United States Patent Application Publication US 2018/0126003 A1 - sequence listing, part 115

SEQ ID NO: 202248 - DNA, 1539 bp, Artificial Sequence
  derived and/or modified sequence
atgctgtttgagggcctggacctggtgtctgccctggccaccctggccgcctgcctggtgtctgtgaccctgctgctggccgtgtcccagcagctgtggcagctgcgctgggccgccacccgggacaagagctgcaagctgcccatccccaagggctccatgggcttccccctgattggagagaccggccactggctgctgcagggcagcggcttccagagcagccggcgggagaagtatggaaatgtgttcaagacccacctgctgggccggcccctcatccgggtgactggagcagaaaatgtgaggaagatcctgatgggagagcaccacctggtgtccacagagtggcccaggagcaccaggatgctgctgggccccaacacagtgagcaacagcatcggggacatccacaggaacaagaggaaggtgttcagcaagatcttcagccatgaggccctggagagctacctgcccaagatccagctggtgatccaggacaccctgcgggcctggagcagccaccctgaggccatcaacgtgtaccaggaggcccagaagctgaccttcaggatggccatccgggtgctgctgggcttcagcatccctgaggaggacctgggccacctgtttgaggtgtaccagcagtttgtggacaacgtgttcagcctgcctgtggacctgcccttcagcggctaccgccggggcatccaggcccggcagatcctgcagaagggcctggagaaggccatccgggagaagctgcagtgcacccagggcaaggactacctggatgccctggacctgctgattgagagcagcaaggagcacggcaaggagatgaccatgcaggagctgaaggatggcaccctggagctgatctttgctgcctatgccaccacagccagcgccagcaccagcctcatcatgcagctgctgaagcaccccaccgtgctggagaagctgagagatgagctgcgggcccacggcatcctgcacagcggcggctgcccctgtgagggcaccctgcggctggacaccctgagcggcctgcgctacctggactgtgtgatcaaggaggtgatgaggctcttcacccccatcagcggcggctacagaacagtgctgcagacctttgagctggatggcttccagatccccaagggctggagcgtgatgtacagcatccgggacacccatgacacagcccctgtgttcaaggatgtgaatgtgtttgatcctgaccgcttcagccaggcccggtctgaggacaaggatggccgcttccactacctgccctttggaggaggagtgaggacctgcctgggcaagcacctggccaagctgttcctgaaggtgctggccgtggagctggccagcaccagcagatttgagctggccaccaggaccttcccccgcatcaccctggtgcctgtgctgcaccctgtggatggcctgtctgtgaagttcttcggcctggacagcaaccagaatgagatcctgcctgagacagaggccatgctgagcgccaccgtgtag

SEQ ID NO: 202249 - DNA, 1539 bp, Artificial Sequence
  derived and/or modified sequence
atgctgttcgagggcctggacctggtgagcgccctggccaccctggcagcatgtcttgtgagcgtgacccttctccttgccgtgtcacagcagctgtggcaacttagatgggcagcaactcgtgacaagagctgtaagctacccatacccaaaggctctatgggatttcctttaatcggggaaaccggacactggctgctccagggaagcggatttcagagcagccggagagagaaatacggaaatgtgttcaagacccatcttctaggaaggccactcatcagagtaacaggagccgagaacgtacgcaagatcctgatgggcgagcaccacctggtttctactgagtggcccagatccaccagaatgttacttgggcctaacaccgtctccaattcgatcggcgatatccaccgcaataaaaggaaggtctttagtaagatattcagccacgaggccctggagtcctatttgcccaaaatccagctggtgatccaagacacattgcgcgcttggtcaagccaccctgaagcgataaatgtgtaccaagaagcccagaagctaacatttcgcatggctatccgggttttgcttggattttccatcccggaggaggatctgggacaccttttcgaagtttaccagcagttcgtggacaacgttttctccctgcctgtggacctgcccttctcaggctacaggcgcgggattcaggcacgtcaaatcctgcagaaaggcctggagaaggctattcgggaaaaattgcagtgtactcaaggtaaagattaccttgatgctctggatttgcttatcgagtcaagcaaagagcatgggaaagagatgaccatgcaagagttgaaagatggcacactggaacttatttttgccgcatacgctaccaccgcatccgcctctactagcttgatcatgcaattactgaaacaccccacggtgctcgaaaagttgcgagacgagctacgggcacatggcatcttacacagcgggggatgcccatgcgagggcactctccgtttggacaccctgtcgggattgcgctacctggactgtgtgattaaagaagtgatgcggctgttcacacccattagcgggggctacaggaccgtgctacaaacatttgagttagatggtttccagattccaaaaggttggagtgtgatgtactcaattagggacacacatgacaccgccccagtttttaaggatgttaacgtgtttgatcccgaccgcttttcccaagccagaagcgaagacaaagatgggaggttccactacctgccgtttggtggtggggttcgcacttgtttgggtaaacatcttgcaaaactctttctgaaggtgcttgccgtggaattggcgagcacctcccggtttgagcttgcaactagaacctttccaagaatcaccctggtgcccgtattacaccccgtcgatggactgtccgtgaaatttttcggactggactcaaaccagaatgaaattcttccagagaccgaggcaatgctgagtgccacagtgtag

SEQ ID NO: 202250 - DNA, 1539 bp, Artificial Sequence
  derived and/or modified sequence
atgctgttcgaggggcttgacctggtgtccgctctggctactctggcggcttgccttgtcagcgtaacccttctccttgcagtgtcccaacaactatggcagctgcgttgggcagcgacaagggataaatcctgtaaattgccaatccctaaaggcagcatgggcttccctttaattggcgagaccggacactggttactgcaaggtagtggatttcagtccagccggagagaaaaatatgggaatgtctttaaaacacacttgctcggtcggcctctaattcgggtcactggggcagagaatgtgcgaaaaattctgatgggcgagcatcacttggtgtctacggaatggccgagatctactcgcatgttactgggcccaaatactgtgtctaattccattggtgatatccatcgaaataaacgtaaagtgtttagcaagattttctcacacgaggccttagaaagctacctcccgaagatccagctcgtgatacaggacacactgcgggcttggagtagtcaccccgaggctataaatgtatatcaggaggcccagaagcttactttccgcatggccattcgggtgctgctgggtttcagcatcccagaagaggatcttggccacctgttcgaggtttaccagcagttcgtggacaacgtgttctctctgcctgttgacctcccttttagcgggtacagaagaggaatacaagcccgacagatcctgcagaaggggctggagaaagctattagggagaaactccagtgcacccagggaaaggattacctggatgctctagatcttctcattgagtcatctaaagagcacgggaaggagatgacgatgcaggagcttaaggacggtaccctggagctcatcttcgctgcatatgcgactaccgcatcggcgtcaacatcactcattatgcagctgctgaagcatccaaccgtcctggaaaagttgcgcgacgaacttcgggcacacggcatcctccattctgggggttgtccctgtgagggaactcttaggctggatactctcagcggactcagatacttggactgcgttataaaagaggtaatgcgcctctttactccaatctcggggggttatcggactgtgttgcagacttttgaactcgacggcttccagattcctaagggatggagtgtcatgtacagcataagggatacccacgataccgctcccgtattcaaggacgtcaacgtgtttgaccccgatcgatttagccaggctcgttctgaagataaggatggacgattccattacttacccttcggcggaggtgttaggacatgcctggggaagcatctggctaagttgtttctcaaggtccttgcagtggagctggcttccacgtcgcggtttgagctcgcaactaggacatttcctcgaataaccctagtgcccgtgttacaccccgttgatggtctgagcgtcaagttcttcggcctcgatagtaatcaaaatgaaatcttgccggaaactgaggctatgctatcagcgacagtttag

SEQ ID NO: 202251 - DNA, 1539 bp, Artificial Sequence
  derived and/or modified sequence
atgctttttgaaggtctggacctggttagcgccctggccaccctcgcggcttgcctggtatctgtaacactcctgctggcggtttcacagcagctatggcagttgagatgggcagcaacgcgggataaatcctgtaagttgccaattcccaagggatccatgggcttcccactaatcggagagaccggtcactggttattacagggaagtggattccaatcttcacggcgcgagaaatatggaaacgtcttcaagactcatctgcttggaagacctctgattcgggtgaccggggccgagaatgtccgcaaaatcctgatgggcgaacaccacctggtgtcaaccgaatggccgcgaagcacacggatgctcctcggtccgaacactgtgtccaattcaatcggcgacatccacagaaataagagaaaggtgtttagcaagatctttagccacgaagcgttggaaagctacctccctaagatacaacttgtgatccaggacacactcagagcctggtcctcccatcctgaggctataaacgtgtaccaggaagcccaaaagctcaccttccgtatggccattcgagtcctcctgggcttcagcatccccgaggaggaccttggacacctattcgaagtgtatcaacagtttgttgataacgtcttctccttgcctgtggacctgcccttcagtggatacagaaggggcattcaagcaagacaaatcctccaaaaaggactggaaaaagcaatccgagagaaactgcagtgtacgcaaggcaaagactacctggacgctctcgatctgctcatcgaaagctctaaggaacacggcaaggaaatgacaatgcaggaacttaaggacggcacactggaactcatcttcgctgcatacgcaacaacagcatcagcttcaacctctctgatcatgcaactgctgaagcatcctacagttctcgaaaagctgcgcgatgagttgagagcccacggaattttgcactcaggcgggtgcccatgtgagggaacgctcaggctggacacactgagtggactccgctatctcgattgcgtcattaaagaggtcatgaggctgtttacccctattagtggtggatatagaaccgtcctccagacatttgagctcgacggcttccagattcccaaaggctggagtgtcatgtattcaattagggatacccatgataccgcacccgtttttaaggatgtcaacgtgttcgaccccgacaggttttctcaggctcgtagtgaagacaaggatggccggttccattacttacctttcggtggtggggtgcgcacatgtctcggtaagcatctggctaaactgtttttgaaggtgctggcggtggagttagcatcaacctccaggttcgagctagcgacccggacttttccaaggatcacactggtgccagttctccacccggttgatggcctttctgtcaaattttttggactcgactctaatcagaacgaaatcttacctgagactgaagcaatgctgagcgcaactgtgtag

SEQ ID NO: 202252 - DNA, 1539 bp, Artificial Sequence
  derived and/or modified sequence
atgcttttcgaaggcctggacctcgtttctgcactagccacccttgcagcttgcctcgtaagtgtgactctcctgttagctgtcagtcagcagctatggcagttgcgatgggctgcgacccgggacaagagctgtaaattacctattccaaagggttctatggggttcccactgataggggaaaccggacattggctgctgcaaggatccggatttcagagttcaagacgtgagaagtatggaaatgttttcaagacacacctgcttggacggccactaatcagggttacgggagccgagaatgtgcgcaaaatcttgatgggagaacatcaccttgtttcaacagagtggccaaggtctactagaatgcttctgggccctaacactgtgagcaatagcatcggggatattcacaggaataaacgtaaggtgttttccaaaatttttagtcatgaagcccttgagtcctaccttccgaagattcaactagttatccaagatacccttcgcgcttggtcatcacacccagaggccatcaacgtttaccaagaggctcaaaagctcacgtttaggatggccattagagtcctcctcgggtttagcattcccgaggaggatctcggccacctgtttgaggtgtatcaacagttcgtagacaacgtcttttcactaccagtggacctaccatttagcggttacaggaggggaatccaagcacggcaaattttgcagaagggtctcgaaaaagcgattcgggaaaaactgcagtgtacacaagggaaagattacctcgatgccttagatctgctcattgaatccagcaaggagcacggaaaagaaatgacaatgcaggagctgaaagatggtaccctagagcttatcttcgctgcgtacgccacgactgccagtgcttccacgtccttgatcatgcaactcctgaagcacccaactgttctggaaaaattacgggatgaactgcgggcgcacggaatcctgcattctggtggttgcccatgcgaggggaccctacgcttggataccttgtccggcttgcgctacctggactgtgtaattaaagaggtgatgagactgtttacccctatatcgggagggtatcggaccgtgttgcaaacctttgaactggacggatttcaaatcccaaaaggatggagcgttatgtatagcatcagagacactcatgacaccgcaccagtcttcaaagacgtgaatgtatttgatcccgacaggttttcacaggcaagatccgaggacaaagatggcaggttccattatttgcccttcggcggcggcgtgcggacttgtcttggaaaacatctcgcaaagctctttctgaaggtccttgcagttgagctagcttccactagccggtttgaattggctacgagaacattcccaaggatcacactcgtgcccgtgctccaccctgtggacggccttagcgtaaaattcttcggactcgactccaaccaaaatgaaattctcccagaaaccgaagccatgttaagtgcaacagtgtag

SEQ ID NO: 202253 - RNA, 1539 nt, Artificial Sequence
  derived and/or modified sequence
augcuuuuugaaggucuggaccugguuagcgcccuggccacccucgcggcuugccugguaucuguaacacuccugcuggcgguuucacagcagcuauggcaguugagaugggcagcaacgcgggauaaauccuguaaguugccaauucccaagggauccaugggcuucccacuaaucggagagaccggucacugguuauuacagggaaguggauuccaaucuucacggcgcgagaaauauggaaacgucuucaagacucaucugcuuggaagaccucugauucgggugaccggggccgagaauguccgcaaaauccugaugggcgaacaccaccuggugucaaccgaauggccgcgaagcacacggaugcuccucgguccgaacacuguguccaauucaaucggcgacauccacagaaauaagagaaagguguuuagcaagaucuuuagccacgaagcguuggaaagcuaccucccuaagauacaacuugugauccaggacacacucagagccugguccucccauccugaggcuauaaacguguaccaggaagcccaaaagcucaccuuccguauggccauucgaguccuccugggcuucagcauccccgaggaggaccuuggacaccuauucgaaguguaucaacaguuuguugauaacgucuucuccuugccuguggaccugcccuucaguggauacagaaggggcauucaagcaagacaaauccuccaaaaaggacuggaaaaagcaauccgagagaaacugcaguguacgcaaggcaaagacuaccuggacgcucucgaucugcucaucgaaagcucuaaggaacacggcaaggaaaugacaaugcaggaacuuaaggacggcacacuggaacucaucuucgcugcauacgcaacaacagcaucagcuucaaccucucugaucaugcaacugcugaagcauccuacaguucucgaaaagcugcgcgaugaguugagagcccacggaauuuugcacucaggcgggugcccaugugagggaacgcucaggcuggacacacugaguggacuccgcuaucucgauugcgucauuaaagaggucaugaggcuguuuaccccuauuagugguggauauagaaccguccuccagacauuugagcucgacggcuuccagauucccaaaggcuggagugucauguauucaauuagggauacccaugauaccgcacccguuuuuaaggaugucaacguguucgaccccgacagguuuucucaggcucguagugaagacaaggauggccgguuccauuacuuaccuuucggugguggggugcgcacaugucucgguaagcaucuggcuaaacuguuuuugaaggugcuggcgguggaguuagcaucaaccuccagguucgagcuagcgacccggacuuuuccaaggaucacacuggugccaguucuccacccgguugauggccuuucugucaaauuuuuuggacucgacucuaaucagaacgaaaucuuaccugagacugaagcaaugcugagcgcaacuguguag

SEQ ID NO: 202254 - RNA, 1539 nt, Artificial Sequence
  derived and/or modified sequence
augcuuuucgaaggccuggaccucguuucugcacuagccacccuugcagcuugccucguaagugugacucuccuguuagcugucagucagcagcuauggcaguugcgaugggcugcgacccgggacaagagcuguaaauuaccuauuccaaaggguucuaugggguucccacugauaggggaaaccggacauuggcugcugcaaggauccggauuucagaguucaagacgugagaaguauggaaauguuuucaagacacaccugcuuggacggccacuaaucaggguuacgggagccgagaaugugcgcaaaaucuugaugggagaacaucaccuuguuucaacagaguggccaaggucuacuagaaugcuucugggcccuaacacugugagcaauagcaucggggauauucacaggaauaaacguaagguguuuuccaaaauuuuuagucaugaagcccuugaguccuaccuuccgaagauucaacuaguuauccaagauacccuucgcgcuuggucaucacacccagaggccaucaacguuuaccaagaggcucaaaagcucacguuuaggauggccauuagaguccuccucggguuuagcauucccgaggaggaucucggccaccuguuugagguguaucaacaguucguagacaacgucuuuucacuaccaguggaccuaccauuuagcgguuacaggaggggaauccaagcacggcaaauuuugcagaagggucucgaaaaagcgauucgggaaaaacugcaguguacacaagggaaagauuaccucgaugccuuagaucugcucauugaauccagcaaggagcacggaaaagaaaugacaaugcaggagcugaaagaugguacccuagagcuuaucuucgcugcguacgccacgacugccagugcuuccacguccuugaucaugcaacuccugaagcacccaacuguucuggaaaaauuacgggaugaacugcgggcgcacggaauccugcauucuggugguugcccaugcgaggggacccuacgcuuggauaccuuguccggcuugcgcuaccuggacuguguaauuaaagaggugaugagacuguuuaccccuauaucgggaggguaucggaccguguugcaaaccuuugaacuggacggauuucaaaucccaaaaggauggagcguuauguauagcaucagagacacucaugacaccgcaccagucuucaaagacgugaauguauuugaucccgacagguuuucacaggcaagauccgaggacaaagauggcagguuccauuauuugcccuucggcggcggcgugcggacuugucuuggaaaacaucucgcaaagcucuuucugaagguccuugcaguugagcuagcuuccacuagccgguuugaauuggcuacgagaacauucccaaggaucacacucgugcccgugcuccacccuguggacggccuuagcguaaaauucuucggacucgacuccaaccaaaaugaaauucucccagaaaccgaagccauguuaagugcaacaguguag

SEQ ID NO: 202255 - protein, 239 aa, Artificial Sequence
  derived and/or modified sequence
MAALKSWLSRSVTSFFRYRQCLCVPVVANFKKRCFSELIRPWHKTVTIGFGVTLCAVPIAQKSEPHSLSSEALMRRAVSLVTDSTSTFLSQTTYALIEAITEYTKAVYTLTSLYRQYTSLLGKMNSEEEDEVWQVIIGARAEMTSKHQEYLKLETTWMTAVGLSEMAAEAAYQTGADQASITARNHIQLVKLQVEEVHQLSRKAETKLAEAQIEELRQKTQEEGEERAESEQEAYLRED

SEQ ID NO: 202256 - DNA, 720 bp, Artificial Sequence
  derived and/or modified sequence
atggccgccctgaagagctggctgagcagaagcgtgaccagcttcttcagatacagacagtgcctgtgcgtgcccgtggtggccaacttcaagaagagatgcttcagcgagctgatcagaccctggcacaagaccgtgaccatcggcttcggcgtgaccctgtgcgccgtgcccatcgcccagaagagcgagccccacagcctgagcagcgaggccctgatgagaagagccgtgagcctggtgaccgacagcaccagcaccttcctgagccagaccacctacgccctgatcgaggccatcaccgagtacaccaaggccgtgtacaccctgaccagcctgtacagacagtacaccagcctgctgggcaagatgaacagcgaggaggaggacgaggtgtggcaggtgatcatcggcgccagagccgagatgaccagcaagcaccaggagtacctgaagctggagaccacctggatgaccgccgtgggcctgagcgagatggccgccgaggccgcctaccagaccggcgccgaccaggccagcatcaccgccagaaaccacatccagctggtgaagctgcaggtggaggaggtgcaccagctgagcagaaaggccgagaccaagctggccgaggcccagatcgaggagctgagacagaagacccaggaggagggcgaggagagagccgagagcgagcaggaggcctacctgagagaggactag

SEQ ID NO: 202257 - DNA, 2250 bp, Artificial Sequence
  derived and/or modified sequence
gagctcggggaccacgcggaggttgtaattggtctctagaccacacctagttgttgagtgccgctgcttgaaaatctcagttctgccgagatcgcagaatacacacaagctacctttgggcaccagagcagacagaaccgcggagcttcagggtggaagattcgtggaaactttgccaaggccaggacctcgtgtgttcccgtccgcccctctgggacggcgccagcccggcaggccgccgaccgtcctggggctcccgcgcagcgcgatgccggcctcgtccaccgtccacgtgctgcagctgctgcgggagctgctcgccttcgtgctcctcagctacacggtgctcatcggggcgctgctgctggccggctggaccacttacttcctggtgctgaagtgacagcgccgtcgccgcgcccggccccgcctcccgcccggccccgcctcccgcccggccccgcctccctaactcaccaggaaattcccttcaagccctggcccgaactgagtccccgcccacccgccagcgtcacggcgcccgactcagctccgcgccggacccacctccgcgccctcaggccctgcatatgccccgccccgcgcggaagttccggcggttggttgccttgcgcggccgttacagcctttgccctaagcctcgccccctttccccctgcctgcccaatcccgactgcttccttgggtgggggcgtggctatggggcgaggcgctctcaggtggaggccgtgccccgctccgcgctcacgaagctgcgtcacttccggcgtgtgcgtctggcgtccgcgcgctgcacaatggcggctctgaagagttggctgtcgcgcagcgtaacttcattcttcaggtacagacagtgtttgtgtgttcctgttgtggctaactttaagaagcggtgtttctcagaattgataagaccatggcacaaaactgtgacgattggctttggagtaaccctgtgtgcggttcctattgcacagaaatcagagcctcattcccttagtagtgaagcattgatgaggagagcagtgtctttggtaacagatagcacctctacctttctctctcagaccacatatgcgttgattgaagctattactgaatatactaaggctgtttataccttaacttctctttaccgacaatatacaagtttacttgggaaaatgaattcagaggaggaagatgaagtgtggcaggtgatcataggagccagagctgagatgacttcaaaacaccaagagtacttgaagctggaaaccacttggatgactgcagttggtctttcagagatggcagcagaagctgcatatcaaactggcgcagatcaggcctctataaccgccaggaatcacattcagctggtgaaactgcaggtggaagaggtgcaccagctctcccggaaagcagaaaccaagctggcagaagcacagatagaagagctccgtcagaaaacacaggaggaaggggaggagcgggctgagtcggagcaggaggcctacctgcgtgaggattgagggcctgagcacactgccctgtctccccactcagtggggaaagcaggggcagatgccaccctgcccagggttggcatgactgtctgtgcaccgagaagaggcggcagatcctgccctggccaatcaggcgagacgcctttgtgagctgtgagtgcctcctgtggtctcaggcttgcgctggacctggttcttagcccttgggcactgcaccctgtttaacatttcaccccactctgtacagctgctcttacccattttttttacctcacacccaaagcattttgcctacctgggtcagagagaggagtcctttttgtcatgcccttaagttcagcaactgtttaacctgttttcagtcttatttacgtcgtcaaaaatgatttagtacttgttccctctgttgggatgccagttgtggcagggggaggggaacctgtccagtttgtacgatttctttgtatgtatttctgatgtgttctctgatctgcccccactgtcctgtgaggacagctgaggccaaggagtgaaaaacctattactactaagagaaggggtgcagagtgtttacctggtgctctcaacaggacttaacatcaacaggacttaacacaggcctcttgttccttcctttctttccgtttctctattgtatccaaaggagaagagtgtaagattttgtttgcatctgaaagagaaaatgcgtctctcctgg

SEQ ID NO: 202258 - DNA, 720 bp, Artificial Sequence
  derived and/or modified sequence
atggctgcactgaaaagctggctgagtcgaagtgtgacctccttctttcgctataggcagtgcctatgcgtgcctgtggtcgcaaattttaaaaaacgctgcttcagcgagctcataagaccatggcataagaccgtcaccattggtttcggggtcactctttgtgccgtgcctatcgcccagaagtccgagcctcactctctaagcagcgaagccctgatgcgcagggctgtatccttggtgaccgactccacctcaactttcctgtcacaaacaacttatgcactgatagaagcaatcactgaatataccaaagccgtgtacacactgacgtccttataccgtcagtacacttccctcttgggcaagatgaatagcgaggaagaggatgaagtctggcaggtgattattggcgccagggccgagatgacgagcaagcaccaagagtacctcaagctggaaaccacatggatgaccgctgtgggactgtctgagatggcagccgaagctgcctaccaaaccggcgccgatcaggcctctatcacagcgaggaatcatatacaactggtcaagctgcaggttgaggaagtgcaccagctcagccgaaaagccgagactaaactggccgaggcacagatcgaggagctgcgccaaaagacccaggaggaaggcgaagagcgggcagagtcggagcaagaggcatacctgcgtgaagattag

SEQ ID NO: 202259 - DNA, 720 bp, Artificial Sequence
  derived and/or modified sequence
atggccgccctgaagtcctggctgagccgctctgtgaccagcttcttccgctaccggcagtgcctgtgtgtgcctgtggtggccaacttcaagaagcgctgcttcagcgagctgatccggccctggcacaagacagtgaccatcggcttcggcgtgaccctgtgtgctgtgcccatcgcccagaagtctgagccccacagcctgagcagcgaggccctgatgagaagagctgtgtccctggtgacagacagcaccagcaccttcctgagccagaccacctacgccctgattgaggccatcacagagtacaccaaggctgtgtacaccctgaccagcctgtaccggcagtacaccagcctgctgggcaagatgaacagcgaggaggaggatgaggtgtggcaggtgatcattggagcccgggcagagatgaccagcaagcaccaggagtacctgaagctggagaccacctggatgacagctgtgggcctgtctgagatggctgctgaggccgcctaccagacaggagctgaccaggccagcatcacagccaggaaccacatccagctggtgaagctgcaggtggaggaggtgcaccagctgagcaggaaggccgagaccaagctggccgaggcccagatcgaggagctgcggcagaagacccaggaggagggggaggagcgggcagagagcgagcaggaggcctacctgcgggaggactag

SEQ ID NO: 202260 - DNA, 720 bp, Artificial Sequence
  derived and/or modified sequence
atggccgccctgaagagctggctgagccggagcgtgaccagcttctttcgctaccgccaatgtctctgcgtgcccgtcgtggccaatttcaagaaaagatgtttttcagaactgattcgcccatggcacaagacagtaaccattggctttggagttaccctgtgtgccgtacctattgcccagaagtccgagccgcattcccttagcagtgaggcactaatgcgaagggctgtctctctcgtgacggactctacctccacgttcctgtcacaaaccacctatgcgctgatcgaggccatcacagaatacacgaaagccgtttacacactgacctcgctttacaggcagtatacatcgctcctgggaaagatgaatagtgaggaggaagacgaggtgtggcaggttatcatcggtgctcgggcagagatgacttcgaagcaccaggagtatctgaagcttgaaaccacttggatgacagccgtgggactctctgaaatggctgcagaagcggcctatcagactggggccgaccaggcctcaataacggccaggaatcacattcagctggtgaagctgcaagtggaagaagtccatcaactgagcagaaaggccgaaacgaaactggccgaagcacagattgaagagcttagacagaagacgcaagaggagggcgaggagcgcgctgagtcggagcaggaggcgtatctgagagaagactag

SEQ ID NO: 202261 - DNA, 720 bp, Artificial Sequence
  derived and/or modified sequence
atggccgcacttaaaagttggctttctaggtcagtcacgagtttttttagatacaggcagtgcttgtgcgtgcctgttgtggcaaattttaaaaagcgctgttttagtgagctgattaggccctggcataaaaccgtaacaatcgggttcggggtgactctctgcgcagttccaatagcccagaagagcgagcctcattcgctgtcatctgaggctctgatgcgacgggctgtgtctctggtcactgactccaccagtaccttcctgtcccagactacatatgcactgatagaagctattacagagtataccaaggcagtgtacaccctgacgtctctgtatcggcagtacacatcactgctaggcaaaatgaacagtgaggaagaagacgaggtgtggcaggtgattattggtgcccgtgcggaaatgacatctaagcatcaggaatacctgaaattggagaccacatggatgacagctgtgggtctcagcgaaatggcagccgaggcggcttaccaaactggtgcagatcaagcaagtatcacagcaagaaatcacatccagctggtcaagttgcaggtagaagaagtgcaccagctctctcggaaagcagagaccaagctggcggaggcacagattgaagagctcagacaaaagactcaggaagaaggagaagaacgagcggagtctgaacaagaagcatacctacgcgaagactag

SEQ ID NO: 202262 - DNA, 717 bp, Artificial Sequence
  derived and/or modified sequence
atggctgcccttaaatcttggctgtcacgcagtgtcacatctttctttcggtacagacagtgcctttgtgtgccagtggtagccaatttcaaaaagaggtgcttttccgaactcattcgcccctggcacaaaaccgtgactattgggtttggcgtgaccctttgcgcagtccctatcgcccagaaaagtgagccacatagcctgtcctccgaagcgttaatgagacgggccgtaagcttggttactgattcaacgagtacattcctcagtcagacaacctacgctttgatcgaagcaatcaccgagtacactaaggctgtgtacaccctcacctctctgtatcggcagtacactagcttgctggggaagatgaatagcgaagaggaggatgaggtgtggcaggtgattatcggagcccgggcggagatgacgagtaaacaccaagaatacttgaagctagaaacaacctggatgacagctgttgggctctcggagatggcagcagaagcggcttaccagaccggcgctgatcaagcctctatcacagcacgcaatcacattcagttggtgaaactgcaggtggaggaggtacaccagctgagcaggaaggccgagacaaagctcgcggaggcccaaattgaggagctcagacagaagactcaggaagagggggaggagcgcgctgaaagtgaacaggaggcgtacctgcgagaagat

SEQ ID NO: 202263 - DNA, 717 bp, Artificial Sequence
  derived and/or modified sequence
atggccgctctcaaaagttggttatctcgctctgtgacaagtttctttagatatcggcaatgtctctgcgttcctgtagtcgccaacttcaaaaaacgctgcttctccgaacttatacggccatggcataaaactgttactatcggattcggagtgacactgtgcgcggtgcccatcgcacagaagagtgaaccacattccctttcatccgaagctctgatgaggagagctgtatcccttgttacagactctacttctacatttctgtctcagactacatacgcccttatcgaagccatcactgagtatacaaaagctgtatacacgctgacatccctatatcggcagtatacttcgctgctcggaaagatgaattccgaagaagaagatgaagtatggcaggtcatcataggagccagggctgagatgacttctaaacatcaggaatatctgaaattagaaacaacttggatgacggcagtagggttatctgaaatggcagcagaagccgcatatcagacaggagcggatcaggctagtataactgctagaaatcacatacaactggtcaagttgcaggtcgaagaagttcatcagctatcacggaaagcagaaactaaactggctgaagctcaaattgaagaactcaggcaaaaaacacaagaagagggagaagaacgagcggaatcagaacaagaagcgtatctacgggaggat

SEQ ID NO: 202264 - DNA, 717 bp, Artificial Sequence
  derived and/or modified sequence
atggcggcactcaagtcttggctgtcacgctcggtgacttccttcttccggtatagacagtgcctgtgtgtgcccgtggtggctaatttcaaaaaacgatgcttctccgaattgatcaggccgtggcacaagactgtcaccattggatttggcgtgactctttgcgcggtgcccatcgcccaaaagtcagaaccacattccctgtcatccgaggcacttatgaggcgcgcggtgagcctcgttaccgactccacgtccaccttcctctcgcaaactacctacgcactcatcgaggcaatcaccgagtacaccaaagctgtgtacactctcacttcactgtatcggcagtacacctcgctgctggggaagatgaacagcgaagaagaagatgaggtctggcaagtgatcatcggggcaagagcggagatgacctccaagcaccaggaatacctgaagctcgaaactacttggatgaccgccgtgggactttccgaaatggccgcagaggctgcctatcaaaccggagccgaccaggcctcgatcaccgcccggaaccacattcagttggtgaagctgcaggtggaagaggtccaccagctgtcccgcaaagcagagactaagctggcagaagcccagatagaagagttgcggcagaaaacccaggaggaaggagaagagagagcggaatccgagcaggaagcatacctcagagaggat

SEQ ID NO: 202265 - DNA, 717 bp, Artificial Sequence
  derived and/or modified sequence
atggccgctctcaaatcctggttgagtcggtcggtgacctctttctttcgctatcggcagtgtctgtgtgtaccggtggttgcgaatttcaagaaaagatgcttttcagaacttataagaccatggcataaaactgtgactatcggctttggggtgactctgtgtgccgtgcctattgcgcagaagagcgaacctcattctctgagctccgaggcactcatgcggagagccgtgtctctcgtgactgacagcacctctacgtttctcagccagactacgtatgcccttatcgaggcaattacagagtacactaaggcggtgtacaccctcacctccctttaccgccagtacacatctctgttaggaaaaatgaattccgaagaggaggacgaggtctggcaggtgataatcggcgcccgggccgagatgacatctaaacaccaagagtacctaaaactggaaaccacctggatgacggcggtggggctctccgagatggccgcggaggccgcataccagaccggggcagaccaggctagtatcaccgcgcgcaatcacatccagctagtgaaactgcaggttgaagaggtacatcagctgtcccggaaggctgagaccaagctcgccgaagcccagattgaggagcttaggcagaagacccaggaggaaggagaggaaagggctgagagtgagcaagaagcctatctcagagaggat

SEQ ID NO: 202266 - DNA, 717 bp, Artificial Sequence
  derived and/or modified sequence
atggcagcccttaagtcctggctgtcccgttccgtgacctcgtttttcagatacagacaatgtctttgtgtgccagtcgtggcgaactttaagaagcgatgcttctcggaactgatacgcccatggcataagaccgtgactattggttttggtgtgaccctctgtgcggtgcctatcgcacaaaagagcgaacctcattcgctgtcctcagaagccctgatgcgcagagcagtgtcacttgtcaccgatagcacgtcgacttttctgagtcaaacgacttacgcgctcatagaagccatcaccgagtatactaaggccgtgtacactctgacttcactttaccggcagtacacctcactgctcggaaagatgaactccgaagaagaagatgaagtgtggcaagtgattattggtgcacgggcagaaatgacttcaaaacatcaagaatacctgaaactcgaaactacttggatgaccgcagtggggcttagcgaaatggctgcagaagcagcataccagacgggggcagatcaagcgtcaattaccgctcggaatcatatccagctcgtgaagctccaagtggaagaagtccatcagctctcaagaaaggcagagactaagctcgcagaggcgcagatcgaggagttgcgtcagaaaacccaagaggaaggagaagagcgcgcggagtctgaacaagaggcatacctccgagaagat

SEQ ID NO: 202267 - DNA, 717 bp, Artificial Sequence
  derived and/or modified sequence
atggcagcactcaagtcctggctgagccggagcgtgaccagttttttcagataccgccaatgtctgtgcgtgccagtggttgccaactttaaaaagcgctgtttcagcgagctgatccgcccttggcataagaccgtcactattggctttggggtgactctttgtgcagtgcctattgcccagaagtcagaacctcatagccttagcagtgaggccctgatgaggcgcgccgtgagcctcgtgaccgactccactagcaccttcctttctcaaacgacctacgctctcatcgaggccattacagagtatacaaaagccgtgtacaccctcacgtccctgtacagacagtacacgagcctgctcggcaagatgaatagtgaggaagaagacgaggtatggcaggtgattatcggagcccgggccgagatgacttccaaacatcaggagtatttgaagctcgagaccacatggatgaccgcggtgggtctcagtgagatggctgccgaggcggcttatcagaccggtgctgaccaggcctccatcacagcaaggaatcacatccaactggtgaaacttcaagttgaggaggttcaccagctctcaaggaaagccgagacgaagctggcagaggctcagatagaagagctgaggcagaaaacccaagaagaaggagaagaaagagcggagtccgagcaagaggcctatctccgggaggat

SEQ ID NO: 202268 - DNA, 717 bp, Artificial Sequence
  derived and/or modified sequence
atggctgcccttaaatcatggctgtccaggtccgtgactagcttctttaggtatcgccaatgcctgtgtgtcccagtcgtcgccaacttcaagaaaaggtgcttcagcgagctgattagaccatggcacaaaacagtaaccatcggctttggagttacactttgtgccgttccaatagctcagaagtcagaacctcacagtctgtcttctgaagccctgatgcgcagggctgtatctctggtgaccgactcaaccagcacttttttgtcccagaccacttatgcactgattgaggccatcacagagtacacaaaggctgtgtacaccttgacttccctctaccgtcagtacacttccctcctcggtaagatgaattccgaggaggaggacgaagtgtggcaggtgatcattggtgcaagagccgagatgactagtaagcatcaggagtatcttaagcttgagactacttggatgaccgcagtgggtttgtctgaaatggctgcagaggccgcctaccaaaccggagctgatcaagcctcaattaccgctcgtaaccatattcagctcgtgaagctccaagtggaggaagtccaccagctgagcaggaaagcagagaccaagttggctgaggcacagatcgaggagttgagacagaaaacccaggaggaaggcgaagagagagcagagtctgagcaggaggcttatctcagggaagat

SEQ ID NO: 202269 - DNA, 717 bp, Artificial Sequence
  derived and/or modified sequence
atggccgctttgaagtcgtggctctctcggtctgtgacctctttttttcggtaccggcagtgtctttgcgtgccggtggtcgcaaacttcaaaaagcgttgctttagcgagcttattcgaccatggcacaagaccgtgactatcggctttggcgtgaccctttgcgcggtccctattgcacagaagagtgagcctcactccttgtcatcagaagctctcatgcgtcgggcagtcagcttggttacagactcaacgagtacattcctgagccagacaacatatgccctaatcgaggcgattacagagtatacaaaggccgtgtacaccctaaccagtctctaccggcagtatacttcgctgctggggaaaatgaattcagaggaagaagatgaagtttggcaggtaattattggagctcgcgccgaaatgacgtccaaacatcaggagtaccttaagttagagacaacctggatgactgcagtcggcctgtcagaaatggccgccgaggctgcttaccagaccggcgctgatcaggctagcataacagcgcggaaccacatccagctcgttaagttacaggtggaagaggtccaccagctcagcaggaaagctgagaccaaactggctgaggcccaaattgaagaacttcggcagaaaacacaggaagagggtgaggaacgggcagagtccgaacaggaagcatacctgcgcgaggat

SEQ ID NO: 202270 - DNA, 717 bp, Artificial Sequence
  derived and/or modified sequence
atggccgctctcaaatcctggctgtcgcgctcagtgacttcgtttttcagatacagacagtgcctgtgcgtgccggtcgtggcgaacttcaaaaagcgctgcttcagcgaattgataagaccatggcacaaaaccgtcaccatcggattcggagtgacgctctgcgccgttccgattgcccaaaagagcgagcctcatagcttgtcctcggaggctctgatgaggagagctgtgtccctcgtgactgattctaccagcaccttcttgtcgcaaaccacctacgccctgattgaagccatcacggaatacactaaggccgtgtacactctgacctccctgtaccggcagtacacttccctcctgggaaaaatgaactcagaagaggaagatgaagtgtggcaggtgattattggggcccgcgccgaaatgacgtccaaacatcaggagtacctgaagttggaaaccacttggatgactgcggtcggactgagcgagatggccgctgaggccgcgtaccaaaccggcgcagaccaggcatccatcaccgcacggaaccacatccaactggtcaaactgcaggtggaggaggtgcatcaactcagccgcaaggccgagactaaactcgcggaggcccagatcgaagagctccggcaaaaaactcaggaagaaggcgaagaaagggcagagtcggaacaggaagcctacctgagggaagat

SEQ ID NO: 202271 - DNA, 717 bp, Artificial Sequence
  derived and/or modified sequence
atggccgctttgaagagctggcttagcaggtccgtgacttcattcttccgatataggcagtgtctatgcgttcccgtagtggctaacttcaagaaacggtgcttcagtgaactcatcagaccatggcacaagacagtgacaataggttttggagtcaccctctgcgccgtccccattgcccagaagtccgagccgcacagcctgtctagtgaggccctgatgagacgtgcggtgtcactcgtgacagattctacctcgacatttctgtctcagaccacatacgcgctcatcgaagccattaccgagtataccaaagccgtatacactctcaccagtctgtatcggcaatatacttccctcctcggcaaaatgaactccgaggaggaggacgaggtgtggcaggtaatcatcggggctagggccgagatgacttcaaagcaccaggagtacctgaaactagaaactacgtggatgactgctgtgggcctatctgagatggcagcagaggccgcatatcagactggggcagaccaggcctccatcacggcaagaaaccatatccagctggtgaagttgcaggtggaggaggttcaccagctgtcaagaaaggcggagacaaaactagccgaggctcagattgaagagctgcgccagaagacacaagaggagggcgaggagcgcgcagagagcgagcaggaggcatatctgcgagaggat

SEQ ID NO: 202272 - DNA, 717 bp, Artificial Sequence
  derived and/or modified sequence
atggcagccctgaaaagctggctgtcccgaagcgttacgtctttttttcgctatcgtcaatgtctgtgtgtgccagtagtggctaactttaaaaagcgctgcttctcagagctgatccgcccgtggcacaaaaccgtcaccataggctttggtgtcaccctctgtgctgtccctatcgcgcagaagtctgagccccactcactctctagcgaggcactgatgagacgtgcggtgagcctggtgacggattctactagcacctttctgtcccaaaccacctacgccttgatcgaagccatcaccgaatatacgaaggcagtgtatacactgacgagcttgtacaggcagtacaccagcctgctcgggaaaatgaatagcgaggaagaggacgaggtctggcaagtcataataggcgcccgtgccgagatgacaagcaagcaccaggagtacctgaaactggagaccacgtggatgaccgcggtgggcctcagcgagatggctgcggaagctgcttatcagacaggcgctgatcaggcgagcatcaccgcgcgcaaccatatccaactggtgaaactgcaggtggaagaagtgcaccagctttcaaggaaagccgaaaccaaactggctgaggcccaaattgaagaactccgccagaaaactcaagaggaaggtgaggagcgggcagagagcgagcaggaagcctatttgcgggaagac

SEQ ID NO: 202273 - DNA, 717 bp, Artificial Sequence
  derived and/or modified sequence
atggcggccctgaaatcatggctcagccgtagcgtcacgtccttcttcagatacaggcagtgcctgtgcgtcccagtggtggcgaactttaagaagcgctgctttagcgaacttatcaggccgtggcataaaactgtgactattggatttggggtgacgctgtgcgccgtcccgatcgctcagaagtccgaaccacattcactgtcatcggaggcccttatgcggcgggcggtgtcgcttgttacggactccacttccaccttcctgtcacaaaccacctacgcactcatcgaggctattaccgaatacactaaggcagtgtacaccttgaccagcttgtaccggcagtacactagcctgctgggcaagatgaattccgaggaagaggatgaagtctggcaagtcatcatcggagcacgggccgagatgacttcgaaacaccaggagtacttgaaactggaaaccacgtggatgactgcagtcggactgtccgagatggccgcagaagccgcataccaaaccggagccgaccaggcctccatcaccgcccgaaaccatattcaattggtgaaactgcaggtggaggaagtgcaccagctctcgagaaaggcggagactaaacttgcagaggcccagatcgaagaactgcggcaaaagacgcaagaggaaggtgaagaaagggctgagtctgagcaggaggcctatctcagagaagat

SEQ ID NO: 202274 - DNA, 717 bp, Artificial Sequence
  derived and/or modified sequence
atggcagccctcaagagttggttgagccggtccgtgacatcctttttcaggtataggcagtgcctttgcgtacctgtggtggcgaacttcaagaagcgttgtttctctgaactgatcaggccttggcacaaaacggtgaccatcggtttcggagttaccctatgcgctgtacccatcgctcaaaagtccgagcctcattccctgtcttcagaagctcttatgagaagagctgtttcgctcgtgaccgatagtacctctacctttctttcccagacaacatatgcactaatcgaggctattacagaatacaccaaggccgtttatactctcacaagtctctacaggcagtatacctcgctcctgggtaaaatgaattctgaagaggaagacgaagtctggcaagtgattattggcgcccgggccgaaatgacaagcaaacatcaggaatatctgaagctggaaaccacttggatgaccgccgttgggcttagcgagatggcggccgaagctgcatatcaaaccggagccgatcaggcgagcataacagcgcgcaaccacattcaactggtgaagctccaggtggaggaggtccaccagctgagcaggaaggctgaaacaaagctagcagaagcacaaatagaggagttacgacagaagacacaagaagaaggagaggagagggccgagtccgaacaggaggcctacctgagggaagac

SEQ ID NO: 202275 - DNA, 717 bp, Artificial Sequence
  derived and/or modified sequence
atggcagcgctgaagagctggctctcaagatcggtgactagcttcttccgctacaggcaatgcctgtgcgtcccggtcgtggccaacttcaaaaagcggtgcttttcggagctgattcgcccttggcacaaaaccgtcaccatcggatttggagtgaccctgtgcgccgtgcccatcgcccagaaatcggaaccgcacagcctctcgagcgaggctcttatgagaagagcagtgtcgctggtgaccgactccactagcaccttcctgtcgcagaccacctacgcgctcattgaagccatcaccgaatacactaaagcagtgtataccctcaccagcctgtaccggcagtacacttcgctcctgggaaaaatgaattccgaggaagaggacgaagtatggcaagttatcattggcgcccgcgccgaaatgacctcaaagcaccaggaatacctcaaactcgagactacgtggatgactgcagtgggcctgagcgagatggctgccgaagccgcctaccagaccggggcagatcaggcgagcatcacggcccgaaatcacattcaacttgtgaagctgcaagtcgaagaagtccatcagttgtcaaggaaggccgagactaagttggccgaggcccagatcgaggaactgcgccaaaagactcaggaggagggagaggaacgggccgagagcgaacaggaggcttacctccgggaggac

SEQ ID NO: 202276 - DNA, 717 bp, Artificial Sequence
  derived and/or modified sequence
atggctgcattgaaatcatggctgtcacggtccgtgacttccttttttcgctacagacaatgtctgtgtgttcctgtcgtcgcaaacttcaaaaagcgatgtttttccgaactgattaggccatggcataagactgtgaccatcggctttggagtcactctgtgtgcggttccaatcgcccaaaagagcgagccgcactccctttcgtcagaggccctcatgagacgagccgtgtccctggtcactgattccactagcaccttcctgtcccagaccacctacgcacttatcgaagccatcaccgaatataccaaggcggtctataccctgacctccctttaccgccaatacacgagccttctcggaaaaatgaattcggaagaagaagatgaggtctggcaagtgattatcggcgcccgagctgaaatgactagcaagcatcaggaatacctcaagctcgaaaccacttggatgaccgcagtgggcctgagtgaaatggcagcagaagcagcttatcagactggagccgaccaggcgtcaattactgctcggaatcacatccagctggtgaaactccaagtcgaagaagtgcaccagctgagccgcaaggcggaaaccaagctggcagaggcacaaattgaggagcttagacaaaagacgcaggaagagggagaggaacgcgcagagtcggaacaagaagcatacctgcgggaggac

SEQ ID NO: 202277 - DNA, 717 bp, Artificial Sequence
  derived and/or modified sequence
atggcggctctgaagtcttggctctctaggtcagtgactagtttcttccgctatcgccagtgtctgtgcgtgccagtggtggcaaacttcaagaaaaggtgtttttccgagcttatccgcccatggcataagaccgtcacaatcggttttggcgttactctctgtgctgtgccaattgcacaaaaatcagaaccacacagcctgagctctgaggccctgatgaggagggccgtctctttggtcacggattctacctccactttcctgagtcagaccacatatgctcttatcgaggccatcaccgagtatactaaagccgtctacacgctgacctctctgtacagacagtatacctcactgctgggaaagatgaatagcgaggaggaggatgaggtctggcaagtgatcatcggagccagagccgaaatgacctctaaacatcaagagtacttgaaattggaaacaacatggatgaccgcggtaggactgtctgagatggcggccgaagctgcctatcagaccggcgcggaccaggccagcattaccgcaaggaaccatattcagctcgttaagctccaagtggaggaagtgcatcaactgtccagaaaggcggaaacgaaacttgcggaagcacagattgaggaacttcgccaaaagacgcaggaggagggagaagagagggccgagagcgaacaggaagcttacttgagagaggat

SEQ ID NO: 202278 - DNA, 717 bp, Artificial Sequence
  derived and/or modified sequence
atggccgcacttaaatcgtggctgtccaggtcagtgacctccttctttagataccgacaatgcctttgtgtgccggtggtcgcaaactttaagaaacgctgtttctcggagttgataagaccttggcataagaccgtgactataggcttcggagtcaccctttgtgcagtgcctattgcacagaagtcagagcctcactcgctctcgagcgaggccctcatgcggagagccgtgtcgcttgtcactgactcgacctcaaccttcttgtcccaaactacctatgccctcattgaagcaatcactgaatacactaaggcagtgtataccctcactagcctctaccggcaatacactagcttgcttgggaaaatgaactctgaggaagaagatgaagtgtggcaggtgatcattggggcacgcgcagaaatgacgagcaagcatcaggaatacctcaagctcgaaacgacctggatgaccgcagtgggactgagcgaaatggcggcagaagccgcataccagaccggggctgatcaagcatcaatcacggcacgtaaccatattcaactggtcaaacttcaagtggaagaggtgcatcaactttcgcggaaggctgaaaccaagctggccgaagctcaaatcgaagagctccgccaaaagactcaggaagaaggggaagaaagagcagaatccgagcaagaagcgtacctgagagaggac

SEQ ID NO: 202279 - DNA, 717 bp, Artificial Sequence
  derived and/or modified sequence
atggcagcacttaagtcttggctctccagaagtgttacaagtttcttccgctatcggcagtgtctttgcgtgcctgtggtggctaatttcaaaaaacggtgcttctctgaactgatccgaccatggcacaagacagtcacgattggcttcggcgtgacactgtgtgccgtgccgattgcccagaaaagtgagccacacagtctatcctcagaagccctgatgcgacgagccgtttcactcgtgacggattcgacgtcaaccttcctttcacagacaacctatgcactgattgaggcaattaccgaatacacaaaggctgtgtacactcttacctccctctatcggcaatacaccagtctgttgggcaaaatgaattcagaggaagaggacgaagtttggcaggtcatcattggcgctcgggcagaaatgacaagcaagcaccaggagtacctgaaactggaaaccacctggatgacggccgttggacttagtgaaatggccgctgaggctgcttaccagaccggcgccgaccaggcgagcatcaccgccagaaaccacattcagctggtgaaactccaggtggaggaggtccaccaactctccagaaaggcagaaaccaagcttgctgaggcccagatcgaagagctgagacagaagacgcaagaggaaggcgaagaacgggcagagtccgagcaggaggcttatctacgcgaagat

SEQ ID NO: 202280 - DNA, 717 bp, Artificial Sequence
  derived and/or modified sequence
atggccgccctgaagagctggcttagcagaagtgtgacttctttcttcaggtaccgccagtgtctttgcgtccccgtggtcgccaactttaagaaaaggtgcttctccgaacttataagaccgtggcacaagacagttacaatcggttttggcgttaccctctgtgctgtccctatcgctcaaaaatccgaaccacacagcctcagctctgaggccttgatgagaagggctgtctctctagttactgatagcaccagcactttcctgtctcaaacaacctacgccctgatcgaagcaattaccgagtataccaaagcggtgtacacgctcaccagcctgtataggcaatacactagcctattgggcaagatgaattctgaggaagaagacgaggtgtggcaggtcattatcggcgcaagggccgagatgacgagtaagcaccaagaatacttgaagttggagaccacatggatgaccgcagtgggcctcagcgaaatggctgctgaggccgcataccaaaccggcgcagaccaagcctcgatcaccgctcggaaccatatacagttggtcaagctgcaggtcgaggaggtgcaccagctgtcaagaaaggccgaaaccaagctcgctgaagctcagattgaagagctgaggcagaagactcaagaagagggcgaagagagggctgaatccgagcaagaggcctatctgagagaggat

SEQ ID NO: 202281 - DNA, 717 bp, Artificial Sequence
  derived and/or modified sequence
atggcagccctcaaaagctggctgtccagatcagtgacttcgttcttccgctaccgccagtgcctgtgcgtcccggtggtggcgaactttaagaagaggtgctttagcgagctgatcagaccgtggcacaagaccgtcacgatcggattcggagtgaccctgtgcgccgtgcccatcgcacagaaaagcgagccgcacagtctttcctccgaggcgctgatgcggagggctgtgagcttggtcacggactcaacctcgactttcttgtcacaaactacctacgcgctgatcgaggcaattaccgaatacactaaggctgtgtacaccctgactagcctgtacagacagtacacctccctcctggggaagatgaactccgaagaggaggacgaagtatggcaagtcatcatcggagctagagcagaaatgacttcaaaacatcaggagtacttgaaacttgagactacctggatgaccgcggtgggactgtcagaaatggctgccgaggcggcctatcagaccggcgccgaccaagcctcgattacggcacgcaaccatatccagctcgtcaagctccaggtggaagaggtgcaccagttgtcccgcaaggccgaaaccaagctggctgaagcccaaatcgaagaactgcggcaaaaaactcaggaggagggcgaagagcgggccgagtcagagcaggaagcctacctgcgggaagat

SEQ ID NO: 202282 - DNA, 717 bp, Artificial Sequence
  derived and/or modified sequence
atggccgcactgaaatcctggcttagtcgatccgtgacgtccttctttagatatcgccaatgcctatgtgtgccagttgtggccaacttcaagaaaaggtgcttcagcgaactgatcagaccgtggcacaagacagtaaccattggattcggggtcaccctgtgtgcagtgccgatcgcgcagaaatcagagccacattcactgtcatcagaggcccttatgcgaagggccgtgtcgctggtgacagattccacgtctacatttttatcgcagactacctacgcccttatcgaagccatcactgaatacaccaaagctgtgtatactctcacctctctctaccggcagtatacctcacttctgggaaaaatgaattctgaggaggaggatgaggtatggcaagtgatcatcggcgcacgtgctgagatgactagcaaacatcaggagtacctcaaactggaaactacgtggatgaccgctgtcggtctgagcgagatggccgccgaagccgcttaccagaccggggctgaccaggcatcaattaccgcccgaaatcacatccagctggtcaagctgcaagttgaggaggtccaccagctctcacggaaggccgagacaaaactcgctgaggcacagatagaagaattaagacagaagacccaggaagagggcgaggaacgggctgagtctgagcaggaggcatacctcagggaggat

SEQ ID NO: 202283 - DNA, 717 bp, Artificial Sequence
  derived and/or modified sequence
atggccgcattgaagtcctggttgtcccgctcggtgacttcgtttttccggtaccggcagtgtctctgcgtccccgtggtcgctaacttcaagaagaggtgcttttctgagctgatccggccgtggcacaagactgtcacgattggtttcggggtgactctgtgcgcggtgcctatcgcgcagaagtcggaaccgcacagcctgagctcagaagcccttatgaggagggctgtctcgctcgttactgacagcacctccacttttctctctcaaactacctacgcactgatcgaagctatcactgagtacactaaggcggtgtacaccctcacctccttgtacagacaatatacctccctgctgggaaagatgaattcggaagaagaggatgaagtgtggcaggtgatcattggagcccgggctgaaatgacgtcgaaacatcaggaatatctcaaactcgaaaccacctggatgaccgccgtcggactttccgagatggccgccgaagcagcgtaccagaccggagctgaccaggcgagcataaccgcgcgcaaccatattcagctggtgaagctgcaagtggaggaggtgcaccagctgtctcgtaaagcggaaactaagctggccgaagcacaaatcgaggagctgagacagaaaactcaagaagagggcgaggaacgcgccgaatcggaacaggaggcatatctgcgagaagat

SEQ ID NO: 202284 - DNA, 717 bp, Artificial Sequence
  derived and/or modified sequence
atggccgctctcaagtcctggttgtcccgctccgtaacatcatttttccgatatcgtcagtgtctgtgtgttccggtggtcgccaattttaagaaacgttgtttcagcgaactcatccgaccgtggcacaaaacagtgacaattggcttcggggtcactctgtgtgcagtaccgatagcacagaagagcgagccacactctttatcctctgaggccctaatgcgtcgagctgtgagcctggtcaccgattctacttcgacattccttagtcaaaccacctatgctctcatagaggctatcaccgagtatactaaggcagtttacaccttaaccagtttgtatcgccagtacacttctctcctgggtaagatgaacagcgaggaagaggacgaggtttggcaggtgatcatcggagcgcgggcagaaatgacgtcgaaacatcaggagtacttaaaacttgagacgacctggatgactgcagtgggactttcggaaatggccgccgaggcagcgtatcaaaccggtgccgaccaagcaagtatcacagcgcggaaccatattcaacttgtcaaattacaagtagaagaagtacaccaattatcacgcaaggctgagactaagctcgccgaagcgcagatcgaggagttaagacagaagacccaggaagaaggcgaggagcgtgcggagtccgaacaagaggcgtacctgcgggaggac

SEQ ID NO: 202285 - DNA, 717 bp, Artificial Sequence
  derived and/or modified sequence
atggcagcactcaaatcgtggctgtcgcgtagcgtcacttcgttctttagatacaggcagtgtctttgtgtgcccgtcgtcgcaaatttcaagaagagatgcttttcagagctcattcggccatggcataaaactgtcactatcggatttggcgtcaccctgtgcgccgtccctattgcacaaaagtcggagccacattcgttgtcatccgaagcactcatgagaagagcggtttccctggtgaccgactccaccagcacctttctgtctcagactacttacgctttgatcgaagcaattaccgaatacactaaggcagtgtacaccctcacttccctgtaccgtcaatacacgtcgctgctcggtaagatgaattcggaagaagaagatgaggtgtggcaggtgattatcggtgcccgcgcagaaatgacttcgaagcatcaagaataccttaagttggaaacgacttggatgaccgcagtgggcctttccgaaatggcagcagaagcagcataccaaaccggggccgatcaggcatcgatcactgcacggaaccacatacaactggtgaagctccaggtcgaggaggtgcaccaactctcgcggaaggctgagactaagctggcggaagcacagattgaagagcttagacaaaagacgcaagaagagggggaagaaagagcagagtcggaacaagaggcctacttgagagaagat

SEQ ID NO: 202286 - DNA, 717 bp, Artificial Sequence
  derived and/or modified sequence
atggcggcccttaagtcttggctatcccggagcgtgaccagcttttttcgctatcggcagtgtttgtgtgttcctgtcgtggccaattttaagaagcggtgcttctcggagcttattagaccatggcacaaaacagtgaccattggctttggtgtgaccctgtgcgccgtcccaattgcgcagaagagcgaacctcattcactgagttccgaggccctcatgaggcgcgccgtcagccttgtgacggatagcacatcgactttcctgtcccagacaacatacgccctgatcgaagccatcaccgagtacactaaggcagtctacaccctgaccagtttgtatagacagtatacaagtctgctaggaaagatgaatagtgaagaagaagacgaagtgtggcaggtgatcattggtgccagagcagaaatgacatcgaagcatcaggagtacctgaagttggaaactacctggatgacagcggttggactgtccgagatggctgctgaggcggcttaccagacaggcgctgatcaggcctccatcaccgctcgtaatcatatacagctggtgaagttacaagtggaagaggttcaccagctgagcagaaaagctgagactaagcttgctgaagctcagatagaagagttgagacagaaaacccaggaagaaggtgaagaaagggcggaaagcgagcaggaagcttatctgcgggaggac

SEQ ID NO: 202287 - DNA, 717 bp, Artificial Sequence
  derived and/or modified sequence
atggccgccctgaaatcctggctgagccgctctgtgacatcttttttccggtataggcagtgcctgtgcgtgccggtcgtggccaattttaagaaacgctgcttcagcgagctgattagaccctggcacaagaccgtcacaatagggttcggtgtaaccctgtgcgctgtccctattgcacaaaagagcgagccccatagcctgagctccgaggcgttaatgaggcgggccgtgtcattggtgacggactccacctccacatttctgtcacagacaacttatgcattgattgaggctatcacagagtatacaaaggcagtctatacactgacctccctctatagacagtacacctccctgctcggcaagatgaattccgaggaagaagatgaggtgtggcaagtgatcataggagccagagcagagatgacgtcgaagcaccaggaatacctgaaactggagaccacttggatgacagccgtcggactcagcgagatggcagccgaagcagcgtatcaaaccggcgccgatcaggcaagtataacagcaagaaatcatatccagctggtgaagctgcaagtagaggaagtccaccagctgagccgcaaggccgagaccaagctcgccgaagcccaaatcgaggagcttcgacagaagactcaggaagaaggggaggaaagggcagagagtgagcaagaggcctatctgcgtgaggac

SEQ ID NO: 202288 - DNA, 717 bp, Artificial Sequence
  derived and/or modified sequence
atggccgccctgaagtcctggctgtcgcggtcagttacgtcgttttttcgctaccgtcagtgcctctgcgtccctgtggtggccaatttcaaaaaacgatgcttctcagaactgatcaggccgtggcataagactgttacgatcggatttggagtgacgctgtgcgccgtcccaatcgcgcagaaaagcgaaccacactctctcagcagtgaagcgctgatgcggcgggcagttagcctggtgactgattcgacttcgaccttcttgagccagactacttacgcgttgatcgaggcaatcactgagtataccaaggccgtgtacactctgacctccctgtacaggcagtacaccagcctcctcggaaagatgaactccgaagaagaagatgaggtgtggcaggtcatcattggagcccgcgcagaaatgacttccaagcatcaagaatacctcaagctggaaaccacctggatgactgcggtgggcctctcggagatggcagcagaagccgcctaccagactggagcagaccaagcatccatcactgccagaaaccatatccagcttgtgaagttgcaggtcgaggaagtgcaccagctcagccggaaggcggagacgaagctggccgaggcccaaatcgaagagcttcgacagaaaacccaagaagaaggcgaagagagggccgagtctgagcaggaggcctacctgcgcgaggac

SEQ ID NO: 202289 - DNA, 717 bp, Artificial Sequence
  derived and/or modified sequence
atggctgcattgaagtcatggttatctcgaagtgtgactagttttttcagatatagacaatgtctttgtgttccagttgttgctaattttaaaaaaagatgtttttcagaacttattagaccatggcataaaacggtaacgattggatttggagttacattatgtgctgttccaattgctcaaaagtctgaacctcactctttatcctcagaagctcttatgaggagagcagtatcgttggttacagattcaacatcaacgtttttgtcacaaaccacttatgcattaattgaagcaattacagagtatactaaagctgtttatactttaacatcattatatagacaatatacctctttattaggaaaaatgaatagtgaagaagaagatgaagtatggcaagttattattggtgcaagagctgaaatgacttcaaaacatcaagaataccttaaactagaaacaacttggatgacagctgtcggacttagtgagatggcagcagaagcagcatatcaaacaggagctgatcaagcatcaatcactgctagaaatcacattcaattggtcaaattacaagtagaagaggtacatcaattgtctagaaaggcagaaacaaaactcgctgaagcacaaattgaagaattgagacaaaagacacaagaagagggtgaagaaagagcagaatctgaacaagaagcttatttaagagaagat

SEQ ID NO: 202290 - DNA, 717 bp, Artificial Sequence
  derived and/or modified sequence
atggcggccctgaaaagctggctcagcagaagcgtgacaagcttctttaggtatcgtcagtgcctctgtgtcccggtcgtggcaaatttcaagaagcgatgtttctcagagctcattagaccctggcataaaaccgtaaccatcggcttcggggtgaccctctgtgctgtccctatcgcccaaaaatccgaaccacattcgttgtcatccgaggccctcatgcgccgcgccgtttccctggtgactgattccacttcgacctttctctctcagacaacatatgcactgatcgaagctatcaccgaatacaccaaggctgtctatacgctgacatccctgtaccgccaatatactagcctattgggtaaaatgaatagcgaagaggaggatgaagtgtggcaggtgatcatcggagccagagcagagatgacatctaagcaccaggaatatcttaaactcgaaactacatggatgactgccgtaggactgtccgaaatggcggccgaggccgcctatcaaacaggtgcggaccaggctagcattaccgcgcggaatcacatccagttagttaagcttcaagtggaggaggtacatcagctgtccagaaaggcggagacaaagctcgcagaggcgcagatagaagagttacggcaaaagacgcaggaagaaggcgaggaaagggctgagtctgagcaagaagcctacctccgagaagac

SEQ ID NO: 202291 - DNA, 717 bp, Artificial Sequence
  derived and/or modified sequence
atggccgccctgaagtcatggttgtctcggagcgtcacttcattcttccggtacagacagtgcctctgcgtgcccgtcgtggcgaacttcaaaaagagatgcttctcagaactgatccggccttggcataaaaccgtgacgatcgggttcggcgtcactttgtgcgcagtgccaatcgcgcagaagtcagaaccacactccctgtcgagcgaagcgctcatgcggagggcagtgagcctggtgactgacagcacttcgacgtttctgagccagactacttacgccctgatcgaagcgataactgagtacacgaaagccgtgtatactctcacttcgctgtacaggcaatacacctccctgttgggtaagatgaattcggaggaggaagatgaagtctggcaggttatcattggcgccagagcggaaatgacctctaagcaccaagagtacctcaaactggaaaccacctggatgaccgccgtggggctgtcagaaatggcagcagaagcagcctaccaaactggagcagaccaagcgtcaatcaccgcccgcaaccatatccaacttgttaagctgcaggtggaggaagtgcaccaactgtcacgcaaggcggagactaagctcgcggaagcccagattgaagaactccgccagaaaacgcaagaggagggcgaggagagggcagagtcagaacaggaggcgtacctccgcgaagat

SEQ ID NO: 202292 - DNA, 717 bp, Artificial Sequence
  derived and/or modified sequence
atggccgcactcaagagctggctgtctcggagtgttacctcttttttcaggtatcgacagtgtttatgcgtccccgtggtggccaacttcaagaagagatgtttttcagagctgattcgaccctggcataagacagtcacaataggctttggcgtgaccctctgtgccgttcctatcgcacaaaaatcagagccccatagccttagttcagaagcgctgatgaggcgcgcggtttccctggtgacagactcgacatccacgttcctgtcccagaccacgtacgcactgatagaggcaatcactgagtacacaaaggccgtatacacactgacgagcctctatcggcagtatacaagcttgctggggaagatgaacagcgaggaagaggacgaagtgtggcaggtgatcatcggggcccgggcggaaatgacaagcaagcaccaggaatacctgaagctggagactacgtggatgactgctgtcggactgagcgaaatggcagcagaggccgcttaccagactggcgccgaccaggcatctataacagcgagaaaccatattcagctggtgaaactacaggtggaggaggtgcaccagctgtctcggaaggccgaaactaaactggccgaggcccagatcgaagaacttagacagaagactcaggaggagggagaggagcgtgcagagtccgaacaagaagcttatctgcgggaggac

SEQ ID NO: 202293 - DNA, 717 bp, Artificial Sequence
  derived and/or modified sequence
atggctgctctcaagtcgtggctttcccgcagcgtgacctcattctttcggtacagacagtgcctgtgcgtccctgtcgtcgcaaatttcaagaaacgctgcttctcggaactgattagaccgtggcacaagaccgtgaccatcggatttggtgtcactctgtgtgccgtgccgatcgcccaaaagagcgaaccacactccctcagctcggaagctctgatgcgccgcgctgtgtcgttggtcactgactccacttcaacgttccttagccaaactacctacgcgctgatcgaggcaattactgagtataccaaggccgtgtacaccctcacttcactgtaccgacaatacacttcgttgctcgggaagatgaactccgaagaggaggatgaggtgtggcaggtgatcatcggagcccgtgcggagatgacctctaaacatcaggaatacctgaagctggagacgacttggatgacggccgtgggcttgtcagaaatggccgccgaggccgcgtaccaaaccggcgcagatcaggcgtcgatcaccgcacggaaccatatccagctcgtgaaactgcaggtggaggaagttcaccaactcagccggaaggcggaaaccaagctggcagaagcgcagatcgaggaactgcggcaaaaaactcaggaagaaggagaagagagagccgaatccgaacaggaggcctacctgagggaggac

SEQ ID NO: 202294 - DNA, 717 bp, Artificial Sequence
  derived and/or modified sequence
atggctgctttgaaatcttggctatccaggtctgtaacttcattcttcaggtatcgacagtgtttgtgtgtgcctgtcgtcgctaattttaagaaaagatgcttttcagagctcatccgaccctggcataaaacagttacaatagggttcggggttacactttgcgcagtgcctatcgcccagaagagtgagccacactcactctcgagtgaagcgttgatgaggagggccgtctctttggtaactgactccacatccacatttctgtcacagactacttatgccttaatcgaagccattactgaatatactaaagcagtttatacacttacatccctatatcggcagtacacttctctactcgggaaaatgaactcagaggaagaagatgaagtgtggcaggtcataatcggggcccgggccgaaatgacttccaaacatcaggaatacttgaaactagaaactacttggatgacagccgttgggttatcagaaatggccgcagaagccgcctatcagacaggagccgatcaggctagtatcactgcccgaaatcacatacagctcgtaaaactccaagtggaagaagtccaccaattgtcaaggaaagcggaaactaaattagccgaagctcagatagaagagctgcggcagaaaacacaggaagaaggagaagaacgcgctgaaagtgagcaggaggcctacttaagagaagat

SEQ ID NO: 202295 - DNA, 717 bp, Artificial Sequence
  derived and/or modified sequence
atggcggccctgaaaagctggctgtcccgttccgtgacgtcgttttttcgataccggcaatgcttgtgtgtgcctgttgtggcaaacttcaaaaagagatgtttttcagagcttattagaccctggcataagactgtgaccattggcttcggagtgactttgtgtgccgtgccgatcgcacagaagtccgaaccgcactcgctttcgagcgaagcacttatgagacgcgccgtctccctcgtgactgattctacctcaacgttcctttcgcaaaccacttacgcacttatcgaagctatcactgaatacaccaaggccgtgtacactctcacttcgctctacaggcaatacacctccttgcttgggaagatgaactcagaggaggaggatgaggtgtggcaagtgataattggagctcgcgcagagatgacttcaaaacaccaagaatacctgaaactggaaaccacgtggatgactgcagtgggtctgtccgaaatggcagcagaagcagcgtaccagaccggcgcagaccaagcgtcgattactgcccggaatcacattcagcttgtgaagttgcaagtcgaggaggttcatcaactctcaagaaaagcagaaactaagctggcagaagcacaaattgaagagttgagacaaaagactcaagaggaaggagaagaaagagcagagagcgagcaagaagcatacctccgtgaggat

SEQ ID NO: 202296 - DNA, 717 bp, Artificial Sequence
  derived and/or modified sequence
atggccgcactcaagagctggctgtcccgaagcgttacctccttctttcgctacaggcagtgcctgtgcgtcccagtggtggctaacttcaaaaaacggtgcttctccgaactgattagaccctggcataagaccgtcaccatcggctttggagtgaccttgtgtgcagtcccaatagcccaaaagtcggagccgcactcactttcgagtgaagctctcatgcgccgcgccgtgtccctcgttactgactcgacttctaccttcctcagccaaactacttatgccctgattgaagccatcactgagtacaccaaggccgtctacactctgacttcgctgtacagacagtacacttcactgctcggcaagatgaattccgaagaagaagatgaagtgtggcaggtgatcatcggtgcccgcgcagaaatgacctcgaagcaccaagaatacctgaagctggaaaccacctggatgacggcggtgggactcagcgaaatggcggccgaagcggcgtaccagacgggagccgatcaggccagcatcaccgcccggaaccacatccaactggtgaaattgcaggtggaggaggtgcatcagcttagccggaaggctgagacgaagttggcggaagcccagatcgaagaactgcggcagaaaacccaagaagaaggagaggaacgggctgagtcggagcaggaggcctacctgagagaagat

SEQ ID NO: 202297 - DNA, 717 bp, Artificial Sequence
  derived and/or modified sequence
atggcagccttgaaaagctggctttccagatcagtgaccagcttttttcgctacaggcagtgtctttgcgtccccgtggtggccaatttcaagaagcgctgtttctcagagttgattagaccgtggcataaaactgtgaccataggatttggggtgactctttgtgcagtgccaattgcccaaaagtcggaaccccatagtctgtcctcggaggctttgatgaggagagcagtctctcttgtgaccgatagcacttccacctttctttcccagaccacgtatgccctgattgaagcgataactgaatacactaaggccgtctacacccttacttcattgtacagacagtacacctcacttctcgggaagatgaactccgaggaggaagatgaagtgtggcaagtgatcattggagcacgcgcggagatgacttcaaagcatcaagagtacctcaaactggagactacctggatgaccgcggtgggattgtccgaaatggctgcagaggcagcataccagaccggtgcagaccaggcatcgatcacggctcgaaaccatatccaacttgtgaagctccaagtggaagaggtgcatcaactctcgcggaaggccgaaaccaagctggcagaagcacaaatcgaagaactgagacaaaaaacccaagaagaaggtgaggaacgtgcggagtccgagcaagaggcgtacttgagagaagat

SEQ ID NO: 202298 - DNA, 717 bp, Artificial Sequence
  derived and/or modified sequence
atggccgccctgaagtcctggctttctcgctctgtcacaagttttttcagataccgccagtgtctgtgtgtgccagtcgtggcgaacttcaagaagcggtgcttctccgagctgattagaccgtggcataagacggtgacgatcggctttggtgtgactctgtgcgctgtgcccatcgctcagaagtccgagccccacagcttgagctctgaggccctcatgcgtagagccgtgtccctcgtgacagactccacctcaaccttcctgtcccagactacttacgcgctaatcgaagccattacggaatacactaaagccgtttatacgctgactagtctgtacagacagtatacctcattgctcggaaagatgaacagtgaggaggaagatgaagtgtggcaggtcatcattggcgctagagccgaaatgaccagcaagcaccaggagtacttgaagctagagaccacctggatgacggcagtcggcctgtcagagatggctgcggaggccgcctatcagaccggcgctgaccaggcttcaatcaccgctcgcaaccacatccagctggtgaagctccaggtcgaagaagttcaccagcttagtcgtaaggccgagaccaagctggccgaagcgcagatcgaggaactccgccagaaaacccaggaagagggggaggaacgagctgaatctgagcaggaggcatatttgagggaggac

SEQ ID NO: 202299 - DNA, 717 bp, Artificial Sequence
  derived and/or modified sequence
atggccgcactcaagagctggttgagccgctcagtgacctccttctttagatacagacaatgcctctgtgtcccagtggttgccaactttaagaagaggtgtttcagcgagcttattcgtccttggcataagactgtgaccattggatttggagtcactctgtgtgccgtgcccatcgcgcagaagtctgaacctcattcgctgtcgtccgaagcattgatgcggcgggccgtctcccttgtgaccgacagcacctctacgtttctgtcgcagactacttatgcacttatcgaggcaataacggaatacactaaggcggtttacacgcttacgtccctttaccgccagtacacctcactgctggggaagatgaactctgaagaagaagatgaagtctggcaggtgattatcggagcgcgagctgagatgactagcaagcaccaagagtacttgaaacttgaaaccacctggatgactgcggtgggcctgtcggaaatggcagcagaagcagcctaccagaccggcgctgaccaagcatcgatcacggctagaaatcacattcagctggtcaaactccaggtcgaggaggtgcatcaactgagccgcaaagctgaaacgaagctcgcagaagcacaaattgaggaactccgacaaaaaactcaagaggagggtgaagagagagccgaatccgaacaggaggcatacctccgggaagat

SEQ ID NO: 202300 - DNA, 717 bp, Artificial Sequence
  derived and/or modified sequence
atggccgcattgaagtcgtggctttccaggtcagtgacctccttctttcgttacagacagtgtctgtgcgtgccagtggtcgctaatttcaagaagcggtgtttctccgagctcatcaggccctggcataagaccgtgacgataggatttggtgtgactctgtgtgccgttccgatcgcacaaaagtcggagcctcactcgctttcatctgaagcattgatgcggcgggcagtcagcctcgtgactgactccacttcgacctttctgtcccaaaccacgtatgccctgattgaggccattactgagtacaccaaggcagtgtacacgcttacctccctgtaccgtcaatacacctcgctccttggaaaaatgaactcggaagaagaagatgaagtgtggcaagtgatcatcggagcacgagctgaaatgacctcgaagcaccaggaatatctgaaattggaaacgacgtggatgactgcagtgggcctgagcgagatggctgcagaagccgcttaccagaccggggccgatcaggcatcgattaccgccagaaaccatatacaactggtgaagctccaggtggaagaagtccaccagctgtccagaaaagctgaaacgaagctggccgaggcccagatcgaggagctgcgtcagaaaacccaagaagaaggagaagaacgggccgagtcagaacaggaagcgtaccttagagaggat

SEQ ID NO: 202301 - DNA, 717 bp, Artificial Sequence
  derived and/or modified sequence
atggcagcgctgaaaagttggctgagccgctcagtcacttcctttttccggtatcgccaatgcttatgtgtacccgtcgttgccaatttcaagaagcgctgtttttccgaactgatccgcccgtggcacaaaaccgtgactattggtttcggcgttaccttgtgtgcagtcccaattgcccagaagagtgagcctcacagcctgtcgtctgaggccctcatgcgacgggcggtgtctttggtcaccgactctacgtccacatttctgagccaaactacgtatgccctgatagaggccatcactgagtacacaaaggccgtgtatactcttacttctctgtacagacagtacacatctctgcttggcaagatgaacagcgaggaggaagacgaggtgtggcaagtgattattggggcgcgggcagagatgacttccaagcatcaggagtatctgaagctggaaactacatggatgaccgccgtggggctgagtgaaatggcagctgaagccgcataccagactggcgccgatcaggccagcataacggctaggaaccacattcagttggtgaagctccaagtggaggaagtccaccaactctcccgaaaggcagagacaaaactggccgaagcccaaatagaggaactgcgacagaaaacacaagaggaaggtgaggagcgcgcagagtccgagcaggaggcgtacctgagagaggat

SEQ ID NO: 202302 - DNA, 717 bp, Artificial Sequence
  derived and/or modified sequence
atggccgccctgaaaagctggctttcacgttcggtcacttccttttttcggtaccggcagtgcctctgtgtgccggtcgtggcaaactttaagaaacggtgcttttcggaactcatcagaccttggcacaaaacggtgaccattggatttggagtcaccctttgtgcggtgcctattgcacagaagtctgaacctcactccctttcgtcggaagcacttatgagaagagcagtgagcctggtgactgattcgacctccacgttcctgtcacaaactacctacgcgctgatcgaggcaattactgagtacacgaaggcggtctacactctgaccagcctttatcgacagtacacctccctccttgggaaaatgaactccgaagaggaagatgaggtctggcaggtcattataggtgcacgcgcggagatgacgtctaagcatcaggagtacctcaagttggaaaccacctggatgactgccgtgggcctttcggaaatggcagcagaggcggcgtaccaaactggtgcagatcaagcatcgatcaccgcgagaaatcacattcagctggtgaagctgcaggtggaagaggtccatcagctgtcaaggaaggcagaaaccaagctcgccgaggcacagattgaagagcttcggcaaaagactcaagaagaaggcgaagagcgcgctgaaagcgagcaggaagcatacctccgcgaagat

SEQ ID NO: 202303 - DNA, 717 bp, Artificial Sequence
  derived and/or modified sequence
atggccgccctgaagtcttggctgtcaaggagtgttacttccttcttccgctatcggcagtgcctgtgtgtccctgtggtggccaatttcaaaaagcggtgtttcagcgagctgatccgcccctggcataagactgtgacaatcggctttggcgtgacactgtgtgctgttccaatcgcgcagaagagcgaaccccatagcctctcaagcgaggccctaatgcgaagggccgtatccttggtcaccgactctacaagcactttcttgagccagacaacatacgctctgatcgaggcgattactgagtacacaaaggccgtttataccctgacgagtctctatcgacaatacacatctctgctcggcaagatgaacagcgaggaagaagatgaggtatggcaggtgattattggggctcgagcggagatgacatccaagcaccaggagtaccttaaacttgagacaacatggatgaccgctgttggcctgagcgagatggccgcggaagcggcttatcagaccggggccgaccaggcgtctatcacggcccgcaaccacatccagctcgtgaaactccaggtggaggaggttcaccaactgagcagaaaagcggaaacaaagctcgcagaggcccagatcgaagagctgagacaaaagacccaagaggagggtgaagaaagagctgagtctgagcaggaagcctacctgcgggaggat

SEQ ID NO: 202304 - DNA, 717 bp, Artificial Sequence
  derived and/or modified sequence
atggcggctctgaagtcctggctgtcccggtctgtgacttctttttttagatataggcagtgcttgtgcgtgccggtggtggcaaacttcaaaaagcgctgtttttctgagttgatcagaccctggcacaaaacagtgacaatcggattcggagtcacactttgcgccgtccccattgctcagaaatctgaacctcacagtctgagttcggaggcccttatgcgaagagccgtttccctggtgactgattctacttccacctttttgtctcagacgacatatgcccttatcgaggcgataacagagtatacaaaagccgtctatacgctcacatcgctgtaccgtcagtatacttctctattgggtaaaatgaattctgaagaggaggacgaagtgtggcaggtgatcatcggagcaagggcggagatgacatcaaagcaccaggagtatctgaaactggaaacgacttggatgaccgccgtcggcctgtctgagatggccgcggaagccgcctaccaaacaggagctgatcaggcatcgataacggcccgtaaccatattcagctggtcaaactgcaggtagaggaggtgcaccagttgtcaaggaaggccgaaaccaagctggctgaggctcagatcgaggaactcagacagaaaacccaggaggagggtgaggaacgcgccgaatcagaacaagaggcgtacctgcgagaggac

SEQ ID NO: 202305 - DNA, 717 bp, Artificial Sequence
  derived and/or modified sequence
atggcggcactgaagtcgtggctgtcacggtccgtgacctcgtttttccgctatcgccagtgcctgtgtgtgcctgtcgtcgcgaacttcaagaaaaggtgctttagcgagttaatccgtccctggcacaagacagtgacaataggcttcggcgtaaccctctgcgcggtgccgatcgctcaaaagtcggaaccccactctctgagctccgaagctctgatgaggcgcgcggtcagtctcgttaccgactcgacatccactttcctgtcgcaaacgacctacgccctaatcgaggctatcaccgagtacactaaggccgtatatactctaacaagcctgtatcgacaatacaccagccttttgggtaagatgaactcagaagaagaagatgaagtctggcaggtgatcattggagcgagagccgagatgacgtcgaagcaccaagagtatcttaagctggagaccacctggatgactgcggtgggcctgtcggagatggctgccgaagctgcctatcagacaggagcagatcaggcgtctatcacagcccgtaaccacatccaactggtgaaacttcaggttgaggaggtgcatcagctgtctcgtaaggccgagacaaaattagccgaagcccaaatcgaagagctgcgccaaaagacgcaggaggagggtgaggagcgcgccgagagtgagcaggaggcgtatctaagagaagat

SEQ ID NO: 202306 - DNA, 717 bp, Artificial Sequence
  derived and/or modified sequence
atggctgcgcttaaaagttggttaagtcggagtgtgacctcttttttcagataccggcaatgtctgtgtgtcccagtggttgccaatttcaaaaagcggtgcttcagcgagcttatcaggccgtggcataagactgtgacgattggatttggggtgacactatgcgcagtccccatcgcacagaaaagcgaacctcacagcctgtcctccgaggcacttatgcgtagggccgtgagcttggtaaccgattcgactagcacatttttgagccagaccacctatgcgctaattgaagcaataacagaatacacaaaggctgtatatacactgactagcctttacaggcagtatacctccctcctgggcaaaatgaacagtgaggaggaggacgaagtctggcaggtcattatcggagctagggctgaaatgacaagcaaacatcaggaataccttaagctggagactacttggatgactgcagtcggcctttcagagatggcggctgaagctgcatatcaaacgggcgctgatcaggcgagtataaccgccaggaaccacattcagcttgtgaaactgcaggtggaggaggtacaccaattgtccagaaaagccgagacaaagctcgcggaagcgcagatcgaggaacttagacagaaaacgcaggaggaaggtgaggaacgcgccgagtcagagcaggaggcctatcttcgtgaggac

SEQ ID NO: 202307 - DNA, 717 bp, Artificial Sequence
  derived and/or modified sequence
atggctgctctgaaaagctggttgtcaagatctgtgacgtccttctttagataccggcagtgtctctgtgttccagttgtcgccaacttcaaaaagcgatgtttttcagagctaatcaggccgtggcataagactgttactatcggattcggagttaccctctgcgctgtgcctatcgcacagaaatccgagccgcattccctctcgagtgaagccctgatgaggcgcgcagttagtcttgttaccgactctacctccacattcctctctcagaccacctacgctcttatcgaggcaatcaccgagtacacaaaagccgtttacaccttgaccagtctgtatagacagtatacatctcttttgggaaaaatgaacagtgaggaggaggatgaagtgtggcaggtgatcatcggagctagggccgaaatgactagcaagcatcaagagtacctaaagctggaaaccacttggatgaccgctgtgggactctcagagatggctgcagaggcagcatatcagacaggcgcagatcaggcatctatcactgctagaaatcatatccaactagtaaagctgcaggtggaagaagttcatcaactttcccgtaaggccgaaactaagctcgccgaagctcagatcgaggaacttcgtcaaaaaactcaggaggagggagaagaaagggcagagagcgagcaggaagcttatctgcgtgaagac

SEQ ID NO: 202308 - DNA, 717 bp, Artificial Sequence
  derived and/or modified sequence
atggcggctctcaagagttggctgagccggagcgtgacatcatttttccgctatcgccagtgcttatgtgttcctgtggtggctaattttaaaaagcgatgcttcagtgaactgatcagaccctggcacaagacggttaccataggttttggggttaccctctgtgctgtgcccattgcccagaagagtgaaccccatagcttatcttccgaagccctgatgcgtagggcggtctctctggtgaccgattccacaagcacttttctgagccagaccacttacgccctcatcgaggcaataaccgaatatacgaaggctgtttatactttaacctccctttatcgacaatatacaagcctgctagggaagatgaattctgaagaagaagacgaagtgtggcaggtgatcattggggcaagagcagaaatgacttccaaacaccaagaatatctgaagctggagaccacttggatgacagcagtcggactttcagagatggcggcagaagctgcgtaccagacgggagctgaccaggctagcatcaccgctaggaaccacatccagctggtgaagctccaggtggaagaggtgcaccagctgtctcgcaaggctgagaccaagctcgctgaagctcagatagaagagctgagacaaaagacccaggaagagggagaggaaagggccgagtccgaacaagaagcttaccttagagaagac

SEQ ID NO: 202309 - DNA, 717 bp, Artificial Sequence
  derived and/or modified sequence
atggctgccctcaaatcatggctgtcccggagcgtcacctctttctttcggtaccgccagtgcctgtgcgtgccggtggtcgcgaacttcaagaagcgctgtttcagcgaactcatccggccgtggcacaaaactgtgacgatcggattcggagttacgttgtgcgccgtcccaattgcacaaaaatcagaaccgcattcattgtcatccgaagcgctgatgagacgcgcggtgtcgcttgttacggattccacttccacttttctgagccaaactacttacgcccttatcgaagccatcactgaatacactaaggccgtgtacacgctgacctccctctaccggcagtacacttcgctcctcggtaagatgaactcagaggaagaggacgaggtctggcaggtgatcatcggagcccgcgcagaaatgaccagcaagcaccaggaatatctgaaattggaaactacctggatgaccgccgtgggcctgagcgagatggccgcagaggcagcgtaccagactggcgccgatcaggcgagcatcaccgcgcggaaccatatccagctcgttaagctgcaggtggaggaggtccatcagctctcgaggaaagcagagactaagctggcagaggcacaaatcgaggaactgcgccagaaaactcaggaagagggagaggaacgagcagaatcagaacaagaagcctacctccgcgaggac

SEQ ID NO: 202310 - DNA, 717 bp, Artificial Sequence
  derived and/or modified sequence
atggccgctctcaaaagttggctgtcccggtccgtaacgtctttcttcagatatcgacaatgcttatgtgtgcccgtcgtggccaatttcaagaagcgatgtttttctgagttaattcgcccgtggcacaagacagtcaccataggcttcggagttacactgtgcgccgtacccatcgcgcagaaatcagaaccccattccctgagtagtgaggccctcatgagaagagccgtctccctcgtgactgactcaacctcaaccttcctgtctcagaccacctacgcactgatagaagccatcacagaatacaccaaagccgtttacaccctgacctccctgtaccggcagtacacaagtttgcttggcaagatgaattcagaagaagaggatgaggtgtggcaggttattatcggggctcgcgccgaaatgaccagcaaacatcaggagtatttgaaattggaaaccacatggatgactgcggttggactgtcagagatggctgcggaggctgcataccagacgggtgcggatcaggcctctatcactgcacgcaaccatattcagttagtgaaactgcaggtcgaagaagtgcatcagctgtcacggaaggccgagactaagctggccgaagcgcagattgaggagttgaggcagaagacgcaggaggaaggagaggagagagccgaaagtgaacaagaggcgtacctgcgtgaggac

SEQ ID NO: 202311 - DNA, 717 bp, Artificial Sequence
  derived and/or modified sequence
atggcggctctgaagtcatggttgtctcgcagcgtgacctcattcttccgatacaggcagtgtttgtgcgtacctgtggtggccaacttcaaaaaacgatgcttttccgagctgatcaggccctggcacaaaacagtgaccataggattcggagtgaccctttgcgctgtgcccattgcccagaaatccgagccacactcactgtcgtccgaggccttgatgcgcagagctgtgagtctcgttacggatagtaccagtacatttttgagccagactacatacgctctaattgaggctatcacagaatacactaaggcagtatatactctgactagcttatacagacagtatacatctctgctagggaaaatgaattcagaagaggaagacgaggtatggcaggtcattatcggagccagggccgaaatgacctcaaaacatcaggagtatctgaagctggaaaccacctggatgacggccgtgggactcagtgagatggccgcagaggccgcctatcagacaggggccgaccaggcaagtatcacagcccggaaccatatccagcttgtaaaactacaggtggaagaagttcaccagttatctaggaaggctgagacaaagttggctgaggcgcagatcgaggagctgagacaaaagacacaggaagagggcgaagaacgagcagagagcgagcaagaagcctatctccgggaggac

SEQ ID NO: 202312 - DNA, 717 bp, Artificial Sequence
  derived and/or modified sequence
atggccgccctcaagagctggttgtcgcgttctgtgactagcttctttcggtaccggcaatgcctgtgcgttcctgtcgtggcgaatttcaagaagcggtgtttcagcgaactgatccgcccgtggcataagaccgtgactattggctttggagtgaccctgtgcgcagtgccaatagcgcagaagtcagagccgcactcactgagctcggaggcactcatgcgcagagccgtctccctggttaccgactccacgtccaccttcctctcacagactacgtacgccctgatcgaagcaatcactgaatacaccaaagcggtctacacgttgacctccctctatcggcaatacacttcgctcctggggaagatgaacagtgaggaagaagatgaagtctggcaggtgatcatcggtgcgcgcgctgaaatgaccagcaaacaccaggagtacctgaagctggaaaccacctggatgaccgcggtcggcctgagcgaaatggcagctgaagcggcctatcagactggagccgatcaggcgagtatcaccgcccggaaccacattcaactggtgaagctgcaggtggaagaggtccatcagttgtccaggaaagccgaaactaaacttgccgaggcccaaatcgaggaactccggcaaaagactcaggaggagggagaggagcgcgcagagtccgaacaagaagcatacctcagagaggat

SEQ ID NO: 202313 - DNA, 717 bp, Artificial Sequence
  derived and/or modified sequence
atggctgctttgaaatcttggctttccagatcggtcacgtcattctttcggtaccgacaatgcctgtgcgtacccgtggtggcaaatttcaagaaaagatgttttagcgagcttattcgaccttggcataagactgtcacgattgggttcggtgtcaccttgtgcgccgtccccattgcgcaaaagagcgagccacattctctgtcctctgaagcactgatgcgccgtgcagtgtcactagtgactgactccacttccaccttcttaagccaaactacatatgccctgattgaggcaatcacagagtacacgaaagctgtctacaccttgactagtctctaccggcagtatacttccttgctgggcaagatgaattcagaggaggaggatgaagtgtggcaggttatcattggggcacgcgctgagatgacctccaaacatcaggagtacctgaagctggagaccacatggatgactgccgtcggtctgagtgagatggctgctgaagctgcataccagacaggtgccgaccaggcttcgatcactgcccgcaatcatatccaacttgtcaagttacaggtcgaagaggtccaccagctatcaagaaaagctgagactaagctggctgaggcccagatagaggaactgcgccagaagacacaggaagagggcgaagaacgggccgagtccgagcaggaggcctatctgcgagaggat

SEQ ID NO: 202314 - DNA, 717 bp, Artificial Sequence
  derived and/or modified sequence
atggccgcacttaagagttggctgagccggagcgttacctcttttttccgctatcgacagtgcttgtgcgtcccagtcgtcgcgaatttcaagaagcggtgttttagtgagctgatacggccctggcataaaacagtgactatcggtttcggcgtcacgttatgtgcggtccctattgcgcagaaaagcgaaccccatagtctgtcaagcgaggcactgatgcgacgggccgtttcacttgtgaccgatagcacgtcaacctttctgtcacagacgacctatgcactgatagaagctatcaccgagtatacgaaggccgtgtatacccttacctcactgtacagacagtatacgtctctgctgggaaagatgaacagtgaggaagaagacgaggtgtggcaggttatcatcggggcccgagctgaaatgaccagtaaacaccaggaataccttaagttggaaaccacttggatgacagccgtgggtttaagcgaaatggccgctgaagctgcataccaaacaggggctgaccaggcaagcattacagcgcgcaaccatatacagttggtgaaacttcaggtggaggaggtgcatcaattaagcaggaaggctgagacaaaactcgcggaggcccagatcgaagagctgagacagaaaactcaagaggagggcgaagaaagagccgagagcgaacaggaggcctacctacgtgaagat

SEQ ID NO: 202315 - DNA, 717 bp, Artificial Sequence
  derived and/or modified sequence
atggcggcgcttaaaagttggctatccagatccgttacttcattttttcgctatagacaatgcctctgtgtccctgtcgtggccaacttcaaaaagcggtgcttttccgagctcattagaccatggcacaagactgtgacgatcgggtttggagtgactctgtgcgcagtgccgattgctcagaaatcagaaccccactcactgagtagtgaggccctgatgcggcgggccgtgagcttagtcacggactccactagcaccttcctctctcagacaacttatgctctgatcgaagcaatcacagagtacacgaaggccgtgtacaccttaacctctctgtacaggcagtatacatctttactgggaaagatgaacagtgaagaagaggatgaggtgtggcaggtaatcatcggagccagagccgagatgacctctaagcatcaggagtatttaaaactcgaaactacatggatgacagccgtggggttgtcagagatggctgcagaggcggcctaccagaccggggctgatcaggcctctatcacagccaggaaccacatccagctggtaaagctacaggtggaagaggtacaccaactctccagaaaggctgaaacaaagctggcagaggcccagattgaagagcttcgtcagaaaacacaggaggaaggtgaggagcgggctgaaagtgagcaagaagcctatttgcgcgaggac

SEQ ID NO: 202316 - DNA, 717 bp, Artificial Sequence
  derived and/or modified sequence
atggcagctttaaaaagttggttgtctcgttcagttacctctttcttcagatatagacagtgtctttgcgtcccagtcgttgcaaacttcaaaaaaagatgtttctctgaattgattagaccctggcacaagactgtaacaattggttttggtgttactttatgtgccgtccccattgctcaaaagagtgaaccgcactctctaagttctgaagcccttatgagacgtgccgtttcgctcgttactgactcaacttctacctttctgtctcaaactacgtatgcgttgattgaagcaatcactgaatataccaaggctgtttacacactcacctctctttatcgtcaatacacttctcttctgggcaagatgaactccgaagaagaagatgaagtttggcaagtaatcattggggcacgtgctgagatgacatcgaagcatcaagaatatctgaaacttgaaacaacttggatgacggcagtggggctgtctgaaatggccgctgaggcagcctatcaaactggagcggatcaagcttccattactgcgcgaaatcatattcagcttgttaagttacaagtggaagaagtccatcaattgagtagaaaagcagaaacaaaattggcagaagctcaaattgaagagctacgccagaagacacaggaggagggagaagagcgagccgagtcggagcaagaggcgtacttgagagaagat

SEQ ID NO: 202317 - DNA, 717 bp, Artificial Sequence
  derived and/or modified sequence
atggcggcacttaaatcttggctttcacggagcgttacttctttcttcaggtatagacagtgcctctgcgtcccagtagttgcaaactttaaaaaaagatgctttagcgaacttatcaggccctggcataaaaccgtaaccattggatttggcgtaaccctttgcgctgtgcccatcgctcaaaaaagcgaaccccacagcctttcttctgaggcccttatgcggcgcgcagttagcctggtcaccgactccacttctaccttcctcagccagaccacttatgctctgatcgaggctatcactgaatacactaaggcagtgtacacactgacctcgctgtatcgtcagtacacttctctactgggaaaaatgaatagcgaggaagaggacgaggtctggcaagtcattatcggggccagggccgaaatgacttcgaagcatcaagaatatcttaagcttgaaactacttggatgaccgcagtgggactgtctgagatggcggctgaagcagcctatcagaccggcgcggaccaggcttctataaccgccaggaaccatatccagcttgttaaattgcaagtggaggaagtgcatcaactcagtagaaaagctgagactaagctggcagaagctcaaattgaagaacttcggcagaagacccaggaagagggagaagagagagcagaatccgaacaagaggcctacctgagggaagac

SEQ ID NO: 202318 - DNA, 717 bp, Artificial Sequence
  derived and/or modified sequence
atggccgccttgaaatcctggctgtcccgttctgtgacttccttcttcagataccgccagtgcctttgcgttccagtcgtggctaatttcaagaagcgctgtttttccgaactgattcggccgtggcataagaccgtgactatcggcttcggcgttaccctgtgcgcggttcccatcgctcagaagtctgagccgcactcgctctcttccgaggctctgatgagaagggccgtttccctggtgaccgatagcacctccactttcttgagccagaccacatatgctctaatcgaagcaatcaccgagtacacaaaggcagtgtacaccctgactagtctgtaccggcagtatacttcactcttggggaaaatgaactcggaagaggaggacgaggtatggcaggtgattattggagctcgtgccgagatgacctccaagcaccaagagtatctgaagctggagaccacgtggatgacagccgtggggctgtctgagatggcggcggaagctgcctatcagacaggcgccgaccaggctagtatcacagcccgcaatcacatccagctcgtcaagttacaggtggaagaggtgcatcagctgtctagaaaggctgaaacaaaactcgccgaggcacagatcgaagagctgaggcagaaaacacaagaagaaggcgaagagcgagctgagtctgagcaagaggcctatttgcgcgaggac

SEQ ID NO: 202319 - DNA, 717 bp, Artificial Sequence
  derived and/or modified sequence
atggccgcattgaagtcctggctttcacggtccgtcactagcttcttccggtaccgtcaatgcctgtgtgtgcccgtcgtcgcaaactttaagaaaaggtgtttctctgaacttatccggccctggcacaaaaccgtgaccattggctttggagtgaccctctgcgcagtgccaattgcacaaaagagcgagcctcatagcctgagctcagaggcgctgatgcggagggctgtgagcctggtcaccgattcgacctcgacttttctgtcacaaaccacctacgcgctcattgaagcaatcaccgaatacaccaaagctgtgtacactctcacctcgctttaccgccaatacacttccctgctgggaaagatgaattccgaggaggaggatgaggtctggcaggtgattatcggggcgagggcagagatgacttccaagcaccaagaatacctgaagctggagacgacgtggatgactgcagtgggactttccgaaatggcagccgaagcggcataccaaacgggagcagaccaagcatcgattaccgcgaggaatcatatccagcttgtgaaattgcaggtggaagaagtgcatcagttgtcccgaaaggccgaaaccaagctcgcagaagcccaaattgaagagctgagacagaaaactcaggaagagggagaagaacgtgcagaatcggaacaagaagcctacctgcgagaggac

SEQ ID NO: 202320 - DNA, 717 bp, Artificial Sequence
  derived and/or modified sequence
atggcagcacttaagtcctggctgtccagaagcgtcacctccttctttaggtaccgccaatgcctctgcgtgcccgtggtcgccaactttaagaagcggtgtttttcggaacttatccggccttggcataagactgtcactattggttttggggtgactctctgtgcagtgcctattgcccagaagtcagaaccgcactcactctcgtccgaggccctgatgagaagggcggtgagcctggtgaccgactccacctcaaccttcctgtcgcagacgacttatgccttgatcgaggcaatcactgagtacaccaaagcggtctataccctgacgagcctgtaccgacaatatacgtcgttgctggggaagatgaacagcgaagaggaggatgaagtctggcaagtgataatcggagcaagagcggaaatgacctcaaaacatcaagagtaccttaagctggaaaccacttggatgactgctgttggtctgtcggagatggccgccgaagcagcttaccaaaccggagcagaccaggctagcattacggcacgcaatcatattcagttggtgaagttgcaggtggaagaagttcatcaactgtcgaggaaggcggagactaaacttgcggaagcccagatagaagaacttcggcaaaaaacccaggaagaaggcgaggaacgcgcggagtcagaacaagaggcatatctgcgagaggat

SEQ ID NO: 202321 - DNA, 717 bp, Artificial Sequence
  derived and/or modified sequence
atggctgcactgaagtcctggctgtccagatctgttacatctttcttccgatatcggcagtgtctctgcgtgccagtggtagccaactttaagaaacgctgcttttcagaactgattcggccatggcataagaccgtgacaattggtttcggagtaacattgtgcgcagttcctatagcacagaagagtgaaccacattcactgagttccgaggcccttatgcgaagggccgtgtccctcgtgaccgactctactagtactttcctttctcagaccacctacgccttgattgaagccatcacggaatacacaaaggctgtttacacactgacttctctttatcgacagtacacctccttgctgggcaagatgaattcagaggaggaggacgaagtgtggcaagtgatcattggcgcgagagctgaaatgacctctaaacaccaagagtaccttaaactggagactacttggatgacagctgtggggctctctgagatggcagccgaggcggcctaccaaacgggcgcagaccaggctagtatcactgcaagaaatcatattcagctggtcaagctccaagtagaagaggtgcatcagctgtctcggaaggccgaaacgaagctggccgaggcccaaatagaggagcttagacagaaaacgcaagaggagggggaagaacgggccgaatccgaacaggaggcctatctgcgggaggat

SEQ ID NO: 202322 - DNA, 717 bp, Artificial Sequence
  derived and/or modified sequence
atggccgcgcttaagagctggctgagccggagcgtgacctcttttttccgctaccgccaatgcttgtgcgtccctgtggtagctaacttcaagaagcggtgcttttctgagctgatccggccgtggcacaagactgttaccatcggattcggggtaaccctctgtgcggtgccaatcgcccagaaatcagagccgcattcgttgtcgtcggaggcactcatgagaagagccgtgtcgctcgtcacggactcaaccagtactttcctttcacaaacgacttacgccctgattgaagccatcaccgaatacaccaaggctgtgtacaccctcacctccctgtaccggcagtacacttcactgctgggaaagatgaatagcgaggaagaggatgaagtgtggcaggtgattatcggggcaagggccgagatgacgagcaagcaccaggagtatctgaaactcgagactacttggatgaccgccgtgggactgtccgagatggcggcggaagctgcctaccagaccggcgcagaccaggcctcaatcaccgcccgcaaccatatccaactcgttaagctccaggtcgaagaggtgcaccaattgtcgcgcaaggcggagactaagctggcggaagcgcagatcgaagagttgcgccaaaaaactcaggaagaaggcgaggagcgagcagaatccgaacaagaagcatacctccgtgaagat

SEQ ID NO: 202323 - DNA, 717 bp, Artificial Sequence
  derived and/or modified sequence
atggcagcgctcaagtcgtggctgtcccgctcggttacttcgttcttccgctaccgccaatgtctctgcgtaccggtggtcgcgaacttcaagaagcgctgtttctcagagctgattaggccatggcacaaaactgtcaccatcggatttggagtgactctgtgcgccgtcccgattgcacaaaaatcagagccacatagcttgtcgtctgaggcgctgatgcgaagggccgtgtcgctcgtgaccgacagcacctcgacctttctttcacagacgacctacgcgctcatcgaggccatcactgaatatactaaggcagtatacaccctgaccagcttgtaccgccagtacacttcgctgctggggaagatgaattcagaggaagaagatgaagtgtggcaggtgatcatcggtgcccgcgcggaaatgacttcgaaacatcaagaatacctgaagttggagacgacctggatgaccgctgtcgggctgtctgagatggctgccgaagccgcctaccagaccggagccgaccaagcctcaatcaccgccagaaaccacattcagctcgtgaagctgcaggtggaagaagtgcaccaactgtcgcgcaaagcagaaactaagctggcagaagcacagatcgaggagctccggcaaaagactcaagaggagggagaagagcgcgcggagtcagaacaggaggcgtacctgcgggaggat

SEQ ID NO: 202324 - DNA, 717 bp, Artificial Sequence
  derived and/or modified sequence
atggcagcacttaaatcatggctgtcccggagcgtcacctcatttttcagatacaggcagtgcttgtgtgtgcccgtggtggcaaactttaagaagagatgtttttccgaacttattagaccatggcataagaccgtcactattggctttggagttactctttgtgccgtgccaatcgcccagaaatcagaaccacactccctttcaagcgaagctctgatgcggcgggccgtgtcgcttgtgactgactcgaccagcacttttctgtcgcagactacctacgcactcattgaggcaattaccgagtacactaaggcagtgtacaccctgacctcgctttaccgccaatacactagccttttgggtaaaatgaatagcgaggaagaagatgaagtctggcaagtgatcattggggcacgggctgagatgactagcaagcatcaggaatacctgaagctggaaactacctggatgaccgcagtgggactgtcagaaatggcagctgaagcagcataccagactggagccgatcaagcatctatcactgcacgaaaccacattcaactggtcaagctgcaagtcgaagaagtccatcagctctccaggaaggcagaaactaaactcgccgaagcacagatcgaagagcttcgacagaaaactcaggaggagggagaggaacgcgcggaatcagaacaggaggcatacttgagagaggac

SEQ ID NO: 202325 - DNA, 717 bp, Artificial Sequence
  derived and/or modified sequence
atggccgcgctgaagtcctggttgtccaggagcgttacttctttcttccgatacaggcagtgtctgtgcgtaccagtggtggccaattttaaaaagcgttgcttttcagagctgatccgtccctggcataagacagtgacaatagggttcggagttaccctctgtgccgtccccatcgcgcaaaaatccgagccacattctctctcttcagaggcccttatgagacgcgccgtgtccctggttacagattccacatccactttcctgagccagacgacttatgccctgattgaggcaatcacagaatacaccaaagcagtgtatactttgacaagtctctataggcagtacacttctctgctcggaaagatgaattctgaagaagaggacgaggtttggcaggtgattattggagctcgggctgagatgacaagcaagcatcaggagtatctgaaactggagactacctggatgacagctgttggactgtctgagatggcagccgaagcggcataccagaccggcgccgaccaggcttccataaccgcccggaaccacatacagcttgtgaagctccaggtcgaggaggtacatcagctttcgcgcaaggctgagacgaaactcgctgaggctcagattgaggagctgagacagaaaactcaggaggagggggaggaacgggccgagagcgagcaggaggcctacctgagagaggat

SEQ ID NO: 202326 - DNA, 717 bp, Artificial Sequence
  derived and/or modified sequence
atggccgcgcttaagtcttggctgagtcgatctgtcacgtcgtttttccggtacagacaatgcctctgtgtgcccgtggtcgctaactttaagaagagatgttttagcgaactgataagaccatggcataaaactgtgactatcggttttggagtgacgctgtgtgccgtgcctattgcccagaagagcgaaccgcattctctctcaagcgaggcactcatgcgtcgggcggtgagcttggtgactgattccaccagtaccttcctctcgcagacgacctacgcgctcatagaagcgattactgaatacacgaaggctgtttacactctgacttccctttataggcagtacacctcgcttcttggtaagatgaacagcgaagaagaggatgaagtgtggcaggtgattattggtgccagggcagaaatgacctcaaaacaccaggaataccttaaactcgagactacctggatgaccgcagtcgggctgtcagaaatggcagccgaagcggcctaccaaaccggagcagaccaggctagcatcactgcaaggaatcatattcaacttgtcaagctgcaagtcgaggaggtgcaccaattgtcacgcaaggcggaaaccaaacttgcagaagcacagatagaagagttgagacaaaagacccaagaagagggagaagaacgagccgaaagcgagcaggaggcatacctgcgggaggac

SEQ ID NO: 202327 - DNA, 717 bp, Artificial Sequence
  derived and/or modified sequence
atggccgcattgaaaagctggctgtccaggtcagtaacttccttcttccgctaccgccaatgcttatgcgtccccgtagtcgccaacttcaagaaaaggtgtttcagcgagctgattaggccttggcacaaaaccgtaacgatcgggttcggggtgaccctatgcgcagtcccaatagcccagaaaagcgaaccccattccctgtcctctgaagctcttatgcgcagagccgtttctctcgtcaccgattccacctcgacattcctgagtcagacgacatatgctctcatcgaggctataactgaatacacaaaggcggtgtacaccctaacatccctgtataggcagtacaccagcctactgggaaagatgaactccgaggaagaggatgaagtttggcaggtgatcattggcgctagggcggagatgacttccaagcaccaggaatacttgaaattggaaacaacctggatgacggccgtggggctgagcgagatggctgcagaggctgcataccagactggggctgaccaggccagtatcaccgctcgtaaccatatccagctcgttaagttacaggtagaggaggtgcatcagctcagccggaaagccgagactaagctggctgaggcacaaatcgaggagctcagacagaagacacaggaagagggagaagaaagagcggagtcagaacaggaggcctatcttagagaggac

SEQ ID NO: 202328 - DNA, 717 bp, Artificial Sequence
  derived and/or modified sequence
atggccgcactgaaatcctggttgtcgaggtccgtgacctccttcttcagatatcgccagtgcttgtgcgtcccagtggtcgccaactttaagaagcgctgtttctctgaactgattagaccctggcataaaacagtgaccatagggtttggggtgacactgtgcgcggtgccaatagcccagaagagtgagcctcacagtctgtcaagcgaagctctaatgcgacgggctgtctcattggtcaccgattccacatctaccttccttagtcagactacctacgctctcatcgaagctataacggagtataccaaagctgtttataccctaacatccctgtatcggcagtatacgtccctgttagggaaaatgaattcagaggaggaggacgaagtgtggcaggtgatcataggcgcacgagctgagatgaccagcaagcatcaggaatatctgaagctggagaccacatggatgactgctgtcggactgagtgagatggccgccgaagccgcctaccagaccggagcggatcaggcctccattactgctcggaatcacattcagctggtgaaactgcaggttgaggaggtacaccagctttcccgcaaggcggaaacgaagctggccgaggctcaaatcgaagagctccgacagaaaacccaggaagagggtgaggaacgagccgaaagcgaacaggaggcctaccttagggaggac

SEQ ID NO: 202329 - DNA, 717 bp, Artificial Sequence
  derived and/or modified sequence
atggccgctctcaaatcctggctgagccggtctgtgacatctttcttccgatacagacagtgcctctgcgtcccagtggtcgctaattttaagaaacggtgttttagcgagttgattaggccttggcacaagaccgtgaccattggatttggagtcacactctgcgcagttcctatcgcacagaagagcgaaccacactccctgagtagcgaagcactaatgcgaagggctgttagtctggttaccgattccacaagcacttttctaagccagactacctacgctctgatcgaagctatcacagagtacaccaaggccgtttatacactgacctcactatacaggcagtacacatccctgctagggaagatgaattccgaggaagaggatgaagtctggcaggtgataataggggctcgtgccgagatgacctcaaagcaccaggaataccttaagttggaaaccacatggatgaccgccgttgggctaagcgaaatggccgcagaagctgcttatcaaaccggggctgaccaggcttctataacagctcgcaatcatatccaattggtcaagttgcaggtggaagaggtgcatcagctcagtagaaaagctgaaaccaagctcgcagaggcccagatcgaagaactccgacaaaagacacaggaggagggggaagagagagctgaaagtgagcaggaggcttacctgagggaagac

SEQ ID NO: 202330 - DNA, 717 bp, Artificial Sequence
  derived and/or modified sequence
atggccgcgctgaaatcgtggctctcccggtccgtcacctccttcttccggtacagacagtgcctttgcgtgccggtggtggctaacttcaagaagagatgtttctccgagctcatccgtccgtggcacaaaactgtgaccatcggattcggagtgactctgtgtgctgtgccaatcgcacagaagagcgaaccgcactcactttcttcggaggcgttgatgcgccgcgccgtcagcctcgtgaccgactcaaccagcacctttctgtcacagaccacttacgcactcatcgaagccatcactgagtacaccaaggccgtgtacaccctgacttccctgtaccgccagtataccagcctgctgggaaagatgaactcagaagaagaagacgaagtctggcaggtgatcatcggagcccgcgccgagatgacttccaaacaccaagagtacctgaagctcgaaaccacctggatgacggcggtgggcctgtcagaaatggccgcggaggcggcctaccagactggagccgaccaagcgtcaatcactgcccgaaatcatatccaactggtgaagctgcaggtggaagaagtccatcaattgagcaggaaggcggaaactaagctggcggaggcgcaaatcgaggagttgcggcagaagactcaagaagaaggcgaagaacgcgccgagagcgaacaggaggcttacctccgggaagac

SEQ ID NO: 202331 - DNA, 717 bp, Artificial Sequence
  derived and/or modified sequence
atggcggcgctgaaaagctggctgagtagatctgtgacgagctttttccggtacaggcagtgtttgtgcgtgcccgtggtcgctaattttaaaaaaaggtgcttctctgagctaattaggccttggcacaaaaccgtgactatagggtttggcgtaaccctttgtgccgttccgatcgcccagaaatcagaaccacactctctgtccagcgaagccctcatgcgccgagcggtcagcttggtcacggattcaacaagcactttcttaagtcagaccacatatgccctaattgaggcaatcacagaatacaccaaagcggtgtatacactgacctccctatatcggcagtacacctccctgctgggaaaaatgaactccgaggaagaagatgaggtgtggcaggtcatcatcggcgctcgagctgagatgacatcaaagcatcaggagtatttgaagttggagaccacttggatgacggcagtgggactttctgagatggccgccgaggccgcttatcagacaggtgcggatcaagcatccatcaccgctaggaaccacatacaactggtaaaacttcaggtggaagaagtgcaccagctgtcaaggaaagctgagacaaagctggcagaagcccagattgaggagctcaggcagaaaacccaggaagaaggagaagaacgcgcagaaagtgagcaagaggcttatctccgggaagat

SEQ ID NO: 202332 - DNA, 717 bp, Artificial Sequence
  derived and/or modified sequence
atggcagccttgaagagctggctgtcgagaagcgtgactagcttctttaggtaccggcagtgcctgtgcgttccggtggtggcgaatttcaaaaagcgctgcttttccgaactgatccggccctggcataaaaccgttaccatcggcttcggagtcactctgtgtgcagtcccgattgctcagaagtcagaaccgcattcattgtcatccgaggcgctcatgcgccgggctgtctccctcgtcaccgacagcacttctacgttcctttcgcagactacgtacgcgctgatcgaagcgatcaccgaatacactaaagccgtgtacacgctgacctcgctgtacagacagtacacgtcactgctcggcaagatgaatagcgaagaggaggacgaagtctggcaggtgatcatcggtgcgagagcggagatgacctcgaaacatcaggagtatcttaagctggaaacgacttggatgacggcagtgggactctccgagatggccgcggaggccgcataccagactggggccgatcaggcgtcaattacggcgagaaatcacatccaacttgtgaagctgcaagtggaggaagtgcaccagctctcccggaaggccgagacgaagctcgctgaagcccagatcgaagaactgaggcaaaagacgcaggaagagggagaagagcgagcagaatcggaacaagaggcatacttgcgggaggat

SEQ ID NO: 202333 - DNA, 717 bp, Artificial Sequence
  derived and/or modified sequence
atggcggcgctaaaatcgtggttatcgcgatcggtaacgtcgttttttcgatatcgacaatgtttatgtgtaccggttgtagcgaattttaaaaaacgttgtttttcggaattaatacgaccgtggcataaaacggttacgataggttttggtgttacgctatgtgcggttccgatagcgcaaaaatcggaaccgcattcgctatcgtcggaagcgctaatgcgtcgtgcggtttcgttagtaacggattcgacgtcgacgtttctatcgcaaacgacgtatgcgttaatagaagcgataacggaatatacgaaagcggtatatacgttaacgtcgttatatcgacaatatacgtcgttattaggtaaaatgaattcggaagaagaagatgaagtttggcaagtaataataggtgcgcgtgcggaaatgacgtcgaaacatcaagaatatttaaaattagaaacgacgtggatgacggcggttggtctatcggaaatggcggcggaagcggcgtatcaaacgggtgcggatcaagcgtcgataacggcgcgaaatcatatacaactagtaaaactacaagttgaagaagtacatcaattatcgcgtaaagcggaaacgaaactagcggaagcgcaaatagaagaattacgtcaaaaaacgcaagaagaaggtgaagaacgagcggaatcggaacaagaagcgtatctacgagaagat

SEQ ID NO: 202334 - DNA, 717 bp, Artificial Sequence
  derived and/or modified sequence
atggcggcgttgaagagctggctttcaaggagcgtcacgtcattttttaggtaccgtcaatgcttatgcgtcccagttgttgctaactttaaaaagagatgcttttcagaactcatacgaccatggcacaaaacagtgacaatcggttttggagtaacactgtgtgctgtgccgatcgctcagaaatctgaaccgcattccctcagctcagaggctcttatgcgccgggcggtgtccttagtcaccgattcaacgtcgacattcctttcacagacgacttacgctctaatcgaggctatcacagaatatacaaaggcagtttataccctgacttctctttatcggcagtatacatctctcctgggcaaaatgaacagtgaagaggaggatgaagtctggcaggttataatcggtgctagggcggaaatgacgagcaagcatcaggaatacctgaaacttgagactacttggatgacagcggtcggtctctctgaaatggcagcagaagccgcctaccagactggtgccgaccaagcctcgattactgcacgtaatcatattcaattggttaaactgcaagtagaggaagttcatcagttatccaggaaagccgaaaccaaattggctgaggctcaaatagaggagcttagacaaaagacgcaggaggagggcgaagaaagagcagaatcagaacaagaggcatatctccgggaggac

SEQ ID NO: 202335 - DNA, 717 bp, Artificial Sequence
  derived and/or modified sequence
atggccgctctaaagagctggctcagtaggtccgtaacatccttttttcgatatcgacagtgcctctgcgtgcctgtggtcgccaacttcaaaaagcgatgctttagcgaactgattagaccttggcacaagacggtgacaatcggcttcggagtgactctgtgtgcagtccctatcgctcaaaaatcggaacctcattctctgtcctcagaagcgctgatgaggcgcgctgtatctctggtaacagactctacttccaccttcctcagtcagaccacatatgccctaattgaggccattacggagtacaccaaggcggtctatacattaacatccctgtataggcaatatacaagtttgctgggaaaaatgaattctgaggaggaggatgaagtgtggcaagtaatcatcggagcaagagcagagatgacatccaaacatcaggaatacctgaagctcgaaaccacatggatgaccgctgtgggactgtcggagatggctgcggaggccgcatatcaaaccggcgcagaccaggcctccattacagcgcgcaaccacattcagctggttaagctgcaagtggaggaggtgcatcaactctcccgcaaggctgagactaagcttgccgaggcgcagatcgaggaattgagacagaagacccaggaggagggggaggagagggcagagtctgaacaggaggcctacctgcgggaggat

SEQ ID NO: 202336 - DNA, 717 bp, Artificial Sequence
  derived and/or modified sequence
atggccgcgctgaagtcctggctctcccggtcggtgacttcctttttccgatatcgccagtgtctctgtgtgcctgtcgttgccaatttcaagaagcggtgcttctcggagcttatccggccttggcataagaccgtgactatcggttttggagtgaccctgtgcgccgtcccaatcgcccagaaatcagaaccgcatagcctgagctcggaggcgctcatgcgccgggcagtctcgctggtcactgatagcacgagcaccttcctgtcgcagaccacctatgctctgattgaagctatcaccgaatacaccaaagcagtgtatactctgacctcgctgtaccgacagtacacctccttgcttggaaagatgaactcggaagaggaggatgaagtctggcaggtcattatcggtgcacgtgcagagatgacgtcaaagcaccaggaatacctcaagctggagacgacgtggatgaccgccgtgggcctgagcgaaatggctgctgaagcggcataccagactggggctgatcaggcctcaatcaccgcccgcaatcacatccaacttgtgaagctccaagtggaagaagtccatcaactctctcgaaaggccgaaactaaattggccgaagcgcagattgaagaattgagacagaaaactcaagaggagggggaggaacgcgcagagtcggaacaagaagcatacctgagagaggac

SEQ ID NO: 202337 - DNA, 717 bp, Artificial Sequence
  derived and/or modified sequence
atggccgccctcaaatcttggctgtctcggagtgtaacatcgttcttccgataccggcaatgtttgtgcgtgccagtggttgccaacttcaaaaaacgctgtttcagcgaactcatcagaccgtggcacaagactgtgactatcggatttggcgtcacattatgtgcggtgcccatcgcccagaaatcagaaccccatagcttgagtagtgaagctctcatgcggcgtgcagtaagcctggttaccgactccacaagcacttttttaagccaaacgacctatgcccttattgaggccatcacggagtataccaaagccgtctataccctgaccagtctgtaccgtcaatacactagcctcttagggaaaatgaactcggaggaggaggatgaagtctggcaggtcatcatcggagcaagagccgagatgacgagcaaacaccaggaatatctgaaacttgagacaacttggatgactgctgtcgggctgtctgaaatggccgccgaggccgcgtatcagaccggcgccgatcaggcctctattaccgcccgcaatcacatccagctcgttaagctgcaggtggaggaggtacatcagttgtctagaaaggctgagacaaaattggcagaggcgcaaatcgaggagctgagacagaagacgcaggaggaaggagaggagagggcagagtccgagcaggaagcttatctgcgtgaggac

SEQ ID NO: 202338 - DNA, 717 bp, Artificial Sequence
  derived and/or modified sequence
atggctgctctgaaatcgtggctgtcccgttccgtgacttcattctttaggtaccgtcaatgcctgtgcgtccccgtggtggcaaatttcaagaagcgatgtttttccgaattgatccgaccctggcataaaactgtgaccatcgggtttggggtcactctttgtgcggtcccaattgcacagaagtccgaacctcactcactctcgtccgaggcactgatgcgccgtgccgtgtcactggtcactgactcaacctcgactttcctgtcccagaccacctacgcattgattgaggcaattaccgaatacactaaggccgtctacacccttacgtcgctttaccgccagtacacctccctgctcggtaagatgaactcagaggaagaagatgaagtctggcaggtgattataggagcaagagcggaaatgacttcaaagcatcaagagtacttgaaattggaaaccacttggatgaccgcagtgggcctgtcggaaatggcagcagaagcagcctaccaaaccggggccgatcaggcatcgatcacggctcggaaccacatacagttggtgaagctgcaggtggaggaggtgcatcaactcagtagaaaagctgaaaccaagttggcggaggcacaaattgaagaacttcgacaaaagactcaggaggaaggtgaagagcgcgcagagagcgaacaggaagcctatctcagagaagat

SEQ ID NO: 202339 - DNA, 717 bp, Artificial Sequence
  derived and/or modified sequence
atggcggcgttaaagtcctggctctcgcgtagtgttacctcctttttccggtacaggcaatgcctctgcgtacctgttgtcgccaactttaagaagagatgcttctcggagcttatccgtccctggcacaagacagtgaccattggtttcggtgttaccctgtgtgctgtgccaatcgcccagaagtcggagccccactccctttcatcggaggctctgatgcgccgcgctgtttctctcgttaccgatagcacttctacgttcctgtcacagacaacatatgctctgatcgaggcgatcaccgaatacactaaggctgtctacactctcacctccttgtatcgtcagtacaccagtctactgggtaagatgaactccgaggaagaggacgaagtgtggcaggttatcattggtgcccgggctgagatgacctccaagcaccaggagtacctgaaactcgagactacctggatgaccgcggtcggtctcagcgagatggccgccgaggcggcgtatcaaaccggtgcagatcaggcatctatcactgcgcgcaaccatatccagcttgtcaagctccaggtggaggaggtgcatcagctgtcccgaaaggcagagaccaaactggctgaggcccagatcgaggaactccggcagaagactcaagaggagggcgaggaaagggctgagtccgagcaggaagcctatcttcgggaggac

SEQ ID NO: 202340 - DNA, 717 bp, Artificial Sequence
  derived and/or modified sequence
atggcggcccttaagagctggctctcccggtcagtcacttcctttttcaggtacagacaatgcctttgtgtcccagtggtggcgaactttaagaaaagatgcttctccgaactcatccggccttggcataagaccgtgaccatcggcttcggtgtgaccctctgcgcggttcctatcgcgcagaaatcggagccgcactcactgtccagcgaagcattgatgcgccgcgcagttagcctcgtgactgactcaacgagcactttcctgtcgcaaactacctacgccctgatcgaggctattacggagtacaccaaggccgtgtacactcttacctcactttaccgacagtacacctccctgctgggtaaaatgaatagcgaggaggaggacgaagtgtggcaggtgatcatcggagcgcgcgcagagatgacctcgaaacaccaggagtaccttaaactggaaaccacctggatgactgccgtcggcctgtcggagatggccgccgaggctgcttaccagactggtgccgaccaggcaagcattactgccagaaatcacatccagctggtcaagctccaagtggaagaagtgcatcaactcagccgcaaggctgaaactaaactggctgaagcgcagatcgaggaactgcgccagaaaacccaggaggaaggagaggagcgagccgagagcgagcaagaggcctacctcagggaagat

SEQ ID NO: 202341 - DNA, 717 bp, Artificial Sequence
  derived and/or modified sequence
atggctgcactgaagtcatggcttagccgatctgttaccagcttcttccgatatcggcaatgcctttgcgtgccagtggtggccaacttcaagaaaaggtgtttttctgaactcattcggccttggcacaaaacagtcacaatcgggttcggtgtcacactgtgtgctgttccaattgcacaaaaatccgaaccgcactccctgagttcagaggccctcatgcgccgcgccgtcagcctcgtaacagattcaactagtacgtttctcagccagacaacttatgcactgattgaggcaattactgaatacacaaaggcagtctacaccctgacctccctctacaggcagtacacttcattgcttggcaagatgaacagtgaggaggaagatgaggtgtggcaggttattataggtgcaagggccgagatgacatctaagcatcaggagtacttgaagcttgagacgacctggatgaccgccgtgggactgagtgagatggccgcagaagctgcttaccagacaggcgccgatcaggcctccataactgctcgcaatcacatccagctggtcaagctccaggtcgaggaggtgcaccagctgtctcgcaaggctgagaccaagcttgcggaagcccagatcgaagaactgcggcagaaaactcaggaggagggagaagagcgggcagaatcagagcaggaggcttacctgagggaagac

SEQ ID NO: 202342 - DNA, 717 bp, Artificial Sequence
  derived and/or modified sequence
atggccgcgctgaagtcatggcttagccgcagcgtgacctcgttttttcggtacaggcagtgtctgtgcgttcctgtggtcgccaatttcaaaaagaggtgcttttccgaattgataaggccgtggcataagaccgtgactattggttttggtgttaccctctgtgccgtgccaatcgcacagaagtcggagcctcattccctgtcatcagaagcacttatgagaagagcagtttcccttgtgaccgactcaacttccaccttcctgtcccagaccacctacgctcttattgaagccattaccgaatacactaaggcagtctacacgctgacctcgctctaccgtcaatataccagccttctgggcaagatgaactcggaagaggaagatgaagtctggcaagtgataattggcgcaagagccgaaatgacctccaagcatcaagagtacttgaagttggagactacctggatgactgcagtcggtctttccgagatggccgcagaggcagcataccagaccggagcagatcaggcaagcatcaccgcgaggaaccacatccaactggtgaaacttcaggtggaggaagtgcaccaactgtcgagaaaggcagaaactaagctggccgaagcgcaaattgaagaactgcggcaaaagactcaagaggaaggggaggagagggccgaatcagaacaagaggcgtacctgcgggaagat

SEQ ID NO: 202343 - DNA, 717 bp, Artificial Sequence
  derived and/or modified sequence
atggctgccctgaaatcatggctgtcccgcagcgtgacctccttttttcgctacagacagtgcctgtgtgtccctgtggtggccaatttcaagaaaagatgcttttcggagcttatccgcccctggcataagactgtcaccataggctttggtgtgactctgtgtgccgtccctattgcacagaaatcggaaccacactctttgagctcggaagcgctcatgcgtagggctgtgtcgcttgtcaccgactcaacttccacctttttgtcacagactacttacgccttgatcgaagccatcaccgagtacaccaaggccgtctacaccctgacctcactctaccgccagtacactagcctgctgggaaaaatgaacagtgaggaagaggacgaagtctggcaagtgattattggagccagagcggaaatgacctcaaaacatcaggaataccttaagttggagacgacctggatgactgccgtggggctgtccgaaatggcagcagaagcagcttatcagaccggagcggatcaggcatcaatcactgcaagaaaccacattcaactcgtcaagctgcaagtggaagaggtgcatcagctgtcgcgcaaagccgagactaagctggcagaggcacaaatcgaggaactccgccaaaaaacccaagaagaaggtgaagaacgggcagaatcagagcaagaagcctacctgagagaagat

SEQ ID NO: 202344 - DNA, 717 bp, Artificial Sequence
  derived and/or modified sequence
atggccgctttgaagtcttggctcagccggtctgtaacctctttctttcgttaccgtcaatgcctgtgtgttcctgtggttgcgaattttaaaaagaggtgttttagcgaactcataaggccatggcataaaactgtcactataggttttggtgtgaccctgtgcgcagtgcccatcgcgcaaaagtctgagccccactccctttctagcgaggctttaatgcgaagagccgtttcgctggtgaccgacagtactagtacttttctctcccaaactacttacgcactgattgaagctatcactgagtacactaaagccgtatatacgttgactagcttatacagacagtacacatcactactgggtaagatgaattcagaagaagaggacgaggtctggcaggtcattataggcgctagagcggagatgacctccaaacaccaggagtacctgaagctcgaaaccacatggatgacagcagtcgggttatcagagatggccgcggaggcagcctatcagaccggcgcagatcaagccagcataaccgccagaaaccatatccaattggtgaaactgcaagtggaagaagtgcatcagctttctcgcaaggcggagactaagcttgccgaagcccagattgaagaactaaggcagaagacccaggaagagggcgaagaaagagccgagtccgaacaggaggcctacctcagggaggat

SEQ ID NO: 202345 - DNA, 717 bp, Artificial Sequence
  derived and/or modified sequence
atggcagccctgaaatcatggcttagcagatcggttacctccttcttccggtaccgtcagtgtctgtgtgtgccagtggtcgcgaacttcaagaagagatgtttcagcgagttgatccgtccctggcataaaactgtcaccatcggatttggtgtgaccctttgtgcagtgcctatcgcacagaagtcggagccgcactcgctctcgtcggaagccctgatgcgaagagccgtgtcccttgtgactgactcgacttcgaccttcctctcgcaaaccacctacgcgctgattgaggcgatcactgaatacaccaaggccgtctacactctcacctccctgtaccggcaatacacttcgctcctgggcaagatgaatagcgaagaagaggacgaggtgtggcaagtgattattggggcacgggctgagatgacctccaagcaccaagagtatctgaagttggagacgacctggatgactgcagtcggtcttagtgagatggcagccgaggcagcctaccaaactggtgcggatcaggcatctatcacggcccggaatcatattcagctggtgaagttgcaggttgaagaagtgcatcaactttcaaggaaggccgaaaccaaactggcagaagcgcagatcgaggagcttagacagaaaacccaggaagaaggtgaggaaagagcagagagcgaacaagaagcatacctcagggaggat

SEQ ID NO: 202346 - DNA, 717 bp, Artificial Sequence
  derived and/or modified sequence
atggcggccctgaaatcatggctctctcggtccgtcacctctttcttccggtacaggcagtgcctttgcgtcccggttgtagcgaacttcaagaagaggtgtttttcggagttgatcagaccatggcacaaaaccgtgacgatcggatttggcgtcaccttgtgcgccgtcccaatcgcccagaagtcggagccgcacagcctgtcgtcagaggcactgatgcgcagagcagtcagtttggtgaccgattccactagcaccttcctgtcgcagactacttacgctcttatcgaggccatcactgagtacaccaaggcagtgtacaccctgactagtctgtatagacaatatacttcactgcttggaaagatgaactccgaagaagaggacgaagtgtggcaggtgatcatcggggcgagagccgaaatgacctctaagcatcaggagtaccttaaactggaaaccacttggatgactgcagtcggactcagcgaaatggcggccgaggctgcataccaaacgggtgcagatcaggctagtattactgcccgaaatcacattcaactcgtgaagctgcaagtcgaagaagtgcatcaactctcgcgcaaggccgagacgaaactggcggaggcgcagatcgaagaactgcgtcaaaagacccaggaagagggagaggaacgggccgaatcagaacaagaagcctacctgcgggaggac

SEQ ID NO: 202347 - DNA, 717 bp, Artificial Sequence
  derived and/or modified sequence
atggctgcactgaagtcttggcttagccgcagtgtcactagcttcttcaggtataggcagtgtctgtgcgtgccagtggtagcaaatttcaaaaaaagatgtttttccgagctaatacggccctggcataagacggtgacgatcgggttcggagtcaccctatgtgcagttcccatagctcagaaaagcgaaccccactcgttgtcgtccgaagcattgatgcgcagagccgtttctctggtaacagacagcactagtacgtttctcagccagacaacctatgccctcatcgaggccataaccgagtacacaaaggcagtgtataccttgacaagcttgtatcgacagtatacctctctgctaggcaagatgaactcggaagaggaggacgaggtgtggcaagttatcattggcgcacgcgccgaaatgactagcaagcaccaggaatacctcaagctcgaaacgacttggatgaccgccgttggcctgtcagagatggctgccgaagcagcttaccagacaggggctgatcaagcatctatcaccgcccggaaccacattcagctcgtaaagttgcaggttgaggaggtgcaccagctctctcgcaaggccgagacaaaactcgccgaagcccagattgaagagctgagacagaaaactcaggaggaaggcgaagagcgcgctgaaagcgaacaagaggcctacctcagggaagac

SEQ ID NO: 202348 - DNA, 717 bp, Artificial Sequence
  derived and/or modified sequence
atggccgccctgaagagctggctgagccgcagcgtgaccagcttcttccgctaccgccagtgcctgtgcgtgcccgtggtggccaacttcaagaagcgctgcttcagcgagctgatccgcccctggcacaagaccgtgaccatcggcttcggcgtgaccctgtgcgccgtgcccatcgcccagaagagcgagccccacagcctgagcagcgaggccctgatgcgccgcgccgtgagcctggtgaccgacagcaccagcaccttcctgagccagaccacctacgccctgatcgaggccatcaccgagtacaccaaggccgtgtacaccctgaccagcctgtaccgccagtacaccagcctgctgggcaagatgaacagcgaggaggaggacgaggtgtggcaggtgatcatcggcgcccgcgccgagatgaccagcaagcaccaggagtacctgaagctggagaccacctggatgaccgccgtgggcctgagcgagatggccgccgaggccgcctaccagaccggcgccgaccaggccagcatcaccgcccgcaaccacatccagctggtgaagctgcaggtggaggaggtgcaccagctgagccgcaaggccgagaccaagctggccgaggcccagatcgaggagctgcgccagaagacccaggaggagggcgaggagcgcgccgagagcgagcaggaggcctacctgcgcgaggac

SEQ ID NO: 202349 - DNA, 883 bp, Artificial Sequence
  derived and/or modified sequence
gggaaataagagagaaaagaagagtaagaagaaatataagagccaccatggcggctctgaagagttggctgtcgcgcagcgtaacttcattcttcaggtacagacagtgtttgtgtgttcctgttgtggctaactttaagaagcggtgtttctcagaattgataagaccatggcacaaaactgtgacgattggctttggagtaaccctgtgtgcggttcctattgcacagaaatcagagcctcattcccttagtagtgaagcattgatgaggagagcagtgtctttggtaacagatagcacctctacctttctctctcagaccacatatgcgttgattgaagctattactgaatatactaaggctgtttataccttaacttctctttaccgacaatatacaagtttacttgggaaaatgaattcagaggaggaagatgaagtgtggcaggtgatcataggagccagagctgagatgacttcaaaacaccaagagtacttgaagctggaaaccacttggatgactgcagttggtctttcagagatggcagcagaagctgcatatcaaactggcgcagatcaggcctctataaccgccaggaatcacattcagctggtgaaactgcaggtggaagaggtgcaccagctctcccggaaagcagaaaccaagctggcagaagcacagatagaagagctccgtcagaaaacacaggaggaaggggaggagcgggctgagtcggagcaggaggcctacctgcgtgaggattgataataggctggagcctcggtggccatgcttcttgccccttgggcctccccccagcccctcctccccttcctgcacccgtacccccgtggtctttgaataaagtctgagtgggcggc

SEQ ID NO: 202350 - DNA, 906 bp, Artificial Sequence
  derived and/or modified sequence
taatacgactcactatagggaaataagagagaaaagaagagtaagaagaaatataagagccaccatggcggctctgaagagttggctgtcgcgcagcgtaacttcattcttcaggtacagacagtgtttgtgtgttcctgttgtggctaactttaagaagcggtgtttctcagaattgataagaccatggcacaaaactgtgacgattggctttggagtaaccctgtgtgcggttcctattgcacagaaatcagagcctcattcccttagtagtgaagcattgatgaggagagcagtgtctttggtaacagatagcacctctacctttctctctcagaccacatatgcgttgattgaagctattactgaatatactaaggctgtttataccttaacttctctttaccgacaatatacaagtttacttgggaaaatgaattcagaggaggaagatgaagtgtggcaggtgatcataggagccagagctgagatgacttcaaaacaccaagagtacttgaagctggaaaccacttggatgactgcagttggtctttcagagatggcagcagaagctgcatatcaaactggcgcagatcaggcctctataaccgccaggaatcacattcagctggtgaaactgcaggtggaagaggtgcaccagctctcccggaaagcagaaaccaagctggcagaagcacagatagaagagctccgtcagaaaacacaggaggaaggggaggagcgggctgagtcggagcaggaggcctacctgcgtgaggattgataataggctggagcctcggtggccatgcttcttgccccttgggcctccccccagcccctcctccccttcctgcacccgtacccccgtggtctttgaataaagtctgagtgggcggctctaga

SEQ ID NO: 202351 - RNA, 883 nt, Artificial Sequence
  derived and/or modified sequence
gggaaauaagagagaaaagaagaguaagaagaaauauaagagccaccauggcggcucugaagaguuggcugucgcgcagcguaacuucauucuucagguacagacaguguuuguguguuccuguuguggcuaacuuuaagaagcgguguuucucagaauugauaagaccauggcacaaaacugugacgauuggcuuuggaguaacccugugugcgguuccuauugcacagaaaucagagccucauucccuuaguagugaagcauugaugaggagagcagugucuuugguaacagauagcaccucuaccuuucucucucagaccacauaugcguugauugaagcuauuacugaauauacuaaggcuguuuauaccuuaacuucucuuuaccgacaauauacaaguuuacuugggaaaaugaauucagaggaggaagaugaaguguggcaggugaucauaggagccagagcugagaugacuucaaaacaccaagaguacuugaagcuggaaaccacuuggaugacugcaguuggucuuucagagauggcagcagaagcugcauaucaaacuggcgcagaucaggccucuauaaccgccaggaaucacauucagcuggugaaacugcagguggaagaggugcaccagcucucccggaaagcagaaaccaagcuggcagaagcacagauagaagagcuccgucagaaaacacaggaggaaggggaggagcgggcugagucggagcaggaggccuaccugcgugaggauugauaauaggcuggagccucgguggccaugcuucuugccccuugggccuccccccagccccuccuccccuuccugcacccguacccccguggucuuugaauaaagucugagugggcggc

SEQ ID NO: 202352 - protein, 323 aa, Artificial Sequence
  derived and/or modified sequence
MNASCCLPSVQPTLPNGSEHLQAPFFSNQSSSAFCEQVFIKPEVFLSLGIVSLLENILVILAVVRNGNLHSPMYFFLCSLAVADMLVSVSNALETIMIAIVHSDYLTFEDQFIQHMDNIFDSMICISLVASICNLLAIAVDRYVTIFYALRYHSIMTVRKALTLIVAIWVCCGVCGVVFIVYSESKMVIVCLITMFFAMMLLMGTLYVHMFLFARLHVKRIAALPPADGVAPQQHSCMKGAVTITILLGVFIFCWAPFFLHLVLIITCPTNPYCICYTAHFNTYLVLIMCNSVIDPLIYAFRSLELRNTFREILCGCNGMNLG

SEQ ID NO: 202353 - DNA, 972 bp, Artificial Sequence
  derived and/or modified sequence
atgaacgccagctgctgcctgcccagcgtgcagcccaccctgcccaacggcagcgagcacctgcaggcccccttcttcagcaaccagagcagcagcgccttctgcgagcaggtgttcatcaagcccgaggtgttcctgagcctgggcatcgtgagcctgctggagaacatcctggtgatcctggccgtggtgagaaacggcaacctgcacagccccatgtacttcttcctgtgcagcctggccgtggccgacatgctggtgagcgtgagcaacgccctggagaccatcatgatcgccatcgtgcacagcgactacctgaccttcgaggaccagttcatccagcacatggacaacatcttcgacagcatgatctgcatcagcctggtggccagcatctgcaacctgctggccatcgccgtggacagatacgtgaccatcttctacgccctgagataccacagcatcatgaccgtgagaaaggccctgaccctgatcgtggccatctgggtgtgctgcggcgtgtgcggcgtggtgttcatcgtgtacagcgagagcaagatggtgatcgtgtgcctgatcaccatgttcttcgccatgatgctgctgatgggcaccctgtacgtgcacatgttcctgttcgccagactgcacgtgaagagaatcgccgccctgccccccgccgacggcgtggccccccagcagcacagctgcatgaagggcgccgtgaccatcaccatcctgctgggcgtgttcatcttctgctgggcccccttcttcctgcacctggtgctgatcatcacctgccccaccaacccctactgcatctgctacaccgcccacttcaacacctacctggtgctgatcatgtgcaacagcgtgatcgaccccctgatctacgccttcagaagcctggagctgagaaacaccttcagagagatcctgtgcggctgcaacggcatgaacctgggctag

SEQ ID NO: 202354 - DNA, 972 bp, Artificial Sequence
  derived and/or modified sequence
atgaatgcatcgtgctgcctgccctctgttcagccaactctgcccaacggatcagaacacttgcaagccccctttttttctaatcagtccagttctgccttctgcgaacaggtgtttatcaaacccgaggtcttcctcagcctcggcattgtcagtcttctcgaaaatatattggtgatcctcgcagttgtacggaatggaaatctccacagcccgatgtacttctttctttgcagtctggccgtcgctgatatgctcgtgtccgtaagcaatgccctggaaaccattatgatcgcaatagtgcactcggattacctcaccttcgaggatcagttcattcagcacatggacaatatctttgatagcatgatttgcatctctctggtagcatcaatttgcaatctcctcgccattgctgttgacagatatgtcaccatcttctacgctctccgctaccacagtatcatgacagttcgcaaagcgcttacactgatcgtagcaatctgggtgtgctgtggagtctgcggggtagtcttcatcgtctatagcgaaagcaaaatggtcatcgtgtgcttgataactatgtttttcgctatgatgctgcttatgggaacactgtatgtgcatatgttcctgttcgctcggctgcacgtgaaacggatcgcagcactacccccagccgacggtgtagctccgcaacaacacagctgcatgaagggggccgtgactatcacaatcttacttggagtgttcatcttttgctgggctcctttctttttgcaccttgtgctaattatcacctgccccaccaatccatactgtatttgctacacagcacacttcaacacttacttagttttaattatgtgtaactccgttatcgaccccttgatctacgctttccgatctttagaactgagaaatacatttcgagagatcctgtgtggctgtaatgggatgaacctggggtag

SEQ ID NO: 202355 - DNA, 972 bp, Artificial Sequence
  derived and/or modified sequence
atgaatgccagctgctgcctgcccagcgtgcagcccaccctgcccaacggcagcgagcacctgcaggcccccttcttcagcaaccagagcagcagcgccttctgtgagcaggtgttcatcaagccagaggtgttcctgagcctgggcatcgtgtccctgctggagaacatcctggtgatcctggccgtggtgagaaatggaaacctgcacagccccatgtacttcttcctgtgcagcctggccgtggccgacatgctggtgtctgtgtccaatgccctggagaccatcatgattgccatcgtgcacagcgactacctgacctttgaggaccagttcatccagcacatggacaacatctttgacagcatgatctgcatcagcctggtggccagcatctgcaacctgctggccatcgctgtggacagatatgtgaccatcttctacgccctgcgctaccacagcatcatgacagtgaggaaggccctgaccctgattgtggccatctgggtgtgctgcggcgtgtgtggggtggtgttcatcgtgtacagcgagagcaagatggtgattgtgtgcctgatcaccatgttctttgccatgatgctgctgatgggcaccctgtatgtgcacatgttcctgtttgcccggctgcacgtgaagagaattgctgccctgcccccagcagatggagtggccccccagcagcacagctgcatgaagggagctgtgaccatcaccatcctgctgggcgtcttcatcttctgctgggcccccttcttcctgcacctggtgctgatcatcacctgccccaccaacccctactgcatctgctacacagcccacttcaacacctacctggtgctgatcatgtgcaacagcgtcatcgaccccctcatctatgccttccgcagcctggagctgaggaacaccttccgggagatcctgtgtggctgcaatggcatgaacctgggctag

SEQ ID NO: 202356 - DNA, 972 bp, Artificial Sequence
  derived and/or modified sequence
atgaacgccagctgctgcctgcccagcgtgcagcccaccctgcccaatgggagcgaacacctgcaggccccctttttctcaaatcagagtagcagtgctttctgcgagcaggtattcatcaaaccagaggtgtttctatcactgggcattgtgagcctgcttgaaaacatcctggtaatcctcgccgtcgttaggaacggaaacctccattccccaatgtacttctttctgtgctctcttgctgtcgccgacatgctagtgtccgtttcgaacgcattagaaactatcatgatcgcaattgtccatagtgattacttaacttttgaggaccagtttattcaacacatggataacatctttgacagcatgatctgcattagcttggtggcgtccatatgtaacctcctggctatcgctgtggaccgatacgtgaccatattctacgccctgcgatatcatagcatcatgactgtgcgaaaagcactgacactgattgtggctatttgggtctgttgcggagtatgtggggtcgtcttcatagtatatagtgagagtaagatggtcattgtctgtctgatcactatgttcttcgccatgatgctgcttatgggtaccctctatgtgcacatgtttctgttcgcccgacttcatgtcaaacggattgcggcactgccacccgccgacggggtcgcccctcaacagcacagctgcatgaagggcgccgtcactattactatcctgctcggggtatttattttctgttgggctcctttcttcctccatctagttctgattatcacctgtcccactaatccctattgtatctgttatacagcacacttcaacacgtacctcgtgctgatcatgtgtaactcagtgattgatccgctgatctacgccttcaggagcctggaactgcgaaatactttccgagagatcctgtgtggctgcaacgggatgaatctcggctag

SEQ ID NO: 202357 - DNA, 972 bp, Artificial Sequence
  derived and/or modified sequence
atgaatgcatcatgttgtcttccctcagtccagccaacccttcctaacggtagcgagcatctgcaggccccattcttttccaaccagagctctagcgcattctgcgagcaggtcttcatcaaaccagaggtgtttctgtccctaggcatagtgtcactcctggagaacatcttggtaatacttgccgtcgttcgcaacggcaacttgcattctcccatgtacttcttcctctgttccctcgccgtggccgatatgctggtatcagtgagtaacgccctggaaactattatgatcgccatcgtccacagcgattacctgacattcgaagatcagttcattcagcacatggataatatttttgatagcatgatctgtatatctctcgtcgcttctatctgtaaccttttggcgattgctgtcgatagatacgtgaccatcttctatgctttacgttatcactcaatcatgacagtgaggaaggcactgactctgatcgtggccatttgggtatgctgtggtgtgtgcggtgtggtctttatcgtttatagcgaaagcaagatggtcatagtttgtctgattaccatgtttttcgctatgatgttgcttatggggacgctgtatgttcatatgtttttgtttgccaggctgcacgtgaaacggattgccgcactgcctccagccgacggggttgcccctcaacaacactcgtgcatgaaaggcgctgtgaccattacgattcttctcggcgttttcatcttctgttgggccccttttttcctgcatcttgtgttgataattacttgtcccactaacccctattgcatctgctacactgcccacttcaatacctatctggtccttatcatgtgcaatagtgtcatagaccccctcatttacgcctttcgatccttagaactccgaaatacctttcgggagatcctgtgtggctgtaatggcatgaacctcggatag

SEQ ID NO: 202358 - DNA, 1084 bp, Artificial Sequence
  derived and/or modified sequence
aatgagcatccaaaagacgtatctggagggagattttgtctttcctgtgagcagcagcagcttcctacggaccctgctggagccccagctcggatcagcccttctgacagcaatgaatgcttcgtgctgcctgccctctgttcagccaacactgcctaatggctcggagcacctccaagcccctttcttcagcaaccagagcagcagcgccttctgtgagcaggtcttcatcaagcccgaggttttcctgtctctgggcatcgtcagtctgctggaaaacatcctggttatcctggccgtggtcaggaacggcaacctgcactccccgatgtacttctttctctgcagcctggcggtggccgacatgctggtaagtgtgtccaatgccctggagaccatcatgatcgccatcgtccacagcgactacctgaccttcgaggaccagtttatccagcacatggacaacatcttcgactccatgatctgcatctccctggtggcctccatctgcaacctcctggccatcgccgtcgacaggtacgtcaccatcttttacgcgctccgctaccacagcatcatgaccgtgaggaaggccctcaccttgatcgtggccatctgggtctgctgcggcgtctgtggcgtggtgttcatcgtctactcggagagcaaaatggtcattgtgtgcctcatcaccatgttcttcgccatgatgctcctcatgggcaccctctacgtgcacatgttcctctttgcgcggctgcacgtcaagcgcatagcagcactgccacctgccgacggggtggccccacagcaacactcatgcatgaagggggcagtcaccatcaccattctcctgggcgtgttcatcttctgctgggcccccttcttcctccacctggtcctcatcatcacctgccccaccaacccctactgcatctgctacactgcccacttcaacacctacctggtcctcatcatgtgcaactccgtcatcgacccactcatctacgctttccggagcctggaattgcgcaacacctttagggagattctctgtggctgcaacggcatgaacttgggatag

SEQ ID NO: 202359 - protein, 173 aa, Artificial Sequence
  derived and/or modified sequence
WGPNIKEFKHRFDPVETKGEGPRRLKNLYFLYLIELRALSKVAPYFERSIVDLYTGNAEEDADTKTLLLNIFQDTKSFPMHFDEKSMFAGDKKGAKSLKEEFRLHFKNISRIMDCVGCDKCRLWGKLQTQGLGTALKILFSEKEIQKLPENSPSKGFQLTRQEIVALLNAFGR

SEQ ID NO: 202360 - protein, 144 aa, Artificial Sequence
  derived and/or modified sequence
MSQGVRRAGAGQGVAAAVQLLVTLSFLRSVVEAQVTGVLDDCLCDIDSIDNFNTYKIFPKIKKLQERDYFRYYKVNLKRPCPFWAEDGHCSIKDCHVEPCPESKIPVGIKAGHSNKYLKMANNTKELEDCEQANKLGAINSTLR

SEQ ID NO: 202361 - protein, 467 aa, Artificial Sequence
  derived and/or modified sequence
MSQGVRRAGAGQGVAAAVQLLVTLSFLRSVVEAQVTGVLDDCLCDIDSIDNFNTYKIFPKIKKLQERDYFRYYKVNLKRPCPFWAEDGHCSIKDCHVEPCPESKIPVGIKAGHSNKYLKMANNTKELEDCEQANKLGAINSTLSNQSKEAFIDWARYDDSRDHFCELDDERSPAAQYVDLLLNPERYTGYKGTSAWRVWNSIYEENCFKPRSVYRPLNPLAPSRGEDDGESFYTWLEGLCLEKRVFYKLISGLHASINLHLCANYLLEETWGKPSWGPNIKEFKHRFDPVETKGEGPRRLKNLYFLYLIELRALSKVAPYFERSIVDLYTGNAEEDADTKTLLLNIFQDTKSFPMHFDEKSMFAGDKKGAKSLKEEFRLHFKNISRIMDCVGCDKCRLWGKLQTQGLGTALKILFSEKEIQKLPENSPSKGFQLTRQEIVALLNAFGRLSTSIRDLQNFKVLLQHSR

SEQ ID NO: 202362 - protein, 71 aa, Artificial Sequence
  derived and/or modified sequence
MANNTKELEDCEQANKLGAINSTLSNQSKEAFIDWARYDDSRDHFCELDDERSPAAQYVDLLLNPERYTGY

SEQ ID NO: 202363 - DNA, 522 bp, Artificial Sequence
  derived and/or modified sequence
tggggccccaacatcaaggagttcaagcacagattcgaccccgtggagaccaagggcgagggccccagaagactgaagaacctgtacttcctgtacctgatcgagctgagagccctgagcaaggtggccccctacttcgagagaagcatcgtggacctgtacaccggcaacgccgaggaggacgccgacaccaagaccctgctgctgaacatcttccaggacaccaagagcttccccatgcacttcgacgagaagagcatgttcgccggcgacaagaagggcgccaagagcctgaaggaggagttcagactgcacttcaagaacatcagcagaatcatggactgcgtgggctgcgacaagtgcagactgtggggcaagctgcagacccagggcctgggcaccgccctgaagatcctgttcagcgagaaggagatccagaagctgcccgagaacagccccagcaagggcttccagctgaccagacaggagatcgtggccctgctgaacgccttcggcagatag

SEQ ID NO: 202364 - DNA, 435 bp, Artificial Sequence
  derived and/or modified sequence
atgagccagggcgtgagaagagccggcgccggccagggcgtggccgccgccgtgcagctgctggtgaccctgagcttcctgagaagcgtggtggaggcccaggtgaccggcgtgctggacgactgcctgtgcgacatcgacagcatcgacaacttcaacacctacaagatcttccccaagatcaagaagctgcaggagagagactacttcagatactacaaggtgaacctgaagagaccctgccccttctgggccgaggacggccactgcagcatcaaggactgccacgtggagccctgccccgagagcaagatccccgtgggcatcaaggccggccacagcaacaagtacctgaagatggccaacaacaccaaggagctggaggactgcgagcaggccaacaagctgggcgccatcaacagcaccctgagatag

SEQ ID NO: 202365 - DNA, 1404 bp, Artificial Sequence
  derived and/or modified sequence
atgagccagggcgtgagaagagccggcgccggccagggcgtggccgccgccgtgcagctgctggtgaccctgagcttcctgagaagcgtggtggaggcccaggtgaccggcgtgctggacgactgcctgtgcgacatcgacagcatcgacaacttcaacacctacaagatcttccccaagatcaagaagctgcaggagagagactacttcagatactacaaggtgaacctgaagagaccctgccccttctgggccgaggacggccactgcagcatcaaggactgccacgtggagccctgccccgagagcaagatccccgtgggcatcaaggccggccacagcaacaagtacctgaagatggccaacaacaccaaggagctggaggactgcgagcaggccaacaagctgggcgccatcaacagcaccctgagcaaccagagcaaggaggccttcatcgactgggccagatacgacgacagcagagaccacttctgcgagctggacgacgagagaagccccgccgcccagtacgtggacctgctgctgaaccccgagagatacaccggctacaagggcaccagcgcctggagagtgtggaacagcatctacgaggagaactgcttcaagcccagaagcgtgtacagacccctgaaccccctggcccccagcagaggcgaggacgacggcgagagcttctacacctggctggagggcctgtgcctggagaagagagtgttctacaagctgatcagcggcctgcacgccagcatcaacctgcacctgtgcgccaactacctgctggaggagacctggggcaagcccagctggggccccaacatcaaggagttcaagcacagattcgaccccgtggagaccaagggcgagggccccagaagactgaagaacctgtacttcctgtacctgatcgagctgagagccctgagcaaggtggccccctacttcgagagaagcatcgtggacctgtacaccggcaacgccgaggaggacgccgacaccaagaccctgctgctgaacatcttccaggacaccaagagcttccccatgcacttcgacgagaagagcatgttcgccggcgacaagaagggcgccaagagcctgaaggaggagttcagactgcacttcaagaacatcagcagaatcatggactgcgtgggctgcgacaagtgcagactgtggggcaagctgcagacccagggcctgggcaccgccctgaagatcctgttcagcgagaaggagatccagaagctgcccgagaacagccccagcaagggcttccagctgaccagacaggagatcgtggccctgctgaacgccttcggcagactgagcaccagcatcagagacctgcagaacttcaaggtgctgctgcagcacagcagatag

SEQ ID NO: 202366 - DNA, 216 bp, Artificial Sequence
  derived and/or modified sequence
atggccaacaacaccaaggagctggaggactgcgagcaggccaacaagctgggcgccatcaacagcaccctgagcaaccagagcaaggaggccttcatcgactgggccagatacgacgacagcagagaccacttctgcgagctggacgacgagagaagccccgccgcccagtacgtggacctgctgctgaaccccgagagatacaccggctactag

SEQ ID NO: 202367 - DNA, 1177 bp, Artificial Sequence
  derived and/or modified sequence
tggggacctaatattaaagaattcaaacaccgctttgaccctgtggaaaccaagggagaaggtccaagaaggctcaagaatctttactttttatacttgattgagcttcgagctttgtcaaaggtggctccatattttgagcgctcaattgtcgatctttacactggaaatgcagaagaagatgctgacacaaaaactcttctactgaatatctttcaagatacaaagtcctttcccatgcactttgatgagaaatccatgtttgcaggtgacaaaaaaggggccaagtcactaaaggaggaattccgattacatttcaagaatatctcccgtataatggactgtgttggatgtgacaaatgcagattatggggaaaattacagactcagggtttaggaactgccctgaagatattattctctgaaaaagaaatccaaaagcttccagagaatagtccatctaaaggcttccaactcacccgacaggaaatagttgctcttttaaatgcttttggaaggtaagaaccattatatgttgaagatttttgatttcccattgggtttcaacaaactgcaaagataatcttctttgctaaaagtagggtttgttttgttgacaaaaaaaaattttatattgtatctgtactaacttagagaggccttaatgctgacaagtcagtttctctacaggtcataggaaaaactaagtttccaattgccagtgtttttcagtttgctgccttaattttgtaagggagatattcttctaatattctttttgcttggctataacttgttcaactacaatagcaggagtaaggaatgtgtgattgagaaggtgataaaagaaaattaaaaccttcatctgctccttatttttcttaaattttcattactatttttttcttttctcacctttttcctgcactatgctctttatttctgaagctcagaggtcatttttctttcactcatttctacatgatttacttctgtatagagacatataatttgcttgcttgtttatatcaccagtggtttaaaaaataatttgaatttgccagcagagatacatgtaatgccaactgaggaatacagaacagaaggaaaagaatcacagaaaataatactatgcttccttggggaaaaagagaaaaaagtcaacttgaggaagaat

SEQ ID NO: 202368 - DNA, 1081 bp, Artificial Sequence
  derived and/or modified sequence
aagcgagccgggggcggggccgcctgggggatgaagtgggggcgctcgcctttcctgcctcactcgcagctgccgggtgttggggaaagagtcgcctgcctccggactggagtgcagacctctgaccctggagtcgctcggccgctgggaaccgtccccttgggtcgtcgcctgggccgcccgtcgttccccggccccgaggggtccggctggccgcggtgtgggtagaggtcagcatgagccaaggggtccgccgggcaggcgctgggcagggggtagcggccgcggtgcagctgctggtcaccctgagcttcctgcggagcgtcgtcgaggcgcaggtcactggagttctggatgattgcttgtgtgatattgacagcatcgataacttcaatacctacaaaatcttccccaaaataaaaaaattgcaagagagagactattttcgttattacaaggttaatctgaagcgaccttgtcctttctgggcagaagatggccactgttcaataaaagactgtcatgtggagccctgtccagagagtaaaattccggttggaataaaagctgggcattctaataagtacttgaaaatggcaaacaataccaaagaattagaagattgtgagcaagctaataaactgggagcaattaacagcacattaagatgagagatctccagctgctcagtatgtagacctattgctgaacccagagcgttacactggctataaagggacctctgcatggagagtgtggaacagcatctatgaagagaactgtttcaagtaactggagggggtgggggaagaaggaacgactgatagagggtcgggagaggccgggtgctgtggctcacgcctgtaatcccagcactttgggaggccaaggtgggtggatcatctgaggtcaggagttcaagaccagcctggccaacatggtgaaaccccgtgtcaactaaaaatacaaaaaaattagccgggcatgatggcaggtgcctgtaatcccagctacttgggaggctgaggcaggagaatcacttgaacccgggaggcagaggttacaatgagcagagattgcg

SEQ ID NO: 202369 - DNA, 4567 bp, Artificial Sequence
  derived and/or modified sequence
agtgggggcgctcgcctttcctgcctcactcgcagctgccgggtgttggggaaagagtcgcctgcctccggactggagtgcagacctctgaccctggagtcgctcggccgctgggaaccgtccccttgggtcgtcgcctgggccgcccgtcgttccccggccccgaggggtccggctggccgcggtgtgggtagaggtcagcatgagccaaggggtccgccgggcaggcgctgggcagggggtagcggccgcggtgcagctgctggtcaccctgagcttcctgcggagcgtcgtcgaggcgcaggtcactggagttctggatgattgcttgtgtgatattgacagcatcgataacttcaatacctacaaaatcttccccaaaataaaaaaattgcaagagagagactattttcgttattacaaggttaatctgaagcgaccttgtcctttctgggcagaagatggccactgttcaataaaagactgtcatgtggagccctgtccagagagtaaaattccggttggaataaaagctgggcattctaataagtacttgaaaatggcaaacaataccaaagaattagaagattgtgagcaagctaataaactgggagcaattaacagcacattaagtaatcaaagcaaagaagctttcattgactgggcaagatatgatgattcacgggatcacttttgtgaacttgatgatgagagatctccagctgctcagtatgtagacctattgctgaacccagagcgttacactggctataaagggacctctgcatggagagtgtggaacagcatctatgaagagaactgtttcaagcctcgatctgtttatcgtcctttaaatcctctggcgcctagccgaggcgaagatgatggagaatcattctacacatggctagaaggtttgtgtctggagaaaagagtcttctataagcttatatcgggacttcatgctagcatcaatttacatctatgcgcaaattatcttttggaagaaacctggggtaagcccagttggggacctaatattaaagaattcaaacaccgctttgaccctgtggaaaccaagggagaaggtccaagaaggctcaagaatctttactttttatacttgattgagcttcgagctttgtcaaaggtggctccatattttgagcgctcaattgtcgatctttacactggaaatgcagaagaagatgctgacacaaaaactcttctactgaatatctttcaagatacaaagtcctttcccatgcactttgatgagaaatccatgtttgcaggtgacaaaaaaggggccaagtcactaaaggaggaattccgattacatttcaagaatatctcccgtataatggactgtgttggatgtgacaaatgcagattatggggaaaattacagactcagggtttaggaactgccctgaagatattattctctgaaaaagaaatccaaaagcttccagagaatagtccatctaaaggcttccaactcacccgacaggaaatagttgctcttttaaatgcttttggaaggctttctacaagtataagagacttacagaattttaaagtcttattacaacacagtaggtaataaaggcttttatgtgtctaactagagacataaagtgactgtggaaagccttttaattatggacattcatcagaaagacactaatctgacttcaagaattctgaactattaaatagaaaatttaaatgctcacttgaatatttatgattcttaatagattattatcaactagagatatttataaatgaagtatatacttttaaaacatgtaagttatactaattttgtgtttaatttcatatgttttcatgtaatgaaaattctattttttttagaattggttttgtttttattctattatcctttatttccagttgtcaaactttaaatggctatgtctgcattctaataacactgttcagtctgttatggaaaaggagaactagggaacaaatgttgctcagggctggtgtcagtgagaaaaatttatcaatgctttttaatgtgtttttacccttgcctcactgtgtgtgtgtcactttctataatataaagaaatactataatatttctagaatctggaactgtcaccatgatgaatggccctttcaatgcatagttacagaaattcctgaagattccccaggacttcaatttcattggtttttatttgcagtttttagttgctgtaattgttgctgtttccagtctaaaggacctcctttggtaaaggtgaacaagacctctcccctatgctacccagccagattttgtgtgtgtaatgggctggcccaagagtgttcttttacttagaactccttttgattttgcttttctctgcccctagaaattttagggacaaagacattttggaaattgtcagttacttttagaaagaaaacactgcagaaatatttaacagattacttcttgataaaatttaaatgggattatatgaatttataatgccaattgaaaatattatatacacaaaatttgctattttcacttaaagtaagcatttttaaaggatttattttagaatacaatctatgcaatcctcgaactcagtgtgcttttccctgacaggatatataaaaaggtagattaggtcaaccctcctttaagcttactctcccctcaccttttcttttcactgtatataaacggtactttctgtgattcataccaacagaggactttctgtgattcataccaacagtcctaaactgtcattttctaaatctgggatttaaaatctttagacaatatttaaaatcttgattttttttaaatgtcagcagatacaatttggaagattgcatctgtgtagaagtaatgcaggtacaagatctagagtttttccttagactctttagtcttttctgaattaaagaataagtgctcttaaatccatattttatcctgtcaaagtctgaaatgtgttcattgatgatttggtgacatctaaaaaattgtatttagttggcttggctcacccctcttaaaaatacttagccatctcttggtgggatgtggtgggggtattaaggtctcagagttatttattttctcacctaatttcaaacctttataaacttggggttttgttgttgatggtggtagtattttttgttaagttgtttaaaaggctgacttgattggagcctcctctactttttcttgagggttgcaagtattgtatggtgggggaggggggccttaaggcaaactgtctaaaaagtgactatccaattaatttaactagtaaattagtaagaattattcttagtattcactcagagtttaagatgtgaaaaatctgcactttgtttatcactctaaatgtaaagaactttttgatagtgttatttcaccactccctcagttaaaggctattatttaaactgtttactggagaaaatcctcgctcatgtccatttattgtttttttctgtactgtgatttgtttcaagcttaggaaaactagtatattagagtatgttctaggaaattaaaagatctggttagagtaaaaagttctttttaaggttcttaactaattttttcacaactaagaaaataaatgaagtattcttaggctgaaattcatcttattttatcataaattagattgtaggggcagcctacatttttgtgtatgtgtttttatttcttaaatgattgtgtgagcctggtgacattttatggttcttgtgatctaaactgtttttccaattcacatcttttgtcgtgaagtgatattatactagagtactgtttgcattgtaaaaatgctttgctggtgctctggcattttgtctttatctcatcacctaatttaaaaacccagcacttgataatataactgacagaaatgattgtacccactgatgaagtaatgaaaatgaagaaaaggaaaatattccttccttcaatggcgtaagtttattttttacttaagtggcatctatgtaagttagacaaactatatattaaaattggtaaactttgaatgtttctcctgttttgattcttagattatgaggaggatcagacagaataagactccacacttttgaaatttgataagtcaaaacgttttattttgacatttttaacattgtgaattattcgatatttgtaatctctgtatgtatatgaaactctgccatgtttttcaactttgcctatgtgccactgtatataagaaaggacagctattttgatcttcatcagcattgccttcagctgaaaatttgggaacagttcacagtaaacctctcagtagtttgcaaactgaggtacctgcagaaaccatagctactcaccaaaatacacagattaggtgcatggtatcgtggaaattatttggtaaaaaaacacacacacaaatctatgtgtactgtattttaaggaatatctacaggtgcagctttgattttgaacagaattccaaataatttactgttgtacccaccagaatctagaaaatgtgaattaaagtacatgtttctgcaa

SEQ ID NO: 202370 - DNA, 605 bp, Artificial Sequence
  derived and/or modified sequence
ggagggccgggcagggccgggccagaaaagaggtgatttctggcgagcagaaaacccggggagcagagacctgaccgtccagtgcgggaaacatctgcgaaccgcccgcagggtggggggacggcgacactccgggtcactggagttctggatgattgcttgtgtgatattgacagcatcgataacttcaatacctacaaaatcttccccaaaataaaaaaattgcaagagagagactattttcgttattacaaggttaatctgaagcgaccttgtcctttctgggcagaagatggccactgttcaataaaagactgtcatgtggagccctgtccagagagtaaaattccggttggaataaaagctgggcattctaataagtacttgaaaatggcaaacaataccaaagaattagaagattgtgagcaagctaataaactgggagcaattaacagcacattaagtaatcaaagcaaagaagctttcattgactgggcaagatatgatgattcacgggatcacttttgtgaacttgatgatgagagatctccagctgctcagtatgtagacctattgctgaacccagagcgttacactggctataa

SEQ ID NO: 202371 - DNA, 522 bp, Artificial Sequence
  derived and/or modified sequence
tggggtcctaacatcaaggagttcaagcatcgattcgatccagtggagacaaaaggggaaggacctcgccggttaaagaatctctatttcctatacttgatcgagttgagagccttgagcaaggtcgccccctatttcgagaggtctattgtggacctgtacaccgggaatgctgaggaagacgctgataccaaaacacttctgctgaatattttccaggacactaagtccttccccatgcattttgatgaaaaatccatgtttgctggtgacaaaaagggagcaaagtcattaaaagaggagtttcgattgcattttaaaaacatttctcgaataatggattgcgtgggatgtgataaatgtcggttgtggggaaaactgcagactcaaggattgggcaccgcccttaaaattctgttctccgagaaggaaatccaaaaactgcccgaaaattctcccagcaaagggtttcagcttaccaggcaagagatcgtcgcccttctgaatgcttttggtcgttag

SEQ ID NO: 202372 - DNA, 435 bp, Artificial Sequence
  derived and/or modified sequence
atgtcacagggtgtaagaagggcaggtgcgggacagggggtagcagcggcggtccagctgctggtcaccctgtccttcctgcgttcagtagtggaagctcaggtgacaggggtcctcgatgactgcctgtgcgacattgacagcatagacaatttcaatacttacaagatttttccaaaaataaaaaagctgcaggaacgagactacttcaggtattacaaggtgaacctaaaaagaccttgtcctttctgggccgaggacggccattgctccattaaggattgtcacgtcgaaccctgtccagagtccaagataccggtcggcattaaagctgggcactctaacaagtacttgaagatggccaacaatactaaagagctggaagactgtgaacaggcgaacaaactgggcgcaatcaacagcacgcttcgctag

SEQ ID NO: 202373 - DNA, 1404 bp, Artificial Sequence
  derived and/or modified sequence
atgagtcagggcgtcaggcgtgccggtgcaggacaaggtgtagccgccgccgtccagctattggtcacgctgtcttttctgaggagtgtcgtggaagcccaggtcaccggcgttctggacgattgcttgtgcgacatagactcaattgacaacttcaatacctataaaatcttccccaagatcaaaaagcttcaggagcgtgattacttccgatattataaagtcaacctgaaaaggccatgtcctttttgggccgaagatggacattgtagcatcaaggattgccatgttgagccatgccctgaatccaaaatccccgtgggcatcaaggctggacatagtaataaatacctgaagatggccaataacaccaaagaactggaagattgtgagcaggcgaacaaactcggggcaatcaatagcaccctttccaaccagagcaaagaggcgtttattgattgggccagatatgacgattccagagaccatttttgtgaattggacgacgagaggtcccccgccgcccaatacgtggatcttctgctgaaccccgaacgttacaccggctacaaagggacgagcgcttggcgggtatggaacagcatttatgaggagaactgcttcaaacccagatcggtgtataggcctctcaaccctctcgcacctagcaggggagaggacgatggtgagtcattctatacctggcttgaggggctgtgcctggaaaaacgcgttttttataagctgatctcaggcttgcacgcatcaattaatctgcatctctgtgccaactatctgctggaagaaacgtggggcaagccgagttgggggcccaacataaaggaatttaagcatcggtttgacccagtagagacaaaaggggaaggacctaggcgtctgaaaaacctttactttttatatttaattgaactgcgcgccctttcaaaagtcgccccttatttcgagcgctctattgtagacctctacacaggaaatgctgaggaagacgccgataccaagaccctgctgctgaatatcttccaagacacgaagagttttcccatgcattttgatgaaaaaagcatgttcgctggagataaaaaaggcgctaaaagcctgaaagaggaatttagattgcacttcaagaatatttcccgtattatggactgcgtcggttgtgacaagtgccggttatggggaaagctgcagacacaagggctgggcacggcactgaagatcctttttagcgaaaaggaaatacagaagctcccagagaatagcccgagcaagggttttcagctcactaggcaagagatcgtggcgctgctaaatgcatttggacggctgtcgacttcaatcagagacctgcagaacttcaaggtcctcctgcagcatagcaggtag

SEQ ID NO: 202374 - DNA, 216 bp, Artificial Sequence
  derived and/or modified sequence
atggctaataacaccaaggagctggaagactgcgaacaggccaacaagctgggagcgattaatagtactttgtcaaatcaatctaaggaagccttcatcgactgggctcgctacgatgatagcagagaccacttttgcgagctggatgatgaacgatcgccggccgctcagtacgttgatctactgctgaacccagaaaggtatacgggctactag

SEQ ID NO: 202375 - DNA, 522 bp, Artificial Sequence
  derived and/or modified sequence
tggggccccaacatcaaggagttcaagcacagatttgatcctgtggagaccaagggggagggcccccggcggctgaagaacctgtacttcctgtacctgattgagctgcgggccctgagcaaggtggccccctactttgagaggagcatcgtggacctgtacacaggaaatgctgaggaggatgctgacaccaagaccctgctgctgaacatcttccaggacaccaagagcttccccatgcactttgatgagaagtccatgtttgctggggacaagaagggggccaagagcctgaaggaggagttccggctgcacttcaagaacatcagccgcatcatggactgtgtgggctgtgacaagtgccgcctgtggggcaagctgcagacccagggcctgggcacagccctgaagatcctcttcagcgagaaggagatccagaagctgcctgagaacagccccagcaagggcttccagctgacccggcaggagatcgtggccctgctgaatgcctttggaagatag

SEQ ID NO: 202376 - DNA, 435 bp, Artificial Sequence
  derived and/or modified sequence
atgagccagggcgtgcggcgggccggggccggccagggcgtggccgctgctgtgcagctgctggtgaccctgtccttcctgcggtctgtggtggaggcccaggtgactggagtgctggatgactgcctgtgtgacatcgacagcattgacaacttcaacacctacaagatcttccccaagatcaagaagctgcaggagcgggactacttccgctactacaaggtgaacctgaagaggccctgccccttctgggccgaggatggccactgcagcatcaaggactgccacgtggagccctgcccagagagcaagatccctgtgggcatcaaggccggccacagcaacaagtacctgaagatggccaacaacaccaaggagctggaggactgtgagcaggccaacaagctgggcgccatcaacagcaccctgaggtag

SEQ ID NO: 202377 - DNA, 1404 bp, Artificial Sequence
  derived and/or modified sequence
atgagccagggcgtgcggcgggccggggccggccagggcgtggccgctgctgtgcagctgctggtgaccctgtccttcctgcggtctgtggtggaggcccaggtgactggagtgctggatgactgcctgtgtgacatcgacagcattgacaacttcaacacctacaagatcttccccaagatcaagaagctgcaggagcgggactacttccgctactacaaggtgaacctgaagaggccctgccccttctgggccgaggatggccactgcagcatcaaggactgccacgtggagccctgcccagagagcaagatccctgtgggcatcaaggccggccacagcaacaagtacctgaagatggccaacaacaccaaggagctggaggactgtgagcaggccaacaagctgggcgccatcaacagcaccctgagcaaccagagcaaggaggccttcatcgactgggcccgctatgatgacagccgggaccacttctgtgagctggatgatgagaggagccctgctgcccagtatgtggacctgctgctgaaccctgagcgctacacaggctacaagggcaccagcgcctggagggtgtggaacagcatctatgaggagaactgcttcaagcccaggtctgtgtaccggcccctgaaccccctggcccccagcagaggagaagatgatggagagagcttctacacctggctggagggcctgtgcctggagaagagggtcttctacaagctgatcagcggcctgcacgccagcatcaacctgcacctgtgtgccaactacctgctggaggagacctggggcaagcccagctggggccccaacatcaaggagttcaagcacagatttgatcctgtggagaccaagggggagggcccccggcggctgaagaacctgtacttcctgtacctgattgagctgcgggccctgagcaaggtggccccctactttgagaggagcatcgtggacctgtacacaggaaatgcagaagaagatgctgacaccaagaccctgctgctgaacatcttccaggacaccaagagcttccccatgcactttgatgagaagtccatgtttgctggggacaagaagggggccaagagcctgaaggaggagttccggctgcacttcaagaacatcagccgcatcatggactgtgtgggctgtgacaagtgccgcctgtggggcaagctgcagacccagggcctgggcacagccctgaagatcctcttcagcgagaaggagatccagaagctgcctgagaacagccccagcaagggcttccagctgacccggcaggagatcgtggccctgctgaatgccttcggccgcctgagcaccagcatccgggacctgcagaacttcaaggtgctgctgcagcacagcaggtag

SEQ ID NO: 202378 - DNA, 216 bp, Artificial Sequence
  derived and/or modified sequence
atggccaacaacaccaaggagctggaggactgtgagcaggccaacaagctgggcgccatcaacagcaccctgagcaaccagagcaaggaggccttcatcgactgggcccgctatgatgacagccgggaccacttctgtgagctggatgatgagaggagccctgctgcccagtatgtggacctgctgctgaaccctgagcgctacacaggctactag

SEQ ID NO: 202379 - DNA, 522 bp, Artificial Sequence
  derived and/or modified sequence
tggggccccaacatcaaggagttcaagcaccggttcgaccccgtggaaacgaagggagagggaccgaggcgcctgaagaacctgtacttcctgtatctgattgaacttagagctctgtctaaagtggccccgtattttgagaggtctatcgtggacctctacactggaaacgcggaggaagatgcagataccaaaacacttttgctgaacattttccaggacaccaagtcatttcccatgcatttcgacgagaagtccatgttcgcaggagacaaaaagggagcaaaatctcttaaagaggagtttagactgcacttcaagaatatatctaggatcatggattgtgttgggtgtgacaagtgtcgtctgtggggcaagttgcagacccagggccttggcacggccctaaaaatcctgttcagtgaaaaggagatacagaagctgccagagaactctccctctaagggcttccagctcactcgacaggaaatcgtggctcttctgaacgcttttgggcgatag

SEQ ID NO: 202380 - DNA, 435 bp, Artificial Sequence
  derived and/or modified sequence
atgagccagggcgtgcggcgggccggcgccggccagggcgtggccgctgctgtgcagttgctggtgactctctcctttctgaggagtgtggttgaggcccaggttaccggcgtgctcgacgattgcctctgcgacatcgactctatcgacaatttcaacacatataaaatctttccaaagatcaaaaaactgcaggagcgcgactattttagatactacaaggtgaaccttaagcgcccctgtcccttctgggccgaggatggacactgcagcattaaagactgtcacgtcgagccctgtcccgaaagtaaaattcctgtgggaattaaagccggacactccaacaagtatctgaagatggctaacaacactaaggagcttgaggactgcgaacaggcaaacaagctaggcgctatcaattccacgctgcgatag

SEQ ID NO: 202381 - DNA, 1404 bp, Artificial Sequence
  derived and/or modified sequence
atgagccagggcgtgcggcgggccggcgccggccagggcgtggccgccgccgtgcaacttcttgttactctgtcgtttctgagatcagtggtagaggcgcaagtgactggagtcttggatgattgtttatgcgatattgatagtattgacaactttaatacatataagatatttcccaaaatcaaaaaactccaggagcgcgactattttcgctattataaagtgaaccttaaaagaccctgtccattttgggcggaagatggccattgctcaattaaggattgtcacgtggagccctgccccgagtccaagatccccgtggggatcaaggcagggcacagtaataagtacctgaaaatggcaaacaacacgaaagagttggaggactgcgaacaggccaacaaactgggggccataaactcgactctgagtaaccagtccaaggaggctttcatcgattgggcgcgctacgacgattcacgtgatcatttctgtgaactggatgatgagagatcacccgccgctcaatatgtcgacctgctgctgaacccagaacggtacaccggctataaaggcacaagcgcatggagagtatggaattcaatctatgaggagaattgcttcaaaccccgaagtgtgtacaggccactcaaccccctggcacccagtaggggtgaagatgatggtgagagtttttatacctggttggagggcctgtgtctggaaaagcgcgtgttttacaaactcatctcaggactgcatgcttctattaacttgcacctatgtgccaattatttgctggaagaaacatggggcaagcccagctggggcccaaacattaaggagtttaaacaccgctttgacccagtggagactaagggagagggccccagaaggttgaaaaatctgtacttcctgtacctaatcgagctgagggctcttagtaaggtagcaccttacttcgagcgctcaatagttgacttatatactggcaacgcagaggaagacgccgatacaaaaacccttttactgaatattttccaggataccaagtcctttcccatgcattttgatgagaagtccatgttcgcaggtgacaaaaagggcgccaagagtctgaaggaagagtttcgtctccacttcaaaaatatctcaaggatcatggactgtgtgggctgcgataaatgcagactctgggggaagctccagacccaaggcttgggaacggccctgaaaattctcttttccgagaaagaaattcaaaaactgcctgaaaattcaccttctaagggtttccagctgacaagacaggagattgttgcactcttgaacgcctttggtcgattgtccacatcgattagagatttacagaactttaaagttctgctgcagcatagtcgatag

SEQ ID NO: 202382 - DNA, 216 bp, Artificial Sequence
  derived and/or modified sequence
atggccaacaacaccaaggagctggaggactgcgagcaggccaacaaacttggtgcaattaatagtacactgtctaaccagtctaaagaggccttcatcgactgggccagatatgatgattctagagaccatttctgtgaactggatgacgagaggtcaccagctgcacagtatgtcgacctcctgttaaaccccgaaaggtataccgggtactag

SEQ ID NO: 202383 - DNA, 522 bp, Artificial Sequence
  derived and/or modified sequence
tggggccctaacatcaaagaattcaagcaccgctttgatccggtggagaccaaaggggaggggccacgcagactcaagaatctttattttctctacctgatcgagctgagggctttatccaaggtggccccttattttgagcggagcattgttgacctctatactggaaacgccgaggaggatgctgacacaaaaacacttctgctcaacatttttcaagacacgaaatcctttccgatgcactttgacgaaaagagcatgtttgcaggggacaaaaaaggcgctaagagcctgaaagaggaattcaggctgcatttcaaaaacatctcaagaatcatggattgtgtgggttgcgacaaatgtaggctgtggggcaaactgcagacacagggtctggggactgcccttaagatcctgttttccgagaaggagatccagaaacttcccgaaaactccccatccaaaggctttcagctgacccgacaggaaatcgtcgccctactcaatgctttcggacggtag

SEQ ID NO: 202384 - DNA, 435 bp, Artificial Sequence
  derived and/or modified sequence
atgtcacagggcgtccgcagagctggtgcgggacaaggagtagcggcagccgtgcaattgctggtcacccttagcttcctgcgctctgtcgtagaagcacaggtgactggtgtcttggacgactgcctgtgcgacattgatagcattgataacttcaatacctacaagatttttcccaagattaagaagctgcaagagcgggactactttcgatactacaaggtgaacctgaaacgcccttgtccattttgggctgaagacggacattgctcaattaaggactgtcatgtggaaccctgtcctgagtctaagattccagtggggatcaaagccggacatagcaacaaatacctgaagatggcaaataatactaaagagctggaggactgtgaacaggcaaataagttgggcgcaatcaattccactctccgctag

SEQ ID NO: 202385 - DNA, 1404 bp, Artificial Sequence
  derived and/or modified sequence
atgagtcagggtgtgcgtagggctggcgctggacaaggggttgccgcagcagtgcaactgctggtgactctgtctttcctgcgctctgtggtagaggcccaggtgacaggcgtgcttgacgattgcctgtgtgatatagattccattgataacttcaatacctataaaatctttcccaaaataaaaaagctgcaggaacgggattattttaggtattataaggtcaacctgaaaagaccctgccctttctgggcagaggatggacattgctctattaaggattgccacgtggagccatgccccgagtctaaaatccccgtgggtatcaaagccggacactccaataagtacctgaaaatggcgaacaataccaaagaattagaagactgtgaacaggcaaataagctgggggctatcaactctaccctctctaatcagtccaaagaggccttcatagattgggccagatacgacgatagcagagatcacttttgtgagctggatgacgagaggagtccagctgcgcagtatgtggacttgcttcttaatccagagcgctatacaggttataagggcaccagcgcttggcgggtatggaactcaatatatgaggagaactgcttcaagcccagaagcgtataccgacctctgaaccccctcgccccatcacgtggtgaggatgacggcgaatctttttacacgtggctggaagggctgtgtctggaaaagagggtgttctacaagctgatctcagggctgcacgccagcataaaccttcacctctgcgccaattacctgctggaagaaacctggggcaaaccttcctgggggccaaatataaaagagttcaagcatagatttgatccagtggagactaaaggcgaaggcccaagacgcctgaagaacctctatttcctatacctgattgaactgcgcgcactgtccaaggtcgctccatacttcgaaagatcgatcgtggatctatacactggaaacgcagaggaagatgccgacactaaaactctgcttctgaacatctttcaggacacgaagagcttccccatgcacttcgacgagaagtcaatgtttgcgggagacaagaaaggtgctaagtcacttaaagaggaatttcggctgcatttcaaaaatattagtaggataatggattgcgttggatgcgataagtgccggctgtggggaaaactccagacacaaggactgggtactgccctaaaaattctgttttcggagaaggaaattcagaagctgccagaaaacagtccatcaaagggtttccagttaacccggcaggaaatcgttgccctgctgaatgcttttggacgattgagtaccagcatccgggatcttcagaatttcaaagtgctcctgcagcattctagatag

SEQ ID NO: 202386 - DNA, 216 bp, Artificial Sequence
  derived and/or modified sequence
atggctaataatactaaagaattggaagattgcgagcaggctaataagttgggggctatcaactctaccctgtctaaccaatccaaagaggcttttatcgactgggcgcgatacgatgactcacgcgaccacttctgcgagctagatgacgaacgatcacccgcagctcaatacgttgatctactgctcaatcctgagcggtatacaggctattag

SEQ ID NO: 202387 - protein, 644 aa, Artificial Sequence
  derived and/or modified sequence
MPSKAENLRPSEPAPQPPEGRTLQGQLPGAPPAQRAGSPPDAPGSESPALACSTPATPSGEDPPARAAPIAPRPPARPRLERALSLDDKGWRRRRFRGSQEDLEARNGTSPSRGSVQSEGPGAPAHSCSPPCLSTSLQEIPKSRGVLSSERGSPSSGGNPLSGVASSSPNLPHRDAAVAGSSPRLPSLLPPRPPPALSLDIASDSLRTANKVDSDLADYKLRAQPLLVRAHSSLGPGRPRSPLACDDCSLRSAKSSFSLLAPIRSKDVRSRSYLEGSLLASGALLGADELARYFPDRNVALFVATWNMQGQKELPPSLDEFLLPAEADYAQDLYVIGVQEGCSDRREWETRLQETLGPHYVLLSSAAHGVLYMSLFIRRDLIWFCSEVECSTVTTRIVSQIKTKGALGISFTFFGTSFLFITSHFTSGDGKVAERLLDYTRTVQALVLPRNVPDTNPYRSSAADVTTRFDEVFWFGDFNFRLSGGRTVVDALLCQGLVVDVPALLQHDQLIREMRKGSIFKGFQEPDIHFLPSYKFDIGKDTYDSTSKQRTPSYTDRVLYRSRHKGDICPVSYSSCPGIKTSDHRPVYGLFRVKVRPGRDNIPLAAGKFDRELYLLGIKRRISKEIQRQQALQSQNSSTICSVS

SEQ ID NO: 202388 - DNA, 1935 bp, Artificial Sequence
  derived and/or modified sequence
atgccttcaaaggcagagaacctcaggccatctgagcctgcaccacagcctcccgagggaagaacactgcagggacagttgccaggcgcccctcctgctcagcgcgccggatctcctccggatgcaccaggcagtgagtcccctgctctggcatgctccacacctgcaaccccgagcggcgaggatccccccgccagggcagcccccatcgccccaaggccccccgccagacctcgactggagcgagcgctctccctggatgataagggatggaggcgcagacgctttcgagggtcgcaggaagatttggaagctaggaatgggacctcaccttcacgaggcagtgtgcagagcgagggacccggggcccccgctcattcatgctctccgccctgtttatctaccagcctccaggagatacctaagagccgcggggtgttaagttccgagcgaggatcaccatcctctggcgggaatcctctgagtggtgtggcaagctcgtcacctaacctccctcaccgcgatgcagcagtggccggcagttcgcctagattaccatccctcctgccccccagaccaccacccgctctgagcctcgacattgcaagcgatagcctgcgcaccgctaataaggttgattccgatctggcagattataagttacgtgcgcagcctctgttggtgagggctcacagctctctgggccctggacgcccgagatccccactggcgtgtgacgattgctcactgcgaagcgccaagtccagctttagtctgctggcaccaatcaggagcaaagatgttcgatcgaggagttatcttgagggctccctgctcgcatcgggggccctcctgggcgctgatgagttggcaaggtacttccctgatcggaacgtggccctctttgtcgcgacctggaatatgcaagggcagaaagagcttccgccctcgttggatgagtttctactgcctgcagaggccgactacgcccaggacctctatgtgatcggagtccaggaagggtgctccgaccgacgggagtgggagacacgactccaggagaccctcggaccccactacgtgctgctgagctctgccgctcacggcgtgctatacatgagcctgttcataagaagggacctgatttggttttgtagtgaagtggaatgtagcactgtaactacaagaatcgtgagccagatcaagaccaagggagcactgggtatttcatttactttctttggcacttccttcttatttattacctcccatttcacgagtggagatggtaaggtggcagagcgactcttagattacaccagaactgtgcaggccctcgtactaccccggaatgtgcctgacacgaacccttacaggtcgtcagcggcggatgtcactacgaggttcgacgaggtcttctggtttggagattttaactttagattgtccggtgggcgcacagtggtcgacgccctcttgtgtcaagggttagttgtcgacgtgcccgcgctcctgcagcacgatcagcttattagagagatgagaaaaggctctattttcaaagggttccaggaacctgatattcacttcctgccttcttataagtttgacatagggaaggatacgtacgattccacatctaaacagaggaccccgtcatacacagatagagtcctgtatagatcaagacacaaaggcgatatttgtccagtaagttacagctcctgccccgggataaaaaccagtgatcatagacctgtgtacgggttgtttcgggtgaaagtgagacctggccgggataatattcctcttgcagctggaaaattcgatcgggaactgtatctgttaggaatcaaacgacgtatatcaaaagagatccagcggcagcaggccctccagtcccaaaacagctcgacgatctgttcagtgtcttag

SEQ ID NO: 202389 - DNA, 3394 bp, Artificial Sequence
  derived and/or modified sequence
gccgggctgactccgcttctgggcggccgggcctccgcgagtaccgggtcgacttcggagtctgcgagcccagccaggggtgcccgcttcccacccctctccccgagcggcgtccccgtcggggtcgaacctcccccgcgacaggcgcccagccgcctgttcccccaggccttgcctgcggaccgccctgggaacggcgtctgggagccccgaggggctggcgggactcggggcccgggccatgcggcagccgcccccgcccctccgcgaccatccccggcccaagcgggagccgcagcggcgtttctgctcctcgctgcgccggcgaccccggacccggcacccgtgacccctcgcgctgcctgcggcctcgcgccgaggcctgccccgggagagaccgtccatgccgtccaaggcggagaatctgcggccctccgagccggccccgcagccgccggaagggaggacgctccaaggacagcttcccggcgctccgccggcccagcgcgcggggtccccacccgatgctccgggctccgagagccccgcgcttgcctgcagcactccggccacgcccagcggcgaggacccgccagcccgagcagcacccatcgccccgcggccccccgccaggcctcgactggagcgagccctgtccctggacgacaagggctggaggaggaggcgttttcgaggcagccaggaggacctggaagcccggaatgggaccagtccctccaggggctcagtgcagagcgagggccccggggcccccgcccacagctgctccccgccctgcctgagcacctccttgcaggaaatccccaagtcccgcggggtcctgagcagtgagagagggagcccgtcctcggggggtaaccctctctctggggtggccagcagctccccgaacctcccgcacagagacgccgccgtggcggggagctcgcccaggctgcccagcctgctgcccccgcgcccaccgcctgccctgagcctggacatcgcctccgactccctgaggacagcaaacaaggtcgactcggatcttgcagactacaagctccgcgcgcagccgctcctggtgcgggcccacagcagcctgggccccggccggccgcggagccccctggcctgcgacgactgttcccttcgctcggccaaatcctccttcagcctcctggcgcccatccgcagcaaggacgtccgcagcaggagttacctggagggcagcctcctggccagcggggccctgttgggggcggatgagctggcccgctacttcccagaccggaacgtggcactcttcgtggccacctggaacatgcagggccagaaggagctcccgcccagcctggacgagttcctgctcccagccgaggccgactatgcccaggacctgtatgtcatcggggtccaggagggctgttctgacaggcgggagtgggagactcgtctgcaggagacgctgggcccgcactatgtgctgctgtcctcggcggcccacggcgtgctctacatgtcgctcttcatccgcagggacctcatctggttctgctcagaggtggagtgctccacggtgaccacacgcatcgtgtctcagatcaagaccaagggggccttgggcatcagcttcaccttttttggcacttccttcctcttcatcacgtcccacttcacctcaggtgacgggaaggtggcggagcggctgctggactacaccaggactgtacaagccctggtcctgcccagaaatgtgcccgacaccaacccctatcgctccagcgcagcggacgtcaccacccgcttcgatgaggtgttctggtttggagacttcaacttccgcctgagtggcgggcgcacagtcgtggacgccctcctgtgccagggcctggtggtggacgtgccggcgctgctgcagcacgaccagctcatccgggagatgcggaaagggtccatcttcaagggcttccaggagccggacatccacttcctcccatcatacaagtttgacatcgggaaggacacgtacgacagcacctccaagcagaggacgccctcatacacggaccgcgtcttgtacagaagccgccacaagggtgacatctgtcctgtgagctactcttcctgccccgggatcaagacgtccgaccaccgccctgtgtatggcctcttccgggtgaaagtgaggccggggcgagacaacattccgttggcagctggcaaatttgatagagaactgtacttactaggaattaaaagacggatttcgaaggagattcagaggcagcaagcactacagagtcagaactccagcaccatctgctccgtttcttgaagtttgctgaacgaggactcacagctgcaacgtggggtgattgtattgatcaaaacccactgggaaggacaaagagtttgccgcctttcggggatccgagggactgtggcgaccgtgcctctgtgccagcgtcccaggaaggaagccaaccctgagcgagcctgtcctctgtggcaggtccacacggtgtgggtgggcagggcttggacccccgtctccatggcaggtccatacagcatgggtggcagggtttggacccgcccagcagcaccacggaccccagccactctcgggggcagacgtcagaatccgttcctgagcagctcctgtgccctgggggcagtcacagagccccccaacacccccgtgctctgcaccagcctctccctccacacccgaagcaggcgtccatctgtgtcctcctggcagcccctcaaacacacaccaccccatgtcacacgggtatccagagcaaggctggatctgggctaggtgacccctggggcctcagacctctgagtgggccccagagcccagctgaggaagccacacagcctccaggacgtggcacggttcccctccacttggctgcaagtcgcctgccatggggcgaggaggcctgcaccccagtataagggcctccccagctgagtaagaagctgcttcccctcctctcataggccaagcctattgtgtgaaaccatctcatggtcttggtgacgtagaccatttttgaaaccgtctcatggtcttggtgacgtagaccgtttgcttctttaactccagccgcggaatgacattagtggaaccgggctagggaactgctggaagttcaggatgccaccaccttgaacacctaggccagggatccccaccatgtcccgggtttctttcttcgagagtatagaaccgttcattcttgctttgtgtcccattccatctcttgaaaaaatgtagtctttgaatgtgtgaaaatctagggacattcaatctagtcttttaaattatttttccatatttatatttttaaataaatgcatatattgagtcttaaaa

SEQ ID NO: 202390 - DNA, 1935 bp, Artificial Sequence
  derived and/or modified sequence
atgcccagcaaggccgagaacctgcggcccagcgagcccgccccccagcccccagagggccgcaccctgcagggccagctgcccggggcccccccagcccagagagctggcagccccccagatgcccctggcagcgagagccctgccctggcctgcagcaccccagccaccccatctggagaagatcctccagcccgggccgcccccatcgccccccggcccccagcccggccccggctggagcgggccctgagcctggatgacaagggctggaggagaagacgcttccggggcagccaggaggacctggaggccagaaatggcaccagccccagccggggctctgtgcagagcgagggccctggggccccagcccacagctgcagccccccctgcctgagcaccagcctgcaggagatccccaagagcagaggagtgctgagcagcgagcggggcagccccagcagcggcggcaaccccctgagcggcgtggccagcagcagccccaacctgccccacagagatgctgctgtggccggcagcagcccccggctgcccagcctgctgccccccaggcctcctccagccctgagcctggacatcgccagtgacagcctgaggacagccaacaaggtggacagcgacctggccgactacaagctgcgggcccagcccctgctggtgcgggcccacagcagcctgggccctggccggcccaggagccccctggcctgtgatgactgcagcctgcggagcgccaagagcagcttcagcctgctggcccccatccgcagcaaggatgtgcgcagccgcagctacctggagggcagcctgctggccagcggggccctgctgggcgcagatgagctggcccgctacttcccagacagaaatgtggccctgtttgtggccacctggaacatgcagggccagaaggagctgccccccagcctggatgagttcctgctgcctgctgaggccgactatgcccaggacctgtatgtgattggagtgcaggagggctgcagcgacagaagagagtgggagacccggctgcaggagaccctgggcccccactacgtgctgctgagcagcgctgcccacggcgtgctgtacatgagcctcttcatccggcgggacctgatctggttctgcagcgaggtggagtgcagcacagtgaccaccagaattgtgtcccagatcaagaccaagggggccctgggcatctccttcaccttcttcggcaccagcttcctgttcatcaccagccacttcaccagcggagatggcaaggtggccgagcggctgctggactacaccaggacagtgcaggccctggtgctgcccagaaatgtgcctgacaccaacccctaccgcagcagcgctgctgatgtgaccaccaggtttgatgaggtgttctggtttggagacttcaacttccggctgagcggcggccgcacagtggtggatgccctgctgtgccagggcctggtggtggatgtgcctgccctgctgcagcacgaccagctgatccgggagatgaggaagggcagcatcttcaagggcttccaggagccagacatccacttcctgcccagctacaagtttgacatcggcaaggacacctatgacagcaccagcaagcagaggacccccagctacacagacagagtgctgtaccgcagccgccacaagggggacatctgccctgtgtcctacagcagctgccccggcatcaagaccagtgaccacaggcctgtgtatggcctcttccgggtgaaggtgcggcccggccgggacaacatccccctggccgccggcaagtttgaccgggagctgtacctgctgggcatcaagaggcgcatcagcaaggagatccagaggcagcaggccctgcagagccagaacagcagcaccatctgcagcgtgtcctag

SEQ ID NO: 202391 - DNA, 1935 bp, Artificial Sequence
  derived and/or modified sequence
atgcccagcaaggccgagaacctgcggcccagcgagcccgccccccagccaccggaggggcggacactacagggacaactccccggtgcaccccctgcccaaagggccggttcccctcctgatgccccaggcagcgaatcgccggctctggcgtgttccacgcctgctaccccgtccggcgaagacccccctgcccgcgctgcgcctatcgccccccgacctccagcaaggcctaggttagaaagggctctctcattagacgataaaggttggaggaggcgtcggtttcgggggtcacaggaggacttggaggccagaaacggcaccagcccaagcagaggtagcgtacaaagcgaggggccgggcgcacccgctcactcctgcagcccaccctgcttatcaacatccctgcaggaaatccccaagtcacgaggcgtgctgtcatctgagcggggttccccgagctccggtggaaatcctctgtctggggtggcatcatcttctcccaaccttcctcaccgcgacgccgctgtcgccggctcttctcccaggttgccaagcttgttaccccctcgacccccccccgctctgtctctggatatcgccagtgacagtctgcggacagcaaataaagtcgacagcgatttggctgactataaattgcgggcgcagccgctacttgtgcgcgctcacagctctctgggccccggtcgcccacgcagcccactggcttgtgacgattgctcactacgcagcgcgaaatcatcgttctccctcttggctcctattcgcagcaaagacgtcaggagccgcagctacctggaggggtccctgttggcctcaggagcactgctcggagcggatgagctcgcacgctattttccagaccggaacgttgccctgtttgtagctacgtggaacatgcagggccagaaagagttacctccctctttagacgaatttctccttcccgctgaagccgactacgcacaggacttgtatgtgattggagtgcaggaaggctgttccgacaggcgggagtgggaaacaagactgcaagaaaccctcggtccgcattatgtgctcctttcgtccgcggctcacggagtgctgtatatgagcctgttcatacggcgggacttgatctggttttgcagtgaggtggaatgttcgaccgtaaccactagaatagtaagtcagattaaaaccaagggtgcgctgggaatatccttcacgttttttggaacatcctttcttttcataacctcccatttcacaagcggagacggcaaagtggctgagcggctactggattatacccgcaccgtgcaggcgttagtgctgcctcggaatgtgcctgacaccaacccctacaggagctcagcggccgacgtaaccaccagattcgacgaggtgttctggttcggcgactttaatttcagactttctggtggtagaaccgtagtcgatgcactcttatgtcagggcctggtggtagacgtcccagcactgcttcaacacgatcagctcatccgtgagatgaggaagggatcaattttcaaggggttccaggagcctgatattcactttctgccctcctacaagttcgacattggaaaagatacctacgactccactagtaagcagcgaaccccgtcttacaccgatcgagtactttatcgcagccggcacaagggcgacatctgtccggtcagctattcgtcttgccctgggatcaagacaagcgaccatagacccgtatatggtctttttagagtgaaagtgaggccagggcgagacaacatccccctagccgcagggaaattcgatcgggaactctacttattgggcattaaaagaaggatttccaaggagatacagcgccagcaagcattgcagtcccaaaactcaagcaccatttgttcagtgtcatag

SEQ ID NO: 202392 - DNA, 1935 bp, Artificial Sequence
  derived and/or modified sequence
atgccctctaaggcggagaatcttcgtcctagtgaaccggcaccccaacctccggaaggcagaaccctccaggggcagctgccaggagccccacccgcacagcgagccggttcaccgcctgacgctcccggatccgagtcccccgcattggcttgctcgaccccagccacaccttcaggagaagatccgcctgccagggctgcccctatagctcccaggccccctgcacgaccaaggcttgagagggccttaagtctggacgacaagggatggagacgaagacgtttccgaggctcacaggaggatctcgaggccagaaacggcactagtccttcccgcggaagcgttcagagcgaggggccaggtgcaccagcacactcgtgtagccctccctgtttgtctacctctcttcaggagatacctaagtctcggggagtgctaagcagtgagcgaggatccccgtcatctggcggaaaccctctctccggcgtggcttcctcctctcccaacctgcctcaccgggacgcggctgtcgcgggttcatcacctaggctcccatcactattaccaccacggccacctccagctctctcgctggacatcgcgtctgatagcttgcgtacagcaaacaaagtggattccgatttggctgattacaagctgcgcgctcagcctttgttggtcagggcccactccagcctcgggcctggaaggccgagatcccccctggcgtgcgacgattgctctctacgatcggctaagtccagcttttcgctgctggcccctatccgctccaaggacgttcggagccgatcttacctcgaaggcagtctgctagcctccggcgcactgctcggcgcagatgaactcgcacgctatttcccagaccgaaatgtcgccctcttcgtggcgacctggaatatgcaaggtcagaaggagctccctccatcactggacgagttcctcctgccagccgaggccgattatgctcaggacctgtacgtgattggcgtgcaggagggctgttcagatagaagggaatgggagactcgcctgcaggagacactgggaccccactatgtgctgctgtcctccgccgcacacggggtgctttatatgtctttatttattcgccgtgacctgatttggttctgctccgaagtggagtgttccacggtcactaccaggattgtgtctcagatcaagacaaagggcgcactcggcatctccttcactttctttggaacttcctttctttttatcacttcccatttcacttccggagacggtaaagtagctgaaagattactcgactacacaagaacagttcaggctcttgtcctgcccaggaacgtgcccgatactaatccctatagaagctccgctgcagacgttactacacgatttgacgaggtgttttggttcggggacttcaattttcgcctaagcggtggcaggacggtcgttgatgcactgctgtgccaaggcctggtagtagatgttccagctctgttgcagcacgaccagctgatcagagaaatgcgcaaaggctccatttttaaggggtttcaggagcccgatatccatttcctgcccagctataaattcgatatcggcaaagatacctacgactcaacttctaaacagagaactccttcctatactgaccgggtgttgtaccgttctagacacaagggagatatctgcccggtgagctatagttcatgccccggtattaagacatctgatcaccgtcccgtgtacgggctctttcgggtgaaagttagacccggaagggataatattcctctcgcggcaggaaagttcgaccgcgagctttacctgctgggaattaaacgaaggatatccaaggagattcaacggcagcaggcattgcaatcccagaactcatcaaccatctgctcggtttcttag

SEQ ID NO: 202393 - DNA, 1935 bp, Artificial Sequence
  derived and/or modified sequence
atgcccagcaaggccgagaacctgagacccagcgagcccgccccccagccccccgagggcagaaccctgcagggccagctgcccggcgccccccccgcccagagagccggcagcccccccgacgcccccggcagcgagagccccgccctggcctgcagcacccccgccacccccagcggcgaggacccccccgccagagccgcccccatcgcccccagaccccccgccagacccagactggagagagccctgagcctggacgacaagggctggagaagaagaagattcagaggcagccaggaggacctggaggccagaaacggcaccagccccagcagaggcagcgtgcagagcgagggccccggcgcccccgcccacagctgcagccccccctgcctgagcaccagcctgcaggagatccccaagagcagaggcgtgctgagcagcgagagaggcagccccagcagcggcggcaaccccctgagcggcgtggccagcagcagccccaacctgccccacagagacgccgccgtggccggcagcagccccagactgcccagcctgctgccccccagacccccccccgccctgagcctggacatcgccagcgacagcctgagaaccgccaacaaggtggacagcgacctggccgactacaagctgagagcccagcccctgctggtgagagcccacagcagcctgggccccggcagacccagaagccccctggcctgcgacgactgcagcctgagaagcgccaagagcagcttcagcctgctggcccccatcagaagcaaggacgtgagaagcagaagctacctggagggcagcctgctggccagcggcgccctgctgggcgccgacgagctggccagatacttccccgacagaaacgtggccctgttcgtggccacctggaacatgcagggccagaaggagctgccccccagcctggacgagttcctgctgcccgccgaggccgactacgcccaggacctgtacgtgatcggcgtgcaggagggctgcagcgacagaagagagtgggagaccagactgcaggagaccctgggcccccactacgtgctgctgagcagcgccgcccacggcgtgctgtacatgagcctgttcatcagaagagacctgatctggttctgcagcgaggtggagtgcagcaccgtgaccaccagaatcgtgagccagatcaagaccaagggcgccctgggcatcagcttcaccttcttcggcaccagcttcctgttcatcaccagccacttcaccagcggcgacggcaaggtggccgagagactgctggactacaccagaaccgtgcaggccctggtgctgcccagaaacgtgcccgacaccaacccctacagaagcagcgccgccgacgtgaccaccagattcgacgaggtgttctggttcggcgacttcaacttcagactgagcggcggcagaaccgtggtggacgccctgctgtgccagggcctggtggtggacgtgcccgccctgctgcagcacgaccagctgatcagagagatgagaaagggcagcatcttcaagggcttccaggagcccgacatccacttcctgcccagctacaagttcgacatcggcaaggacacctacgacagcaccagcaagcagagaacccccagctacaccgacagagtgctgtacagaagcagacacaagggcgacatctgccccgtgagctacagcagctgccccggcatcaagaccagcgaccacagacccgtgtacggcctgttcagagtgaaggtgagacccggcagagacaacatccccctggccgccggcaagttcgacagagagctgtacctgctgggcatcaagagaagaatcagcaaggagatccagagacagcaggccctgcagagccagaacagcagcaccatctgcagcgtgagctag

SEQ ID NO: 202394 - protein, 437 aa, Artificial Sequence
  derived and/or modified sequence
MLQDPDSDQPLNSLDVKPLRKPRIPMETFRKVGIPIIIALLSLASIIIVVVLIKVILDKYYFLCGQPLHFIPRKQLCDGELDCPLGEDEEHCVKSFPEGPAVAVRLSKDRSTLQVLDSATGNWFSACFDNFTEALAETACRQMGYSSKPTFRAVEIGPDQDLDVVEITENSQELRMRNSSGPCLSGSLVSLHCLACGKSLKTPRVVGVEEASVDSWPWQVSIQYDKQHVCGGSILDPHWVLTAAHCFRKHTDVFNWKVRAGSDKLGSFPSLAVAKIIIIEFNPMYPKDNDIALMKLQFPLTFSGTVRPICLPFFDEELTPATPLWIIGWGFTKQNGGKMSDILLQASVQVIDSTRCNADDAYQGEVTEKMMCAGIPEGGVDTCQGDSGGPLMYQSDQWHVVGIVSWGYGCGGPSTPGVYTKVSAYLNWIYNVWKAEL

SEQ ID NO: 202395 - DNA, 1314 bp, Artificial Sequence
  derived and/or modified sequence
atgctgcaggaccccgacagcgaccagcccctgaacagcctggacgtgaagcccctgagaaagcccagaatccccatggagaccttcagaaaggtgggcatccccatcatcatcgccctgctgagcctggccagcatcatcatcgtggtggtgctgatcaaggtgatcctggacaagtactacttcctgtgcggccagcccctgcacttcatccccagaaagcagctgtgcgacggcgagctggactgccccctgggcgaggacgaggagcactgcgtgaagagcttccccgagggccccgccgtggccgtgagactgagcaaggacagaagcaccctgcaggtgctggacagcgccaccggcaactggttcagcgcctgcttcgacaacttcaccgaggccctggccgagaccgcctgcagacagatgggctacagcagcaagcccaccttcagagccgtggagatcggccccgaccaggacctggacgtggtggagatcaccgagaacagccaggagctgagaatgagaaacagcagcggcccctgcctgagcggcagcctggtgagcctgcactgcctggcctgcggcaagagcctgaagacccccagagtggtgggcgtggaggaggccagcgtggacagctggccctggcaggtgagcatccagtacgacaagcagcacgtgtgcggcggcagcatcctggacccccactgggtgctgaccgccgcccactgcttcagaaagcacaccgacgtgttcaactggaaggtgagagccggcagcgacaagctgggcagcttccccagcctggccgtggccaagatcatcatcatcgagttcaaccccatgtaccccaaggacaacgacatcgccctgatgaagctgcagttccccctgaccttcagcggcaccgtgagacccatctgcctgcccttcttcgacgaggagctgacccccgccacccccctgtggatcatcggctggggcttcaccaagcagaacggcggcaagatgagcgacatcctgctgcaggccagcgtgcaggtgatcgacagcaccagatgcaacgccgacgacgcctaccagggcgaggtgaccgagaagatgatgtgcgccggcatccccgagggcggcgtggacacctgccagggcgacagcggcggccccctgatgtaccagagcgaccagtggcacgtggtgggcatcgtgagctggggctacggctgcggcggccccagcacccccggcgtgtacaccaaggtgagcgcctacctgaactggatctacaacgtgtggaaggccgagctgtag

SEQ ID NO: 202396 - DNA, 1314 bp, Artificial Sequence
  derived and/or modified sequence
atgctgcaggatcctgactctgaccaaccactgaactctctggatgtcaagcccttacggaagcctcggatccccatggagacgtttagaaaagtgggaatacctattatcatcgcgttattgagtcttgcatccataatcattgtggttgtgctgattaaggtcatcctggacaagtactatttcctctgtgggcaaccgctgcacttcatcccaaggaagcagctgtgtgacggtgagctcgactgcccccttggagaggatgaggaacactgtgtgaaatcctttccagagggccccgcggtggcagtgcgactttccaaggacagatccaccctgcaagtgctggactccgcaactggcaattggttctccgcctgcttcgacaatttcacagaggcactggcagagaccgcctgtcggcagatgggctactcttctaaaccaacgtttcgtgctgtggagatcggaccggatcaggacctcgacgttgtagaaataactgagaattcacaggagctccgcatgcgaaactcatcaggtccctgcttatctggcagcctcgtgtccttgcactgtttggcctgtggcaagtcactgaaaaccccccgagtggtgggagtggaggaggcttctgttgactcgtggccatggcaagtcagtattcagtacgataaacaacatgtgtgcggggggagcattctggaccctcactgggtgttaaccgccgcacactgcttcagaaaacacaccgatgtattcaactggaaggtgagagccggctcagataagctcggatcttttcctagtttggcggtggctaagatcatcatcatagaattcaatccaatgtatcctaaagataatgatattgcactgatgaagcttcagtttccactgactttcagcgggacggtcaggccaatctgtttaccattctttgacgaggagttgacccccgcgactcctctgtggatcatcggctgggggttcaccaagcagaatggaggaaaaatgagcgatatccttttgcaagcttccgtgcaggtgattgacagcacaaggtgtaacgccgacgacgcttaccagggggaagtgaccgaaaaaatgatgtgtgccggcattcctgagggcggtgtcgatacatgtcaaggggactcaggcgggcctctcatgtaccagtcagaccagtggcacgtggtcggtattgtaagctggggctatgggtgtggaggacccagtaccccaggggtctacacgaaggtctccgcctacctgaattggatatacaatgtatggaaagccgagctgtag

SEQ ID NO: 202397 - DNA, 1314 bp, Artificial Sequence
  derived and/or modified sequence
atgctgcaggaccctgacagcgaccagcccctgaacagcctggatgtgaagcccctgaggaagccccgcatccccatggagaccttcaggaaggtgggcatccccatcatcatcgccctgctgagcctggccagcatcatcatcgtggtggtgctgatcaaggtgatcctggacaagtactacttcctgtgtggccagcccctgcacttcatccccaggaagcagctgtgtgatggagagctggactgccccctgggagaagatgaggagcactgtgtgaagagcttccctgagggccctgctgtggccgtgcggctgagcaaggacaggagcaccctgcaggtgctggacagcgccaccggcaactggttcagcgcctgctttgacaacttcacagaggccctggccgagacagcctgccggcagatgggctacagcagcaagcccaccttccgggctgtggagatcggccctgaccaggacctggatgtggtggagatcacagagaacagccaggagctgaggatgaggaacagcagcggcccctgcctgagcggcagcctggtgtccctgcactgcctggcctgtgggaagagcctgaagaccccccgggtggtgggcgtggaggaggcctctgtggacagctggccctggcaggtgtccatccagtatgacaagcagcacgtgtgtggcggcagcatcctggacccccactgggtgctgacagctgcccactgcttcaggaagcacacagatgtgttcaactggaaggtgcgggccggcagtgacaagctgggcagcttccccagcctggccgtggccaagatcatcatcatcgagttcaaccccatgtaccccaaggacaatgacatcgccctgatgaagctgcagttccccctgaccttctctggaacagtgcggcccatctgcctgcccttctttgatgaggagctgaccccagccacccccctgtggatcatcggctggggcttcaccaagcagaatggaggcaagatgtctgacatcctgctgcaggcctctgtgcaggtgattgacagcacccgctgcaatgctgatgatgcctaccagggcgaggtgacagagaagatgatgtgtgccggcatccctgagggcggcgtggacacctgccagggcgacagcggcggccccctgatgtaccagagcgaccagtggcacgtggtgggcatcgtgtcctggggctacggctgcggcggccccagcaccccaggagtgtacaccaaggtgtctgcctacctgaactggatctacaacgtgtggaaggccgagctgtag

SEQ ID NO: 202398 - DNA, 1314 bp, Artificial Sequence
  derived and/or modified sequence
atgctgcaggaccccgacagcgaccagcccctgaacagcctggacgttaagccccttcggaagcctaggatccctatggagacattccgcaaagtggggatccctattattatcgccttgttgagccttgcttcgataatcatcgtcgtcgtgttaattaaagtgattctggataagtactacttcctgtgcggccagcctttacattttattcctcgcaagcaactgtgtgacggcgagctagactgccctctgggcgaggatgaagaacactgcgtaaaatcatttcccgaaggacccgccgtcgccgtgcgtctgtcaaaggaccgctccacactccaagtcttagatagcgcaacagggaactggttttctgcctgtttcgataactttaccgaagccttggcagagacagcgtgtcgtcaaatgggctacagcagtaaacctacctttcgcgccgtggagatcggccccgaccaggacttggacgtggtggagattacagaaaatagccaggaactgagaatgcggaactcaagcggtccctgcctttccggctccctagtgtcactccattgcttggcatgtgggaagtcattgaagacccctcgcgtagtaggcgtggaggaggcttccgtcgactcttggccctggcaggtgagcatccagtacgacaaacagcatgtgtgcggcggatctatccttgatccgcactgggtgctaacagctgcccattgcttccggaaacacaccgatgtctttaattggaaggtgcgcgccggatctgataagctgggaagtttcccgagtctcgccgtcgctaagatcataatcattgagttcaatcccatgtatccgaaagataatgacattgcattgatgaagctgcaatttcctcttacattctctggaacagtacgacccatatgtttgcctttcttcgacgaagaactgacaccagctaccccgctgtggattattggttgggggttcacaaaacaaaatggcggcaagatgtcagacatcctgcttcaggccagcgtccaggtgatagactctacccgctgtaatgccgatgatgcatatcagggggaagtcaccgagaaaatgatgtgtgcaggcatcccagaagggggcgtggacacttgtcagggagactcaggaggccctcttatgtatcagtcagatcaatggcatgtcgtcggcatcgtgagttgggggtatggatgtgggggcccctccacaccaggcgtgtatactaaggtgagcgcatacctgaactggatttataatgtttggaaagcagaactatag

SEQ ID NO: 202399 - DNA, 1314 bp, Artificial Sequence
  derived and/or modified sequence
atgctccaggacccagacagcgaccaaccgcttaactccctcgacgttaaacctctgaggaagccccgaattccaatggaaaccttccggaaggtgggtatcccaattattattgctctgctgtcgctggcaagcatcattatcgtggtggtgcttatcaaagttattcttgacaaatattatttcctgtgcggacaacccctccacttcatccccagaaagcagctctgtgacggggagttggattgcccgctcggagaggatgaggagcattgcgtgaagagtttccctgaagggcctgccgtagctgttaggctctctaaggatagaagcactttacaggtgctcgattcagctaccggcaattggtttagcgcgtgctttgacaacttcacggaggctttggctgaaaccgcctgtaggcaaatgggctactcaagtaagcctaccttccgggctgtggaaattggccctgatcaggacctggatgtggtggagattacagaaaattctcaagagctccgcatgcgcaattcctctggcccatgcctgtcaggaagtttagtgagccttcattgcctggcctgcggaaagtctttaaagacacctagggtcgtaggggttgaagaggcatctgttgactcatggccctggcaggttagtatccagtacgacaagcagcacgtgtgcggaggatcgattctggaccctcactgggtcctgacagccgcacactgtttcaggaagcataccgacgtgttcaattggaaggtgcgggcaggctccgacaagcttggctcatttccctcattggccgttgctaaaataataatcatcgagttcaaccccatgtaccccaaggataatgacattgccctgatgaaacttcagtttcccctgacgttcagcgggaccgtccggccaatctgcctccctttctttgatgaggagctcacccctgcaacacccctttggattatcgggtggggctttaccaaacagaacgggggaaagatgtcagatatcttactgcaggcgtcagtccaagttatcgactcaacacgatgcaatgccgacgatgcctaccagggggaagtgactgaaaagatgatgtgcgccggaatacccgaagggggagttgatacttgtcaaggcgactcaggaggccctctcatgtaccagtccgatcagtggcacgttgttggcattgtttcctggggatacggttgcggaggaccatccactcccggagtctatacaaaagtgtctgcctatctgaattggatatataatgtgtggaaggccgagctctag

SEQ ID NO: 202400 - DNA, 2074 bp, Artificial Sequence
  derived and/or modified sequence
acacagagagaggcagcagcttgctcagcggacaaggatgctgggcgtgagggaccaaggcctgccctgcactcgggcctcctccagccagtgctgaccagggacttctgacctgctggccagccaggacctgtgtggggaggccctcctgctgccttggggtgacaatctcagctccaggctacagggagaccgggaggatcacagagccagcatgttacaggatcctgacagtgatcaacctctgaacagcctcgatgtcaaacccctgcgcaaaccccgtatccccatggagaccttcagaaaggtggggatccccatcatcatagcactactgagcctggcgagtatcatcattgtggttgtcctcatcaaggtgattctggataaatactacttcctctgcgggcagcctctccacttcatcccgaggaagcagctgtgtgacggagagctggactgtcccttgggggaggacgaggagcactgtgtcaagagcttccccgaagggcctgcagtggcagtccgcctctccaaggaccgatccacactgcaggtgctggactcggccacagggaactggttctctgcctgtttcgacaacttcacagaagctctcgctgagacagcctgtaggcagatgggctacagcagcaaacccactttcagagctgtggagattggcccagaccaggatctggatgttgttgaaatcacagaaaacagccaggagcttcgcatgcggaactcaagtgggccctgtctctcaggctccctggtctccctgcactgtcttgcctgtgggaagagcctgaagaccccccgtgtggtgggtgtggaggaggcctctgtggattcttggccttggcaggtcagcatccagtacgacaaacagcacgtctgtggagggagcatcctggacccccactgggtcctcacggcagcccactgcttcaggaaacataccgatgtgttcaactggaaggtgcgggcaggctcagacaaactgggcagcttcccatccctggctgtggccaagatcatcatcattgaattcaaccccatgtaccccaaagacaatgacatcgccctcatgaagctgcagttcccactcactttctcaggcacagtcaggcccatctgtctgcccttctttgatgaggagctcactccagccaccccactctggatcattggatggggctttacgaagcagaatggagggaagatgtctgacatactgctgcaggcgtcagtccaggtcattgacagcacacggtgcaatgcagacgatgcgtaccagggggaagtcaccgagaagatgatgtgtgcaggcatcccggaagggggtgtggacacctgccagggtgacagtggtgggcccctgatgtaccaatctgaccagtggcatgtggtgggcatcgttagttggggctatggctgcgggggcccgagcaccccaggagtatacaccaaggtctcagcctatctcaactggatctacaatgtctggaaggctgagctgtaatgctgctgcccctttgcagtgctgggagccgcttccttcctgccctgcccacctggggatcccccaaagtcagacacagagcaagagtccccttgggtacacccctctgcccacagcctcagcatttcttggagcagcaaagggcctcaattcctataagagaccctcgcagcccagaggcgcccagaggaagtcagcagccctagctcggccacacttggtgctcccagcatcccagggagagacacagcccactgaacaaggtctcaggggtattgctaagccaagaaggaactttcccacactactgaatggaagcaggctgtcttgtaaaagcccagatcactgtgggctggagaggagaaggaaagggtctgcgccagccctgtccgtcttcacccatccccaagcctactagagcaagaaaccagttgtaatataaaatgcactgccctactgttggtatgactaccgttacctactgttgtcattgttattacagctatggccactattattaaagagctgtgtaacatctctggcata

SEQ ID NO: 202401 - protein, 117 aa, Artificial Sequence
  derived and/or modified sequence
MAAAAAAGSGTPREEEGPAGEAAASQPQAPTSVPGARLSRLPLARVKALVKADPDVTLAGQEAIFILARAAELFVETIAKDAYCCAQQGKRKTLQRRDLDNAIEAVDEFAFLEGTLD

SEQ ID NO: 202402 - DNA, 354 bp, Artificial Sequence
  derived and/or modified sequence
atggcagctgccgctgcagcaggcagcggcacaccccgcgaggaggaaggacctgctggagaagccgcggcaagccagccccaagccccaacgtctgttcctggagcaaggctgagtcgcttaccattagctagggtgaaagccttagttaaggccgatccagacgtgaccctggccgggcaggaagctatcttcatccttgcccgtgcagcagaactgtttgtggaaaccattgctaaagacgcttactgctgcgctcagcagggtaaaagaaagacactgcagcgacgtgacctggataacgcaatcgaagccgttgatgagtttgccttcttggaaggcacacttgattag

SEQ ID NO: 202403 - DNA, 354 bp, Artificial Sequence
  derived and/or modified sequence
atggctgctgctgctgctgctggcagcggcaccccccgggaggaggagggccctgctggggaggccgccgccagccagccccaggcccccacctctgtgcctggggcccggctgagccggctgcccctggcccgggtgaaggccctggtgaaggctgaccctgatgtgaccctggccggccaggaggccatcttcatcctggcccgggctgctgagctgtttgtggagaccatcgccaaggatgcctactgctgtgcccagcagggcaagaggaagaccctgcagaggcgggacctggacaatgccattgaagctgtggatgaatttgccttcctggagggcaccctggactag

SEQ ID NO: 202404 - DNA, 354 bp, Artificial Sequence
  derived and/or modified sequence
atggccgccgccgccgccgccggcagcggcaccccccgggaggaggaggggcccgccggggaagccgcggcatctcagccacaggccccgacgtctgttcccggcgccaggctctcgcggttgccactcgcccgggtcaaggccctggtaaaggccgaccctgatgtcactcttgccggtcaggaggccattttcatcctggcaagggccgccgaactcttcgtcgaaaccatcgccaaggatgcctattgctgtgcccagcagggaaagagaaagaccttacagagaagagatttggataatgctatcgaggccgtggatgaatttgcgttcctggaagggaccctcgattag

SEQ ID NO: 202405 - DNA, 1248 bp, Artificial Sequence
  derived and/or modified sequence
cgggtggctaggcgcgtgggaagagccggagcccgacccccgcccacccggtttcctggcagcgcactgccgcgtaggggcggagccgcgcgcctacacagggtgtggcctccagcccgcgcgggaaagggcctgcgccgcatgcgcgcgcacagtcggcggccgcgcgcagcacgctcaaggccgggatggcggcggcggcggcggcaggaagcgggacgccccgagaggaggagggacctgctggggaggcagcggcctcgcagccccaggccccaacgagtgtgcctggggctcgtctctcgaggttgcctctggcgcgagtgaaggccttggtgaaggcagatcccgacgtgacgctagcgggacaggaagccatcttcattctggcacgagccgcggaactgtttgtggagaccattgcaaaagatgcctactgttgcgctcagcagggaaaaaggaaaacccttcagaggagagacttggataatgcaatagaagctgtggatgaatttgcttttctggaaggtactttagattgattgccgagcggggcagttttgtgagccttcatctgaagccttcagttcacccctctgcacaggcctcagctttgaagaacggagtctttgcacttacacacactcttcctgttctgccttcacctatgccgggataagcagagatctcatcaattagctcttctctgcaaggtcttccactatttctgtctgtcttccatatcaagcctggatgcagctgctgctgcttagagcagagatgaagaaagtgttctgcataagtggcttcctgaatgatgaggaccagaataaaggtttttgatcaacctcagtccagtgtgttttataatctcgcctttgttcctaccctgtgactggagagtcaccatacctggtcacagaccttcctgatcttccctgccagccattctaacatacagtcctttcattaattttgttcttttatttttccagcacatcaccagaaagtggttccagaatttatggaacaccacttgccctcaggagttcaaataaatatggtcctagattgaaagccagttaaattttttttaagttttatttattgacatatccacatactctatatttcaccaatttaaagtgtacaattcagtggtatttagtatattcacaaatatgtacaccagtcatcacagtcgattttagaacattttatttatttatttattattattatacttta

SEQ ID NO: 202406 - DNA, 354 bp, Artificial Sequence
  derived and/or modified sequence
atggccgctgctgctgccgctggatccggcactcccagagaagaggaaggcccagccggagaggcagctgccagccagccacaggctccaacttctgttcccggtgcacggttaagcaggctcccgttagctagggtcaaagctctggtgaaagccgatcctgacgtgactctagctggccaagaggcaatcttcattttggccagagcagccgaactctttgtggagaccattgctaaagacgcttactgctgcgcccaacaaggtaaacgcaaaaccttgcagagaagagacttggacaacgctatcgaggcagtggacgaatttgcgttcttagaagggacgctggattag

SEQ ID NO: 202407 - DNA, 354 bp, Artificial Sequence
  derived and/or modified sequence
atggccgccgccgccgccgccggcagcggcacccccagagaggaggagggccccgccggcgaggccgccgccagccagccccaggcccccaccagcgtgcccggcgccagactgagcagactgcccctggccagagtgaaggccctggtgaaggccgaccccgacgtgaccctggccggccaggaggccatcttcatcctggccagagccgccgagctgttcgtggagaccatcgccaaggacgcctactgctgcgcccagcagggcaagagaaagaccctgcagagaagagacctggacaacgccatcgaggccgtggacgagttcgccttcctggagggcaccctggactag

SEQ ID NO: 202408 - protein, 319 aa, Artificial Sequence
  derived and/or modified sequence
MEKANETSPVMGFVLLRLSAHPELEKTFFVLILLMYLVILLGNGVLILVTILDSRLHTPMYFFLGNLSFLDICFTTSSVPLVLDSFLTPQETISFSACAVQMALSFAMAGTECLLLSMMAFDRYVAICNPLRYSVIMSKAAYMPMAASSWAIGGAASVVHTSLAIQLPFCGDNVINHFTCEILAVLKLACADISINVISMEVTNVIFLGVPVLFISFSYVFIITTILRIPSAEGRKKVFSTCSAHLTVVIVFYGTLFFMYGKPKSKDSMGADKEDLSDKLIPLFYGVVTPMLNPIIYSLRNKDVKAAVRRLLRPKGFTQ

SEQ ID NO: 202409 - DNA, 960 bp, Artificial Sequence
  derived and/or modified sequence
atggagaaggccaacgagaccagccccgtgatgggcttcgtgctgctgagactgagcgcccaccccgagctggagaagaccttcttcgtgctgatcctgctgatgtacctggtgatcctgctgggcaacggcgtgctgatcctggtgaccatcctggacagcagactgcacacccccatgtacttcttcctgggcaacctgagcttcctggacatctgcttcaccaccagcagcgtgcccctggtgctggacagcttcctgaccccccaggagaccatcagcttcagcgcctgcgccgtgcagatggccctgagcttcgccatggccggcaccgagtgcctgctgctgagcatgatggccttcgacagatacgtggccatctgcaaccccctgagatacagcgtgatcatgagcaaggccgcctacatgcccatggccgccagcagctgggccatcggcggcgccgccagcgtggtgcacaccagcctggccatccagctgcccttctgcggcgacaacgtgatcaaccacttcacctgcgagatcctggccgtgctgaagctggcctgcgccgacatcagcatcaacgtgatcagcatggaggtgaccaacgtgatcttcctgggcgtgcccgtgctgttcatcagcttcagctacgtgttcatcatcaccaccatcctgagaatccccagcgccgagggcagaaagaaggtgttcagcacctgcagcgcccacctgaccgtggtgatcgtgttctacggcaccctgttcttcatgtacggcaagcccaagagcaaggacagcatgggcgccgacaaggaggacctgagcgacaagctgatccccctgttctacggcgtggtgacccccatgctgaaccccatcatctacagcctgagaaacaaggacgtgaaggccgccgtgagaagactgctgagacccaagggcttcacccagtag

SEQ ID NO: 202410 - DNA, 960 bp, Artificial Sequence
  derived and/or modified sequence
atggaaaaggcgaacgaaacatcccctgtgatgggttttgtcttgttaaggctttccgcccaccctgaactggagaaaacgtttttcgtgctgatcctgcttatgtacctcgtcatactcctggggaacggtgtgctgattctggtgactatcttagatagccggttacataccccaatgtacttctttctgggtaacctgtctttcctggatatctgctttacgacttcatccgtacccctagtactggatagttttctgacaccgcaggagacaatcagctttagtgcctgcgcagtccagatggccctatcattcgcgatggcgggcaccgaatgcttgctcctttccatgatggcgttcgacaggtacgtcgctatctgtaatcccctacgttatagcgtgattatgtcaaaagctgcctatatgcccatggctgcttcatcctgggccatcgggggcgccgcttcggttgtgcatactagcttggctattcagttgcccttctgtggagacaacgtcatcaatcactttacctgcgaaatcctcgcagtgctgaagctcgcgtgcgctgacatttccattaatgttatctctatggaagtcaccaatgtgatttttctaggcgtgcctgttctctttatcagcttctcctacgtgtttattataactaccatcctgcgaattccgtccgcagagggccgcaaaaaagtgtttagcacctgctccgcccacttaactgtggtgatcgttttttacggcacattatttttcatgtacggtaaacctaagtccaaggattctatgggcgctgataaggaggatctttctgacaaactgatcccactgttttacggtgtcgtgacacccatgcttaaccctatcatatatagtttgcgtaacaaggatgtgaaggccgccgtcaggagactgcttaggcctaaaggcttcacccagtag

SEQ ID NO: 202411 - DNA, 960 bp, Artificial Sequence
  derived and/or modified sequence
atggagaaggccaatgagaccagccctgtgatgggctttgtgctgctgcggctgagcgcccaccctgagctggagaagaccttctttgtgctgatcctgctgatgtacctggtgatcctgctgggcaatggagtgctgatcctggtgaccatcctggacagccggctgcacacccccatgtacttcttcctgggcaacctgtccttcctggacatctgcttcaccaccagctctgtgcccctggtgctggacagcttcctgaccccccaggagaccatctccttcagcgcctgtgctgtgcagatggccctgagctttgccatggccggcacagagtgcctgctgctgtccatgatggcctttgaccgctacgtggccatctgcaaccccctgcgctacagcgtcatcatgagcaaggccgcctacatgcccatggccgccagctcctgggccatcggcggggccgcctctgtggtgcacaccagcctggccatccagctgcccttctgtggggacaacgtcatcaaccacttcacctgtgagatcctggccgtgctgaagctggcctgtgccgacatcagcatcaacgtcatctccatggaggtgaccaacgtcatcttcctgggcgtgcctgtgctcttcatctccttctcctatgtgttcatcatcaccaccatcctgcgcatccccagcgctgagggcaggaagaaggtgttcagcacctgcagcgcccacctgactgtggtgattgtgttctacggcaccctcttcttcatgtatggcaagcccaagagcaaggacagcatgggcgctgacaaggaggacctgagtgacaagctgatccccctcttctatggagtggtgacccccatgctgaaccccatcatctacagcctgaggaacaaggatgtgaaggctgctgtgcggcggctgctgcggcccaagggcttcacccagtag

SEQ ID NO: 202412 - DNA, 1047 bp, Artificial Sequence
  derived and/or modified sequence
tcccaaaaagcctgatgcgctgctcagtactttgctgatggcagaggggatatcacatggaaaaagccaatgagacctcccctgtgatggggttcgttctcctgaggctctctgcccacccagagctggaaaagacattcttcgtgctcatcctgctgatgtacctcgtgatcctgctgggcaatggggtcctcatcctggtgaccatccttgactcccgcctgcacacgcccatgtacttcttcctagggaacctctccttcctggacatctgcttcactacctcctcagtcccactggtcctggacagctttttgactccccaggaaaccatctccttctcagcctgtgctgtgcagatggcactctcctttgccatggcaggaacagagtgcttgctcctgagcatgatggcatttgatcgctatgtggccatctgcaacccccttaggtactccgtgatcatgagcaaggctgcctacatgcccatggctgccagctcctgggctattggtggtgctgcttccgtggtacacacatccttggcaattcagctgcccttctgtggagacaatgtcatcaaccacttcacctgtgagattctggctgttctaaagttggcctgtgctgacatttccatcaatgtgatcagcatggaggtgacgaatgtgatcttcctaggagtcccggttctgttcatctctttctcctatgtcttcatcatcaccaccatcctgaggatcccctcagctgaggggaggaaaaaggtcttctccacctgctctgcccacctcaccgtggtgatcgtcttctacgggaccttattcttcatgtatgggaagcctaagtctaaggactccatgggagcagacaaagaggatctttcagacaaactcatcccccttttctatggggtggtgaccccgatgctcaaccccatcatctatagcctgaggaacaaggatgtgaaggctgctgtgaggagactgctgagaccaaaaggcttcactcagtgatggtggaagggtcctctgtgattgtcaccca

SEQ ID NO: 202413 - DNA, 960 bp, Artificial Sequence
  derived and/or modified sequence
atggagaaggccaacgagaccagccccgtgatgggcttcgtgctgctaaggttatccgcccatcctgaactcgagaaaactttctttgtgcttattctcctcatgtatctggtgatcctcctaggtaacggagtattgattctagtgactatccttgattctcgtctccatacacctatgtattttttcctaggcaacctcagcttcctcgacatctgctttacgacgtcatcagtcccgcttgtgctcgattctttcctcacaccccaggaaacaataagtttttcagcatgcgctgtgcagatggccctctcctttgctatggcggggactgaatgtctcctgctgagcatgatggcattcgaccgatacgttgcaatctgtaaccccctaaggtactcagtcattatgtctaaagccgcgtacatgcccatggcggcttcatcctgggccatcggcggtgctgcttctgtagtccacacgtcactggcaatccagttgcctttttgtggcgataacgtgatcaatcacttcacatgcgagatcttggccgttctcaagctggcctgtgccgacatatccattaacgtcattagtatggaagtgacaaacgtgattttcttaggcgtccctgtgttgtttatcagtttttcctacgtcttcatcatcacaacaattctgcgtatcccgtccgctgaaggcagaaagaaagttttcagcacctgcagtgctcacctcacagtcgtcatcgtcttttatgggacgctattctttatgtatggtaagccaaagtctaaagacagcatgggggcggataaagaggacctctctgataaactaatcccgcttttctacggtgtggttaccccgatgctcaatcctatcatctacagcctcagaaacaaagacgtgaaggcggcggtgcggcggctcctgcgcccaaaaggatttacccaatag

SEQ ID NO: 202414 - DNA, 960 bp, Artificial Sequence
  derived and/or modified sequence
atggaaaaggcaaacgagacatcacctgtcatgggattcgtgcttctgcgactcagcgcccacccagagctggagaagactttctttgtgcttatcttgctgatgtacctcgttattttactgggcaatggagtcctcattttagtgacaattctggattccaggctgcatacccctatgtacttctttctcggaaatctgtcctttctagatatttgcttcacaactagctctgtgcctctcgttttggacagcttcctcactccacaggagaccatcagcttctctgcctgtgcagttcagatggctctttctttcgcaatggctggaacagagtgtttactactgagtatgatggcttttgaccgctatgttgctatatgcaaccctctgcgctacagcgtcattatgtcgaaggcagcatatatgccgatggctgctagctcttgggcaatcggcggagcagcctcagtggtgcacacgagcttagccatacagttgcccttctgcggtgacaatgtgatcaaccatttcacctgtgaaatcttggctgtattgaaactcgcttgcgctgacatttctattaatgtgatttcaatggaggtgaccaatgtgatcttcttgggtgtgcccgtcttgttcatttccttcagttacgtgtttattataactactatccttcgtatcccctcggctgaaggcaggaagaaagtgttttctacgtgttccgctcatttaaccgtggtaattgtattttatggcaccttgttttttatgtatgggaagccgaagtccaaggattcgatgggcgctgacaaagaagatctgagcgacaagctcatccccctcttttatggagtggtcacgccaatgcttaaccctataatttacagccttcgtaacaaggacgttaaggcagctgtgagacggctcctgaggcctaagggttttacccaatag

SEQ ID NO: 202415 - protein, 574 aa, Artificial Sequence
  derived and/or modified sequence
MELKAEEEEVGGVQPVSIQAFASSSTLHGLAHIFSYERLSLKRALWALCFLGSLAVLLCVCTERVQYYFHYHHVTKLDEVAASQLTFPAVTLCNLNEFRFSQVSKNDLYHAGELLALLNNRYEIPDTQMADEKQLEILQDKANFRSFKPKPFNMREFYDRAGHDIRDMLLSCHFRGEVCSAEDFKVVFTRYGKCYTFNSGRDGRPRLKTMKGGTGNGLEIMLDIQQDEYLPVWGETDETSFEAGIKVQIHSQDEPPFIDQLGFGVAPGFQTFVACQEQRLIYLPPPWGTCKAVTMDSDLDFFDSYSITACRIDCETRYLVENCNCRMVHMPGDAPYCTPEQYKECADPALDFLVEKDQEYCVCEMPCNLTRYGKELSMVKIPSKASAKYLAKKFNKSEQYIGENILVLDIFFEVLNYETIEQKKAYEIAGLLGELLMTPVPFSCHGHGVAPYHPKAGCSLLSHEGPPPQRPFPKPCCLGDIGGQMGLFIGASILTVLELFDYAYEVIKHKLCRRGKCQKEAKRSSADKGVALSLDDVKRHNPCESLRGHPAGMTYAANILPHHPARGTFEDFTC

SEQ ID NO: 202416 - DNA, 1725 bp, Artificial Sequence
  derived and/or modified sequence
atggagctgaaggcggaagaggaggaagttggcggagttcagccagtcagcatacaggcctttgccagttcatccacactgcatggcttggctcacatattctcttacgaaaggttgagtcttaagcgggccctgtgggcgttgtgttttctgggatcactcgctgtgctgttatgtgtctgtaccgagagagtgcagtactactttcactaccaccacgtcactaagttagatgaggtcgctgccagccagctgaccttccctgctgtgactttatgtaacttaaatgagttcaggttctctcaagtaagcaagaacgatctgtatcatgctggggagcttttagcactgctcaacaacaggtatgagatccccgacacgcaaatggccgacgagaaacagttggagattctccaggacaaagccaacttccgctccttcaagccaaagccattcaatatgcgcgaattttatgacagagccgggcatgacatacgggatatgttactctcatgtcactttcgtggtgaagtttgcagtgcggaggactttaaagttgttttcactaggtacggtaaatgctatacctttaatagtggtagagacgggcgcccaagactgaagactatgaagggaggaaccgggaacggtctcgaaattatgctcgacatccagcaggacgagtatcttccagtttggggcgaaaccgatgagacaagttttgaagcaggcataaaagtacagattcactcccaagatgaaccaccatttattgaccagctgggtttcggggtcgcccctgggttccagacatttgtggcttgtcaggagcagaggctcatttatctgccccccccttggggtacatgcaaggcggtcacaatggactcggatctcgactttttcgattcctattcgataaccgcatgcaggatcgactgtgaaacacgctacctggtggaaaattgcaattgccgtatggtacatatgccaggggatgctccttactgtacacctgaacagtataaagagtgcgccgatccagctctggactttctggtcgagaaggaccaggaatactgtgtatgcgagatgccttgtaacctgaccagatatggaaaggagctgtctatggtaaagatccccagcaaagcatctgcaaagtatcttgctaagaagttcaacaaatcagagcagtacattggcgagaacattctggtgctcgatatcttctttgaagtgctcaactacgaaactatcgagcaaaagaaggcttacgagatagctggcctcctcggcgagttactcatgaccccagtccccttttcttgtcacggccacggtgtggctccttaccatcccaaggctgggtgcagcctgttgagccatgaaggaccccctccccaacggccattccccaaaccctgctgcttaggcgacatcggaggccagatgggcttgttcattggtgcatccattcttaccgttttagagctttttgactacgcgtatgaggttatcaagcacaaactctgtcgcaggggaaagtgtcagaaggaagcaaagagatcatcagctgataagggggttgccctgagtctcgacgacgttaagcgtcacaacccttgcgaatccttgcgaggccatccagcagggatgacctacgccgctaacattctgccacaccaccccgctaggggaacatttgaggatttcacttgttag

SEQ ID NO: 202417 - DNA, 1725 bp, Artificial Sequence
  derived and/or modified sequence
atggagctgaaggccgaggaggaggaggtgggcggcgtgcagcctgtgtccatccaggcctttgccagcagcagcaccctgcacggcctggcccacatcttctcctatgaaaggctgagcctgaagagggccctgtgggccctgtgcttcctgggcagcctggccgtgctgctgtgtgtgtgcacagagcgggtgcagtactacttccactaccaccacgtgaccaagctggatgaggtggccgccagccagctgaccttccctgctgtgaccctgtgcaacctgaatgagttccgcttcagccaggtgtccaagaatgacctgtaccacgccggggagctgctggccctgctgaacaacagatatgagatcccagacacccagatggctgatgagaagcagctggagatcctgcaggacaaggccaacttccgctccttcaagcccaagcccttcaacatgagggagttctatgacagagctggccatgacatccgggacatgctgctgagctgccacttccggggggaggtgtgcagcgctgaggacttcaaggtggtgttcaccaggtatggcaagtgctacaccttcaacagcggcagagatggccggccccggctgaagaccatgaagggcggcactggaaatggcctggagatcatgctggacatccagcaggatgagtacctgcctgtgtggggcgagacagatgagaccagctttgaagctggcatcaaggtgcagatccacagccaggatgagccccccttcatcgaccagctgggctttggagtggcccctggcttccagacctttgtggcctgccaggagcagaggctcatctacctgcccccaccctggggcacctgcaaggctgtgaccatggacagcgacctggacttctttgacagctacagcatcacagcctgcagaattgactgtgagacccgctacctggtggagaactgcaactgcaggatggtgcacatgcctggagatgccccctactgcaccccagagcagtacaaggaatgtgccgaccctgccctggacttcctggtggagaaggaccaggagtactgtgtgtgtgagatgccctgcaacctgaccaggtatggcaaggagctgtccatggtgaagatccccagcaaggccagcgccaagtacctggccaagaagttcaacaagtctgagcagtacatcggggagaacatcctggtgctggacatcttctttgaggtgctgaactatgagaccatcgagcagaagaaggcctatgaaattgctggcctgctgggggagctgctgatgacccctgtgcccttcagctgccacggccatggagtggccccctaccaccccaaggccggctgcagcctgctgagccatgagggccccccaccccagaggcccttccccaagccctgctgcctgggggacattggaggccagatgggcctcttcatcggggccagcatcctgactgtgctggagctgtttgattatgcctatgaggtgatcaagcacaagctgtgcagaagaggcaagtgccagaaggaggccaagaggagcagcgctgacaagggcgtggccctgagcctggatgatgtgaagaggcacaacccctgtgagagcctgcggggccaccctgctggcatgacctacgccgccaacatcctgccccaccacccagcccggggcacctttgaggacttcacctgctag

SEQ ID NO: 202418 - DNA, 4072 bp, Artificial Sequence
  derived and/or modified sequence
agacagcctcgcagacactcgtaggcgcgcacgcgcaccctctcccctccccctcccctcccgccgcctcccggccggacgatggatccctgcagatcccagggctgagagcaccgcgcaccgcgccgagcccgggcagaccgagccgaggcgagcgagccagcgagccagcgcgcgcgggcgggcggacagatcggagccgagcggggccgggcggggcgctccctgcagggctctgcgcggcgtgccgcggcggccgcgggctccggccccgggccatgagcccctccgcgactcggcgctgagcccgccaccggtccagcgccccaggacccgccgccggctgccggcttgccgaagccccctcaggatcccctcaacaaggatggaactgaaggccgaggaggaggaggtgggtggcgtccagccggtgagcatccaggccttcgccagcagctccacactgcacggcctggcccacatcttctcctacgagcggctgtctctgaagcgggcactgtgggccctgtgcttcctgggctccctggctgtgctgctgtgtgtgtgcacggagcgtgtgcagtactacttccactaccaccatgtcaccaagctcgacgaggtggctgcctctcagcttaccttccctgctgtcacgctgtgcaacctcaacgagttccgctttagccaagtctccaagaatgacctgtatcatgctggggagctgctggccctgctcaacaacaggtatgagataccagacacacagatggcagatgaaaagcagctggagatactgcaggacaaagccaacttccgcagcttcaaacccaaacccttcaacatgcgtgagttctacgaccgagctgggcacgacattcgagacatgctgctctcctgccacttccggggggaggtctgcagcgctgaagacttcaaggtggtcttcacacgctatggaaagtgctacacgttcaactcgggccgagatgggcggccgcggctgaagaccatgaagggtgggacgggcaatgggctggaaatcatgctggacatccagcaggacgagtacctgcctgtgtggggggagactgacgagacgtccttcgaagcaggcatcaaagtgcagatccatagtcaggatgaacctcctttcatcgaccagctgggctttggcgtggccccaggcttccagacctttgtggcctgccaggagcagcggctcatctacctgcccccaccctggggcacctgcaaagctgttaccatggactcggatttggatttcttcgactcctacagcatcactgcctgccgcatcgactgtgagacgcgctacctggtggagaactgcaactgccgcatggtgcacatgccaggggatgccccatactgtactccagagcagtacaaggagtgtgcagatcctgctctggacttcctggtggagaaggaccaggagtactgcgtgtgtgaaatgccttgcaacctgacccgctatggcaaagagctgtccatggtcaagatccccagcaaagcctcagccaagtacctggccaagaagttcaacaaatctgagcaatacataggggagaacatcctggtgctggacattttctttgaagtcctcaactatgagaccattgaacagaagaaggcctatgagattgcagggctcctgggtgagctgctgatgacacctgtccccttctcatgccatgggcatggcgtggctccctatcatccaaaagcagggtgctcacttctgtcccatgagggtcctccaccccagaggcccttccccaaaccctgttgtcttggtgacatcgggggccagatggggctgttcatcggggccagcatcctcacggtgctggagctctttgactacgcctacgaggtcattaagcacaagctgtgccgacgaggaaaatgccagaaggaggccaaaaggagcagtgcggacaagggcgtggccctcagcctggacgacgtcaaaagacacaacccgtgcgagagccttcggggccaccctgccgggatgacatacgctgccaacatcctacctcaccatccggcccgaggcacgttcgaggactttacctgctgagccccgcaggccgctgaaccaaaggcctagatggggaggactaggagagcgagggggcccccagctgcctcctcacatctgccctggggactccccacactccggggcagatctttcctcttgtctgtggtaaggaaggagtcttgaccatagagtcctctctctgcctctatcccattctttttacatttaacaaaactaatctaaaaaagaactaaaaagggagaacggggcaagggacctcaggctgcccctctctcctccatgctgcctcccctagctcccagcctgaattctgtctatctagctgtctgccatctgagtgtccatctacattctgctgccaccagtcaccaaaggcccttcccagtgaggggtggaagggatctctggggtctggaatttggccccaaaccagagaatgtaccttaagggggagggctagtgtgggggagggaggcttccccagccttaagagaccctctcagcccagtgactgtccccaaacccaagtctcctggcaggaactaaaacctcagccccactctctcacaccatgtggaatctcgtgggggtcggggatccccttaagaagtggtaatggggacaagatgcggccctggtgctgtaggctacatcctgatacctataagttcacccccaccccacagctgctggagagaaatcccaagaggcagcccttcctcaccatcccattaaagaccgggctggttagcgtccagctcagggagaagggcgctagtgcctaacctcactggtccctctcccggaggcccttgtagagggccacgtccataaattttcttatggaactctcccacatcctcttccccaacttcatttgcttctctcaacaacctcatctgcattttctatttctatatgatacagactctatattgctatatctctgtatatactttcccagccctgtctgtctccaccccatcccctcttgtctctgagaaccattctcccaccccaagttccaccttctatgtttctactccctccctggtctctgaatgccttcgcctgtataaagagttggactctctcccctggtgtctgtactgtgtacacacatccctctgagaagcacaaggagacgacacgcgcattgtaacctttgcactgtctcagtggcgacaaaggaagctgtgaatcacaagctctgcctctttctggcctcaccctctcccccaacccgggcaccctcggccctccctgcagccttaacattctcttcccctgctcctcctatcccattgccctctgcccagctgacagtggcatccccagggaaggggttgctgtagagatagcccccacccaggggatggaggtctaccctggacactaagccaagtgtgtcagagacagaagggagctggggattggcgactcctgaagttggggcagtgggatgctgacaggcagaagctgaggtcctcagtcagtggcctttcctccttctgggtgcccagccccctttcctcacctgatacccaagcccaccacttttattttctggtgaggtgggtttgggaggaaagagaggcctagaggaggagttgaaagctctgctgttgtctcaccctatcttaatgagagacaagtgaggtggagggcctgccccccctccctccaccagacactccttccaggcctgagccccaacccctcttcaggccttccttccctagctgtgtcttggtcttcaatcccagaacaggacctgtgagcagctgcattggcctggagctggagagtaaggctgtaggatctttggaatctcttggttcctaagagtttcctcagagatcatacctccccagagggaagcaggaatgaggccaaaaagtgtgcattggataggggaacagcaggcagggctctgggtgacgcatgcctctggtctaataaactgggtttcaacca

SEQ ID NO: 202419 - DNA, 1725 bp, Artificial Sequence
  derived and/or modified sequence
atggagctgaaggccgaggaggaggaggtgggcggcgtgcagcccgtaagcatccaggccttcgcctcctcatccacactccacgggctggcccacatcttcagctacgagaggcttagtctgaagcgagcattatgggcgctctgtttcctggggtcacttgcagtcttattgtgcgtttgtacagaacgggtacaatactatttccactaccaccacgttactaagctggatgaagtggccgcaagtcagctgacctttcccgcagtaaccctctgtaatcttaatgaattcagattcagtcaggtttccaagaacgatttataccacgccggggagttgttggcgctgctgaataacaggtatgagatcccagatacccaaatggccgatgaaaagcagctggagatcctgcaggacaaagccaacttccgctcattcaagccgaaaccgttcaatatgagggaattctatgacagggccggccacgatatacgtgacatgctcttatcatgccatttcaggggcgaagtctgtagtgccgaggactttaaagtagtattcaccagatatggcaagtgttacacattcaattccggcagagatgggcggcccaggctcaagaccatgaaggggggaacaggtaacgggctggagatcatgctggacatccaacaagatgaatacctgcctgtgtggggcgaaaccgatgagacatcttttgaggccgggatcaaggtgcagattcacagtcaggatgagccaccgttcatagaccagctcggtttcggagtggcacctgggttccagaccttcgtggcatgccaggagcaacgtctgatatatttacctcctccatggggcacttgcaaagccgtcactatggattctgacctcgacttttttgattcatattcaattacggcttgtaggattgactgtgagacaaggtacctggtggagaattgtaactgtcgtatggttcacatgcccggagatgcaccatactgtacgcccgagcagtacaaagaatgtgcggatcccgctctcgacttccttgtcgagaaggaccaggaatactgtgtttgcgagatgccctgcaatttaacacgatacggcaaagagctatctatggtaaagataccctccaaggcttccgctaagtaccttgctaaaaaattcaacaagtccgagcagtatataggagagaacatactggtgctcgacatttttttcgaggttctgaattatgagaccattgaacaaaagaaagcatatgaaattgccggccttttaggcgaactgctgatgactcctgtgcctttttcctgccatggacatggggtcgcaccttatcaccctaaggccgggtgttcactgctgtcccatgagggccctcccccccaaagacccttccctaagccctgctgcctgggcgatattggtggccaaatgggcctgttcataggcgcatcaattctgacagttctcgaacttttcgattatgcttacgaggtgatcaaacacaaactctgccggcggggtaagtgccagaaagaagcgaagcgcagctctgccgataaaggtgtggcgctgagtctagacgacgtgaaacgccacaacccctgtgagtctcttcggggtcatcccgctggcatgacctatgctgctaatatcttaccccaccaccctgcacggggcaccttcgaggactttacttgctag

SEQ ID NO: 202420 - DNA, 1725 bp, Artificial Sequence
  derived and/or modified sequence
atggaactcaaagcagaagaggaagaggtggggggagtccagccggtgtcaatccaggccttcgcgtccagttctactttacatgggctggcccacattttttcctatgagagactctctctgaaaagggccctttgggccctgtgcttcttgggatctctagccgtgttgctgtgtgtgtgcacggagcgcgtgcagtactatttccactaccaccacgtcaccaagctcgacgaagttgccgcatcacagctgacatttcctgccgtgacactatgcaatctgaatgagttccgtttctctcaggtgtctaaaaacgacctgtatcacgcaggtgaacttctggcgttgctgaacaataggtacgaaatccccgatactcaaatggccgacgagaaacagctagaaattctccaagacaaggctaacttcagaagctttaagcctaagccattcaatatgagggaattctacgacagagcgggacacgacattagggacatgctgttgtcctgccactttcgaggcgaagtgtgttccgccgaggattttaaagtggtctttacgaggtatggcaaatgttatacctttaacagcgggagagacggccgtcccagactcaaaaccatgaagggagggacgggtaacgggctggaaattatgctggatattcaacaggacgagtatcttcccgtgtggggggagaccgatgagaccagttttgaagccggaattaaggttcagatccactctcaggatgaacccccttttattgatcagctcggctttggggtcgcgccagggttccaaaccttcgtcgcctgccaagagcagcgcctaatttacctgcctcccccttgggggacctgtaaagccgtgaccatggacagcgatctggatttttttgacagctactcgattacggcctgtcgaattgactgtgagactagataccttgtagaaaattgcaattgcagaatggtccacatgcctggggatgctccttattgcacgcccgagcagtacaaggaatgcgcggaccccgcactggacttcttggtggagaaggaccaagagtactgcgtctgtgagatgccatgcaatctcacccggtatggcaaggaactgtcaatggtcaagataccaagtaaagcatctgccaagtaccttgctaagaaattcaataagtcagagcagtatattggcgagaacatcctggtactggatatcttcttcgaggtattgaactacgagacgatcgagcaaaaaaaggcttacgagatcgccggtctgcttggcgaacttctgatgaccccagtgcccttttcatgccacggccatggggtagccccatatcatcctaaagccggttgcagcctcttgtcacacgaaggcccaccaccccaaaggcccttccccaaaccttgttgcctaggagacattggcggacagatgggactctttatcggagcaagcatcctgacagttctggagttgttcgactacgcctacgaagttatcaagcacaagctttgtcgcagaggaaaatgccagaaggaagccaaaaggtcctcagccgataagggagtggctctgtccctcgacgacgtgaagaggcacaacccctgcgaatcacttcggggacatcccgcaggcatgacctatgcagcaaacattttacctcatcatccggcaagggggacttttgaagacttcacatgctag

SEQ ID NO: 202421 - DNA, 1725 bp, Artificial Sequence
  derived and/or modified sequence
atggagctgaaggccgaggaggaggaggtgggcggcgtgcagcccgtgagcatccaggccttcgccagcagcagcaccctgcacggcctggcccacatcttcagctacgagagactgagcctgaagagagccctgtgggccctgtgcttcctgggcagcctggccgtgctgctgtgcgtgtgcaccgagagagtgcagtactacttccactaccaccacgtgaccaagctggacgaggtggccgccagccagctgaccttccccgccgtgaccctgtgcaacctgaacgagttcagattcagccaggtgagcaagaacgacctgtaccacgccggcgagctgctggccctgctgaacaacagatacgagatccccgacacccagatggccgacgagaagcagctggagatcctgcaggacaaggccaacttcagaagcttcaagcccaagcccttcaacatgagagagttctacgacagagccggccacgacatcagagacatgctgctgagctgccacttcagaggcgaggtgtgcagcgccgaggacttcaaggtggtgttcaccagatacggcaagtgctacaccttcaacagcggcagagacggcagacccagactgaagaccatgaagggcggcaccggcaacggcctggagatcatgctggacatccagcaggacgagtacctgcccgtgtggggcgagaccgacgagaccagcttcgaggccggcatcaaggtgcagatccacagccaggacgagccccccttcatcgaccagctgggcttcggcgtggcccccggcttccagaccttcgtggcctgccaggagcagagactgatctacctgccccccccctggggcacctgcaaggccgtgaccatggacagcgacctggacttcttcgacagctacagcatcaccgcctgcagaatcgactgcgagaccagatacctggtggagaactgcaactgcagaatggtgcacatgcccggcgacgccccctactgcacccccgagcagtacaaggagtgcgccgaccccgccctggacttcctggtggagaaggaccaggagtactgcgtgtgcgagatgccctgcaacctgaccagatacggcaaggagctgagcatggtgaagatccccagcaaggccagcgccaagtacctggccaagaagttcaacaagagcgagcagtacatcggcgagaacatcctggtgctggacatcttcttcgaggtgctgaactacgagaccatcgagcagaagaaggcctacgagatcgccggcctgctgggcgagctgctgatgacccccgtgcccttcagctgccacggccacggcgtggccccctaccaccccaaggccggctgcagcctgctgagccacgagggcccccccccccagagacccttccccaagccctgctgcctgggcgacatcggcggccagatgggcctgttcatcggcgccagcatcctgaccgtgctggagctgttcgactacgcctacgaggtgatcaagcacaagctgtgcagaagaggcaagtgccagaaggaggccaagagaagcagcgccgacaagggcgtggccctgagcctggacgacgtgaagagacacaacccctgcgagagcctgagaggccaccccgccggcatgacctacgccgccaacatcctgccccaccaccccgccagaggcaccttcgaggacttcacctgctag

SEQ ID NO: 202422 - protein, 540 aa, Artificial Sequence
  derived and/or modified sequence
MARKQNRNSKELGLVPLTDDTSHAGPPGPGRALLECDHLRSGVPGGRRRKDWSCSLLVASLAGAFGSSFLYGYNLSVVNAPTPYIKAFYNESWERRHGRPIDPDTLTLLWSVTVSIFAIGGLVGTLIVKMIGKVLGRKHTLLANNGFAISAALLMACSLQAGAFEMLIVGRFIMGIDGGVALSVLPMYLSEISPKEIRGSLGQVTAIFICIGVFTGQLLGLPELLGKESTWPYLFGVIVVPAVVQLLSLPFLPDSPRYLLLEKHNEARAVKAFQTFLGKADVSQEVEEVLAESRVQRSIRLVSVLELLRAPYVRWQVVTVIVTMACYQLCGLNAIWFYTNSIFGKAGIPPAKIPYVTLSTGGIETLAAVFSGLVIEHLGRRPLLIGGFGLMGLFFGTLTITLTLQDHAPWVPYLSIVGILAIIASFCSGPGGIPFILTGEFFQQSQRPAAFIIAGTVNWLSNFAVGLLFPFIQKSLDTYCFLVFATICITGAIYLYFVLPETKNRTYAEISQAFSKRNKAYPPEEKIDSAVTDGKINGRP

SEQ ID NO: 202423 - DNA, 1623 bp, Artificial Sequence
  derived and/or modified sequence
atggcccgaaagcagaacaggaacagtaaggaactggggttggtcccactgacagacgacacatcgcacgccggtccccctggccccggcagggcgcttctggaatgtgatcacctgcggagcggggtccccgggggccggcggagaaaggattggtcttgctccttactcgtggcttccctggccggcgcgtttgggagtagcttcctgtatgggtacaacctgagcgtggtgaacgcccccacgccctacattaaagccttttacaacgaatcatgggagcgtagacatgggagaccaatcgatcccgacacactcaccctgttgtggtccgtgacggtgtcaatcttcgccataggcgggctcgtgggaacactgatagtaaaaatgattggcaaggtgcttgggcggaagcacaccctgttagccaacaatggctttgcaatctccgccgccctcctgatggcctgctccctccaagccggagcattcgagatgctgatagtaggtcgctttatcatggggattgacggcggtgtggcactctccgtcttacccatgtatctctctgaaataagccctaaggaaattcggggctccttggggcaggtgactgctatttttatctgtattggcgtattcaccggccaactgctcggtctcccagaattgttgggaaaggagagcacctggccctacctttttggggtcatcgtcgtccctgcggtcgttcaacttttatctcttcctttcctaccagactcccctagatacctgctgttagaaaagcacaatgaggcccgtgccgtgaaggcattccagaccttcctgggcaaggctgacgtctctcaggaggtggaagaagttcttgccgaatcccgggtgcaaaggtcaatcagactcgtgtccgtgctggaactcctgagggccccttatgtgcgatggcaagtggtgactgtgatcgttaccatggcttgttatcagctttgtggccttaatgctatctggttttatacaaatagtatcttcggcaaggcgggaattcctcccgccaagattccttatgttaccctcagtaccggcggtatcgagacgctggcggccgtgttttctggtctggtcattgagcatctgggccgtcgccccctccttattggcggcttcgggctcatggggttattttttggcaccctgactattaccttaaccttgcaggatcatgccccatgggtgccttacctttccatcgtcggaattctggccatcatcgcgtccttttgttctggcccaggcggcatccctttcatcctaacaggcgaattcttccagcaatcccagcgccccgccgcgttcattatagctggcacagttaattggctctctaatttcgctgtaggcctgctgttccccttcatacagaaatccctggacacctactgtttcttggtgtttgctaccatatgtataacaggagccatttatctctactttgttttgcctgaaacaaaaaataggacctacgccgaaatctctcaggctttcagcaaaagaaacaaggcttatcctcccgaggagaagatcgatagcgctgtaacagacggaaagattaacgggcgaccgtag

SEQ ID NO: 202424 - DNA, 1623 bp, Artificial Sequence
  derived and/or modified sequence
atggccaggaagcagaacagaaacagcaaggagctgggcctggtgcccctgacagatgacaccagccacgccggccccccaggccctggccgggccctgctggagtgtgaccacctgcggtctggagtgcctgggggcagaagaaggaaggactggagctgcagcctgctggtggccagcctggccggggccttcggcagcagcttcctgtatggctacaacctgtctgtggtgaatgcccccaccccctacatcaaggccttctacaatgaatcctgggagaggagacatggccggcccattgatcctgacaccctgaccctgctgtggagcgtgacagtgtccatctttgccatcggcggcctggtgggcaccctgattgtgaagatgattggcaaggtgctgggcaggaagcacaccctgctggccaacaatggatttgccatctctgctgccctgctgatggcctgcagcctgcaggccggggcctttgagatgctgattgtgggccgcttcatcatgggcattgatggaggagtggccctgtctgtgctgcccatgtacctgtctgagatcagccccaaggagatccggggcagcctgggccaggtgacagccatcttcatctgcattggagtcttcaccggccagctgctgggcctgcctgagctgctgggcaaggagagcacctggccctacctgtttggagtcatcgtggtgcctgctgtggtgcagctgctgagcctgcccttcctgcctgacagcccccgctacctgctgctggagaagcacaatgaggcccgggctgtgaaggccttccagaccttcctgggcaaggcagatgtgtcccaggaggtggaggaggtgctggccgagagccgggtgcagaggagcatccggctggtgtctgtgctggagctgctgcgggccccctacgtgcgctggcaggtggtgacagtgattgtgaccatggcctgctaccagctgtgtggcctgaatgccatctggttctacaccaacagcatctttgggaaggccggcatccccccagccaagatcccctacgtgaccctgagcactggaggcatcgagaccctggccgctgtgttttctggcctggtgattgagcacctgggccggcggcccctgctgattggaggcttcggcctgatgggcctcttcttcggcaccctgaccatcaccctgaccctgcaggaccacgccccctgggtgccctacctgagcatcgtgggcatcctggccatcatcgccagcttctgcagcggccctgggggcatccccttcatcctgaccggggagttcttccagcagagccagaggcctgctgccttcatcatcgccggcaccgtgaactggctgagcaactttgctgtgggcctgctcttccccttcatccagaagagcctggacacctactgcttcctggtgtttgccaccatctgcatcaccggggccatctacctgtactttgtgctgcctgagaccaagaacagaacctacgccgagatcagccaggccttcagcaagaggaacaaggcctacccacctgaggagaagattgattctgctgtgacagatggcaagatcaatggccggccctag

SEQ ID NO: 202425 - DNA, 1623 bp, Artificial Sequence
  derived and/or modified sequence
atggcccggaagcagaaccggaacagcaaggagctgggcctggtgccattaacagacgacacaagccacgctggtcccccagggccaggtagggcattactggaatgtgatcatctccgctcgggtgtacctggcggacggcgccgtaaagattggagttgctccctcctggtcgctagcctcgctggagcatttgggagtagcttcctgtatggctataatctgagcgtggtgaacgcccccacaccctatataaaagctttctacaacgagtcctgggagcgccgccatggacgtcccatcgatccagacacactaactcttttgtggagtgtgaccgtcagtatctttgccattggaggacttgtgggtactttgatcgtgaagatgatagggaaggtccttggacgcaaacacacactgctggccaacaacggtttcgctatttccgcagccctgctaatggcctgttctcttcaagcgggggccttcgaaatgctcatcgtgggtcgatttatcatggggatcgatggtggagtggcactctctgtgctccctatgtacctgtccgagataagccctaaggagattagaggaagcctgggacaggttactgccattttcatctgcattggagttttcacggggcagctgctcggactccctgaactgctgggtaaggagagcacatggccttacctctttggtgtgattgtcgtcccggccgtggtgcagctcctgagcctgccttttctgcccgatagccctagatacctgcttctggaaaagcataacgaagcccgagccgtcaaggcctttcagaccttcttgggcaaggccgacgtgagtcaggaggtggaagaggtactggccgagagcagagtccagaggagcataaggctggttagtgtgctggagctcctcagagcaccatacgtgagatggcaagtagtcacagtgatagtgacaatggcctgctaccaactttgcggactgaacgccatctggttctataccaatagcatcttcgggaaggccgggattcctccggccaaaatcccttacgtgactctcagtaccggaggcattgagacgctggccgcagtcttttccggactagtgattgagcatctaggacggaggccgcttctcatcggtgggtttggcctgatgggtctctttttcggtacactgacaattaccctgactttacaggatcacgctccttgggtgccatacctgtcgattgtgggcattctggccatcatcgcctccttctgctcaggccccggcgggataccatttattctcaccggggaattctttcagcaaagccagcgccccgcagcgttcattatcgctggcacagtaaactggttgtcaaacttcgccgtgggactgctatttccatttatccagaagagcctggacacttactgtttcctggtgttcgccacaatctgcatcacaggggcaatttacctatactttgtacttcctgagactaaaaaccggacatacgcagagatttctcaagctttctcaaagcgcaataaggcctatccacctgaggaaaaaatcgactcagcagtgaccgatggaaaaatcaacggccggccttag

SEQ ID NO: 202426 - DNA, 1623 bp, Artificial Sequence
  derived and/or modified sequence
atggctaggaaacagaacagaaatagcaaagagctgggtctcgtccctctcacggacgacacatcccacgcgggtcctcctggccctggcagggcattgctggaatgtgatcatcttcgctctggcgtaccagggggacgtagacgcaaagattggagttgttcactgcttgtggcgagtctggccggagccttcgggtctagctttttatacggctacaacctctcagtggtgaacgcacctactccttacattaaggctttttacaatgagagctgggagcgccgacatgggcgtccgattgatccagatacattgacactcctttggagcgtcaccgtgagcatattcgcaatcggaggcctggttgggactctgatagtgaagatgattgggaaagtcctaggccgaaagcatacactcctggccaataatggcttcgccatctcagcagcgctcctgatggcctgttccctgcaagcaggggcatttgagatgcttatcgtcgggcgattcattatgggaatcgacggcggagtggccctgtctgtgctcccaatgtacctgtctgaaatcagtcccaaggagatccgaggctccctaggacaggtgactgctatatttatctgcattggagtgtttacaggacagctgctcggcctccctgaactcctaggaaaggaaagtacctggccctacttatttggggtcatcgtcgtgcctgcagtggttcagctgctctcactgccatttctccccgattctccccgttacctgcttttagaaaaacacaatgaggccagagccgtcaaggcatttcagactttcctggggaaggccgacgtatcccaggaagtggaagaggtcctggcggagtccagagtgcagaggagcatccgcctggtcagcgtgcttgaactcttgcgagcaccgtatgtgcgttggcaggtggtcacagttatcgtgacaatggcgtgctaccaattatgcgggctgaatgccatctggttctatactaactccattttcgggaaagctggaatacccccagccaaaatcccatacgttaccctctccactggtggcattgaaacactagccgcagttttttcaggcctcgtcattgagcacctcggtagaagacctctactaattggcggattcggcctgatgggactcttttttggtaccctcaccattacactcaccctgcaggatcacgctccctgggtgccatacttatcaattgtgggaatcctagcaataattgcaagtttttgcagtggacccggaggtatcccatttatcctcactggagaattcttccagcaaagccaacgtcctgcagcttttatcatcgcagggactgtcaactggctgtccaattttgcagttggcttgctcttccctttcatccagaaatctctggacacttattgcttcctggttttcgcaactatctgcataacgggcgcaatttatctgtatttcgtgcttccagagaccaaaaatcgtacctatgccgagatttcccaagcattcagcaagcgcaacaaggcgtaccctcctgaagaaaagattgattccgcagtaaccgacggaaaaatcaatgggagaccctag

SEQ ID NO: 202427 - DNA, 1850 bp, Artificial Sequence
  derived and/or modified sequence
cttggcagagtctggggtccctggactgagccatcagctgggtcactgagacccatggcaaggaaacaaaataggaattccaaggaactgggcctagttcccctcacagatgacaccagccacgccgggcctccagggccagggagggcactgctggagtgtgaccacctgaggagtggggtgccaggtggaaggagaagaaaggactggtcctgctcgctcctcgtggcctccctcgcgggcgccttcggctcctccttcctctacggctacaacctgtcggtggtgaatgcccccaccccgtacatcaaggccttttacaatgagtcatgggaaagaaggcatggacgtccaatagacccagacactctgactttgctctggtctgtgactgtgtccatattcgccatcggtggacttgtggggacgttaattgtgaagatgattggaaaggttcttgggaggaagcacactttgctggccaataatgggtttgcaatttctgctgcattgctgatggcctgctcgctccaggcaggagcctttgaaatgctcatcgtgggacgcttcatcatgggcatagatggaggcgtcgccctcagtgtgctccccatgtaccttagtgagatctcacccaaggagatccgtggctctctggggcaggtgactgccatctttatctgcattggcgtgttcactgggcagcttctgggcctgcccgagctgctgggaaaggagagtacctggccatacctgtttggagtgattgtggtccctgccgttgtccagctgctgagccttccctttctcccggacagcccacgctacctgctcttggagaagcacaacgaggcaagagctgtgaaagccttccaaacgttcttgggtaaagcagacgtttcccaagaggtagaggaggtcctggctgagagccgcgtgcagaggagcatccgcctggtgtccgtgctggagctgctgagagctccctacgtccgctggcaggtggtcaccgtgattgtcaccatggcctgctaccagctctgtggcctcaatgcaatttggttctataccaacagcatctttggaaaagctgggatccctccggcaaagatcccatacgtcaccttgagtacagggggcatcgagactttggctgccgtcttctctggtttggtcattgagcacctgggacggagacccctcctcattggtggctttgggctcatgggcctcttctttgggaccctcaccatcacgctgaccctgcaggaccacgccccctgggtcccctacctgagtatcgtgggcattctggccatcatcgcctctttctgcagtgggccaggtggcatcccgttcatcttgactggtgagttcttccagcaatctcagcggccggctgccttcatcattgcaggcaccgtcaactggctctccaactttgctgttgggctcctcttcccattcattcagaaaagtctggacacctactgtttcctagtctttgctacaatttgtatcacaggtgctatctacctgtattttgtgctgcctgagaccaaaaacagaacctatgcagaaatcagccaggcattttccaaaaggaacaaagcatacccaccagaagagaaaatcgactcagctgtcactgatggtaagataaatggaaggccttaacaagtttcctcctccacgttggacaattatgtcaaaaacaggattgtctacatggatgatctcacttttcaggaaacttaaaatttacccattattgggaagcttaaatgaattgaagctatgcaagtcttttatattattaaatatttaaaagtaaacctgtactaatctaa

SEQ ID NO: 202428 - DNA, 1623 bp, Artificial Sequence
  derived and/or modified sequence
atggccagaaagcagaacagaaacagcaaggagctgggcctggtgcccctgaccgacgacaccagccacgccggcccccccggccccggcagagccctgctggagtgcgaccacctgagaagcggcgtgcccggcggcagaagaagaaaggactggagctgcagcctgctggtggccagcctggccggcgccttcggcagcagcttcctgtacggctacaacctgagcgtggtgaacgcccccaccccctacatcaaggccttctacaacgagagctgggagagaagacacggcagacccatcgaccccgacaccctgaccctgctgtggagcgtgaccgtgagcatcttcgccatcggcggcctggtgggcaccctgatcgtgaagatgatcggcaaggtgctgggcagaaagcacaccctgctggccaacaacggcttcgccatcagcgccgccctgctgatggcctgcagcctgcaggccggcgccttcgagatgctgatcgtgggcagattcatcatgggcatcgacggcggcgtggccctgagcgtgctgcccatgtacctgagcgagatcagccccaaggagatcagaggcagcctgggccaggtgaccgccatcttcatctgcatcggcgtgttcaccggccagctgctgggcctgcccgagctgctgggcaaggagagcacctggccctacctgttcggcgtgatcgtggtgcccgccgtggtgcagctgctgagcctgcccttcctgcccgacagccccagatacctgctgctggagaagcacaacgaggccagagccgtgaaggccttccagaccttcctgggcaaggccgacgtgagccaggaggtggaggaggtgctggccgagagcagagtgcagagaagcatcagactggtgagcgtgctggagctgctgagagccccctacgtgagatggcaggtggtgaccgtgatcgtgaccatggcctgctaccagctgtgcggcctgaacgccatctggttctacaccaacagcatcttcggcaaggccggcatcccccccgccaagatcccctacgtgaccctgagcaccggcggcatcgagaccctggccgccgtgttcagcggcctggtgatcgagcacctgggcagaagacccctgctgatcggcggcttcggcctgatgggcctgttcttcggcaccctgaccatcaccctgaccctgcaggaccacgccccctgggtgccctacctgagcatcgtgggcatcctggccatcatcgccagcttctgcagcggccccggcggcatccccttcatcctgaccggcgagttcttccagcagagccagagacccgccgccttcatcatcgccggcaccgtgaactggctgagcaacttcgccgtgggcctgctgttccccttcatccagaagagcctggacacctactgcttcctggtgttcgccaccatctgcatcaccggcgccatctacctgtacttcgtgctgcccgagaccaagaacagaacctacgccgagatcagccaggccttcagcaagagaaacaaggcctacccccccgaggagaagatcgacagcgccgtgaccgacggcaagatcaacggcagaccctag

SEQ ID NO: 202429 - protein, 255 aa, Artificial Sequence
  derived and/or modified sequence
MILNKALLLGALALTAVMSPCGGEDIVADHVASYGVNFYQSHGPSGQYTHEFDGDEEFYVDLETKETVWQLPMFSKFISFDPQSALRNMAVGKHTLEFMMRQSNSTAATNEVPEVTVFSKFPVTLGQPNTLICLVDNIFPPVVNITWLSNGHSVTEGVSETSFLSKSDHSFFKISYLTFLPSADEIYDCKVEHWGLDEPLLKHWEPEIPAPMSELTETLVCALGLSVGLMGIVVGTVFIIQGLRSVDASRHQGLL

SEQ ID NO: 202430 - protein, 255 aa, Artificial Sequence
  derived and/or modified sequence
MILNKALLLGALALTAVMSPCGGEDIVADHVASYGVNFYQSHGPSGQYTHEFDGDEEFYVDLETKETVWQLPMFSKFISFDPQSALRNMAVGKHTLEFMMRQSNSTAATNEVPEVTVFSKFPVTLGQPNTLICLVDNIFPPVVNITWLSNGHSVTEGVSETSFLSKSDHSFFKISYLTFLPSADEIYDCKVEHWGLDEPLLKHWEPEIPAPMSELTETLVCALGLSVGLMGIVVGTVFIIQGLRSVGASRHQGLL

SEQ ID NO: 202431 - protein, 255 aa, Artificial Sequence [sequence omitted]

SEQ ID NO: 202432 - protein, 255 aa, Artificial Sequence [sequence omitted]

SEQ ID NO: 202433 - protein, 82 aa, Artificial Sequence
  derived and/or modified sequence
DHVASYGVNFYQSHGPSGQYTHEFDGDEEFYVDLETKETVWQLPMFSKFISFDPQSALRNMAVGKHTLEFMMRQSNSTAATN

SEQ ID NO: 202434 - protein, 27 aa, Artificial Sequence
  derived and/or modified sequence
MILNKALLLGALALTAVMSPCGGEDIV

SEQ ID NO: 202435 - DNA, 768 bp, Artificial Sequence
  derived and/or modified sequence
atgatcttgaacaaagctctccttctgggtgccctggcattgacagccgtcatgagcccttgtggaggcgaggacatcgttgctgatcatgtggccagttatggggtaaacttttatcagtcacatggtccgagcgggcagtacacccacgaatttgacggggatgaggagttttacgtggatctggagacaaaggaaactgtctggcagctcccaatgttttccaagttcattagcttcgatccccaaagcgctttgaggaacatggccgtcggtaagcacaccctggagttcatgatgcggcaaagtaatagcacggcggcgacaaacgaagttcccgaagtgactgtgttcagtaagttcccagtcactcttgggcagccaaacacgcttatctgcctcgttgacaatatctttcctcctgttgtgaatatcacttggctttctaacggccattctgtgacggaaggtgtatctgagacttccttcttgtctaagtccgaccattctttttttaagatttcttatctgacgtttctcccctcagcagacgagatttatgactgcaaggtcgagcactggggactcgacgaaccactgctcaaacactgggaacctgagattccagcccctatgtccgaactgaccgaaaccttggtctgcgccctagggttgagcgtggggctgatggggattgtggttggcacggttttcattatccaaggattaaggtcagtggatgcgtcgcgccaccagggccttctctag

SEQ ID NO: 202436 - DNA, 768 bp, Artificial Sequence
  derived and/or modified sequence
atgattttaaacaaggctttactgcttggggctctagcacttaccgctgttatgtccccttgcggcggagaggacatcgtggctgaccatgttgcaagttacggcgtgaacttctaccaatcccatggtccgtcagggcagtatacacacgaatttgatggggatgaagaattttacgtcgatctggagacgaaggaaaccgtgtggcagctgcccatgtttagcaagtttatctcctttgatcctcagtctgcactgcgaaacatggctgtggggaagcacaccctggagttcatgatgagacagtcaaattctacagctgccactaatgaagtgccagaggttactgtcttttctaagtttcctgtcactttgggacagccgaatacactgatctgcttggtcgataacatcttcccacccgtcgtcaatattacctggttgtctaatggccattctgtcacagaaggggtgagcgagacctctttcttatctaaaagtgatcactcgttcttcaagatctcctatctgacttttctcccaagtgctgacgaaatctacgactgcaaggtggagcattggggacttgatgaaccactcctgaaacactgggagcccgagatacccgcacctatgagcgagctgaccgaaacactggtgtgtgccctagggctgtccgtgggcctcatgggtatagttgttggtacagtgttcattatacagggtctgagatcggtgggagcatctaggcaccaggggctgctctag

SEQ ID NO: 202437 - DNA, 768 bp, Artificial Sequence
  derived and/or modified sequence
atgatcctgaataaggcactcctgttgggcgccctcgctctgaccgccgtgatgtctccatgcgggggagaagacatcgtagctgatcatgtcgcctcctacggtgtcaacttctatcagagtcacggcccttcagggcaatatacccacgagttcgatggcgacgaggaattctacgttgacctggagacgaaggaaaccgtatggcagcttcctatgttttccaagttcatcagcttcgacccacagagtgctcttagaaatatggcagtcggcaagcataccctggaattcatgatgggccagtctaacagcacagctgctactaatgaagtgcctgaggtcaccgtcttctccaagtttcccgtaaccctgggccagcccaacacacttatttgtttggtggataatatcttcccccctgtggtgaacatcacatggctgagcaatggtcacagcgttacggaaggtgtgtctgagaccagctttctttccaagtctgaccatagtttttttaagattagttacctcacctttctgccctccgcagatgagatctatgactgcaaagtggaacactggggtttggatgaaccgcttctaaaacattgggagcccgaaattcccgctccgatgtcggagttaactgagaccctcgtgtgcgcacttggactcagcgtgggtctgatggggattgtcgtcggcaccgtgtttattattcagggcctcagaagtgtgggagcctcaagacatcaggggctgttgtag

SEQ ID NO: 202438 - DNA, 768 bp, Artificial Sequence
  derived and/or modified sequence
atgatactgaataaggctcttctgctgggcgccctggcacttactgcggtcatgtccccctgtgggggggaggacattgtggctgatcatgtagcctcgtacggggtaaacttttatcaaagccacggcccatccggtcaatatacccatgaatttgatggtgacgaagagttttacgtagacctcgagaccaaagaaactgtctggcagctcccgatgttcagcaagttcatttccttcgatccgcagtcagccctgaggaacatggccgtgggtaaacatacattagagtttatgatgagacagtccaactctacggctgctaccaatgaagtgccagaggtaacagtcttttcaaaatttcccgtcaccctagggcaaccaaatacccttatttgccttgtagacaatatattcccacctgtggtaaacattacatggctgagtaacggacacagtgtcacagagggcgtgtccgaaactagtttcctgtccaagagcgaccactcattctttaaaatatcctacctaacattcctgccaagcgctgacgaaatctacgattgtaaggtggagcactgggggttagacgagccgctgcttaagcattgggagccagaaataccagcccccatgtctgaactgaccgagacattagtctgcgccctcggtttgtctgttggactaatggggatcgtggttgggaccgtattcatcatccagggtcttagaagcgttggagcctcgcggcatcagggtctgctctag

SEQ ID NO: 202439 - DNA, 768 bp, Artificial Sequence
  derived and/or modified sequence
atgatactgaataaagccctgctcctcggagccctagcactgacggcagttatgagtccctgtggaggcgaggacatagtggcagatcacgttgccagctacggggtcaacttctatcagtcccatggcccctccggtcaatatacacatgaattcgacggcgatgaagaattttatgttgatctggagactaaggagacagtgtggcagttgccaatgttttccaaattcatctctttcgatcctcaatcagccttaaggaacatggctgtgggaaagcatacactggagttcatgatgcgccagtcaaatagcactgcagccacaaacgaggtgccagaagtgactgtattttccaaatttccagttacacttgggcagccaaatacactgatctgcttagtggacaacatcttccctcctgtggtgaacatcacatggcttagcaacgggcactctgtcacagaaggtgtctcagaaacgtctttcctaagtaagtccgaccatagcttctttaagatatcttatttaacatttctccctagtgccgatgagatctacgattgtaaggtcgagcattggggcctggatgagccgctgctcaagcattgggagcccgaaattccagccccaatgtctgaacttacagaaacattagtgtgtgctctcggccttagcgccggactcatgggtatagtcgtgggaaccgtttttattattcagggtttacgatccgtgggagcttcccgccaccaagggttgctctag

SEQ ID NO: 202440 - DNA, 768 bp, Artificial Sequence
  derived and/or modified sequence
atgattctgaataaggctcttctcctgggcgcgctggcactgactgcagtgatgtccccctgtgggggggaggacatcgtagctgatcacgtcgcaagctatggagtgaatttttaccagagccacggcccaagcgggcagtatacccacgaattcgatggcgacgaagaattctatgtggacctggaaactaaggagacagtctggcagttgcctatgttcagcaagtttatttcctttgacccccagtcggctctgaggaatatggcggttgggaagcacacgttggagttcatgatgagacaatcaaactctaccgcagcaacgaatgaggtgcccgaggtgactgtctttagtaagttcccagtcacgctcggccagcccaacacccttatctgtctggtggacaacatctttccacctgtggtcaacataacttggttgagtaacgggcacagcgtcaccgaaggagtgagcgagaccagcttcttatctaaaagcgaccactctttctttaagatatcatacttgacttttctaccttcggccgatgagatctacgactgcaaagttgaacactggggacttgacgaaccactgctcaaacactgggagccagaaattccagcccctatgtctgagttgacagaaacactggtgtgtgcattgggactgtccgttggcttaatgggcattgtcgttggaaccgtattcattatacaggggttgagatctgtaggagctagtcgacaccaggggctgctctag

SEQ ID NO: 202441 - DNA, 768 bp, Artificial Sequence
  derived and/or modified sequence
atgatcctgaataaagctctccttcttggggcgcttgcactcacagccgtgatgagcccctgtggcggagaggacattgtcgctgatcatgttgctagctatggcgtcaacttctatcagagtcatggccccagcggccagtatacacacgagtttgatggtgacgaggaattttatgtggatctcgaaacgaaggaaactgtatggcagctcccgatgttttcaaaattcataagcttcgacccacagagcgctcttcgaaacatggccgtcggcaaacacaccttagagttcatgatgcgccaaagcaattccactgcggctaccaatgaagtgccggaggttacagtgttttccaagttcccagtcacccttggacagcctaacacactcatttgtctcgtcgacaatatattcccacctgtcgtgaacattacctggctcagcaatgggcattcagtaacagaaggggttagcgagacctccttcttgtccaagtctgatcacagtttctttaaaatctcctacctcactttcctgccaagtgcagatgagatctacgactgtaaggtggaacattgggggctcgatgagcctctcctcaaacattgggaacccgagattccggcccctatgagcgagctcactgagactcttgtgtgtgcgctggggctgtccgtagggctgatggggattgttgttggcaccgtgttcatcattcaggggttgagatccgtgggagcgtctaggcaccagggactgctgtag

SEQ ID NO: 202442 - DNA, 768 bp, Artificial Sequence
  derived and/or modified sequence
atgattttgaacaaggcccttctgctcggggcattagcgctcactgctgtcatgtccccatgtggaggcgaagatattgttgccgaccacgtagcttcctatggggttaatttttaccaatctcacggtccctcgggccaatatacccatgaattcgatggcgatgaggagttttatgtggacttggagacgaaggaaactgtgtggcagctccctatgttttcaaaatttatctcatttgatccacagtctgcgctgagaaacatggctgtaggtaagcataccctagagtttatgatgaggcagagtaacagcactgccgctaccaacgaagtgccggaggttacagtgttcagtaaatttcctgtaaccttgggccagcccaataccctcatttgtctggtggacaatatcttcccacctgtggtcaatatcacatggctgagtaatgggcactctgttactgagggcgtgagcgagacttcatttctgagcaagagcgaccattctttttttaagatcagctatctgaccttccttccgtctgctgatgaaatctatgactgcaaagtggaacactggggcctggacgaaccccttttgaaacactgggagcccgaaattcccgctcctatgtccgaactgaccgaaaccctggtgtgtgctcttggcctgtctgcaggtctcatgggcattgtggtaggcaccgtgtttataattcaggggctccggagcgttggcgcaagtaggcatcagggactgctctag

SEQ ID NO: 202443 - DNA, 768 bp, Artificial Sequence
  derived and/or modified sequence
atgatccttaacaaagcccttctgctcggggccttggctctcacagccgttatgtctccctgcggaggtgaagatatcgtggctgaccacgtggcgtcctatggggtcaatttttaccagtcccatggaccctctgggcagtatacccacgagttcgatggcgacgaggagttttacgtggaccttgaaaccaaggagactgtctggcaactgcctatgtttagcaaattcatttctttcgacccacagtccgccctccggaacatggccgttggtaaacacacacttgaatttatgatgcggcaatcaaattctacagcagctacaaacgaagttcccgaagtgactgtcttttcaaagtttcctgtgacattaggtcagccgaacacactgatttgtctggtggacaatatctttccacccgtggtaaacataacttggctgagcaacggacactcagtaaccgagggggtgtctgaaacaagttttctttccaaatccgaccacagtttcttcaagatctcctacttgacatttctccccagtgcagatgaaatctacgactgcaaggtggaacattggggccttgacgagcccctcctgaaacactgggagcctgagatcccggctccaatgagtgaattgaccgaaacactggtctgtgcattgggccttagtgtggggctaatgggaatagtagtgggaactgttttcatcattcagggactaaggagtgtgggggccagccggcatcaaggcctactgtag

SEQ ID NO: 202444 - DNA, 249 bp, Artificial Sequence
  derived and/or modified sequence
gaccatgtcgcaagctatggggtaaatttttaccaatcccacggccccagtggacaatacacacacgagtttgatggagatgaagagttctacgtcgacctcgaaaccaaagaaaccgtgtggcaactgcccatgttttcaaagtttatcagctttgatcctcagtcagctcttcggaatatggccgtgggtaagcatactttagaatttatgatgcgacaaagtaattccaccgccgcaaccaactag

SEQ ID NO: 202445 - DNA, 768 bp, Artificial Sequence
  derived and/or modified sequence
atgatcctgaacaaggccctgttgcttggtgcactggccctgacggccgtcatgagtccctgtgggggagaagacatagttgccgatcacgttgcctcctatggagtaaacttttaccaaagccacgggccatccggacagtacacccacgaattcgacggagacgaggagttctacgtggatctggagacaaaggagaccgtgtggcaactacccatgttcagcaagtttatttcattcgacccccagagcgccctacgcaacatggctgtcggaaagcacaccctcgagttcatgatgaggcagagcaactctacagcagctacaaacgaggtaccggaagtgactgtgttctccaaattccccgttaccctggggcagccaaacaccttgatctgccttgtggataacatcttccccccggttgtcaacatcacgtggctttccaacggacactctgtgacggaaggcgtgagcgagactagctttctgtctaaatccgatcacagcttctttaaaatcagctacctgaccttcttacctagtgccgacgaaatatacgattgtaaagttgaacattggggactggacgaaccgctgttgaagcattgggaacccgagattccggctcccatgagcgagctgaccgagacactcgtttgcgcccttggactgtccgtgggactgatggggattgtagtcgggaccgtgttcatcatacagggattgcgcagtgttggcgcctcccgccaccagggactcctctag

SEQ ID NO: 202446 - DNA, 768 bp, Artificial Sequence
  derived and/or modified sequence
atgatcctgaacaaggccctgctgctgggcgccctggccctgacagctgtgatgagcccctgtggcggggaggacatcgtggccgaccacgtggccagctatggagtgaacttctaccagagccacggccccagcggccagtacacccatgaatttgatggagatgaggagttctacgtggacctggagaccaaggagaccgtgtggcagctgcccatgttcagcaagttcatcagctttgacccccagagcgccctgaggaacatggctgtgggcaagcacaccctggagttcatgatgaggcagagcaacagcacagctgccaccaatgaggtgcctgaggtgaccgtcttcagcaagtttcctgtgaccctgggccagcccaacaccctcatctgcctggtggacaacatcttcccccctgtggtgaacatcacctggctgagcaatggccacagcgtgacagaaggagtgtctgagaccagcttcctgagcaagagtgaccacagcttcttcaagatctcctacctgaccttcctgcccagcgcagatgagatctatgactgcaaggtggagcactggggcctggatgagcccctgctgaagcactgggagcctgagatcccagcccccatgtctgagctgacagagaccctggtgtgtgccctgggcctgtctgtgggcctgatgggcatcgtggtgggcaccgtcttcatcatccagggcctgcggtctgtggatgccagccgccaccagggcctgctgtag

SEQ ID NO: 202447 - DNA, 768 bp, Artificial Sequence
  derived and/or modified sequence
atgatcctgaacaaggccctgctgctgggcgccctggccctgacagctgtgatgagcccctgtggcggggaggacatcgtggccgaccacgtggccagctatggagtgaacttctaccagagccacggccccagcggccagtacacccatgaatttgatggagatgaggagttctacgtggacctggagaccaaggagaccgtgtggcagctgcccatgttcagcaagttcatcagctttgacccccagagcgccctgaggaacatggctgtgggcaagcacaccctggagttcatgatgaggcagagcaacagcacagctgccaccaatgaggtgcctgaggtgaccgtcttcagcaagtttcctgtgaccctgggccagcccaacaccctcatctgcctggtggacaacatcttcccccctgtggtgaacatcacctggctgagcaatggccacagcgtgacagaaggagtgtctgagaccagcttcctgagcaagagtgaccacagcttcttcaagatctcctacctgaccttcctgcccagcgcagatgagatctatgactgcaaggtggagcactggggcctggatgagcccctgctgaagcactgggagcctgagatcccagcccccatgtctgagctgacagagaccctggtgtgtgccctgggcctgtctgtgggcctgatgggcatcgtggtgggcaccgtcttcatcatccagggcctgcggtctgtgggcgccagccgccaccagggcctgctgtag

SEQ ID NO: 202448 - DNA, 768 bp, Artificial Sequence
  derived and/or modified sequence
atgatcctgaacaaggccctgctgctgggcgccctggccctgacagctgtgatgagcccctgtggcggggaggacatcgtggccgaccacgtggccagctatggagtgaacttctaccagagccacggccccagcggccagtacacccatgaatttgatggagatgaggagttctacgtggacctggagaccaaggagaccgtgtggcagctgcccatgttcagcaagttcatcagctttgacccccagagcgccctgaggaacatggctgtgggcaagcacaccctggagttcatgatgggccagagcaacagcacagctgccaccaatgaggtgcctgaggtgaccgtcttcagcaagtttcctgtgaccctgggccagcccaacaccctcatctgcctggtggacaacatcttcccccctgtggtgaacatcacctggctgagcaatggccacagcgtgacagaaggagtgtctgagaccagcttcctgagcaagagtgaccacagcttcttcaagatctcctacctgaccttcctgcccagcgcagatgagatctatgactgcaaggtggagcactggggcctggatgagcccctgctgaagcactgggagcctgagatcccagcccccatgtctgagctgacagagaccctggtgtgtgccctgggcctgtctgtgggcctgatgggcatcgtggtgggcaccgtcttcatcatccagggcctgcggtctgtgggcgccagccgccaccagggcctgctgtag

SEQ ID NO: 202449 - DNA, 768 bp, Artificial Sequence
  derived and/or modified sequence
atgatcctgaacaaggccctgctgctgggcgccctggccctgacagctgtgatgagcccctgtggcggggaggacatcgtggccgaccacgtggccagctatggagtgaacttctaccagagccacggccccagcggccagtacacccatgaatttgatggagatgaggagttctacgtggacctggagaccaaggagaccgtgtggcagctgcccatgttcagcaagttcatcagctttgacccccagagcgccctgaggaacatggctgtgggcaagcacaccctggagttcatgatgaggcagagcaacagcacagctgccaccaatgaggtgcctgaggtgaccgtcttcagcaagtttcctgtgaccctgggccagcccaacaccctcatctgcctggtggacaacatcttcccccctgtggtgaacatcacctggctgagcaatggccacagcgtgacagaaggagtgtctgagaccagcttcctgagcaagagtgaccacagcttcttcaagatctcctacctgaccttcctgcccagcgcagatgagatctatgactgcaaggtggagcactggggcctggatgagcccctgctgaagcactgggagcctgagatcccagcccccatgtctgagctgacagagaccctggtgtgtgccctgggcctgtctgctggcctgatgggcatcgtggtgggcaccgtcttcatcatccagggcctgcggtctgtgggcgccagccgccaccagggcctgctgtag

SEQ ID NO: 202450 - DNA, 249 bp, Artificial Sequence
  derived and/or modified sequence
gaccacgtggccagctatggagtgaacttctaccagagccacggccccagcggccagtacacccatgaatttgatggagatgaggagttctacgtggacctggagaccaaggagaccgtgtggcagctgcccatgttcagcaagttcatcagctttgacccccagagcgccctgaggaacatggctgtgggcaagcacaccctggagttcatgatgaggcagagcaacagcacagctgccaccaactag

SEQ ID NO: 202451 - DNA, 1517 bp, Artificial Sequence
  derived and/or modified sequence
ggcagggtttggtttgggtgtcttcagatttgcttgtctcgaggtcctcacaattgctctacagctcagagcagcaactgctgaggctgccttgggaagaagatgatcctaaacaaagctctgctgctgggggccctcgccctgactgccgtgatgagcccctgtggaggtgaagacattgtggctgaccatgttgcctcctatggtgtgaacttctaccagtctcacggtccctctggccagtacacccatgaatttgatggagacgaggagttctacgtggacctggagacgaaagagactgtctggcagttgcctatgtttagcaaatttataagttttgacccgcagagtgcactgagaaatatggctgtgggaaaacacaccttggaattcatgatgagacagtccaactctaccgctgccaccaatgaggttcctgaggtcacagtgttttccaagtttcctgtgacgctgggtcagcccaacaccctcatctgtcttgtggacaacatctttcctcctgtggtcaacatcacctggctgagcaatgggcactcagtcacagaaggtgtttctgagaccagcttcctctccaagagtgatcattccttcttcaagatcagttacctcaccttcctcccttctgctgatgagatttatgactgcaaggtggagcactggggcctggacgagcctcttctgaaacactgggagcctgagattccagcccctatgtcagagctcacagagactttggtctgcgccctggggttgtctgtgggcctcatgggcattgtggtgggcactgtcttcatcatccaaggcctgcgttcagttgatgcttccagacaccaagggctcttatgaatctcatcctgaaaggaaggtgcatcaccatctacaggagaagaagaatggacttgctaaatgacctagcactattctctggcctgatttatcatatcccttttctcctccaaatgtttcttctctcacctcttctctgggacttaaggtgctatattccctcagagctcacaaatgcctttcaattctttccctgacctcctttcctgaatttttttattttctcaaatgttacctactaagggatgcctgagtaagccactcagctacctaattcctcaatgacctttatctaaaatctccatggaagcaataaattcccttttgatgcctctattgaatttttcccatctttcatctcagggctgactgagagcataacttagaatgggtgactcttatgttttaggccaatttcatgtcattccccagatcatatttcatgtccagtaacacaggagcaaccaagtacagtgtatcctgataatttgttgatttcttaactggtgttaatatttctttcttccttttgttcctacccttggccactgccacccacccctcaattcaggtaccaacgaaccctctgcccttggctcagaatggttatagcagaaatacaaaaaaaaaaaaaaaaagtctgtact

SEQ ID NO: 202452 - DNA, 1524 bp, Artificial Sequence
  derived and/or modified sequence
ggcagggtttggtttgggtgtcttcagatttgcttgtctcgaggtcctcacaattgctctacagctcagagcagcaactgctgaggctgccttgggaagaagatgatcctaaacaaagctctgctgctgggggccctcgccctgactgccgtgatgagcccctgtggaggtgaagacattgtggctgaccatgttgcctcctatggtgtgaacttctaccagtctcacggtccctctggccagtacacccatgaatttgatggagacgaggagttctatgtggacctggagacgaaagagactgtctggcagttgcctatgtttagcaaatttataagttttgacccgcagagtgcactgagaaatatggctgtgggaaaacacaccttggaattcatgatgagacagtccaactctaccgctgccaccaatgaggttcctgaggtcacagtgttttccaagtttcctgtgacgctgggtcagcccaacaccctcatctgtcttgtggacaacatctttcctcctgtggtcaacatcacctggctgagcaatgggcactcagtcacagaaggtgtttctgagaccagcttcctctccaagagtgatcattccttcttcaagatcagttacctcaccttcctcccttctgctgatgagatttatgactgcaaggtggagcactggggcctggacgagcctcttctgaaacactgggagcctgagattccagcccctatgtcagagctcacagagactttggtctgcgccctggggttgtctgtgggcctcatgggcattgtggtgggcactgtcttcatcatccaaggcctgcgttcagttggtgcttccagacaccaagggctcttatgaatcccatcctgaaaaggaaggtgcatcaccatctacaggagaagaagaatggacttgctaaatgacctagcactattctctggcctgatttatcatatcccttttctcctccaaatgtttcttctctcacctcttctctgggacttaaggtgctatattccctcagagctcacaaatgcctttcaattctttccctgacctcctttcctgaatttttttattttctcaaatgttacctactaagggatgcctgggtaagccactcagctacctaattcctcaatgacctttatctaaaatctccatggaagcaataaattcccttttgatgcctctattgaatttttcccatctttcatctcagggctgactgagagcataacttagaatgggcgactcttatgttttaggccaatttcatatcattccccagatcatatttcaagtccagtaacacaggagcaaccaagtacagtgtatcctgataatttgttgatttcttaactggtgttaatatttctttcttccttttgttcctacccttggccactgccagccacccctcaattcaggtaccaacgaaccctctgcccttggctcagaatggttatagcagaaatacaaaaaaaaaaaaaaagtctgtactaatttcaa

SEQ ID NO: 202453 - DNA, 1521 bp, Artificial Sequence
  derived and/or modified sequence
ggcagggtttggtttgggtgtcttcagatttgcttgtctcgaggtcctcacaattgctctacagctcagagcagcaactgctgaggctgccttgggaagaagatgatcctaaacaaagctctgctgctgggggccctcgccctgactgccgtgatgagcccctgtggaggtgaagacattgtggctgaccatgttgcctcctatggtgtgaacttctaccagtctcacggtccctctggccagtacacccatgaatttgatggagacgaggagttctatgtggacctggagacgaaagagactgtctggcagttgcctatgtttagcaaatttataagttttgacccgcagagtgcactgagaaatatggctgtgggaaaacacaccttggaattcatgatgggacagtccaactctaccgctgccaccaatgaggttcctgaggtcacagtgttttccaagtttcctgtgacgctgggtcagcccaacaccctcatctgtcttgtggacaacatctttcctcctgtggtcaacatcacctggctgagcaatgggcactcagtcacagaaggtgtttctgagaccagcttcctctccaagagtgatcattccttcttcaagatcagttacctcaccttcctcccttctgctgatgagatttatgactgcaaggtggagcactggggcctggacgagcctcttctgaaacactgggagcctgagattccagcccctatgtcagagctcacagagactttggtctgcgccctggggttgtctgtgggcctcatgggcattgtggtgggcactgtcttcatcatccaaggcctgcgttcagttggtgcttccagacaccaagggctcttatgaatcccatcctgaaaaggaaggtgcatcaccatctacaggagaagaagaatggacttgctaaatgacctagcactattctctggcctgatttatcatatcccttttctcctccaaatgtttcttctctcacctcttctctgggacttaaggtgctatattccctcagagctcacaaatgcctttcaattctttccctgacctcctttcctgaatttttttattttctcaaatgttacctactaagggatgcctgggtaagccactcagctacctaattcctcaatgacctttatctaaaatctccatggaagcaataaattcccttttgatgcctctattgaatttttcccatctttcatctcagggctgactgagagcataacttagaatgggcgactcttatgttttaggccaatttcatatcattccccagatcatatttcaagtccagtaacacaggagcaaccaagtacagtgtatcctgataatttgttgatttcttaactggtgttaatatttctttcttccttttgttcctacccttggccactgccagccacccctcaattcaggtaccaacgaaccctctgcccttggctcagaatggttatagcagaaatacaaaaaaaaaaaaaaaagtctgtactaatt

SEQ ID NO: 202454 - DNA, 1725 bp, Artificial Sequence
  derived and/or modified sequence
ggcagggtttggtttgggtgtcttcagatttgcttgtctcgaggtcctcacaattgctctacagctcagagcagcaactgctgagcctgccttgggaagaagatgatcctaaacaaagctctgctgctgggggccctcgccctgactgccgtgatgagcccctgtggaggtgaagacattgtggctgaccatgttgcctcctatggtgtgaacttctaccagtctcacggtccctctggccagtacacccatgaatttgatggagacgaggagttctatgtggacctggagacgaaagagactgtctggcagttgcctatgtttagcaaatttataagttttgacccgcagagtgcactgagaaatatggctgtgggaaaacacaccttggaattcatgatgagacagtccaactctaccgctgccaccaatgaggttcctgaggtcacagtgttttccaagtttcctgtgacgctgggtcagcccaacaccctcatctgtcttgtggacaacatctttcctcctgtggtcaacatcacctggctgagcaatgggcactcagtcacagaaggtgtttctgagaccagcttcctctccaagagtgatcattccttcttcaagatcagttacctcaccttcctcccttctgctgatgagatttatgactgcaaggtggagcactggggcctggacgagcctcttctgaaacactgggagcctgagattccagcccctatgtcagagctcacagagactttggtctgcgccctggggttgtctgtgggcctcatgggcattgtggtgggcactgtcttcatcatccaaggcctgcgttcagttggtgcttccagacaccaagggctcttatgaatcccatcctgaaaaggaaggtgcatcaccatctacaggagaagaagaatggacttgctaaatgacctagcactattctctggcctgatttatcatatcccttttctcctccaaatgtttcttctctcacctcttctctgggacttaaggtgctatattccctcagagctcacaaatgcctttcaattctttccctgacctcctttcctgaatttttttattttctcaaatgttacctactaagggatgcctgggtaagccactcagctacctaattcctcaatgacctttatctaaaatctccatggaagcaataaattcccttttgatgcctctattgaatttttcccatctttcatctcagggctgactgagagcataacttagaatgggcgactcttatgttttaggccaatttcatatcattccccagatcatatttcaagtccagtaacacaggagcaaccaagtacagtgtatcctgataatttgttgatttcttaactggtgttaatatttctttcttccttttgttcctacccttggccactgccagccacccctcaattcaggtaccaacgaaccctctgcccttggctcagaatggttatagcagaaatacaaaaaaaaaaaaaaaagtctgtactaatttcaatatggctcttaaaaggaatgacagagaaataggatacaagaattttgaatctcaaaagttatcaaaagtaaaaaattttgttaccaaaagtcaaactgcattctcaaaactttaaatttgtgaagaatgacaacagtagaagctttcctctccccttctcaccttgaggagataaaaattctctaggcaggaaaagaaat

SEQ ID NO: 202455 - DNA, 1499 bp, Artificial Sequence
  derived and/or modified sequence
ggcagggtttggtttgggtgtcttcagatttgcttgtctcgaggtcctcacaattgctctgcagctcagagcagcaactgctgaggctgccttgggaagaagatgatcctaaacaaagctctgctgctgggggccctcgccctgactgccgtgatgagcccctgtggaggtgaagacattgtggctgaccatgttgcctcctatggtgtgaacttctaccagtctcacggtccctctggccagtacacccatgaatttgatggagatgaggagttctacgtggacctggagacgaaagagactgtctggcagttgcctatgtttagcaaatttataagttttgacccgcagagtgcactgagaaatatggctgtgggaaaacacaccttggaattcatgatgagacagtccaactctaccgctgccaccaatgaggttcctgaggtcacagtgttttccaagtttcctgtgacgctgggtcagcccaacaccctcatctgtcttgtggacaacatctttcctcctgtggtcaacatcacctggctgagcaatgggcactcagtcacagaaggtgtttctgagaccagcttcctctccaagagtgatcattccttcttcaagatcagttacctcaccttcctcccttctgctgatgagatttatgactgcaaggtggagcactggggcctggacgagcctcttctgaaacactgggagcctgagattccagcccctatgtcagagctcacagagactttggtctgcgccctggggttgtctgcgggcctcatgggcattgtggtgggcactgtcttcatcatccaaggcctgcgttcagttggtgcttccagacaccaagggctcttgtgaatcccatcctgaaaaggaaggtgcatcaccatctacaggagaagaagaatggacttgctaaatgacctagcactattctctggcctgatttatcatatcccttttctcctccaaatgtttcttctctcacctcttctctgggacttaaggtgctatattccctcagagctcacaaatacctttcaattctttccctgacctcctttcctgaatttttttattttctcaaatgttacctactaagggatgcctgggtaagccacttagctacctaattcctcaatgacctttatctaaaatctccatggaagcaataaattcccttttatgatgcctctattgaatttttcccatctttcatctcagggctgactgagagcataacttagaatgggcgactcttatgttttaggccaatttcatatcattccccagatcatatttcatgtccagtaacacaggagcaaccaagtacagtgtatcctgataatttgttgatttcttaactggtgttaatatttctttcttccttttgttcctacccttggccactgccacccacccttcaattcaggtaccaacgaaccctctgcccttggctcagaatggttatagcagaaatccaaaaa

SEQ ID NO: 202456 - DNA, 1500 bp, Artificial Sequence
  derived and/or modified sequence
ggtgtcttcagatttgcttgtctcgaggtcctcacaattgctctacagctcagagcagcaactgctgaggctgccttgggaagaagatgatcctaaacaaagctctgctgctgggggccctcgccctgactgccgtgatgagcccctgtggaggtgaagacattgtggctgaccatgttgcctcctatggtgtgaacttctaccagtctcacggtccctctggccagtacacccatgaatttgatggagacgaggagttctacgtggacctggagacgaaagagactgtctggcagttgcctatgtttagcaaatttataagttttgacccgcagagtgcactgagaaatatggctgtgggaaaacacaccttggaattcatgatgagacagtccaactctaccgctgccaccaatgaggttcctgaggtcacagtgttttccaagtttcctgtgacgctgggtcagcccaacaccctcatctgtcttgtggacaacatctttcctcctgtggtcaacatcacctggctgagcaatgggcactcagtcacagaaggtgtttctgagaccagcttcctctccaagagtgatcattccttcttcaagatcagttacctcaccttcctcccttctgctgatgagatttatgactgcaaggtggagcactggggcctggacgagcctcttctgaaacactgggagcctgagattccagcccctatgtcagagctcacagagactttggtctgcgccctggggttgtctgtgggcctcatgggcattgtggtgggcactgtcttcatcatccaaggcctgcgttcagttggtgcttccagacaccaagggctcttatgaatctcatcctgaaaggaaggtgcatcaccatctacaggagaagaagaatggacttgctaaatgacctagcactattctctggcctgatttatcatatcccttttctcctccaaatgtttcttctctcacctcttctctgggacttaaggtgctatattccctcagagctcacaaatgcctttcaattctttccctgacctcctttcctgaatttttttattttctcaaatgttacctactaagggatgcctgagtaagccactcagctacctaattcctcaatgacctttatctaaaatctccatggaagcaataaattcccttttgatgcctctattgaatttttcccatctttcatctcagggctgactgagagcataacttagaatgggtgactcttatgttttaggccaatttcatgtcattccccagatcatatttcatgtccagtaacacaggagcaaccaagtacagtgtatcctgataatttgttgatttcttaactggtgttaatatttctttcttccttttgttcctacccttggccactgccacccacccctcaattcaggtaccaacgaaccctctgcccttggctcagaatggttatagcagaaatacaaaaaaaaaaaaaaaagtctgtact

SEQ ID NO: 202457 - DNA, 1648 bp, Artificial Sequence
  derived and/or modified sequence
gaggtcctcacaattgctctacagctcagagcagcaactgctgagcctgccttgggaagaagatgatcctaaacaaagctctgctgctgggggccctcgccctgactgccgtgatgagcccctgtggaggtgaagacattgtggctgaccatgttgcctcctatggtgtgaacttctaccagtctcacggtccctctggccagtacacccatgaatttgatggagacgaggagttctatgtggacctggagacgaaagagactgtctggcagttgcctatgtttagcaaatttataagttttgacccgcagagtgcactgagaaatatggctgtgggaaaacacaccttggaattcatgatgagacagtccaactctaccgctgccaccaatgaggttcctgaggtcacagtgttttccaagtttcctgtgacgctgggtcagcccaacaccctcatctgtcttgtggacaacatctttcctcctgtggtcaacatcacctggctgagcaatgggcactcagtcacagaaggtgtttctgagaccagcttcctctccaagagtgatcattccttcttcaagatcagttacctcaccttcctcccttctgctgatgagatttatgactgcaaggtggagcactggggcctggacgagcctcttctgaaacactgggagcctgagattccagcccctatgtcagagctcacagagactttggtctgcgccctggggttgtctgtgggcctcatgggcattgtggtgggcactgtcttcatcatccaaggcctgcgttcagttggtgcttccagacaccaagggctcttatgaatcccatcctgaaaaggaaggtaagattgagatttgttggagctgaaacctcagtatgagagggaggaaagtgggagggggttgtggacatgaatgtggttgaaagttgtaggcgaattgggaagtggcatgatgatcacacaggaggcccctcagacccatcgatctcatgtctgtcctgttgcaggtgcatcaccatctacaggagaagaagaatggacttgctaaatgacctagcactattctctggcctgatttatcatatcccttttctcctccaaatgtttcttctctcacctcttctctgggacttaaggtgctatattccctcagagctcacaaatgcctttcaattctttccctgacctcctttcctgaatttttttattttctcaaatgttacctactaagggatgcctgggtaagccactcagctacctaattcctcaatgacctttatctaaaatctccatggaagcaataaattcccttttgatgcctctattgaatttttcccatctttcatctcagggctgactgagagcataacttagaatgggcgactcttatgttttaggccaatttcatatcattccccagatcatatttcaagtccagtaacacaggagcaaccaagtacagtgtatcctgataatttgttgatttcttaactggtgttaatatttctttcttccttttgttcctacccttggccactgccagccacccctcaattcaggtaccaacgaaccctctgcccttggctcagaatggttatagcagaaatacaaaaaaaaaaaaaaaagtctgtactaatt

SEQ ID NO: 202458 - DNA, 1201 bp, Artificial Sequence
  derived and/or modified sequence
ggcagggtttggtttgggtgtcttcagatttgcttgtctcgaggtcctcacaattgctctgcagctcagagcagcaactgctgaggctgccttgggaagaagatgatcctaaacaaagctctgctgctgggggccctcgccctgactgccgtgatgagcccctgtggaggtgaagacattgtggctgaccatgttgcctcctatggtgtgaacttctaccagtctcacggtccctctggccagtacacccatgaatttgatggagatgaggagttctacgtggacctggagacgaaagagactgtctggcagttgcctatgtttagcaaatttataagttttgacccgcagagtgcactgagaaatatggctgtgggaaaacacaccttggaattcatgatgagacagtccaactctaccgctgccaccaatgaggttcctgaggtcacagtgttttccaagtttcctgtgacgctgggtcagcccaacaccctcatctgtcttgtggacaacatctttcctcctgtggtcaacatcacctggctgagcaatgggcactcagtcacagaaggtgtttctgagaccagcttcctctccaagagtgatcattccttcttcaagatcagttacctcaccttcctcccttctgctgatgagatttatgactgcaaggtggagcactggggcctggacgagcctcttctgaaacactgggagcctgagattccagcccctatgtcagagctcacagagactttggtctgcgccctggggttgtctgcgggcctcatgggcattgtggtgggcactgtcttcatcatccaaggcctgcgttcagttggtgcttccagacaccaagggctcttgtgaatcccatcctgaaaaggaaggtgcatcaccatctacaggagaagaagaatggacttgctaaatgacctagcactattctctggcctgatttatcatatcccttttctcctccaaatgtttcttctctcacctcttctctgggacttaaggtgctatattccctcagagctcacaaatacctttcaattctttccctgacctcctttcctgaatttttttattttctcaaatgttacctactaagggatgcctgggtaagccacttagctacctaattcctcaatgacctttatctaaaatctccatggaagcaataaattcccttttatga

SEQ ID NO: 202459 - DNA, 1710 bp, Artificial Sequence
  derived and/or modified sequence
tcctcacaattgctctacagctcagagcagcaactgctgagcctgccttgggaagaagatgatcctaaacaaagctctgctgctgggggccctcgccctgactgccgtgatgagcccctgtggaggtgaagacattgtggctgaccatgttgcctcctatggtgtgaacttctaccagtctcacggtccctctggccagtacacccatgaatttgatggagacgaggagttctatgtggacctggagacgaaagagactgtctggcagttgcctatgtttagcaaatttataagttttgacccgcagagtgcactgagaaatatggctgtgggaaaacacaccttggaattcatgatgagacagtccaactctaccgctgccaccaatgaggttcctgaggtcacagtgttttccaagtttcctgtgacgctgggtcagcccaacaccctcatctgtcttgtggacaacatctttcctcctgtggtcaacatcacctggctgagcaatgggcactcagtcacagaaggtgtttctgagaccagcttcctctccaagagtgatcattccttcttcaagatcagttacctcaccttcctcccttctgctgatgagatttatgactgcaaggtggagcactggggcctggacgagcctcttctgaaacactgggagcctgagattccagcccctatgtcagagctcacagagactttggtctgcgccctggggttgtctgtgggcctcatgggcattgtggtgggcactgtcttcatcatccaaggcctgcgttcagttggtgcttccagacaccaagggctcttatgaatcccatcctgaaaaggaaggtgcatcaccatctacaggagaagaagaatggacttgctaaatgacctagcactattctctggcctgatttatcatatcccttttctcctccaaatgtttcttctctcacctcttctctgggacttaaggtgctatattccctcagagctcacaaatgcctttcaattctttccctgacctcctttcctgaatttttttattttctcaaatgttacctactaagggatgcctgggtaagccactcagctacctaattcctcaatgacctttatctaaaatctccatggaagcaataaattcccttttgatgcctctattgaatttttcccatctttcatctcagggctgactgagagcataacttagaatgggcgactcttatgttttaggccaatttcatatcattccccagatcatatttcaagtccagtaacacaggagcaaccaagtacagtgtatcctgataatttgttgatttcttaactggtgttaatatttctttcttccttttgttcctacccttggccactgccagccacccctcaattcaggtaccaacgaaccctctgcccttggctcagaatggttatagcagaaatacaaaaaaaaaaaaaaaagtctgtactaatttcaatatggctcttaaaaggaatgacagagaaataggatacaagaattttgaatctcaaaagttatcaaaagtaaaaaattttgttaccaaaagtcaaactgcattctcaaaactttaaatttgtgaagaatgacaacagtagaagctttcctctccccttctcaccttgaggagataaaaattctctaggcaggaaaagaaatggaagccagttagaaaaacattgaaataa

SEQ ID NO: 202460 - DNA, 246 bp, Artificial Sequence
  derived and/or modified sequence
gaccatgttgcctcctatggtgtgaacttctaccagtctcacggtccctctggccagtacacccatgaatttgatggagacgaggagttctacgtggacctggagacgaaagagactgtctggcagttgcctatgtttagcaaatttataagttttgacccgcagagtgcactgagaaatatggctgtgggaaaacacaccttggaattcatgatgagacagtccaactctaccgctgccaccaat

SEQ ID NO: 202461 - DNA, 768 bp, Artificial Sequence
  derived and/or modified sequence
atgatcctaaacaaagctctgctgctgggggccctcgccctgactgccgtgatgagcccctgtggaggtgaagacattgtggctgaccatgttgcctcctatggtgtgaacttctaccagtctcacggtccctctggccagtacacccatgaatttgatggagacgaggagttctacgtggacctggagacgaaagagactgtctggcagttgcctatgtttagcaaatttataagttttgacccgcagagtgcactgagaaatatggctgtgggaaaacacaccttggaattcatgatgagacagtccaactctaccgctgccaccaatgaggttcctgaggtcacagtgttttccaagtttcctgtgacgctgggtcagcccaacaccctcatctgtcttgtggacaacatctttcctcctgtggtcaacatcacctggctgagcaatgggcactcagtcacagaaggtgtttctgagaccagcttcctctccaagagtgatcattccttcttcaagatcagttacctcaccttcctcccttctgctgatgagatttatgactgcaaggtggagcactggggcctggacgagcctcttctgaaacactgggagcctgagattccagcccctatgtcagagctcacagagactttggtctgcgccctggggttgtctgtgggcctcatgggcattgtggtgggcactgtcttcatcatccaaggcctgcgttcagttggtgcttccagacaccaagggctcttatga

SEQ ID NO: 202462 - DNA, 768 bp, Artificial Sequence
  derived and/or modified sequence
atgatcctgaacaaggccctgctgctgggcgccctggccctgaccgctgttatgagcccgtgcggcggtgaggatattgtagccgaccatgtggccagctacggggtgaacttttatcagagccatggtccttccggccagtatacccacgaattcgatggggatgaggagttttacgttgacttggagacaaaggaaactgtatggcaattgcccatgttttctaagttcataagtttcgacccccagagtgcactcaggaatatggccgtgggaaagcacaccttggagtttatgatgagacagagcaatagcacagctgctactaatgaagtgcctgaggtgacagtgttcagcaagttccccgtgaccctcggccagccgaacaccttgatttgcttggtggacaatattttccctccagtggtgaacataacatggttgtctaatggacattctgttaccgaaggcgtgagcgagacgtctttcttgtcaaagtctgaccactccttctttaaaattagttacttaacatttctgcctagcgccgacgaaatttacgactgtaaagtggagcactggggcctggatgagcctttgctcaaacactgggagccagagatcccagccccaatgagcgaacttacagaaacactggtctgtgccctcggcctaagcgttgggctgatggggattgtggtggggactgtgttcatcattcagggtctgcggtccgttgacgcaagtcgccaccaaggtctgctgtag

SEQ ID NO: 202463 - DNA, 768 bp, Artificial Sequence
  derived and/or modified sequence
atgatcctgaacaaggccctgctgctgggcgccctggccctgaccgctgtcatgagcccctgcgggggtgaagacattgttgccgatcacgtcgcatcctacggggttaacttttatcaatcgcatggtccgtccgggcagtatacacatgaatttgacggggacgaggagttctatgtggacttggagacgaaggaaactgtgtggcagctccctatgttttccaaattcatctccttcgacccccagtcggctcttaggaacatggccgtgggtaaacacacgctggaattcatgatgaggcagtcaaattcaactgccgcaactaacgaggtaccagaggtcactgtgttcagtaagttcccagtcacgttgggacagcccaacactctgatctgcctcgtagataatatttttcctccagtggtgaatattacttggctctctaacggccactctgtgacagagggggtctcggaaacatcctttctcagcaaatctgatcatagttttttcaaaatttcttacctcacttttctcccgtctgccgacgaaatatatgattgtaaggtggaacactggggtctcgatgaacctctgttgaagcactgggagcccgaaatacctgctccaatgagcgagttgactgaaactctcgtctgtgcactcggcctgtctgtcgggctcatgggcatcgtggttggaactgtgtttatcatccaaggcctaaggtctgtcggggccagcaggcatcaggggctcttgtag

SEQ ID NO: 202464 - DNA, 768 bp, Artificial Sequence
  derived and/or modified sequence
atgatcctgaacaaggccctgctgctgggcgccctggccctgaccgcagtgatgtccccgtgtggaggtgaggatatcgtggccgaccatgtggcttcttatggcgtgaacttctaccaatcccatggcccctcaggtcaatatactcacgaatttgacggcgacgaggagttctatgtggacctcgagacaaaagaaactgtttggcagttgcccatgttttctaagttcatcagcttcgatccacagtctgcacttcggaacatggctgttgggaaacacacgctggaattcatgatggggcagtctaactctacagctgctacaaacgaggtcccagaggtgacagtattcagcaagttccccgtgacccttggacagcctaataccctaatctgtcttgtcgataacattttccccccagtagtaaacatcacctggctgtctaatggccactccgttaccgagggcgtgtccgaaacctcattcctgtcaaagtcagaccattcattttttaagatttcgtacctgacgtttttacctagcgcggatgagatatacgactgtaaggtcgaacattgggggctcgatgagcctctcctgaagcactgggaaccagagattccagctcctatgagcgaactgacagaaacgctcgtgtgcgcgcttgggctgtcagtgggcttgatgggcatcgtcgttgggacggtatttatcattcagggcctgcgttcagtcggtgcgtctcggcaccagggccttctctag

SEQ ID NO: 202465 - DNA, 768 bp, Artificial Sequence
  derived and/or modified sequence
atgatcctgaacaaggccctgctgctgggcgccctggccctgaccgccgttatgagtccttgcgggggcgaagatatcgtggccgatcacgtggcctcatacggcgttaatttctatcagtcccatggcccatccggacagtacacccatgagtttgatggcgacgaagaattttatgtggatttagaaactaaagagactgtttggcaacttccaatgttcagtaagtttatctcatttgacccacagtccgcgctaaggaacatggccgtagggaaacacactcttgaattcatgatgcggcaatcaaatagcacagctgcgacaaacgaggtaccagaggttaccgtgttctcaaaatttccggtgaccctcggtcagcctaacacattgatctgcctggtggacaacatctttcctccagtagtgaatattacttggctcagcaacgggcacagcgtgaccgaaggcgtctccgaaacgtcattcctgagcaagtcggatcattccttttttaaaatttcatacctaacatttcttccttctgccgatgagatctatgactgtaaagtcgaacattggggattggacgagccccttctcaaacattgggagcccgagatccccgcacccatgtctgagctcactgagactttggtgtgcgctctgggcctcagcgtgggactaatgggcatcgtcgtggggaccgtgtttatcatccagggcctacgctccgtcggagcgtcccgacatcaggggctactctag

SEQ ID NO: 202466 - DNA, 768 bp, Artificial Sequence
  derived and/or modified sequence
atgatcctgaacaaggccctgctgctgggcgccctggccctgaccgccgtgatgagtccctgcggcggcgaggatattgtggctgatcatgtcgccagttatggcgtgaatttctaccagtcacacggcccatccggccagtatactcatgagttcgatggggacgaggagttttacgtggatctggagaccaaggagactgtgtggcagctacctatgttcagtaaattcattagttttgatcctcaaagcgctctacgcaatatggcagtggggaagcacacactcgagttcatgatgcgccagtcaaattccacagctgcaacaaacgaggtgccagaggtgacagtgtttagcaaatttcccgtgactctgggacagcctaacaccctgatatgtctggtcgataatatcttcccgcccgtggtcaatatcacttggctgtcaaatgggcattccgtgactgagggcgtgagtgaaaccagttttctgagcaaatccgaccattccttctttaaaatatcgtacctgactttcttaccaagcgccgatgaaatctatgactgtaaggtagagcactggggactggatgagcccctcctcaagcactgggaacccgaaatccccgcccctatgtccgagttgactgaaactcttgtctgcgcccttggcctttccgcgggactgatgggaatcgtggttggtacagtattcattattcagggacttagatcagttggcgccagccgtcaccagggcctactgtag

SEQ ID NO: 202467 - DNA, 768 bp, Artificial Sequence
  derived and/or modified sequence
atgatcctgaacaaggccctgctgctgggcgccctggccctgaccgcagtcatgtctccctgcggcggagaagatattgtggcagatcacgttgcttcttatggcgtgaacttttaccagtctcatgggccatctggccagtacactcacgaatttgacggcgatgaagaattctacgtcgacttggagactaaggaaacggtctggcaactgccaatgttttctaagttcattagttttgaccctcagtcagcattgcgcaacatggcggtcggtaaacacactctggaattcatgatgagacagtcaaactccacggctgctaccaacgaggtgccagaggttaccgtgtttagcaaatttcccgtcacacttggtcagcctaacaccctcatctgcctggtcgataatatatttccccccgttgtcaatattacatggctgtccaacgggcactcagtgacagagggagtaagtgagacatccttcctctctaagagtgatcattccttttttaagatctcctaccttacatttctcccctccgccgatgaaatctatgactgtaaggtcgaacactggggcctcgacgaaccgctactgaagcattgggagccggagatcccagctcccatgtctgaattgacagagactttggtctgtgcacttggtctgtctgtggggctgatgggaatcgtcgtgggcaccgtgtttatcatccaggggcttcggtctgtcggagcaagtaggcaccagggtcttctatag

SEQ ID NO: 202468 - DNA, 768 bp, Artificial Sequence
  derived and/or modified sequence
atgatcctgaacaaggccctgctgctgggcgccctggccctgaccgccgtgatgtccccctgcggcggggaggacatcgtggcggaccacgttgcctcctacggcgtgaatttttaccagtctcacgggccttccggccagtacacacacgaattcgatggagacgaagaattttacgtggacctggaaacaaaggagacggtgtggcaattgcccatgttctccaaatttattagtttcgacccgcaatcagctctgagaaatatggcggttggcaaacacactcttgaatttatgatgagacagagtaatagcaccgccgcgaccaatgaggtgccggaggtcactgtttttagtaagttccctgttactttaggacagcccaatactctgatctgccttgtcgacaacatctttccacccgtagtgaatatcacatggctgtctaatggacattccgtcacagagggagtgagcgagacttccttcctatctaagtccgatcattctttttttaagataagttacctcacattcctgcccagcgcagacgaaatttacgattgcaaggtcgaacactggggtctcgacgaacccttacttaaacattgggaacctgaaatacctgctccaatgtctgaactcacggagactctggtatgtgcacttggtctaagtgtagggcttatgggtattgtggtgggcaccgtgtttattattcaggggttgcgatcggtcggcgcaagcagacaccagggtctgttgtag

SEQ ID NO: 202469 - DNA, 768 bp, Artificial Sequence
  derived and/or modified sequence
atgatcctgaacaaggccctgctgctgggcgccctggccctgaccgccgtgatgagcccctgcggcggtgaggacatcgtagccgaccatgtggctagctatggagtaaacttctaccaaagtcacggcccttccggccagtacacccatgaatttgatggagatgaggagttttacgtggacctggagaccaaggagacagtctggcaacttccgatgttctcaaaatttatcagctttgatccccaatcagctctaagaaatatggcagttggaaagcacaccctagagttcatgatgagacagtcaaatagcaccgccgctacgaatgaggtacccgaagtcacggtatttagcaaattcccggtgactctggggcaaccaaacactctcatctgcttggtagacaatatctttcctcccgtggtgaatattacctggctctctaatgggcattccgtgaccgaaggcgtgagcgagacctcattcctgtcgaaaagcgaccattcctttttcaagatatcttacctgacatttttacccagcgctgatgagatctacgattgtaaggtggaacactggggcctggatgagcccctcctaaagcattgggagcctgaaatccccgccccaatgtcagaactgacggagacccttgtgtgcgccctcgggttgtctgccggactcatgggaattgtggttggaacagtgttcataatccagggcctccggtctgtcggcgcctctagacatcagggcctgctgtag

SEQ ID NO: 202470 - DNA, 768 bp, Artificial Sequence
  derived and/or modified sequence
atgatcctgaacaaggccctgctgctgggcgccctggccctgaccgccgtaatgtccccttgtgggggggaggacatcgtggcagaccatgtcgcttcttatggagtcaatttctatcagtcacacgggcccagcgggcagtatacacacgaattcgatggggatgaggagttctacgtggatctggaaactaaggagacggtttggcagttacccatgttttcgaagtttattagtttcgacccccagtccgcactgcgaaacatggcggtcggtaagcacacattggagttcatgatgagacaatctaattctactgccgcaaccaatgaagttccggaggttacagtgtttagcaagtttcccgtgacccttggccagcctaacacactgatttgtctcgtggataacatttttccacctgtagttaacataacttggctcagcaatggacattcagtgacggaaggcgtgagtgagacgtctttcctgtccaaatcagatcactcatttttcaagatcagctacctgacgttcctcccctccgctgacgagatttacgactgcaaggtcgaacattggggcctcgatgaacccctgttgaagcactgggaacccgagatccctgccccaatgagtgaacttaccgagactctggtgtgtgcgcttgggctatctgttgggctgatggggattgtagttggaacggtgttcataatacagggcctgaggagtgtgggcgcatctaggcaccagggcttgttgtag

SEQ ID NO: 202471 - DNA, 249 bp, Artificial Sequence
  derived and/or modified sequence
gaccacgtggccagctacggcgtgaacttctaccagagccacggcccgtccggacagtacacgcatgagtttgacggcgacgaagagttctatgttgatctggagaccaaggagacggtgtggcagctgccaatgttttccaaattcataagcttcgacccccagtctgcactacgcaacatggccgtcggaaaacacacactggagttcatgatgagacaatctaattctacggccgccaccaattag

SEQ ID NO: 202472 - DNA, 768 bp, Artificial Sequence
  derived and/or modified sequence
atgatcctgaacaaggccctgctgctgggcgccctggccctgaccgccgtgatgtccccttgcgggggagaggatattgtcgccgatcacgttgcttcttatggggtgaacttctaccagagccatggtcccagcggccagtacacccacgagtttgacggcgatgaggagttttatgtggacttggaaacaaaagaaaccgtgtggcagctgcccatgttcagtaaatttatctctttcgatccccagtcagccctcaggaatatggcagtaggtaagcacacactggagttcatgatgaggcagtccaatagtaccgctgcaactaatgaagtgcctgaggtgacagtgtttagcaagttcccagtgacactcgggcagccgaacacactgatttgcctggtggataatatctttccccctgtggtcaacataacttggctttcgaacggccacagcgtaactgaaggcgtttctgaaacaagcttcctcagcaagtccgaccacagtttcttcaagatctcatatctcacattcctgccgtccgccgacgaaatttatgattgtaaagttgagcattggggcctcgatgagccattacttaaacattgggaaccagagatccctgctcctatgtctgaattaacggaaactcttgtctgtgccttgggtctgagtgttggcttgatggggatcgtcgtgggaaccgtgttcatcatacaaggacttcgctcagtgggggcctccaggcatcaggggctgctctag

SEQ ID NO: 202473 - DNA, 768 bp, Artificial Sequence
  derived and/or modified sequence
atgattctgaacaaagccctcctcctcggagcattggccctcactgcggtgatgagtccttgcgggggtgaagacatcgtcgcagatcacgttgcgagctatggcgtcaacttttaccagagccacggaccatcaggacagtacactcatgagttcgatggcgatgaagaattttacgtcgatctcgagaccaaagagacagtgtggcaactgccaatgttcagcaagtttatcagtttcgacccgcaatctgctcttaggaatatggcagtcggcaagcacactttagagttcatgatgcgacaatctaattccacggctgcgaccaacgaagttcctgaggtgaccgttttctccaagttccccgtcacactgggacagccaaacacactcatatgtctagtcgataacatcttcccccctgttgtgaacatcacatggctgagcaatggccacagcgtgaccgagggggtcagtgagaccagcttcctctcgaagtcagaccatagctttttcaagatatcatatctaacattcttgccaagtgcagatgagatctatgattgcaaggtagagcactggggactggacgagcctctgctgaagcattgggagccggaaatccccgcacccatgtccgaattaacagagaccctcgtttgtgccctggggctgtccgttggcctgatgggtattgttgtcggcacagtctttattatccagggcctcaggtctgtggacgcaagccgccatcaaggccttctctag

SEQ ID NO: 202474 - DNA, 768 bp, Artificial Sequence
  derived and/or modified sequence
atgatcctcaacaaggccctgctgctgggcgctttggccctcaccgcagtgatgagtccatgtggcggtgaagacatcgtggcagaccatgtggcctcctacggggtcaacttttatcagtcccacggaccgagtggtcagtacacacatgaattcgatggtgatgaggagttttacgtagacctggaaaccaaggagacagtttggcagctgccaatgtttagcaaattcatctcgtttgacccgcagagcgccttaagaaacatggcggtagggaaacatactctggagtttatgatgaggcagtctaactctacggctgctactaacgaggtgcccgaagttacagtgttctcaaagtttccagtcaccttgggacagccaaacactctcatttgtctggtggataatatattccccccagttgttaacattacatggttatcaaatggccatagtgtgacagagggcgtcagcgagacatccttccttagcaaatccgatcatagttttttcaaaatttcctacctgactttcttgccttccgcagacgagatttacgattgcaaggtggagcactggggcttggatgaaccacttctgaagcattgggaaccagaaattccagcacctatgtccgaactgactgagacgctcgtgtgtgcgttgggcctgagtgtgggtctgatgggtatagttgtagggactgtgttcattatacagggattaagatcggtcggagcctcacgccatcaagggctgctctag

SEQ ID NO: 202475 - DNA, 768 bp, Artificial Sequence
  derived and/or modified sequence
atgattctgaacaaggccttactgctcggggctttagcgctgacagcagtaatgagtccatgtggcggagaggatatcgttgccgaccacgtggcatcctacggcgtgaacttctaccaatcacacggacctagcgggcagtacacccacgaattcgatggcgatgaggaattttatgtggacttggagacgaaggaaaccgtatggcagctgcctatgttttcaaagtttatttcttttgaccctcagtccgcccttaggaatatggccgtagggaagcataccttggagtttatgatgggacagagtaacagtacagccgcaacgaacgaagtccctgaagtgaccgtcttttcaaaattcccagtgacattggggcagccaaacactctgatctgtctggtggacaacatcttcccccctgtggtcaacattacgtggctaagcaacggacattcggtaaccgagggtgtcagcgagacgagcttcctgagtaaatccgaccatagtttctttaagattagctatctcacctttttgccctctgcagacgagatctatgactgcaaagtcgagcattggggtctagatgagccattactaaaacattgggaaccggaaatccctgccccaatgtcagagctgactgaaaccctcgtctgtgcgcttggcttgtcagtcggcctcatgggtatagttgtcgggaccgtatttatcattcagggtttgcggtcagttggcgcttctcgccatcaagggttgctgtag

SEQ ID NO: 202476 - DNA, 768 bp, Artificial Sequence
  derived and/or modified sequence
atgatcctaaataaggctctgttactcggagccctggcattgaccgccgtgatgtccccgtgtggcggtgaagatatcgtggccgaccatgtcgcctcctacggtgtgaatttttaccagagccatgggcctagtggccagtacactcacgaattcgatggagacgaggagttctacgtggacctcgagacaaaggagaccgtgtggcagctgcccatgttttccaaattcatatcttttgatccacagagtgctctgcggaacatggcagttggtaagcatacacttgagtttatgatgcgacagagcaactctaccgctgctactaacgaggtcccagaggtgacagtgttttctaagtttcctgtaaccctcgggcagccgaacacactgatttgcctggtggacaacatatttcctccggtggtaaatataacctggctgtccaacgggcactctgtaaccgaaggggtcagtgagacaagctttttgtccaagagtgatcactcgtttttcaagattagctatctgaccttcctgccctccgctgatgagatctatgactgcaaggtcgaacattggggtttagatgagcctcttctaaagcattgggaacccgaaatccccgcacctatgtcggagctgaccgagacactggtgtgcgcattaggcctttctgtcggccttatgggtatcgtagttggaacagtcttcattatccagggtttacgctcagttggagctagccgccaccagggcctcctctag

SEQ ID NO: 202477 - DNA, 768 bp, Artificial Sequence
  derived and/or modified sequence
atgattctgaacaaagcattgctgctcggggcactcgccttgacagctgtaatgtctccttgtggcggagaagacatcgtggccgatcatgtggcttcatatggagtgaatttctatcaatcccacggaccatcgggacagtacacccacgagtttgacggagatgaggagttttacgtggatttagaaactaaggaaacagtgtggcagttgcccatgttcagcaagtttatcagtttcgatcctcagagcgcactccggaacatggctgtaggaaaacacacactagagttcatgatgaggcaatctaattctacagctgctaccaacgaggtgccggaggtcactgtgttctcaaagtttcccgtgaccctgggacaaccaaatacccttatctgcctcgtggacaatatttttccacccgttgtcaacatcacatggctttcaaatggacacagtgtgacagagggggtgagtgaaacctcatttctaagtaagtctgatcattcttttttcaagatttcatatctaaccttcttgccctccgcagacgaaatctacgactgcaaagtagaacattggggcctcgatgaacctcttctgaaacactgggagcccgagattcctgccccaatgtcagagttaactgagacgttagtttgtgctttaggcctgtctgctggactaatgggtattgtggtgggcacagtatttattatacaggggctgcgatccgttggcgcaagccggcaccaaggactcttatag

SEQ ID NO: 202478 - DNA, 768 bp, Artificial Sequence
  derived and/or modified sequence
atgattctcaacaaagccctcttgctaggagcacttgctctgacagcggtgatgtctccttgcggcggtgaagacattgttgccgatcatgtcgcaagctacggagtaaacttctatcagtcccatgggccaagtggccagtatacacatgaattcgatggtgacgaagaattctacgtcgatctggaaaccaaggagacggtctggcagctcccaatgttttctaaattcataagcttcgatcctcagagtgccctcagaaatatggctgtgggtaagcatactctggagttcatgatgcgacagtctaatagcacagctgctactaacgaggtgcctgaggtcactgtctttagcaagttccctgtgaccctgggccaacctaacaccctgatttgcctcgttgacaatattttcccaccggttgtcaatataacttggctctcaaacgggcattcagtgacagagggggtgagtgagacgtcttttctgagcaagtccgatcattccttctttaaaattagttatctgacattcctgccgagcgctgatgagatatacgactgtaaggtcgagcattggggcctggatgagcctctactgaagcattgggagcctgagatcccggctccgatgagtgagcttaccgaaactctggtctgtgcattaggtctgagcgtgggactgatgggtattgtggtggggaccgtgtttattattcagggcctgcgctccgtgggcgcttcacgacatcaaggactcctgtag

SEQ ID NO: 202479 - DNA, 768 bp, Artificial Sequence
  derived and/or modified sequence
atgattcttaacaaggccctgcttctgggtgcactggccttaaccgcagtcatgtctccttgcggtggggaagacattgtcgcagaccacgttgcgtcctatggcgtgaacttttaccaaagtcacggtccttccggacaatatactcatgaattcgatggtgatgaagaattctacgttgacctcgagactaaagagaccgtatggcagttaccaatgttcagtaagttcatctcattcgacccccagagcgccctccgtaatatggccgtggggaagcataccctagagttcatgatgcgacaatctaactcgacagccgctactaacgaagtccccgaagttacagtcttttcgaagttccctgtaacactgggtcagccaaataccctgatctgtcttgtcgataacatttttccgcctgtcgtgaacataacctggctctccaatgggcatagtgtgacagaaggagtgtctgagacaagttttttgagcaagagtgaccactccttcttcaagatctcttacttgacattcctgccatccgccgatgagatctatgactgcaaagtagagcattggggattggacgaacccctgcttaaacactgggaacctgaaataccggcacctatgtcagagttaacagaaacactcgtctgtgctctagggctctctgtggggttgatgggcattgtagtgggcacagtatttatcatacagggccttcggagtgttggcgcttcccgccaccagggactcctgtag

SEQ ID NO: 202480 - DNA, 768 bp, Artificial Sequence
  derived and/or modified sequence
atgattctcaataaagccctactgttgggggcattggccctcacagcagtgatgtcaccctgcggcggtgaggatatcgtcgcggatcatgttgcttcgtacggagtgaatttctatcagagccacgggccatccggccagtacacccacgagttcgacggcgatgaggagttctatgtggatctggaaacaaaggagacagtgtggcagctgcccatgttcagtaagttcatctccttcgatccacagtccgcactcaggaatatggccgtaggcaagcacactctggagtttatgatgcgtcagagtaattctacagcagccaccaacgaggtgcccgaggtgaccgtgttcagcaaatttccagtgacactggggcagcccaacacactgatctgtctggtcgacaacatttttccccctgttgtgaacattacctggctgtcaaacggtcacagcgtcactgagggcgtttctgaaacctcattcttgagcaagtctgatcatagtttctttaagatcagctatttgacttttctgccatctgccgatgagatctatgactgtaaagtagagcactgggggctggacgagccactactcaagcactgggagcctgaaatccctgctccgatgagcgaactcacagaaactctggtttgcgccttgggcctaagcgctgggctgatgggcatcgtcgtgggcactgtgtttatcatccaggggctgcgatcagttggcgctagtagacaccaaggcctcttatag

SEQ ID NO: 202481 - DNA, 768 bp, Artificial Sequence
  derived and/or modified sequence
atgatcctgaacaaagctttgcttctcggggctttagccctaaccgccgtaatgtctccttgcggaggggaggacatcgttgctgaccatgtggcctcctatggcgttaacttctaccagtctcacggcccttccgggcagtacacccatgagttcgatggcgacgaagaattttacgtggacttggaaacgaaagagacagtgtggcagctgccgatgttctcaaaatttatttcctttgacccccagtcagctctgcgtaatatggcagtgggaaaacatactcttgagtttatgatgcgacagtccaatagcaccgccgctaccaacgaggtcccagaagtgactgttttctccaagtttcctgtcaccctgggacaacccaatacactgatctgcctggtagacaacatattcccaccagtcgtgaatattacatggcttagcaacggccattccgtgacggagggggtgagcgagacaagtttcctctctaagagcgatcacagttttttcaaaatcagctatttgacgttcctcccctcagctgacgagatctatgactgcaaggtcgaacattggggactggatgagcccctgttgaagcactgggaaccagagataccagctccgatgtctgaactcaccgagacacttgtatgcgctcttggattatcggtgggcttgatgggtatcgtagtcggtaccgtgtttataattcagggattgaggagtgtgggagcctctagacaccagggtctactctag

SEQ ID NO: 202482 - DNA, 249 bp, Artificial Sequence
  derived and/or modified sequence
gaccatgtcgcttcctacggagtgaacttctaccagtcccacgggccaagcggccagtatacccatgagttcgatggtgatgaggaattttatgtggacttagagacgaaggagacggtgtggcagttgcctatgttttccaagtttatatcattcgaccctcagagtgctctacgaaacatggccgttggcaaacacacactggaattcatgatgcgccagtcaaattccaccgccgctaccaactag

SEQ ID NO: 202483 - DNA, 768 bp, Artificial Sequence
  derived and/or modified sequence
atgatcctgaacaaagctctgttgcttggggctttggccctgactgccgtgatgtccccatgcgggggtgaagatatcgtcgcagaccacgtggccagctacggcgtgaacttttaccagtctcacggcccatcagggcagtacacccacgagttcgacggcgatgaagaattctatgtcgatctggagaccaaggagaccgtctggcaactcccaatgttttccaagtttatttcattcgacccgcagtctgcactgaggaatatggccgtcggcaaacataccttggagtttatgatgcggcaaagcaatagtaccgctgccactaatgaggtgccggaagtcactgtgtttagtaaattcccagtaacattgggccagcccaacaccttgatttgtctcgtggacaatatcttccctcctgtagttaacatcacttggctctctaatggacattcagtgactgagggcgtaagtgaaacgagtttcttaagcaagagtgaccacagcttcttcaaaatttcctatctaacttttttgccatccgccgacgaaatatacgattgtaaggtcgaacattgggggctggacgaaccactattgaagcactgggagcccgagatccctgcgcctatgtctgagctcaccgaaactctggtctgcgctctgggcttatccgttggtttgatgggcattgtggtgggaacggtatttatcatccaggggctgcgatctgtaggcgctagcagacaccagggattgttgtag

SEQ ID NO: 202484 - DNA, 768 bp, Artificial Sequence
  derived and/or modified sequence
atgatcctgaacaaggccctgctgctgggcgccctggccctgaccgccgtgatgagcccctgcggcggcgaggacatcgtggccgaccacgtggccagctacggcgtgaacttctaccagagccacggccccagcggccagtacacccacgagttcgacggcgacgaggagttctacgtggacctggagaccaaggagaccgtgtggcagctgcccatgttcagcaagttcatcagcttcgacccccagagcgccctgagaaacatggccgtgggcaagcacaccctggagttcatgatgagacagagcaacagcaccgccgccaccaacgaggtgcccgaggtgaccgtgttcagcaagttccccgtgaccctgggccagcccaacaccctgatctgcctggtggacaacatcttcccccccgtggtgaacatcacctggctgagcaacggccacagcgtgaccgagggcgtgagcgagaccagcttcctgagcaagagcgaccacagcttcttcaagatcagctacctgaccttcctgcccagcgccgacgagatctacgactgcaaggtggagcactggggcctggacgagcccctgctgaagcactgggagcccgagatccccgcccccatgagcgagctgaccgagaccctggtgtgcgccctgggcctgagcgtgggcctgatgggcatcgtggtgggcaccgtgttcatcatccagggcctgagaagcgtggacgccagcagacaccagggcctgctgtag

SEQ ID NO: 202485 - DNA, 768 bp, Artificial Sequence
  derived and/or modified sequence
atgatcctgaacaaggccctgctgctgggcgccctggccctgaccgccgtgatgagcccctgcggcggcgaggacatcgtggccgaccacgtggccagctacggcgtgaacttctaccagagccacggccccagcggccagtacacccacgagttcgacggcgacgaggagttctacgtggacctggagaccaaggagaccgtgtggcagctgcccatgttcagcaagttcatcagcttcgacccccagagcgccctgagaaacatggccgtgggcaagcacaccctggagttcatgatgagacagagcaacagcaccgccgccaccaacgaggtgcccgaggtgaccgtgttcagcaagttccccgtgaccctgggccagcccaacaccctgatctgcctggtggacaacatcttcccccccgtggtgaacatcacctggctgagcaacggccacagcgtgaccgagggcgtgagcgagaccagcttcctgagcaagagcgaccacagcttcttcaagatcagctacctgaccttcctgcccagcgccgacgagatctacgactgcaaggtggagcactggggcctggacgagcccctgctgaagcactgggagcccgagatccccgcccccatgagcgagctgaccgagaccctggtgtgcgccctgggcctgagcgtgggcctgatgggcatcgtggtgggcaccgtgttcatcatccagggcctgagaagcgtgggcgccagcagacaccagggcctgctgtag

SEQ ID NO: 202486 - DNA, 768 bp, Artificial Sequence
  derived and/or modified sequence
atgatcctgaacaaggccctgctgctgggcgccctggccctgaccgccgtgatgagcccctgcggcggcgaggacatcgtggccgaccacgtggccagctacggcgtgaacttctaccagagccacggccccagcggccagtacacccacgagttcgacggcgacgaggagttctacgtggacctggagaccaaggagaccgtgtggcagctgcccatgttcagcaagttcatcagcttcgacccccagagcgccctgagaaacatggccgtgggcaagcacaccctggagttcatgatgggccagagcaacagcaccgccgccaccaacgaggtgcccgaggtgaccgtgttcagcaagttccccgtgaccctgggccagcccaacaccctgatctgcctggtggacaacatcttcccccccgtggtgaacatcacctggctgagcaacggccacagcgtgaccgagggcgtgagcgagaccagcttcctgagcaagagcgaccacagcttcttcaagatcagctacctgaccttcctgcccagcgccgacgagatctacgactgcaaggtggagcactggggcctggacgagcccctgctgaagcactgggagcccgagatccccgcccccatgagcgagctgaccgagaccctggtgtgcgccctgggcctgagcgtgggcctgatgggcatcgtggtgggcaccgtgttcatcatccagggcctgagaagcgtgggcgccagcagacaccagggcctgctgtag

SEQ ID NO: 202487 - DNA, 768 bp, Artificial Sequence
  derived and/or modified sequence
atgatcctgaacaaggccctgctgctgggcgccctggccctgaccgccgtgatgagcccctgcggcggcgaggacatcgtggccgaccacgtggccagctacggcgtgaacttctaccagagccacggccccagcggccagtacacccacgagttcgacggcgacgaggagttctacgtggacctggagaccaaggagaccgtgtggcagctgcccatgttcagcaagttcatcagcttcgacccccagagcgccctgagaaacatggccgtgggcaagcacaccctggagttcatgatgagacagagcaacagcaccgccgccaccaacgaggtgcccgaggtgaccgtgttcagcaagttccccgtgaccctgggccagcccaacaccctgatctgcctggtggacaacatcttcccccccgtggtgaacatcacctggctgagcaacggccacagcgtgaccgagggcgtgagcgagaccagcttcctgagcaagagcgaccacagcttcttcaagatcagctacctgaccttcctgcccagcgccgacgagatctacgactgcaaggtggagcactggggcctggacgagcccctgctgaagcactgggagcccgagatccccgcccccatgagcgagctgaccgagaccctggtgtgcgccctgggcctgagcgccggcctgatgggcatcgtggtgggcaccgtgttcatcatccagggcctgagaagcgtgggcgccagcagacaccagggcctgctgtag

SEQ ID NO: 202488 - DNA, 249 bp, Artificial Sequence
  derived and/or modified sequence
gaccacgtggccagctacggcgtgaacttctaccagagccacggccccagcggccagtacacccacgagttcgacggcgacgaggagttctacgtggacctggagaccaaggagaccgtgtggcagctgcccatgttcagcaagttcatcagcttcgacccccagagcgccctgagaaacatggccgtgggcaagcacaccctggagttcatgatgagacagagcaacagcaccgccgccaccaactag

SEQ ID NO: 202489 - DNA, 1152 bp, Artificial Sequence
  derived and/or modified sequence
tcctcacaattgctctacagctcagagcagcaactgctgaggctgccttgggaagaagatgatcctaaacaaagctctgctgctgggggccctcgccctgactgccgtgatgagcccctgtggaggtgaagacattgtggctgaccatgttgcctcctatggtgtgaacttctaccagtctcacggtccctctggccagtacacccatgaatttgatggagacgaggagttctatgtggacctggagacgaaagagactgtctggcagttgcctatgtttagcaaatttataagttttgacccgcagagtgcactgagaaatatggctgtgggaaaacacaccttggaattcatgatgagacagtccaactctaccgctgccaccaatgaggttcctgaggtcacagtgttttccaagtttcctgtgacgctgggtcagcccaacaccctcatctgtcttgtggacaacatctttcctcctgtggtcaacatcacctggctgagcaatgggcactcagtcacagaaggtgtttctgagaccagcttcctctccaagagtgatcattccttcttcaagatcagttacctcaccttcctcccttctgctgatgagatttatgactgcaaggtggagcactggggcctggacgagcctcttctgaaacactgggagcctgagattccagcccctatgtcagagctcacagagactttggtctgcgccctggggttgtctgtgggcctcatgggcattgtggtgggcactgtcttcatcatccaaggcctgcgttcagttggtgcttccagacaccaagggctcttatgaatcccatcctgaaaaggaaggtgcatcaccatctacaggagaagaagaatggacttgctaaatgacctagcactattctctggcctgatttatcatatcccttttctcctccaaatgtttcttctctcacctcttctctgggacttaaggtgctatattccctcagagctcacaaatgcctttcaattctttccctgacctcctttcctgaatttttttattttctcaaatgttacctactaagggatgcctgggtaagccactcagctacctaattcctcaatgacctttatctaaaatctccatggaagcaataaattcccttt

SEQ ID NO: 202490 - protein, 164 aa, Artificial Sequence
  derived and/or modified sequence
ITGLWSLAIISWERWLVVCKPFGNVRFDAKLAIVGIAFSWIWSAVWTAPPIFGWSRYWPHGLKTSCGPDVFSGSSYPGVQSYMIVLMVTCCIIPLAIIMLCYLQVWLAIRAVAKQQKESESTQKAEKEFRNCILQLFGKKVDDGSELSSASKTEVSSVSSVSPA

SEQ ID NO: 202491 - protein, 364 aa, Artificial Sequence
  derived and/or modified sequence
MAQQWSLQRLAGRHPQDSYEDSTQSSIFTYTNSNSTRGPFEGPNYHIAPRWVYHLTSVWMIFVVTASVFTNGLVLAATMKFKKLRHPLNWILVNLAVADLAETVIASTISIVNQVSGYFVLGHPMCVLEGYTVSLCGITGLWSLAIISWERWLVVCKPFGNVRFDAKLAIVGIAFSWIWSAVWTAPPIFGWSRYWPHGLKTSCGPDVFSGSSYPGVQSYMIVLMVTCCIIPLAIIMLCYLQVWLAIRAVAKQQKESESTQKAEKEVTRMVVVMIFAYCVCWGPYTFFACFAAANPGYAFHPLMAALPAYFAKSATIYNPVIYVFMNRQFRNCILQLFGKKVDDGSELSSASKTEVSSVSSVSPA

SEQ ID NO: 202492 - DNA, 495 bp, Artificial Sequence
  derived and/or modified sequence
atcaccggcctgtggagcctggccatcatcagctgggagagatggctggtggtgtgcaagcccttcggcaacgtgagattcgacgccaagctggccatcgtgggcatcgccttcagctggatctggagcgccgtgtggaccgccccccccatcttcggctggagcagatactggccccacggcctgaagaccagctgcggccccgacgtgttcagcggcagcagctaccccggcgtgcagagctacatgatcgtgctgatggtgacctgctgcatcatccccctggccatcatcatgctgtgctacctgcaggtgtggctggccatcagagccgtggccaagcagcagaaggagagcgagagcacccagaaggccgagaaggagttcagaaactgcatcctgcagctgttcggcaagaaggtggacgacggcagcgagctgagcagcgccagcaagaccgaggtgagcagcgtgagcagcgtgagccccgcctag

SEQ ID NO: 202493 - DNA, 495 bp, Artificial Sequence
  derived and/or modified sequence
atcaccggactgtggagcctcgccatcatttcatgggaacggtggctggtggtgtgcaagcccttcgggaatgttcggtttgacgctaaattagccatagtggggatcgcatttagttggatatggtctgcagtgtggactgccccccccattttcggttggagccgttactggccccacggactgaaaacgagctgcgggccagatgtgttctctggtagctcatatccaggggtgcaaagctacatgattgtgttgatggtgacctgctgtatcattccactggccataatcatgttatgctatctgcaggtgtggctcgcgattcgagccgtggcaaaacagcaaaaggagtcagaaagcactcaaaaggctgaaaaagagttccgcaattgcatcttacagctctttggcaagaaggttgacgacgggtctgaactcagctctgctagtaagactgaagtttcgagcgtatcatcagtctccccagcctag

SEQ ID NO: 202494 - DNA, 495 bp, Artificial Sequence
  derived and/or modified sequence
atcaccggcctgtggagcctggccatcatctcctgggagcgctggctggtggtgtgcaagccctttggaaatgtgcgctttgatgccaagctggccatcgtgggcatcgccttctcctggatctggagcgctgtgtggacagccccacccatcttcggctggagccgctactggccccacggcctgaagaccagctgtggcccagatgtgttcagcggcagcagctacccaggagtgcagagctacatgattgtgctgatggtgacctgctgcatcatccccctggccatcatcatgctgtgctacctgcaggtgtggctggccatccgggctgtggccaagcagcagaaggagagcgagagcacccagaaggccgagaaggagttcaggaactgcatcctgcagctgtttgggaagaaggtggatgatggcagcgagctgagcagcgccagcaagacagaggtgtcctctgtgtcctctgtgtccccagcctag

SEQ ID NO: 202495 - DNA, 495 bp, Artificial Sequence
  derived and/or modified sequence
atcaccggcctgtggagcctggccatcatcagctgggagcggtggctggtcgtgtgcaagcccttcggtaacgtgaggtttgacgcgaaactggctattgttggcatcgctttttcatggatctggtccgccgtctggacagcacctcctattttcgggtggtctagatattggcctcacgggctgaagacttcttgcggccccgacgtgttttccggctctagttacccaggcgttcaatcgtacatgattgttctgatggttacctgttgtatcatcccactggccattattatgctttgttatctgcaagtttggctcgccatccgggccgtcgctaagcagcaaaaggaatccgaatcaacacagaaagctgaaaaggagtttcgcaactgtattctgcaactcttcggtaaaaaggtcgacgatgggtctgagctgagcagtgcctcaaaaacagaagtgtcctctgtcagcagcgtgagtccagcctag

SEQ ID NO: 202496 - DNA, 592 bp, Artificial Sequence
  derived and/or modified sequence
atcacaggtctctggtctctggccatcatttcctgggagaggtggctggtggtgtgcaagccctttggcaatgtgagatttgatgccaagctggccatcgtgggcattgccttctcctggatctggtctgctgtgtggacagccccgcccatctttggttggagcaggtactggccccacggcctgaagacttcatgcggcccagacgtgttcagcggcagctcgtaccccggggtgcagtcttacatgattgtcctcatggtcacctgctgcatcatcccactcgctatcatcatgctctgctacctccaagtgtggctggccatccgagcggtggcaaagcagcagaaagagtctgaatccacccagaaggcagagaaggaatttcgaaactgcatcttgcagcttttcgggaagaaggttgacgatggctctgaactctccagcgcctccaaaacggaggtctcatctgtgtcctcggtatcgcctgcatgaggtctgcctcctacccatcccgcccaccggggctttggccacctctcctttccccctccttctccatccctgtaaaataaatgtaatttatctttgc

SEQ ID NO: 202497 - DNA, 495 bp, Artificial Sequence
  derived and/or modified sequence
atcacgggattgtggagcttggctatcatatcctgggaaagatggctggtggtgtgcaagccattcgggaacgtgcgattcgacgccaaactcgcaattgttggcatagccttcagctggatctggtcagccgtgtggacagctccacctatttttggctggagcaggtactggcctcatggcctcaaaacctcttgcgggccagacgtgttcagcggaagctcctaccccggagtgcagagctatatgatagtcctcatggtaacgtgttgcatcatcccgcttgccatcatcatgttgtgctatctgcaggtgtggttggccattcgggctgtggccaaacagcagaaggaaagcgaaagtacccaaaaagcagagaaagagtttcggaactgcatactgcagctgtttggaaagaaggtggacgacggatcagaactaagtagtgcgtccaaaacagaggtgagtagtgtctcttcagtctcacccgcatag

SEQ ID NO: 202498 - DNA, 1095 bp, Artificial Sequence
  derived and/or modified sequence
atggcccaacagtggagtctgcagcgactcgctggacggcacccacaggatagctacgaagacagcacccagagtagcatcttcacttatactaactcaaactcaacgagaggtcctttcgaggggccaaactatcacatcgcccctcggtgggtgtaccacctgaccagtgtttggatgatctttgttgttactgcctcagtatttactaatgggctagtcctagcggctacaatgaagtttaagaaactaaggcatcccctaaattggatactcgtcaacctcgccgtggctgacttagcagagacagtaatcgctagcactatcagcattgttaatcaggtgagcggatatttcgtgttggggcatcctatgtgtgttttagaaggttacactgtttctttatgcggaataacagggctgtggagtttggccatcatatcatgggaacggtggctggtggtgtgcaagccgttcggcaatgttcgctttgacgccaagttggccatcgtgggaatcgctttcagctggatttggtctgccgtgtggactgccccacctatttttggctggtctaggtattggccccatgggttaaagacttcttgcggacccgacgtctttagcggtagttcgtatccaggagtacaatcctacatgatcgtgctcatggtcacctgctgcattatacctctcgcaattatcatgctgtgctacctgcaggtgtggctggctatccgggccgtggcaaaacaacagaaggaatcagagtccactcagaaagccgagaaggaagtgacccggatggtggtggtcatgatttttgcttactgtgtatgctggggaccatacactttcttcgcgtgttttgccgctgctaacccaggctatgctttccaccccctcatggcagcgctgcccgcctactttgccaaatctgccacgatctataacccagtcatttatgtgtttatgaatcggcagtttcgcaattgcattctgcagttatttgggaagaaggtagacgacggctccgagctgtcttccgcaagtaagacggaggtttcctctgtttcatccgtgtcacccgcctag

SEQ ID NO: 202499 - DNA, 1095 bp, Artificial Sequence
  derived and/or modified sequence
atggcccagcagtggagcctgcagaggctggccggccgccacccccaggacagctatgaggacagcacccagagcagcatcttcacctacaccaacagcaacagcacccggggcccctttgagggccccaactaccacatcgccccccgctgggtgtaccacctgacctctgtgtggatgatctttgtggtgacagcctctgtgttcaccaacggcctggtgctggccgccaccatgaagttcaagaagctgcggcaccccctgaactggatcctggtgaacctggccgtggccgacctggccgagaccgtgattgccagcaccatcagcatcgtgaaccaggtgtctggctactttgtgctgggccaccccatgtgtgtgctggagggctacacagtgtccctgtgtggcatcaccggcctgtggagcctggccatcatctcctgggagcgctggctggtggtgtgcaagccctttggaaatgtgcgctttgatgccaagctggccatcgtgggcatcgccttctcctggatctggagcgctgtgtggacagccccacccatcttcggctggagccgctactggccccacggcctgaagaccagctgtggcccagatgtgttttctggcagcagctacccaggagtgcagagctacatgattgtgctgatggtgacctgctgcatcatccccctggccatcatcatgctgtgctacctgcaggtgtggctggccatccgggctgtggccaagcagcagaaggagagcgagagcacccagaaggccgagaaggaggtgaccaggatggtggtggtgatgatctttgcctactgtgtgtgctggggcccctacaccttctttgcctgctttgctgctgccaaccctggctacgccttccaccccctgatggccgccctgcctgcctactttgccaagagcgccaccatctacaaccctgtgatctacgtgttcatgaaccggcagttcaggaactgcatcctgcagctgtttgggaagaaggtggatgatggcagcgagctgagcagcgccagcaagacagaggtgtcctctgtgtcctctgtgtccccagcctag

SEQ ID NO: 202500 - DNA, 1095 bp, Artificial Sequence
  derived and/or modified sequence
atggcccagcagtggagcctgcagcggctggccggccggcacccccaggattcatacgaagactccactcagtctagcatcttcacttacacaaatagtaactccactaggggaccatttgagggaccaaattatcacattgctccaaggtgggtgtatcacctgacctccgtctggatgatttttgtggttactgcttccgtgtttactaacggtctcgtgctggctgctacaatgaaatttaagaaactgaggcacccattgaactggattctggtcaacctggcagtggccgacctggctgagacagtcatagccagtacaatatccattgtgaatcaagtctccgggtactttgtgttaggtcaccccatgtgcgtcctcgaaggctatacagtcagcctgtgcggcatcactggtctttggagcctagcaatcatcagctgggagagatggttggtggtgtgcaaaccatttggtaatgtacgttttgacgcaaaactagctattgtgggaattgcctttagctggatctggagcgctgtgtggacggcacctccaatatttggatggagcagatactggccccatggtctgaaaacttcctgtggccctgacgtattttccggtagcagctacccaggtgtccaaagctatatgatcgttttgatggtgacatgctgtataatccctctggcaatcatcatgctttgttacctgcaagtctggcttgcaatacgggccgtcgcaaagcaacaaaaggagtccgagagtacacagaaggccgagaaggaggttactagaatggttgtagtgatgatctttgcatactgcgtgtgttggggtccctacaccttttttgcttgtttcgctgccgccaaccccggttacgcttttcaccctctaatggctgccctgcccgcctacttcgcaaagagcgcaacgatatacaatcccgtcatctacgtcttcatgaaccgccagttcagaaattgcatcctccagctcttcggcaaaaaagtggacgacggaagcgaattatcctccgcctccaagacagaagtgagttctgtttcaagcgtatccccggcgtag

SEQ ID NO: 202501 - DNA, 1261 bp, Artificial Sequence
  derived and/or modified sequence
cgtgaccctcaggtgatgcgccagggccggctgccgtcggggacagggctttccatagccatggcccagcagtggagcctccaaaggctcgcaggccgccatccgcaggacagctatgaggacagcacccagtccagcatcttcacctacaccaacagcaactccaccagaggccccttcgaaggcccgaattaccacatcgctcccagatgggtgtaccacctcaccagtgtctggatgatctttgtggtcactgcatccgtcttcacaaatgggcttgtgctggcggccaccatgaagttcaagaagctgcgccacccgctgaactggatcctggtgaacctggcggtcgctgacctagcagagaccgtcatcgccagcactatcagcattgtgaaccaggtctctggctacttcgtgctgggccaccctatgtgtgtcctggagggctacaccgtctccctgtgtgggatcacaggtctctggtctctggccatcatttcctgggagaggtggctggtggtgtgcaagccctttggcaatgtgagatttgatgccaagctggccatcgtgggcattgccttctcctggatctggtctgctgtgtggacagccccgcccatctttggttggagcaggtactggccccacggcctgaagacttcatgcggcccagacgtgttcagcggcagctcgtaccccggggtgcagtcttacatgattgtcctcatggtcacctgctgcatcatcccactcgctatcatcatgctctgctacctccaagtgtggctggccatccgagcggtggcaaagcagcagaaagagtctgaatccacccagaaggcagagaaggaagtgacgcgcatggtggtggtgatgatctttgcgtactgcgtctgctggggaccctacaccttcttcgcatgctttgctgctgccaaccctggttacgccttccaccctttgatggctgccctgccggcctactttgccaaaagtgccactatctacaaccccgttatctatgtctttatgaaccggcagtttcgaaactgcatcttgcagcttttcgggaagaaggttgacgatggctctgaactctccagcgcctccaaaacggaggtctcatctgtgtcctcggtatcgcctgcatgaggtctgcctcctacccatcccgcccaccggggctttggccacctctcctttccccctccttctccatccctgtaaaataaatgtaatttatctttgccaaaaccaa

SEQ ID NO: 202502 - DNA, 1095 bp, Artificial Sequence
  derived and/or modified sequence
atggcacaacaatggtcattgcagagactcgcaggtcgccatcctcaagactcgtacgaggacagcacacagtcctctatcttcacttacacaaactccaacagcacaagaggcccattcgagggccctaattatcacattgcacctcgctgggtctaccacctgaccagtgtgtggatgatctttgtggtcaccgccagtgtgtttaccaacgggctcgtccttgcagccactatgaaatttaaaaaactgcgacatcctctcaattggatcctggtgaatttggcagtggctgacttggcggagaccgttattgcctctactataagcatcgtcaatcaggtgagtggctacttcgtactggggcacccgatgtgcgtactggaagggtacacagtcagtctttgcggcattacaggactttggagtcttgcaattatttcatgggagaggtggttagtagtgtgtaaaccgttcgggaacgtgagattcgacgccaaattagccatcgtgggaattgcgttcagctggatctggtccgcagtgtggaccgcacccccaatttttggctggagtcgatattggcctcacgggctgaagacctcctgcggccctgatgtgttcagtgggtcctcttaccctggcgtgcagtcttatatgattgtcttgatggtgacatgttgcatcatacccctggccatcatcatgttgtgttacctgcaagtctggctggctattagagccgtggcgaaacaacaaaaggagtctgaaagcactcagaaggctgaaaaggaggtgactcgtatggtggtagttatgattttcgcgtactgcgtctgctggggcccatataccttctttgcttgctttgctgccgctaatcctggctatgctttccatcctctgatggccgctctgccagcctattttgctaaaagcgcaacaatttacaatcccgtcatctacgtatttatgaatagacagtttcgcaattgtatcctgcagttgtttggaaaaaaagtcgacgatggatctgaactgtcctccgcttcgaagactgaagtttccagcgtctcctcagtatcaccagcctag

SEQ ID NO: 202503 - DNA, 1095 bp, Artificial Sequence
  derived and/or modified sequence
atggcccagcagtggagcctgcagagactggccggcagacacccccaggacagctacgaggacagcacccagagcagcatcttcacctacaccaacagcaacagcaccagaggccccttcgagggccccaactaccacatcgcccccagatgggtgtaccacctgaccagcgtgtggatgatcttcgtggtgaccgccagcgtgttcaccaacggcctggtgctggccgccaccatgaagttcaagaagctgagacaccccctgaactggatcctggtgaacctggccgtggccgacctggccgagaccgtgatcgccagcaccatcagcatcgtgaaccaggtgagcggctacttcgtgctgggccaccccatgtgcgtgctggagggctacaccgtgagcctgtgcggcatcaccggcctgtggagcctggccatcatcagctgggagagatggctggtggtgtgcaagcccttcggcaacgtgagattcgacgccaagctggccatcgtgggcatcgccttcagctggatctggagcgccgtgtggaccgccccccccatcttcggctggagcagatactggccccacggcctgaagaccagctgcggccccgacgtgttcagcggcagcagctaccccggcgtgcagagctacatgatcgtgctgatggtgacctgctgcatcatccccctggccatcatcatgctgtgctacctgcaggtgtggctggccatcagagccgtggccaagcagcagaaggagagcgagagcacccagaaggccgagaaggaggtgaccagaatggtggtggtgatgatcttcgcctactgcgtgtgctggggcccctacaccttcttcgcctgcttcgccgccgccaaccccggctacgccttccaccccctgatggccgccctgcccgcctacttcgccaagagcgccaccatctacaaccccgtgatctacgtgttcatgaacagacagttcagaaactgcatcctgcagctgttcggcaagaaggtggacgacggcagcgagctgagcagcgccagcaagaccgaggtgagcagcgtgagcagcgtgagccccgcctag

SEQ ID NO: 202504 - protein, 387 aa, Artificial Sequence
  derived and/or modified sequence
MERPPPRAAGRDPSALRAEAPWLRAEGPGPRAAPVTVPTPPQGSSVGGGFAGLEFARPQESEPRASDLGAPRTWTGAAAGPRTPSAHIPVPAQRATPGKARLDEVMAAAALTSLSTSPLLLGAPVAAFSPEPGLEPWKEALVRPPGSYSSSSNSGDWGWDLASDQSSPSTPSPPLPPEAAHFLFGEPTLRKRKSPAQVMFQCLWKSCGKVLSTASAMQRHIRLVHLGRQAEPEQSDGEEDFYYTELDVGVDTLTDGLSSLTPVSPTASMPPAFPRLELPELLEPPALPSPLRPPAPPLPPPPVLSTVANPQSCHSDRVYQGCLTPARLEPQPTEVGACPPALSSRIGVTLRKPRGDAKKCRKVYGMERRDLWCTACRWKKACQRFLD

SEQ ID NO: 202505 - DNA, 2296 bp, Artificial Sequence
  derived and/or modified sequence
cgcgtcctgagagtcagccctcgccgctgcagcctcggcgcccggccggccggccatggagcgccccccgccccgcgccgccggccgggaccccagtgcgctgcgggccgaggcgccgtggctgcgcgcggagggtccggggccgcgcgccgcgcccgtgacggtgcccacgccgccgcagggctcttccgtgggcggcggcttcgcgggcttggagttcgcgcggccgcaggagtcggagccgcgggcctcggacctgggggccccccggacgtggacgggggcggcggcggggccccggactccgtcggcgcacatccccgtcccagcgcagagagccaccccaggaaaagcccggctggacgaggtcatggctgccgctgcccttacaagcctgtccaccagccctctccttctgggggccccggttgcagccttcagcccagagcctggcctggagccctggaaggaggccctggtgcggcccccaggcagctacagcagcagcagcaacagtggagactggggatgggacctggccagtgaccagtcctctccgtccaccccgtcacccccactgccccccgaggcagcccactttctgtttggggagcccaccctgagaaaaaggaagagcccggcccaggtcatgttccagtgtctgtggaagagctgcgggaaggtgctgagcacggcgtcggcgatgcagagacacatccgcctggtgcacctggggaggcaggcagagcctgagcagagtgatggtgaggaggacttctactacacagagctggatgttggtgtggacacgctgaccgacgggctgtccagcctgactccagtgtcccccacggcctccatgccgcctgccttcccccgcctggagctgccagagctgctggagcccccagccctgcctagtcccctgcggccgcctgccccgcccctgcccccgccccctgtcctgagcaccgttgctaacccccagtcctgtcacagtgaccgtgtctaccagggctgcctgacgcccgcccgcctggagccgcagcccacggaggtcggagcctgcccacccgccttgtcctccaggatcggagtcaccctgaggaagccccgcggcgacgcgaagaagtgccggaaggtgtatggcatggagcgccgggacctctggtgcacagcctgccgctggaagaaagcctgccagcggttcctggactaagtccggctcgttcaagaacataagctaccaccttctccctccccaccccctccaggcccggggctgaaacagcccgaggacagccccaggggctggctttcaccagctgcagggtctgcttttacttggggtgggggggcggggctgaccctgaaccctcccccccgccaggtcggggaggggtcccaccactcaaagtgcctctaaagaaaccagctttttgcactaaagccaaaccacaccgctgtccccttagccccaagggccctgggggcagccaccctcccgcctgtcggcccgtagatttatcaagggtgttatgggcccagctttggggggccagtcccgatgcactttgaggggtgttggagaggggactcccccactcgcacttaactcaacggctctcgggccctggggctgtttttaccatgtttgtttttgaagctcaggtgtctcacgtctgggctgcaccaggcgaagagagaaattaaagatttgaggtttttccagaagctttgtctgcctctcgggaggaaggccgtggggctgggaccctgtggtgggcaagtgggtggagtctggcagctgcccacagagggccgagggtcacccgtcggccgccgccaccccaggcgaggccggaggaaggatcatctgagacgcaggaggcatctgctggagcagcaatttcccaatttattgaaagtgatcgctttgcaaggatgtctaagctaatcccgtcacagaaaggaaacgcacaggcgcctaggcagaaacttggagactcaccgcagaggccacgtgaacccacggccacagagaggcaggacggcagagccatgatttcccaccgagcgattacgagaacctcttcccccaatagtagacacatctccaatacaaacacaggtttataataagtaataggaagtcaatataatatagattatccccagaaaaaaatcaacaatcttcaaacactgccctttttttgtgtgttttgtttttgttgacaggttgaaagcatgttgaaaaaaataaatatttaagaaaagcaaaaaaaaaaaaaaaaaa

SEQ ID NO: 202506 - DNA, 709 bp, Artificial Sequence
  derived and/or modified sequence
tctctgcacttcctggggagcgtctggcccagcttggtacctcgcgtgttagcctgctgagagctgcagctccagcccagccgcggaccgccgggaagtcacccgctctgggggcagctgaatcttgacgttaccgccattgtttggagaaatcgagtgggtgtggaactgcggcgagcgagcccaaagtcatgctcagccggaaagtcgcatacaataatatgaagttgaactttcctcggcgcagaaaggcacaataataaaccctgagatccccggaatatcagaaggaaagtgctgttgatttgttcagctacttggaaacctcgcctctgctgagaaattaaagaagctagtgacggatttatcttggaaatacacatactggaaattgatcttaccaccatgagggaagatgcaccagccttctgggttctgtctcagaattgctatataggaggaaatgggcactttaaaaagtacaacttttgcctatgatatgcgatgtaagaagatggctaagaatgaaaatattttctatctagcaattacacttaaaactaaagtgattcataagactacaaaactggcttaggaaggaaggttggcggcggtgaagagggaagaggatgatctagtaatgggctcttccaaatcgcatctggtaggttcatagccatgagtcagccaccaatcgggggcgctgccc

SEQ ID NO: 202507 - DNA, 1164 bp, Artificial Sequence
  derived and/or modified sequence
atggaaagaccccctccgagagcagccggcagagaccccagcgcattgagggctgaagcaccatggctgcgcgccgaagggcccggaccacgggccgcccctgtgacagttccgacaccgcctcagggttcaagcgtcgggggcgggttcgcgggtctagagtttgctaggccacaggagtctgagcccagagctagcgacctgggagcacctagaacttggacaggagcggcggccggcccacggactccgtcagcccatattcccgttccggctcagcgagccaccccaggcaaagccagactggatgaagtgatggccgcggccgcgctgacatcactctccacatcacctctcctgctcggggccccagtggctgcatttagcccagaacctggtctagaaccttggaaggaggcgcttgtgagacctccaggttcatatagctccagctccaatagcggagactggggctgggacctcgcttcagaccagagttctccatccactccttcacctcctctgccaccggaggccgcccattttctcttcggggagcccacactcaggaagcggaagtctcccgcccaagtcatgttccaatgtctgtggaaatcttgcgggaaggtgctgtccaccgcttccgccatgcagagacatatccgtctcgtgcatctcggcaggcaggccgagcccgagcagagtgacggggaggaggacttttactataccgagctggatgtgggggtggacacgctgaccgacggactgtccagtctgactccagtgtccccaactgcctccatgccccctgcatttcctcggcttgagctcccagagctattggagccccccgcacttccctcccccttgcggcccccagcccctccgctgccccctccaccagtgctgtccacggtggctaacccgcaatcttgtcacagcgacagagtttaccagggttgcctcacacctgcccgactggagcctcagcctacagaagttggtgcctgtcccccagccctttcgtcaagaattggcgtaaccctgaggaaacccaggggggatgcaaaaaaatgccgaaaagtgtacggtatggagaggcgggacctctggtgcaccgcttgcaggtggaagaaggcttgccagaggtttctggattag

SEQ ID NO: 202508 - DNA, 1164 bp, Artificial Sequence
  derived and/or modified sequence
atggagcggcccccacccagggctgctggccgggaccccagcgccctgcgggcagaggccccctggctgcgggcagagggccctggcccccgggccgcccctgtgacagtgcccaccccaccccagggcagctctgtgggcggcggctttgctggcctggagtttgcccggccccaggagagcgagccccgggccagtgacctgggcgcccccaggacctggacaggagctgctgctggccccaggaccccatctgcccacatccctgtgcctgcccagagggccaccccaggcaaggcccggctggatgaggtgatggctgctgctgccctgaccagcctgagcaccagccccctgctgctgggcgcccctgtggccgccttcagccctgagcccggcctggagccctggaaggaggccctggtgcggcccccaggcagctacagcagcagcagcaacagcggggactggggctgggacctggccagtgaccagagcagccccagcacccccagcccccccctgcccccagaggccgcccacttcctgtttggagagcccaccctgaggaagaggaagagccctgcccaggtgatgttccagtgcctgtggaagagctgtgggaaggtgctgagcacagccagcgccatgcagaggcacatccggctggtgcacctgggccggcaggccgagcctgagcagagtgatggagaggaggacttctactacacagagctggatgtgggcgtggacaccctgacagatggcctgagcagcctgacccctgtgagccccacagcctccatgcccccagccttcccccggctggagctgcctgagctgctggagcccccagccctgcccagccccctgcggcccccagccccacccctgcccccacctcctgtgctgagcacagtggccaacccccagagctgccacagcgacagagtgtaccagggctgcctgaccccagcccggctggagccccagcccacagaggtgggcgcctgccccccagccctgagcagccgcatcggcgtgaccctgaggaagcccagaggagatgccaagaagtgcaggaaggtgtatggcatggagcggcgggacctgtggtgcacagcctgccgctggaagaaggcctgccagcgcttcctggactag

SEQ ID NO: 202509 - DNA, 1164 bp, Artificial Sequence
  derived and/or modified sequence
atggagcggccccccccccgggccgccggccgggaccccagcgccctccgcgccgaagcgccatggctccgcgctgagggcccgggccctcgagcagccccagttaccgtgcctacacccccccaggggagctctgtcggaggaggctttgcggggctcgagttcgctcgacctcaggagagtgagccacgagctagcgatcttggggctcccagaacttggacaggagcggcagctgggccgcgtactccctcagcccacattcctgtgcccgctcagagggccacaccgggaaaggcaaggctcgacgaggtcatggccgccgccgccctgacctcattgagcacgtccccgctgctccttggagctcccgttgcggccttcagcccagagcctgggttagaaccctggaaggaggcactggtaagaccacctgggagttacagcagctctagcaactccggagactgggggtgggatctcgcgtcggaccagagctcaccctctacaccgagtccacccctgcctcctgaggctgcccacttcctgttcggcgagccgaccctcagaaagaggaaaagtccagctcaagttatgttccagtgcctgtggaagagttgtgggaaggtgcttagcacagcctcagccatgcagcggcatatacgattggtccatctgggcaggcaggccgaacctgagcagagcgacggggaagaggatttctactacacggaactggacgtgggggtggatactctgacagacggcctgagcagcctgactcccgttagtccgacagcaagcatgccacccgcctttccgcgcctggagttaccagagctgctggagccccccgccctcccctcccccctgcgacccccagccccgccattgccacccccaccagttctgtcaaccgtggctaatcctcaatcatgccactcggatcgcgtttaccagggctgcctgacccctgctagacttgaacctcagcccaccgaagtgggtgcttgcccacctgcactcagctctcgcatcggtgttaccctccgcaagcctcgtggtgatgccaagaaatgccgcaaagtctatgggatggagcgccgtgacttgtggtgcaccgcctgcagatggaagaaggcatgccagcgcttcctcgattag

SEQ ID NO: 202510 - DNA, 1164 bp, Artificial Sequence
  derived and/or modified sequence
atggagaggccgccacctagagcagctggaagggaccccagtgctctgagagccgaggccccttggcttcgcgcagaaggacccggacctagagcagcacctgtaactgtacccaccccgcctcagggatcttcagtcgggggaggatttgccggactggaattcgcacgtccccaggagtccgagccccgagctagcgacctcggagctcctcgcacctggacaggagccgctgctgggcctcgcactccatctgcgcacatcccagtccccgctcaacgggctacacccggtaaagctcgtctcgacgaagtgatggccgctgctgcactgacgtcacttagcacaagtccccttctgttgggtgccccagtcgctgcgttcagtcccgagcccggacttgaaccatggaaagaagcgttagtgagacctcctggaagttattctagttcttcaaactcgggggattggggctgggacttagcctccgatcaaagctcgccaagcaccccttcgccgccactgccaccggaagccgctcatttcctgtttggtgagccaacgctgcgcaagcgtaaatccccggcacaagtaatgttccagtgtctgtggaagtcctgtggaaaagttctgtccactgcatccgccatgcagcgccatataaggctcgtgcatctgggcaggcaagctgagcccgaacaatccgatggcgaggaggacttctattacaccgaattagatgtcggcgtagatacccttacagacggcctgtcatctctgactccagtttcccctaccgcatcgatgccccctgcttttccaaggctcgagttaccggagctgctcgagccccctgcattaccatcacccctgagacctcctgccccacccctgccacccccaccggtgctgagtacggtggcaaacccccagagttgtcacagcgacagggtttaccaaggctgtcttaccccggcacgcctggaaccccagccaacagaagtgggggcatgcccacctgcgttgagctcccgaattggcgttacccttcggaagccacgcggagatgccaagaagtgtcgtaaagtgtacggcatggagagacgggacctctggtgcactgcatgccgatggaagaaagcctgccagaggtttctcgattag

SEQ ID NO: 202511 - DNA, 1731 bp, Artificial Sequence
  derived and/or modified sequence
gtcctgagagtcagccctcgccgctgcagcctcggcgcccggccggccggccatggagcgccccccgccccgcgccgccggccgggaccccagtgcgctgcgggccgaggcgccgtggctgcgcgcggagggtccggggccgcgcgccgcgcccgtgacggtgcccacgccgccgcagggctcttccgtgggcggcggcttcgcgggcttggagttcgcgcggccgcaggagtcggagccgcgggcctcggacctgggggccccccggacgtggacgggggcggcggcggggccccggactccgtcggcgcacatccccgtcccagcgcagagagccaccccaggaaaagcccggctggacgaggtcatggctgccgctgcccttacaagcctgtccaccagccctctccttctgggggccccggttgcagccttcagcccagagcctggcctggagccctggaaggaggccctggtgcggcccccaggcagctacagcagcagcagcaacagtggagactggggatgggacctggccagtgaccagtcctctccgtccaccccgtcacccccactgccccccgaggcagcccactttctgtttggggagcccaccctgagaaaaaggaagagcccggcccaggtcatgttccagtgtctgtggaagagctgcgggaaggtgctgagcacggcgtcggcgatgcagagacacatccgcctggtgcacctggggaggcaggcagagcctgagcagagtgatggtgaggaggacttctactacacagagctggatgttggtgtggacacgctgaccgacgggctgtccagcctgactccagtgtcccccacggcctccatgccgcctgccttcccccgcctggagctgccagagctgctggagcccccagccctgcctagtcccctgcggccgcctgccccgcccctgcccccgccccctgtcctgagcaccgttgctaacccccagtcctgtcacagtgaccgtgtctaccagggctgcctgacgcccgcccgcctggagccgcagcccacggaggtcggagcctgcccacccgccttgtcctccaggatcggagtcaccctgaggaagccccgcggcgacgcgaagaagtgccggaaggtgtatggcatggagcgccgggacctctggtgcacagcctgccgctggaagaaagcctgccagcggttcctggactaagtccggctcgttcaagaacataagctaccaccttctccctccccaccccctccaggcccggggctgaaacagcccgaggacagccccaggggctggctttcaccagctgcagggtctgcttttacttggggtgggggggcggggctgaccctgaaccctcccccccgccaggtcggggaggggtcccaccactcaaagtgcctctaaagaaaccagctttttgcactaaagccaaaccacaccgctgtccccttagccccaagggccctgggggcagccaccctcccgcctgtcggcccgtagatttatcaagggtgttatgggcccagctttggggggccagtcccgatgcactttgaggggtgttggagaggggactcccccactcgcacttaactcaacggctctcgggccctggggctgtttttaccatgtttgtttttgaagctcaggtgtctcacgtctgggctgcaccaggcgaagagagaaattaaagatttgaggtttttccagaa

SEQ ID NO: 202512 - DNA, 1164 bp, Artificial Sequence
  derived and/or modified sequence
atggagagacccccccccagagccgccggcagagaccccagcgccctgagagccgaggccccctggctgagagccgagggccccggccccagagccgcccccgtgaccgtgcccacccccccccagggcagcagcgtgggcggcggcttcgccggcctggagttcgccagaccccaggagagcgagcccagagccagcgacctgggcgcccccagaacctggaccggcgccgccgccggccccagaacccccagcgcccacatccccgtgcccgcccagagagccacccccggcaaggccagactggacgaggtgatggccgccgccgccctgaccagcctgagcaccagccccctgctgctgggcgcccccgtggccgccttcagccccgagcccggcctggagccctggaaggaggccctggtgagaccccccggcagctacagcagcagcagcaacagcggcgactggggctgggacctggccagcgaccagagcagccccagcacccccagcccccccctgccccccgaggccgcccacttcctgttcggcgagcccaccctgagaaagagaaagagccccgcccaggtgatgttccagtgcctgtggaagagctgcggcaaggtgctgagcaccgccagcgccatgcagagacacatcagactggtgcacctgggcagacaggccgagcccgagcagagcgacggcgaggaggacttctactacaccgagctggacgtgggcgtggacaccctgaccgacggcctgagcagcctgacccccgtgagccccaccgccagcatgccccccgccttccccagactggagctgcccgagctgctggagccccccgccctgcccagccccctgagaccccccgccccccccctgccccccccccccgtgctgagcaccgtggccaacccccagagctgccacagcgacagagtgtaccagggctgcctgacccccgccagactggagccccagcccaccgaggtgggcgcctgcccccccgccctgagcagcagaatcggcgtgaccctgagaaagcccagaggcgacgccaagaagtgcagaaaggtgtacggcatggagagaagagacctgtggtgcaccgcctgcagatggaagaaggcctgccagagattcctggactag

SEQ ID NO: 202513 - DNA, 469 bp, Artificial Sequence
  derived and/or modified sequence
acccccgggcaggttctggtgcttggagctggacaagaaaaggcagtgtgggtgtggagggctccctgccagttcctggggcctctctgtccccactccccacggcacctccctgcctgatgcatcaccaaacagcccctcctggattctgtttccttgtgtcttcttgtcggcctgtttttactgtcttctgctaggcggcccatgggcagagctgggacactagtgggaaggaaggaaagaaggaagaaggccctggctgacgggcctgaggacaagacccaaggagagcctccctgaagatgcctagcctcctcctctctaccttgggatcgccttggtgccatcctcagtgtttccccagtgacggggtggagtaaggatgcacacagcacaggtgcctgagccggttggtctggattcccaggaagaattccaggcatgatggatgggccacgttccgatgtgg

SEQ ID NO: 202514 - protein, 327 aa, Artificial Sequence
  derived and/or modified sequence
MEGSNGFGIDSILSHRAGSPALPKGDPLLGDCRSPLELSPRSESSSDCSSPASPGRDCLETGTPRPGGASGPGLDSHLQPGQLSAPAQSRTVTSSFLIRDILADCKPLAACAPYSSSGQPAAPEPGGRLAAKAAEDFRDKLDKSGSNASSDSEYKVKEEGDREISSSRDSPPVRLKKPRKARTAFTDHQLAQLERSFERQKYLSVQDRMELAASLNLTDTQVKTWYQNRRTKWKRQTAVGLELLAEAGNYSALQRMFPSPYFYPQSLVSNLDPGAALYLYRGPSAPPPALQRPLVPRILIHGLQGASEPPPPLPPLAGVLPRAAQPR

SEQ ID NO: 202515 - DNA, 1907 bp, Artificial Sequence
  derived and/or modified sequence
cttttggatctaatgcgcagaggaggttggcccagagctcccgggctcccccaaggctgaactccgtccaaggtgcccgcaggctccctgcccgccttccccatgccagcccgcagctaggggcaggggcagcggcggctggggttgggggtgggtggggagcttttggggaggacaggtcgcagcttggctatggaaggctccaatggctttgggatcgactccattctctcccaccgcgcgggcagccccgcccttcccaagggggaccccttgctcggggactgccgttcgcccctggagctgagtccacgctcagagagcagcagcgactgctcttcgccagcctctccaggaagggactgtttggagacggggaccccacggcctggcggggcatccggcccaggtttggactcccacctgcagcccgggcagctctcagccccggcccagtcgcgcaccgtcacctcctcctttctgatcagggacatccttgccgactgcaaaccactcgcggcctgtgcaccctactctagcagcgggcagccggcagcccctgagcctgggggccgccttgcggccaaggccgcggaggactttagagacaagctggacaaaagtggcagcaacgcctcatcggactctgagtataaagtgaaggaggagggcgaccgcgagatctccagctccagggacagtcccccggtgcgcctgaaaaagccacgcaaggcgcgcacggccttcaccgaccatcagctggcgcagctggagcgcagcttcgagcggcagaagtacctgagcgtgcaggaccgcatggagctcgccgcctcgctcaacctcaccgacacgcaggtcaagacctggtaccagaaccgcaggactaaatggaagcgacagacggccgtcgggttggagctgctggcggaggcaggcaattactcagcgctccagcggatgttcccgtcgccttatttctacccgcagagtctggtttccaacctggaccccggcgcggcgctctacctgtaccgcggccccagcgcgccgccgcctgctctccagagacctctggtgccccgcatcctcatccacggactccagggcgccagcgagccgcccccgccgctgccccccctggccggcgtcctcccacgcgccgcgcagcctcggtgaggcgcccgtcggctccggggcctcctcccgcgggctcggcgtggccccttccgcccgcctttctgagggcgcaggttcgacgccctttcccgggagggggccctgcccggccctccctggcgccccagcccagtgccccccgaagggccaaatgccaagtccactgaggcccggaccccggactgcgtctccccagcccccctcggcgtcctctctcgcggccgctctgtccgggagccatccccacccgccgggtgtacatacgcgtctctgccactccccacccccagcctctgccggctcccctaggcaacccctttctccccaggagcgggtgcggctgattcccaggcttcgctctctcccacgccccttctacgctccaggtggagaacagcccctctccccgcgcccccgccagggagagaaggggagtgcggagccccgtctccctacccctcgagcacctgggccagcggctgagctgtacataccgtgtgcaaagtgtatatgaagttatttattcgtgacccatgagcccgtgaccgtgtccgtggattagtgagtctgtggcctgtgccctccccactcccaggcggggcaggaaggggccaagggggcttgcccacccaccccgaccccagcccccagcctcagccccggtccgggggcagccaggcctctcgggttctctcttttttaaatgtcgaaataaacttcttacaaatgac

SEQ ID NO: 202516 - DNA, 180 bp, Artificial Sequence
  derived and/or modified sequence
atgcagaccgggggatgcgaacctaagcacaggcgaatgtgcccagatgattcctccgaaaacattatgaagtggaggacgttcctgcctgaggagcgtacagtaacccaggccggagatgtgactcacaccctgggttccaaaggaccaaaggccggagtgccgttcactggaccatag

SEQ ID NO: 202517 - DNA, 984 bp, Artificial Sequence
  derived and/or modified sequence
atggagggctcaaatgggttcggcatagattcaatactctcacaccgcgctggaagccctgctttgcctaagggcgaccccctgcttggggactgccgctctccgctggaattgagtccacgcagtgagagcagctccgattgcagttcccccgctagtcccggacgcgactgtctggagactggcaccccccggcccggcggagcgagtggacccggccttgatagtcatctgcagcctggccagctgtccgcccccgctcagtcccgtacagtcacatcaagcttcctcatcagggacattttagctgactgcaagcctctggcggcatgcgccccatactccagctcgggtcagcccgccgctccggagccaggcgggcggctggccgctaaagcggccgaggactttcgggataaattggataaatctggctcaaatgccagtagcgactcagagtataaggtcaaagaggagggggatcgcgagataagcagctccagggacagcccccctgtacgtctgaagaagcctcgcaaggcacggacagcttttacagatcatcagctggctcagcttgaaagaagttttgagcgccaaaagtatttgagtgtgcaggacaggatggaactagcggcgtcactgaacctgactgatacccaggttaagacctggtaccagaacagaaggacaaaatggaaaagacagaccgcggtcggtttggagcttttagcagaagccggcaactacagcgctctacaacgaatgttcccaagcccttatttctatccccagagcctggtgtcaaacttagaccccggggcagctctgtacctgtatcgggggcccagcgcaccccccccagcacttcagcggcctctggtgccacgcattctaattcatggattacagggagcatctgagccacctccccccctgccacccctcgccggggttttacctcgcgccgctcagccaaggtag

SEQ ID NO: 202518 - DNA, 984 bp, Artificial Sequence
  derived and/or modified sequence
atggagggaagtaacggtttcgggattgattcgatactgagtcatcgcgccggcagtcccgctcttccaaagggagatcccttgctgggggactgtaggtcccctctcgaactgtccccccgttcggaaagctcctcagactgttcttctcccgcgtcccctggcagagattgtctggagaccggcaccccgcgacccgggggcgcctctgggcccggactggattcccatctccaacctggccaacttagtgctccagcgcagtcaagaacggtgacctcatcatttctgatccgtgatattttagccgattgtaagcctctggccgcctgtgccccatatagtagttccggccaacccgccgctcctgagcccggcggccgcttggctgcaaaggcagcagaggacttccgggacaagttagacaagtcagggtctaacgcttcatcagactctgagtacaaagttaaggaagaaggtgatagggaaattagcagtagtagggattcccctccagtgcgtctcaaaaagcctaggaaggcccgaactgcttttacagatcaccagctcgcgcaactggagagatcttttgaacggcaaaaatatttgtccgtgcaggaccgtatggagcttgcggctagtttaaacctgacggacactcaggtaaagacctggtaccagaaccgcaggaccaagtggaagcggcagaccgccgtgggattggaactcctcgctgaggcgggtaactactctgccctccagagaatgtttccttccccttatttttacccccagtctcttgtgtcaaatttggaccccggagctgccctgtatctgtatcgcggcccatcggcaccaccaccggccctacagcggcctcttgtgccacggatcctgattcacggccttcaaggagcctccgagccgcctcccccactgcccccgttagccggagtgctccctagagccgctcagccgcggtag

SEQ ID NO: 202519 - DNA, 984 bp, Artificial Sequence
  derived and/or modified sequence
atggagggcagcaatggatttggaattgacagcatcctgagccacagagctggcagccctgccctgcccaagggggaccccctgctgggggactgccgcagccccctggagctgagccccaggtctgagagcagcagtgactgcagcagccctgccagccctggccgggactgcctggagaccggcacccccaggcctgggggcgccagcggccctggcctggacagccacctgcagcccggccagctgagcgccccagcccagagcaggacagtgaccagcagcttcctgatccgggacatcctggccgactgcaagcccctggccgcctgtgccccctacagcagcagcggccagcctgctgcccctgagcccggcggccgcctggccgccaaggctgctgaggacttccgggacaagctggacaagagcggcagcaatgccagcagtgacagcgagtacaaggtgaaggaggagggggaccgggagatcagcagcagccgggacagcccccctgtgcggctgaagaagcccaggaaggccaggacagccttcacagaccaccagctggcccagctggagaggagctttgagcggcagaagtacctgtctgtgcaggacaggatggagctggccgccagcctgaacctgacagacacccaggtgaagacctggtaccagaacagaaggaccaagtggaagaggcagacagctgtgggcctggagctgctggccgaggccggcaactacagcgccctgcagaggatgttccccagcccctacttctacccccagagcctggtgagcaacctggaccctggagctgccctgtacctgtaccggggccccagcgcccctcctccagccctgcagaggcccctggtgccccgcatcctgattcatggcctgcagggcgccagcgagcccccaccacccctgccccccctggccggcgtgctgcccagggctgcccagcccaggtag

SEQ ID NO: 202520 - DNA, 984 bp, Artificial Sequence
  derived and/or modified sequence
atggagggcagcaacggcttcggcatcgacagcatcctgagccaccgggcgggatcccctgccctgcctaagggtgaccccttactcggcgactgccgttctccccttgagctctcgcctaggagcgagagcagcagcgactgctctagccccgcctcgcccgggcgagactgtttagagacggggactcctagacctgggggagccagtggtcctggcctggattctcatctccaacctggtcagctttctgcaccggcgcagtcacgaaccgtgacaagctcattcctaatccgagacatcttagccgattgtaaacctctggccgcgtgcgcaccttactctagctcagggcagccagccgctcctgagcctggtgggcgcttggctgccaaggcagcggaggattttcgagacaaattagataagtcaggttccaacgccagctccgatagtgaatataaggtaaaggaggagggtgatagggagatctcgtcttcccgtgacagccccccggtccgccttaaaaagccccggaaggctcgcactgcattcactgatcatcagcttgcccagttagagcgcagtttcgaacgccagaaatacctttctgtccaggacagaatggaactagccgcttcactcaatttgaccgatacgcaggtaaaaacctggtaccagaataggagaacaaaatggaaacgccagactgcggtcgggctggaacttcttgccgaagcgggaaactacagcgccctgcagaggatgttccccagcccttacttctatcctcagtccctcgtctcaaacctcgacccgggagctgcactgtatttatacagaggcccatcagcacctccgcctgccctgcagcgcccactggtgcctagaatcttgatacatgggttgcaaggcgcttctgagcccccacccccactgccccccctcgccggtgtgctgcccagggctgcacaaccaagatag

SEQ ID NO: 202521 - DNA, 984 bp, Artificial Sequence
  derived and/or modified sequence
atggagggcagcaacggcttcggcatcgacagcatcctgagccaccgggcgggttcccctgcgctacctaagggggaccctcttctgggcgactgtagatcccctcttgagcttagtccccggagcgagagctcatccgattgtagcagtccagcttccccagggagggattgcctagagaccggcactccaaggcccgggggtgcatctgggcctggactcgactctcatttgcagcctggacagctcagtgccccagcccagtcacgaactgtgacttcttcctttttgatccgcgacatactggccgattgcaagcctttagcagcctgcgcaccatacagctccagtggtcagcccgcggccccagaaccaggcggccggcttgctgctaaggccgctgaagacttccgagacaaactcgacaaatccgggtccaacgcctcctctgactctgaatacaaggtgaaggaggagggagaccgtgaaatttccagtagtagggatagtccccctgtacgactgaagaagcctagaaaggcgcgaaccgcctttacggaccatcagctcgcacagctcgaaaggtcctttgagagacagaaatatttatccgtgcaagaccgaatggaactcgccgctagcctgaacctgaccgacacacaagtgaaaacttggtaccaaaacagacggacgaagtggaagagacagacagccgtgggtctggagcttctggctgaagccggaaattactcggcattacagcggatgtttccttctccctacttttatccgcagtccctggtcagcaacctcgatcccggcgcagcactttatctttacaggggaccttcagccccaccccccgcactgcaaaggcctttagtgcccaggattttaatccacgggctgcagggcgcttccgaacctccccctccccttcctccacttgccggcgtgcttccacgcgcagcgcagccccgttag

SEQ ID NO: 202522 - DNA, 984 bp, Artificial Sequence
  derived and/or modified sequence
atggaaggctctaacggtttcgggatcgatagtatcctgtcccaccgggctggatctcccgctctccccaagggcgacccgctgctgggtgactgccgcagccccctggaattgtcacctcggtcagagagcagtagtgactgctcatcacccgcttctccaggcagggactgtttagagacgggaacaccccgacctggaggcgctagtgggccaggactagatagccatctgcagcccggtcagctgtcggctcctgcccagtctcgcaccgtgactagctcatttcttattagagatatcctggctgattgcaaaccattggccgcatgcgctccatatagtagctcggggcagccagccgcacctgagcccggtggcagactggccgctaaagcggctgaagacttccgcgacaaactcgataagtcgggatccaacgccagttctgatagcgaatacaaggtgaaggaggaaggcgatagagaaatttcgtcttcaagggacagtcctcccgtgcgcttgaagaagcctaggaaggctcgaactgcattcacagaccaccagctggcccagctggaaaggagcttcgagagacagaaatacttgagcgtacaggacagaatggagctggccgctagcttaaacctaactgacactcaggttaaaacatggtaccaaaaccgacgaaccaaatggaagcggcagaccgccgtgggactggaactgctggccgaggcgggtaactacagcgctctgcagcggatgtttcccagcccgtatttttatcctcagtcactggtctctaacttggatcctggcgctgcattgtatctgtatagaggcccttcagccccaccaccggctctgcagagacccttggttccaagaattctgatccatggattgcagggggcatccgagccaccaccccctcttccccctctagccggagtcctgcccagggcagcacagccgagatag

SEQ ID NO: 202523 - DNA, 984 bp, Artificial Sequence
  derived and/or modified sequence
atggagggttcaaacgggtttggtattgatagcattttatcccaccgtgctggcagtcctgcgctgccaaagggggatccactgctgggagattgtcggagtccgctggagctgagtccaaggagcgagtcctctagcgattgctcatcaccggcatccccgggtcgcgactgtctggaaactggcacaccgcgtccgggtggagcatccggcccaggcctggattcgcatctgcagcctggccagctatccgccccagcccagtctcgcactgttacctcttcctttcttatccgggatattcttgcagactgtaagcccctggccgcttgcgctccctacagctcctccggacagccagcagccccagagccaggaggaaggttggcagctaaggcagctgaggacttccgcgacaaacttgataagtccggcagcaatgcttcgtctgactccgagtacaaagtgaaggaagagggggaccgcgagatatcctcatccagggactcaccacccgtgcgactgaagaagccacgaaaggcacgaaccgcattcaccgaccaccagctggcccagcttgaacgctcgtttgagaggcagaaatacctttccgttcaagatcgcatggagctggcagcttctctgaacctgaccgacacccaggtaaagacatggtaccaaaatcgaagaacgaaatggaagagacagacagctgtggggctggagctgctggccgaagccggaaattattccgcgctccagcgaatgttcccgtctccatatttctatccacagtccctggtctcaaacttagatccaggcgcagccctctacctgtaccggggaccatctgcccctcctcccgcactgcagcgtccgttggtaccacgcatactgatacatggcctacagggagcctctgaaccgccacccccattaccccctctggccggagtgctgcctcgcgctgcccagccacgctag

SEQ ID NO: 202524 - DNA, 2341 bp, Artificial Sequence
  derived and/or modified sequence
acggtgctgacgggcccccggagcggcgagggcgcggagagaggacctccccggccaggtggagagtcatgagccgcgggcagccgccgccgctctccgcggtgctgatgccgccaggtgcgctcctttccgcccgctgctagcgcggcccgggcccgcagctatctgcggtgctgacctggccaccctcagccaccacttgcctggaagaagcgtgcggtttggatttttaaaacgccattctttatttagattccaacatcctcgcgtttcttctgtgccaagggggccctcgggccgtccgtctccccctttgctctccccaacttggcgcgccctccctcccattcctccctgacactcccaccaccccccctcggctcggcggctcggcgcgatgctgcagaagacgcactgagcccttttggatctaatgcgcagaggaggttggcccagagctcccgggctcccccaaggctgaactccgtccaaggtgcccgcaggctccctgcccgccttccccatgccagcccgcagctaggggcaggggcagcggcggctggggttgggggtgggtggggagcttttggggaggacaggtcgcagcttggctatggaaggctccaatggctttgggatcgactccattctctcccaccgcgcgggcagccccgcccttcccaagggggaccccttgctcggggactgccgttcgcccctggagctgagtccacgctcagagagcagcagcgactgctcttcgccagcctctccaggaagggactgtttggagacggggaccccacggcctggcggggcatccggcccaggtttggactcccacctgcagcccgggcagctctcagccccggcccagtcgcgcaccgtcacctcctcctttctgatcagggacatccttgccgactgcaaaccactcgcggcctgtgcaccctactctagcagcgggcagccggcagcccctgagcctgggggccgccttgcggccaaggccgcggaggactttagagacaagctggacaaaagtggcagcaacgcctcatcggactctgagtataaagtgaaggaggagggcgaccgcgagatctccagctccagggacagtcccccggtgcgcctgaaaaagccacgcaaggcgcgcacggccttcaccgaccatcagctggcgcagctggagcgcagcttcgagcggcagaagtacctgagcgtgcaggaccgcatggagctcgccgcctcgctcaacctcaccgacacgcaggtcaagacctggtaccagaaccgcaggactaaatggaagcgacagacggccgtcgggttggagctgctggcggaggcaggcaattactcagcgctccagcggatgttcccgtcgccttatttctacccgcagagtctggtttccaacctggaccccggcgcggcgctctacctgtaccgcggccccagcgcgccgccgcctgctctccagagacctctggtgccccgcatcctcatccacggactccagggcgccagcgagccgcccccgccgctgccccccctggccggcgtcctcccacgcgccgcgcagcctcggtgaggcgcccgtcggctccggggcctcctcccgcgggctcggcgtggccccttccgcccgcctttctgagggcgcaggttcgacgccctttcccgggagggggccctgcccggccctccctggcgccccagcccagtgccccccgaagggccaaatgccaagtccactgaggcccggaccccggactgcgtctccccagcccccctcggcgtcctctctcgcggccgctctgtccgggagccatccccacccgccgggtgtacatacgcgtctctgccactccccacccccagcctctgccggctcccctaggcaacccctttctccccaggagcgggtgcggctgattcccaggcttcgctctctcccacgccccttctacgctccaggtggagaacagcccctctccccgcgcccccgccagggagagaaggggagtgcggagccccgtctccctacccctcgagcacctgggccagcggctgagctgtacataccgtgtgcaaagtgtatatgaagttatttattcgtgacccatgagcccgtgaccgtgtccgtggattagtgagtctgtggcctgtgccctccccactcccaggcggggcaggaaggggccaagggggcttgcccacccaccccgaccccagcccccagcctcagccccggtccgggggcagccaggcctctcgggttctctcttttttaaatgtcgaaataaacttcttacaaatgaccaggcgcctgtcc

SEQ ID NO: 202525 - DNA, 1197 bp, Artificial Sequence
  derived and/or modified sequence
aggctgaactccgtccaaggagcttttggggaggacaggtcgcagcttggctatggaaggctccaatggctttgggatcgactccattctctcccaccgcgcgggcagccccgcccttcccaagggggaccccttgctcggggactgccgttcgcccctggagctgagtccacgctcagagagcagcagcgactgctcttcgccagcctctccaggaagggactgtttggagacggggaccccacggcctggcggggcatccggcccaggtttggactcccacctgcagcccgggcagctctcagccccggcccagtcgcgcaccgtcacctcctcctttctgatcagggacatccttgccgactgcaaaccactcgcggcctgtgcaccctactctagcagcgggcagccggcagcccctgagcctgggggccgccttgcggccaaggccgcggaggactttagagacaagctggacaaaagtggcagcaacgcctcatcggactctgagtataaagtgaaggaggagggcgaccgcgagatctccagctccagggacagtcccccggtgcgcctgaaaaagccacgcaaggcgcgcacggccttcaccgaccatcagctggcgcagctggagcgcagcttcgagcggcagaagtacctgagcgtgcaggaccgcatggagctcgccgcctcgctcaacctcaccgacacgcaggtcaagacctggtaccagaaccgcaggactaaatggaagcgacagacggccgtcgggttggagctgctggcggaggcaggcaattactcagcgctccagcggatgttcccgtcgccttatttctacccgcagagtctggtttccaacctggaccccggcgcggcgctctacctgtaccgcggccccagcgcgccgccgcctgctctccagagacctctggtgccccgcatcctcatccacggactccagggcgccagcgagccgcccccgccgctgccccccctggccggcgtcctcccacgcgccgcgcagcctcggtgaggcgcccgtcggctccggggcctcctcccgcgggctcggcgtggccccttccgcccgcctttctgagggcgcaggttcgacgccctttcccgggagggggccctgcccggccctccctggcgccccagcccagtgccccccgaagggccaaatgccaagtc

SEQ ID NO: 202526 - DNA, 984 bp, Artificial Sequence
  derived and/or modified sequence
atggagggcagcaacggcttcggcatcgacagcatcctgagccacagagccggcagccccgccctgcccaagggcgaccccctgctgggcgactgcagaagccccctggagctgagccccagaagcgagagcagcagcgactgcagcagccccgccagccccggcagagactgcctggagaccggcacccccagacccggcggcgccagcggccccggcctggacagccacctgcagcccggccagctgagcgcccccgcccagagcagaaccgtgaccagcagcttcctgatcagagacatcctggccgactgcaagcccctggccgcctgcgccccctacagcagcagcggccagcccgccgcccccgagcccggcggcagactggccgccaaggccgccgaggacttcagagacaagctggacaagagcggcagcaacgccagcagcgacagcgagtacaaggtgaaggaggagggcgacagagagatcagcagcagcagagacagcccccccgtgagactgaagaagcccagaaaggccagaaccgccttcaccgaccaccagctggcccagctggagagaagcttcgagagacagaagtacctgagcgtgcaggacagaatggagctggccgccagcctgaacctgaccgacacccaggtgaagacctggtaccagaacagaagaaccaagtggaagagacagaccgccgtgggcctggagctgctggccgaggccggcaactacagcgccctgcagagaatgttccccagcccctacttctacccccagagcctggtgagcaacctggaccccggcgccgccctgtacctgtacagaggccccagcgcccccccccccgccctgcagagacccctggtgcccagaatcctgatccacggcctgcagggcgccagcgagccccccccccccctgccccccctggccggcgtgctgcccagagccgcccagcccagatag

SEQ ID NO: 202527 - protein, 1722 aa, Artificial Sequence
  derived and/or modified sequence
MGNQDGKLKRSAGDALHEGGGGAEDALGPRDVEATKKGSGGKKALGKHGKGGGGGGGGGESGKKKSKSDSRASVFSNLRIRKNLSKGKGAGGSREDVLDSQALQTGELDSAHSLLTKTPDLSLSADEAGLSDTECADPFEVTGPGGPGPAEARVGGRPIAEDVETAAGAQDGQRTSSGSDTDIYSFHSATEQEDLLSDIQQAIRLQQQQQQQLQLQLQQQQQQQQLQGAEEPAAPPTAVSPQPGAFLGLDRFLLGPSGGAGEAPGSPDTEQALSALSDLPESLAAEPREPQQPPSPGGLPVSEAPSLPAAQPAAKDSPSSTAFPFPEAGPGEEAAGAPVRGAGDTDEEGEEDAFEDAPRGSPGEEWAPEVGEDAPQRLGEEPEEEAQGPDAPAAASLPGSPAPSQRCFKPYPLITPCYIKTTTRQLSSPNHSPSQSPNQSPRIKRRPEPSLSRGSRTALASVAAPAKKHRADGGLAAGLSRSADWTEELGARTPRVGGSAHLLERGVASDSGGGVSPALAAKASGAPAAADGFQNVFTGRTLLEKLFSQQENGPPEEAEKFCSRIIAMGLLLPFSDCFREPCNQNAQTNAASFDQDQLYTWAAVSQPTHSLDYSEGQFPRRVPSMGPPSKPPDEEHRLEDAETESQSAVSETPQKRSDAVQKEVVDMKSEGQATVIQQLEQTIEDLRTKIAELERQYPALDTEVASGHQGLENGVTASGDVCLEALRLEEKEVRHHRILEAKSIQTSPTEEGGVLTLPPVDGLPGRPPCPPGAESGPQTKFCSEISLIVSPRRISVQLDSHQPTQSISQPPPPPSLLWSAGQGQPGSQPPHSISTEFQTSHEHSVSSAFKNSCNIPSPPPLPCTESSSSMPGLGMVPPPPPPLPGMTVPTLPSTAIPQPPPLQGTEMLPPPPPPLPGAGIPPPPPLPGAGILPLPPLPGAGIPPPPPLPGAAIPPPPPLPGAGIPLPPPLPGAGIPPPPPLPGAGIPPPPPLPGAGIPPPPPLPGAGIPPPPPLPGAGIPPPPPLPGAGIPPPPPLPGAGIPPPPPLPGAGIPPPPPLPGAGIPPPPPLPGAGIPPPPPLPGAGIPPPPPLPGAGIPPPPPLPGVGIPPPPPLPGAGIPPPPPLPGAGIPPPPPLPGAGIPPPPPLPRVGIPPPPPLPGAGIPPPPPLPGAGIPPPPPLPGVGIPPPPPLPGVGIPPPPPLPGAGIPPPPPLPGMGIPPAPAPPLPPPGTGIPPPPLLPVSGPPLLPQVGSSTLPTPQVCGFLPPPLPSGLFGLGMNQDKGSRKQPIEPCRPMKPLYWTRIQLHSKRDSSTSLIWEKIEEPSIDCHEFEELFSKTAVKERKKPISDTISKTKAKQVVKLLSNKRSQAVGILMSSLHLDMKDIQHAVVNLDNSVVDLETLQALYENRAQSDELEKIEKHGRSSKDKENAKSLDKPEQFLYELSLIPNFSERVFCILFQSTFSESICSIRRKLELLQKLCETLKNGPGVMQVLGLVLAFGNYMNGGNKTRGQADGFGLDILPKLKDVKSSDNSRSLLSYIVSYYLRNFDEDAGKEQCLFPLPEPQDLFQASQMKFEDFQKDLRKLKKDLKACEVEAGKVYQVSSKEHMQPFKENMEQFIIQAKIDQEAEENSLTETHKCFLETTAYFFMKPKLGEKEVSPNAFFSIWHEFSSDFKDFWKKENKLLLQERVKEAEEVCRQKKGKSLYKIKPRHDSGIKAKISMKT

SEQ ID NO: 202528 - protein, 318 aa, Artificial Sequence
  derived and/or modified sequence
MRAQSDELEKIEKHGRSSKDKENAKSLDKPEQFLYELSLIPNFSERVFCILFQSTFSESICSIRRKLELLQKLCETLKNGPGVMQVLGLVLAFGNYMNGGNKTRGQADGFGLDILPKLKDVKSSDNSRSLLSYIVSYYLRNFDEDAGKEQCLFPLPEPQDLFQASQMKFEDFQKDLRKLKKDLKACEVEAGKVYQVSSKEHMQPFKENMEQFIIQAKIDQEAEENSLTETHKCFLETTAYFFMKPKLGEKEVSPNAFFSIWHEFSSDFKDFWKKENKLLLQERVKEAEEVCRQKKGKSLYKIKPRHDSGIKAKISMKT

SEQ ID NO: 202529 - DNA, 597 bp, Artificial Sequence
  derived and/or modified sequence
atgagcagagccgtgaccatcgccgaggccttctgccacatcctgttcagaatcatcagcgagatcctgatgagaatgctggaggagcagtgcctgttccccctgcccgagccccaggacctgttccaggccagccagatgaagttcgaggacttccagaaggacctgagaaagctgaagaaggacctgaaggcctgcgaggtggaggccggcaaggtgtaccaggtgagcagcaaggagcacatgcagcccttcaaggagaacatggagcagttcatcatccaggccaagatcgaccaggaggccgaggagaacagcctgaccgagacccacaagtgcttcctggagaccaccgcctacttcttcatgaagcccaagctgggcgagaaggaggtgagccccaacgccttcttcagcatctggcacgagttcagcagcgacttcaaggacttctggaagaaggagaacaagctgctgctgcaggagagagtgaaggaggccgaggaggtgtgcagacagaagaagggcaagagcctgtacaagatcaagcccagacacgacagcggcatcaaggccaagatcagcatgaagacctag

SEQ ID NO: 202530 - DNA, 1050 bp, Artificial Sequence
  derived and/or modified sequence
aacaccatccacgacgtgctggacgtggaggccgccgtggtgaacctggacaacagcgtggtggacctggagaccctgcaggccctgtacgagaacagagcccagagcgacgagctggagaagatcgagaagcacggcagaagcagcaaggacaaggagaacgccaagagcctggacaagcccgagcagttcctgtacgagctgagcctgatccccaacttcagcgagagagtgttctgcatcctgttccagagcaccttcagcgagagcatctgcagcatcagaagaaagctggagctgctgcagaagctgtgcgagaccctgaagaacggccccggcgtgatgcaggtgctgggcctggtgctggccttcggcaactacatgaacggcggcaacaagaccagaggccaggccgacggcttcggcctggacatcctgcccaagctgaaggacgtgaagagcagcgacaacagcagaagcctgctgagctacatcgtgagctactacctgagaaacttcgacgaggacgccggcaaggagcagtgcctgttccccctgcccgagccccaggacctgttccaggccagccagatgaagttcgaggacttccagaaggacctgagaaagctgaagaaggacctgaaggcctgcgaggtggaggccggcaaggtgtaccaggtgagcagcaaggagcacatgcagcccttcaaggagaacatggagcagttcatcatccaggccaagatcgaccaggaggccgaggagaacagcctgaccgagacccacaagtgcttcctggagaccaccgcctacttcttcatgaagcccaagctgggcgagaaggaggtgagccccaacgccttcttcagcatctggcacgagttcagcagcgacttcaaggacttctggaagaaggagaacaagctgctgctgcaggagagagtgaaggaggccgaggaggtgtgcagacagaagaagggcaagagcctgtacaagatcaagcccagacacgacagcggcatcaagaacaacaacagcatgcacacctag

SEQ ID NO: 202531 - DNA, 957 bp, Artificial Sequence
  derived and/or modified sequence
atgagagcccagagcgacgagctggagaagatcgagaagcacggcagaagcagcaaggacaaggagaacgccaagagcctggacaagcccgagcagttcctgtacgagctgagcctgatccccaacttcagcgagagagtgttctgcatcctgttccagagcaccttcagcgagagcatctgcagcatcagaagaaagctggagctgctgcagaagctgtgcgagaccctgaagaacggccccggcgtgatgcaggtgctgggcctggtgctggccttcggcaactacatgaacggcggcaacaagaccagaggccaggccgacggcttcggcctggacatcctgcccaagctgaaggacgtgaagagcagcgacaacagcagaagcctgctgagctacatcgtgagctactacctgagaaacttcgacgaggacgccggcaaggagcagtgcctgttccccctgcccgagccccaggacctgttccaggccagccagatgaagttcgaggacttccagaaggacctgagaaagctgaagaaggacctgaaggcctgcgaggtggaggccggcaaggtgtaccaggtgagcagcaaggagcacatgcagcccttcaaggagaacatggagcagttcatcatccaggccaagatcgaccaggaggccgaggagaacagcctgaccgagacccacaagtgcttcctggagaccaccgcctacttcttcatgaagcccaagctgggcgagaaggaggtgagccccaacgccttcttcagcatctggcacgagttcagcagcgacttcaaggacttctggaagaaggagaacaagctgctgctgcaggagagagtgaaggaggccgaggaggtgtgcagacagaagaagggcaagagcctgtacaagatcaagcccagacacgacagcggcatcaaggccaagatcagcatgaagacctag

SEQ ID NO: 202532 - DNA, 5169 bp, Artificial Sequence
  derived and/or modified sequence
atggggaatcaagatggtaaacttaagaggtccgcgggagatgccctccacgagggcgggggcggagccgaggatgcgctgggaccgcgcgacgtagaagccactaagaagggcagtgggggaaaaaaggcactgggaaaacacggcaagggtggcggggggggtggtggtggaggcgagtcaggcaaaaaaaaatcgaagtcagacagtagggcgagcgtgttctccaacctaagaatcaggaagaatcttagtaaaggaaaaggcgcaggggggtccagggaagatgtcctcgattcgcaggctctgcagacaggggaattagattcagcccatagtctgttgacaaaaactccggacctgagcctctctgctgatgaagccggtctgagcgacacggagtgtgctgacccctttgaggtgaccggccccggtggccctggtcctgccgaggccagggtgggcgggcggcccatcgccgaggatgttgagactgctgctggagcccaagacggtcagcgcacttcaagtggtagtgacacggacatctatagctttcattccgcgactgaacaggaagaccttttgtcagacatccagcaggccataagactccaacagcaacagcagcaacagctacagctccagctccaacagcaacagcagcagcagcagctgcaaggtgctgaggagcctgccgccccccctacagctgtgtccccccagcccggcgcattcttaggtttggaccggtttctgctcggcccttccggtggagccggggaggcgcctgggagccctgatacagagcaggcccttagtgccctgtccgacctgcctgagtctttggcagccgaacccagagagccacaacagccaccatcgccaggcggcttgccggtatctgaggccccatccctgcctgccgcccagcccgctgcaaaagacagcccaagtagcacagcctttcctttcccagaggcagggcccggggaagaggcagctggtgctccagttcgtggagccggggacaccgacgaagagggtgaggaggacgctttcgaggacgcccccaggggtagcccaggggaagaatgggcacccgaggtgggagaggatgctccccagagacttggagaagagccagaggaggaggctcaagggccggatgcacctgccgccgctagtttacccggcagtccagccccatcccagagatgtttcaagccatacccgctcattaccccttgttatatcaaaaccacaactcgccagttatcgagtcctaatcactcccccagccagtctcccaaccagtcaccgcgcatcaagcgccggccagagccttccttgtcaagggggtcacgaacagccctggcgtcggtggctgcgccagcaaaaaagcaccgcgcagacggcggcctcgctgctggcctctcacgctctgcagattggaccgaagagctgggggcacggactcctcgggtcggaggctctgcccatcttctggaaagaggagtggcttccgattcaggtggcggcgtctcccctgccctcgctgctaaagcctcaggcgctcctgcagccgccgatggcttccaaaatgtctttactggccggacgctgttagagaaattattctctcagcaggagaatgggccccccgaggaagcagagaagttttgctcccgtataattgccatggggctgctattgccattctctgattgcttccgagagccctgcaatcagaacgcccagaccaatgccgcgagcttcgatcaggatcagctgtacacttgggccgccgtaagtcaaccaacacatagcttggattattccgaaggccagttcccccgaagggtgccctccatgggtcctcccagcaagcctcccgacgaggaacatcggctggaggacgcagagaccgaatcccagtctgccgtgtctgaaacgcctcaaaagaggtcagacgccgtgcagaaagaagtagtggatatgaaatcagagggtcaggctactgtgattcagcaactggagcagactattgaagatctgcggacaaaaattgcggagcttgagcggcagtaccccgcactagacaccgaagtggccagcggtcaccagggactggagaatggcgtgacagccagcggagacgtgtgcttagaggctttgcggctcgaagagaaagaggtgagacaccaccggatcctggaggctaaatctatccagacttcacctactgaggaaggtggcgtcctgactctgccgcctgtagatgggctcccaggtcggccgccatgtcctcccggcgccgagtcaggaccgcagaccaagttttgctccgaaatctctttaattgttagtccccggcgcatctcagttcaactggacagccatcaaccaactcagtctatttcccagccaccaccacctccatctctgctctggagcgcaggccagggccaacccggcagtcagcctccacactccatctcaacagaatttcaaacatcacatgagcatagcgtttcgagtgctttcaagaactcctgcaatatcccttcaccaccgccactgccatgcacagagagctcatctagtatgcctggcttaggcatggtgcccccacctcctccgcccctgccaggcatgacagttccaacgctgccaagcactgccattcctcagccccctcctcttcagggtaccgagatgttgccaccacccccacctcctctgccaggggctggcatacccccgccgccacctttgcctggcgcaggtatcttgccgttgccccctctccccggggcaggcatcccaccaccaccgcctctgcccggtgcagccatccctcctcctccacctctgcccggagccggaattccccttcctcctcctcttcccggagcagggatcccgcctcctcccccgctgcccggtgctgggatccctcctccgcccccgctgcccggagcagggatcccacctccaccgccactcccaggtgcagggataccaccccctcccccccttcccggggctggtatccccccgccacccccgctgcccggagcaggaatccccccccccccgccgctgcccggcgccggaattccacctcccccacccctcccaggcgccggtataccgccccccccacctctaccgggagccgggattccacccccaccacccctccccggggcagggataccacccccccctcccttgccgggcgctggaatcccgccgccgcctccattgccaggcgccggcattccacccccaccgcccttacccggcgtcgggatcccaccaccaccacctctgcctggcgccggcatcccccctccgccccccttgccaggtgcgggtatacccccccccccccccttacctggagccgggataccccccccaccacctcttccacgggtgggcatccccccccccccaccactgcccggggccggtatcccccctcctccccctctgccaggcgccggaatacccccaccccctccgctgccaggagtgggaatccctcctcctccccctcttccaggtgttggcattccaccccctccacctttacccggcgccggcatacccccaccaccgcctctgcccgggatgggtatcccacctgcccctgccccccccctgccgcctcccggcactgggatcccaccaccccctctgcttcccgtatctggccctccccttttaccacaagttggatcctctacgctgccaactccgcaggtgtgcggcttcctgcccccccctctgccctccggactgttcgggctaggcatgaatcaggacaaagggtcccggaaacaacccattgaaccctgtcgccctatgaagcctctctactggacgcgtatccagctacacagcaagcgggattccagcacctccctgatctgggaaaagattgaggaacccagcattgactgccacgaatttgaggagctcttttctaaaaccgccgttaaggagcgcaagaaacctatatccgataccatttctaaaacaaaggctaagcaggtagtgaaactgctaagcaataaaagatctcaggccgttggcatcctcatgtcctccctgcatctggatatgaaagacatccagcatgccgttgtgaatttggataatagcgtcgtggatttagaaacactgcaagctttatatgagaaccgggcgcagtctgacgagctggagaagatagaaaagcacggaaggtccagcaaggataaagagaacgccaagtcactcgacaaaccagagcagtttctttacgagctcagtctgatcccaaatttttctgaacgggtcttctgtattctgttccagtctacgttctcagagtcaatctgttccatccggcggaagctggagctgctgcaaaagctgtgcgaaactctgaagaacgggccaggcgttatgcaagtactgggcttagtactggcctttggaaattacatgaacggcgggaacaagacaagaggccaagcagacggctttggcctagatatcttgcccaaactgaaggacgttaagtcatcagacaattcgcgatctttgctgagttacatcgtctcctactaccttcgcaatttcgatgaggacgccggtaaagagcaatgcctctttcccctgcctgagccccaggacctcttccaggctagtcagatgaagtttgaggatttccagaaggatctaagaaagctgaagaaggatctgaaagcttgcgaggtcgaggccgggaaggtctaccaggtgtcctctaaggaacacatgcagcctttcaaagagaacatggaacaatttattatacaggctaaaattgatcaggaggcagaagagaattctctgactgagacccacaaatgcttccttgagaccaccgcatatttttttatgaaacctaagctcggcgaaaaagaggtcagccccaacgccttcttctctatttggcacgaattcagtagcgacttcaaagacttttggaagaaagagaacaagcttctcctacaggaacgcgtgaaagaggccgaagaagtgtgtcgtcagaagaagggaaagagcctctacaagataaaacccaggcacgacagcggaatcaaggccaaaatttcaatgaagacctag

SEQ ID NO: 202533 - DNA, 597 bp, Artificial Sequence
  derived and/or modified sequence
atgagccgggccgtgacgatcgccgaagctttctgtcacatcctttttcggatcatctccgaaatcttaatgcgcatgctggaagaacaatgcctgtttcctctccccgagccccaggacttgttccaggctagtcagatgaagttcgaggactttcagaaagacctgcgaaaactgaaaaaagatctgaaagcgtgcgaagtggaagctggtaaggtgtatcaagtgtcatccaaagaacacatgcaaccattcaaggaaaacatggaacagtttatcatccaggcaaaaatagaccaggaggctgaggagaactctctgactgagacccacaaatgttttctggagacaaccgcatatttttttatgaaacctaaactaggggagaaggaggtgagccctaacgccttctttagtatctggcacgagttttcttcagattttaaagacttctggaaaaaagagaacaagctcctcctacaggaacgggtcaaagaagccgaggaagtatgccgccagaagaagggaaaatcattatataaaataaaacccagacatgactctggaatcaaggccaagatctctatgaagacctag

SEQ ID NO: 202534 - DNA, 1050 bp, Artificial Sequence
  derived and/or modified sequence
aatacaatacacgatgtgctcgacgtggaagcagcggttgttaaccttgataacagtgtggtagatctggaaaccctacaggctctgtacgaaaacagggctcagtcggatgagctggagaaaatcgagaagcacggtcggagtagcaaggacaaggagaacgccaaatccctggataaacctgagcaatttttgtatgaacttagtctaatccccaatttttcggagcgcgtcttctgtatacttttccagtcaactttttcagagtctatttgctcgattcgtcggaagctcgagcttctccaaaaactctgcgagacactcaagaacggacctggagtaatgcaggtgctggggctggtgctcgcatttggcaactacatgaatggggggaacaaaacaaggggccaggctgatggcttcgggttggacattctgcctaagctaaaggacgttaagagcagcgataattcacgcagtctcctgtcttatatcgtgtcatattatttgaggaatttcgatgaggacgcaggtaaagaacagtgtctgttccctctccccgaacctcaggacctctttcaagcctcacaaatgaaatttgaagacttccagaaggacctccgaaaactcaaaaaggacctcaaggcctgcgaggttgaggccgggaaggtctatcaggtgagctcaaaggaacacatgcagccctttaaggaaaacatggagcagtttattatccaggcaaaaatcgatcaggaagccgaggagaattcgctcactgaaacccataagtgtttcctggagactacagcttacttctttatgaagcccaagttaggagaaaaagaagtaagtcccaatgctttcttttccatctggcatgaattcagctctgacttcaaagacttctggaaaaaggagaacaaactgctgttgcaggagcgggtaaaggaagccgaggaggtgtgtaggcagaaaaaaggcaagtctctctacaagatcaaacccaggcatgacagtggcattaagaacaataactccatgcatacatag

SEQ ID NO: 202535 - DNA, 957 bp, Artificial Sequence
  derived and/or modified sequence
atgcgagcccagagcgatgagttggagaagatcgagaaacatggccgctcttccaaagataaagaaaacgcaaagagtctcgataagccggagcaattcttatatgagctttccctgattccgaacttttccgagagggttttctgcatcctcttccagagcacattctctgaaagcatatgttccattcgacggaagcttgagcttctgcaaaagctatgtgagacattgaaaaatgggcccggggtgatgcaggtgcttggcctggtgctagcttttgggaactacatgaacggaggtaacaagactcgggggcaggccgacgggtttggactggacatcctcccaaaactgaaggatgtgaagagcagtgacaactcccgcagtttgctgtcatacatcgtgagctactatctccgcaattttgatgaagacgcaggcaaggagcagtgcctgttccctttaccagagcctcaggacctgtttcaggctagtcagatgaaatttgaggactttcaaaaggatctgagaaagctcaaaaaagacctgaaggcctgcgaggtggaagctggtaaggtataccaggtgtcttccaaagaacacatgcagcctttcaaggaaaatatggaacagtttatcatccaggccaagatcgaccaggaagccgaggagaactcattgaccgagacccacaagtgtttcctcgagaccacagcctacttcttcatgaagcctaagttaggcgagaaagaggtcagcccaaacgcattcttcagcatctggcatgagttttcatccgacttcaaagacttctggaagaaagaaaataagcttctgctgcaggagagggtaaaagaggccgaagaagtgtgtaggcagaaaaagggaaaaagcttgtacaagatcaaacccagacacgattcaggcattaaagccaagatcagtatgaagacctag

SEQ ID NO: 202536 - DNA, 5169 bp, Artificial Sequence
  derived and/or modified sequence
atgggcaaccaggacggcaagctgaagaggtctgctggagatgccctgcatgaaggaggcggcggcgcagaagatgccctgggccccagagatgtggaggccaccaagaagggcagcggcggcaagaaggccctgggcaagcacggcaagggcggcggcggcggcggcggcggcggggagagcggcaagaagaagagcaagagtgacagccgggcctctgtgttcagcaacctgcgcatcaggaagaacctgagcaagggcaagggggccggcggcagcagagaagatgtgctggacagccaggccctgcagacaggagagctggacagcgcccacagcctgctgaccaagaccccagacctgagcctgtctgcagatgaggccggcctgagtgacacagaatgtgccgacccctttgaggtgacaggccctgggggccctggccctgctgaggcccgggtgggcggccggcccatcgcagaagatgtggagacagctgctggggcccaggacggccagaggaccagcagcggcagtgacacagacatctacagcttccacagcgccacagagcaggaggacctgctgagtgacatccagcaggccatccggctgcagcagcagcagcagcagcagctgcagctgcagctgcagcagcagcagcagcagcagcagctgcagggcgctgaggagcctgctgccccacccacagctgtgagcccccagcccggggccttcctgggcctggaccgcttcctgctgggccccagcggcggggccggggaggcccctggcagcccagacacagagcaggccctgagcgccctgagtgacctgcctgagagcctggccgctgagccccgggagccccagcagccccccagccctgggggcctgcctgtgtctgaggcccccagcctgcctgctgcccagcctgctgccaaggacagccccagcagcacagccttccccttccctgaggccggccctggagaggaggccgccggggcccctgtgcggggggccggggacacagatgaggagggggaggaggatgcctttgaagatgccccccggggcagccctggagaggagtgggcccctgaggtgggggaggatgccccccagaggctgggggaggagcctgaggaggaggcccagggcccagatgccccagctgctgccagcctgcccggcagccctgcccccagccagcgctgcttcaagccctaccccctcatcaccccctgctacatcaagaccaccacccggcagctgagcagccccaaccacagccccagccagagccccaaccagagcccccgcatcaagagaagacctgagcccagcctgagccggggcagcaggacagccctggcctctgtggccgccccagccaagaagcacagagcagatggcggcctggccgccggcctgagccgctctgctgactggacagaggagctgggcgcccggaccccccgggtgggcggcagcgcccacctgctggagcggggcgtggccagtgacagcggcggcggcgtgtccccagccctggccgccaaggccagcggggccccagctgctgctgatggcttccagaatgtgttcaccggccgcaccctgctggagaagctgttcagccagcaggagaatggccccccagaggaggccgagaagttctgcagccgcatcatcgccatgggcctgctgctgcccttcagtgactgcttccgggagccctgcaaccagaatgcccagaccaatgctgccagctttgaccaggaccagctgtacacctgggccgctgtgtcccagcccacccacagcctggactacagcgagggccagttcccccggcgggtgcccagcatgggcccccccagcaagcccccagatgaggagcaccggctggaggatgctgagacagagagccagagcgctgtgtctgagaccccccagaagagaagtgatgctgtgcagaaggaggtggtggacatgaagtctgagggccaggccaccgtcatccagcagctggagcagaccatcgaggacctgcggaccaagattgctgagctggagcggcagtacccagccctggacacagaggtggccagcggccaccagggcctggagaatggagtgacagccagcggagatgtgtgcctggaggccctgcggctggaggagaaggaggtgcgccaccaccgcatcctggaggccaagagcatccagaccagccccacagaggagggcggcgtgctgaccctgccccctgtggatggcctgcccggccggcccccctgccccccaggagctgagagcggcccccagaccaagttctgcagcgagatcagcctcatcgtgagcccccggcgcatctctgtgcagctggacagccaccagcccacccagagcatcagccagcccccacctccacccagcctgctgtggagcgctggccagggccagcccggcagccagcccccccacagcatcagcacagagttccagaccagccatgagcacagcgtgtcctctgccttcaagaacagctgcaacatccccagccccccacccctgccctgcacagagagcagcagctccatgcctggcctgggcatggtgcccccacctcctccacccctgcccggcatgacagtgcccaccctgcccagcacagccatcccccagcccccacccctgcagggcacagagatgctgcccccacctcctccacccctgcccggggccggcatccccccacctccacccctgcctggagctggcatcctgcccctgccccccctgcccggggccggcatccccccacctccacccctgcctggagctgccatccccccacctccacccctgcccggggccggcatccccctgcccccacccctgcctggagctggcatccccccacctccacccctgcccggggccggcatccccccacctccacccctgcctggagctggcatccccccacctccacccctgcccggggccggcatccccccacctccacccctgcctggagctggcatccccccacctccacccctgcccggggccggcatccccccacctccacccctgcctggagctggcatccccccacctccacccctgcccggggccggcatccccccacctccacccctgcctggagctggcatccccccacctccacccctgcccggggccggcatccccccacctccacccctgcctggagctggcatccccccacctccacccctgcccggggccggcatccccccacctccacccctgcccggggtgggcatccccccacctccacccctgcccggggccggcatccccccacctccacccctgcctggagctggcatccccccacctccacccctgcccggggccggcatccccccacctccacccctgccccgggtgggcatccccccacctccacccctgcccggggccggcatccccccacctccacccctgcctggagctggcatccccccacctccacccctgcccggggtgggcatccccccacctccacccctgcccggggtgggcatccccccacctccacccctgcccggggccggcatccccccacctccacccctgcccggcatgggcatccccccagccccagccccacccctgcccccacctggcaccggcatccccccaccacccctgctgcctgtgtctggcccccccctgctgccccaggtgggcagcagcaccctgcccaccccccaggtgtgtggcttcctgcccccacccctgcccagcggcctgtttggcctgggcatgaaccaggacaagggcagcaggaagcagcccatcgagccctgccggcccatgaagcccctgtactggacccgcatccagctgcacagcaagagggacagcagcaccagcctcatctgggagaagattgaggagcccagcattgactgccacgagtttgaggagctgttcagcaagacagctgtgaaggagaggaagaagcccatcagtgacaccatcagcaagaccaaggccaagcaggtggtgaagctgctgagcaacaagaggagccaggccgtgggcatcctgatgagcagcctgcacctggacatgaaggacatccagcacgctgtggtgaacctggacaacagcgtggtggacctggagaccctgcaggccctgtatgagaacagagcccagagtgatgagctggagaagattgagaagcacggccgcagcagcaaggacaaggaaaatgccaagagcctggacaagccagagcagttcctgtatgagctgagcctcatccccaacttcagcgagagggtcttctgcatcctcttccagagcaccttcagcgagagcatctgcagcatccggaggaagctggagctgctgcagaagctgtgtgagaccctgaagaatggacctggggtgatgcaggtgctgggcctggtgctggcctttggaaactacatgaatggaggcaacaagacccggggccaggctgatggcttcggcctggacatcctgcccaagctgaaggatgtgaagagcagtgacaacagccgcagcctgctgagctacatcgtgtcctactacctgaggaactttgatgaagatgctgggaaggagcagtgcctcttccccctgcctgagccccaggacctcttccaggccagccagatgaagtttgaggacttccagaaggacctgaggaagctgaagaaggacctgaaggcctgtgaggtggaggccggcaaggtgtaccaggtgagcagcaaggagcacatgcagcccttcaaggagaacatggagcagttcatcatccaggccaagattgaccaggaggccgaggagaacagcctgacagagacccacaagtgcttcctggagaccacagcctacttcttcatgaagcccaagctgggggagaaggaggtgagccccaatgccttcttcagcatctggcatgagttcagcagtgacttcaaggacttctggaagaaggagaacaagctgctgctgcaggagcgggtgaaggaggccgaggaggtgtgccggcagaagaagggcaagagcctgtacaagatcaagcccaggcatgacagcggcatcaaggccaagatctccatgaagacctag

SEQ ID NO: 202537 - DNA, 597 bp, Artificial Sequence
  derived and/or modified sequence
atgagcagagctgtgaccatcgccgaggccttctgccacatcctcttccgcatcatcagcgagatcctgatgaggatgctggaggagcagtgcctcttccccctgcctgagccccaggacctcttccaggccagccagatgaagtttgaggacttccagaaggacctgaggaagctgaagaaggacctgaaggcctgtgaggtggaggccggcaaggtgtaccaggtgagcagcaaggagcacatgcagcccttcaaggagaacatggagcagttcatcatccaggccaagattgaccaggaggccgaggagaacagcctgacagagacccacaagtgcttcctggagaccacagcctacttcttcatgaagcccaagctgggggagaaggaggtgagccccaatgccttcttcagcatctggcatgagttcagcagtgacttcaaggacttctggaagaaggagaacaagctgctgctgcaggagcgggtgaaggaggccgaggaggtgtgccggcagaagaagggcaagagcctgtacaagatcaagcccaggcatgacagcggcatcaaggccaagatctccatgaagacctag

SEQ ID NO: 202538 - DNA, 1050 bp, Artificial Sequence
  derived and/or modified sequence
aacaccatccatgatgtgctggatgtggaggccgctgtggtgaacctggacaacagcgtggtggacctggagaccctgcaggccctgtatgaaaatagagcccagagtgatgagctggagaagattgagaagcacggccgcagcagcaaggacaaggaaaatgccaagagcctggacaagccagagcagttcctgtatgagctgagcctcatccccaacttcagcgagagggtcttctgcatcctcttccagagcaccttcagcgagagcatctgcagcatccggaggaagctggagctgctgcagaagctgtgtgagaccctgaagaatggacctggggtgatgcaggtgctgggcctggtgctggccttcggcaactacatgaatggaggcaacaagacccggggccaggctgatggcttcggcctggacatcctgcccaagctgaaggatgtgaagagcagtgacaacagccgcagcctgctgagctacatcgtgtcctactacctgaggaactttgatgaagatgctgggaaggagcagtgcctcttccccctgcctgagccccaggacctcttccaggccagccagatgaagtttgaggacttccagaaggacctgaggaagctgaagaaggacctgaaggcctgtgaggtggaggccggcaaggtgtaccaggtgagcagcaaggagcacatgcagcccttcaaggagaacatggagcagttcatcatccaggccaagattgaccaggaggccgaggagaacagcctgacagagacccacaagtgcttcctggagaccacagcctacttcttcatgaagcccaagctgggggagaaggaggtgagccccaatgccttcttcagcatctggcatgagttcagcagtgacttcaaggacttctggaagaaggagaacaagctgctgctgcaggagcgggtgaaggaggccgaggaggtgtgccggcagaagaagggcaagagcctgtacaagatcaagcccaggcatgattctggcatcaagaacaacaacagcatgcacacctag

SEQ ID NO: 202539 - DNA, 957 bp, Artificial Sequence
  derived and/or modified sequence
atgagggcccagagtgatgagctggagaagattgagaagcacggccgcagcagcaaggacaaggaaaatgccaagagcctggacaagccagagcagttcctgtatgagctgagcctcatccccaacttcagcgagagggtcttctgcatcctcttccagagcaccttcagcgagagcatctgcagcatccggaggaagctggagctgctgcagaagctgtgtgagaccctgaagaatggacctggggtgatgcaggtgctgggcctggtgctggcctttggaaactacatgaatggaggcaacaagacccggggccaggctgatggcttcggcctggacatcctgcccaagctgaaggatgtgaagagcagtgacaacagccgcagcctgctgagctacatcgtgtcctactacctgaggaactttgatgaagatgctgggaaggagcagtgcctcttccccctgcctgagccccaggacctcttccaggccagccagatgaagtttgaggacttccagaaggacctgaggaagctgaagaaggacctgaaggcctgtgaggtggaggccggcaaggtgtaccaggtgagcagcaaggagcacatgcagcccttcaaggagaacatggagcagttcatcatccaggccaagattgaccaggaggccgaggagaacagcctgacagagacccacaagtgcttcctggagaccacagcctacttcttcatgaagcccaagctgggggagaaggaggtgagccccaatgccttcttcagcatctggcatgagttcagcagtgacttcaaggacttctggaagaaggagaacaagctgctgctgcaggagcgggtgaaggaggccgaggaggtgtgccggcagaagaagggcaagagcctgtacaagatcaagcccaggcatgacagcggcatcaaggccaagatctccatgaagacctag

SEQ ID NO: 202540 - DNA, 5169 bp, Artificial Sequence
  derived and/or modified sequence
atgggcaaccaggacggcaagctgaagcggagcgccggcgacgccctacatgaaggaggggggggcgccgaagacgccctggggccgcgagatgtggaggcgactaagaaggggagcggcggcaagaaggcgctgggtaagcacggcaagggtggcgggggtggcgggggggggggtgagagtggaaaaaagaagtcaaagagcgacagccgggctagtgttttctctaacctcagaataagaaagaatttgagcaaggggaagggtgccggaggctcaagagaagatgtgctagattcacaggccctccagacaggggagctggactcagctcatagcttgttgacaaagacccccgacttgagcctgtctgccgacgaggcaggtctgtctgatacagaatgcgcagatccgttcgaggttacaggccccggggggcccggccctgctgaagcgagagtcggaggtcgacccattgcggaagatgtggagacagccgccggcgctcaggatggtcagaggacatccagtggcagtgacacagatatctattcattccattccgcaacggaacaagaagatctgctctctgacattcagcaagccatccgtcttcagcagcagcaacagcagcagctgcagctgcagctgcagcagcagcaacaacagcagcaactgcaaggcgctgaggagcctgcggcaccccctactgccgtaagtccccaaccaggggcttttcttggtctagatagatttctgctggggcctagcggaggagctggagaggctcccggctcccccgatacagaacaagccctgagtgcgctttccgatcttcccgagtcactggccgccgagccgagagaaccacagcaaccacccagcccaggcggtctgccagttagtgaggcccccagcctaccagctgcccagcccgctgcaaaagattccccaagctccactgcattccccttccccgaagctggtcccggcgaggaagcagctggggcccccgtgcgcggggccggagacacagatgaagaaggagaagaagacgcgtttgaggacgcccctagaggatctcctggtgaggagtgggctccagaggtgggcgaggacgcaccccaacgcctgggggaggagccagaggaggaggcccaaggcccagatgctcctgctgccgcatccctgccgggctcacctgctccatcgcagagatgttttaagccttatccactgatcaccccgtgctatattaaaacaactacgcgtcagttatcttcccccaatcactccccatcgcaatctcctaatcagtctccccgcatcaagcgtcgtcctgaaccaagcctgagtcgagggtctaggacggcgctggcatccgtagccgcccccgctaagaagcaccgggcggatggaggactggccgcaggactttcccggtccgctgactggactgaggagctgggtgctcgcacaccacgggtcggcggtagcgcccacctgttggagcgaggcgtggcatctgatagtggtggcggggtgagcccggcgctcgcggccaaggcgagtggtgctccggctgccgcagacgggttccagaatgtgttcactgggcgtacccttctggaaaagttgtttagtcaacaggagaacgggccacctgaagaggccgagaaattttgttcgcggatcattgccatgggcctcctgctgccatttagcgattgcttccgggagccatgcaatcagaacgctcagactaacgctgccagctttgatcaagatcagctgtacacttgggctgctgtatcccagcccacccactccctcgactactcagagggccaattccccagaagagtcccaagtatgggccctcccagcaagccacccgacgaggagcacaggttggaggacgccgagactgagagtcaatccgccgttagcgaaactccacaaaagcggtcggatgccgtgcagaaagaagtggtggatatgaaatccgagggacaggcgaccgtaattcagcagctggaacaaaccatcgaggatctcaggactaaaatcgctgaactcgaaagacagtaccctgcacttgacacagaggttgctagcggacatcagggcttggagaatggagtgacagctagtggggatgtgtgtcttgaagccctgcgactggaagaaaaggaagtcagacatcaccgcatcctggaagccaagagcattcagacgtcacctaccgaggaaggaggggtgctcaccctacccccagttgatgggttacctggacggcccccttgcccccctggagccgaaagtgggccgcagacaaaattttgctccgaaatctccctgattgtgagcccacggcggattagcgtccagttggattcccaccagcctacccaatccatatctcaacctccacccccgcccagcctcttgtggtcagccggacaggggcagccgggtagccaaccgcctcacagtatttctactgagtttcagaccagccacgaacactctgtgagtagtgcttttaaaaactcctgcaacatccccagcccaccacctttgccgtgtacagagtcttcctcttccatgcccggcctcggcatggttcccccacctcctcctcctctccctggcatgaccgtccctactttaccttcaacagccatccctcaaccccctccattgcaggggacggagatgctgcctccgcctcctccgcctcttccaggggctggtattccaccacccccgccactgccaggtgccggtatactgcctctaccacccctcccgggcgctgggatccccccaccccctcccctccctggcgcggcaataccaccacctcctccattacctggcgccgggatcccgctgccaccccctcttccaggagctggaataccaccgccaccaccccttccaggtgccgggatcccgccacctcctcccctgcctggcgcgggaataccaccacctccacctctgcccggcgcaggaatccctccaccaccacctttgcccggcgcaggcatcccgccaccgccccccctgcctggagccggcattcctccccccccccctcttccaggagcgggaatacctccaccgccacccttgccgggagcaggtatcccaccacccccaccactaccaggagccgggattcctcctccgccacctttacccggtgccggaatacctccgccgccacctcttcccggagctgggatccctcctccaccccccctcccgggagcaggtataccacctcctcccccactgcccggcgtcgggatcccccctccacccccgctgcctggcgcgggcattcccccaccaccacctttgccaggggccgggatcccacctcccccacctctgcctggcgcgggtattccaccgcctcctcccctgccgagagtgggcattccccccccaccccctctgcctggcgcgggtattccccctccgcctcccttgcccggcgcaggcattcccccaccaccaccactgcccggagttggcatccccccccctcctccccttccaggagttgggatcccacccccacccccccttccaggtgccggcatacctccacctccacccctgccaggtatggggatccccccagctccagcccctcctctgccgccccctggtactgggattccaccacccccactcctgccagttagtgggccgccgctgcttccccaagtcggctctagtacactgcctacacctcaggtgtgcggatttctgccaccccctctcccatccgggttattcggcctggggatgaaccaagataaggggagccgcaaacagccaattgagccttgcaggcccatgaaaccattgtattggaccaggatccaactccactccaaaagagacagtagtacttcgctgatatgggaaaaaatcgaggagccatccatcgattgtcacgagttcgaggagttgttttcgaagactgcagtgaaggagcgaaagaagcccatctcggataccatcagtaagactaaggctaagcaggtcgttaaattactgagcaataaaaggtcacaggccgtgggcatactgatgtcctccctacatctggacatgaaggatatacaacacgccgtcgtcaacttggataactccgttgtggacctagagacacttcaggccctgtacgaaaatagggcccagagtgacgagttggaaaaaatagagaaacacggtcgatcatctaaggataaagagaatgctaaaagcttggacaaaccggaacagttcttatatgaattgtccctaataccgaatttctccgaacgagtcttctgtatactttttcagtcaacattttccgagtctatttgctccatcaggcggaaactcgagctgctgcagaaattgtgtgaaacattaaaaaacggaccgggagtgatgcaagttctggggctggtcctggctttcggcaactacatgaacggcgggaacaaaacaaggggccaggctgatgggttcggtctcgatattttaccgaaactgaaagacgtgaagtcatccgataacagccgtagcctgctgagctatatagtatcttactacttgcgcaatttcgatgaggacgcaggtaaagagcagtgtctgtttcccctgcccgaaccacaggatttattccaggctagtcagatgaagttcgaggacttccagaaagacctgaggaagttgaagaaggatctgaaggcctgtgaggtcgaagcgggaaaggtgtaccaagtctctagcaaggaacatatgcagccctttaaggagaacatggaacagtttattatccaggcgaagatcgatcaggaggcagaggaaaacagcctaaccgagacccacaaatgctttctcgagacgactgcttactttttcatgaaaccaaagttgggcgaaaaggaagtatcccccaatgcatttttctcaatctggcacgaatttagctccgactttaaggacttctggaaaaaagaaaacaaactactgctccaagagagagtgaaggaggctgaggaggtgtgcagacagaagaaaggcaagtctctgtataaaattaaacctcggcatgactccggaatcaaagctaaaatcagcatgaagacctag

SEQ ID NO: 202541 - DNA, 597 bp, Artificial Sequence
  derived and/or modified sequence
atgagccgggccgtgaccatcgccgaggccttctgccacatcctgttcaggattataagcgaaatcctgatgaggatgctcgaagagcaatgcctgttccccctacccgaacctcaggatctgttccaagcgagccagatgaagtttgaagactttcagaaggacctgcggaagctgaagaaggacttgaaggcttgcgaagtggaagcgggcaaggtttaccaggtgagtagcaaagagcatatgcagccttttaaggaaaacatggagcagtttataattcaagccaaaattgaccaggaagccgaagaaaattcactcactgagacccataagtgctttctcgaaacgacggcttactttttcatgaagccgaagctgggtgagaaagaggtcagcccaaacgcctttttctccatctggcatgagttcagctcagacttcaaagatttctggaaaaaggaaaacaagctcctgctgcaggaacgggttaaagaagcggaggaggtatgccgtcagaagaaagggaagtcgttgtacaaaattaaacctcgacacgactcaggtataaaagccaagatctccatgaagacctag

SEQ ID NO: 202542 - DNA, 1050 bp, Artificial Sequence
  derived and/or modified sequence
aacaccatccacgacgtgctggacgtggaggccgccgtggtgaacctggacaactctgtcgtagatctcgagaccctccaggccctatatgaaaacagagctcaatcagacgagcttgagaagatcgaaaaacacggccgaagcagtaaggataaggaaaatgctaaatctctggacaaaccagaacagttcctctatgaactaagccttataccaaatttcagcgagcgggtcttttgcattttatttcagagtacatttagcgaatcgatctgctccatccgaagaaagcttgaactgttgcagaaactgtgtgaaaccctgaaaaatggacctggcgtcatgcaggttctgggcttggtcctcgcatttggtaactatatgaatggcgggaataagaccagaggccaggctgacgggtttggcctcgacatactccctaagctgaaggacgtgaaaagttcagacaactcaagaagcctcctcagttatattgtgtcttattatctgcgcaatttcgatgaagacgctggaaaagaacaatgtctattccctctgccggagccccaggacctgttccaggcctcgcaaatgaagttcgaggactttcagaaagatctccgtaagcttaagaaagacctgaaggcatgtgaggtggaggcaggcaaggtttaccaggtgagttcgaaggaacacatgcagccgtttaaggaaaatatggaacagttcatcattcaggcaaagattgatcaggaggctgaagaaaattctttaactgaaacacataagtgttttctagagacaaccgcctatttcttcatgaagcctaagcttggagagaaagaagttagtccaaatgcatttttcagcatttggcacgagtttagcagcgatttcaaagacttttggaagaaagagaataagctcctgttgcaggaacgcgttaaggaagcggaggaagtctgccgccaaaagaaaggcaagtcgctgtataaaataaaaccaagacatgactcgggtattaaaaacaataattctatgcatacatag

SEQ ID NO: 202543 - DNA, 957 bp, Artificial Sequence
  derived and/or modified sequence
atgcgggcccagagcgacgagctggagaagatcgagaagcacggccggtcatctaaggacaaagaaaacgctaaaagcctggataaacctgagcaattcctgtatgaactctccctgatcccaaacttcagtgagcgggtgttctgtatcttgtttcaaagcacatttagcgagagcatttgctcgatccgccgtaaattggagctcctgcagaagctctgtgaaacattaaaaaatggacccggcgtgatgcaggttctgggcctcgtactggcctttggcaattatatgaacggcggcaacaaaaccagagggcaagccgacgggttcggcctcgacatcctgcctaaactgaaagatgtgaaatcatccgacaactctcggtcgttactgtcatacatcgtatcttattacctccggaatttcgatgaggacgcaggcaaagaacagtgcctgttcccgctgccagagccacaagacctgtttcaagcaagccagatgaagttcgaagactttcagaaagatttgcgcaagctgaaaaaggatctaaaggcgtgcgaagtggaggccggaaaggtgtaccaggtgagctccaaggagcatatgcagccattcaaggaaaacatggagcaatttataatccaagcaaagatcgatcaggaagcagaagaaaatagtttgactgagactcataaatgttttttggagactaccgcgtatttctttatgaaaccaaagctaggtgaaaaggaggtctcaccgaacgcttttttttcaatatggcatgaattttcgagcgatttcaaagatttctggaaaaaagaaaacaagctccttttgcaggaaagggtgaaggaagctgaggaggtgtgccggcagaaaaagggaaagagcctgtacaagataaaaccccgtcatgatagcggcatcaaagctaagatttctatgaagacctag

SEQ ID NO: 202544 - DNA, 5168 bp, Artificial Sequence
  derived and/or modified sequence
atgggcaaccaggatggcaagctgaaacgtagcgccggagacgcactccacgagggaggcggaggcgctgaagacgctctgggccctcgcgacgtggaagcaacaaagaagggcagtggcggaaaaaaagctctggggaagcacggaaaagggggtgggggaggagggggtggcggagagagtggaaaaaagaagtccaaaagtgactccagagcgagcgtattttccaatctgaggataagaaagaacctgtcaaagggaaaaggcgcaggagggagcagggaagacgtgctggattcacaggcacttcaaacaggggagttagatagtgctcacagcctgcttacaaagactcccgacctttctttgtcagcagatgaagccggactatccgataccgaatgcgctgacccctttgaagttactggtccgggaggacctggccctgccgaagccagagtgggtggcaggcccattgccgaggatgtggagacggcagccggtgcccaggatgggcagcgaacctcctccggtagtgacacggacatatactccttccactcggctaccgaacaggaggacctcctcagcgacatccagcaagccattagactccagcaacagcagcaacagcaattacaacttcagctgcagcagcagcagcaacagcagcaactacaaggcgctgaagaacctgctgcaccaccaacagccgtgagccctcagcctggagcatttttgggcttggaccgtttcctcctgggaccctctggcggagcaggagaggctcccggtagccccgataccgagcaggccctgtccgccctgtctgatctgccggagagcctagccgctgagccgcgagaaccgcaacagcccccatcccccggagggcttccagtctccgaagctccaagcctgccagctgcgcagcctgctgccaaggacagtccctccagcaccgctttcccctttcctgaggcaggcccaggagaggaggcagccggtgcacctgttcgtggagctggcgacacagatgaagagggcgaggaagatgcctttgaggatgctccacgaggaagtcctggcgaagagtgggcgcctgaagttggggaggacgcacctcagcgcctgggagaggaacctgaggaggaggcccaggggccagatgcaccagctgccgctagtctacctggctcccctgcccctagtcaacggtgttttaaaccgtatccactcataacaccatgctacattaaaaccaccaccagacaactctcttcacctaatcactcccctagccagtcccctaaccaaagtccaagaataaaaagacggccagagccaagcctgtcacgcggttcgaggaccgctctcgctagcgtagccgctccagctaagaaacacagggcagatggcggtctggcagcgggactgagccgctcagcagactggaccgaggaacttggagctaggacaccaagagtcggaggcagcgcccatctgctggaaagaggagtagcctcggattctggcggaggcgtgtcccccgcactggctgcaaaagcttctggcgctcctgctgcagctgatgggttccagaacgtattcaccggacgaacgctgctggagaagttattttctcaacaggagaacggacctccagaagaagccgagaagttttgttcaaggattatagcaatggggctgctgctacccttttccgactgtttcagagagccttgtaaccagaatgcgcaaaccaatgccgcatcttttgatcaggaccagctgtatacctgggcagcggtgtctcagccgacccacagtttagactattcagagggtcagttccccaggagagtgccaagcatgggacccccttccaaacctcctgatgaagaacaccgattggaggatgccgagaccgaatcgcaaagcgctgtgtctgagactccgcaaaagagaagcgatgcggtccagaaggaagttgtcgatatgaaaagcgagggccaagccaccgtgatccagcaacttgagcagaccatcgaagatcttcgcacaaaaatcgctgaactagagcgacagtaccctgcccttgacacagaggtggcctctggacaccagggtctagagaacggcgtcactgcgtcgggcgatgtgtgcctggaagcgttgcgcctcgaggagaaagaggtgcgccaccatcgaatactggaagccaagtcgatacaaacgtccccaactgaggaggggggagtgctcactctacccccagtcgatggactgcccggacgacccccatgcccccctggcgcagagagtggcccacagactaagttttgctccgaaataagtcttattgtgtctccacggagaatatctgtccagctagacagtcaccagccaacccagtctatctctcagccacctccccctcctagcttactgtggagcgccggtcaaggccagcctggcagtcagccaccccatagcatcagtaccgaattccagacttctcacgagcactcggtgtccagcgcgttcaaaaacagttgtaacattccaagtccacccccactgccatgtaccgagtctagctcatccatgccaggtctgggtatggtcccacctccacctcctcccttgcctggtatgaccgtgccaactctgccctccaccgctatccctcagccacctcctctgcaggggaccgaaatgcttcctcctcctccccctcctctgccgggtgccggaatccccccaccacctcccctgccgggtgctgggatcctcccgctgccccctctcccaggcgcaggaattcccccacccccaccgctgcccggagccgctattcccccaccccctccgctcccgggagccggtatccccctgcccccaccccttccaggcgcaggaataccaccccctccaccactcccaggagccggtatccccccacctcccccactccctggagcagggatccctcctcccccaccactgcctggcgcagggattcccccaccccctccactcccgggagccggaattcctcctcctccaccactacccggtgcaggcatacccccacctccaccccttccaggagccggtatacctccccctcctcctctgccaggagcgggaattccaccccctcccccactcccaggagcagggatcccccctccgcctccgttgccaggcgctggaatcccaccaccgcctccacttccgggagccggaattccacctcctccacctctgcctggagctggaatcccacccccacctccactaccaggggtggggatcccgcctcctcctccactacccggagccggaattcctccccctccaccactgcctggcgctggcatacctccccctccacctctacccggagcaggaataccacctccccctcctctccccagagtcgggatccctcccccaccccctttgcccggtgcgggaattcccccacccccacccttgccaggtgccggtatccccccaccacctccgctgcccggtgtgggaatccctccgccaccgcctttacccggagttggcatacctcctccgccacccctgcccggagcaggaataccccctccccctcccctccctggtatgggaattccccctgccccagccccacccctgcctcccccaggtactggcataccaccccctcccttgttgcctgtatctggcccacccctgctgccgcaggtgggaagttccactctccctactccacaggtctgtgggttcctaccccctcctctccctagtggtttattcggcctgggtatgaatcaggataagggatccaggaaacagcccattgaaccgtgcagacccatgaagccattatactggacccggatccagctacactccaaaagagacagctctacaagcttgatctgggagaagattgaagagccctccattgattgtcacgagttcgaggagctcttcagtaaaaccgccgttaaggaaagaaaaaagccaattagtgatacaatcagcaagaccaaagccaagcaggtggtgaaactgttgagcaacaaaaggtctcaggcggtgggtattctcatgtctagccttcacctggatatgaaagacatccagcacgcagttgtcaatctcgataatagtgtggtggacctggaaaccctgcaggccctctacgagaatagagcacaaagtgacgaactagagaagatcgagaagcacggacgcagctcgaaagataaagaaaatgcaaagagcctcgacaaacctgagcaattcctctatgagctgtcactcatccctaatttcagtgaacgagtgttctgcattttgtttcaatcgaccttttctgaatccatctgtagcatacgcaggaagttagagctgttgcaaaagttatgcgagactctcaagaatggcccaggcgttatgcaggtgcttggtcttgttctggccttcggtaattatatgaacggtggaaataagacccggggacaagcagatggattcggcctggacattctacctaagctcaaagatgttaagtcttccgacaactccaggtccctgttgagttacattgttagctattacctgagaaattttgatgaagacgcaggaaaagagcagtgcctgtttcccctgcctgagccgcaggacctctttcaggctagccaaatgaagtttgaggatttccagaaggacctgcggaaactgaagaaggaccttaaagcgtgcgaagttgaagccggtaaagtctaccaggtttcaagcaaggagcatatgcagccctttaaggagaacatggaacagttcatcatccaggccaaaattgaccaggaggctgaggaaaactctctgactgagacacacaagtgctttctggagactacagcctacttttttatgaaaccaaagctgggcgagaaggaggtgtccccaaacgccttttttagcatttggcatgaattctcgtctgattttaaggatttttggaagaaagagaataaattgcttcttcaagagagggttaaagaggcggaagaagtctgccgacagaagaaaggaaagagtctgtacaagataaaaccacggcacgatagtgggatcaaagccaagatttcaatgaagactta

SEQ ID NO: 202545 - DNA, 597 bp, Artificial Sequence
  derived and/or modified sequence
atgagccgtgccgtgaccattgccgaggccttttgtcacatacttttccggattataagtgagatcctgatgagaatgctcgaagagcaatgcttgtttcctctgccggagccccaggatctgtttcaggccagccagatgaaatttgaagactttcagaaagacctcagaaagctaaaaaaggacctcaaggcttgcgaggtcgaggcaggtaaggtctatcaggtgagctctaaagaacacatgcaacctttcaaagagaacatggagcaatttattatacaggccaagattgaccaagaggccgaagagaactcactgacagaaacacacaagtgttttctcgagacgaccgcctacttctttatgaagccgaaactgggtgagaaagaggtctcacctaacgcttttttctctatttggcatgagttctcatccgacttcaaagatttttggaagaaggagaataagcttctgctgcaggaaagggttaaggaggccgaagaagtgtgccgccagaaaaaaggcaagtccttatacaagatcaaacccagacacgactcaggcataaaggccaagatctctatgaagacatag

SEQ ID NO: 202546 - DNA, 1050 bp, Artificial Sequence
  derived and/or modified sequence
aatacgatccatgacgtgctcgacgtcgaagccgcagtcgttaacctggacaatagtgtcgtggacctggagaccctgcaggccctgtatgagaacagagcgcagtccgacgagctagaaaaaattgagaagcacggccgatcttctaaagataaggagaacgccaaatccctcgacaaacccgagcaattcttgtacgaactgtcgttgattcccaattttagcgagagggtcttttgtattctgtttcagagtactttctcagagtccatttgtagtattaggcgcaaactggaattgttgcagaagctttgcgagactctgaaaaatgggccaggagtgatgcaggttctggggctggttctggcattcggcaactacatgaacgggggaaataagacccgcggacaagctgacggattcggcctcgatatactcccaaagcttaaagatgtgaagtcctctgacaatagtagatccctgcttagctacatcgtctcttactatttacggaatttcgacgaagatgcaggaaaggagcagtgcctgtttcctctcccagagcctcaggacctgtttcaggcttcgcagatgaaattcgaggattttcaaaaggacttaaggaaattaaagaaggacctgaaggcttgtgaagtagaagccggaaaagtgtaccaggtgtcttccaaagagcacatgcaaccgttcaaagagaacatggaacagttcatcattcaggctaaaattgatcaagaggccgaagagaacagcctgacagagacccacaagtgttttttagagacaaccgcttactttttcatgaaaccaaagctaggagagaaagaagtctctccaaatgcctttttttcaatttggcacgaattctcctccgacttcaaagacttctggaagaaggagaacaaactgctcttacaggagagagtgaaggaagcggaagaggtttgcaggcagaaaaaagggaaatccctttataagattaaaccccgtcacgactctggcatcaagaacaataattcgatgcacacctag

SEQ ID NO: 202547 - DNA, 957 bp, Artificial Sequence
  derived and/or modified sequence
atgcgggcacagagcgacgagctggagaaaattgaaaaacatggtagaagctccaaggacaaggaaaatgccaagtcattagacaagcctgaacagtttctttacgagctctcgctcatacccaatttttcagagcgagtgttttgcatcctcttccaatccacattttccgaaagtatttgtagcatcagaaggaaactggagctgttgcagaaattgtgtgagacacttaagaacggcccaggtgtgatgcaggtgttaggcttggtcctggccttcggcaactatatgaatggcggaaacaaaacacgtgggcaggccgatggctttgggctggacatcctcccgaagttgaaggacgtgaaatctagcgacaactctagatcactcctgagttatattgtttcctattatctcaggaactttgatgaggatgcaggcaaagagcagtgcctctttccactgccagagccccaggatctgttccaggcatcacagatgaagtttgaagactttcagaaggacctccggaagctcaagaaggatcttaaagcctgtgaggtggaggctgggaaggtgtaccaggtctctagcaaagagcatatgcaacctttcaaggagaatatggagcaattcattattcaggccaaaatcgaccaagaggccgaggaaaactccctgaccgagacacacaagtgcttcctggagactacggcctacttcttcatgaaaccaaaactcggggaaaaagaggtaagtccaaacgccttcttcagcatttggcatgagttctcaagcgatttcaaagacttctggaaaaaagaaaataaactgttgctccaagagcgagtgaaagaagcagaagaagtgtgtagacagaagaaagggaagtctttgtataaaattaagcctcgacatgactctggcatcaaggctaagatcagtatgaagacctag

SEQ ID NO: 202548 - DNA, 602 bp, Artificial Sequence
  derived and/or modified sequence
gttaaaaggggactgacaggatgaaggcagtacagaatgctgggctgagagcaggactgagatcctagaggcagaatcccagtctacccgtactctctgggaggaagtgatgagaacttgcagcagggtggtggtagtgaaagagaagaatgaaagacaaggaagcatcagtggaacttgatgtgtggctggataccagaaatgcagaggaagttagtcaaaggttcccgtcctgatgactggagatcatggtatcactgactgagctctaggggttgtgaaatagagctcattaggcagaggatggttgtcaagttattaagcaacaaaagatcacaagcagttggaatactaatgtctagccttcatttagatatgaaagacatacaacatgctgttgtgaacttggataattctgtggttgacctggagacccttcaagctctctatgagaatagagcacagtcagacgaactcgaaaaaatagaaaagcatggccgatcttccaaagacaaggaaaatgccaagtctctggacaaacctgaacagttcctttatgaactgtcactaatccccaacttttcagagcgagtcttttgcat

SEQ ID NO: 202549 - DNA, 1047 bp, Artificial Sequence
  derived and/or modified sequence
aacacgattcatgatgtgttggatgtggaagcagctgttgtgaacttggataattctgtggttgacctggagacccttcaagctctctatgagaatagagcacagtcagacgaactcgaaaaaatagaaaagcatggccgatcttccaaagacaaggaaaatgccaagtctctggacaaacctgaacagttcctttatgaactgtcactaatccccaacttttcagagcgagtcttttgcatcctgttccagtccacattttcagaaagcatttgctcaattcgtcgcaaactggaattactacagaaattgtgtgagacattaaaaaatggcccaggggttatgcaggttctaggtttggttcttgcctttggcaactacatgaatggaggaaataagactcgaggacaggcagatggctttggattagacattcttccaaaactgaaagatgtcaagagcagtgacaatagcagaagccttttgtcatatattgtttcgtattatctccgaaattttgatgaggatgctggaaaagaacagtgcctctttccactgccagaaccccaggacctttttcaggcctcacagatgaagtttgaagattttcaaaaagatctcagaaaactgaagaaagacttgaaagcctgtgaagttgaagcagggaaagtataccaggtctcctcaaaagagcatatgcagcctttcaaggaaaacatggaacaatttattattcaagccaaaattgaccaagaggcagaggaaaattcactgacagagactcataaatgctttttggagaccacggcatatttcttcatgaaaccaaaacttggagagaaggaggtgtccccaaatgctttcttcagtatctggcatgaattcagctctgactttaaagacttctggaagaaagagaacaaacttcttctacaagagagagtaaaagaagccgaagaggtgtgtagacagaagaaaggaaaatcactttataaaataaaaccaagacatgactctggaattaaaaacaataatagcatgcacacc

SEQ ID NO: 202550 - DNA, 2902 bp, Artificial Sequence
  derived and/or modified sequence
attcctgccctggtggagcttacattatagaagggaggtccagaccatcaataaatatacagcgaagctccaaggaaaaacagagcagggcaaagagaagacagctatgggaggtggtttattttatataaattagccagacagtgcctctgagaggtgatgtctaagcagggactcggagatgagggaataagctaatggatatctgaagaaagaaccttccacatggatgaagcatcgcatgcaaagctcaaggaaggagcatgtttagtcaagtgcctaaagtggctggagcagagtgagtgagagttgagaggtagaagatgaattcggagagggagcattggggccagactatgtagcctagtgggccaagtgaggtcaggcctttaagaaggagcgtattgaggaagaaccatgcacactactgctagtgctagggtgagaaagatgaggactgagaactgacctggatttgggatcttgggtgaatgagtgacatccgcaagagtagtctctgttgactggttagggacagatgtctgattaactgggagcacaggaagctggggcagtgactctaggtaacacgctcttgaggcattggtatatgtaaagggtcacaatggaaaggaaagctagcaggagggcaagggaattagggttttgtttttgtgtttatttttggtgctgggataaacagcgtatgtgtcactgggtagaaatgatccagtaaaggaaaaattgtgaactttgttctctcttaatatgtgtgtttcgttgattcattcctgacttgtatctcccacatcttatcccttaattaagccattcttcctcttgcataattgcaaattattatgatataaatagctttgttgtactcttttatgagttttacagggaggaaattgcataaactctctataaagtaatttctatgtttaaaagcccttaagttctcccgccccatagcctgaccaaaaaagtcttactaaacaaaaataggatacaaatgatccatacacatcatcctggctagagaagggtcagaaactacagtgttgttagaaccaatagagcttaactttatatctcactggctttaataaaaaacttttctgagctatttgacacaaaaatcactaagattaagaaaatatcttaacacaggtggaaatagtaaaaggatgtttgcatgaaaaccgtcaaatgtaataaacagcactattctctgataataaaagatgaatctggctgtcagatgcaattttataatagcttcgaccatcatgtacggcaggagtatttttttttatttactatcgttaagtttgtggaaccagtgattgttgttttactattttgttaaggaaacctaaaacattcttagaatgtacagaaagaatatggtcattcttataggaccaaagggcgtatcaagtgagctgcttttgtaaataccatgaaaatccaagtctgacatggaattaaaatcatctctactacaagatgcagaaaaaaaccaaactcttttttttctatatcagagacttaaaaatattagtgatgaccaatgtgattagaagctttaaaatcctaacatttatgtgaacaaaaatcttcctgttttcagagacttaagcatatcatctgagcattgaaaaaagctcttaatagtacctttcagatttctcatctgttttcagatcccatattaaactccttgtggaagaatgagaaagaaagctactctaaattttacagaatagaattcaggctctttatttacaaaatggagtgtgaaccttgctgtttactcatctaccccctcaagcaattgtgttttccttccttatcagcacagaccatcacagttccaggatttgtctgagatgctagccacctctgattgctattcactggacactcttgtgattgtgatttaagattgtaggccaggcatgagccaccgcgcccagccggcatgtaaatttttatgtgacactttttttttggtggggggtggcaggggagagggtctcactgttgcccaggctagagtgcagaggtgctgatcacagctcactgcagggcacgcaccaccatgcccggctaagtttttgtattttttgtggagtcagggtctcactctgttgcccatgctggtctggaactcctgggctcaagcaattcacccgccttggcatcccaaagtgctgggattgcaggcatgagctactccgccctggctgtgatactctttaattattctaatgcttctaacttacgtcatggtgccaatcctatttatataatagaatcaatctcatactctcagctgacaatgaggggtatttcattttttacttgtatataagattccttttatataggatgaaatgcatacacactctgcatagaaattcttatgtgtttgtatattactccattcaatcatactatgattccaagttaagaactcctagataaattagcgtctgtagctgtaacagttgaggctttcaattcaaatgtcagataacattcttctgtgtattgtattattttctgcagtaattcaaatctttattgagttgaggtttgctcacttactataaggtagaatgaggtgatctaagtaggttttgtttaaatacatgtgtcttctccccatcagagtaaaagaagccgaagaggtgtgtagacagaagaaaggaaaatcactttataaaataaaaccaagacatgactctggaattaaagcaaagataagcatgaaaacttgaacaatgaaaagcagaatgaaaatgagtcattgcaacgactttcacaaaattcagctgacctgagagtgggagggaaactaccgtcattctgctcatgtttcttcttgacctct

SEQ ID NO: 202551 - DNA, 1632 bp, Artificial Sequence
  derived and/or modified sequence
acagaatgctgggctgagagcaggactgagatcctagaggcagaatcccagtctacccgtactctctgggaggaagtgatgagaacttgcagcagggtggtggtagtgaaagagaagaatgaaagacaaggaagcatcagtggaacttgatgtgtggctggataccagaaatgcagaggaagttagtcaaaggttcccgtcctgatgactggagatcatggtatcactgactgagctctaggggttgtgaaatagagctcattaggcagaggatgagagcacagtcagacgaactcgaaaaaatagaaaagcatggccgatcttccaaagacaaggaaaatgccaagtctctggacaaacctgaacagttcctttatgaactgtcactaatccccaacttttcagagcgagtcttttgcatcctgttccagtccacattttcagaaagcatttgctcaattcgtcgcaaactggaattactacagaaattgtgtgagacattaaaaaatggcccaggggttatgcaggttctaggtttggttcttgcctttggcaactacatgaatggaggaaataagactcgaggacaggcagatggctttggattagacattcttccaaaactgaaagatgtcaagagcagtgacaatagcagaagccttttgtcatatattgtttcgtattatctccgaaattttgatgaggatgctggaaaagaacagtgcctctttccactgccagaaccccaggacctttttcaggcctcacagatgaagtttgaagattttcaaaaagatctcagaaaactgaagaaagacttgaaagcctgtgaagttgaagcagggaaagtataccaggtctcctcaaaagagcatatgcagcctttcaaggaaaacatggaacaatttattattcaagccaaaattgaccaagaggcagaggaaaattcactgacagagactcataaatgctttttggagaccacggcatatttcttcatgaaaccaaaacttggagagaaggaggtgtccccaaatgctttcttcagtatctggcatgaattcagctctgactttaaagacttctggaagaaagagaacaaacttcttctacaagagagagtaaaagaagccgaagaggtgtgtagacagaagaaaggaaaatcactttataaaataaaaccaagacatgactctggaattaaagcaaagataagcatgaaaacttgaacaatgaaaagcagaatgaaaatgagtcattgcaacgactttcacaaaattcagctgacctgagagtgggagggaaactaccgtcattctgctcatgtttcttcttgacctcttgcataatctttttgttttctagacagttcactaattgttgaattttactgtatattcatataaaaatgcaaacgtactagaccagtggagaatttgacaccttttctttttgtaaaagtttatggtattataccgatagaccaaaacagcatgtgtaagaggcagtatctgcactaattctcaacatgctaaacattaactacaattcactgttgtgagaatattcctcgtcacagcaaaaacactttcctttctactgacaaccagtcctccacatcacagcatttag

SEQ ID NO: 202552 - DNA, 6434 bp, Artificial Sequence
  derived and/or modified sequence
gccgcagccgcagccgcagcgacggcagccacgggagccgccgcgcattatgcaaagcggcggcagatgcgagcggggccagccgggcgcgcgtcggcctcccctcccagcggctccccccgccgccgcctgactctcccgggagactccctaggcccggacctggggccgaggagggccgggatggcctgagtgcccgcggcgcggcggcgcagcagcgggattgcaccatggggaaccaggatgggaagctgaagaggagcgcaggtgatgctttgcacgaaggcggcggtggcgccgaggatgcgctggggcccagggatgtggaagccacaaagaaggggagcgggggcaagaaggcgctaggcaagcacggcaaggggggagggggcggcggcggcggcggggagtcgggcaagaagaagagcaagtccgactccagagcctcggtgttttccaacctgcggatcaggaagaatctgtccaaggggaaaggcgccggcggctcccgcgaagatgtactggattcccaggccctgcagaccggggagctggacagcgctcactccctgctcaccaagactccagacctcagcctctcggcggacgaggccggcctgtcggataccgagtgtgcggacccttttgaggtgaccggtccagggggtcctgggcctgccgaggctagggtcgggggccggccgatcgccgaggatgtggaaactgcagcaggggcgcaggatggacaaaggaccagctcgggctcggacacggacatctatagcttccattcggctacggagcaagaggatttgctttcagacatccagcaggcgatccgcctgcagcagcagcagcagcagcagctccagctccagctccagcaacagcagcagcagcagcagctccagggcgccgaggagcctgcagcgccccccactgccgtctcccctcagcccggggccttcctgggcctggaccggttcctgctggggccgagcggcggggctggggaggccccgggcagtccggacaccgagcaggcgctgtccgcgctctccgacctgcccgagagcctggccgccgagccccgggagccccagcaaccgccgtcccccggcggcctcccggtctccgaggcgcccagtctcccggcagcgcaacccgcggccaaagactcgccctcctccacggctttcccatttcccgaggccgggccgggggaggaagcggccggagcccccgtgcgaggggctggggacacggatgaggagggtgaggaggatgcttttgaggatgcgccccggggctctccgggggaggagtgggccccggaggtgggagaggacgccccgcagaggctgggggaagagccggaggaggaggcgcaaggacctgacgcccccgcggccgcttccctgcccggcagccccgcgcctagccagcgctgtttcaagccctacccgctcatcaccccctgctacatcaagaccaccacccggcagctcagctcgcccaatcactccccgtctcagtcccctaatcagagccccaggatcaagaggcggccggaaccctccctgagccgagggtccagaactgccctggcctccgtagccgccccggccaagaagcaccgggccgacggcggccttgcggccggcctgagccgctcggctgactggacggaggagctaggcgcccgcacgccccgggtgggaggctccgcgcacctgctggagcgcggggtggcgagtgacagcggcggtggggtgtccccagcactggccgccaaggcgtctggggcccccgcggctgcggatggcttccagaacgtgttcacagggcgaacgctgttggagaagctgttcagccagcaggagaacgggcctccagaagaagcagagaagttttgctcccggatcattgccatgggtcttctccttccttttagtgattgcttcagggaaccgtgtaatcagaatgcccagacgaatgcagcttcgtttgatcaagatcaactttatacctgggctgcagttagtcaacccacacactcattggactattcagaagggcagtttcctaggcgagttccatccatggggccaccatccaaacctcccgatgaggaacacaggctcgaggatgctgaaacagaatctcaatctgctgtttcagaaactccccaaaaacgctcagatgctgtccagaaggaagttgttgacatgaagtctgagggacaggccactgtaattcagcagctggaacagactattgaggatctgagaaccaaaatagctgaactagagaggcagtatcctgccctggacacagaggtggccagtggtcatcaagggcttgagaatggagtgacagcctcaggcgatgtctgtctcgaagctctcaggttagaagaaaaggaagtacggcatcataggattttagaggcgaaatcgatacagacttcccccacggaagagggcggggtgctgacactgcctcctgtggatgggctgccagggcgtcctccatgcccccctggggctgaaagtggacctcagacaaagttctgttcagagatttctttgattgtgtctccaaggcgaatatcagtccagctcgacagccatcagcccacacagagcatctcacagcctccaccacctccatcccttctgtggtctgctgggcaaggacagcctgggtcacagccgccccattctatttctaccgagtttcaaaccagccacgaacactctgtttcctctgcctttaaaaacagctgtaacatcccatctccaccacctctgccttgcacagagtcctccagctccatgcctggcctgggcatggtgcctcccccacctccccctctccctggcatgacagtgcctactctgcccagtacagccattccccaacctcctcctctgcagggtacagaaatgctgccaccccctccccctcctcttcccggagcgggcatacctcctccgccgcctctacccggagcaggcatactccctctgccccctctacccggagcgggaatacctcctccgccccctctacccggagcggcaataccccctccgccccctcttcccggggcaggcataccccttcctccccctcttcccggagcaggaatacctcctccaccccctctacccggagcgggcataccccctcctcccccacttcccggagcgggcataccccctccgcccccacttcccggagcgggcataccccctcctccccctcttcccggagcgggcatacctcctccaccccctctacccggagcgggcataccccctccgcccccacttcccggagcgggcataccccctccgcccccacttcccggagcgggcataccccctcctccccctcttcccggagcgggcatacctcctccaccccctctacccggagcgggcataccccctccgcccccacttcccggagcgggcatacccccacctccccctctacccggagcgggcataccccctccgccccctctacccggagtgggcatacctcctccgccccctctacccggagcgggcataccccctcctccccctctacccggagcgggcataccccctcctccccctcttcccggagcgggcatacctcctccaccccctctacccagagtgggcataccccctccgcccccacttcccggagcgggcatacccccacctccccctctacccggagcgggcataccccctccgccccctctacctggagtgggaatacctcctccgccccctctacctggagtgggaatacctcctccgccccctctacctggtgctgggattcccccacctcctcccttgccaggtatggggattccacctgctccagctcccccactccctccacctgggacaggaatcccaccgccccctctgcttcctgtatcaggccctccactcctcccacaagttgggagtagcactttaccaaccccacaggtgtgtggatttcttcctcctccattgccaagtggcttgtttggattagggatgaatcaggacaaagggagtaggaagcagcccatagagccttgtcgaccaatgaagcctctttactggaccaggattcaactacatagtaaaagagactccagtacttcacttatttgggaaaaaattgaagagccatccatagattgtcatgaatttgaggaattattttctaaaactgctgtaaaggagagaaagaaacctatctctgatactatctcaaagacgaaggctaaacaagttgtcaagttattaagcaacaaaagatcacaagcagttggaatactaatgtctagccttcatttagatatgaaagacatacaacatgctgttgtgaacttggataattctgtggttgacctggagacccttcaagctctctatgagaatagagcacagtcagacgaactcgaaaaaatagaaaagcatggccgatcttccaaagacaaggaaaatgccaagtctctggacaaacctgaacagttcctttatgaactgtcactaatccccaacttttcagagcgagtcttttgcatcctgttccagtccacattttcagaaagcatttgctcaattcgtcgcaaactggaattactacagaaattgtgtgagacattaaaaaatggcccaggggttatgcaggttctaggtttggttcttgcctttggcaactacatgaatggaggaaataagactcgaggacaggcagatggctttggattagacattcttccaaaactgaaagatgtcaagagcagtgacaatagcagaagccttttgtcatatattgtttcgtattatctccgaaattttgatgaggatgctggaaaagaacagtgcctctttccactgccagaaccccaggacctttttcaggcctcacagatgaagtttgaagattttcaaaaagatctcagaaaactgaagaaagacttgaaagcctgtgaagttgaagcagggaaagtataccaggtctcctcaaaagagcatatgcagcctttcaaggaaaacatggaacaatttattattcaagccaaaattgaccaagaggcagaggaaaattcactgacagagactcataaatgctttttggagaccacggcatatttcttcatgaaaccaaaacttggagagaaggaggtgtccccaaatgctttcttcagtatctggcatgaattcagctctgactttaaagacttctggaagaaagagaacaaacttcttctacaagagagagtaaaagaagccgaagaggtgtgtagacagaagaaaggaaaatcactttataaaataaaaccaagacatgactctggaattaaagcaaagataagcatgaaaacttgaacaatgaaaagcagaatgaaaatgagtcattgcaacgactttcacaaaattcagctgacctgagagtgggagggaaactaccgtcattctgctcatgtttcttcttgacctcttgcataatctttttgttttctagacagttcactaattgttgaattttactgtatattcatataaaaatgcaaacgtactagaccagtggagaatttgacaccttttctttttgtaaaagtttatggtattataccgatagaccaaaacagcatgtgtaagaggcagtatctgcactaattctcaacatgctaaacattaactacaattcactgttgtgagaatattcctcgtcacagcaaaaacactttcctttctactgacaaccagtcctccacatcacagcatttagacatatgggtaaaatgttatttctagtgaattgtttgtatcagtttcatgtctaagtataaattttctattttaaaatttaagaaccgtttataatcagtgctttcccaactcttgggttgctctccataactatgtatttgtgaaagaaaatggtcattttttttactgaagtcatataatgacttgggtcagctcgtaatgcattgtgatggttttgtatgagctgggtgtttttttccattacttttaatgatcttcgttgcaagttatagttgtggataaaggggagaatttattgctcttgcaaaccaattatggaaagcaacttaagaaaaccaatgttctaaatcataattgtttgtatttatgtaaagtatggtctcttactttttagtttgtagtttaagtgcaaagaaacagtagtggttttttttctattgttttgtagtcttcctgtccccttcagtccctccagtgtgtatattaccattctccaatgaaataatagggcatttaacaaagatcgctatgtgcaatactgtatttagtgtttctatttcaatttttctaggatgttaatttatatgaaaataaaatgaataataaaagaataaagatacttgcaaaaga

SEQ ID NO: 202553 - DNA, 5169 bp, Artificial Sequence
  derived and/or modified sequence
atgggcaaccaggacggcaagctgaagagaagcgccggcgacgccctgcacgagggcggcggcggcgccgaggacgccctgggccccagagacgtggaggccaccaagaagggcagcggcggcaagaaggccctgggcaagcacggcaagggcggcggcggcggcggcggcggcggcgagagcggcaagaagaagagcaagagcgacagcagagccagcgtgttcagcaacctgagaatcagaaagaacctgagcaagggcaagggcgccggcggcagcagagaggacgtgctggacagccaggccctgcagaccggcgagctggacagcgcccacagcctgctgaccaagacccccgacctgagcctgagcgccgacgaggccggcctgagcgacaccgagtgcgccgaccccttcgaggtgaccggccccggcggccccggccccgccgaggccagagtgggcggcagacccatcgccgaggacgtggagaccgccgccggcgcccaggacggccagagaaccagcagcggcagcgacaccgacatctacagcttccacagcgccaccgagcaggaggacctgctgagcgacatccagcaggccatcagactgcagcagcagcagcagcagcagctgcagctgcagctgcagcagcagcagcagcagcagcagctgcagggcgccgaggagcccgccgccccccccaccgccgtgagcccccagcccggcgccttcctgggcctggacagattcctgctgggccccagcggcggcgccggcgaggcccccggcagccccgacaccgagcaggccctgagcgccctgagcgacctgcccgagagcctggccgccgagcccagagagccccagcagccccccagccccggcggcctgcccgtgagcgaggcccccagcctgcccgccgcccagcccgccgccaaggacagccccagcagcaccgccttccccttccccgaggccggccccggcgaggaggccgccggcgcccccgtgagaggcgccggcgacaccgacgaggagggcgaggaggacgccttcgaggacgcccccagaggcagccccggcgaggagtgggcccccgaggtgggcgaggacgccccccagagactgggcgaggagcccgaggaggaggcccagggccccgacgcccccgccgccgccagcctgcccggcagccccgcccccagccagagatgcttcaagccctaccccctgatcaccccctgctacatcaagaccaccaccagacagctgagcagccccaaccacagccccagccagagccccaaccagagccccagaatcaagagaagacccgagcccagcctgagcagaggcagcagaaccgccctggccagcgtggccgcccccgccaagaagcacagagccgacggcggcctggccgccggcctgagcagaagcgccgactggaccgaggagctgggcgccagaacccccagagtgggcggcagcgcccacctgctggagagaggcgtggccagcgacagcggcggcggcgtgagccccgccctggccgccaaggccagcggcgcccccgccgccgccgacggcttccagaacgtgttcaccggcagaaccctgctggagaagctgttcagccagcaggagaacggcccccccgaggaggccgagaagttctgcagcagaatcatcgccatgggcctgctgctgcccttcagcgactgcttcagagagccctgcaaccagaacgcccagaccaacgccgccagcttcgaccaggaccagctgtacacctgggccgccgtgagccagcccacccacagcctggactacagcgagggccagttccccagaagagtgcccagcatgggcccccccagcaagccccccgacgaggagcacagactggaggacgccgagaccgagagccagagcgccgtgagcgagaccccccagaagagaagcgacgccgtgcagaaggaggtggtggacatgaagagcgagggccaggccaccgtgatccagcagctggagcagaccatcgaggacctgagaaccaagatcgccgagctggagagacagtaccccgccctggacaccgaggtggccagcggccaccagggcctggagaacggcgtgaccgccagcggcgacgtgtgcctggaggccctgagactggaggagaaggaggtgagacaccacagaatcctggaggccaagagcatccagaccagccccaccgaggagggcggcgtgctgaccctgccccccgtggacggcctgcccggcagacccccctgcccccccggcgccgagagcggcccccagaccaagttctgcagcgagatcagcctgatcgtgagccccagaagaatcagcgtgcagctggacagccaccagcccacccagagcatcagccagcccccccccccccccagcctgctgtggagcgccggccagggccagcccggcagccagcccccccacagcatcagcaccgagttccagaccagccacgagcacagcgtgagcagcgccttcaagaacagctgcaacatccccagccccccccccctgccctgcaccgagagcagcagcagcatgcccggcctgggcatggtgccccccccccccccccccctgcccggcatgaccgtgcccaccctgcccagcaccgccatcccccagcccccccccctgcagggcaccgagatgctgccccccccccccccccccctgcccggcgccggcatccccccccccccccccctgcccggcgccggcatcctgcccctgccccccctgcccggcgccggcatccccccccccccccccctgcccggcgccgccatccccccccccccccccctgcccggcgccggcatccccctgcccccccccctgcccggcgccggcatccccccccccccccccctgcccggcgccggcatccccccccccccccccctgcccggcgccggcatccccccccccccccccctgcccggcgccggcatccccccccccccccccctgcccggcgccggcatccccccccccccccccctgcccggcgccggcatccccccccccccccccctgcccggcgccggcatccccccccccccccccctgcccggcgccggcatccccccccccccccccctgcccggcgccggcatccccccccccccccccctgcccggcgccggcatccccccccccccccccctgcccggcgccggcatccccccccccccccccctgcccggcgccggcatccccccccccccccccctgcccggcgtgggcatccccccccccccccccctgcccggcgccggcatccccccccccccccccctgcccggcgccggcatccccccccccccccccctgcccggcgccggcatccccccccccccccccctgcccagagtgggcatccccccccccccccccctgcccggcgccggcatccccccccccccccccctgcccggcgccggcatccccccccccccccccctgcccggcgtgggcatccccccccccccccccctgcccggcgtgggcatccccccccccccccccctgcccggcgccggcatccccccccccccccccctgcccggcatgggcatcccccccgcccccgccccccccctgcccccccccggcaccggcatcccccccccccccctgctgcccgtgagcggcccccccctgctgccccaggtgggcagcagcaccctgcccaccccccaggtgtgcggcttcctgcccccccccctgcccagcggcctgttcggcctgggcatgaaccaggacaagggcagcagaaagcagcccatcgagccctgcagacccatgaagcccctgtactggaccagaatccagctgcacagcaagagagacagcagcaccagcctgatctgggagaagatcgaggagcccagcatcgactgccacgagttcgaggagctgttcagcaagaccgccgtgaaggagagaaagaagcccatcagcgacaccatcagcaagaccaaggccaagcaggtggtgaagctgctgagcaacaagagaagccaggccgtgggcatcctgatgagcagcctgcacctggacatgaaggacatccagcacgccgtggtgaacctggacaacagcgtggtggacctggagaccctgcaggccctgtacgagaacagagcccagagcgacgagctggagaagatcgagaagcacggcagaagcagcaaggacaaggagaacgccaagagcctggacaagcccgagcagttcctgtacgagctgagcctgatccccaacttcagcgagagagtgttctgcatcctgttccagagcaccttcagcgagagcatctgcagcatcagaagaaagctggagctgctgcagaagctgtgcgagaccctgaagaacggccccggcgtgatgcaggtgctgggcctggtgctggccttcggcaactacatgaacggcggcaacaagaccagaggccaggccgacggcttcggcctggacatcctgcccaagctgaaggacgtgaagagcagcgacaacagcagaagcctgctgagctacatcgtgagctactacctgagaaacttcgacgaggacgccggcaaggagcagtgcctgttccccctgcccgagccccaggacctgttccaggccagccagatgaagttcgaggacttccagaaggacctgagaaagctgaagaaggacctgaaggcctgcgaggtggaggccggcaaggtgtaccaggtgagcagcaaggagcacatgcagcccttcaaggagaacatggagcagttcatcatccaggccaagatcgaccaggaggccgaggagaacagcctgaccgagacccacaagtgcttcctggagaccaccgcctacttcttcatgaagcccaagctgggcgagaaggaggtgagccccaacgccttcttcagcatctggcacgagttcagcagcgacttcaaggacttctggaagaaggagaacaagctgctgctgcaggagagagtgaaggaggccgaggaggtgtgcagacagaagaagggcaagagcctgtacaagatcaagcccagacacgacagcggcatcaaggccaagatcagcatgaagacctag

SEQ ID NO: 202554 - protein, 246 aa, Artificial Sequence
  derived and/or modified sequence
MNRFLLLMSLYLLGSARGTSSQPNELSGSIDHQTSVQQLPGEFFSLENPSDAEALYETSSGLNTLSEHGSSEHGSSKHTVAEHTSGEHAESEHASGEPAATEHAEGEHTVGEQPSGEQPSGEHLSGEQPLSELESGEQPSDEQPSGEHGSGEQPSGEQASGEQPSGTILNCYTCAYMNDQGKCLRGEGTCITQNSQQCMLKKIFEGGKLQFMVQGCENMCPSMNLFSHGTRMQIICCRNQSFCNKI

SEQ ID NO: 202555 - protein, 121 aa, Artificial Sequence
  derived and/or modified sequence
MNRFLLLMSLYLLGSARGTSSQPNELSGSIDHQTSVQQLPGTILNCYTCAYMNDQGKCLRGEGTCITQNSQQCMLKKIFEGGKLQFMVQGCENMCPSMNLFSHGTRMQIICCRNQSFCNKI

SEQ ID NO: 202556 - DNA, 741 bp, Artificial Sequence
  derived and/or modified sequence
atgaatcggtttctcctgttgatgtccctgtacctgctcggaagcgctagaggcactagctcccagcctaatgaactgagcggaagtattgaccatcagactagcgtgcagcagctgcctggagagtttttttctctcgagaatccttccgatgccgaggctctctacgagacttcttcgggcctcaacaccctttctgaacacggaagctcagagcatgggagttccaagcacacagtggctgaacacaccagcggcgagcatgccgaaagcgaacatgccagtggagagcctgccgctaccgagcatgctgagggcgaacacaccgtgggcgagcaaccttccggcgagcagccaagtggagaacatttaagcggcgagcagcccctgtctgagctggagtctggagagcaaccttctgacgagcagccatctggtgagcatggcagcggggagcaaccatcaggcgaacaggcgtctggtgagcaaccctcaggcactatcctcaactgctacacatgcgcatacatgaacgatcagggcaaatgtctgagaggcgaggggacgtgtatcacgcagaactcccagcagtgtatgctgaaaaaaattttcgaaggcgggaaacttcaatttatggtgcaggggtgcgagaacatgtgtccctccatgaatttgttttcccacggcacgaggatgcaaatcatttgctgcaggaaccagagtttctgtaataaaatctag

SEQ ID NO: 202557 - DNA, 366 bp, Artificial Sequence
  derived and/or modified sequence
atgaacagatttctcctgttgatgtctttgtacctgctaggatccgcaagggggactagcagccaaccaaacgagctgagtggtagcattgatcatcagacgtctgtccagcagttacccggcaccatcctgaattgctatacatgcgcctacatgaacgaccaggggaaatgcctgcgaggagagggcacatgtatcacgcaaaacagtcagcagtgcatgctgaaaaaaatttttgagggtggcaagctacagttcatggtgcagggatgcgagaacatgtgcccttccatgaacctgttttcccacgggaccaggatgcaaattatctgttgccggaaccagtctttctgtaataagatttag

SEQ ID NO: 202558 - DNA, 741 bp, Artificial Sequence
  derived and/or modified sequence
atgaaccgattcctgctgttaatgagcttatatctgttggggtctgctagaggaacttcctcccagcctaatgagcttagcggtagtatagaccaccaaacatctgtccagcagctgccgggcgagttcttttctttggaaaatcctagcgatgccgaggcgttgtatgagacttccagcggacttaataccctatccgaacatgggtcctctgaacacgggtcatcaaaacacacagtggccgagcatacctccggagagcatgctgagtctgagcacgcttctggagaacccgccgccaccgaacatgcggagggggagcataccgttggagagcaaccctctggggagcagccttctggggagcatttgtcgggtgaacaacccttaagtgagctggagagtggagagcagcccagcgacgagcagccatcaggtgaacacggatcaggggagcagccttccggtgaacaagcctctggggaacaaccatccggaaccattttgaattgttatacatgtgcctacatgaatgatcagggaaagtgtttacgtggagaggggacatgtattacgcagaacagtcagcagtgcatgttaaagaagatctttgaaggcgggaagctccagttcatggtacaagggtgcgagaacatgtgcccatccatgaatcttttcagccatgggacccggatgcagatcatatgttgccggaatcaatcattctgtaataaaatttag

SEQ ID NO: 202559 - DNA, 741 bp, Artificial Sequence
  derived and/or modified sequence
atgaaccgcttcctgctgctgatgagcctgtacctgctgggcagcgcccggggcaccagcagccagcccaatgagctgagcggcagcattgaccaccagacctctgtgcagcagctgcccggggagttcttcagcctggagaaccccagtgatgctgaggccctgtatgagaccagcagcggcctgaacaccctgtctgagcacggcagcagcgagcacggcagcagcaagcacacagtggccgagcacaccagcggggagcacgccgagagcgagcacgccagcggggagcctgctgccacagaacatgctgagggggagcacacagtgggggagcagcccagcggggagcagcccagcggggagcacctgtctggagagcagcccctgtctgagctggagagcggggagcagcccagtgatgagcagcccagcggggagcacggcagcggggagcagcccagcggggagcaggccagcggggagcagcccagcggcaccatcctgaactgctacacctgtgcctacatgaatgaccagggcaagtgcctgcggggggagggcacctgcatcacccagaacagccagcagtgcatgctgaagaagatctttgagggcggcaagctgcagttcatggtgcagggctgtgagaacatgtgccccagcatgaacctcttcagccacggcaccaggatgcagatcatctgctgcaggaaccagagcttctgcaacaagatctag

SEQ ID NO: 202560 - DNA, 366 bp, Artificial Sequence
  derived and/or modified sequence
atgaaccgcttcctgctgctgatgagcctgtacctgctgggcagcgcccggggcaccagcagccagcccaatgagctgagcggcagcattgaccaccagacctctgtgcagcagctgcccggcaccatcctgaactgctacacctgtgcctacatgaatgaccagggcaagtgcctgcggggggagggcacctgcatcacccagaacagccagcagtgcatgctgaagaagatctttgaaggaggcaagctgcagttcatggtgcagggctgtgagaacatgtgccccagcatgaacctcttcagccacggcaccaggatgcagatcatctgctgcaggaaccagagcttctgcaacaagatctag

SEQ ID NO: 202561 - DNA, 741 bp, Artificial Sequence
  derived and/or modified sequence
atgaaccggttcctgctgctgatgagcctgtacctgctgggcagcgcgagaggcacgagttctcaacccaacgaactgagcggatcaatcgatcatcagaccagcgtccaacagctgcctggggagttttttagtctagagaatccctctgacgccgaggccctttatgaaacaagcagtggcctcaatacgctgagcgagcacggatcgtccgagcacgggtcctcaaaacacaccgtggccgagcacaccagcggggagcacgctgaatcagagcatgctagcggggagccagccgctaccgagcacgctgagggagaacacaccgtgggggagcaacctagcggtgaacaaccaagcggagaacacctctccggggagcaaccactcagcgaacttgagtctggcgaacagccttccgatgagcagcctagcggcgagcacggctctggggaacagccgagtggggagcaggcatcgggtgaacagccttccggcacgattctcaattgctatacttgtgcttatatgaatgaccaagggaaatgccttcggggggagggcacatgtattactcagaacagtcagcaatgtatgctgaagaaaatttttgaaggtggtaagcttcagttcatggttcaaggctgtgaaaacatgtgtcccagcatgaacctctttagccacggaacacggatgcagatcatttgctgccgcaaccagagcttctgcaacaagatctag

SEQ ID NO: 202562 - DNA, 366 bp, Artificial Sequence
  derived and/or modified sequence
atgaaccggttcctgctgctgatgagcctgtacctgctgggcagcgctcggggcacatcctcacagcccaacgagctgtctgggtccatcgaccaccagacctcagtccaacaactcccagggaccatcctgaactgttacacgtgtgcttacatgaatgaccagggcaagtgcttacgcggagagggtacttgtattacccaaaatagtcagcaatgcatgcttaaaaagatcttcgagggaggaaaactccagtttatggtccagggatgtgaaaacatgtgcccatctatgaatctcttttcccatggaacacgaatgcagattatctgctgtcgcaatcaatctttctgcaacaagatctag

SEQ ID NO: 202563 - DNA, 741 bp, Artificial Sequence
  derived and/or modified sequence
atgaaccggttcctgctgctgatgagcctgtacctgctgggcagcgcgagagggacctctagtcagccgaatgaactttcaggctcaatagaccaccagacatcagttcagcaactaccaggagagttcttctcactggaaaacccgtccgacgcagaggccttatatgagacttcaagcggcctgaataccctgtcagagcacggcagctccgagcatggctcctccaagcatacagtggcggaacacacatctggtgaacacgctgaaagcgagcacgcaagcggagagcccgccgctacagagcacgccgaaggcgagcataccgtgggggagcagccaagcggggaacagcctagcggcgagcacctgagcggcgagcaacctcttagcgaactggagtcaggagaacagccaagtgatgaacagccctctggggagcacggctctggggagcagccctcgggtgaacaggcttccggagagcagcccagtggaacgatactgaactgttacacctgtgcctatatgaatgaccagggcaagtgtttacggggggaaggaacctgcataacacagaattctcagcaatgtatgctcaaaaaaatttttgaaggcggcaagcttcagttcatggtgcagggatgtgaaaacatgtgtccttccatgaatctgtttagccatggcacaaggatgcaaattatctgctgccgaaatcagagtttttgtaacaaaatttag

SEQ ID NO: 202564 - DNA, 741 bp, Artificial Sequence
  derived and/or modified sequence
atgaaccggtttctcttactgatgtccctctatcttctcggatctgctcgtggcacttcctcacagccaaatgagctgagcggcagtattgatcaccagacatctgtgcagcagttgccgggagagttcttttcattagagaatccctctgatgccgaagcactttatgagacttctagcggcctcaataccctgtccgagcacggttcctctgaacacggttcaagtaagcacacagtggctgagcatacaagcggggagcacgccgaatcggagcacgccagtggcgaacccgctgctactgagcacgcagaaggggagcacaccgttggagagcagcccagtggcgagcagccgtctggggaacacttgagcggcgagcagccactcagcgagctggagagtggtgagcagcctagtgacgagcaaccgtctggggagcatggtagtggagaacagccatcgggtgaacaggccagtggcgaacagcccagcgggactatccttaattgctacacctgtgcctacatgaacgatcaaggtaaatgcttgcggggagaaggcacctgtataacccagaactcccagcagtgcatgttgaagaagatatttgaaggcggaaagctgcagttcatggtgcaagggtgtgaaaacatgtgtcccagcatgaacctcttctcccacgggaccagaatgcaaataatctgttgccgtaaccaatctttttgcaacaagatttag

SEQ ID NO: 202565 - DNA, 366 bp, Artificial Sequence
  derived and/or modified sequence
atgaaccggttcctgctcctcatgagtctttatttactggggagcgcacgaggaacctcctcccagcctaacgaactctcaggctctattgaccatcaaacatctgttcagcaactccccggtacaatcctcaattgctacacctgtgcctatatgaacgaccagggtaagtgtttgcgcggtgaaggtacctgtataactcagaattcacagcagtgcatgctcaaaaaaatcttcgaagggggaaagctacagtttatggtccaggggtgcgaaaacatgtgtccctcaatgaacttgttctcccatgggacacggatgcagattatctgttgtcgaaatcagtcattttgtaacaagatttag

SEQ ID NO: 202566 - DNA, 741 bp, Artificial Sequence
  derived and/or modified sequence
atgaacaggttcctcctgctgatgagcttgtatcttctggggtcagcccgagggacaagcagccagccaaatgagctgtctggatcgatcgaccaccagacttccgttcagcagctacctggggagttcttctcattggaaaacccttcagatgcagaggccctctacgaaacaagcagcggcctgaataccctcagcgagcatggaagctcggaacatggcagcagtaaacacacagtcgctgaacacacctccggagagcatgcagagtccgaacacgcctccggcgaacccgctgccacagaacacgcagagggggagcacacagttggtgaacagccaagcggtgagcagccctcgggagagcatctctcaggggaacagcctttgagcgaattagagtcgggtgaacagccttctgacgaacaacctagcggcgagcatggctctggcgaacagccctccggggagcaggcgagtggagagcaaccaagcggtactatcttgaactgctacacatgcgcctatatgaacgaccaggggaagtgtctcagaggcgaaggcacatgtatcacccaaaatagtcagcaatgcatgctaaagaagatttttgaaggcggaaagttgcagttcatggttcaaggatgtgagaatatgtgcccctccatgaatctgttctcgcatggcacacggatgcaaataatttgctgtaggaaccagagcttttgcaataaaatctag

SEQ ID NO: 202567 - DNA, 1042 bp, Artificial Sequence
  derived and/or modified sequence
ctgtgaagaagctgtggcccacactggggtcccctcttttcctaaatccagatgaacaggtttctcttgctaatgagtctttatctgcttggatctgccagaggaacatcaagtcagcctaatgagctttctggctccatagatcatcaaacttcagttcagcaacttccaggtgagttcttttcacttgaaaacccttctgatgctgaggctttatatgagacttcttcaggcctgaacactttaagtgagcatggttccagtgagcatggttcaagcaagcacactgtggccgagcacacttctggagaacatgctgagagtgagcatgcttcaggtgagcccgctgcgactgaacatgctgaaggtgagcatactgtaggtgagcagccttcaggagaacagccttcaggtgaacacctctccggagaacagcctttgagtgagcttgagtcaggtgaacagccttcagatgaacagccttcaggtgaacatggctccggtgaacagccttctggtgagcaggcctcgggtgaacagccttcaggcacaatattaaattgctacacatgtgcttatatgaatgatcaaggaaaatgtcttcgtggagagggaacctgcatcactcagaattcccagcagtgcatgttaaagaagatctttgaaggtggaaaactccaattcatggttcaagggtgtgagaacatgtgcccatctatgaacctcttctcccatggaacgaggatgcaaattatatgctgtcgaaatcaatctttctgcaataagatctagaagcctgggcccttgcttgttttgactcaggcagtaaaaagcctccatcactctatttggctcattttatatttagttccttccccagtcaacaactgaccacatctgcctctgcctgagcattaggatgctcaaacatcctatctttcttcttctattcatgcttttatccattcttctctgtcctgtcttccctgctccaactctttctctcaatattcctgatttttttttcaataaatttcacatg

SEQ ID NO: 202568 - DNA, 891 bp, Artificial Sequence
  derived and/or modified sequence
gccccaacacactaccctgcacacagaaaataatcattggtcttcactagtgaaataagcagtgggttgctaagggccaacttgcctgaacaggctacacaagaacctcagagcccaacccattgtgaagaaacatgggttacttctgaggttctagaattcccagaagctctgcttcagcactggaagcttttgctcgcagtttgcttcatagctctgtgaagaagctgtggcccacactggggtcccctcttttcctaaatccagatgaacaggtttctcttgctaatgagtctttatctgcttggatctgccagaggaacatcaagtcagcctaatgagctttctggctccatagatcatcaaacttcagttcagcaacttccaggcacaatattaaattgctacacatgtgcttatatgaatgatcaaggaaaatgtcttcgtggagagggaacctgcatcactcagaattcccagcagtgcatgttaaagaagatctttgaaggtggaaaactccaattcatggttcaagggtgtgagaacatgtgcccatctatgaacctcttctcccatggaacgaggatgcaaattatatgctgtcgaaatcaatctttctgcaataagatctagaagcctgggcccttgcttgttttgactcaggcagtaaaaagcctccatcactctatttggctcattttatatttagttccttccccagtcaacaactgaccacatctgcctctgcctgagcattaggatgctcaaacatcctatctttcttcttctattcatgcttttatccattcttctctgtcctgtcttccctgctccaactctttctctcaatattcctgatttttttttcaataaatttcacatggttaaagc

SEQ ID NO: 202569 - DNA, 1266 bp, Artificial Sequence
  derived and/or modified sequence
gccccaacacactaccctgcacacagaaaataatcattggtcttcactagtgaaataagcagtgggttgctaagggccaacttgcctgaacaggctacacaagaacctcagagcccaacccattgtgaagaaacatgggttacttctgaggttctagaattcccagaagctctgcttcagcactggaagcttttgctcgcagtttgcttcatagctctgtgaagaagctgtggcccacactggggtcccctcttttcctaaatccagatgaacaggtttctcttgctaatgagtctttatctgcttggatctgccagaggaacatcaagtcagcctaatgagctttctggctccatagatcatcaaacttcagttcagcaacttccaggtgagttcttttcacttgaaaacccttctgatgctgaggctttatatgagacttcttcaggcctgaacactttaagtgagcatggttccagtgagcatggttcaagcaagcacactgtggccgagcacacttctggagaacatgctgagagtgagcatgcttcaggtgagcccgctgcgactgaacatgctgaaggtgagcatactgtaggtgagcagccttcaggagaacagccttcaggtgaacacctctccggagaacagcctttgagtgagcttgagtcaggtgaacagccttcagatgaacagccttcaggtgaacatggctccggtgaacagccttctggtgagcaggcctcgggtgaacagccttcaggcacaatattaaattgctacacatgtgcttatatgaatgatcaaggaaaatgtcttcgtggagagggaacctgcatcactcagaattcccagcagtgcatgttaaagaagatctttgaaggtggaaaactccaattcatggttcaagggtgtgagaacatgtgcccatctatgaacctcttctcccatggaacgaggatgcaaattatatgctgtcgaaatcaatctttctgcaataagatctagaagcctgggcccttgcttgttttgactcaggcagtaaaaagcctccatcactctatttggctcattttatatttagttccttccccagtcaacaactgaccacatctgcctctgcctgagcattaggatgctcaaacatcctatctttcttcttctattcatgcttttatccattcttctctgtcctgtcttccctgctccaactctttctctcaatattcctgatttttttttcaataaatttcacatggttaaagc

SEQ ID NO: 202570 - DNA, 741 bp, Artificial Sequence
  derived and/or modified sequence
atgaacagattcctgctgctgatgagcctgtacctgctgggcagcgccagaggcaccagcagccagcccaacgagctgagcggcagcatcgaccaccagaccagcgtgcagcagctgcccggcgagttcttcagcctggagaaccccagcgacgccgaggccctgtacgagaccagcagcggcctgaacaccctgagcgagcacggcagcagcgagcacggcagcagcaagcacaccgtggccgagcacaccagcggcgagcacgccgagagcgagcacgccagcggcgagcccgccgccaccgagcacgccgagggcgagcacaccgtgggcgagcagcccagcggcgagcagcccagcggcgagcacctgagcggcgagcagcccctgagcgagctggagagcggcgagcagcccagcgacgagcagcccagcggcgagcacggcagcggcgagcagcccagcggcgagcaggccagcggcgagcagcccagcggcaccatcctgaactgctacacctgcgcctacatgaacgaccagggcaagtgcctgagaggcgagggcacctgcatcacccagaacagccagcagtgcatgctgaagaagatcttcgagggcggcaagctgcagttcatggtgcagggctgcgagaacatgtgccccagcatgaacctgttcagccacggcaccagaatgcagatcatctgctgcagaaaccagagcttctgcaacaagatctag

SEQ ID NO: 202571 - DNA, 366 bp, Artificial Sequence
  derived and/or modified sequence
atgaacagattcctgctgctgatgagcctgtacctgctgggcagcgccagaggcaccagcagccagcccaacgagctgagcggcagcatcgaccaccagaccagcgtgcagcagctgcccggcaccatcctgaactgctacacctgcgcctacatgaacgaccagggcaagtgcctgagaggcgagggcacctgcatcacccagaacagccagcagtgcatgctgaagaagatcttcgagggcggcaagctgcagttcatggtgcagggctgcgagaacatgtgccccagcatgaacctgttcagccacggcaccagaatgcagatcatctgctgcagaaaccagagcttctgcaacaagatctag

SEQ ID NO: 202572 - protein, 213 aa, Artificial Sequence
  derived and/or modified sequence
MRPGTGQGGLEAPGEPGPNLRQRWPLLLLGLAVVTHGLLRPTAASQSRALGPGAPGGSSRSSLRSRWGRFLLQRGSWTGPRCWPRGFQSKHNSVTHVFGSGTQLTVLSQPKATPSVTLFPPSSEELQANKATLVCLMNDFYPGILTVTWKADGTPITQGVEMTTPSKQSNNKYAASSYLSLTPEQWRSRRSYSCQVMHEGSTVEKTVAPAECS

SEQ ID NO: 202573 - DNA, 642 bp, Artificial Sequence
  derived and/or modified sequence
atgagaccaggaaccggccagggggggctcgaggcccctggcgagccaggcccaaatctgcggcagagatggcctctgctgctcctgggcttagccgtggtaacccacggcctactgcgccctactgccgcaagccagagcagagccctcgggcccggcgcacctggcggaagctcaaggtcctccttgcgatctagatggggaaggtttctcctacagcgcggctcgtggacaggtcctcgttgttggcctcgtgggttccagtcgaagcataattctgtcacccacgttttcggtagcggcacccagctgactgtactgtcccagcctaaggccactccatctgtcactctctttccacctagttcggaagaacttcaagccaacaaagctacattggtctgtctgatgaatgatttctaccccgggattctcactgtcacctggaaggcggacgggactcctattacgcagggtgtggaaatgaccacgccaagcaagcaatccaataacaaatatgcggcctccagctacctctccctgaccccagagcagtggagaagtcgccggtcttatagctgtcaagtcatgcatgaaggcagtacagtggaaaaaactgtggccccagcagaatgtagctag

SEQ ID NO: 202574 - DNA, 901 bp, Artificial Sequence
  derived and/or modified sequence
ggccacatggactggggtgcaatgggacagctgctgccagcgagagggaccagggcaccactctctagggagcccacactgcaagtcaggccacaaggacctctgaccctgagggccgatgaggccagggacaggccaggggggccttgaggcccctggtgagccaggccccaacctcaggcagcgctggcccctgctgctgctgggtctggccgtggtaacccatggcctgctgcgcccaacagctgcatcgcagagcagggccctgggccctggagcccctggaggaagcagccggtccagcctgaggagccggtggggcaggttcctgctccagcgcggctcctggactggccccaggtgctggccccgggggtttcaatccaagcataactcagtgacgcatgtgtttggcagcgggacccagctcaccgttttaagtcagcccaaggccaccccctcggtcactctgttcccgccgtcctctgaggagctccaagccaacaaggctacactggtgtgtctcatgaatgacttttatccgggaatcttgacggtgacctggaaggcagatggtacccccatcacccagggcgtggagatgaccacgccctccaaacagagcaacaacaagtacgcggccagcagctacctgagcctgacgcccgagcagtggaggtcccgcagaagctacagctgccaggtcatgcacgaagggagcaccgtggagaagacggtggcccctgcagaatgttcataggttcccagccccgaccccacccaaaggggcctggagctgcaggatcccaggggaagggtctctctctgcatcccaagccatccagcccttctccctgtacccagtaaaccctaaataaataccctctttgtcaaccagaaa

SEQ ID NO: 202575 - DNA, 716 bp, Artificial Sequence
  derived and/or modified sequence
gagcccacactgcaagtcaggccacaaggacctctgaccctgagggccgatgaggccagggacaggccaggggggccttgaggcccctggtgagccaggccccaacctcaggcagcgctggcccctgctgctgctgggtctggccgtggtaacccatggcctgctgcgcccaacagctgcatcgcagagcagggccctgggccctggagcccctggaggaagcagccggtccagcctgaggagccggtggggcaggtcagcccaaggccaccccctcggtcactctgttcccgccgtcctctgaggagctccaagccaacaaggctacactggtgtgtctcatgaatgacttttatccgggaatcttgacggtgacctggaaggcagatggtacccccatcacccagggcgtggagatgaccacgccctccaaacagagcaacaacaagtacgcggccagcagctacctgagcctgacgcccgagcagtggaggtcccgcagaagctacagctgccaggtcatgcacgaagggagcaccgtggagaagacggtggcccctgcagaatgttcataggttcccagccccgaccccacccaaaggggcctggagctgcaggatcccaggggaagggtctctctctgcatcccaagccatccagcccttctccctgtacccagtaaaccctaaataaataccctctttgtcaaccagaaa

SEQ ID NO: 202576 - DNA, 642 bp, Artificial Sequence
  derived and/or modified sequence
atgaggcctggcaccggccagggcggcctggaggcccctggagagcccggccccaacctgcggcagcgctggcccctgctgctgctgggcctggccgtggtgacccacggcctgctgcggcccacagctgccagccagagccgggccctgggccctggggcccctgggggcagcagccgcagcagcctgcggagccgctggggccgcttcctgctgcagaggggctcctggacaggcccccgctgctggccccggggcttccagagcaagcacaacagcgtgacccacgtgtttggcagcggcacccagctgactgtgctgagccagcccaaggccaccccatctgtgaccctcttcccccccagcagcgaggagctgcaggccaacaaggccaccctggtgtgcctgatgaatgacttctacccaggcatcctgactgtgacctggaaggcagatggcacccccatcacccagggcgtggagatgaccacccccagcaagcagagcaacaacaagtatgctgccagcagctacctgagcctgaccccagagcagtggaggagcagaagaagctacagctgccaggtgatgcatgagggcagcacagtggagaagacagtggccccagcagaatgttcctag

SEQ ID NO: 202577 - DNA, 642 bp, Artificial Sequence
  derived and/or modified sequence
atgcggcccggcaccggccagggcggcctggaggcccccggcgagcctggccccaacctgaggcagagatggcccctgctcttgctgggactagcagtcgtcacccacgggcttcttcgccccactgcagcgtcccagagtcgggccttgggccccggcgcacctggtggctcatcaagaagttcacttcgctcgcggtggggacgattcttgttgcagcgtggttcctggacaggccctaggtgctggccccggggatttcagagtaagcacaactctgtaacccacgtgtttggttctggcacccaactgaccgttctctcacagcctaaggcaacaccatcagtcactctgttcccgcccagtagcgaggaacttcaagccaacaaggctacgctcgtctgcttgatgaatgacttctaccccggaatcctaacagtgacctggaaggcagacgggactcctatcacacagggcgtagagatgacgaccccctctaagcagagcaataacaagtatgctgcttcatcatatctctcactcacacctgagcagtggcggtcacggcgatcttactcctgccaagtgatgcacgagggatctaccgtggaaaagacggtggccccagcagagtgttcctag

SEQ ID NO: 202578 - DNA, 642 bp, Artificial Sequence
  derived and/or modified sequence
atgcgtcctggaaccgggcagggtggccttgaggcccctggagaacccggaccgaatctcaggcagcgttggccccttttattactggggctggccgtggttacccacggtctgctacggccaaccgccgcatcccagtctagggccctgggcccaggagctcccggaggcagctctcgaagctcactacgaagtaggtggggtaggttcctgttacagcgcggatcctggaccggtcccaggtgctggccccgtggattccagtctaaacataattctgtgacgcatgtgttcggatctggcacccagttgactgtgctttcacagccaaaggccacaccatccgtcactctatttccaccatcctcagaagagcttcaggctaataaggccaccctcgtgtgcctgatgaatgacttttatcccggtatactgactgtcacctggaaagcagacggcacgcctatcacccagggggtggagatgaccaccccttcaaaacaatcgaacaacaagtatgccgcttcatcttacctctccttgactcccgaacagtggcgttctcgtaggtcctactcatgccaggtgatgcatgaggggagcacggtggaaaaaacagtcgcgcctgctgagtgctcctag

SEQ ID NO: 202579 - DNA, 642 bp, Artificial Sequence
  derived and/or modified sequence
atgagacccggcaccggccagggcggcctggaggcccccggcgagcccggccccaacctgagacagagatggcccctgctgctgctgggcctggccgtggtgacccacggcctgctgagacccaccgccgccagccagagcagagccctgggccccggcgcccccggcggcagcagcagaagcagcctgagaagcagatggggcagattcctgctgcagagaggcagctggaccggccccagatgctggcccagaggcttccagagcaagcacaacagcgtgacccacgtgttcggcagcggcacccagctgaccgtgctgagccagcccaaggccacccccagcgtgaccctgttcccccccagcagcgaggagctgcaggccaacaaggccaccctggtgtgcctgatgaacgacttctaccccggcatcctgaccgtgacctggaaggccgacggcacccccatcacccagggcgtggagatgaccacccccagcaagcagagcaacaacaagtacgccgccagcagctacctgagcctgacccccgagcagtggagaagcagaagaagctacagctgccaggtgatgcacgagggcagcaccgtggagaagaccgtggcccccgccgagtgcagctag

SEQ ID NO: 202580 - protein, 210 aa, Artificial Sequence
  derived and/or modified sequence
MNRFLLLMSLYLLGSARGTSSQPNELSGSIDHQTSVQQLPGEPAATEHAEGEHTVGEQPSGEQPSGEHLSGEQPLSELESGEQPSDEQPSGEHGSGEQPSGEQASGEQPSGEHASGEQASGAPISSTSTGTILNCYTCAYMNDQGKCLRGEGTCITQNSQQCMLKKIFEGGKLQFMVQGCENMCPSMNLFSHGTRMQIICCRNQSFCNKI

SEQ ID NO: 202581 - protein, 165 aa, Artificial Sequence [sequence omitted]

SEQ ID NO: 202582 - DNA, 633 bp, Artificial Sequence
  derived and/or modified sequence
atgaaccgcttcctgttgttgatgagcctatatctcctgggctcggcaagaggcacctcctcccaaccaaatgaactgtcaggttctattgatcatcaaacgagcgtccagcagctcccaggagagccagccgccacagagcacgcagagggcgagcataccgtgggggagcagcctagtggcgagcagcctagcggtgaacatttgtcaggtgagcagcctctgagcgagctggaatccggagaacagccatctgatgaacagccaagcggcgagcacgggtcaggagagcaacccagcggcgaacaggccagtggagaacagcccagcggtgaacatgcctctggtgaacaggcgagcggcgcccccatctcctcaacttccacaggtaccatcctgaactgttatacttgtgcctacatgaacgaccaaggaaaatgcctgaggggagagggaacttgcatcacccagaacagccagcagtgcatgctgaagaagattttcgagggtggaaaactccaattcatggtgcagggttgcgaaaatatgtgtccctccatgaatctattcagtcatgggactcgtatgcagatcatctgctgtcgtaatcagtcgttttgcaacaaaatctag

SEQ ID NO: 202583 - DNA, 498 bp, Artificial Sequence
  derived and/or modified sequence
atgaacagatttctgctgctgatgtccctgtacctgctcggcagtgctaggggtacttcctcacagcccaacgagttgtccggttcaatcgatcatcagacctccgtgcagcagcttcccggggaaccagccgccacagagcacgcggaaggagagcacaccgtgggggagcaaccttccggcgaacagccatcgggagagcacgcctccggtgagcaagcttcaggtgctcccatatccagcacgagcacaggaacgatcctgaactgttacacttgcgcttacatgaatgaccaggggaagtgtctgcggggtgaagggacttgtataacccaaaattcccagcaatgcatgctcaagaagatatttgaaggagggaaactacaattcatggttcagggctgcgaaaatatgtgtccctcgatgaacctattttcccatggcaccaggatgcagatcatatgctgcaggaaccagtcgttttgtaacaaaatttag

SEQ ID NO: 202584 - DNA, 633 bp, Artificial Sequence
  derived and/or modified sequence
atgaaccgctttctgctgctcatgtccttgtaccttctgggatccgcaagggggacttcgagtcaaccaaacgagctgtccgggagtatcgaccatcaaacgagcgttcaacagctgccaggagaaccggcggccaccgagcacgccgagggcgagcacaccgtcggcgaacagccatctggagaacaaccatctggagagcatttgtccggggaacaacctttgagcgaactggagtcaggagaacagcccagtgacgagcaaccgagcggagaacatgggagtggggagcaaccatcaggcgaacaggcatccggggaacagccctcaggcgaacacgcctcaggggagcaggcatccggagccccaatttcttctaccagtaccggcaccatcctcaattgctatacctgcgcttacatgaatgaccaaggaaagtgtctacggggtgagggaacctgtatcactcagaatagccaacagtgtatgctgaagaagatcttcgagggcggaaaacttcaatttatggtacagggttgtgaaaacatgtgtccgtcaatgaatctgttttcccatggtacacggatgcagatcatttgttgccgcaaccaaagcttttgcaataaaatctag

SEQ ID NO: 202585 - DNA, 633 bp, Artificial Sequence
  derived and/or modified sequence
atgaaccgcttcctgctgctgatgagcctgtacctgctgggcagcgcccggggcaccagcagccagcccaatgagctgagcggcagcattgaccaccagacctctgtgcagcagctgcccggggagcctgctgccacagagcacgccgagggggagcacacagtgggggagcagcccagcggggagcagcccagcggggagcacctgagcggggagcagcccctgtctgagctggagagcggggagcagcccagtgatgagcagcccagcggggagcacggcagcggggagcagcccagcggggagcaggccagcggggagcagcccagcggggagcacgccagcggggagcaggccagcggggcccccatcagcagcaccagcacaggcaccatcctgaactgctacacctgtgcctacatgaatgaccagggcaagtgcctgcggggggagggcacctgcatcacccagaacagccagcagtgcatgctgaagaagatctttgagggcggcaagctgcagttcatggtgcagggctgtgagaacatgtgccccagcatgaacctcttcagccacggcaccaggatgcagatcatctgctgcaggaaccagagcttctgcaacaagatctag

SEQ ID NO: 202586 - DNA, 498 bp, Artificial Sequence
  derived and/or modified sequence
atgaaccgcttcctgctgctgatgagcctgtacctgctgggcagcgcccggggcaccagcagccagcccaatgagctgagcggcagcattgaccaccagacctctgtgcagcagctgcccggggagcctgctgccacagagcacgccgagggggagcacacagtgggggagcagcccagcggggagcagcccagcggggagcacgccagcggggagcaggccagcggggcccccatcagcagcaccagcacaggcaccatcctgaactgctacacctgtgcctacatgaatgaccagggcaagtgcctgcggggggagggcacctgcatcacccagaacagccagcagtgcatgctgaagaagatctttgaaggaggcaagctgcagttcatggtgcagggctgtgagaacatgtgccccagcatgaacctcttcagccacggcaccaggatgcagatcatctgctgcaggaaccagagcttctgcaacaagatctag

SEQ ID NO: 202587 - DNA, 633 bp, Artificial Sequence
  derived and/or modified sequence
atgaaccggttcctgctgctgatgagcctgtacctgctgggcagcgctaggggaactagttcacagcccaacgagctcagtgggtctatcgaccaccagacaagcgtccagcagcttcctggggaaccagctgcaacagaacatgccgagggcgagcacacagtcggagagcaaccatcaggagagcagccgagtggcgaacatttgagtggagagcagccactgtctgaactggaatctggagagcagccctccgacgaacagccatctggggaacacggttcaggcgagcagccatcaggcgagcaggcttccggcgaacagccctctggggagcatgcctccggcgagcaggcctcgggcgcaccaatctcgagcactagtaccggtactattctgaactgttacacttgtgcatatatgaatgaccaggggaaatgtcttcgaggggaggggacctgtatcactcagaactctcagcagtgcatgctgaagaagatattcgagggagggaaactgcagttcatggtgcaaggatgcgaaaacatgtgtcctagcatgaatctattttcccatgggaccaggatgcagataatctgctgtaggaaccagtccttctgtaataagatttag

SEQ ID NO: 202588 - DNA, 498 bp, Artificial Sequence
  derived and/or modified sequence
atgaaccggttcctgctgctgatgagcctgtacctgctgggcagcgcacgcggcactagttcacagcctaacgagctctctggtagcatcgatcatcagacttccgtgcagcagttgccaggagagccagcagcgaccgagcacgccgaaggggagcatacagtgggggaacagccttctggtgagcagccttctggcgagcacgcctccggggaacaggcgagtggggctcctatcagctcgactagtactggaacaatattgaactgctatacttgtgcctacatgaacgaccaaggtaaatgtcttcgcggagaaggaacgtgcattactcaaaattctcagcagtgtatgctgaagaagatcttcgagggtggcaaactccagttcatggtccaggggtgtgagaacatgtgcccatccatgaatctgttcagccatggaacaaggatgcagattatctgttgccggaaccagagcttctgcaataagatttag

SEQ ID NO: 202589 - DNA, 633 bp, Artificial Sequence
  derived and/or modified sequence
atgaaccggttcctgctgctgatgagcctgtacctgctgggcagcgcacgcggcacctcttctcagccaaatgaattaagcggctctatagatcatcaaacatccgtgcaacagttgcctggggagcccgcggccacagagcacgccgaaggagagcatactgtaggtgaacagcccagtggcgaacagccttccggagagcacttaagcggtgagcagcccctgagtgagcttgagagtggcgagcagccgtccgatgagcaacctagcggtgaacatggatctggcgagcagccctccggtgagcaggcgagcggggaacagccaagtggagagcacgcctcaggggagcaggcatcaggagctccaatctcttccacctcaaccgggacgattctgaattgctatacctgcgcttatatgaatgatcagggcaaatgccttcggggcgaggggacttgtattacacaaaactcacagcagtgcatgcttaagaagattttcgaaggggggaagctccagttcatggtacagggatgtgagaatatgtgcccaagtatgaatctgttctctcatggcacgcgcatgcaaatcatctgttgcagaaaccagtcattctgtaacaaaatctag

SEQ ID NO: 202590 - DNA, 633 bp, Artificial Sequence
  derived and/or modified sequence
atgaatcggttcttattacttatgtcgctctaccttctgggcagtgccaggggcacctccagccagccaaacgagctgtcaggatcgatagatcaccagacttctgtccagcagctccccggagaacctgccgctaccgagcatgcagagggcgagcatactgtcggagaacagccatccggagagcaaccctccggtgagcatctttctggggaacaacccctctcagaactggaatcaggtgaacagccgtctgacgagcagccgagtggagagcacgggtctggagaacagcccagcggcgagcaggcttccggggaacagccctccggagagcacgcctctggcgaacaggcctccggggcacctataagttcaacatccactggtaccatcttgaattgctacacttgcgcctatatgaacgatcaaggaaagtgcttgaggggagaaggcacatgcataactcaaaactctcagcaatgcatgctgaagaaaattttcgagggcggaaaactccaattcatggtacagggatgcgagaatatgtgcccctcaatgaacctcttctctcacggcacccgaatgcagataatctgttgcaggaatcagtctttctgtaacaagatttag

SEQ ID NO: 202591 - DNA, 498 bp, Artificial Sequence
  derived and/or modified sequence
atgaataggtttttgctgctaatgtcgctttacctcctagggagcgctagaggcacgagttcacagcccaacgaactctccggttccattgatcatcaaacctctgtgcagcagttaccaggggagcctgcggcaaccgaacacgcagaaggtgagcacacagtcggcgagcagccctccggcgagcaaccgtctggcgagcacgcctctggggaacaagcttcaggcgcacccattagcagcacttccacaggcaccatcctgaattgctacacctgcgcgtacatgaatgatcagggaaagtgccttcgcggtgaaggcacgtgtatcactcagaactcgcagcagtgtatgctgaagaaaattttcgaggggggtaaactgcagtttatggtgcaaggctgtgagaacatgtgcccctccatgaatcttttttcccatggcacgcggatgcagatcatttgctgcagaaaccagagcttctgcaataaaatctag

SEQ ID NO: 202592 - DNA, 633 bp, Artificial Sequence
  derived and/or modified sequence
atgaacaggtttttgctcttgatgagtctgtatctcctggggagtgccaggggtactagctctcagcctaatgagttaagtggctcaatcgaccaccagacgagcgtccagcagctcccaggggaacccgctgccaccgagcatgccgagggcgagcacaccgttggggagcagcccagtggcgagcaaccatcaggggagcatctctctggggaacagcctcttagcgaacttgagtcaggggaacagccatcggacgaacagccaagtggggagcacggatcaggtgaacagcctagcggcgagcaggcctcaggcgaacagccctccggtgagcacgcctccggtgaacaagctagcggagcaccaatttcaagcacatcaactgggacgatcttaaactgttacacctgcgcctatatgaacgatcagggaaagtgcttaagaggggagggaacctgcattactcagaacagccaacagtgcatgctaaaaaaaatcttcgagggcggtaagttgcagtttatggtacagggctgtgaaaatatgtgtccaagcatgaatctgttctcccacggcacgcggatgcagatcatctgttgtagaaaccaatctttttgcaacaaaatctag

SEQ ID NO: 202593 - DNA, 1158 bp, Artificial Sequence
  derived and/or modified sequence
gccccaacacactaccctgcacacagaaaataatcattggtcttcactagtgaaataagcagtgggttgctaagggccaacttgcctgaacaggctacacaagaacctcagagcccaacccattgtgaagaaacatgggttacttctgaggttctagaattcccagaagctctgcttcagcactggaagcttttgctcgcagtttgcttcatagctctgtgaagaagctgtggcccacactggggtcccctcttttcctaaatccagatgaacaggtttctcttgctaatgagtctttatctgcttggatctgccagaggaacatcaagtcagcctaatgagctttctggctccatagatcatcaaacttcagttcagcaacttccaggtgagcccgctgcgactgaacatgctgaaggtgagcatactgtaggtgagcagccttcaggagaacagccttcaggtgaacacctctccggagaacagcctttgagtgagcttgagtcaggtgaacagccttcagatgaacagccttcaggtgaacatggctccggtgaacagccttctggtgagcaggcctcgggtgaacagccttcaggtgagcacgcttcaggggaacaggcttcaggtgcaccaatttcaagcacatctacaggcacaatattaaattgctacacatgtgcttatatgaatgatcaaggaaaatgtcttcgtggagagggaacctgcatcactcagaattcccagcagtgcatgttaaagaagatctttgaaggtggaaaactccaattcatggttcaagggtgtgagaacatgtgcccatctatgaacctcttctcccatggaacgaggatgcaaattatatgctgtcgaaatcaatctttctgcaataagatctagaagcctgggcccttgcttgttttgactcaggcagtaaaaagcctccatcactctatttggctcattttatatttagttccttccccagtcaacaactgaccacatctgcctctgcctgagcattaggatgctcaaacatcctatctttcttcttctattcatgcttttatccattcttctctgtcctgtcttccctgctccaactctttctctcaatattcctgatttttttttcaataaatttcacatggttaaagc

SEQ ID NO: 202594 - DNA, 1023 bp, Artificial Sequence
  derived and/or modified sequence
gccccaacacactaccctgcacacagaaaataatcattggtcttcactagtgaaataagcagtgggttgctaagggccaacttgcctgaacaggctacacaagaacctcagagcccaacccattgtgaagaaacatgggttacttctgaggttctagaattcccagaagctctgcttcagcactggaagcttttgctcgcagtttgcttcatagctctgtgaagaagctgtggcccacactggggtcccctcttttcctaaatccagatgaacaggtttctcttgctaatgagtctttatctgcttggatctgccagaggaacatcaagtcagcctaatgagctttctggctccatagatcatcaaacttcagttcagcaacttccaggtgagcccgctgcgactgaacatgctgaaggtgagcatactgtaggtgagcagccttcaggagaacagccttcaggtgagcacgcttcaggggaacaggcttcaggtgcaccaatttcaagcacatctacaggcacaatattaaattgctacacatgtgcttatatgaatgatcaaggaaaatgtcttcgtggagagggaacctgcatcactcagaattcccagcagtgcatgttaaagaagatctttgaaggtggaaaactccaattcatggttcaagggtgtgagaacatgtgcccatctatgaacctcttctcccatggaacgaggatgcaaattatatgctgtcgaaatcaatctttctgcaataagatctagaagcctgggcccttgcttgttttgactcaggcagtaaaaagcctccatcactctatttggctcattttatatttagttccttccccagtcaacaactgaccacatctgcctctgcctgagcattaggatgctcaaacatcctatctttcttcttctattcatgcttttatccattcttctctgtcctgtcttccctgctccaactctttctctcaatattcctgatttttttttcaataaatttcacatggttaaagc

SEQ ID NO: 202595 - DNA, 794 bp, Artificial Sequence
  derived and/or modified sequence
ctgtgaagaagctgtggcccacactggggtcccctcttttcctaaatccagatgaacaggtttctcttgctaatgagtctttatctgcttggatctgccagaggaacatcaagtcagcctaatgagctttctggctccatagatcatcaaacttcagttcagcaacttccaggtgagcccgctgcgactgaacatgctgaaggtgagcatactgtaggtgagcagccttcaggagaacagccttcaggtgaacacctctccggagaacagcctttgagtgagcttgagtcaggtgaacagccttcagatgaacagccttcaggtgaacatggctccggtgaacagccttctggtgagcaggcctcgggtgaacagccttcaggtgagcacgcttcaggggaacaggcttcaggtgcaccaatttcaagcacatctacaggcacaatattaaattgctacacatgtgcttatatgaatgatcaaggaaaatgtcttcgtggagagggaacctgcatcactcagaattcccagcagtgcatgttaaagaagatctttgaaggtggaaaactccaattcatggttcaagggtgtgagaacatgtgcccatctatgaacctcttctcccatggaacgaggatgcaaattatatgctgtcgaaatcaatctttctgcaataagatctagaagcctgggcccttgcttgttttgactcaggcagtaaaaagcctccatcactctatttggctcattttatatttagttccttccccagtcaacaactgaccacatctgcc

SEQ ID NO: 202596 - DNA, 633 bp, Artificial Sequence
  derived and/or modified sequence
atgaacagattcctgctgctgatgagcctgtacctgctgggcagcgccagaggcaccagcagccagcccaacgagctgagcggcagcatcgaccaccagaccagcgtgcagcagctgcccggcgagcccgccgccaccgagcacgccgagggcgagcacaccgtgggcgagcagcccagcggcgagcagcccagcggcgagcacctgagcggcgagcagcccctgagcgagctggagagcggcgagcagcccagcgacgagcagcccagcggcgagcacggcagcggcgagcagcccagcggcgagcaggccagcggcgagcagcccagcggcgagcacgccagcggcgagcaggccagcggcgcccccatcagcagcaccagcaccggcaccatcctgaactgctacacctgcgcctacatgaacgaccagggcaagtgcctgagaggcgagggcacctgcatcacccagaacagccagcagtgcatgctgaagaagatcttcgagggcggcaagctgcagttcatggtgcagggctgcgagaacatgtgccccagcatgaacctgttcagccacggcaccagaatgcagatcatctgctgcagaaaccagagcttctgcaacaagatctag

SEQ ID NO: 202597 - DNA, 498 bp, Artificial Sequence
  derived and/or modified sequence
atgaacagattcctgctgctgatgagcctgtacctgctgggcagcgccagaggcaccagcagccagcccaacgagctgagcggcagcatcgaccaccagaccagcgtgcagcagctgcccggcgagcccgccgccaccgagcacgccgagggcgagcacaccgtgggcgagcagcccagcggcgagcagcccagcggcgagcacgccagcggcgagcaggccagcggcgcccccatcagcagcaccagcaccggcaccatcctgaactgctacacctgcgcctacatgaacgaccagggcaagtgcctgagaggcgagggcacctgcatcacccagaacagccagcagtgcatgctgaagaagatcttcgagggcggcaagctgcagttcatggtgcagggctgcgagaacatgtgccccagcatgaacctgttcagccacggcaccagaatgcagatcatctgctgcagaaaccagagcttctgcaacaagatctag

SEQ ID NO: 202598 - protein, 155 aa, Artificial Sequence
  derived and/or modified sequence
MNRFLLLMSLYLLGSARGTSSQPNELSGSIDHQTSVQQLPGEQPSGEQPSGEHLSGEQPLSELESGEQPSDEQPSGEHGSGEQPSGEQASGEQPSGEHASGEQASGAPISSTSTGGKLQFMVQGCENMCPSMNLFSHGTRMQIICCRNQSFCNKI

SEQ ID NO: 202599 - protein, 195 aa, Artificial Sequence
  derived and/or modified sequence
MNRFLLLMSLYLLGSARGTSSQPNELSGSIDHQTSVQQLPGEQPSGEQPSGEHLSGEQPLSELESGEQPSDEQPSGEHGSGEQPSGEQASGEQPSGEHASGEQASGAPISSTSTGTILNCYTCAYMNDQGKCLRGEGTCITQNSQQCMLKKIFEGGKLQFMVQGCENMCPSMNLFSHGTRMQIICCRNQSFCNKI

SEQ ID NO: 202600 - protein, 170 aa, Artificial Sequence
  derived and/or modified sequence
MNRFLLLMSLYLLGSARGTSSQPNELSGSIDHQTSVQQLPGEQPSDEQPSGEHGSGEQPSGEQASGEQPSGEHASGEQASGAPISSTSTGTILNCYTCAYMNDQGKCLRGEGTCITQNSQQCMLKKIFEGGKLQFMVQGCENMCPSMNLFSHGTRMQIICCRNQSFCNKI

SEQ ID NO: 202601 - protein, 176 aa, Artificial Sequence
  derived and/or modified sequence
MNRFLLLMSLYLLGSARGTSSQPNELSGSIDHQTSVQQLPGEQPSGEQPSGEHLSGEQPLSELESGEQPSDEQPSGEHGSGEQPSGEQASGEQPSGTILNCYTCAYMNDQGKCLRGEGTCITQNSQQCMLKKIFEGGKLQFMVQGCENMCPSMNLFSHGTRMQIICCRNQSFCNKI

SEQ ID NO: 202602 - DNA, 468 bp, Artificial Sequence
  derived and/or modified sequence
atgaacagattcttgctgcttatgagtctctatttgctgggatcggcaagggggacctcctcccagcccaatgaactgtctggaagtatagaccaccagacctctgtacagcaactgccgggagagcagcccagtggagagcagccctccggggaacatctgagcggagagcaacctctgtctgaactggagtctggggagcaacccagtgatgagcagccgtctggtgaacacggcagcggagaacagccatctggtgaacaggcatcaggggagcagccatccggagaacatgcttcgggcgagcaggcttctggcgcaccaattagttctacctcaacaggcggcaaacttcagttcatggtgcaggggtgcgagaacatgtgcccgagcatgaacctcttctcacatggaaccagaatgcagatcatttgttgcaggaaccagagtttctgtaacaagatctag

SEQ ID NO: 202603 - DNA, 246 bp, Artificial Sequence
  derived and/or modified sequence
atgaacagatttctcctgctcatgagtctttatcttttggggagcgccagaggtactagtagtcagccaaatgagctctctggttctattgatcaccagacctccgtgcaacagctccctggtggtaagctgcagttcatggtccaaggctgcgagaacatgtgccctagtatgaacttgttcagccatgggacccggatgcagattatctgttgtcgaaaccagtcattctgtaacaaaatatag

SEQ ID NO: 202604 - DNA, 588 bp, Artificial Sequence
  derived and/or modified sequence
atgaacaggttcctccttctcatgagcctgtacctgctcggaagcgcaaggggcacttcatcgcagcctaatgagctcagtggatcaattgaccatcagacatccgtccagcagcttccaggtgagcagccctctggagagcagccgagtggcgaacatctctcaggggaacagcctctgtccgaattggagtctggcgagcaaccctccgacgagcaaccatctggtgagcacggttccggcgagcagccaagcggagaacaggcttctggggagcagccgagtggagaacatgcctctggggaacaggcctctggagctcctatatcctctacctctacgggcactatcctgaactgctatacgtgtgcatacatgaacgaccagggaaagtgcttgcgcggcgaaggtacttgcatcacacagaacagccagcagtgtatgctgaagaagatttttgaaggagggaagttacagtttatggtccaaggatgtgaaaacatgtgcccatctatgaatctgtttagtcatggcaccagaatgcagattatctgctgtcgaaaccagtctttctgtaataaaatctag

SEQ ID NO: 202605 - DNA, 513 bp, Artificial Sequence
  derived and/or modified sequence
atgaacaggtttctcttgttaatgtcattatacctgctgggctccgccagagggacgagctcccaacctaatgaattgagtggtagtattgaccatcaaacatccgtgcagcaactgccaggggagcaaccgtctgatgaacaaccctccggcgaacacggtagcggtgagcagccatctggggaacaggccagtggcgaacagccatctggagaacacgcctccggcgagcaggctagtggggcacccatttcgagcacaagcactgggacaattctcaattgttatacctgtgcttatatgaacgatcaaggaaaatgcctgcgaggagaggggacttgcataacgcagaattcacagcagtgcatgttgaaaaagatcttcgagggaggaaaattgcagtttatggtgcagggatgcgagaacatgtgcccgagtatgaacctcttcagccacgggaccaggatgcagattatttgttgcagaaaccagtccttttgtaacaagatatag

SEQ ID NO: 202606 - DNA, 531 bp, Artificial Sequence
  derived and/or modified sequence
atgaatcgttttttactgcttatgtcactgtatctgctgggttccgctcggggcacttcgtcacagccaaacgagttgtccggctcgatagaccaccaaaccagcgttcagcagcttcccggagaacaaccatccggcgagcagccctccggagaacacctttccggagaacagcccctcagtgaactggaaagcggggagcagccatcagacgagcagcctagcggtgaacacggctccggtgagcagcccagcggagagcaggcttcaggtgagcagccgtctggcacaattctgaattgttacacatgcgcctacatgaatgaccaagggaaatgccttcgtggcgagggaacatgcatcactcaaaattcgcagcagtgtatgctgaaaaagatctttgaaggcggaaagctgcaattcatggtgcaggggtgtgagaacatgtgtcccagtatgaatttgttttcacatggcacacgaatgcagatcatttgctgtaggaaccaatcattttgcaacaagatttag

SEQ ID NO: 202607 - DNA, 588 bp, Artificial Sequence
  derived and/or modified sequence
atgaaccggtttctgctgttgatgtcactgtacctgctaggcagtgcccggggcacctcaagtcagccaaacgaattgagcgggtccattgatcatcagacttccgtgcagcagctccctggggagcagccatcaggcgagcagccaagtggcgaacatttaagtggcgaacaacccctctccgagctagaatcgggcgagcagcccagcgatgaacaaccatccggcgaacatggctccggcgaacagcccagcggcgagcaggcttcgggtgaacagccctccggagagcatgcatccggcgagcaggcgtctggggcccccatctctagcacttctactggcactatcctaaattgttatacctgtgcctatatgaacgaccagggtaagtgcttgaggggggaaggcacctgtattacacagaactctcagcagtgcatgctcaagaagattttcgaaggcggcaaactccagttcatggttcagggatgcgaaaatatgtgtccgtccatgaatttattttcccatggcaccagaatgcagattatatgctgtagaaaccagtcattttgtaataagatctag

SEQ ID NO: 202608 - DNA, 468 bp, Artificial Sequence
  derived and/or modified sequence
atgaaccgcttcctgctgctgatgagcctgtacctgctgggcagcgcccggggcaccagcagccagcccaatgagctgagcggcagcattgaccaccagacctctgtgcagcagctgcccggggagcagcccagcggggagcagcccagcggggagcacctgtctggagagcagcccctgtctgagctggagagcggggagcagcccagtgatgagcagcccagcggggagcacggcagcggggagcagcccagcggggagcaggccagcggggagcagcccagcggggagcacgccagcggggagcaggccagcggggcccccatcagcagcaccagcactggaggcaagctgcagttcatggtgcagggctgtgagaacatgtgccccagcatgaacctcttcagccacggcaccaggatgcagatcatctgctgcaggaaccagagcttctgcaacaagatctag

SEQ ID NO: 202609 - DNA, 246 bp, Artificial Sequence
  derived and/or modified sequence
atgaaccgcttcctgctgctgatgagcctgtacctgctgggcagcgcccggggcaccagcagccagcccaatgagctgagcggcagcattgaccaccagacctctgtgcagcagctgcccggcggcaagctgcagttcatggtgcagggctgtgagaacatgtgccccagcatgaacctcttcagccacggcaccaggatgcagatcatctgctgcaggaaccagagcttctgcaacaagatctag

SEQ ID NO: 202610 - DNA, 588 bp, Artificial Sequence
  derived and/or modified sequence
atgaaccgcttcctgctgctgatgagcctgtacctgctgggcagcgcccggggcaccagcagccagcccaatgagctgagcggcagcattgaccaccagacctctgtgcagcagctgcccggggagcagcccagcggggagcagcccagcggggagcacctgtctggagagcagcccctgtctgagctggagagcggggagcagcccagtgatgagcagcccagcggggagcacggcagcggggagcagcccagcggggagcaggccagcggggagcagcccagcggggagcacgccagcggggagcaggccagcggggcccccatcagcagcaccagcacaggcaccatcctgaactgctacacctgtgcctacatgaatgaccagggcaagtgcctgcggggggagggcacctgcatcacccagaacagccagcagtgcatgctgaagaagatctttgaaggaggcaagctgcagttcatggtgcagggctgtgagaacatgtgccccagcatgaacctcttcagccacggcaccaggatgcagatcatctgctgcaggaaccagagcttctgcaacaagatctag

SEQ ID NO: 202611 - DNA, 513 bp, Artificial Sequence
  derived and/or modified sequence
atgaaccgcttcctgctgctgatgagcctgtacctgctgggcagcgcccggggcaccagcagccagcccaatgagctgagcggcagcattgaccaccagacctctgtgcagcagctgcccggggagcagcccagtgatgagcagcccagcggggagcacggcagcggggagcagcccagcggggagcaggccagcggggagcagcccagcggggagcacgccagcggggagcaggccagcggggcccccatcagcagcaccagcacaggcaccatcctgaactgctacacctgtgcctacatgaatgaccagggcaagtgcctgcggggggagggcacctgcatcacccagaacagccagcagtgcatgctgaagaagatctttgagggcggcaagctgcagttcatggtgcagggctgtgagaacatgtgccccagcatgaacctcttcagccacggcaccaggatgcagatcatctgctgcaggaaccagagcttctgcaacaagatctag

SEQ ID NO: 202612 - DNA, 531 bp, Artificial Sequence
  derived and/or modified sequence
atgaaccgcttcctgctgctgatgagcctgtacctgctgggcagcgcccggggcaccagcagccagcccaatgagctgagcggcagcattgaccaccagacctctgtgcagcagctgcccggggagcagcccagcggggagcagcccagcggggagcacctgtctggagagcagcccctgtctgagctggagagcggggagcagcccagtgatgagcagcccagcggggagcacggcagcggggagcagcccagcggggagcaggccagcggggagcagcccagcggcaccatcctgaactgctacacctgtgcctacatgaatgaccagggcaagtgcctgcggggggagggcacctgcatcacccagaacagccagcagtgcatgctgaagaagatctttgagggcggcaagctgcagttcatggtgcagggctgtgagaacatgtgccccagcatgaacctcttcagccacggcaccaggatgcagatcatctgctgcaggaaccagagcttctgcaacaagatctag

SEQ ID NO: 202613 - DNA, 468 bp, Artificial Sequence
  derived and/or modified sequence
atgaaccggttcctgctgctgatgagcctgtacctgctgggcagcgccaggggtactagctcccagcccaatgaactaagcggatcaatcgatcaccaaacatccgtgcagcagctcccaggggaacagccctccggcgagcaaccaagcggcgagcatctcagcggggagcagcctctgagtgagcttgaatcgggggaacagccttcagatgaacagcctagtggcgagcatggcagcggtgaacaaccatcaggcgaacaggccagcggggagcagcccagtggggagcacgctagcggagaacaggccagtggagcccctatttccagcacatctacgggaggtaagttacaatttatggtccagggctgcgagaatatgtgtccgtccatgaatctatttagccacggcacacggatgcagattatctgttgccgcaatcagagtttctgcaacaagatttag

SEQ ID NO: 202614 - DNA, 246 bp, Artificial Sequence
  derived and/or modified sequence
atgaaccggttcctgctgctgatgagcctgtacctgctgggcagcgccagagggacgtcaagtcagccaaatgagctgagcggcagcattgatcaccaaaccagcgtgcaacagctcccggggggcaaactccaatttatggtgcagggctgtgaaaacatgtgtcccagtatgaacctcttctcccacggcacacggatgcaaattatctgttgcagaaatcagtccttctgcaacaaaatttag

SEQ ID NO: 202615 - DNA, 588 bp, Artificial Sequence
  derived and/or modified sequence
atgaaccggttcctgctgctgatgagcctgtacctgctgggcagcgcacgaggaacctcatcgcagcccaacgagcttagcggatctattgatcatcagacatctgttcagcaactacccggagagcagcctagtggcgaacaacctagtggagaacacctgagtggcgagcagccactcagcgagctagaaagcggcgagcaaccatccgatgaacagccaagcggagaacacggcagcggtgagcagccttccggagagcaggcttcgggcgaacagccctcaggcgagcacgcttcaggtgagcaggcatccggcgcgcccatttcttccacctcaacgggtactatactgaattgttatacatgcgcttacatgaatgaccagggtaagtgcctcagaggagaggggacatgcatcacacagaactcgcagcagtgtatgctgaagaaaattttcgaaggcggtaagctgcaatttatggtgcaaggttgcgaaaacatgtgtccatccatgaacctgttctcacatgggacgcggatgcaaatcatatgctgtaggaaccaatctttctgtaacaagatctag

SEQ ID NO: 202616 - DNA, 513 bp, Artificial Sequence
  derived and/or modified sequence
atgaaccggttcctgctgctgatgagcctgtacctgctgggcagcgcacgcggaacgagtagtcagcctaacgaactgtcggggtctattgaccaccagacatccgtgcagcagttacccggcgaacagccaagcgacgagcaaccatctggggaacacggatccggagaacagccttcgggagagcaagcatccggcgagcagcctagcggcgagcacgcctctggagagcaggcgagtggagcgcccatttccagcacctcgacgggcacaattttaaattgctatacttgcgcttatatgaatgatcaaggaaaatgtctgagaggcgaagggacttgtatcactcaaaattcccagcaatgtatgttgaagaagatctttgagggaggcaagctgcagtttatggtgcagggttgcgaaaatatgtgcccctcaatgaatctgttttcccatggaacaagaatgcaaatcatctgctgccggaatcagagcttctgtaataagatatag

SEQ ID NO: 202617 - DNA, 531 bp, Artificial Sequence
  derived and/or modified sequence
atgaaccggttcctgctgctgatgagcctgtacctgctgggcagcgcacgaggcaccagctcccagcccaatgagctcagcgggtctatagatcaccaaaccagcgttcagcaactccccggtgagcagccctctggggagcagccatcgggtgagcacctttcgggagagcagcctctctcagagctcgaaagtggcgagcagccgtccgatgagcagccttctggggagcacggaagcggcgagcagccgtccggggagcaggccagcggcgagcagccctctggcactatcctgaactgttacacctgtgcctatatgaatgaccagggaaaatgtttgaggggcgagggcacatgcattactcaaaattcccagcagtgcatgctgaagaagatcttcgagggcggcaaattacagttcatggtccaaggctgcgagaacatgtgtcccagtatgaacttgttctctcatggcacacgcatgcagattatctgctgtcgcaatcagagcttttgcaataagatctag

SEQ ID NO: 202618 - DNA, 588 bp, Artificial Sequence
  derived and/or modified sequence
atgaaccggttcctgctgctgatgagcctgtacctgctgggcagcgctagagggacgagctctcagcccaacgaactgtcaggttccatagatcatcagacaagcgtgcaacaattgccaggtgaacaacctagtggagagcaacctagtggagagcatttgagcggcgaacaacctctctccgaactcgaaagcggagagcaaccctctgacgagcagccttccggcgaacacggcagtggtgagcagcctagcggtgagcaggcaagcggtgaacagccatccggggaacatgcatcaggagagcaagcatcaggagccccgatttctagcacatcaacagggactattcttaattgctacacctgcgcctatatgaatgaccagggaaaatgcctccgcggcgagggaacctgcataacccagaacagtcagcagtgcatgctaaaaaagatcttcgagggaggcaagcttcagttcatggtgcaaggatgcgaaaacatgtgccccagcatgaacttgttcagccacggaacaagaatgcagataatatgttgccgcaatcagagcttttgtaataagatttag

SEQ ID NO: 202619 - DNA, 468 bp, Artificial Sequence
  derived and/or modified sequence
atgaataggtttctcctattaatgtctctgtatttgctcggctcagcacgcggaacttcttctcagccaaatgagttatcaggcagtattgatcaccagacttctgtgcagcaattgccgggtgaacagccgagcggagaacagccaagcggggaacacctatccggcgagcagcctttatcggagttggagagtggagagcagccatccgacgagcagcctagtggcgaacatggaagtggagagcagccatctggcgagcaagcaagcggtgagcagccctctggggaacacgcttctggagaacaagctagcggagctcctataagctccacgtctacaggaggcaagctgcaatttatggtccagggctgcgaaaacatgtgtccttctatgaacctcttttcgcacggaacccgcatgcaaattatttgttgcagaaatcagtctttttgcaataaaatctag

SEQ ID NO: 202620 - DNA, 246 bp, Artificial Sequence
  derived and/or modified sequence
atgaatcgcttcctgctgctaatgtcactctacctcctcgggtctgcaagaggaaccagtagtcagcctaatgagctgtctggttctatcgaccatcaaacgtctgtgcagcaactgcccggaggcaaactccagttcatggtgcagggttgcgaaaatatgtgtccttccatgaatttattctctcacggaactagaatgcagataatttgctgtaggaatcaatccttctgtaacaaaatctag

SEQ ID NO: 202621 - DNA, 588 bp, Artificial Sequence
  derived and/or modified sequence
atgaatcgcttcctgctgcttatgagcctgtacctgctgggcagcgctagaggcacttcatcgcagccgaacgagctaagtgggagtatcgatcaccagacctccgtacagcagctgcccggtgagcaaccttcaggtgagcaacctagtggcgagcacctctcaggggaacagcctctgagtgagctggagagtggcgaacagccatccgatgagcaaccctccggagaacacggctccggggaacagcctagcggagaacaagcgtccggagagcagccctctggtgagcacgccagcggagagcaggccagtggggctcccatttctagcacctctactggcacgatcttgaactgctacacatgtgcttacatgaacgaccagggaaagtgtttgcggggagagggaacatgtatcactcagaacagccagcagtgtatgctaaagaagatctttgagggtggaaagttacagtttatggtgcagggctgcgaaaatatgtgtccttccatgaacttgttcagccacggtaccagaatgcagataatttgctgtcgaaatcaatccttctgcaataaaatctag

SEQ ID NO: 202622 - DNA, 513 bp, Artificial Sequence
  derived and/or modified sequence
atgaaccgatttctcctgctgatgtctttgtatctgttgggaagtgcacgaggtacaagctctcaacccaacgagctctctggaagtatcgaccaccagacctcagttcagcaactccccggtgagcaaccctccgatgagcagccttctggtgagcatgggtctggggagcagcctagtggagagcaggcatctggggagcagccctctggagagcacgctagtggcgaacaggccagcggtgcacctattagctccaccagtacaggcacaattttgaactgctatacatgcgcttatatgaatgatcagggcaagtgtctgagaggcgagggcacctgcataacgcagaattcacagcagtgtatgctgaagaaaatattcgagggaggcaagctacaattcatggttcaaggttgcgagaatatgtgccccagcatgaacctgttctcccatgggacgcgaatgcagatcatttgctgtcggaatcagtccttttgcaacaagatatag

SEQ ID NO: 202623 - DNA, 531 bp, Artificial Sequence
  derived and/or modified sequence
atgaatagatttctgcttttgatgagcctgtacttacttggctccgccaggggcaccagctcccagcccaacgagctcagcggctccatcgaccatcaaacaagcgtccaacaactcccaggagagcaaccgtcgggcgaacaacctagcggtgagcacttgtctggcgaacaacctcttagcgaattagaatctggagagcagccgagcgacgaacaaccatccggagaacatggctccggcgaacagccgtctggcgagcaggccagcggcgagcagcccagtggaacaatcttgaactgttacacgtgtgcctacatgaatgatcaggggaagtgtttacgtggggagggtacatgtatcacgcagaattcgcagcagtgcatgctgaaaaagattttcgagggtggcaaattgcagttcatggtgcaaggctgcgaaaacatgtgtccatcgatgaacctgttttcccacggtactcgtatgcagatcatatgctgtcgtaaccagtcattttgtaataagatctag

SEQ ID NO: 202624 - DNA, 588 bp, Artificial Sequence
  derived and/or modified sequence
atgaacagattcctcctgctgatgtccctgtatctcctcggcagtgctcggggtaccagtagccagcctaatgaactgtctggctccattgatcaccaaacctctgtgcagcaattgcctggcgaacaacccagcggcgaacagccttccggcgagcacttaagtggtgagcagcccctctccgaattggagagcggcgagcagccctccgatgaacagccctctggcgagcatgggagtggcgaacaaccaagcggagaacaggcaagcggcgagcagccatctggcgagcacgcaagtggagagcaagcctccggggcacctataagttcaactagcacaggcacaatactgaattgttatacttgcgcatacatgaacgatcaggggaagtgtctgcggggtgagggcacatgtattacccaaaactcccagcagtgtatgctcaagaagatttttgaaggaggaaagctgcagtttatggtccaaggctgcgagaacatgtgcccttccatgaatttattcagccacggcacccggatgcaaatcatctgctgccgcaaccagtccttttgcaataagatctag

SEQ ID NO: 202625 - DNA, 993 bp, Artificial Sequence
  derived and/or modified sequence
gccccaacacactaccctgcacacagaaaataatcattggtcttcactagtgaaataagcagtgggttgctaagggccaacttgcctgaacaggctacacaagaacctcagagcccaacccattgtgaagaaacatgggttacttctgaggttctagaattcccagaagctctgcttcagcactggaagcttttgctcgcagtttgcttcatagctctgtgaagaagctgtggcccacactggggtcccctcttttcctaaatccagatgaacaggtttctcttgctaatgagtctttatctgcttggatctgccagaggaacatcaagtcagcctaatgagctttctggctccatagatcatcaaacttcagttcagcaacttccaggtgagcagccttcaggagaacagccttcaggtgaacacctctccggagaacagcctttgagtgagcttgagtcaggtgaacagccttcagatgaacagccttcaggtgaacatggctccggtgaacagccttctggtgagcaggcctcgggtgaacagccttcaggtgagcacgcttcaggggaacaggcttcaggtgcaccaatttcaagcacatctacaggtggaaaactccaattcatggttcaagggtgtgagaacatgtgcccatctatgaacctcttctcccatggaacgaggatgcaaattatatgctgtcgaaatcaatctttctgcaataagatctagaagcctgggcccttgcttgttttgactcaggcagtaaaaagcctccatcactctatttggctcattttatatttagttccttccccagtcaacaactgaccacatctgcctctgcctgagcattaggatgctcaaacatcctatctttcttcttctattcatgcttttatccattcttctctgtcctgtcttccctgctccaactctttctctcaatattcctgatttttttttcaataaatttcacatggttaaagc

SEQ ID NO: 202626 - DNA, 771 bp, Artificial Sequence
  derived and/or modified sequence
gccccaacacactaccctgcacacagaaaataatcattggtcttcactagtgaaataagcagtgggttgctaagggccaacttgcctgaacaggctacacaagaacctcagagcccaacccattgtgaagaaacatgggttacttctgaggttctagaattcccagaagctctgcttcagcactggaagcttttgctcgcagtttgcttcatagctctgtgaagaagctgtggcccacactggggtcccctcttttcctaaatccagatgaacaggtttctcttgctaatgagtctttatctgcttggatctgccagaggaacatcaagtcagcctaatgagctttctggctccatagatcatcaaacttcagttcagcaacttccaggtggaaaactccaattcatggttcaagggtgtgagaacatgtgcccatctatgaacctcttctcccatggaacgaggatgcaaattatatgctgtcgaaatcaatctttctgcaataagatctagaagcctgggcccttgcttgttttgactcaggcagtaaaaagcctccatcactctatttggctcattttatatttagttccttccccagtcaacaactgaccacatctgcctctgcctgagcattaggatgctcaaacatcctatctttcttcttctattcatgcttttatccattcttctctgtcctgtcttccctgctccaactctttctctcaatattcctgatttttttttcaataaatttcacatggttaaagc

SEQ ID NO: 202627 - DNA, 1113 bp, Artificial Sequence
  derived and/or modified sequence
gccccaacacactaccctgcacacagaaaataatcattggtcttcactagtgaaataagcagtgggttgctaagggccaacttgcctgaacaggctacacaagaacctcagagcccaacccattgtgaagaaacatgggttacttctgaggttctagaattcccagaagctctgcttcagcactggaagcttttgctcgcagtttgcttcatagctctgtgaagaagctgtggcccacactggggtcccctcttttcctaaatccagatgaacaggtttctcttgctaatgagtctttatctgcttggatctgccagaggaacatcaagtcagcctaatgagctttctggctccatagatcatcaaacttcagttcagcaacttccaggtgagcagccttcaggagaacagccttcaggtgaacacctctccggagaacagcctttgagtgagcttgagtcaggtgaacagccttcagatgaacagccttcaggtgaacatggctccggtgaacagccttctggtgagcaggcctcgggtgaacagccttcaggtgagcacgcttcaggggaacaggcttcaggtgcaccaatttcaagcacatctacaggcacaatattaaattgctacacatgtgcttatatgaatgatcaaggaaaatgtcttcgtggagagggaacctgcatcactcagaattcccagcagtgcatgttaaagaagatctttgaaggtggaaaactccaattcatggttcaagggtgtgagaacatgtgcccatctatgaacctcttctcccatggaacgaggatgcaaattatatgctgtcgaaatcaatctttctgcaataagatctagaagcctgggcccttgcttgttttgactcaggcagtaaaaagcctccatcactctatttggctcattttatatttagttccttccccagtcaacaactgaccacatctgcctctgcctgagcattaggatgctcaaacatcctatctttcttcttctattcatgcttttatccattcttctctgtcctgtcttccctgctccaactctttctctcaatattcctgatttttttttcaataaatttcacatggttaaagc

SEQ ID NO: 202628 - DNA, 1038 bp, Artificial Sequence
  derived and/or modified sequence
gccccaacacactaccctgcacacagaaaataatcattggtcttcactagtgaaataagcagtgggttgctaagggccaacttgcctgaacaggctacacaagaacctcagagcccaacccattgtgaagaaacatgggttacttctgaggttctagaattcccagaagctctgcttcagcactggaagcttttgctcgcagtttgcttcatagctctgtgaagaagctgtggcccacactggggtcccctcttttcctaaatccagatgaacaggtttctcttgctaatgagtctttatctgcttggatctgccagaggaacatcaagtcagcctaatgagctttctggctccatagatcatcaaacttcagttcagcaacttccaggtgaacagccttcagatgaacagccttcaggtgaacatggctccggtgaacagccttctggtgagcaggcctcgggtgaacagccttcaggtgagcacgcttcaggggaacaggcttcaggtgcaccaatttcaagcacatctacaggcacaatattaaattgctacacatgtgcttatatgaatgatcaaggaaaatgtcttcgtggagagggaacctgcatcactcagaattcccagcagtgcatgttaaagaagatctttgaaggtggaaaactccaattcatggttcaagggtgtgagaacatgtgcccatctatgaacctcttctcccatggaacgaggatgcaaattatatgctgtcgaaatcaatctttctgcaataagatctagaagcctgggcccttgcttgttttgactcaggcagtaaaaagcctccatcactctatttggctcattttatatttagttccttccccagtcaacaactgaccacatctgcctctgcctgagcattaggatgctcaaacatcctatctttcttcttctattcatgcttttatccattcttctctgtcctgtcttccctgctccaactctttctctcaatattcctgatttttttttcaataaatttcacatggttaaagc

SEQ ID NO: 202629 - DNA, 1056 bp, Artificial Sequence
  derived and/or modified sequence
gccccaacacactaccctgcacacagaaaataatcattggtcttcactagtgaaataagcagtgggttgctaagggccaacttgcctgaacaggctacacaagaacctcagagcccaacccattgtgaagaaacatgggttacttctgaggttctagaattcccagaagctctgcttcagcactggaagcttttgctcgcagtttgcttcatagctctgtgaagaagctgtggcccacactggggtcccctcttttcctaaatccagatgaacaggtttctcttgctaatgagtctttatctgcttggatctgccagaggaacatcaagtcagcctaatgagctttctggctccatagatcatcaaacttcagttcagcaacttccaggtgagcagccttcaggagaacagccttcaggtgaacacctctccggagaacagcctttgagtgagcttgagtcaggtgaacagccttcagatgaacagccttcaggtgaacatggctccggtgaacagccttctggtgagcaggcctcgggtgaacagccttcaggcacaatattaaattgctacacatgtgcttatatgaatgatcaaggaaaatgtcttcgtggagagggaacctgcatcactcagaattcccagcagtgcatgttaaagaagatctttgaaggtggaaaactccaattcatggttcaagggtgtgagaacatgtgcccatctatgaacctcttctcccatggaacgaggatgcaaattatatgctgtcgaaatcaatctttctgcaataagatctagaagcctgggcccttgcttgttttgactcaggcagtaaaaagcctccatcactctatttggctcattttatatttagttccttccccagtcaacaactgaccacatctgcctctgcctgagcattaggatgctcaaacatcctatctttcttcttctattcatgcttttatccattcttctctgtcctgtcttccctgctccaactctttctctcaatattcctgatttttttttcaataaatttcacatggttaaagc

SEQ ID NO: 202630 - DNA, 782 bp, Artificial Sequence
  derived and/or modified sequence
gcttcagcactggaagcttttgctcgcagtttgcttcatagctctgtgaagaagctgtggcccacactggggtcccctcttttcctaaatccagatgaacaggtttctcttgctaatgagtctttatctgcttggatctgccagaggaacatcaagtcagcctaatgagctttctggctccatagatcatcaaacttcagttcagcaacttccaggtgagcagccttcaggagaacagccttcaggtgaacacctctccggagaacagcctttgagtgagcttgagtcaggtgaacagccttcagatgaacagccttcaggtgaacatggctccggtgaacagccttctggtgagcaggcctcgggtgaacagccttcaggtgagcacgcttcaggggaacaggcttcaggtgcaccaatttcaagcacatctacaggcacaatattaaattgctacacatgtgcttatatgaatgatcaaggaaaatgtcttcgtggagagggaacctgcatcactcagaattcccagcagtgcatgttaaagaagatctttgaaggtggaaaactccaattcatggttcaagggtgtgagaacatgtgcccatctatgaacctcttctcccatggaacgaggatgcaaattatatgctgtcgaaatcaatctttctgcaataagatctagaagcctgggcccttgcttgttttgactcaggcagtaaaaagcctccatcactctatttggctcattttatatttagttccttccccagtcaacaactgac

SEQ ID NO: 202631 - DNA, 468 bp, Artificial Sequence
  derived and/or modified sequence
atgaacagattcctgctgctgatgagcctgtacctgctgggcagcgccagaggcaccagcagccagcccaacgagctgagcggcagcatcgaccaccagaccagcgtgcagcagctgcccggcgagcagcccagcggcgagcagcccagcggcgagcacctgagcggcgagcagcccctgagcgagctggagagcggcgagcagcccagcgacgagcagcccagcggcgagcacggcagcggcgagcagcccagcggcgagcaggccagcggcgagcagcccagcggcgagcacgccagcggcgagcaggccagcggcgcccccatcagcagcaccagcaccggcggcaagctgcagttcatggtgcagggctgcgagaacatgtgccccagcatgaacctgttcagccacggcaccagaatgcagatcatctgctgcagaaaccagagcttctgcaacaagatctag

SEQ ID NO: 202632 - DNA, 246 bp, Artificial Sequence
  derived and/or modified sequence
atgaacagattcctgctgctgatgagcctgtacctgctgggcagcgccagaggcaccagcagccagcccaacgagctgagcggcagcatcgaccaccagaccagcgtgcagcagctgcccggcggcaagctgcagttcatggtgcagggctgcgagaacatgtgccccagcatgaacctgttcagccacggcaccagaatgcagatcatctgctgcagaaaccagagcttctgcaacaagatctag

SEQ ID NO: 202633 - DNA, 588 bp, Artificial Sequence
  derived and/or modified sequence
atgaacagattcctgctgctgatgagcctgtacctgctgggcagcgccagaggcaccagcagccagcccaacgagctgagcggcagcatcgaccaccagaccagcgtgcagcagctgcccggcgagcagcccagcggcgagcagcccagcggcgagcacctgagcggcgagcagcccctgagcgagctggagagcggcgagcagcccagcgacgagcagcccagcggcgagcacggcagcggcgagcagcccagcggcgagcaggccagcggcgagcagcccagcggcgagcacgccagcggcgagcaggccagcggcgcccccatcagcagcaccagcaccggcaccatcctgaactgctacacctgcgcctacatgaacgaccagggcaagtgcctgagaggcgagggcacctgcatcacccagaacagccagcagtgcatgctgaagaagatcttcgagggcggcaagctgcagttcatggtgcagggctgcgagaacatgtgccccagcatgaacctgttcagccacggcaccagaatgcagatcatctgctgcagaaaccagagcttctgcaacaagatctag

SEQ ID NO: 202634 - DNA, 513 bp, Artificial Sequence
  derived and/or modified sequence
atgaacagattcctgctgctgatgagcctgtacctgctgggcagcgccagaggcaccagcagccagcccaacgagctgagcggcagcatcgaccaccagaccagcgtgcagcagctgcccggcgagcagcccagcgacgagcagcccagcggcgagcacggcagcggcgagcagcccagcggcgagcaggccagcggcgagcagcccagcggcgagcacgccagcggcgagcaggccagcggcgcccccatcagcagcaccagcaccggcaccatcctgaactgctacacctgcgcctacatgaacgaccagggcaagtgcctgagaggcgagggcacctgcatcacccagaacagccagcagtgcatgctgaagaagatcttcgagggcggcaagctgcagttcatggtgcagggctgcgagaacatgtgccccagcatgaacctgttcagccacggcaccagaatgcagatcatctgctgcagaaaccagagcttctgcaacaagatctag

SEQ ID NO: 202635 - DNA, 531 bp, Artificial Sequence
  derived and/or modified sequence
atgaacagattcctgctgctgatgagcctgtacctgctgggcagcgccagaggcaccagcagccagcccaacgagctgagcggcagcatcgaccaccagaccagcgtgcagcagctgcccggcgagcagcccagcggcgagcagcccagcggcgagcacctgagcggcgagcagcccctgagcgagctggagagcggcgagcagcccagcgacgagcagcccagcggcgagcacggcagcggcgagcagcccagcggcgagcaggccagcggcgagcagcccagcggcaccatcctgaactgctacacctgcgcctacatgaacgaccagggcaagtgcctgagaggcgagggcacctgcatcacccagaacagccagcagtgcatgctgaagaagatcttcgagggcggcaagctgcagttcatggtgcagggctgcgagaacatgtgccccagcatgaacctgttcagccacggcaccagaatgcagatcatctgctgcagaaaccagagcttctgcaacaagatctag

SEQ ID NO: 202636 - protein, 847 aa, Artificial Sequence
  derived and/or modified sequence
MFKCWSVVLVLGFIFLESEGRPTKEGGYGLKSYQPLMRLRHKQEKNQESSRVKGFMIQDGPFGSCENKYCGLGRHCVTSRETGQAECACMDLCKRHYKPVCGSDGEFYENHCEVHRAACLKKQKITIVHNEDCFFKGDKCKTTEYSKMKNMLLDLQNQKYIMQENENPNGDDISRKKLLVDQMFKYFDADSNGLVDINELTQVIKQEELGKDLFDCTLYVLLKYDDFNADKHLALEEFYRAFQVIQLSLPEDQKLSITAATVGQSAVLSCAIQGTLRPPIIWKRNNIILNNLDLEDINDFGDDGSLYITKVTTTHVGNYTCYADGYEQVYQTHIFQVNVPPVIRVYPESQAREPGVTASLRCHAEGIPKPQLGWLKNGIDITPKLSKQLTLQANGSEVHISNVRYEDTGAYTCIAKNEAGVDEDISSLFVEDSARKTLANILWREEGLGIGNMFYVFYEDGIKVIQPIECEFQRHIKPSEKLLGFQDEVCPKAEGDEVQRCVWASAVNVKDKFIYVAQPTLDRVLIVDVQSQKVVQAVSTDPVPVKLHYDKSHDQVWVLSWGTLEKTSPTLQVITLASGNVPHHTIHTQPVGKQFDRVDDFFIPTTTLIITHMRFGFILHKDEAALQKIDLETMSYIKTINLKDYKCVPQSLAYTHLGGYYFIGCKPDSTGAVSPQVMVDGVTDSVIGFNSDVTGTPYVSPDGHYLVSINDVKGLVRVQYITIRGEIQEAFDIYTNLHISDLAFQPSFTEAHQYNIYGSSSTQTDVLFVELSSGKVKMIKSLKEPLKAEEWPWNRKNRQIQDSGLFGQYLMTPSKDSLFILDGRLNKLNCEITEVEKGNTVIWVGDA

SEQ ID NO: 202637 - DNA, 2544 bp, Artificial Sequence
  derived and/or modified sequence
atgtttaaatgttggagtgttgtcctcgtgttgggatttattttcctggagagcgaaggcagacccactaaagagggcggttatggattgaagtcttaccagccccttatgcgcctgcggcacaaacaggagaagaaccaggaaagttcccgggttaaaggttttatgatccaagatggaccattcggttcttgtgaaaacaaatattgtggtctcgggcgacactgtgtgacttctagagaaaccggtcaggccgagtgcgcttgcatggacctgtgcaaacggcactataaacctgtgtgtggaagcgacggagaattttatgagaaccactgcgaggttcatcgggctgcctgtttaaagaagcagaaaattactatcgtacacaatgaggattgtttcttcaaaggcgacaagtgcaagacaaccgagtactcaaagatgaagaacatgcttctggatctgcagaaccagaagtatatcatgcaagaaaacgagaacccgaacggagatgacattagtagaaaaaaactgttagtggatcagatgttcaaatactttgatgccgattccaatggcctcgtcgacatcaacgaactcacccaagtgatcaagcaggaagaactgggcaaagatctcttcgattgtacactgtacgtgctgctcaagtatgacgacttcaacgcggataagcacttagcccttgaagagttctaccgtgctttccaagtcatacagttgagcctcccagaagatcagaagctgagtatcacggcagccactgtgggccaaagtgcagtgctctcatgcgccattcaggggacattgaggcctccgatcatctggaaacgcaataatattatcctaaataatttggatttggaagacattaatgactttggggatgatggctccttgtatataacaaaagtgacaacaactcacgtcgggaattacacatgctatgctgacgggtacgagcaggtttatcagactcacattttccaggtcaatgtgccccctgtcatccgcgtctacccagaaagtcaggccagggaaccaggcgtcactgcctccctgcgctgtcacgctgaaggaattcccaaaccgcagttagggtggctcaagaatggaatcgacattacccccaagctgtcaaagcagctgacactacaggcgaatgggtcagaggtacacatctccaacgtgaggtacgaagataccggggcttacacttgtatagcaaagaatgaggcaggcgtggatgaggacatttcatccttgtttgttgaggattccgctcgaaagacacttgcaaatattttgtggcgtgaggagggactcggcattgggaacatgttttacgtattttatgaggacgggattaaagtgatacagcctatcgaatgcgagtttcaaagacacatcaagccctctgagaagttactcggatttcaggacgaggtatgccccaaagcagagggagatgaggtgcagcgatgcgtgtgggcatcggccgtgaatgtgaaggacaagttcatctacgtggcgcagcctacactcgaccgggttctgatagtcgacgtgcagtctcagaaggtggttcaggcggtttctacagacccagtcccagtaaaactccactatgataaatcccatgatcaagtgtgggtactctcctggggcaccctcgagaaaaccagccccacccttcaggtcattacattagcatctggaaacgtgcctcatcatactatacatacccagcccgtggggaagcagttcgatcgagtggacgatttctttattcccaccaccaccctaattatcacgcacatgagatttggatttattctccacaaggacgaagccgctctgcagaaaattgacttagaaacaatgagctatatcaaaacaatcaacttgaaggactataaatgcgtaccccagagtctggcctacacccacctcggtgggtattacttcatcgggtgcaagcctgattctacaggcgctgtcagtcctcaggtgatggtggatggagtcactgattcggtgattggcttcaatagtgatgtaactggaacaccctacgtgagcccagacggccattacttggtgtccatcaacgacgtaaaaggattggtaagggtgcaatatattaccataaggggcgaaattcaggaagcctttgacatatatacgaacttgcacatttcggacctggccttccaacccagcttcactgaagctcaccaatacaacatctacggaagctccagcacccaaaccgacgtgctgtttgtggagctgtcatcaggaaaagttaagatgattaagagtctgaaggagccgcttaaagcagaggaatggccatggaacagaaaaaacagacaaatccaggattccggcctgtttggccagtacctcatgaccccaagcaaagactcacttttcattttagacggacggcttaacaaactgaattgtgagattactgaggtggagaaggggaacaccgtcatctgggtgggtgacgcttag

SEQ ID NO: 202638 - DNA, 2544 bp, Artificial Sequence
  derived and/or modified sequence
atgtttaaatgctggagtgtggtgctcgtcctagggttcatttttctggagagtgagggaagaccaacgaaggagggcggttacggcctgaagtcataccagccactaatgaggctacgtcataaacaggaaaagaatcaagaaagttcgagagtgaaaggcttcatgatccaggacgggccgttcgggtcatgcgaaaacaaatactgtggcttgggcagacattgcgtgaccagtagagagaccggacaagccgaatgtgcatgcatggatctgtgtaagcggcactataaacccgtatgcggctcagacggggaattctacgagaatcattgcgaagtgcacagagccgcgtgtcttaaaaaacaaaaaatcactattgtacataatgaagattgtttcttcaaaggcgacaagtgcaagaccactgagtacagcaagatgaaaaacatgctgctagacttgcaaaaccaaaagtatattatgcaggagaatgagaatccaaacggagatgatattagccgcaaaaagctacttgtcgaccaaatgttcaagtattttgacgcagattccaatggcctggtcgatattaacgaactcacccaggttattaaacaagaagagctaggcaaagacctgtttgattgcactttatatgtcttgctcaaatacgacgactttaacgcggacaaacacctcgcgctggaggagttctatcgcgcttttcaggtaatccagctaagcctgccggaggatcagaaacttagcatcactgccgctaccgtggggcagtcagctgtgttgtcgtgtgcaatccagggcaccctgagaccacctattatatggaaaagaaacaacattattctgaataacctcgatctcgaagacatcaacgacttcggcgacgatggctcactgtacattacaaaggttaccaccactcacgtgggcaattatacctgctacgcagacggctatgagcaggtgtatcagacacatatattccaggtaaacgtgcctcctgtaataagagtctaccctgagagccaggcacgagagccaggagttaccgcaagcctccgatgtcacgctgaaggtattcccaaacctcagctgggctggttaaagaacggcattgacattaccccaaaactgtctaaacagctaacccttcaggctaacggaagtgaggtgcacatcagcaacgtgagatacgaagacaccggggcctacacatgtattgcaaagaacgaagccggcgtggatgaagatatctctagcctctttgtggaagatagtgcaaggaaaactttggcaaatatcctctggagagaggagggactcggtatcgggaacatgttctacgtgttctacgaagacggaattaaggtgatccagccgattgaatgtgagttccagaggcacattaagcccagtgagaagctgctaggattccaggatgaagtgtgcccgaaagcagaaggggatgaagtgcagaggtgcgtgtgggcctcggccgtgaacgttaaggataaattcatctacgttgcgcagccaacattggaccgagtcttgatcgtggacgtacagagccaaaaagttgttcaggccgtctccaccgacccagtacctgttaagctacactatgacaagtctcacgaccaagtgtgggtgctcagctggggaactttagaaaagaccagtcctacactgcaggttattaccctcgcgtctggcaacgtcccccatcatacaattcacactcaacccgtaggaaagcagttcgaccgggtagacgatttttttatccctactaccacactgatcatcacacacatgagatttggattcattcttcataaagacgaagccgctctccaaaagatcgacctcgagaccatgtcatacatcaaaactatcaatctaaaagactacaagtgcgttccccagagtctggcctatacacacttgggcggctattattttatcggctgtaagccagattccacaggtgccgtttcaccccaggttatggtggacggggttactgatagcgttatcggtttcaattcggacgttaccgggaccccttatgtatctcccgatggacattacctggtgtccataaacgatgtgaaaggccttgtgcgagtgcagtacattaccattaggggcgagatccaggaagcttttgacatctacaccaatctccatatatccgaccttgcattccagccaagctttacagaagcacatcagtataacatttacgggagttccagcacccagaccgacgttctttttgttgagctcagtagtggaaaagtaaaaatgatcaaaagcctgaaggaacctctcaaagctgaggagtggccctggaatcgcaagaacaggcagatccaggatagcgggctatttggtcaatacctcatgacccctagcaaagatagcttattcattttggatggaaggttgaacaagctaaactgtgagatcactgaggtggagaaagggaacacggtcatatgggttggcgacgcatag

SEQ ID NO: 202639 - DNA, 2544 bp, Artificial Sequence
  derived and/or modified sequence
atgttcaagtgttggagcgttgtcctggtgttgggttttatctttctcgagtcagagggaagaccgaccaaggagggtggttacgggctgaagagttaccaacctttgatgaggctgagacacaaacaggagaagaaccaagagagctcccgcgtaaaaggcttcatgatccaagacggcccatttgggagttgcgaaaacaaatattgcggactaggaaggcactgtgtcacctcaagagagactgggcaggccgagtgcgcatgcatggacctgtgcaaacgccattacaagccagtttgcggttccgatggcgaattctacgagaaccattgtgaagtgcacagggcggcatgcttaaagaaacagaagattaccattgtgcataacgaagactgcttttttaagggagataaatgcaagactaccgagtacagcaaaatgaagaacatgttattagatctccagaaccagaaatatattatgcaggagaacgaaaaccccaatggcgacgacatttctaggaagaaactcttagtggaccagatgttcaaatactttgacgctgattcaaacggcttagtggacattaacgagctgacacaggtgattaaacaggaagaactgggcaaagacctattcgattgtaccctctacgtactacttaaatacgacgattttaatgctgataaacacctcgcgctcgaggagttttaccgagctttccaagtcattcagcttagtctcccggaggatcagaagctgagcattacagctgcgactgtggggcaaagcgccgttctgtcttgcgccattcagggaacgctgcgcccacccattatctggaaacgcaacaacattatcctgaataacctcgatctcgaagacataaacgactttggtgacgatggaagtctttatataactaaggtcaccacaactcatgttggaaactacacatgttacgctgacggctatgaacaggtttaccagacacacattttccaagttaacgtccctcccgttatacgggtatacccagagtcgcaggccagagaaccaggcgtgactgcatcccttagatgtcacgcagagggtattccaaagccgcaactgggctggcttaagaatggaatcgatatcacgcccaaactcagtaagcagttaaccctccaagcaaacggctcagaggttcacatctcaaatgtgagatatgaggacaccggagcttatacgtgtatcgccaaaaatgaagcgggtgttgatgaggacatctcaagcttattcgtcgaagacagtgccagaaaaaccctcgccaatatcctgtggcgcgaagagggactggggattgggaatatgttctatgtgttctacgaagacggcatcaaagttattcaaccgattgagtgtgaattccaaagacatataaaaccatcagaaaaacttttgggttttcaagatgaggtgtgtcctaaagctgaaggcgatgaggtccagagatgcgtgtgggcctcggccgtgaacgttaaggataaattcatctacgttgcgcagccaacattggaccgagtcttgatcgtggacgtacagagccaaaaagttgttcaggccgtctccaccgacccagtacctgttaagctacactatgacaagtctcacgaccaagtgtgggtgctcagctggggaactttagaaaagaccagtcctacactgcaggttattaccctcgcgtctggcaacgtcccccatcatacaattcacactcaacccgtaggaaagcagttcgaccgggtagacgatttcttcatccctacaaccaccctgatcattactcatatgcgattcggattcatacttcacaaggacgaagccgccctccaaaagatcgacctcgagaccatgagctatatcaagacaattaatctcaaagattacaaatgcgttccccagtccctggcttacacacaccttggcggatattacttcatcggatgcaaaccagatagtaccggagccgtgagcccccaggttatggttgacggcgtaacggactcagtgattggttttaactctgacgtaacaggaacgccttacgtttcaccggatggtcactacttggtctctatcaacgatgtgaaaggacttgtacgagtgcagtacataactatccgtggggaaattcaagaggcattcgatatttatacaaacctgcacatctcggatctggccttccagccgtcgtttactgaagcacaccaatacaacatatatgggtcctcctccacccagaccgacgtacttttcgtggagctgtcttctggcaaggtaaagatgatcaaaagtctcaaagaaccacttaaagccgaggaatggccgtggaacagaaagaatagacagattcaggattccggactgtttggccagtatcttatgacaccctctaaggactctctctttatcctggacggaagacttaataaattaaattgcgagattaccgaagtggagaagggtaatacagtaatctgggtgggcgacgcgtag

SEQ ID NO: 202640 - DNA, 2544 bp, Artificial Sequence
  derived and/or modified sequence
atgttcaagtgctggagcgtggtgctggtgctgggcttcatcttcctggagagcgagggcagacccaccaaggagggcggctacggcctgaagagctaccagcccctgatgagactgagacacaagcaggagaagaaccaggagagcagcagagtgaagggcttcatgatccaggacggccccttcggcagctgcgagaacaagtactgcggcctgggcagacactgcgtgaccagcagagagaccggccaggccgagtgcgcctgcatggacctgtgcaagagacactacaagcccgtgtgcggcagcgacggcgagttctacgagaaccactgcgaggtgcacagagccgcctgcctgaagaagcagaagatcaccatcgtgcacaacgaggactgcttcttcaagggcgacaagtgcaagaccaccgagtacagcaagatgaagaacatgctgctggacctgcagaaccagaagtacatcatgcaggagaacgagaaccccaacggcgacgacatcagcagaaagaagctgctggtggaccagatgttcaagtacttcgacgccgacagcaacggcctggtggacatcaacgagctgacccaggtgatcaagcaggaggagctgggcaaggacctgttcgactgcaccctgtacgtgctgctgaagtacgacgacttcaacgccgacaagcacctggccctggaggagttctacagagccttccaggtgatccagctgagcctgcccgaggaccagaagctgagcatcaccgccgccaccgtgggccagagcgccgtgctgagctgcgccatccagggcaccctgagaccccccatcatctggaagagaaacaacatcatcctgaacaacctggacctggaggacatcaacgacttcggcgacgacggcagcctgtacatcaccaaggtgaccaccacccacgtgggcaactacacctgctacgccgacggctacgagcaggtgtaccagacccacatcttccaggtgaacgtgccccccgtgatcagagtgtaccccgagagccaggccagagagcccggcgtgaccgccagcctgagatgccacgccgagggcatccccaagccccagctgggctggctgaagaacggcatcgacatcacccccaagctgagcaagcagctgaccctgcaggccaacggcagcgaggtgcacatcagcaacgtgagatacgaggacaccggcgcctacacctgcatcgccaagaacgaggccggcgtggacgaggacatcagcagcctgttcgtggaggacagcgccagaaagaccctggccaacatcctgtggagagaggagggcctgggcatcggcaacatgttctacgtgttctacgaggacggcatcaaggtgatccagcccatcgagtgcgagttccagagacacatcaagcccagcgagaagctgctgggcttccaggacgaggtgtgccccaaggccgagggcgacgaggtgcagagatgcgtgtgggccagcgccgtgaacgtgaaggacaagttcatctacgtggcccagcccaccctggacagagtgctgatcgtggacgtgcagagccagaaggtggtgcaggccgtgagcaccgaccccgtgcccgtgaagctgcactacgacaagagccacgaccaggtgtgggtgctgagctggggcaccctggagaagaccagccccaccctgcaggtgatcaccctggccagcggcaacgtgccccaccacaccatccacacccagcccgtgggcaagcagttcgacagagtggacgacttcttcatccccaccaccaccctgatcatcacccacatgagattcggcttcatcctgcacaaggacgaggccgccctgcagaagatcgacctggagaccatgagctacatcaagaccatcaacctgaaggactacaagtgcgtgccccagagcctggcctacacccacctgggcggctactacttcatcggctgcaagcccgacagcaccggcgccgtgagcccccaggtgatggtggacggcgtgaccgacagcgtgatcggcttcaacagcgacgtgaccggcaccccctacgtgagccccgacggccactacctggtgagcatcaacgacgtgaagggcctggtgagagtgcagtacatcaccatcagaggcgagatccaggaggccttcgacatctacaccaacctgcacatcagcgacctggccttccagcccagcttcaccgaggcccaccagtacaacatctacggcagcagcagcacccagaccgacgtgctgttcgtggagctgagcagcggcaaggtgaagatgatcaagagcctgaaggagcccctgaaggccgaggagtggccctggaacagaaagaacagacagatccaggacagcggcctgttcggccagtacctgatgacccccagcaaggacagcctgttcatcctggacggcagactgaacaagctgaactgcgagatcaccgaggtggagaagggcaacaccgtgatctgggtgggcgacgcctag

SEQ ID NO: 202641 - DNA, 4831 bp, Artificial Sequence
  derived and/or modified sequence
tgcctagggaggaggagcgagaatcagcctggttcagtgactgagacaaactggaggtgaaaggagctggtactgtccactgtgctgtcggtgctgaacctgagacgcgagcggaccagttgctccagcacctgaaggcaacgccctcttgcaccctctgtgccctgtgggacccgcttcaccaacaggacccatatcaacttgacaaaggagtgtggtatcggacgtgggagagagtcctctgtttgccacctgggcgctcattcaggcgtgactttggagatttctatagttttagaccaaactatttttttttccccagctaagacgatcttttgagagttttttttttttattgtgatttatatttccacagcgtttaggaatctttctgggggacttttgtgactgttaaaataaggtgaaaagcaataaggatgtttaagtgctggtcagttgtcttggttctcggattcatttttctggagtcggaaggaaggccaaccaaagaaggaggatatggccttaaatcctatcagcctctaatgagattgcgacataagcaggaaaaaaatcaagaaagttcaagagtcaaaggatttatgattcaggatggcccttttggatcttgtgaaaataagtactgtggtttgggaagacactgtgttaccagcagagagacagggcaagcagaatgtgcctgtatggacctttgcaaacgtcactacaaacctgtgtgtggatctgacggagaattctatgaaaaccactgtgaagtgcacagagctgcttgcctgaaaaaacaaaagattaccattgttcacaatgaagactgcttctttaaaggagataagtgcaagactactgaatacagcaagatgaaaaatatgctattagatttacaaaatcaaaaatatattatgcaagaaaatgaaaatcctaatggcgacgacatatctcggaagaagctattggtggatcaaatgtttaaatattttgatgcagacagtaatggacttgtagatattaatgaactaactcaggtgataaaacaggaagaacttggcaaggatctctttgattgtactttgtatgttctattgaaatatgatgattttaatgctgacaagcacctggctcttgaagaattttatagagcattccaagtgatccagttgagtctgccagaagatcagaaactaagcatcactgcagcaactgtgggacaaagtgctgttctgagctgtgccattcaaggaaccctgagacctcccattatctggaaaaggaacaatattattctaaataatttagatttggaagacatcaatgactttggagatgatgggtccttgtatattactaaggttaccacaactcacgttggcaattacacctgctatgcagatggctatgaacaagtctatcagactcacatcttccaagtgaatgttcctccagtcatccgggtgtatccagagagtcaggctagagagcctggggtaactgccagtcttaggtgccatgcagagggcataccaaagcctcagcttggctggttgaagaatggaattgatattacaccaaagctttccaaacaactcacgcttcaagcaaatggcagtgaggttcacataagcaatgtgcgctatgaagatactggagcatacacttgtatcgcaaagaatgaagcaggagtggatgaagacatctcttctctttttgtggaagactctgctagaaagaccctagctaacatattatggagagaagaaggtctgggaattgggaacatgttctatgttttttatgaagatggaatcaaagtgatacaacccatagaatgtgaatttcagaggcacattaagcctagtgaaaagctccttggatttcaggatgaagtctgtcccaaagctgagggagatgaagttcagaggtgtgtgtgggcatcagctgttaatgtcaaagacaagttcatttatgttgcacagccaactttggacagagtccttattgttgatgtgcagtcccaaaaagttgttcaggcagtgagcacagaccctgtcccagttaaattacactatgacaaatcacatgatcaggtctgggtgctaagctggggtaccttggagaagacatcaccaacactacaggtaattaccctggccagtgggaatgtgcctcaccacacgatccacacccaaccagtgggaaagcaatttgacagagtggatgattttttcattcccaccacaacactcattatcacccatatgaggtttggatttattcttcataaagatgaagctgcactacaaaaaattgatcttgaaaccatgtcatacatcaagacaattaacttgaaggactataagtgcgttcctcagtcattggcatatacacacttgggaggctactacttcattggctgcaaacctgacagcaccggagcagtttccccacaggtcatggtggacggtgtaactgactcagtcattgggttcaatagtgatgtgacgggcactccatatgtctctccagatggccactaccttgtcagcattaatgatgtgaaaggtcttgtaagggttcagtacattaccatcagaggagaaatacaggaggcttttgatatttacacaaatctgcacatatctgatctggcatttcaaccatcctttactgaagcccaccaatataacatctacggtagttcaagcacacaaactgatgtgctctttgtggagctctcttctgggaaggtcaagatgataaagagtctcaaggaaccactcaaggcagaagaatggccttggaaccggaaaaacaggcaaatccaggacagtggcttgtttggtcaatacctgatgacaccttccaaggactctctcttcatcctagatggacgactcaataaattaaactgtgagatcactgaagttgaaaaaggaaatacagtcatttgggttggagatgcctaaaaaccctacgatacaattattgaatgaagcgttttacaatacattgcacttaatccattgtttaaatttacaacttaactttccaagtttatatcctagtcaaacaaaatttacttggttggtccaaataaaataaattgtttttgactaagtgactaagacatacacaattaattatattggttaattagaaatactcagcacaatatttaatgagaaatcacatcagtcacaagaatcaaatatgtaaattatgctttaaacaataaagtaggatttaaatcatttaaaaaactaaactgcagggaatttcagatgacataaagcattatttcattttgagggtagtttattttttttctctgtccttttggtatgattaaacaagaaataaaaggtgttgtggaaacttaaaattcttaattcaaaatattcggtcctgtccactgtttataatattttgtgccttgaagggaatgtcacaggaggaaaaggaagactaaagcctgcatactaaatgctctcataactataaatctcttgttgttaaaaaacatctcttgcaccaaatcctgtcttcagtcttttgtttaaccctcaatgaactaccaattgaaggcataagttggtcttaggttgtatacaggtgtcaaactccacttgacatttactgtataatctgcagcatgctatagaaagtggggaggaagggaggaaaaataattacagtcaaaatatttgcaatctatctactcattttgctttcaatcactagagtgcattatgtttttaatgcaagtttgtctgggatgtcaactgcctacagatgtttattactagcagaatagattatttattaatagattgtttcttttcatatagtccaatgtttcatcatcaggaactttcggttttaaaaaagaaacattacttttgtctgctaaagtaaaccatatatagggaaattaacacctaggaaaagaaaactggcaagagaattgatgaggtattagtggcttagaagaattagtaatataagttgggaataaaggggtagcccgacagtggtaagtaaaaatgtagtactccattgtttttgctatttaaatataatgtatcaaaaacctttattctaaaatttccacaaatgattccttttatccatcttcttgtaatcctaaaagcatcttctcactatgtgctgtagtttgaaacctaacgaatcctcctacttgagacactgtagaaaagtaaaaattgttgcttctgttttgttttaagaggaaatgagaaggccagcagaagtagattaaaactagagagctggtttattaaaataagcagataattatccaggcttaaagtaatagcttacatgttttgaaaatccttgtacttatttttgtttttattgttgcaaaaaaatgttaatgggctgttgaaatgacctccatttacttaaggtaatccaataaggtcttttttaaatatacaaattttactcaagtttaaattgtataaaactgcttagaaacctgaaattttatagtgtgtaatatcttatgtgtatatagcatcctgagctgtgtgatacagtagatttcttcttagcagaaacatgcgaggtagatttaataaacaacaaaaatcagcttatgtttctacttattgaatctgctttactttttagcaattttcttccttgtgaacatgaaccatataaagtgtctgtgacttaatgatttcatgtaagtctgtcgcatacatccttcttttgtagcttacaccatgtggatgctctgtctgtagacactgcttgataaaaggagaataaacctcttacattttaa

SEQ ID NO: 202642 - DNA, 2544 bp, Artificial Sequence
  derived and/or modified sequence
atgtttaagtgctggtctgtggtcctggttttgggatttatctttctggaaagtgagggtcgcccaacaaaggaggggggatacggtttgaaatcgtaccagcccttgatgcggctgcgacataaacaggagaagaatcaagagagctcaagggtcaaggggttcatgatacaggatggcccttttgggtcttgtgagaacaagtattgtgggctggggaggcactgtgtcacttcccgggagacgggacaagcggagtgtgcctgtatggacctgtgcaagaggcactataaacctgtctgtgggagcgacggggaattttatgagaatcactgcgaggtgcatcgagccgcttgtctgaagaaacagaagatcaccatcgtgcataacgaagactgtttctttaaaggggataaatgcaagactacggagtactcaaagatgaagaacatgctcctcgaccttcagaatcagaagtacattatgcaggaaaatgaaaatcccaacggggatgatatcagcaggaagaagctcctggtcgaccagatgttcaagtacttcgatgcagacagcaatggcctggttgacatcaatgagctaacacaggtcattaagcaggaggaactcggtaaagacctgtttgactgcaccttatatgttcttctcaaatacgacgattttaacgctgataaacacctggctctcgaggagttctatcgggccttccaggtgattcaactcagcctgcctgaggaccaaaagctgtccattactgctgccaccgttgggcaatccgcagtgctaagttgtgccatacagggaactctcaggccgccaattatttggaaacggaacaacattatcttgaacaaccttgatctagaggatatcaatgacttcggagatgatggtagcctatacatcacaaaagttacgaccacgcacgttggcaactacacctgctatgccgatggctatgaacaggtgtaccagactcacattttccaagtgaacgttccgcccgtaatacgagtgtacccagaatcccaagctcgagagccaggcgtgacagccagtctgcgttgccatgcagagggtatcccgaagcctcagctcggctggctaaagaatggcatcgatatcactcctaaactcagtaaacagctgacccttcaggcaaacggcagtgaagttcatatctcgaatgtccgatatgaagacaccggggcctatacatgcattgctaagaatgaggctggtgtggatgaggacatttcttcactgtttgtggaagactcagcccgtaagacactggcaaatatcctgtggagggaagagggactgggcatcggcaatatgttttacgtgttctatgaagacggtattaaagtgattcaaccaattgaatgcgagtttcaacggcacatcaaacctagtgaaaagctgcttggttttcaggatgaagtgtgcccgaaagcggaaggggacgaggtgcaaagatgtgtctgggcaagcgccgtaaacgtgaaggacaagttcatctacgtggcacagcctaccttggatcgcgtgctgattgtcgacgtccagagccaaaaggttgtacaggccgtgtcaactgaccctgttccggtcaaacttcattacgataagtcacatgaccaggtctgggtgctgagctggggcactctagagaagacatcccccactctgcaagttattacattggcctcaggcaatgtgccccatcacacaatccatacccagcccgtggggaagcagtttgaccgcgttgatgatttttttatcccgacaacaacattgatcatcacacacatgagattcgggtttatcctccataaagacgaggcagccctgcagaagatcgatcttgagaccatgtcttatatcaaaacaatcaacttgaaagactacaagtgcgtcccacagtctctggcttacactcatctggggggctactattttattggctgcaagccagatagcacgggcgccgtgagcccccaggtcatggtggacggcgtcaccgactctgtgataggcttcaattccgacgtgactggcacaccgtatgtgtcccctgacggtcattaccttgtgagcatcaatgatgtgaaaggcctcgtcagggtgcagtacataacaatacgcggtgagatacaggaggcctttgacatctataccaatctccacatctccgacctcgctttccaacccagctttactgaagctcaccagtacaacatctatggctccagcagtacgcagacagatgtgctgttcgttgaactgtcttcagggaaggtcaagatgatcaaaagcctgaaggagccactaaaggccgaagagtggccttggaatcgaaagaacaggcagattcaagacagcgggctgttcggccaatatttgatgacaccgtcaaaagattcgctattcatattagacggaaggctcaacaaactcaattgtgagatcacggaggtggagaaaggaaatacagtcatctgggttggggatgcatag

SEQ ID NO: 202643 - DNA, 2544 bp, Artificial Sequence
  derived and/or modified sequence
atgttcaagtgctggagcgtggtgctggtgctgggcttcatcttcctggagagcgagggccggcccaccaaggagggcggctacggcctgaagagctaccagcccctgatgaggctgcggcacaagcaggagaagaaccaggagagcagccgggtgaagggcttcatgatccaggacggccccttcggcagctgtgagaacaagtactgcggcctgggccgccactgtgtgaccagccgggagaccggccaggccgagtgtgcctgcatggacctgtgcaagaggcactacaagcctgtgtgtggcagtgatggagagttctatgagaaccactgtgaggtgcacagagctgcctgcctgaagaagcagaagatcaccatcgtgcacaatgaagactgcttcttcaagggggacaagtgcaagaccacagagtacagcaagatgaagaacatgctgctggacctgcagaaccagaagtacatcatgcaggagaatgaaaaccccaatggagatgacatcagcaggaagaagctgctggtggaccagatgttcaagtactttgatgctgacagcaatggcctggtggacatcaatgagctgacccaggtgatcaagcaggaggagctgggcaaggacctgtttgactgcaccctgtatgtgctgctgaagtatgatgacttcaatgctgacaagcacctggccctggaggagttctaccgggccttccaggtgatccagctgagcctgcctgaggaccagaagctgagcatcacagctgccaccgtgggccagagcgctgtgctgagctgtgccatccagggcaccctgcggccccccatcatctggaagaggaacaacatcatcctgaacaacctggacctggaggacatcaatgactttggagatgatggcagcctgtacatcaccaaggtgaccaccacccacgtgggcaactacacctgctacgcagatggctatgagcaggtgtaccagacccacatcttccaggtgaatgtgccccctgtgatccgggtgtacccagagagccaggcccgggagcccggggtgacagccagcctgcgctgccacgccgagggcatccccaagccccagctgggctggctgaagaatggaattgacatcacccccaagctgagcaagcagctgaccctgcaggccaacggcagcgaggtgcacatcagcaatgtgcgctatgaggacaccggggcctacacctgcatcgccaagaatgaagctggggtggatgaggacatcagcagcctgtttgtggaggacagcgccaggaagaccctggccaacatcctgtggagggaggagggcctgggcatcggcaacatgttttatgtgttctatgaagatggcatcaaggtgatccagcccattgaatgtgagttccagaggcacatcaagcccagcgagaagctgctgggcttccaggatgaggtgtgccccaaggccgagggagatgaggtgcagagatgtgtgtgggccagcgctgtgaatgtgaaggacaagttcatctacgtggcccagcccaccctggacagagtgctgattgtggatgtgcagagccagaaggtggtgcaggccgtgtccacagatcctgtgcctgtgaagctgcactatgacaagagccatgaccaggtgtgggtgctgtcctggggcaccctggagaagaccagccccaccctgcaggtgatcaccctggccagcggaaatgtgccccaccacaccatccacacccagcctgtgggcaagcagtttgacagagtggatgacttcttcatccccaccaccaccctcatcatcacccacatgagatttggcttcatcctgcacaaggatgaggccgccctgcagaagattgacctggagaccatgagctacatcaagaccatcaacctgaaggactacaagtgtgtgccccagagcctggcctacacccacctgggcggctactacttcatcggctgcaagccagacagcactggagctgtgagcccccaggtgatggtggatggagtgacagattctgtgattggcttcaacagtgatgtgacaggcaccccctacgtgtccccagatggccactacctggtgtccatcaatgatgtgaagggcctggtgcgggtgcagtacatcaccatccggggggagatccaggaggcctttgacatctacaccaacctgcacatcagtgacctggccttccagcccagcttcacagaggcccaccagtacaacatctacggcagcagcagcacccagacagatgtgctgtttgtggagctgagcagcggcaaggtgaagatgatcaagagcctgaaggagcccctgaaggccgaggagtggccctggaacaggaagaaccggcagatccaggacagcggcctgtttggccagtacctgatgacccccagcaaggacagcctcttcatcctggatggccgcctgaacaagctgaactgtgagatcacagaggtggagaagggcaacacagtcatctgggtgggagatgcctag

SEQ ID NO: 202644 - DNA, 2544 bp, Artificial Sequence
  derived and/or modified sequence
atgttcaagtgctggagcgtggtgctggtgctgggcttcatcttcttggaatccgagggccgcccgacaaaagaaggagggtacggcctcaagtcctatcagccccttatgcgcctaagacacaaacaggagaaaaaccaggagagcagcagggtgaaaggcttcatgatccaggacgggccctttgggagctgtgagaataagtactgtggcctgggccggcactgcgtcacgagcagagagactgggcaggcagaatgcgcatgtatggatctctgcaaacgacattacaaacccgtctgtgggagcgacggggaattctacgagaaccactgtgaggtccatagggcagcctgtctcaaaaagcagaaaatcactatcgtacacaatgaagactgtttttttaagggggataaatgcaagaccaccgaatatagcaaaatgaagaacatgctgttggatctgcagaaccaaaaatacattatgcaagagaatgaaaaccccaacggagatgatattagccggaaaaagttgcttgttgatcagatgttcaagtacttcgacgccgacagcaacggcctcgtggacatcaatgaactcacacaggtgatcaagcaagaggagctgggcaaggacctgtttgattgcactctttacgtgctgctgaaatacgacgactttaatgcagacaaacatctagcgctcgaggagttttacagggcctttcaagtaatccagctgtctcttccggaggatcagaaactctcaattactgcagccactgttgggcaaagcgctgttctctcctgtgctatacaggggacactgagaccacccattatttggaaacgaaataatattattcttaacaatcttgatctagaagacattaacgactttggtgacgacggcagtctgtacataaccaaggtcacaacgactcacgtaggaaactacacatgttatgctgacggatacgagcaggtttatcagactcacatctttcaggtcaatgttcccccagtcatccgggtgtaccctgaaagtcaggctcgggaaccgggggtaaccgcgtcactgagatgccacgcagaggggatcccaaaaccccagctgggatggctcaaaaatgggattgatatcacccctaaattgtccaagcagttgacattacaggccaatggttccgaggtccacatctccaacgtaagatacgaagacaccggcgcctacacttgcatagccaaaaatgaggcgggggttgatgaagatataagcagtctgttcgtcgaggattcggcccgcaagacattggctaacattctgtggagggaagagggactcggcattggtaatatgttctatgtcttctacgaggacggcattaaggtcatccagccaattgagtgtgaatttcagagacatatcaagcccagcgaaaagttattgggtttccaagacgaagtttgcccgaaggctgagggagatgaagtgcaacgctgtgtatgggcttccgccgtgaatgtaaaagacaaatttatttacgtggcacagccaacgcttgatcgggtgttaattgttgatgttcagagccaaaaagtggtccaggctgtgagcaccgaccctgtgcctgtgaagctccattatgacaagagtcacgatcaggtgtgggtcctgtcttggggaactctggagaagaccagccccacactccaagtgataaccttggcctcaggtaacgtgcctcaccatactattcatacccagcccgttggcaagcagttcgatcgagtcgatgatttttttatccctacaacaaccctgatcattacacacatgagattcggcttcattcttcataaagatgaagcggccctgcagaagattgacctggagaccatgagctatattaagaccataaatctgaaggattacaagtgtgtccctcaaagtcttgcctacacacatctgggtgggtactattttatcggatgcaagccagattccacaggtgcggtgtccccacaggtgatggttgacggggtgaccgactccgtgattggctttaactcagacgttaccggaaccccctatgttagccccgacgggcactacctggtctccatcaatgatgttaaaggtctcgtaagggtccagtatatcactatcagaggcgagatccaggaagcattcgatatttatacaaacctacacatttccgatcttgcctttcaaccttccttcaccgaggcccaccagtacaacatctacggatcatctagtacgcagactgacgtcctcttcgtggaactgagctccggcaaggtaaagatgataaagtctttaaaggagcctctaaaagcagaggagtggccctggaatcgcaaaaatagacaaattcaggatagcggactctttggccagtatttgatgacgcctagcaaggactcactttttattcttgatggccgactcaataaactgaattgcgaaattacagaagtcgagaagggaaacacggtaatctgggttggtgatgcctag

SEQ ID NO: 202645 - RNA, 2544 nt, Artificial Sequence
  derived and/or modified sequence
auguuuaaaugcuggaguguggugcucguccuaggguucauuuuucuggagagugagggaagaccaacgaaggagggcgguuacggccugaagucauaccagccacuaaugaggcuacgucauaaacaggaaaagaaucaagaaaguucgagagugaaaggcuucaugauccaggacgggccguucgggucaugcgaaaacaaauacuguggcuugggcagacauugcgugaccaguagagagaccggacaagccgaaugugcaugcauggaucuguguaagcggcacuauaaacccguaugcggcucagacggggaauucuacgagaaucauugcgaagugcacagagccgcgugucuuaaaaaacaaaaaaucacuauuguacauaaugaagauuguuucuucaaaggcgacaagugcaagaccacugaguacagcaagaugaaaaacaugcugcuagacuugcaaaaccaaaaguauauuaugcaggagaaugagaauccaaacggagaugauauuagccgcaaaaagcuacuugucgaccaaauguucaaguauuuugacgcagauuccaauggccuggucgauauuaacgaacucacccagguuauuaaacaagaagagcuaggcaaagaccuguuugauugcacuuuauaugucuugcucaaauacgacgacuuuaacgcggacaaacaccucgcgcuggaggaguucuaucgcgcuuuucagguaauccagcuaagccugccggaggaucagaaacuuagcaucacugccgcuaccguggggcagucagcuguguugucgugugcaauccagggcacccugagaccaccuauuauauggaaaagaaacaacauuauucugaauaaccucgaucucgaagacaucaacgacuucggcgacgauggcucacuguacauuacaaagguuaccaccacucacgugggcaauuauaccugcuacgcagacggcuaugagcagguguaucagacacauauauuccagguaaacgugccuccuguaauaagagucuacccugagagccaggcacgagagccaggaguuaccgcaagccuccgaugucacgcugaagguauucccaaaccucagcugggcugguuaaagaacggcauugacauuaccccaaaacugucuaaacagcuaacccuucaggcuaacggaagugaggugcacaucagcaacgugagauacgaagacaccggggccuacacauguauugcaaagaacgaagccggcguggaugaagauaucucuagccucuuuguggaagauagugcaaggaaaacuuuggcaaauauccucuggagagaggagggacucgguaucgggaacauguucuacguguucuacgaagacggaauuaaggugauccagccgauugaaugugaguuccagaggcacauuaagcccagugagaagcugcuaggauuccaggaugaagugugcccgaaagcagaaggggaugaagugcagaggugcgugugggccucggccgugaacguuaaggauaaauucaucuacguugcgcagccaacauuggaccgagucuugaucguggacguacagagccaaaaaguuguucaggccgucuccaccgacccaguaccuguuaagcuacacuaugacaagucucacgaccaagugugggugcucagcuggggaacuuuagaaaagaccaguccuacacugcagguuauuacccucgcgucuggcaacgucccccaucauacaauucacacucaacccguaggaaagcaguucgaccggguagacgauuuuuuuaucccuacuaccacacugaucaucacacacaugagauuuggauucauucuucauaaagacgaagccgcucuccaaaagaucgaccucgagaccaugucauacaucaaaacuaucaaucuaaaagacuacaagugcguuccccagagucuggccuauacacacuugggcggcuauuauuuuaucggcuguaagccagauuccacaggugccguuucaccccagguuaugguggacgggguuacugauagcguuaucgguuucaauucggacguuaccgggaccccuuauguaucucccgauggacauuaccugguguccauaaacgaugugaaaggccuugugcgagugcaguacauuaccauuaggggcgagauccaggaagcuuuugacaucuacaccaaucuccauauauccgaccuugcauuccagccaagcuuuacagaagcacaucaguauaacauuuacgggaguuccagcacccagaccgacguucuuuuuguugagcucaguaguggaaaaguaaaaaugaucaaaagccugaaggaaccucucaaagcugaggaguggcccuggaaucgcaagaacaggcagauccaggauagcgggcuauuuggucaauaccucaugaccccuagcaaagauagcuuauucauuuuggauggaagguugaacaagcuaaacugugagaucacugagguggagaaagggaacacggucauauggguuggcgacgcauag

SEQ ID NO: 202646 - RNA, 2544 nt, Artificial Sequence
  derived and/or modified sequence
auguucaaguguuggagcguuguccugguguuggguuuuaucuuucucgagucagagggaagaccgaccaaggagggugguuacgggcugaagaguuaccaaccuuugaugaggcugagacacaaacaggagaagaaccaagagagcucccgcguaaaaggcuucaugauccaagacggcccauuugggaguugcgaaaacaaauauugcggacuaggaaggcacugugucaccucaagagagacugggcaggccgagugcgcaugcauggaccugugcaaacgccauuacaagccaguuugcgguuccgauggcgaauucuacgagaaccauugugaagugcacagggcggcaugcuuaaagaaacagaagauuaccauugugcauaacgaagacugcuuuuuuaagggagauaaaugcaagacuaccgaguacagcaaaaugaagaacauguuauuagaucuccagaaccagaaauauauuaugcaggagaacgaaaaccccaauggcgacgacauuucuaggaagaaacucuuaguggaccagauguucaaauacuuugacgcugauucaaacggcuuaguggacauuaacgagcugacacaggugauuaaacaggaagaacugggcaaagaccuauucgauuguacccucuacguacuacuuaaauacgacgauuuuaaugcugauaaacaccucgcgcucgaggaguuuuaccgagcuuuccaagucauucagcuuagucucccggaggaucagaagcugagcauuacagcugcgacuguggggcaaagcgccguucugucuugcgccauucagggaacgcugcgcccacccauuaucuggaaacgcaacaacauuauccugaauaaccucgaucucgaagacauaaacgacuuuggugacgauggaagucuuuauauaacuaaggucaccacaacucauguuggaaacuacacauguuacgcugacggcuaugaacagguuuaccagacacacauuuuccaaguuaacgucccucccguuauacggguauacccagagucgcaggccagagaaccaggcgugacugcaucccuuagaugucacgcagaggguauuccaaagccgcaacugggcuggcuuaagaauggaaucgauaucacgcccaaacucaguaagcaguuaacccuccaagcaaacggcucagagguucacaucucaaaugugagauaugaggacaccggagcuuauacguguaucgccaaaaaugaagcggguguugaugaggacaucucaagcuuauucgucgaagacagugccagaaaaacccucgccaauauccuguggcgcgaagagggacuggggauugggaauauguucuauguguucuacgaagacggcaucaaaguuauucaaccgauugagugugaauuccaaagacauauaaaaccaucagaaaaacuuuuggguuuucaagaugagguguguccuaaagcugaaggcgaugagguccagagaugcgugugggccucggccgugaacguuaaggauaaauucaucuacguugcgcagccaacauuggaccgagucuugaucguggacguacagagccaaaaaguuguucaggccgucuccaccgacccaguaccuguuaagcuacacuaugacaagucucacgaccaagugugggugcucagcuggggaacuuuagaaaagaccaguccuacacugcagguuauuacccucgcgucuggcaacgucccccaucauacaauucacacucaacccguaggaaagcaguucgaccggguagacgauuucuucaucccuacaaccacccugaucauuacucauaugcgauucggauucauacuucacaaggacgaagccgcccuccaaaagaucgaccucgagaccaugagcuauaucaagacaauuaaucucaaagauuacaaaugcguuccccagucccuggcuuacacacaccuuggcggauauuacuucaucggaugcaaaccagauaguaccggagccgugagcccccagguuaugguugacggcguaacggacucagugauugguuuuaacucugacguaacaggaacgccuuacguuucaccggauggucacuacuuggucucuaucaacgaugugaaaggacuuguacgagugcaguacauaacuauccguggggaaauucaagaggcauucgauauuuauacaaaccugcacaucucggaucuggccuuccagccgucguuuacugaagcacaccaauacaacauauauggguccuccuccacccagaccgacguacuuuucguggagcugucuucuggcaagguaaagaugaucaaaagucucaaagaaccacuuaaagccgaggaauggccguggaacagaaagaauagacagauucaggauuccggacuguuuggccaguaucuuaugacacccucuaaggacucucucuuuauccuggacggaagacuuaauaaauuaaauugcgagauuaccgaaguggagaaggguaauacaguaaucugggugggcgacgcguag

SEQ ID NO: 202647 - protein, 159 aa, Artificial Sequence
  derived and/or modified sequence
MAERKGTAKVDFLKKIEKEIQQKWDTERVFEVNASNLEKQTSKGKYFVTFPYPYMNGRLHLGHTFSLSKCEFAVGYQRLKGKCCLFPFGLHCTGMPIKACADKLKREIELYGCPPDFPDEEEEEEETSVKTEDIIIKDKAKGKKSKAAKLDLLNTSGAL

SEQ ID NO: 202648 - protein, 1176 aa, Artificial Sequence
  derived and/or modified sequence
MAERKGTAKVDFLKKIEKEIQQKWDTERVFEVNASNLEKQTSKGKYFVTFPYPYMNGRLHLGHTFSLSKCEFAVGYQRLKGKCCLFPFGLHCTGMPIKACADKLKREIELYGCPPDFPDEEEEEEETSVKTEDIIIKDKAKGKKSKAAAKAGSSKYQWGIMKSLGLSDEEIVKFSEAEHWLDYFPPLAIQDLKRMGLKVDWRRSFITTDVNPYYDSFVRWQFLTLRERNKIKFGKRYTIYSPKDGQPCMDHDRQTGEGVGPQEYTLLKLKVLEPYPSKLSGLKGKNIFLVAATLRPETMFGQTNCWVRPDMKYIGFETVNGDIFICTQKAARNMSYQGFTKDNGVVPVVKELMGEEILGASLSAPLTSYKVIYVLPMLTIKEDKGTGVVTSVPSDSPDDIAALRDLKKKQALRAKYGIRDDMVLPFEPVPVIEIPGFGNLSAVTICDELKIQSQNDREKLAEAKEKIYLKGFYEGIMLVDGFKGQKVQDVKKTIQKKMIDAGDALIYMEPEKQVMSRSSDECVVALCDQWYLDYGEENWKKQTSQCLKNLETFCEETRRNFEATLGWLQEHACSRTYGLGTHLPWDEQWLIESLSDSTIYMAFYTVAHLLQGGNLHGQAESPLGIRPQQMTKEVWDYVFFKEAPFPKTQIAKEKLDQLKQEFEFWYPVDLRVSGKDLVPNHLSYYLYNHVAMWPEQSDKWPTAVRANGHLLLNSEKMSKSTGNFLTLTQAIDKFSADGMRLALADAGDTVEDANFVEAMADAGILRLYTWVEWVKEMVANWDSLRSGPASTFNDRVFASELNAGIIKTDQNYEKMMFKEALKTGFFEFQAAKDKYRELAVEGMHRELVFRFIEVQTLLLAPFCPHLCEHIWTLLGKPDSIMNASWPVAGPVNEVLIHSSQYLMEVTHDLRLRLKNYMMPAKGKKTDKQPLQKPSHCTIYVAKNYPPWQHTTLSVLRKHFEANNGKLPDNKVIASELGSMPELKKYMKKVMPFVAMIKENLEKMGPRILDLQLEFDEKAVLMENIVYLTNSLELEHIEVKFASEAEDKIREDCCPGKPLNVFRIEPGVSVSLVNPQPSNGHFSTKIEIRQGDNCDSIIRRLMKMNRGIKDLSKVKLMRFDDPLLGPRRVPVLGKEYTEKTPISEHAVFNVDLMSKKIHLTENGIRVDIGDTIIYLVH

SEQ ID NO: 202649 - protein, 1122 aa, Artificial Sequence
  derived and/or modified sequence
MNGRLHLGHTFSLSKCEFAVGYQRLKGKCCLFPFGLHCTGMPIKACADKLKREIELYGCPPDFPDEEEEEEETSVKTEDIIIKDKAKGKKSKAAAKAGSSKYQWGIMKSLGLSDEEIVKFSEAEHWLDYFPPLAIQDLKRMGLKVDWRRSFITTDVNPYYDSFVRWQFLTLRERNKIKFGKRYTIYSPKDGQPCMDHDRQTGEGVGPQEYTLLKLKVLEPYPSKLSGLKGKNIFLVAATLRPETMFGQTNCWVRPDMKYIGFETVNGDIFICTQKAARNMSYQGFTKDNGVVPVVKELMGEEILGASLSAPLTSYKVIYVLPMLTIKEDKGTGVVTSVPSDSPDDIAALRDLKKKQALRAKYGIRDDMVLPFEPVPVIEIPGFGNLSAVTICDELKIQSQNDREKLAEAKEKIYLKGFYEGIMLVDGFKGQKVQDVKKTIQKKMIDAGDALIYMEPEKQVMSRSSDECVVALCDQWYLDYGEENWKKQTSQCLKNLETFCEETRRNFEATLGWLQEHACSRTYGLGTHLPWDEQWLIESLSDSTIYMAFYTVAHLLQGGNLHGQAESPLGIRPQQMTKEVWDYVFFKEAPFPKTQIAKEKLDQLKQEFEFWYPVDLRVSGKDLVPNHLSYYLYNHVAMWPEQSDKWPTAVRANGHLLLNSEKMSKSTGNFLTLTQAIDKFSADGMRLALADAGDTVEDANFVEAMADAGILRLYTWVEWVKEMVANWDSLRSGPASTFNDRVFASELNAGIIKTDQNYEKMMFKEALKTGFFEFQAAKDKYRELAVEGMHRELVFRFIEVQTLLLAPFCPHLCEHIWTLLGKPDSIMNASWPVAGPVNEVLIHSSQYLMEVTHDLRLRLKNYMMPAKGKKTDKQPLQKPSHCTIYVAKNYPPWQHTTLSVLRKHFEANNGKLPDNKVIASELGSMPELKKYMKKVMPFVAMIKENLEKMGPRILDLQLEFDEKAVLMENIVYLTNSLELEHIEVKFASEAEDKIREDCCPGKPLNVFRIEPGVSVSLVNPQPSNGHFSTKIEIRQGDNCDSIIRRLMKMNRGIKDLSKVKLMRFDDPLLGPRRVPVLGKEYTEKTPISEHAVFNVDLMSKKIHLTENGIRVDIGDTIIYLVH

SEQ ID NO: 202650 - DNA, 3531 bp, Artificial Sequence
  derived and/or modified sequence
atggctgagaggaagggcaccgccaaggttgatttccttaagaaaattgagaaagagattcagcagaagtgggacactgaaagggtgtttgaagtgaatgcctcgaacctggagaagcaaacttcaaagggaaagtatttcgtcacatttccttacccctatatgaatggacggcttcatttgggacataccttctctttaagtaaatgtgaatttgcggtgggctatcagcggttaaaggggaaatgttgtctctttccctttggacttcactgcactggtatgcctattaaggcgtgcgcagacaaattgaagcgcgaaattgagttatacgggtgcccgccagatttccccgatgaggaagaagaagaggaggagacctccgtcaaaaccgaagatattatcataaaagataaggccaagggaaaaaaatctaaggccgccgctaaggctggctcttctaagtaccaatgggggattatgaagagtctggggcttagtgacgaagaaatcgttaaattctccgaggccgagcattggctagactacttccccccgctggctatccaggacttaaagcgcatgggcctgaaagttgactggaggaggagcttcatcactacagacgttaacccctattacgacagctttgtgcggtggcagtttctgacgctgcgtgaacgcaacaagatcaaatttgggaaacgctatactatatactcccccaaagacgggcagccctgtatggaccacgacaggcaaacaggcgaaggggtgggtccgcaggaatatacactgcttaagttaaaggtgctggagccgtacccttcaaagctgagcgggctcaagggcaaaaacatcttccttgtagccgcaacactgagacctgaaaccatgttcggccagacgaattgttgggtgcgtcccgacatgaagtatatcgggttcgagacagtgaacggtgacatcttcatctgcacccagaaggccgccagaaatatgtcttaccagggctttactaaagacaatggagtcgtgcccgtcgtgaaggaactcatgggcgaagagatcctgggtgccagcctgagtgccccgctgactagttataaggtcatttacgtcctgcccatgctgaccatcaaggaggataaggggactggtgtggtgacgtccgtccccagcgattcacccgatgatatcgccgcactgcgagatctgaagaagaaacaggcactccgggcaaaatatggcatccgcgacgatatggtgttgccatttgagccagtgcccgtgattgaaattcctggattcgggaatctgtccgccgtaactatctgcgacgagttgaaaatccagtcccagaacgatcgggaaaaacttgctgaggccaaggaaaaaatttatctgaagggcttctacgagggcattatgctggtagatgggttcaaaggccaaaaggtacaggatgtgaagaaaaccatccaaaagaaaatgattgatgccggggacgctcttatctacatggaaccggagaaacaagtaatgtctaggtcatccgacgagtgcgtcgttgccctgtgcgatcagtggtatctcgactatggtgaagaaaattggaagaagcagacctcgcagtgcctgaaaaacctggaaacattctgcgaagaaacccggagaaactttgaggccactctaggttggttgcaggagcacgcatgctcccgcacatacgggttgggaacacacttgccctgggatgagcagtggctcattgaatccctgagcgacagcactatctatatggccttttataccgtggcccaccttttacaaggtgggaatctgcacggccaggcagaatctccactgggcatccggcctcagcagatgaccaaagaggtgtgggattacgtgtttttcaaggaggccccttttccaaaaacacaaatcgccaaagagaaattggatcaactgaaacaggagttcgaattttggtatcctgtggacctccgggtctctggtaaggatttagtgccaaatcatttgagctactatttgtacaaccacgtcgctatgtggcccgagcagagtgacaaatggccaactgctgttcgcgccaatggtcacctgttgctaaatagtgagaaaatgtccaagtccacaggtaactttctgacgttgacacaggcaattgataagttctccgccgatggaatgcggcttgctctggccgatgctggggacacagtagaagacgccaactttgttgaagctatggctgacgctggcatcttacggctctatacgtgggtggaatgggtgaaggaaatggtagccaattgggattctcttcgaagcgggccagccagcacgtttaacgacagagtctttgcctctgaattaaatgctggtatcataaaaacagaccagaactacgagaagatgatgttcaaggaggcactgaagacaggcttttttgaattccaggcggcaaaggacaaatacagagaattggccgtggagggtatgcacagagagctcgtctttcggttcattgaagtccagaccctgctgctggcgcccttctgcccgcatctctgcgagcacatctggactctgctgggcaaaccagatagcattatgaacgcctcatggcctgtggctggccctgtgaacgaagtgttaattcactccagccagtatctgatggaggtaacacacgacctgcgcttacgcctcaagaactacatgatgcccgctaagggcaaaaagacagacaaacagccactgcagaaaccgtcccactgcacaatttacgttgccaagaactaccccccttggcagcacaccaccctaagtgtgctccgtaaacacttcgaggctaataacggaaagttacccgataataaggtgatcgcatcggaacttggtagtatgcctgagctgaagaagtacatgaaaaaggttatgcctttcgttgccatgatcaaggaaaacctggagaaaatggggccacggatcctagacctgcagctggagtttgacgaaaaagccgtgctaatggagaacattgtgtacctgacaaactccctggagctggaacacattgaggtcaaatttgcgtcagaggcagaggataagatccgggaagactgttgtcccggcaaacctctcaatgttttccgtatcgaaccaggggtttctgtgagcttggtgaacccccagccatcaaatgggcatttctctaccaaaatagagatccggcaaggggataattgcgactctataattcgccggttaatgaaaatgaacagggggatcaaggatctcagtaaagtaaaacttatgcgattcgacgatccattgttaggccctcggagagtgccagtgcttggcaaggagtacaccgaaaaaactcccattagtgaacacgctgtatttaatgtagacctcatgtctaagaagattcatcttacagaaaatggcattcgggtggatattggggataccatcatttacctcgtgcattag

SEQ ID NO: 202651 - DNA, 3531 bp, Artificial Sequence
  derived and/or modified sequence
atggccgagaggaaaggaacagccaaggtggacttcctgaagaagattgagaaggagatccagcagaagtgggacacagagcgggtgtttgaggtgaatgccagcaacctggagaagcagaccagcaagggcaagtactttgtgaccttcccctacccctacatgaatggccgcctgcacctgggccacaccttcagcctgagcaaatgtgaatttgctgtgggctaccagaggctgaagggcaagtgctgcctcttccccttcggcctgcactgcaccggcatgcccatcaaggcctgtgccgacaagctgaagcgggagattgagctgtatggctgccccccagacttcccagatgaggaggaggaggaggaggagacctctgtgaagacagaggacatcatcatcaaggacaaggccaagggcaagaagagcaaggccgccgccaaggccggcagcagcaagtaccagtggggcatcatgaagagcctgggcctgagtgatgaggagatcgtgaagttcagcgaggccgagcactggctggactacttcccccccctggccatccaggacctgaagaggatgggcctgaaggtggactggaggaggagcttcatcaccacagatgtgaacccctactatgacagctttgtgcgctggcagttcctgaccctgcgggagaggaacaagatcaagtttgggaagcgctacaccatctacagccccaaggatggccagccctgcatggaccatgaccggcagacaggagagggcgtgggcccccaggagtacaccctgctgaagctgaaggtgctggagccctaccccagcaagctgagcggcctgaagggcaagaacatcttcctggtggccgccaccctgcggcctgagaccatgtttggccagaccaactgctgggtgcggccagacatgaagtacatcggctttgagaccgtgaatggagacatcttcatctgcacccagaaggccgccaggaacatgagctaccagggcttcaccaaggacaatggagtggtgcctgtggtgaaggagctgatgggagaggagatcctgggcgccagcctgagcgcccccctgaccagctacaaggtgatctacgtgctgcccatgctgaccatcaaggaggacaagggcaccggggtggtgacctctgtgcccagcgacagcccagatgacattgctgccctgcgggacctgaagaagaagcaggccctgcgggccaagtatggcatcagagatgacatggtgctgccctttgagcctgtgcctgtgattgagatccctggctttggaaacctgtctgctgtgaccatctgtgatgagctgaagatccagagccagaatgaccgggagaagctggccgaggccaaggagaagatctacctgaagggcttctatgagggcatcatgctggtggatggcttcaagggccagaaggtgcaggatgtgaagaagaccatccagaagaagatgattgatgctggagatgccctgatctacatggagcctgagaagcaggtgatgagccgcagcagtgatgaatgtgtggtggccctgtgtgaccagtggtacctggactatggagaggagaactggaagaagcagaccagccagtgcctgaagaacctggagaccttctgtgaggagaccaggaggaactttgaggccaccctgggctggctgcaggagcacgcctgcagcaggacctacggcctgggcacccacctgccctgggatgagcagtggctgattgagagcctgagtgacagcaccatctacatggccttctacacagtggcccacctgctgcagggcggcaacctgcacggccaggccgagagccccctgggcatccggccccagcagatgaccaaggaggtgtgggactatgtgttcttcaaggaggcccccttccccaagacccagatcgccaaggagaagctggaccagctgaagcaggagtttgagttctggtaccctgtggacctgcgggtgtctgggaaggacctggtgcccaaccacctgagctactacctgtacaaccacgtggccatgtggccagagcagagcgacaagtggcccacagctgtgcgggccaacggccacctgctgctgaacagcgagaagatgagcaagagcactggaaacttcctgaccctgacccaggccatcgacaagttcagcgcagatggcatgaggctggccctggctgatgctggggacacagtggaggatgccaactttgtggaggccatggctgatgctggcatcctgcggctgtacacctgggtggagtgggtgaaggagatggtggccaactgggacagcctgcggagcggccctgccagcaccttcaatgacagagtgtttgccagcgagctgaatgccggcatcatcaagacagaccagaactatgagaagatgatgttcaaggaggccctgaagacaggcttctttgagttccaggccgccaaggacaagtaccgggagctggccgtggagggcatgcaccgggagctggtgttccgcttcatcgaggtgcagaccctgctgctggcccccttctgcccccacctgtgtgagcacatctggaccctgctgggcaagccagacagcatcatgaatgcctcctggcctgtggccggccctgtgaatgaggtgctgatccacagcagccagtacctgatggaggtgacccatgacctgcggctgcggctgaagaactacatgatgcctgccaagggcaagaagacagacaagcagcccctgcagaagcccagccactgcaccatctacgtggccaagaactacccaccctggcagcacaccaccctgtctgtgctgaggaagcactttgaggccaacaacgggaagctgcctgacaacaaggtgattgccagcgagctgggctccatgcctgagctgaagaagtacatgaagaaggtgatgccctttgtggccatgatcaaggagaacctggagaagatgggcccccgcatcctggacctgcagctggagtttgatgagaaggctgtgctgatggagaacatcgtgtacctgaccaacagcctggagctggagcacatcgaggtgaagtttgccagcgaggccgaggacaagatccgggaggactgctgccctgggaagcccctgaatgtgttcagaattgagcccggggtgtctgtgtccctggtgaacccccagcccagcaatggccacttcagcaccaagattgagatccggcagggcgacaactgtgacagcatcatccggcggctgatgaagatgaacagaggcatcaaggacctgagcaaggtgaagctgatgagatttgatgaccccctgctgggcccccggcgggtgcctgtgctgggcaaggagtacacagagaagacccccatcagcgagcacgctgtgttcaacgtggacctgatgagcaagaagatccacctgacagaaaatggcatccgggtggacattggagacaccatcatctacctggtgcactag

SEQ ID NO: 202652 - DNA, 4766 bp, Artificial Sequence
  derived and/or modified sequence
ggctgtagttagtaaggagccggatgattgcctcagcaggtgtgaagcgtgtgctttagtttcgtgggaggcctggcatccccgagagggaggggaaaggtaaccactcctttgtggaggtcgccagggtcattgtcgtggatttgcacagtcggctgggcggtgcaatggcggaaagaaaaggaacagccaaagtggactttttgaagaagattgagaaagaaatccaacagaaatgggatactgagagagtgtttgaggtcaatgcatctaatttagagaaacagaccagcaagggcaagtattttgtaaccttcccatatccatatatgaatggacgccttcatttgggacacacgttttctttatccaaatgtgagtttgctgtagggtaccagcgattgaaaggaaaatgttgtctgtttccctttggcctgcactgtactggaatgcctattaaggcatgtgctgataagttgaaaagagaaatagagctgtatggttgcccccctgattttccagatgaagaagaggaagaggaagaaaccagtgttaaaacagaagatataataattaaggataaagctaaaggaaaaaagagtaaagctgctgctaaagctggatcttctaaataccagtggggcattatgaaatcccttggcctgtctgatgaagagatagtaaaattttctgaagcagaacattggcttgattatttcccgccactggctattcaggatttaaaaagaatgggtttgaaggtagactggcgtcgttccttcatcaccactgatgttaatccttactatgattcatttgtcagatggcaatttttaacattaagagaaagaaacaaaattaaatttgggaagcggtatacaatttactctccgaaagatggacagccttgcatggatcatgatagacaaactggagagggtgttggacctcaggaatatactttactcaaattgaaggtgcttgagccatacccatctaaattaagtggcctgaaaggtaaaaatattttcttggtggctgctactctcagacctgagaccatgtttgggcagacaaattgttgggttcgtcctgatatgaagtacattggatttgagacggtgaatggtgatatattcatctgtacccaaaaagcagccaggaatatgtcataccagggctttaccaaagacaatggcgtggtgcctgttgttaaggaattaatgggggaggaaattcttggtgcatcactttctgcacctttaacatcatacaaggtgatctatgttctcccaatgctaactattaaggaggataaaggcactggtgtggttacaagtgttccttccgactcccctgatgatattgctgccctcagagacttgaagaaaaagcaagccttacgagcaaaatatggaattagagatgacatggtcttgccatttgagccggtgccagtcattgaaatcccaggttttggaaatctttctgctgtaaccatttgtgatgagttgaaaattcagagccagaatgaccgggaaaaacttgcagaagcaaaggagaagatatatctaaaaggattttatgagggtatcatgttggtggatggatttaaaggacagaaggttcaagatgtaaagaagactattcagaaaaagatgattgacgctggagatgcacttatttacatggaaccagagaaacaagtgatgtccaggtcgtcagatgaatgtgttgtggctctgtgtgaccagtggtacttggattatggagaagagaattggaagaaacagacatctcagtgcttgaagaacctggaaacattctgtgaggagaccaggaggaattttgaagccaccttaggttggctacaagaacatgcttgctcaagaacttatggtctaggcactcacctgccttgggatgagcagtggctgattgaatcactttctgactccactatttacatggcattttacacagttgcacacctattgcaggggggtaacttgcatggacaggcagagtctccgctgggcattagaccgcaacagatgaccaaggaagtttgggattatgttttcttcaaggaggctccatttcctaagactcagattgcaaaggaaaaattagatcagttaaagcaggagtttgaattctggtatcctgttgatcttcgcgtctctggcaaggatcttgttccaaatcatctttcatattacctttataatcatgtggctatgtggccggaacaaagtgacaaatggcctacagctgtgagagcaaatggacatctcctcctgaactctgagaagatgtcaaaatccacaggcaacttcctcactttgacccaagctattgacaaattttcagcagatggaatgcgtttggctctggctgatgctggtgacactgtagaagatgccaactttgtggaagccatggcagatgcaggtattctccgtctgtacacctgggtagagtgggtgaaagaaatggttgccaactgggacagcctaagaagtggtcctgccagcactttcaatgatagagtttttgccagtgaattgaatgcaggaattataaaaacagatcaaaactatgaaaagatgatgtttaaagaagctttgaaaacagggttttttgagtttcaggccgcaaaagataagtaccgtgaattggctgtggaagggatgcacagagaacttgtgttccggtttattgaagttcagacacttctcctcgctccattctgtccacatttgtgtgagcacatctggacactcctgggaaagcctgactcaattatgaatgcttcatggcctgtggcaggtcctgttaatgaagttttaatacactcctcacagtatcttatggaagtaacacatgaccttagactacgactcaagaactatatgatgccagctaaagggaagaagactgacaaacaacccctgcagaagccctcacattgcaccatctatgtggcaaagaactatccaccttggcaacataccaccctgtctgttctacgtaaacactttgaggccaataacggaaaactgcctgacaacaaagtcattgctagtgaactaggcagtatgccagaactgaagaaatacatgaagaaagtcatgccatttgttgccatgattaaggaaaatctggagaagatggggcctcgtattctggatttgcaattagaatttgatgaaaaggctgtgcttatggagaatatagtctatctgactaattcgcttgagctagaacacatagaagtcaagtttgcctccgaagcagaagataaaatcagggaagactgctgtcctgggaaaccacttaatgtttttagaatagaacctggtgtgtccgtttctctggtgaatccccagccatccaatggccacttctcaaccaaaattgaaatcaggcaaggagataactgtgattccataatcaggcgtttaatgaaaatgaatcgaggaattaaagacctttccaaagtgaaactgatgagatttgatgatccactgttggggcctcgacgagttcctgtcctgggaaaggagtacaccgagaagacccccatttctgagcatgctgttttcaatgtggacctcatgagcaagaaaattcatctgactgagaatgggataagggtggatattggcgatacaataatctatctggttcattaaactcatgcacattggagatttatcctggtttcttaggaatactactactctgattgtgtctactgattggctatcagaaccttaggctggacctaaatagattgatttcatttctaaccatccaattctgcatgtattcataattctatcaagtcatctttgattcctggacctaataaattttttttccctttctttgggtgtccaagagaaatggtttttgccaaactctttttaaaaaacaaattgttgctatttcctagaagtttctggtttttaagatgaacataaaagtgtcagtatgcttcttttatgaggtgtactttatactttgatgaaggctaaggtgtacctaacagctttttatagtatattcatttatggagttagctgtatttttttttaaaaaagaaaagtagtaaattagcagcttttttttttaaatgaagagaacttcatgatgatttaaaagaactaatgagaatattttgacttgacttcaattactaagtattttgtataaagaacaaataggtcctgcattttataagactttttaaagctttaattattcaactaagaaccaataatggcttcttcaaggctaatatcaatagtttataagcagtatatttcacctacactaaatatgggcattttaaaagaagattccccccttcccccccagaaatctgcatttactaaatttgtcttaagtccaattgtgtttaaaggtcatgctggtcgggtgtggtggctcacacctataatcccagcactttgggaggccaaggtgggcagtcacctgaggtcaggagtttgagaccagcctgaccaacatggtgaaaccccgtctctactaaaaatacaaaaattagcttggcatggtggcgggtacctgtaatcccagctgcttgggagtgtgaggcaggagaatcgcttgaacctgggagaccgaggttgcagtgagctgaaaccgtgccattgcactccagcttaggcaacaagagtgaaactctgtctcaatcaatccatcaatcaatcaataaaatagaggtcatgctgact

SEQ ID NO: 202653 - DNA, 3737 bp, Artificial Sequence
  derived and/or modified sequence
aggtgtgaagcgtgtgctttagtttcgtgggaggcctggcatccccgagagggaggggaaaggtaaccactcctttgtggaggtcgccagggtcattgtcgtggatttgcacagtcggctgggcggtgcaatggcgcaagggcaagtattttgtaaccttcccatatccatatatgaatggacgccttcatttgggacacacgttttctttatccaaatgtgagtttgctgtagggtaccagcgattgaaaggaaaatgttgtctgtttccctttggcctgcactgtactggaatgcctattaaggcatgtgctgataagttgaaaagagaaatagagctgtatggttgcccccctgattttccagatgaagaagaggaagaggaagaaaccagtgttaaaacagaagatataataattaaggataaagctaaaggaaaaaagagtaaagctgctgctaaagctggatcttctaaataccagtggggcattatgaaatcccttggcctgtctgatgaagagatagtaaaattttctgaagcagaacattggcttgattatttcccgccactggctattcaggatttaaaaagaatgggtttgaaggtagactggcgtcgttccttcatcaccactgatgttaatccttactatgattcatttgtcagatggcaatttttaacattaagagaaagaaacaaaattaaatttgggaagcggtatacaatttactctccgaaagatggacagccttgcatggatcatgatagacaaactggagagggtgttggacctcaggaatatactttactcaaattgaaggtgcttgagccatacccatctaaattaagtggcctgaaaggtaaaaatattttcttggtggctgctactctcagacctgagaccatgtttgggcagacaaattgttgggttcgtcctgatatgaagtacattggatttgagacggtgaatggtgatatattcatctgtacccaaaaagcagccaggaatatgtcataccagggctttaccaaagacaatggcgtggtgcctgttgttaaggaattaatgggggaggaaattcttggtgcatcactttctgcacctttaacatcatacaaggtgatctatgttctcccaatgctaactattaaggaggataaaggcactggtgtggttacaagtgttccttccgactcccctgatgatattgctgccctcagagacttgaagaaaaagcaagccttacgagcaaaatatggaattagagatgacatggtcttgccatttgagccggtgccagtcattgaaatcccaggttttggaaatctttctgctgtaaccatttgtgatgagttgaaaattcagagccagaatgaccgggaaaaacttgcagaagcaaaggagaagatatatctaaaaggattttatgagggtatcatgttggtggatggatttaaaggacagaaggttcaagatgtaaagaagactattcagaaaaagatgattgacgctggagatgcacttatttacatggaaccagagaaacaagtgatgtccaggtcgtcagatgaatgtgttgtggctctgtgtgaccagtggtacttggattatggagaagagaattggaagaaacagacatctcagtgcttgaagaacctggaaacattctgtgaggagaccaggaggaattttgaagccaccttaggttggctacaagaacatgcttgctcaagaacttatggtctaggcactcacctgccttgggatgagcagtggctgattgaatcactttctgactccactatttacatggcattttacacagttgcacacctattgcaggggggtaacttgcatggacaggcagagtctccgctgggcattagaccgcaacagatgaccaaggaagtttgggattatgttttcttcaaggaggctccatttcctaagactcagattgcaaaggaaaaattagatcagttaaagcaggagtttgaattctggtatcctgttgatcttcgcgtctctggcaaggatcttgttccaaatcatctttcatattacctttataatcatgtggctatgtggccggaacaaagtgacaaatggcctacagctgtgagagcaaatggacatctcctcctgaactctgagaagatgtcaaaatccacaggcaacttcctcactttgacccaagctattgacaaattttcagcagatggaatgcgtttggctctggctgatgctggtgacactgtagaagatgccaactttgtggaagccatggcagatgcaggtattctccgtctgtacacctgggtagagtgggtgaaagaaatggttgccaactgggacagcctaagaagtggtcctgccagcactttcaatgatagagtttttgccagtgaattgaatgcaggaattataaaaacagatcaaaactatgaaaagatgatgtttaaagaagctttgaaaacagggttttttgagtttcaggccgcaaaagataagtaccgtgaattggctgtggaagggatgcacagagaacttgtgttccggtttattgaagttcagacacttctcctcgctccattctgtccacatttgtgtgagcacatctggacactcctgggaaagcctgactcaattatgaatgcttcatggcctgtggcaggtcctgttaatgaagttttaatacactcctcacagtatcttatggaagtaacacatgaccttagactacgactcaagaactatatgatgccagctaaagggaagaagactgacaaacaacccctgcagaagccctcacattgcaccatctatgtggcaaagaactatccaccttggcaacataccaccctgtctgttctacgtaaacactttgaggccaataacggaaaactgcctgacaacaaagtcattgctagtgaactaggcagtatgccagaactgaagaaatacatgaagaaagtcatgccatttgttgccatgattaaggaaaatctggagaagatggggcctcgtattctggatttgcaattagaatttgatgaaaaggctgtgcttatggagaatatagtctatctgactaattcgcttgagctagaacacatagaagtcaagtttgcctccgaagcagaagataaaatcagggaagactgctgtcctgggaaaccacttaatgtttttagaatagaacctggtgtgtccgtttctctggtgaatccccagccatccaatggccacttctcaaccaaaattgaaatcaggcaaggagataactgtgattccataatcaggcgtttaatgaaaatgaatcgaggaattaaagacctttccaaagtgaaactgatgagatttgatgatccactgttggggcctcgacgagttcctgtcctgggaaaggagtacaccgagaagacccccatttctgagcatgctgttttcaatgtggacctcatgagcaagaaaattcatctgactgagaatgggataagggtggatattggcgatacaataatctatctggttcattaaactcatgcacattggagatttatcctggtttcttaggaatactactactctgattgtgtctactgattggctatcagaaccttaggctggacctaaatagattgatttcatttctaaccatccaattctgcatgtattcataattctatcaagtcatctttgattcctggacctaataaattttttttccctttc

SEQ ID NO: 202654 - DNA, 3531 bp, Artificial Sequence
  derived and/or modified sequence
atggccgagcggaagggcaccgccaaggtggacttcctgaagaagatcgagaaagaaatccagcagaagtgggatacggagcgtgttttcgaagtaaacgcctccaacctagaaaaacagacttccaagggaaaatactttgtgaccttcccctacccgtatatgaatggccggctgcacctgggacacaccttctctttgtcaaaatgcgagtttgcagtgggctatcagcgcctcaaaggaaagtgttgtctgtttcctttcggtctccattgcacgggcatgcccatcaaggcatgcgctgataaactcaagcgtgagattgagctgtacggctgcccccccgatttcccggatgaagaagaagaagaggaagagacctcagtgaaaaccgaggacatcattatcaaggataaggcaaaaggcaagaaatcaaaagctgccgctaaagcaggcagctcgaagtatcaatgggggatcatgaagagcttgggcctgagcgacgaggagattgtcaaatttagcgaggccgaacattggctggattacttccccccactcgccatacaggatctcaagaggatgggtctcaaagtcgattggcgacggtcctttatcacaactgacgtgaacccatattacgactcattcgtcaggtggcagttccttacgctccgggaacgtaataagattaagttcggcaaaagatacacgatatactcacctaaggatgggcagccctgcatggatcacgaccgccagacaggtgagggggtgggaccccaggagtatactctcttaaaactgaaagtgctcgagccctatccttcgaagctctctgggttaaagggaaagaacattttccttgtcgcagccactctgcgccccgaaaccatgtttggccaaacaaattgctgggtacggcccgatatgaagtatattggattcgaaactgttaatggcgatatttttatctgtactcaaaaggcagcgagaaatatgtcttaccaggggttcactaaggacaacggtgtggtacccgtggtgaaagagctaatgggggaggagatccttggtgccagcctgtccgccccactaacgagttataaggttatatacgttctgcccatgcttacaattaaggaggacaaggggaccggagtagtaacttctgtgcccagcgactcccctgacgacatcgctgccctgagagatttaaagaagaaacaagctctgagagccaaatacggcatcagagatgacatggtcttaccctttgagccggtgccagttatagagattcctggattcgggaatctgtccgcagtgactatttgcgacgagctgaaaattcaatctcaaaatgatcgcgagaagctcgcggaggccaaagagaaaatctacctgaaggggttctacgagggaattatgctcgtggatggcttcaaaggacagaaggtgcaggacgtaaagaaaactatacagaaaaagatgatcgatgccggagacgctttgatttacatggagcccgagaaacaggtcatgagtaggagtagcgatgaatgtgtggtcgcgctttgtgaccagtggtatctagattatggtgaggagaactggaaaaaacagacatcccagtgcctgaaaaacctggaaaccttctgcgaggagactcgcaggaacttcgaagccaccctcggatggctgcaagaacacgcttgctctaggacctacgggctggggactcacctgccctgggacgagcagtggctgatcgaatccctctccgacagtacaatttacatggccttctacacagtcgcacacctcctacagggagggaaccttcacggacaggccgagtccccgcttggaattcgacctcagcagatgacgaaagaagtctgggactatgtcttttttaaggaagctccctttccaaagacacagatcgccaaagagaagttagaccagttgaaacaggaatttgagttctggtaccctgtggatctgagagttagcggcaaggatcttgtcccaaaccatctcagctattatttgtataaccatgtggccatgtggcccgaacagtctgataaatggcctaccgcagtgagagcgaatggacatctcctgcttaactcagaaaaaatgtccaagagcacaggcaactttctgacactgactcaggctattgataaatttagcgctgatggcatgcggttggcattggctgatgctggagatacagtggaagatgcaaactttgtggaagccatggctgacgcaggtattctgcgcctttatacttgggtggagtgggtaaaggagatggttgcaaattgggattccttacgatccggccctgcctctacctttaacgacagggtgttcgcttccgaacttaacgccgggattattaaaacagatcagaattacgagaagatgatgttcaaggaagctctcaaaacaggtttcttcgaattccaggctgcaaaagataaataccgcgagctggccgtagaaggaatgcatagggagctggtcttccgctttatcgaggttcagacattgttattggccccattttgtccacatctttgtgaacatatttggaccctcttagggaaacccgatagtattatgaatgcaagctggccggtcgccggtccagtgaatgaagtcctgattcattcaagtcaatatctgatggaggtgacgcacgatctgcgtcttaggcttaagaattacatgatgcccgcaaaaggcaagaaaactgataagcagcctctgcagaaacccagtcactgtacaatctacgttgccaaaaattatcctccctggcagcacacaaccctcagtgtgctgagaaagcacttcgaggccaataacggtaagctacctgacaataaggttatcgccagcgaactgggctcgatgccagagctcaaaaaatatatgaagaaagtgatgcctttcgtggctatgattaaggagaacctggaaaaaatgggccctaggatcctcgatcttcagctggaattcgacgagaaagcagtacttatggagaatattgtgtatctgacgaatagcctggagttggagcatattgaggttaagttcgcctccgaagcggaggacaaaattcgcgaggattgctgcccagggaagccactcaatgtgtttagaatcgagcccggcgtttcagttagcctcgtgaatcctcagccatcaaatgggcatttcagtaccaaaattgagataaggcagggcgacaactgtgacagcattattaggcgcctcatgaagatgaatcgcggcattaaggatcttagcaaagtcaagttaatgagatttgatgatccgctacttggccctcggagggtgccggtattggggaaagagtatacggaaaaaacacccataagcgagcacgctgttttcaacgtcgatctgatgtctaaaaaaattcatttgaccgagaatgggatccgagtggacattggagacacgatcatctaccttgtgcattag

SEQ ID NO: 202655 - DNA, 3531 bp, Artificial Sequence
  derived and/or modified sequence
atggccgagcggaagggtactgccaaggtcgatttcctaaagaaaattgagaaggagatccagcagaagtgggatactgagagggtgttcgaggttaatgcttcgaacttggagaagcagacatctaagggtaaatactttgtaacattcccttacccatatatgaatggcaggctgcacctggggcacaccttttccctttcaaaatgtgaatttgctgtggggtaccaacgcctcaagggaaaatgttgccttttcccttttggcctgcattgcaccgggatgcctatcaaggcctgcgctgacaaacttaaacgagagattgagttatacggctgtccccctgattttcctgacgaagaggaagaagaggaggagacgagcgtgaaaacagaggacatcatcattaaagacaaggcaaagggaaaaaagagcaaggcagcagcaaaggcaggtagctctaagtatcagtggggtatcatgaagtctcttggcctctctgacgaagaaattgtaaagttcagcgaggctgaacattggttagattacttccctcctcttgccatccaagatctaaagcggatgggactgaaggtcgactggcggcgtagttttattacaacggacgtgaacccctactacgactcctttgtgcggtggcagttcctgactctacgagaacggaataaaatcaagtttggcaagcggtacacaatctatagccctaaggacggccagccttgtatggaccacgataggcagaccggggaaggcgtaggtcctcaggagtatacccttttaaagttgaaagtgctggagccctacccttccaaactcagcggacttaaggggaagaacatttttctcgtcgccgcaaccctgaggcctgagaccatgtttggacagacgaactgttgggtacggcctgacatgaaatacataggcttcgaaactgtgaacggggacatatttatatgtactcagaaagctgctcgcaatatgtcttatcagggctttacaaaggataacggggtagtcccagtcgtcaaggagctgatgggtgaggagatcctcggagcctctctgtcagcgccattgacttcttataaagtcatctatgtcttaccaatgctgacaataaaggaagacaagggaaccggtgtcgttacttcagtgccctctgattctcctgatgatattgcagctctccgcgacctcaagaaaaagcaggccctgagggcaaaatacggcatccgggatgatatggtacttccctttgaaccagtgccagttatcgagatcccagggttcgggaatttgtctgctgttactatatgcgatgagttgaaaatacagtcacagaacgatcgcgagaagctggcagaggccaaagagaagatatacttaaaaggcttttatgaaggcattatgttggtggatggttttaagggacagaaggttcaggacgtaaagaagaccattcaaaagaaaatgatcgacgctggcgatgcactcatctatatggaacccgaaaagcaagtgatgagcaggagttcagatgagtgtgttgtcgctctgtgcgatcagtggtacttagactatggtgaagagaactggaaaaagcagacatcgcaatgcctaaaaaatctcgaaactttttgcgaagaaaccaggcgaaactttgaagcgaccctcgggtggcttcaagaacacgcctgttcacgaacctatggattaggaacccaccttccatgggacgagcaatggctgatcgagtcactgtcggactccacaatctacatggccttttatactgtagctcacctgctccagggcggtaacctacatggtcaagccgagtctcccctaggcatcaggccccagcaaatgacgaaagaggtgtgggattacgtcttttttaaagaagcacccttcccaaagacacagattgccaaggagaagctggaccagcttaagcaggaatttgagttctggtacccagtggacctgagggttagcggaaaagacttggtcccgaaccatcttagctactacctctacaatcatgtggctatgtggcctgaacaaagtgataagtggccgactgccgtgcgcgctaatgggcatttactgctcaattcagaaaaaatgagcaagtcaaccggtaacttcctgacccttacccaagccatcgataagttttctgccgatgggatgagattagccctggccgacgctggcgacaccgttgaggatgctaatttcgtggaggccatggcggacgcaggaattctgcggctgtacacatgggtggaatgggtgaaagaaatggtcgccaactgggactctttacgctccggaccggcaagtaccttcaatgatcgagtgtttgcctccgagttgaacgccggtataataaaaacagaccagaactacgaaaagatgatgttcaaagaggcgctgaagactggcttctttgagttccaggctgcgaaggacaagtacagagagctggctgtagagggcatgcatcgagagctggtgtttcgctttatagaggtgcagaccctattactggcacctttctgtccccatctctgtgagcacatctggacactcctggggaaacccgactctataatgaacgcctcgtggcccgtggcgggacccgttaacgaggtcttgatccacagctcccagtatcttatggaggtgacccatgatctgagacttagactgaaaaattatatgatgcccgctaagggcaaaaaaaccgacaagcagccgctccaaaaaccctctcactgcactatctacgtggctaaaaactacccaccgtggcagcatactacacttagtgtcttgaggaagcacttcgaggcaaacaacggaaaactgcccgataacaaggttattgcctcagagttgggctccatgccagaactgaagaaatacatgaaaaaggtgatgccttttgtcgcgatgataaaggaaaatctcgaaaagatgggccctaggattttggatctccagttagagtttgacgagaaggccgtgctgatggaaaacatcgtatatctcaccaacagtctggaactggagcacatagaggtaaagttcgcttccgaagcagaggataagatccgagaggattgctgtcctggtaagccattgaacgtgtttaggattgagcccggagtctccgtttccctcgttaacccacagccctctaacggccacttctctactaagatagagatcaggcaaggagataattgcgactcgatcattcgcaggctgatgaaaatgaatcggggtattaaggacctgtctaaagtcaaattgatgaggttcgacgatcccttgctcggcccacgaagggtgccagtgcttggcaaggagtataccgagaaaacgcccataagcgagcacgctgtgtttaacgtagatctgatgtcgaagaaaatccatctgaccgaaaatggtattcgcgtggacataggagataccattatctacttagtgcactag

SEQ ID NO: 202656 - DNA, 3531 bp, Artificial Sequence
  derived and/or modified sequence
atggccgagagaaagggcaccgccaaggtggacttcctgaagaagatcgagaaggagatccagcagaagtgggacaccgagagagtgttcgaggtgaacgccagcaacctggagaagcagaccagcaagggcaagtacttcgtgaccttcccctacccctacatgaacggcagactgcacctgggccacaccttcagcctgagcaagtgcgagttcgccgtgggctaccagagactgaagggcaagtgctgcctgttccccttcggcctgcactgcaccggcatgcccatcaaggcctgcgccgacaagctgaagagagagatcgagctgtacggctgcccccccgacttccccgacgaggaggaggaggaggaggagaccagcgtgaagaccgaggacatcatcatcaaggacaaggccaagggcaagaagagcaaggccgccgccaaggccggcagcagcaagtaccagtggggcatcatgaagagcctgggcctgagcgacgaggagatcgtgaagttcagcgaggccgagcactggctggactacttcccccccctggccatccaggacctgaagagaatgggcctgaaggtggactggagaagaagcttcatcaccaccgacgtgaacccctactacgacagcttcgtgagatggcagttcctgaccctgagagagagaaacaagatcaagttcggcaagagatacaccatctacagccccaaggacggccagccctgcatggaccacgacagacagaccggcgagggcgtgggcccccaggagtacaccctgctgaagctgaaggtgctggagccctaccccagcaagctgagcggcctgaagggcaagaacatcttcctggtggccgccaccctgagacccgagaccatgttcggccagaccaactgctgggtgagacccgacatgaagtacatcggcttcgagaccgtgaacggcgacatcttcatctgcacccagaaggccgccagaaacatgagctaccagggcttcaccaaggacaacggcgtggtgcccgtggtgaaggagctgatgggcgaggagatcctgggcgccagcctgagcgcccccctgaccagctacaaggtgatctacgtgctgcccatgctgaccatcaaggaggacaagggcaccggcgtggtgaccagcgtgcccagcgacagccccgacgacatcgccgccctgagagacctgaagaagaagcaggccctgagagccaagtacggcatcagagacgacatggtgctgcccttcgagcccgtgcccgtgatcgagatccccggcttcggcaacctgagcgccgtgaccatctgcgacgagctgaagatccagagccagaacgacagagagaagctggccgaggccaaggagaagatctacctgaagggcttctacgagggcatcatgctggtggacggcttcaagggccagaaggtgcaggacgtgaagaagaccatccagaagaagatgatcgacgccggcgacgccctgatctacatggagcccgagaagcaggtgatgagcagaagcagcgacgagtgcgtggtggccctgtgcgaccagtggtacctggactacggcgaggagaactggaagaagcagaccagccagtgcctgaagaacctggagaccttctgcgaggagaccagaagaaacttcgaggccaccctgggctggctgcaggagcacgcctgcagcagaacctacggcctgggcacccacctgccctgggacgagcagtggctgatcgagagcctgagcgacagcaccatctacatggccttctacaccgtggcccacctgctgcagggcggcaacctgcacggccaggccgagagccccctgggcatcagaccccagcagatgaccaaggaggtgtgggactacgtgttcttcaaggaggcccccttccccaagacccagatcgccaaggagaagctggaccagctgaagcaggagttcgagttctggtaccccgtggacctgagagtgagcggcaaggacctggtgcccaaccacctgagctactacctgtacaaccacgtggccatgtggcccgagcagagcgacaagtggcccaccgccgtgagagccaacggccacctgctgctgaacagcgagaagatgagcaagagcaccggcaacttcctgaccctgacccaggccatcgacaagttcagcgccgacggcatgagactggccctggccgacgccggcgacaccgtggaggacgccaacttcgtggaggccatggccgacgccggcatcctgagactgtacacctgggtggagtgggtgaaggagatggtggccaactgggacagcctgagaagcggccccgccagcaccttcaacgacagagtgttcgccagcgagctgaacgccggcatcatcaagaccgaccagaactacgagaagatgatgttcaaggaggccctgaagaccggcttcttcgagttccaggccgccaaggacaagtacagagagctggccgtggagggcatgcacagagagctggtgttcagattcatcgaggtgcagaccctgctgctggcccccttctgcccccacctgtgcgagcacatctggaccctgctgggcaagcccgacagcatcatgaacgccagctggcccgtggccggccccgtgaacgaggtgctgatccacagcagccagtacctgatggaggtgacccacgacctgagactgagactgaagaactacatgatgcccgccaagggcaagaagaccgacaagcagcccctgcagaagcccagccactgcaccatctacgtggccaagaactaccccccctggcagcacaccaccctgagcgtgctgagaaagcacttcgaggccaacaacggcaagctgcccgacaacaaggtgatcgccagcgagctgggcagcatgcccgagctgaagaagtacatgaagaaggtgatgcccttcgtggccatgatcaaggagaacctggagaagatgggccccagaatcctggacctgcagctggagttcgacgagaaggccgtgctgatggagaacatcgtgtacctgaccaacagcctggagctggagcacatcgaggtgaagttcgccagcgaggccgaggacaagatcagagaggactgctgccccggcaagcccctgaacgtgttcagaatcgagcccggcgtgagcgtgagcctggtgaacccccagcccagcaacggccacttcagcaccaagatcgagatcagacagggcgacaactgcgacagcatcatcagaagactgatgaagatgaacagaggcatcaaggacctgagcaaggtgaagctgatgagattcgacgaccccctgctgggccccagaagagtgcccgtgctgggcaaggagtacaccgagaagacccccatcagcgagcacgccgtgttcaacgtggacctgatgagcaagaagatccacctgaccgagaacggcatcagagtggacatcggcgacaccatcatctacctggtgcactag

SEQ ID NO: 202657 - protein, 902 aa, Artificial Sequence
  derived and/or modified sequence
MADPEVCCFITKILCAHGGRMALDALLQEIALSEPQLCEVLQVAGPDRFVVLETGGEAGITRSVVATTRARVCRRKYCQRPCDNLHLCKLNLLGRCNYSQSERNLCKYSHEVLSEENFKVLKNHELSGLNKEELAVLLLQSDPFFMPEICKSYKGEGRQQICNQQPPCSRLHICDHFTRGNCRFPNCLRSHNLMDRKVLAIMREHGLNPDVVQNIQDICNSKHMQKNPPGPRAPSSHRRNMAYRARSKSRDRFFQGSQEFLASASASAERSCTPSPDQISHRASLEDAPVDDLTRKFTYLGSQDRARPPSGSSKATDLGGTSQAGTSQRFLENGSQEDLLHGNPGSTYLASNSTSAPNWKSLTSWTNDQGARRKTVFSPTLPAARSSLGSLQTPEAVTTRKGTGLLSSDYRIINGKSGTQDIQPGPLFNNNADGVATDITSTRSLNYKSTSSGHREISSPRIQDAGPASRDVQATGRIADDADPRVALVNDSLSDVTSTTSSRVDDHDSEEICLDHLCKGCPLNGSCSKVHFHLPYRWQMLIGKTWTDFEHMETIEKGYCNPGIHLCSVGSYTINFRVMSCDSFPIRRLSTPSSVTKPANSVFTTKWIWYWKNESGTWIQYGEEKDKRKNSNVDSSYLESLYQSCPRGVVPFQAGSRNYELSFQGMIQTNIASKTQKDVIRRPTFVPQWYVQQMKRGPDHQPAKTSSVSLTATFRPQEDFCFLSSKKYKLSEIHHLHPEYVRVSEHFKASMKNFKIEKIKKIENSELLDKFTWKKSQMKEEGKLLFYATSRAYVESICSNNFDSFLHETHENKYGKGIYFAKDAIYSHKNCPYDAKNVVMFVAQVLVGKFTEGNITYTSPPPQFDSCVDTRSNPSVFVIFQKDQVYPQYVIEYTEDKACVIS

SEQ ID NO: 202658 - protein, 699 aa, Artificial Sequence
  derived and/or modified sequence
MADPEVCCFITKILCAHGGRMALDALLQEIALSEPQLCEVLQVAGPDRFVVLETGGEAGITRSVVATTRARVCRRKYCQRPCDNLHLCKLNLLGRCNYSQSERNLCKYSHEVLSEENFKVLKNHELSGLNKEELAVLLLQSDPFFMPEICKSYKGEGRQQICNQQPPCSRLHICDHFTRGNCRFPNCLRSHNLMDRKVLAIMREHGLNPDVVQNIQDICNSKHMQKNPPGPRAPSSHRRNMAYRARSKSRDRFFQGSQEFLASASASAERSCTPSPDQISHRASLEDAPVDDLTRKFTYLGSQDRARPPSGSSKATDLGGTSQAGTSQRFLENGSQEDLLHGNPGSTYLASNSTSAPNWKSLTSWTNDQGARRKTVFSPTLPAARSSLGSLQTPEAVTTRKGTGLLSSDYRIINGKSGTQDIQPGPLFNNNADGVATDITSTRSLNYKSTSSGHREISSPRIQDAGPASRDVQATGRIADDADPRVALVNDSLSDVTSTTSSRVDDHDSEEICLDHLCKGCPLNGSCSKVHFHLPYRWQMLIGKTWTDFEHMETIEKGYCNPGIHLCSVGSYTINFRVMSCDSFPIRRLSTPSSVTKPANSVFTTKWIWYWKNESGTWIQYGEEKDKRKNSNVDSSYLESLYQSCPRGVVPFQAGSRNYELSFQGMIQTNIASKTQKDVIRRPTFVPQWYVQQMKRGPE

SEQ ID NO: 202659 - protein, 506 aa, Artificial Sequence
  derived and/or modified sequence
MAYRARSKSRDRFFQGSQEFLASASASAERSCTPSPDQISHRASLEDAPVDDLTRKFTYLGSQDRARPPSGSSKATDLGGTSQAGTSQRFLENGSQEDLLHGNPGSTYLASNSTSAPNWKSLTSWTNDQGARRKTVFSPTLPAARSSLGSLQTPEAVTTRKGTGLLSSDYRIINGKSGTQDIQPGPLFNNNADGVATDITSTRSLNYKSTSSGHREISSPRIQDAGPASRDVQATGRIADDADPRVALVNDSLSDVTSTTSSRVDDHDSEEICLDHLCKGCPLNGSCSKVHFHLPYRWQMLIGKTWTDFEHMETIEKGYCNPGIHLCSVGSYTINFRVMSCDSFPIRRLSTPSSVTKPANSVFTTKWIWYWKNESGTWIQYGEEKDKRKNSNVDSSYLESLYQSCPRGVVPFQAGSRNYELSFQGMIQTNIASKTQKDVIRRPTFVPQWYVQEERARVSVLKQLFADRCLRCSCPGLIKSLVNLEPVFLKSSCLHYSAVSICIIDE

SEQ ID NO: 202660 - DNA, 2709 bp, Artificial Sequence
  derived and/or modified sequence
atggccgaccccgaggtgtgctgcttcatcaccaagatcctgtgcgcccacggcggcagaatggccctggacgccctgctgcaggagatcgccctgagcgagccccagctgtgcgaggtgctgcaggtggccggccccgacagattcgtggtgctggagaccggcggcgaggccggcatcaccagaagcgtggtggccaccaccagagccagagtgtgcagaagaaagtactgccagagaccctgcgacaacctgcacctgtgcaagctgaacctgctgggcagatgcaactacagccagagcgagagaaacctgtgcaagtacagccacgaggtgctgagcgaggagaacttcaaggtgctgaagaaccacgagctgagcggcctgaacaaggaggagctggccgtgctgctgctgcagagcgaccccttcttcatgcccgagatctgcaagagctacaagggcgagggcagacagcagatctgcaaccagcagcccccctgcagcagactgcacatctgcgaccacttcaccagaggcaactgcagattccccaactgcctgagaagccacaacctgatggacagaaaggtgctggccatcatgagagagcacggcctgaaccccgacgtggtgcagaacatccaggacatctgcaacagcaagcacatgcagaagaacccccccggccccagagcccccagcagccacagaagaaacatggcctacagagccagaagcaagagcagagacagattcttccagggcagccaggagttcctggccagcgccagcgccagcgccgagagaagctgcacccccagccccgaccagatcagccacagagccagcctggaggacgcccccgtggacgacctgaccagaaagttcacctacctgggcagccaggacagagccagaccccccagcggcagcagcaaggccaccgacctgggcggcaccagccaggccggcaccagccagagattcctggagaacggcagccaggaggacctgctgcacggcaaccccggcagcacctacctggccagcaacagcaccagcgcccccaactggaagagcctgaccagctggaccaacgaccagggcgccagaagaaagaccgtgttcagccccaccctgcccgccgccagaagcagcctgggcagcctgcagacccccgaggccgtgaccaccagaaagggcaccggcctgctgagcagcgactacagaatcatcaacggcaagagcggcacccaggacatccagcccggccccctgttcaacaacaacgccgacggcgtggccaccgacatcaccagcaccagaagcctgaactacaagagcaccagcagcggccacagagagatcagcagccccagaatccaggacgccggccccgccagcagagacgtgcaggccaccggcagaatcgccgacgacgccgaccccagagtggccctggtgaacgacagcctgagcgacgtgaccagcaccaccagcagcagagtggacgaccacgacagcgaggagatctgcctggaccacctgtgcaagggctgccccctgaacggcagctgcagcaaggtgcacttccacctgccctacagatggcagatgctgatcggcaagacctggaccgacttcgagcacatggagaccatcgagaagggctactgcaaccccggcatccacctgtgcagcgtgggcagctacaccatcaacttcagagtgatgagctgcgacagcttccccatcagaagactgagcacccccagcagcgtgaccaagcccgccaacagcgtgttcaccaccaagtggatctggtactggaagaacgagagcggcacctggatccagtacggcgaggagaaggacaagagaaagaacagcaacgtggacagcagctacctggagagcctgtaccagagctgccccagaggcgtggtgcccttccaggccggcagcagaaactacgagctgagcttccagggcatgatccagaccaacatcgccagcaagacccagaaggacgtgatcagaagacccaccttcgtgccccagtggtacgtgcagcagatgaagagaggccccgaccaccagcccgccaagaccagcagcgtgagcctgaccgccaccttcagaccccaggaggacttctgcttcctgagcagcaagaagtacaagctgagcgagatccaccacctgcaccccgagtacgtgagagtgagcgagcacttcaaggccagcatgaagaacttcaagatcgagaagatcaagaagatcgagaacagcgagctgctggacaagttcacctggaagaagagccagatgaaggaggagggcaagctgctgttctacgccaccagcagagcctacgtggagagcatctgcagcaacaacttcgacagcttcctgcacgagacccacgagaacaagtacggcaagggcatctacttcgccaaggacgccatctacagccacaagaactgcccctacgacgccaagaacgtggtgatgttcgtggcccaggtgctggtgggcaagttcaccgagggcaacatcacctacaccagcccccccccccagttcgacagctgcgtggacaccagaagcaaccccagcgtgttcgtgatcttccagaaggaccaggtgtacccccagtacgtgatcgagtacaccgaggacaaggcctgcgtgatcagctag

SEQ ID NO: 202661 - DNA, 2709 bp, Artificial Sequence
  derived and/or modified sequence
atggccgatcccgaggtttgctgttttatcaccaagattctgtgtgctcacggaggccggatggcattggatgctctgttgcaagagatcgccttgtccgagcctcaactttgcgaagtactgcaggtcgctgggcccgaccgattcgtagtcctcgagactggcggcgaggctggaatcactcgaagcgtggtagccacaactagggctagggtgtgccgccgcaaatactgccaacgaccttgcgacaacctccacctctgtaagctgaacctccttgggagatgtaattatagccaatcggagcgcaatttatgtaaatacagccacgaggtactgtccgaggagaatttcaaagtactcaagaatcatgagctgtccggcttgaacaaggaagaactcgctgtgctgctactgcagtcggatccattctttatgcccgaaatatgcaagtcttataagggagaagggagacagcagatttgcaaccaacaacccccatgcagtcgcttgcatatctgcgatcacttcaccagaggcaactgccgatttcccaattgcctccgatcacataatctgatggacagaaaagtcttagccatcatgcgcgaacatgggctcaaccccgacgtcgtacagaatatacaggacatttgcaattctaaacatatgcagaaaaaccctcctgggccacgggcaccttcctctcaccgacgtaatatggcatacagggccagaagcaagagtcgcgataggttctttcagggcagccaggaatttctcgcatccgctagcgcatcggccgagagaagttgtacccccagcccagaccagatctcccaccgcgcctctttagaggatgccccggtagacgaccttacccgcaagttcacgtacctgggatcccaagatcgggcgaggccacccagtggcagctctaaagcaacagacctaggcggcaccagtcaggccggtacaagtcaaaggtttcttgaaaatgggagccaggaagacttactccacggaaatccaggctccacctatctagcttcaaactctacctccgctcctaactggaagtcgctgacatcgtggacgaacgatcagggggccagacgaaagaccgtattctcccctacattaccagcagcaagatcatccttgggatccttgcagacgcctgaggctgtaacaacacgcaaagggaccggcctgctgagctctgattatcggattatcaatggaaaaagcggcacgcaggacattcaacctggccccctattcaataacaacgccgacggagtggccactgacatcaccagtacaaggtcattgaattacaagagcacaagctcaggtcaccgcgaaatatctagcccccgcatccaggacgctggtcctgcgtcgagggatgtccaagctactggacgtatagccgatgacgcagatcctagagttgcactggtgaatgattccctgagcgatgtcacctctactacaagtagccgtgtggatgatcacgattccgaagagatctgtctcgaccacctgtgcaaaggctgccctttaaacggctcctgctcaaaggtgcattttcatcttccttacaggtggcaaatgctcatcggcaaaacctggacagattttgaacacatggaaacaatagaaaagggatactgcaaccctgggatacacctgtgcagtgtggggtcatataccattaattttagggtcatgagttgcgattccttccccatccgcaggctgtctaccccaagtagtgtgacaaagcctgctaattcagtctttacaaccaaatggatttggtactggaaaaatgagagcgggacctggattcagtatggggaggagaaagataaacgcaagaacagcaacgtggattcatcttacctggagagtttgtatcagtcatgcccccggggggtggttccgttccaggcgggcagcagaaactacgagctgtctttccagggtatgattcagactaacattgcctccaagacgcagaaggatgtgatcagacgacctactttcgtgcctcagtggtatgttcagcaaatgaaacggggcccagatcaccagccagccaaaacttcttcagtctcgttgactgctacattccgcccccaggaggatttttgtttcctgtcatctaaaaaatacaagctgtcagaaatccatcatctgcacccagaatatgtgcgggtgagcgaacactttaaggcaagcatgaagaactttaaaatagaaaagataaaaaagattgagaactccgagctgttggacaagttcacttggaaaaagagtcagatgaaggaagaggggaaacttctgttctacgctacatcaagggcctatgtggaatccatatgctccaataattttgattccttccttcacgaaacccatgagaataaatatggcaaaggaatttatttcgccaaagatgctatttattcacacaaaaactgcccctacgacgcaaaaaatgttgtgatgtttgtcgctcaggttctagtgggcaaattcaccgaggggaatattacgtacacctcaccgcccccacagtttgattcgtgcgttgatacaaggtcaaacccttcagttttcgttatattccagaaagatcaggtgtatccgcaatacgtgatagaatacactgaagacaaggcatgcgtgatcagttag

SEQ ID NO: 202662 - DNA, 2709 bp, Artificial Sequence
  derived and/or modified sequence
atggctgaccctgaggtgtgctgcttcatcaccaagatcctgtgtgcccatggaggccgcatggccctggatgccctgctgcaggagatcgccctgtctgagccccagctgtgtgaggtgctgcaggtggccggccctgacagatttgtggtgctggagaccggcggggaggccggcatcaccaggtctgtggtggccaccacccgggcccgggtgtgcaggaggaagtactgccagaggccctgtgacaacctgcacctgtgcaagctgaacctgctgggccgctgcaactacagccagagcgagaggaacctgtgcaagtacagccatgaggtgctgtctgaggagaacttcaaggtgctgaagaaccacgagctgagcggcctgaacaaggaggagctggccgtgctgctgctgcagagcgaccccttcttcatgcctgagatctgcaagagctacaagggggagggccggcagcagatctgcaaccagcagcccccctgcagccggctgcacatctgtgaccacttcacccggggcaactgccgcttccccaactgcctgcggagccacaacctgatggacaggaaggtgctggccatcatgagggagcacggcctgaacccagatgtggtgcagaacatccaggacatctgcaacagcaagcacatgcagaagaaccccccaggcccccgggcccccagcagccacagaagaaacatggcctaccgggcccggagcaagagccgggaccgcttcttccagggcagccaggagttcctggccagcgccagcgccagcgctgagaggagctgcacccccagcccagaccagatcagccaccgggccagcctggaggatgcccctgtggatgacctgaccaggaagttcacctacctgggcagccaggaccgggcccggccccccagcggcagcagcaaggccacagacctgggcggcaccagccaggccggcaccagccagcgcttcctggagaatggcagccaggaggacctgctgcacggcaaccctggcagcacctacctggccagcaacagcaccagcgcccccaactggaagagcctgacctcctggaccaatgaccagggcgcccggaggaagacagtgttcagccccaccctgcctgctgcccggagcagcctgggcagcctgcagaccccagaggccgtgaccaccaggaaaggaacaggcctgctgagcagtgactaccgcatcatcaacgggaagagcggcacccaggacatccagcccggccccctcttcaacaacaatgctgatggagtggccacagacatcaccagcaccaggagcctgaactacaagagcaccagcagcggccaccgggagatcagcagcccccgcatccaggatgctggccctgccagcagagatgtgcaggccaccggcagaattgctgatgatgctgacccccgggtggccctggtgaatgacagcctgagtgatgtgaccagcaccaccagcagccgggtggatgaccatgattctgaggagatctgcctggaccacctgtgcaagggctgccccctgaatggcagctgcagcaaggtgcacttccacctgccctaccgctggcagatgctgattggcaagacctggacagactttgagcacatggagaccatcgagaagggctactgcaaccctggcatccacctgtgcagcgtgggcagctacaccatcaacttccgggtgatgagctgtgacagcttccccatccggcggctgagcacccccagctctgtgaccaagccagccaacagcgtcttcaccaccaagtggatctggtactggaagaatgaaagtggcacctggatccagtatggagaggagaaggacaagaggaagaacagcaatgtggacagcagctacctggagagcctgtaccagagctgcccccggggcgtggtgcccttccaggccggcagcagaaattatgagctgtccttccagggcatgatccagaccaacatcgccagcaagacccagaaggatgtgatcagaagacccacctttgtgccccagtggtacgtgcagcagatgaagaggggccctgaccaccagcctgccaagaccagctctgtgtccctgacagccaccttccggccccaggaggacttctgcttcctgagcagcaagaagtacaagctgtctgagatccaccacctgcacccagaatatgtgcgggtgtctgagcacttcaaggcctccatgaagaacttcaagattgagaagatcaagaagattgaaaattctgagctgctggacaagttcacctggaagaagagccagatgaaggaggagggcaagctgctcttctacgccaccagccgggcctacgtggagagcatctgcagcaacaactttgacagcttcctgcacgagacccatgagaacaagtatggcaagggcatctactttgccaaggatgccatctacagccacaagaactgcccctatgatgccaagaatgtggtgatgtttgtggcccaggtgctggtgggcaagttcacagagggcaacatcacctacaccagccccccaccccagtttgacagctgtgtggacaccaggagcaaccccagcgtgtttgtgatcttccagaaggaccaggtgtacccccagtatgtgattgagtacacagaggacaaggcctgtgtgatctcctag

SEQ ID NO: 202663 - DNA, 2709 bp, Artificial Sequence
  derived and/or modified sequence
atggccgaccccgaggtgtgctgcttcatcaccaagatcctgtgcgcgcacggaggacgcatggctctggacgccctcttacaggagatcgcactgtctgagccccaactgtgtgaagtacttcaagtggccggccccgatcgttttgtcgttctggaaacaggaggagaggctggcatcacacgatcagtagtggcgaccacacgtgccagggtgtgccggaggaagtactgtcagcgtccatgcgataatctacacctgtgcaaactcaatctgcttggtcgatgtaactactcccagtcggaaaggaacctgtgtaagtatagccacgaggttctgagcgaggagaatttcaaggtcctgaagaaccatgagcttagcggacttaacaaggaagagttagccgttctgttgttgcaaagcgacccattcttcatgcccgagatctgcaagagttataagggcgaaggacgccaacagatttgtaatcagcagcctccttgcagcaggctgcatatttgcgatcatttcacccgcggaaattgccgctttccgaactgtctacgttctcataacctgatggaccggaaagtcctggctattatgcgcgagcatggcttgaatcccgatgtggtgcagaatatccaggacatctgtaacagtaagcacatgcagaagaacccacctgggccacgcgccccttctagccaccgcaggaatatggcctacagggccagatccaaatcacgggacagattttttcagggatcacaggagtttcttgcctcagccagtgcttcagcagaaagatcatgcacaccaagtcccgatcaaatcagtcatcgggcctcactggaggatgcccccgtggatgaccttactaggaagttcacatatctcggttctcaggatcgcgctagacctccgagcggctctagcaaggccacagatctcggcggaactagccaggccggcacgtcacagcggttccttgagaatggctctcaggaagacctactgcacggcaatcctggctcaacctacctggccagtaattccaccagcgcccccaattggaaatctctgacatcttggaccaatgaccagggggcccgacgtaaaaccgtgttttccccgactctgcccgccgcccggtccagtctcggttcccttcagacccccgaggccgtgacgaccagaaaaggcaccggcctattgagctccgactataggattattaatggcaagtctggtacccaggacattcaacctggccctctgtttaataacaacgcagacggggttgccacagatatcacctccacaaggagtctcaattacaagtcaacttcctcagggcatcgggaaatttcttcccctagaatccaggatgcaggtcccgcctcgcgggacgtccaggcaacagggcgaattgctgacgatgccgacccccgcgtggccttggtgaatgacagtctgtcagatgtcaccagcaccactagcagcagagtcgatgaccatgattccgaagaaatatgcctggaccacctgtgtaaagggtgcccacttaatggcagttgtagcaaagtccacttccatctaccgtataggtggcaaatgcttattggcaaaacgtggactgattttgagcacatggagaccatcgaaaaaggatactgcaatcctgggatacacctctgcagcgtgggctcctacaccataaattttagagtcatgtcctgcgattcattcccaatcaggaggttgagcacaccaagctctgttaccaagccagccaacagcgtattcaccactaagtggatctggtactggaagaatgaatctggaacctggattcaatatggcgaggagaaggacaagcgtaaaaacagtaacgtcgatagcagttacctcgagtctttgtatcagtcttgtccccgcggggtagtgccttttcaggccggatcacggaattatgagctgtctttccagggcatgattcagaccaatatcgcgtcaaaaacccagaaagatgtgattcgaaggcccacatttgtcccacagtggtacgtccagcagatgaaaagaggtcctgaccatcagccagcaaagacttcaagtgtcagccttacggccacctttagacctcaggaagacttttgctttctgtcttcaaagaagtacaaactgtctgaaatccatcacctgcatccagaatacgtcagagtgagcgagcatttcaaagcctcgatgaagaattttaaaattgaaaagattaaaaagatcgagaatagcgagctgttggacaagtttacttggaagaaaagtcaaatgaaggaggagggaaaactactcttctatgcaaccagccgcgcatacgtagagagcatttgttcaaataacttcgatagtttcctgcatgagacacacgaaaacaagtatggcaaaggtatttacttcgccaaggacgctatctacagccataagaattgcccctacgacgcaaaaaacgtcgtaatgtttgtagcccaggtgttggtggggaaattcactgaaggaaatatcacctacacatcgccgccacctcagtttgattcttgtgtcgacacccgatctaacccatctgtctttgtaattttccaaaaagatcaggtgtaccctcagtacgtgatagagtatacagaagataaggcatgtgtgataagctag

SEQ ID NO: 202664 - DNA, 2709 bp, Artificial Sequence
  derived and/or modified sequence
atggccgatccagaggtctgttgtttcataacgaagattttgtgtgcccatggcggacgtatggccttggacgctttgcttcaggagatcgctcttagtgagccacagctgtgtgaggtcctccaggtggcaggccctgatcggtttgttgtgctggagaccgggggtgaagcgggtatcactcgatcagttgtggcaacaacccgtgctagagtttgtaggagaaaatattgccaacgaccatgtgacaacttgcacctgtgcaagctgaatctgctgggcagatgtaattacagtcaaagcgagcggaacctgtgcaagtattcccatgaggtgctcagtgaagagaacttcaaagtccttaagaaccatgagctaagtggcctgaacaaggaggaattggccgttctgctgctccagtcagatcccttttttatgcccgaaatttgtaagagctacaagggtgagggaaggcaacaaatctgtaaccagcagccgccatgctcccggttacacatatgcgaccattttacccggggaaactgtagattccccaactgcttaagatctcacaacctgatggataggaaggtccttgccatcatgagagaacatggccttaatccagatgtggtgcaaaatattcaggatatttgcaacagtaaacatatgcagaaaaacccccctggccctagagcaccaagctcccatcgtcgaaacatggcataccgcgcaaggagtaaatcaagagatcgattcttccaaggctcacaggagtttctggcctccgcctctgcttctgcagagaggagttgcacaccatctcccgaccagatctcccatcgagcatccctggaagatgccccagttgatgatctgacacgtaagttcacatatctcggcagccaggacagggcccgtcctccatcagggtcttccaaagctaccgatctaggcggtacctcacaagccggaacttcacaacggttcctggagaacggaagccaggaagacctgctacacggcaaccctggatcaacttacctggcttcaaatagtacgtccgcccctaactggaagagcctcacatcctggacaaacgatcagggggcaaggcggaagaccgtgttcagccctaccctgccagcagcacggagtagcctgggctctctccagaccccggaggcggtgaccacacggaaaggcaccggtctcctaagcagcgactacaggattataaatgggaagtccggaacccaagatatccagccgggacctctgttcaacaacaatgccgacggggttgccacagacatcacttcgaccagatcccttaattataagagtaccagcagtggtcacagggaaatctcctccccaaggatacaggacgccggtccggctagtcgggacgtacaggctaccggcaggatcgcagacgacgccgacccacgcgtcgccttggtgaacgatagtctttcagatgtgacctcaacaacctcctcacgcgttgatgatcatgattcggaagaaatctgcctggaccacttatgcaaggggtgtcctttgaatggctcatgttcgaaagtacatttccatttgccctacagatggcagatgctaatcgggaaaacctggactgatttcgaacatatggaaacaatcgaaaaaggctactgcaaccctggcatccatctgtgctcagtaggcagctatactattaactttagggtcatgtcatgtgatagcttccccattcgccgtttatctactccctcttcagtgactaagcccgctaactcggtgttcactactaaatggatctggtactggaagaatgagtccggcacatggattcagtatggcgaggaaaaggacaagagaaaaaattctaacgtggattcttcctatctcgagtccctgtatcagagctgccctcgcggagtcgtgccttttcaggccggttcaagaaattatgagctttcatttcagggtatgatccagaccaacatagcctccaagacgcagaaagatgtcattagaagacccacttttgtgccccagtggtacgttcagcagatgaagcgtgggcctgaccatcagccagcaaaaacgtcttccgtaagcctgaccgcaacctttcgcccacaggaggacttctgctttctgtcgtctaagaagtacaagctgtcagaaatccaccacctgcatcccgagtatgtgagagtgagcgaacactttaaagcttctatgaagaactttaagatcgagaagatcaaaaaaatcgagaattccgaactgcttgataagtttacatggaagaagtcccagatgaaagaagagggaaagcttctcttctacgctaccagccgggcatacgtcgagtccatatgcagtaacaactttgactcattcctgcacgagacacacgagaacaaatatggtaagggaatctacttcgccaaggacgccatctattctcacaagaattgtccctacgatgccaagaacgtggtgatgtttgtggctcaagtcctggtaggaaagtttacagaagggaacataacctacacatctccccctccccagtttgatagttgcgtggatacaaggagcaacccgtctgtgttcgttatcttccaaaaggaccaggtctatccccagtatgttatagaatatacagaggataaggcctgcgtaatctcctag

SEQ ID NO: 202665 - DNA, 7100 bp, Artificial Sequence
  derived and/or modified sequence
gaaccgagagggggccaccccaggcggtcaccagcagatttgcccgcgcgttctctttctttccacccagttgcccttgcggccggctgtaaacctgccactaggacccggtcggtgagatctagcctcttgacctgagagccgagagtggatcgctgggctgggctaacggcgacggagagcgcgccctcgctgactccgggcgcgcccagcagtagcaccgcccgcgcccgcccctggacacttgtaagtttcgatttccgatttccgcggaaccgagtcccgcgccgcggcagagccagcacagccagcgcgccatggcggacccggaggtgtgctgcttcatcaccaaaatcctgtgcgcccacgggggccgcatggccctggacgcgctgctccaggagatcgcgctgtctgagccgcagctctgtgaggtgctgcaggtggccgggcccgaccgctttgtggtgttggagaccggcggcgaggccgggatcacccgatcggtggtggccaccactcgagcccgggtctgccgtcgcaagtactgccagagaccctgcgataacctgcatctctgcaaactcaacttgctgggccggtgcaactattcgcagtccgagcggaatttatgcaaatattctcatgaggttctctcagaagagaacttcaaagtcctgaaaaatcacgaactctctggactgaacaaagaggaattagcagtgctcctcctccaaagtgatcctttttttatgcccgagatatgcaaaagttataagggagagggtcggcagcagatttgtaaccagcagccaccgtgttcaagactccacatctgtgaccacttcacccgagggaactgtcgttttcccaactgcctccggtcccataacctgatggacagaaaggtgctggccatcatgagggagcacgggctgaaccccgacgtggtccagaacatccaggacatctgcaacagcaagcacatgcagaagaatcccccagggcccagagctccttcttcacatcgtagaaacatggcatatagggctagaagcaagagtagagatcggttctttcagggcagccaagaatttcttgcgtctgcttcagcgtctgctgagaggtcctgcacacctagtccagatcagatcagccacagggcttccctggaggacgcgcctgtggacgatctcacccgcaagttcacgtatctggggagtcaggatcgcgctcggcctccctcaggctcgtccaaggctactgatcttggaggaacaagtcaggccgggacaagccagaggtttttagagaacggcagtcaagaggacctcttgcatggaaatccaggcagcacttaccttgcttccaattcaacatcagcccccaactggaagagcctcacatcctggacgaatgaccaaggcgccaggagaaagactgtgttttctcccacgctacctgccgcccgctcttctcttggctctctgcaaacacctgaagctgtgaccaccagaaagggcacaggcttgctttcctcagactacaggatcatcaatggcaaaagtggaactcaggacatccagcctggccctctttttaataataatgctgatggagtggccacagatataacttctaccagatccttaaattacaaaagcactagcagcggtcacagagaaatatcatcacctaggattcaggatgctggacctgcttcccgagatgtccaggccactggcagaatcgcagatgatgctgacccaagagtagcacttgttaacgattctttatctgatgtcacaagtaccacatcttctagggtggatgatcatgactcagaggaaatttgtcttgaccatctgtgtaagggttgtccgcttaatggtagctgcagcaaagtccacttccatctgccttaccggtggcagatgcttattggtaaaacctggacggactttgagcacatggagacgatcgagaaaggctactgtaaccccggaatccacctctgttctgtaggaagttatacaatcaattttcgggtaatgagttgtgattcctttcccatccgacgcctctccactccttcttctgtcaccaagccagccaattctgtcttcaccaccaaatggatttggtattggaagaatgaatctggcacatggattcagtatggagaagagaaagacaaacggaaaaattcaaacgtcgactcttcatacctggagtctctctatcaatcctgtccgaggggagttgtgccatttcaggcgggctcacggaactatgagctgagtttccaagggatgattcagacaaacatagcttccaaaactcaaaaggatgtcatcagaagaccaacatttgtgcctcagtggtatgtgcagcagatgaagagagggccagaccatcagccagcaaagacctcgtcagtgtctttaactgcgacctttcgtcctcaggaggacttttgcttcctatcctcaaagaaatataagttgtcagagatccatcacctacatccagaatatgtcagagtaagtgagcattttaaagcttccatgaaaaatttcaagattgaaaagataaagaagatcgagaactcagagctcctggataaatttacatggaagaaatcgcagatgaaggaagaaggaaaactcctattttatgcgacaagccgtgcctatgtggaatctatctgttcgaataattttgacagtttcctacatgaaactcatgaaaacaaatacggaaaaggaatttactttgcaaaagatgccatctattcccacaaaaattgcccgtatgatgccaaaaacgtcgttatgtttgtagcccaagttctggttggaaagtttactgaaggaaatataacgtacacgagccctcctccacagttcgacagctgtgtggataccagatcgaatccctccgtttttgtcatctttcagaaagatcaggtttacccacaatatgtgattgaatatactgaagacaaagcctgcgtgattagttagaaccgatgaatacagcgtcagaaggatgccataaccattctgttcctttacagaactaaattgccgcagacaggagttaaagttttatattttcctgctcagttatctaatgtcttagatcagtggtccccaaattttgctacatattagaatcatctgggaggttttaaacaaattctgatgcccaggttgcaccccatgccaatgaaatcatttctgggcgtcagcgccaggcagttgtatttttttttttttttttttttttgagactgaatctcactccatcgtccaggctggagtgcagtggcgcgatctcggctcactgcaacctctgcctcccgggttcaagcaattctcctgcctcagcctcccgagtagctggaactacaggcacacactgccgcgcccagctaattttttgtattttttagtagagacagggtttcactgtgttgcccaggctggtctcaaactcctgagctcaggcaatctgcccgccttggcctcccaaagtgctaggattacaggtatgagccaccatgcccggctggcagttgtattttttaaagcccttctgatgattccaatgtgttggaaagtttaccttgtctcagatgtaactggtaaaggctgatttctaaattttctgtaattgcagcaacctttctctcctgtctacccttttagtttactgtatgccatggttttgttttggttacattgaaagaaagttaatttggaaaatttgggagaaatctaatcatgcctattaaggatgtaagacattacagccttagaagaaagattgtgaaaagctggggagaaaatgcttaaggacatgctaggggaaaaaaaagtaaaattgaagtgctattgcagacatggctgcagtactgtaccttatcattctgatgaaactgatttggagcacccttttctttatcgctacatttatttaggggacaaactccatccaggttgactctctctggaatgcggtaataagagctggcaagtaaggctcagagagaagcaaccaactggagttaattgcccatttgggctctttgtataattatggcaaagtagacatttatgttctaattaatatgattacagagaaggctttttctcaggtcaggcttttcatgaaagtattttgagaacaatgaattgcaataaccagcttcacacaagcataactgataaacgcgagtgctattgtagtcttggcaagtgagccaagaacctaggagcagggccattcctactgaaggacgggccccctacggagatgaaatttgtttcctggtgagcacagaatcagaacaaagaacaatatcccaaagaggccctgtgtctaccaggagcttctttttccaaatgtaatggattatgtggaattgtagtgccatcggtttttacttagagcccttgacgtgcttggaccaatatttccttccttcttatgaaccaggtttttccttctgattttcccttttcaacattccttaccagtcaccaaagtttcctgttataatttcttttagcagacaagttataagtcagatttaattagcatcagagttgattttatattagtcagattttggatcatcacagagatctccacaactccttggcttaaacagctccaccggtaaaaaaaaaaaaaaaaaaaaaaaaaaaaaatagtttttttagagtagagttattttctgggagagttactacaaatgcttattctcattgacttatttctttcatggtaactttcgttttggagtgttcattttctgaacttgaccctcacattgtaggggtgcagtttgtccaactctttccaacagcccattagacaccactagctggatatttcacaggcatctttgattcaatatgtccaaagtggaactctccatctacctccctcacatgaacctgttcctctctcaggatctgtatgtaagtgaaaagcatcaccatctacccattggctcaagcagaaatctggaagtcatctttgactccttcctctccctcctgataaacatctaagcagtttctaagtctagttttacctcttaaatatctctgttcccttctaagttgtttgctgtgttttcttcagagcaagaaggttatattttttaaaatttacttagtaatgcacattcaaaacacacatcaagtcttcaggataaagttcaaaaccgctgtcatggccccatgtgatctctccctcccctacccctctatcatttagtttcttctgcgcaagccactctggcttcctttcagttttgtggttcccatttttagctagttcagtggttttcaatgggcatttctgcctttttttttctaaacgacaaatagaaatacatcttctttattatcctccaaatccaattcagaggtaatatgctccacctacacacaattttagaaataaattaaaaattaaataaaactaatatgaacataaagaggaaataaaaggtacctaacttgggcacagctgtaactgaagacctaatgaagtagtcagatgcttacaactatttataatgcatcaatttgaacttagaaggtaggagatcagatcatatgtgggaaaatgtaaaagcagggatatcagtgggcattagaataaaaactagggatacaataacttctttgcatatgacaatacttatttgtatataagagaaagaacgaaataacctttattgaaataaagatactatgcaagaaaatgtacagttgtcgaagtggagaaaatgaggatatattcttgcagacgagctataggtcatacatgaatgtctagtgagacattcaaaattcgtatagggtgcagagtaatttcttattgtgaggaactgtccaatgtattgcaagatgttctgcatacttggctctcacatactaaatgctagtagcgcccccacccccacgcccagtcacggtgacaaccacaaaccctatcagatctattcacctttttcagagcagatattttgtaacattctctttgctgacctgaaatgactcatagataatacaatctacttacacacatgaatttcttaaaaaaatcaatttaatgccctaactctcttattaaggagaaatagaaaagaagaaatttataatgaaaagaagatgaatttcattatgtaaacgctcaggcatgactacgctgtttgaaacagacagatgtttactcttccttgtaatgagtaggtttggatttaagagccgattagaggctacttcctgtaaacaagtacaggaaaatgaaactagacgggtgggggacactagaatgaaaaccagtgttagggtaaagacaaaacagactatgtacataatctgtatatgggaaaagaaagagcgaaattaccttacttaaggataataggacaagacaaattacagattgtctcagagaaaacaaatgagttactctctcggacaagctgtaggtcctacctaaatgtccagcaggacattagacagtcgtacagggtacagaataattcttcgttgtgtggcactaacccacacactgcaggacatcgttctccctggctgcatccactcagtgctgggagtagtccccagttattatgaaaccaccaataacccactgaccacagtgagaaccactgattttttccactgacctactgaatatctagcatccttagattggctcaactgttactttcctaaggagtccttctacagaataggtcagatcttggcctcccaaaccccttatttttaaaatactttgcgccttgctttgataatttgtattatgtatccaaactgaaattatctgctttctgcattagaatgtaagccccctgagggttgagtcagtctgtcttgtttgctgtgccacgcctgatgcccagcccagcagcatgctttgtacactgatatattgggtaaattttgttgaataaattaagctcaactatttgtatttcaatagttgagttgtattgcttcctgttcttcaagcttaatttgaactgtctaataaaaagaagtaattaa

SEQ ID NO: 202666 - DNA, 2264 bp, Artificial Sequence
  derived and/or modified sequence
agagccagcacagccagcgcgccatggcggacccggaggtgtgctgcttcatcaccaaaatcctgtgcgcccacgggggccgcatggccctggacgcgctgctccaggagatcgcgctgtctgagccgcagctctgtgaggtgctgcaggtggccgggcccgaccgctttgtggtgttggagaccggcggcgaggccgggatcacccgatcggtggtggccaccactcgagcccgggtctgccgtcgcaagtactgccagagaccctgcgataacctgcatctctgcaaactcaacttgctgggccggtgcaactattcgcagtccgagcggaatttatgcaaatattctcatgaggttctctcagaagagaacttcaaagtcctgaaaaatcacgaactctctggactgaacaaagaggaattagcagtgctcctcctccaaagtgatcctttttttatgcccgagatatgcaaaagttataagggagagggtcggcagcagatttgtaaccagcagccaccgtgttcaagactccacatctgtgaccacttcacccgagggaactgtcgttttcccaactgcctccggtcccataacctgatggacagaaaggtgctggccatcatgagggagcacgggctgaaccccgacgtggtccagaacatccaggacatctgcaacagcaagcacatgcagaagaatcccccagggcccagagctccttcttcacatcgtagaaacatggcatatagggctagaagcaagagtagagatcggttctttcagggcagccaagaatttcttgcgtctgcttcagcgtctgctgagaggtcctgcacacctagtccagatcagatcagccacagggcttccctggaggacgcgcctgtggacgatctcacccgcaagttcacgtatctggggagtcaggatcgcgctcggcctccctcaggctcgtccaaggctactgatcttggaggaacaagtcaggccgggacaagccagaggtttttagagaacggcagtcaagaggacctcttgcatggaaatccaggcagcacttaccttgcttccaattcaacatcagcccccaactggaagagcctcacatcctggacgaatgaccaaggcgccaggagaaagactgtgttttctcccacgctacctgccgcccgctcttctcttggctctctgcaaacacctgaagctgtgaccaccagaaagggcacaggcttgctttcctcagactacaggatcatcaatggcaaaagtggaactcaggacatccagcctggccctctttttaataataatgctgatggagtggccacagatataacttctaccagatccttaaattacaaaagcactagcagcggtcacagagaaatatcatcacctaggattcaggatgctggacctgcttcccgagatgtccaggccactggcagaatcgcagatgatgctgacccaagagtagcacttgttaacgattctttatctgatgtcacaagtaccacatcttctagggtggatgatcatgactcagaggaaatttgtcttgaccatctgtgtaagggttgtccgcttaatggtagctgcagcaaagtccacttccatctgccttaccggtggcagatgcttattggtaaaacctggacggactttgagcacatggagacgatcgagaaaggctactgtaaccccggaatccacctctgttctgtaggaagttatacaatcaattttcgggtaatgagttgtgattcctttcccatccgacgcctctccactccttcttctgtcaccaagccagccaattctgtcttcaccaccaaatggatttggtattggaagaatgaatctggcacatggattcagtatggagaagagaaagacaaacggaaaaattcaaacgtcgactcttcatacctggagtctctctatcaatcctgtccgaggggagttgtgccatttcaggcgggctcacggaactatgagctgagtttccaagggatgattcagacaaacatagcttccaaaactcaaaaggatgtcatcagaagaccaacatttgtgcctcagtggtatgtgcaggaagagagggccagagtaagtgttctgaagcagctgtttgctgacagatgcttgagatgttcatgccctgggctcatcaagtcactcgtgaatctggagcctgttttcctgaaaagttcctgtttgcattactctgcagtttccatttgcattatcgatgagtaa

SEQ ID NO: 202667 - protein, 1555 aa, Artificial Sequence
  derived and/or modified sequence
MGCKGDASGACAAGALPVTGVCYKMGVLVVLTVLWLFSSVKADSKAITTSLTTKWFSTPLLLEASEFLAEDSQEKFWNFVEASQNIGSSDHDGTDYSYYHAILEAAFQFLSPLQQNLFKFCLSLRSYSATIQAFQQIAADEPPPEGCNSFFSVHGKKTCESDTLEALLLTASERPKPLLFKGDHRYPSSNPESPVVIFYSEIGSEEFSNFHRQLISKSNAGKINYVFRHYIFNPRKEPVYLSGYGVELAIKSTEYKAKDDTQVKGTEVNTTVIGENDPIDEVQGFLFGKLRDLHPDLEGQLKELRKHLVESTNEMAPLKVWQLQDLSFQTAARILASPVELALVVMKDLSQNFPTKARAITKTAVSSELRTEVEENQKYFKGTLGLQPGDSALFINGLHMDLDTQDIFSLFDVLRNEARVMEGLHRLGIEGLSLHNVLKLNIQPSEADYAVDIRSPAISWVNNLEVDSRYNSWPSSLQELLRPTFPGVIRQIRKNLHNMVFIVDPAHETTAELMNTAEMFLSNHIPLRIGFIFVVNDSEDVDGMQDAGVAVLRAYNYVAQEVDDYHAFQTLTHIYNKVRTGEKVKVEHVVSVLEKKYPYVEVNSILGIDSAYDRNRKEARGYYEQTGVGPLPVVLFNGMPFEREQLDPDELETITMHKILETTTFFQRAVYLGELPHDQDVVEYIMNQPNVVPRINSRILTAERDYLDLTASNNFFVDDYARFTILDSQGKTAAVANSMNYLTKKGMSSKEIYDDSFIRPVTFWIVGDFDSPSGRQLLYDAIKHQKSSNNVRISMINNPAKEISYENTQISRAIWAALQTQTSNAAKNFITKMAKEGAAEALAAGADIAEFSVGGMDFSLFKEVFESSKMDFILSHAVYCRDVLKLKKGQRAVISNGRIIGPLEDSELFNQDDFHLLENIILKTSGQKIKSHIQQLRVEEDVASDLVMKVDALLSAQPKGDPRIEYQFFEDRHSAIKLRPKEGETYFDVVAVVDPVTREAQRLAPLLLVLAQLINMNLRVFMNCQSKLSDMPLKSFYRYVLEPEISFTSDNSFAKGPIAKFLDMPQSPLFTLNLNTPESWMVESVRTPYDLDNIYLEEVDSVVAAEYELEYLLLEGHCYDITTGQPPRGLQFTLGTSANPVIVDTIVMANLGYFQLKANPGAWILRLRKGRSEDIYRIYSHDGTDSPPDADEVVIVLNNFKSKIIKVKVQKKADMVNEDLLSDGTSENESGFWDSFKWGFTGQKTEEVKQDKDDIINIFSVASGHLYERFLRIMMLSVLKNTKTPVKFWFLKNYLSPTFKEFIPYMANEYNFQYELVQYKWPRWLHQQTEKQRIIWGYKILFLDVLFPLVVDKFLFVDADQIVRTDLKELRDFNLDGAPYGYTPFCDSRREMDGYRFWKSGYWASHLAGRKYHISALYVVDLKKFRKIAAGDRLRGQYQGLSQDPNSLSNLDQDLPNNMIHQVPIKSLPQEWLWCETWCDDASKKRAKTIDLCNNPMTKEPKLEAAVRIVPEWQDYDQEIKQLQIRFQKEKETGALYKEKTKEPSREGPQKREEL

SEQ ID NO: 202668 - DNA, 4668 bp, Artificial Sequence
  derived and/or modified sequence
atgggctgcaagggcgacgccagcggcgcctgcgccgccggcgccctgcccgtgaccggcgtgtgctacaagatgggcgtgctggtggtgctgaccgtgctgtggctgttcagcagcgtgaaggccgacagcaaggccatcaccaccagcctgaccaccaagtggttcagcacccccctgctgctggaggccagcgagttcctggccgaggacagccaggagaagttctggaacttcgtggaggccagccagaacatcggcagcagcgaccacgacggcaccgactacagctactaccacgccatcctggaggccgccttccagttcctgagccccctgcagcagaacctgttcaagttctgcctgagcctgagaagctacagcgccaccatccaggccttccagcagatcgccgccgacgagcccccccccgagggctgcaacagcttcttcagcgtgcacggcaagaagacctgcgagagcgacaccctggaggccctgctgctgaccgccagcgagagacccaagcccctgctgttcaagggcgaccacagataccccagcagcaaccccgagagccccgtggtgatcttctacagcgagatcggcagcgaggagttcagcaacttccacagacagctgatcagcaagagcaacgccggcaagatcaactacgtgttcagacactacatcttcaaccccagaaaggagcccgtgtacctgagcggctacggcgtggagctggccatcaagagcaccgagtacaaggccaaggacgacacccaggtgaagggcaccgaggtgaacaccaccgtgatcggcgagaacgaccccatcgacgaggtgcagggcttcctgttcggcaagctgagagacctgcaccccgacctggagggccagctgaaggagctgagaaagcacctggtggagagcaccaacgagatggcccccctgaaggtgtggcagctgcaggacctgagcttccagaccgccgccagaatcctggccagccccgtggagctggccctggtggtgatgaaggacctgagccagaacttccccaccaaggccagagccatcaccaagaccgccgtgagcagcgagctgagaaccgaggtggaggagaaccagaagtacttcaagggcaccctgggcctgcagcccggcgacagcgccctgttcatcaacggcctgcacatggacctggacacccaggacatcttcagcctgttcgacgtgctgagaaacgaggccagagtgatggagggcctgcacagactgggcatcgagggcctgagcctgcacaacgtgctgaagctgaacatccagcccagcgaggccgactacgccgtggacatcagaagccccgccatcagctgggtgaacaacctggaggtggacagcagatacaacagctggcccagcagcctgcaggagctgctgagacccaccttccccggcgtgatcagacagatcagaaagaacctgcacaacatggtgttcatcgtggaccccgcccacgagaccaccgccgagctgatgaacaccgccgagatgttcctgagcaaccacatccccctgagaatcggcttcatcttcgtggtgaacgacagcgaggacgtggacggcatgcaggacgccggcgtggccgtgctgagagcctacaactacgtggcccaggaggtggacgactaccacgccttccagaccctgacccacatctacaacaaggtgagaaccggcgagaaggtgaaggtggagcacgtggtgagcgtgctggagaagaagtacccctacgtggaggtgaacagcatcctgggcatcgacagcgcctacgacagaaacagaaaggaggccagaggctactacgagcagaccggcgtgggccccctgcccgtggtgctgttcaacggcatgcccttcgagagagagcagctggaccccgacgagctggagaccatcaccatgcacaagatcctggagaccaccaccttcttccagagagccgtgtacctgggcgagctgccccacgaccaggacgtggtggagtacatcatgaaccagcccaacgtggtgcccagaatcaacagcagaatcctgaccgccgagagagactacctggacctgaccgccagcaacaacttcttcgtggacgactacgccagattcaccatcctggacagccagggcaagaccgccgccgtggccaacagcatgaactacctgaccaagaagggcatgagcagcaaggagatctacgacgacagcttcatcagacccgtgaccttctggatcgtgggcgacttcgacagccccagcggcagacagctgctgtacgacgccatcaagcaccagaagagcagcaacaacgtgagaatcagcatgatcaacaaccccgccaaggagatcagctacgagaacacccagatcagcagagccatctgggccgccctgcagacccagaccagcaacgccgccaagaacttcatcaccaagatggccaaggagggcgccgccgaggccctggccgccggcgccgacatcgccgagttcagcgtgggcggcatggacttcagcctgttcaaggaggtgttcgagagcagcaagatggacttcatcctgagccacgccgtgtactgcagagacgtgctgaagctgaagaagggccagagagccgtgatcagcaacggcagaatcatcggccccctggaggacagcgagctgttcaaccaggacgacttccacctgctggagaacatcatcctgaagaccagcggccagaagatcaagagccacatccagcagctgagagtggaggaggacgtggccagcgacctggtgatgaaggtggacgccctgctgagcgcccagcccaagggcgaccccagaatcgagtaccagttcttcgaggacagacacagcgccatcaagctgagacccaaggagggcgagacctacttcgacgtggtggccgtggtggaccccgtgaccagagaggcccagagactggcccccctgctgctggtgctggcccagctgatcaacatgaacctgagagtgttcatgaactgccagagcaagctgagcgacatgcccctgaagagcttctacagatacgtgctggagcccgagatcagcttcaccagcgacaacagcttcgccaagggccccatcgccaagttcctggacatgccccagagccccctgttcaccctgaacctgaacacccccgagagctggatggtggagagcgtgagaaccccctacgacctggacaacatctacctggaggaggtggacagcgtggtggccgccgagtacgagctggagtacctgctgctggagggccactgctacgacatcaccaccggccagccccccagaggcctgcagttcaccctgggcaccagcgccaaccccgtgatcgtggacaccatcgtgatggccaacctgggctacttccagctgaaggccaaccccggcgcctggatcctgagactgagaaagggcagaagcgaggacatctacagaatctacagccacgacggcaccgacagcccccccgacgccgacgaggtggtgatcgtgctgaacaacttcaagagcaagatcatcaaggtgaaggtgcagaagaaggccgacatggtgaacgaggacctgctgagcgacggcaccagcgagaacgagagcggcttctgggacagcttcaagtggggcttcaccggccagaagaccgaggaggtgaagcaggacaaggacgacatcatcaacatcttcagcgtggccagcggccacctgtacgagagattcctgagaatcatgatgctgagcgtgctgaagaacaccaagacccccgtgaagttctggttcctgaagaactacctgagccccaccttcaaggagttcatcccctacatggccaacgagtacaacttccagtacgagctggtgcagtacaagtggcccagatggctgcaccagcagaccgagaagcagagaatcatctggggctacaagatcctgttcctggacgtgctgttccccctggtggtggacaagttcctgttcgtggacgccgaccagatcgtgagaaccgacctgaaggagctgagagacttcaacctggacggcgccccctacggctacacccccttctgcgacagcagaagagagatggacggctacagattctggaagagcggctactgggccagccacctggccggcagaaagtaccacatcagcgccctgtacgtggtggacctgaagaagttcagaaagatcgccgccggcgacagactgagaggccagtaccagggcctgagccaggaccccaacagcctgagcaacctggaccaggacctgcccaacaacatgatccaccaggtgcccatcaagagcctgccccaggagtggctgtggtgcgagacctggtgcgacgacgccagcaagaagagagccaagaccatcgacctgtgcaacaaccccatgaccaaggagcccaagctggaggccgccgtgagaatcgtgcccgagtggcaggactacgaccaggagatcaagcagctgcagatcagattccagaaggagaaggagaccggcgccctgtacaaggagaagaccaaggagcccagcagagagggcccccagaagagagaggagctgtag

SEQ ID NO: 202669 - DNA, 4596 bp, Artificial Sequence
  derived and/or modified sequence
atgggcgtgctggtggtgctgaccgtgctgtggctgttcagcagcgtgaaggccgacagcaaggccatcaccaccagcctgaccaccaagtggttcagcacccccctgctgctggaggccagcgagttcctggccgaggacagccaggagaagttctggaacttcgtggaggccagccagaacatcggcagcagcgaccacgacggcaccgactacagctactaccacgccatcctggaggccgccttccagttcctgagccccctgcagcagaacctgttcaagttctgcctgagcctgagaagctacagcgccaccatccaggccttccagcagatcgccgccgacgagcccccccccgagggctgcaacagcttcttcagcgtgcacggcaagaagacctgcgagagcgacaccctggaggccctgctgctgaccgccagcgagagacccaagcccctgctgttcaagggcgaccacagataccccagcagcaaccccgagagccccgtggtgatcttctacagcgagatcggcagcgaggagttcagcaacttccacagacagctgatcagcaagagcaacgccggcaagatcaactacgtgttcagacactacatcttcaaccccagaaaggagcccgtgtacctgagcggctacggcgtggagctggccatcaagagcaccgagtacaaggccaaggacgacacccaggtgaagggcaccgaggtgaacaccaccgtgatcggcgagaacgaccccatcgacgaggtgcagggcttcctgttcggcaagctgagagacctgcaccccgacctggagggccagctgaaggagctgagaaagcacctggtggagagcaccaacgagatggcccccctgaaggtgtggcagctgcaggacctgagcttccagaccgccgccagaatcctggccagccccgtggagctggccctggtggtgatgaaggacctgagccagaacttccccaccaaggccagagccatcaccaagaccgccgtgagcagcgagctgagaaccgaggtggaggagaaccagaagtacttcaagggcaccctgggcctgcagcccggcgacagcgccctgttcatcaacggcctgcacatggacctggacacccaggacatcttcagcctgttcgacgtgctgagaaacgaggccagagtgatggagggcctgcacagactgggcatcgagggcctgagcctgcacaacgtgctgaagctgaacatccagcccagcgaggccgactacgccgtggacatcagaagccccgccatcagctgggtgaacaacctggaggtggacagcagatacaacagctggcccagcagcctgcaggagctgctgagacccaccttccccggcgtgatcagacagatcagaaagaacctgcacaacatggtgttcatcgtggaccccgcccacgagaccaccgccgagctgatgaacaccgccgagatgttcctgagcaaccacatccccctgagaatcggcttcatcttcgtggtgaacgacagcgaggacgtggacggcatgcaggacgccggcgtggccgtgctgagagcctacaactacgtggcccaggaggtggacgactaccacgccttccagaccctgacccacatctacaacaaggtgagaaccggcgagaaggtgaaggtggagcacgtggtgagcgtgctggagaagaagtacccctacgtggaggtgaacagcatcctgggcatcgacagcgcctacgacagaaacagaaaggaggccagaggctactacgagcagaccggcgtgggccccctgcccgtggtgctgttcaacggcatgcccttcgagagagagcagctggaccccgacgagctggagaccatcaccatgcacaagatcctggagaccaccaccttcttccagagagccgtgtacctgggcgagctgccccacgaccaggacgtggtggagtacatcatgaaccagcccaacgtggtgcccagaatcaacagcagaatcctgaccgccgagagagactacctggacctgaccgccagcaacaacttcttcgtggacgactacgccagattcaccatcctggacagccagggcaagaccgccgccgtggccaacagcatgaactacctgaccaagaagggcatgagcagcaaggagatctacgacgacagcttcatcagacccgtgaccttctggatcgtgggcgacttcgacagccccagcggcagacagctgctgtacgacgccatcaagcaccagaagagcagcaacaacgtgagaatcagcatgatcaacaaccccgccaaggagatcagctacgagaacacccagatcagcagagccatctgggccgccctgcagacccagaccagcaacgccgccaagaacttcatcaccaagatggccaaggagggcgccgccgaggccctggccgccggcgccgacatcgccgagttcagcgtgggcggcatggacttcagcctgttcaaggaggtgttcgagagcagcaagatggacttcatcctgagccacgccgtgtactgcagagacgtgctgaagctgaagaagggccagagagccgtgatcagcaacggcagaatcatcggccccctggaggacagcgagctgttcaaccaggacgacttccacctgctggagaacatcatcctgaagaccagcggccagaagatcaagagccacatccagcagctgagagtggaggaggacgtggccagcgacctggtgatgaaggtggacgccctgctgagcgcccagcccaagggcgaccccagaatcgagtaccagttcttcgaggacagacacagcgccatcaagctgagacccaaggagggcgagacctacttcgacgtggtggccgtggtggaccccgtgaccagagaggcccagagactggcccccctgctgctggtgctggcccagctgatcaacatgaacctgagagtgttcatgaactgccagagcaagctgagcgacatgcccctgaagagcttctacagatacgtgctggagcccgagatcagcttcaccagcgacaacagcttcgccaagggccccatcgccaagttcctggacatgccccagagccccctgttcaccctgaacctgaacacccccgagagctggatggtggagagcgtgagaaccccctacgacctggacaacatctacctggaggaggtggacagcgtggtggccgccgagtacgagctggagtacctgctgctggagggccactgctacgacatcaccaccggccagccccccagaggcctgcagttcaccctgggcaccagcgccaaccccgtgatcgtggacaccatcgtgatggccaacctgggctacttccagctgaaggccaaccccggcgcctggatcctgagactgagaaagggcagaagcgaggacatctacagaatctacagccacgacggcaccgacagcccccccgacgccgacgaggtggtgatcgtgctgaacaacttcaagagcaagatcatcaaggtgaaggtgcagaagaaggccgacatggtgaacgaggacctgctgagcgacggcaccagcgagaacgagagcggcttctgggacagcttcaagtggggcttcaccggccagaagaccgaggaggtgaagcaggacaaggacgacatcatcaacatcttcagcgtggccagcggccacctgtacgagagattcctgagaatcatgatgctgagcgtgctgaagaacaccaagacccccgtgaagttctggttcctgaagaactacctgagccccaccttcaaggagttcatcccctacatggccaacgagtacaacttccagtacgagctggtgcagtacaagtggcccagatggctgcaccagcagaccgagaagcagagaatcatctggggctacaagatcctgttcctggacgtgctgttccccctggtggtggacaagttcctgttcgtggacgccgaccagatcgtgagaaccgacctgaaggagctgagagacttcaacctggacggcgccccctacggctacacccccttctgcgacagcagaagagagatggacggctacagattctggaagagcggctactgggccagccacctggccggcagaaagtaccacatcagcgccctgtacgtggtggacctgaagaagttcagaaagatcgccgccggcgacagactgagaggccagtaccagggcctgagccaggaccccaacagcctgagcaacctggaccaggacctgcccaacaacatgatccaccaggtgcccatcaagagcctgccccaggagtggctgtggtgcgagacctggtgcgacgacgccagcaagaagagagccaagaccatcgacctgtgcaacaaccccatgaccaaggagcccaagctggaggccgccgtgagaatcgtgcccgagtggcaggactacgaccaggagatcaagcagctgcagatcagattccagaaggagaaggagaccggcgccctgtacaaggagaagaccaaggagcccagcagagagggcccccagaagagagaggagctgtag

SEQ ID NO: 202670 - DNA, 4668 bp, Artificial Sequence
  derived and/or modified sequence
atgggctgcaagggagacgcttcaggggcttgcgccgcaggggcattgcccgtgacgggcgtttgctacaagatgggagtattggtcgtgctcacagtcttgtggctcttctcgtcagtcaaggcagattctaaagccatcactacaagcctgactaccaagtggttctcaactccactgctgcttgaagcctccgagtttctggctgaagatagccaggaaaagttctggaatttcgttgaggcgagccagaacatcgggtcttctgatcacgacggaaccgactatagctactatcatgctatattagaggctgcattccagttcctcagtcctttgcagcagaacttgtttaaattttgtctgtccctgaggtcctatagcgccactatccaagctttccagcagattgcggctgacgagcccccccccgagggttgcaacagcttcttttcagtacatggcaagaagacttgtgagagcgacacacttgaggcactgttgctgaccgcctctgaacgacctaagccactgctcttcaaaggtgaccatcgatacccctcatccaatcccgagtcccccgtagttattttttacagtgagatcggcagtgaggaattcagtaattttcacagacagctgatttccaagtcaaatgcaggcaagatcaattatgtgttccggcactatatcttcaaccctcggaaggaacccgtctatctttctggatacggcgttgaactggcaattaagtcaaccgagtacaaagccaaagatgatacccaggtcaagggcacggaggtgaacaccaccgtgataggggagaacgatcccattgatgaagtccaaggctttttattcgggaagcttcgggacctccaccccgacctggagggccagttgaaagagctgagaaagcacctggtggaatcaaccaatgaaatggccccactcaaagtgtggcagttgcaggacttgagcttccagactgccgctagaatcctggcaagcccagtggagctggccttagtcgtcatgaaagacctttctcagaacttcccaactaaggcccgagccataactaagacagctgtgagttcagagctccggaccgaggttgaggaaaatcagaagtacttcaaaggcacattgggcctgcaaccaggagatagcgccctgttcatcaatggcttgcatatggacctggacacacaggacatcttttccttatttgacgttctgcgaaacgaggcaagagtgatggaaggacttcaccgcctgggcatcgaaggtctgagtctacataatgttctaaaactcaatatacaacctagcgaggcggattacgctgtggacatcagatcgcctgccatttcctgggttaacaatttggaagtagactcgcgatataactcctggcccagttcactgcaggagttactgcgacctacctttcctggcgtgattcgccagattaggaagaacctgcataacatggtatttatagtggatcccgctcacgagactaccgccgaattgatgaatactgccgagatgtttttgtccaatcacatccccctccgcattggattcattttcgtagttaatgacagcgaagacgtggatggaatgcaggacgccggggtggcagtgcttagggcgtacaattacgtggcccaggaagtcgatgactaccatgctttccagaccctgactcacatatacaacaaggtcagaaccggcgaaaaggtaaaagtggagcatgtggtgtccgttcttgagaagaagtacccatatgtcgaagtgaactccatactcgggatagacagcgcttatgataggaacagaaaggaggccagaggttattacgagcagaccggagttggccccctgccagtggtcctcttcaacggcatgcccttcgagagggagcagctcgatccagatgaactggagacgatcacaatgcataagatccttgagacgaccacctttttccagcgcgcggtgtatctcggtgaacttccacacgatcaggacgtggtggaatatatcatgaaccagccaaacgttgtcccacgcattaatagcagaatcctcacagccgagcgggactacttggatctgaccgcctccaacaactttttcgtggatgactatgcacgctttacaatcctcgacagtcagggaaaaacagctgccgtggctaactccatgaattacctgacaaagaaaggaatgtcctccaaagaaatctacgacgactcctttatcagacccgtgacgttctggattgtgggagatttcgactccccctccggacggcaactgctgtacgatgccatcaagcaccagaaaagctctaataatgtcagaatctccatgatcaataacccagctaaagagatatcatacgagaatacgcagatatcaagggccatatgggccgcactgcagactcaaacatccaacgctgcgaaaaattttattactaaaatggcgaaggagggagcagcagaggccctagctgcaggggcggatatagccgaattttcggtgggtggcatggactttagtctttttaaagaggtgtttgaaagtagtaagatggattttatcctgtcacacgccgtttactgtagagatgtccttaaattgaaaaaaggtcagagagcagtcatctctaatggacgtataatcggccccctagaggattctgaactgtttaaccaagacgattttcacctccttgagaacattattttgaaaacgtcaggccaaaagattaagtcccacatccagcagttgagggtcgaagaagacgtggcctcggaccttgttatgaaggttgacgcacttttgtccgcccagcccaagggcgacccacggattgaatatcagttcttcgaggacagacacagcgcgatcaagctgaggcccaaagaaggggagacatatttcgacgtggttgctgtggtcgacccagttacacgggaagcgcaacggttggcacccttgttactcgtcctcgctcagctgattaatatgaacctgcgggtgtttatgaactgccagtcaaagctgagcgatatgcctctgaaaagtttttatagatacgttctcgaaccagagatatccttcactagtgacaactcattcgccaaaggccctattgccaaattcttagatatgcctcagagccccttattcaccctcaatctgaatacccccgagtcatggatggtcgagtccgtgcgtactccgtacgacctagataatatctaccttgaggaagttgatagcgttgtggcagctgaatatgaactcgagtatttgcttctcgaggggcattgctacgatattaccacgggtcagccaccaaggggacttcagttcaccctgggcaccagcgccaaccctgtgatcgtggacactattgtcatggccaaccttgggtattttcagctcaaggcaaaccccggagcctggattctgcgcttgcggaaaggcagatccgaggacatttatcgaatttactcccacgacggcacagatagtcctccagacgcagatgaggtggtgatcgtccttaataacttcaagagtaagatcatcaaagtgaaagtgcagaaaaaagcagacatggtcaatgaggacctgttgtccgatggcaccagcgagaatgagagcggattttgggacagttttaagtggggcttcaccggccagaagacagaggaagtcaagcaagataaagacgacattataaacattttctccgttgcaagcggacatctgtacgagaggtttctgaggataatgatgctgtcagtccttaaaaataccaaaactcctgttaagttttggttcctgaaaaattacctcagcccaacttttaaggaatttatcccttatatggcgaacgagtacaacttccagtacgaattggttcagtataaatggcccaggtggcttcatcaacagacagagaagcagcgaattatttggggatataagattctgtttctggacgtgctgtttcctctagttgttgacaagttcctgttcgtggacgctgatcaaatagtgcgcaccgacctcaaagagctgcgggacttcaacctcgacggagcgccctatggttatactcccttttgtgactcacgacgagaaatggacggatatcgcttctggaagtccggatactgggctagccatctggcagggcgaaagtaccatatctctgctctgtacgtcgttgaccttaagaaattcagaaaaatcgctgccggcgatcgtttgcgggggcaatatcaggggttgtcacaggacccaaatagtctcagcaatctggatcaagatctgccaaacaacatgattcatcaagttccgatcaagagtctcccccaagagtggctttggtgtgaaacatggtgcgacgacgcctccaagaaacgggctaaaacaatagacctttgtaacaatccaatgactaaggaacctaaactggaagccgccgtgagaatcgttcccgagtggcaagactacgaccaggagataaagcaactccagatccgctttcagaaagaaaaagagaccggtgcgctctataaagaaaagacgaaggagccctcacgtgagggtccacagaagagagaagaattgtag

SEQ ID NO: 202671 - DNA, 4596 bp, Artificial Sequence
  derived and/or modified sequence
atgggggtcctggtggtgctcacagtgctatggcttttctcatccgttaaggcggactctaaagccatcaccacatcattgacgaccaagtggttctccaccccattgctgttggaagcatccgaattcttggctgaggatagtcaggagaagttctggaatttcgttgaggctagccagaacatcggcagctccgaccatgatggcaccgattactcttactaccatgccatcctggaagctgcattccagtttcttagtcctctgcagcagaatctcttcaagttctgtctctcccttcgatcatattcagccacaatccaggcatttcaacagattgccgcagacgaaccccctcctgaggggtgtaactcttttttcagtgtgcacgggaaaaaaacctgtgagagcgataccctggaggccctcctactgaccgcctccgaacgccccaagccgttgctgtttaagggtgatcaccgatatcctagcagcaacccagaatcacccgttgttatcttttatagtgagattggcagtgaggagtttagcaatttccacagacagcttataagcaaaagtaatgccggcaaaattaactacgtgtttaggcattatatctttaacccgcgaaaggaaccggtgtacctaagcggatacggcgttgaattagctatcaaatccactgagtataaggccaaagatgatacccaggtcaaagggacagaagttaatactacagttatcggcgagaacgaccctatagacgaggtacaaggcttccttttcggaaagctcagggatctgcacccggacctcgaggggcagctaaaagagctccgtaagcacctcgtggagtcaacaaatgagatggcccccctgaaagtttggcaactccaggatttgagctttcaaaccgccgcaagaattttagcatcacctgtggaattagcgctggtggttatgaaggatctttctcaaaatttcccaacgaaagcccgggctattacgaaaaccgcagtgtcctcggagctgaggactgaagtagaggagaaccagaaatattttaagggcacactcgggctccagccgggtgattccgccttatttataaacggacttcacatggatctggacacacaggacattttttctctgtttgacgtgctccgcaacgaggccagagtaatggagggcctccacagactgggaatcgaaggattatcactccataacgtgctgaagttgaatatacagcctagcgaagctgattacgccgtcgacattcgtagcccggcaatctcctgggtcaacaatctggaagttgattccagatataattcttggcctagctcattgcaggagcttctacgacctacgtttccaggggtgattcggcagatcaggaaaaacctacataacatggtcttcatcgtagatccagcccacgaaaccacagcagaactgatgaataccgccgaaatgtttctgagcaatcatattccacttaggataggctttattttcgttgttaacgacagcgaggacgtagatggcatgcaggatgccggagtcgccgtgctcagagcttacaactatgttgctcaggaggtggatgattatcacgcctttcagacgctaacgcacatttataataaggtgcggactggagaaaaggtgaaggtggagcatgtggtgtcagttctggaaaaaaagtatccttacgttgaagtgaactccattctgggcattgacagcgcctacgaccgcaacagaaaggaggcacgaggatattatgaacaaacaggagtaggaccactacccgtagtgctgtttaatggcatgcctttcgagcgcgaacagctcgaccccgatgagttagagaccattaccatgcataaaatcctggaaactacaaccttcttccagcgcgcagtgtatctcggagagctgcctcatgatcaggacgtagtggagtacatcatgaaccagcctaatgtggtcccccggattaacagtcgcattctcactgctgagagggactatctagatttaaccgctagtaataattttttcgtggacgattatgcgaggttcacaatcttggactcccaaggcaaaaccgctgcagtggccaacagcatgaactatctcactaaaaaggggatgtcttccaaggagatttatgatgacagcttcattcgacctgtcacattttggatcgtgggagacttcgattctccctcaggacgccagttgctttacgacgctatcaaacatcagaaaagctcaaacaacgttagaatttctatgatcaacaacccagcaaaggagatttcgtacgaaaatacacagatcagtagggccatctgggcggcgttacagacacagaccagtaatgctgctaagaatttcatcactaaaatggctaaagagggtgccgccgaagcattggctgcaggagcagacattgccgagtttagtgtgggaggaatggacttctctctatttaaggaggtctttgagtcaagtaaaatggacttcattctgagccacgctgtgtactgccgagacgttcttaaactcaaaaaaggacaaagagccgtgatcagcaatggcagaataataggtcctcttgaggattctgagctgttcaaccaagatgattttcatttgttggagaacatcatcctgaagacaagcggtcagaagattaagagtcatatccagcagttacgtgtggaggaggatgtggcctctgacctcgtaatgaaggttgacgccctgctcagtgcccagcccaaaggcgatccccgaatcgaataccaatttttcgaggatcggcactccgctatcaagctgcgccctaaggaaggggaaacctattttgacgtggtagctgtcgtggaccccgtgacccgggaggctcagaggcttgctcctctcctacttgtactcgcccagctcataaatatgaacctaagagttttcatgaattgccagagcaagttatcagatatgcccctcaagagtttctataggtatgtgctggagccagaaatttctttcacatctgacaactccttcgccaaaggccccatcgccaaatttttggatatgccccagtcccctctgttcactctgaatctcaatactcctgagtcgtggatggtggagagtgtgcggactccctacgatctcgataatatctatcttgaggaagtggatagcgtggttgcagccgagtacgaactggaatatctgctgttggagggccactgctacgatattacaaccggccagccaccaaggggtctacagttcaccctgggcacatccgctaatcccgttatcgtcgacacaatcgtgatggctaatctcggctactttcagctgaaggcaaaccctggtgcctggatacttcggctacgcaagggccgcagcgaggacatttacaggatctatagccacgacggaactgactcacctcccgatgccgacgaggtggttatcgtgctcaacaatttcaaaagtaaaataattaaagttaaggttcagaaaaaagccgacatggtcaatgaggacctgttgtccgacgggacatcagaaaacgagtccggattctgggattcgttcaaatggggatttaccggacagaaaaccgaggaggtcaagcaggataaagacgacattatcaacattttcagcgtggcatcaggtcacttgtatgaaagatttctgcggattatgatgctaagcgtgctcaagaatacaaaaacaccagtcaaattttggttcctgaaaaactatctgtcgcccacttttaaggaatttatcccgtatatggccaatgaatacaattttcagtacgagctggtgcagtacaagtggccccgctggctgcaccagcagacagaaaagcagcggattatctggggatacaaaattctgtttctggacgtgctattccccctggtggtcgataagtttctgttcgttgacgctgaccagatcgtgcgcaccgacctcaaagagctgcgggacttcaacttggatggcgcaccctacggttacaccccgttctgcgattcgaggagagaaatggatggctacagattctggaagagcggatactgggcttcacacctcgcaggccgaaaatatcatatttccgccctgtacgttgtggatctcaagaagttccggaaaatcgccgcaggggacaggcttcggggtcagtatcaagggctctcacaagatccaaacagtctcagcaacttagaccaagacctgccaaacaacatgatccaccaggttccgattaagtcactgcctcaggagtggctgtggtgtgaaacctggtgtgatgacgccagcaagaagagagccaaaaccatagatctgtgcaacaaccccatgacaaaagaacccaaactggaggcagctgtgcggatcgtcccagagtggcaggattatgaccaggaaattaaacagctgcagatcaggtttcagaaggaaaaagagaccggcgccctgtacaaggaaaagactaaggagcccagtagggaagggccccagaagcgggaagagctttag

SEQ ID NO: 202672 - DNA, 4668 bp, Artificial Sequence
  derived and/or modified sequence
atgggctgcaagggagatgccagcggggcctgtgccgccggggccctgcctgtgactggagtgtgctacaagatgggcgtgctggtggtgctgactgtgctgtggctgttcagctctgtgaaggctgacagcaaggccatcaccaccagcctgaccaccaagtggttcagcacccccctgctgctggaggccagcgagttcctggccgaggacagccaggagaagttctggaactttgtggaggccagccagaacatcggcagcagtgaccatgatggaacagactacagctactaccacgccatcctggaggccgccttccagttcctgagccccctgcagcagaacctcttcaagttctgcctgagcctgcggagctacagcgccaccatccaggccttccagcagattgctgctgatgagcccccacctgagggctgcaacagcttcttctctgtgcacggcaagaagacctgtgagagtgacaccctggaggccctgctgctgacagccagcgagcggcccaagcccctgctcttcaagggggaccaccgctaccccagcagcaaccctgagagccctgtggtgatcttctacagcgagatcggcagcgaggagttcagcaacttccaccggcagctgatcagcaagagcaatgctgggaagatcaactacgtgttccgccactacatcttcaaccccaggaaggagcctgtgtacctgagcggctacggcgtggagctggccatcaagagcacagagtacaaggccaaggatgacacccaggtgaagggcacagaggtgaacaccaccgtgattggagaaaatgaccccattgatgaggtgcagggcttcctgtttgggaagctgcgggacctgcacccagacctggagggccagctgaaggagctgaggaagcacctggtggagagcaccaatgagatggcccccctgaaggtgtggcagctgcaggacctgtccttccagacagctgcccgcatcctggccagccctgtggagctggccctggtggtgatgaaggacctgagccagaacttccccaccaaggcccgggccatcaccaagacagctgtgtcctctgagctgaggacagaggtggaggagaaccagaagtacttcaagggcaccctgggcctgcagcccggggacagcgccctcttcatcaatggcctgcacatggacctggacacccaggacatcttcagcctgtttgatgtgctgagaaatgaggcccgggtgatggagggcctgcaccggctgggcatcgagggcctgagcctgcacaacgtgctgaagctgaacatccagcccagcgaggccgactatgctgtggacatccgcagccctgccatctcctgggtgaacaacctggaggtggacagccgctacaacagctggcccagcagcctgcaggagctgctgcggcccaccttccctggggtcatccggcagatcaggaagaacctgcacaacatggtgttcatcgtggaccctgcccacgagaccacagctgagctgatgaacacagctgagatgttcctgagcaaccacatccccctgagaattggcttcatctttgtggtgaatgacagtgaagatgtggatggcatgcaggatgctggggtggccgtgctgcgggcctacaactacgtggcccaggaggtggatgactaccacgccttccagaccctgacccacatctacaacaaggtgaggactggagagaaggtgaaggtggagcacgtggtgtctgtgctggagaagaagtacccctacgtggaggtgaacagcatcctgggcatcgacagcgcctatgacaggaacaggaaggaggcccggggctactatgagcagacaggagtgggccccctgcctgtggtgctcttcaacggcatgccctttgagcgggagcagctggaccctgatgagctggagaccatcaccatgcacaagatcctggagaccaccaccttcttccagagagctgtgtacctgggggagctgccccatgaccaggatgtggtggagtacatcatgaaccagcccaacgtggtgccccgcatcaacagccgcatcctgacagctgagcgggactacctggacctgacagccagcaacaacttctttgtggatgattatgcccgcttcaccatcctggacagccagggcaagacagctgctgtggccaacagcatgaactacctgaccaagaagggcatgagcagcaaggagatctatgatgacagcttcatccggcctgtgaccttctggatcgtgggggactttgacagccccagcggccggcagctgctgtatgatgccatcaagcaccagaagagcagcaacaacgtgcgcatctccatgatcaacaacccagccaaggagatctcctatgagaacacccagatcagccgggccatctgggccgccctgcagacccagaccagcaatgctgccaagaacttcatcaccaagatggccaaggagggcgctgctgaggccctggccgccggggctgacattgctgagttctctgtgggcggcatggacttcagcctcttcaaggaggtgtttgagagcagcaagatggacttcatcctgagccatgctgtgtactgcagagatgtgctgaagctgaagaagggccagagagctgtgatcagcaatggccgcatcatcggccccctggaggacagcgagctgttcaaccaggatgacttccacctgctggagaacatcatcctgaagaccagcggccagaagatcaagagccacatccagcagctgcgggtggaggaggatgtggccagtgacctggtgatgaaggtggatgccctgctgagcgcccagcccaagggggacccccgcatcgagtaccagttctttgaggacagacacagcgccatcaagctgcggcccaaggagggggagacctactttgatgtggtggccgtggtggaccctgtgacccgggaggcccagaggctggcccccctgctgctggtgctggcccagctgatcaacatgaacctgcgggtcttcatgaactgccagagcaagctgagtgacatgcccctgaagagcttctaccgctacgtgctggagcctgagatctccttcaccagtgacaacagctttgccaagggccccatcgccaagttcctggacatgccccagagccccctcttcaccctgaacctgaacaccccagagagctggatggtggagagcgtgaggaccccctatgacctggacaacatctacctggaggaggtggacagcgtggtggccgcagaatatgagctggagtacctgctgctggagggccactgctatgacatcaccaccggccagcccccccggggcctgcagttcaccctgggcaccagcgccaaccctgtgattgtggacaccatcgtgatggccaacctgggctacttccagctgaaggccaaccctggggcctggatcctgcggctgaggaagggccgctctgaggacatctaccgcatctacagccatgatggaacagacagccccccagatgctgatgaggtggtgattgtgctgaacaacttcaagagcaagatcatcaaggtgaaggtgcagaagaaggctgacatggtgaatgaagacctgctgagtgatggcaccagtgaaaatgaaagtggcttctgggacagcttcaagtggggcttcaccggccagaagacagaggaggtgaagcaggacaaggatgacatcatcaacatcttctctgtggccagcggccacctgtatgagcgcttcctgcgcatcatgatgctgtctgtgctgaagaacaccaagacccctgtgaagttctggttcctgaagaactacctgagccccaccttcaaggagttcatcccctacatggccaatgagtacaacttccagtatgagctggtgcagtacaagtggccccgctggctgcaccagcagacagagaagcagaggatcatctggggctacaagatcctcttcctggatgtgctcttccccctggtggtggacaagttcctgtttgtggatgctgaccagatcgtgaggacagacctgaaggagctgcgggacttcaacctggatggagccccctacggctacacccccttctgtgacagcagaagagagatggatggctaccgcttctggaagagcggctactgggccagccacctggccggcaggaagtaccacatcagcgccctgtatgtggtggacctgaagaagttcaggaagattgctgctggggaccggctgcggggccagtaccagggcctgagccaggaccccaacagcctgagcaacctggaccaggacctgcccaacaacatgatccaccaggtgcccatcaagagcctgccccaggagtggctgtggtgtgagacctggtgtgatgatgccagcaagaagagggccaagaccatcgacctgtgcaacaaccccatgaccaaggagcccaagctggaggccgctgtgagaattgtgcctgagtggcaggactatgaccaggagatcaagcagctgcagatccgcttccagaaggagaaggagactggagccctgtacaaggagaagaccaaggagcccagccgggagggcccccagaagcgggaggagctgtag

SEQ ID NO: 202673 - DNA, 4596 bp, Artificial Sequence
  derived and/or modified sequence
atgggcgtgctggtggtgctgactgtgctgtggctgttcagctctgtgaaggctgacagcaaggccatcaccaccagcctgaccaccaagtggttcagcacccccctgctgctggaggccagcgagttcctggccgaggacagccaggagaagttctggaactttgtggaggccagccagaacatcggcagcagtgaccatgatggaacagactacagctactaccacgccatcctggaggccgccttccagttcctgagccccctgcagcagaacctcttcaagttctgcctgagcctgcggagctacagcgccaccatccaggccttccagcagattgctgctgatgagcccccacctgagggctgcaacagcttcttctctgtgcacggcaagaagacctgtgagagtgacaccctggaggccctgctgctgacagccagcgagcggcccaagcccctgctcttcaagggggaccaccgctaccccagcagcaaccctgagagccctgtggtgatcttctacagcgagatcggcagcgaggagttcagcaacttccaccggcagctgatcagcaagagcaatgctgggaagatcaactacgtgttccgccactacatcttcaaccccaggaaggagcctgtgtacctgagcggctacggcgtggagctggccatcaagagcacagagtacaaggccaaggatgacacccaggtgaagggcacagaggtgaacaccaccgtgattggagaaaatgaccccattgatgaggtgcagggcttcctgtttgggaagctgcgggacctgcacccagacctggagggccagctgaaggagctgaggaagcacctggtggagagcaccaatgagatggcccccctgaaggtgtggcagctgcaggacctgtccttccagacagctgcccgcatcctggccagccctgtggagctggccctggtggtgatgaaggacctgagccagaacttccccaccaaggcccgggccatcaccaagacagctgtgtcctctgagctgaggacagaggtggaggagaaccagaagtacttcaagggcaccctgggcctgcagcccggggacagcgccctcttcatcaatggcctgcacatggacctggacacccaggacatcttcagcctgtttgatgtgctgagaaatgaggcccgggtgatggagggcctgcaccggctgggcatcgagggcctgagcctgcacaacgtgctgaagctgaacatccagcccagcgaggccgactatgctgtggacatccgcagccctgccatctcctgggtgaacaacctggaggtggacagccgctacaacagctggcccagcagcctgcaggagctgctgcggcccaccttccctggggtcatccggcagatcaggaagaacctgcacaacatggtgttcatcgtggaccctgcccacgagaccacagctgagctgatgaacacagctgagatgttcctgagcaaccacatccccctgagaattggcttcatctttgtggtgaatgacagtgaagatgtggatggcatgcaggatgctggggtggccgtgctgcgggcctacaactacgtggcccaggaggtggatgactaccacgccttccagaccctgacccacatctacaacaaggtgaggactggagagaaggtgaaggtggagcacgtggtgtctgtgctggagaagaagtacccctacgtggaggtgaacagcatcctgggcatcgacagcgcctatgacaggaacaggaaggaggcccggggctactatgagcagacaggagtgggccccctgcctgtggtgctcttcaacggcatgccctttgagcgggagcagctggaccctgatgagctggagaccatcaccatgcacaagatcctggagaccaccaccttcttccagagagctgtgtacctgggggagctgccccatgaccaggatgtggtggagtacatcatgaaccagcccaacgtggtgccccgcatcaacagccgcatcctgacagctgagcgggactacctggacctgacagccagcaacaacttctttgtggatgattatgcccgcttcaccatcctggacagccagggcaagacagctgctgtggccaacagcatgaactacctgaccaagaagggcatgagcagcaaggagatctatgatgacagcttcatccggcctgtgaccttctggatcgtgggggactttgacagccccagcggccggcagctgctgtatgatgccatcaagcaccagaagagcagcaacaacgtgcgcatctccatgatcaacaacccagccaaggagatctcctatgagaacacccagatcagccgggccatctgggccgccctgcagacccagaccagcaatgctgccaagaacttcatcaccaagatggccaaggagggcgctgctgaggccctggccgccggggctgacattgctgagttctctgtgggcggcatggacttcagcctcttcaaggaggtgtttgagagcagcaagatggacttcatcctgagccatgctgtgtactgcagagatgtgctgaagctgaagaagggccagagagctgtgatcagcaatggccgcatcatcggccccctggaggacagcgagctgttcaaccaggatgacttccacctgctggagaacatcatcctgaagaccagcggccagaagatcaagagccacatccagcagctgcgggtggaggaggatgtggccagtgacctggtgatgaaggtggatgccctgctgagcgcccagcccaagggggacccccgcatcgagtaccagttctttgaggacagacacagcgccatcaagctgcggcccaaggagggggagacctactttgatgtggtggccgtggtggaccctgtgacccgggaggcccagaggctggcccccctgctgctggtgctggcccagctgatcaacatgaacctgcgggtcttcatgaactgccagagcaagctgagtgacatgcccctgaagagcttctaccgctacgtgctggagcctgagatctccttcaccagtgacaacagctttgccaagggccccatcgccaagttcctggacatgccccagagccccctcttcaccctgaacctgaacaccccagagagctggatggtggagagcgtgaggaccccctatgacctggacaacatctacctggaggaggtggacagcgtggtggccgcagaatatgagctggagtacctgctgctggagggccactgctatgacatcaccaccggccagcccccccggggcctgcagttcaccctgggcaccagcgccaaccctgtgattgtggacaccatcgtgatggccaacctgggctacttccagctgaaggccaaccctggggcctggatcctgcggctgaggaagggccgctctgaggacatctaccgcatctacagccatgatggaacagacagccccccagatgctgatgaggtggtgattgtgctgaacaacttcaagagcaagatcatcaaggtgaaggtgcagaagaaggctgacatggtgaatgaagacctgctgagtgatggcaccagtgaaaatgaaagtggcttctgggacagcttcaagtggggcttcaccggccagaagacagaggaggtgaagcaggacaaggatgacatcatcaacatcttctctgtggccagcggccacctgtatgagcgcttcctgcgcatcatgatgctgtctgtgctgaagaacaccaagacccctgtgaagttctggttcctgaagaactacctgagccccaccttcaaggagttcatcccctacatggccaatgagtacaacttccagtatgagctggtgcagtacaagtggccccgctggctgcaccagcagacagagaagcagaggatcatctggggctacaagatcctcttcctggatgtgctcttccccctggtggtggacaagttcctgtttgtggatgctgaccagatcgtgaggacagacctgaaggagctgcgggacttcaacctggatggagccccctacggctacacccccttctgtgacagcagaagagagatggatggctaccgcttctggaagagcggctactgggccagccacctggccggcaggaagtaccacatcagcgccctgtatgtggtggacctgaagaagttcaggaagattgctgctggggaccggctgcggggccagtaccagggcctgagccaggaccccaacagcctgagcaacctggaccaggacctgcccaacaacatgatccaccaggtgcccatcaagagcctgccccaggagtggctgtggtgtgagacctggtgtgatgatgccagcaagaagagggccaagaccatcgacctgtgcaacaaccccatgaccaaggagcccaagctggaggccgctgtgagaattgtgcctgagtggcaggactatgaccaggagatcaagcagctgcagatccgcttccagaaggagaaggagactggagccctgtacaaggagaagaccaaggagcccagccgggagggcccccagaagcgggaggagctgtag

SEQ ID NO: 202674 - DNA, 4668 bp, Artificial Sequence
  derived and/or modified sequence
atgggctgcaagggcgacgccagcggcgcctgcgccgccggcgccctgccagtgaccggagtttgttacaagatgggggtgttggttgtacttacagtcctttggcttttcagtagtgtgaaagccgatagcaaagcaataacaacctctctgactacgaagtggtttagtactcctctgctgctggaggcatctgaattcttggccgaggactcccaggagaaattttggaatttcgtggaagctagtcagaacatcggcagtagcgaccacgacggcacagactatagttactatcacgccattttggaggcagcattccagtttctcagcccgcttcaacaaaacttatttaaattttgcctgtcgctgagatcttactcagcaactattcaggctttccaacaaattgccgcggacgaacccccgccagaaggttgtaacagcttcttctcggtgcacggaaagaaaacctgtgaatctgacaccctggaagccctgctgctcacagcttcagagcggccaaaaccacttctatttaagggcgaccaccgctatcctagtagtaatccagaatcacctgttgttattttctactctgaaatagggtccgaggaattttccaacttccataggcagctgatttccaaaagcaatgccggtaaaatcaattatgtgttccgacattatatatttaacccccggaaagaacccgtgtatctgtcaggatatggtgtggaactggcgattaagtccaccgagtataaagcaaaggacgatacacaagtgaaaggaaccgaagtaaataccaccgtaataggcgaaaacgatccaattgacgaggtacaagggtttctgttcggcaaactgcgcgatctgcaccccgatctggagggacagttgaaggagctcaggaaacacctggtggagtccacaaacgaaatggcccctctgaaggtttggcagctgcaagatctctccttccagacagccgctaggattctggccagccctgtcgaacttgccctggtggtgatgaaagatctcagtcagaactttccaacaaaggccagggctatcaccaagacggctgtatcaagtgagctgcgaaccgaggtggaagagaatcaaaaatacttcaagggcaccctgggtctgcaacctggagacagcgccctttttattaacgggctccatatggacctggacacacaggacatattctcgctctttgacgtactgcgcaatgaagccagagtcatggaggggctgcatcggctcgggattgagggcctgtccctgcataacgtcctgaagctcaacatacagcccagcgaagcggactacgccgtagatattcggtctccagcaatatcctgggtgaacaacctcgaagtcgacagtagatacaacagttggccttcatcactacaggagcttctccgcccgacctttcccggcgtgattcgccagatcagaaaaaacttacacaatatggtctttatcgttgaccccgcacacgaaacaacggctgaactgatgaacactgccgagatgttcctatctaaccacatcccccttagaattggattcatttttgttgtgaatgacagtgaagacgtggacggtatgcaggatgctggcgtggctgtgcttcgcgcttataattacgtggcacaggaggtagacgattatcacgctttccaaacgttgacacatatctacaataaagtcaggacaggggaaaaggtgaaagtcgaacacgtggtctctgttctggagaaaaagtacccatatgtcgaagtcaactccattctcggaatagatagcgcctatgacaggaacagaaaggaggcccgtgggtactacgaacagacgggcgtaggccccctgcccgttgtcctcttcaatgggatgccctttgagcgcgagcaactggacccagacgaactggagactatcaccatgcacaagattctcgagacgactaccttctttcaaagggcagtgtacctcggtgagttaccccacgaccaggacgtggtagagtacattatgaatcaacccaacgtggtgccgaggattaacagccggatcctgacagcagaaagggactatctggatctgacggcctctaacaacttttttgtcgacgattacgcccgcttcaccatactcgattcgcaaggaaaaaccgcggccgtagccaatagcatgaattacctgacaaaaaaaggaatgagtagcaaagaaatatacgatgatagtttcatcaggccggtgacgttctggattgttggggatttcgatagtcctagcggccgccaactgctctacgatgccatcaagcaccagaagtcctccaacaacgtcagaataagtatgatcaacaatcctgccaaggaaatatcctatgagaatacacagatttctagggccatttgggcagcactccagacgcagacaagtaacgctgccaaaaactttatcactaagatggcgaaggagggtgccgcagaggcactggcggcaggcgccgatatcgctgagttctctgtgggagggatggatttctcgctctttaaagaagtgtttgagtcctcaaaaatggatttcattctgtcccatgccgtctattgccgcgacgtccttaagttaaaaaaaggccagagagctgtgattagcaatggccgcatcattggtcctctagaagactcagagctttttaatcaagacgactttcacttgctcgagaacataatcctgaaaacctccgggcagaagattaagtctcacatacagcagctgcgggttgaggaggacgtggcgagcgacctggtcatgaaggtggacgcactgctctctgcccagccgaaaggcgatcctcggattgagtatcagttctttgaggaccgccattctgcgataaagctgcgccctaaggagggagagacttatttcgatgtggtcgctgtggtggatccggtgactcgcgaagcgcaacggctggcaccactgctgctggtgctagcccaactgatcaacatgaatctccgggtctttatgaattgtcagagcaagctcagtgacatgccccttaagtcattctatcgatacgtacttgagcctgagatatcttttacttccgacaattcattcgccaagggaccaattgcaaaatttctagacatgccgcagagcccgctttttacgctgaacctcaacacccctgagtcctggatggtagaatcagtgaggaccccctacgacctggataacatatacctggaggaagttgattccgttgtggcggctgagtatgagctggaatacctgctcctcgaggggcattgttacgatatcaccacaggccagcccccgaggggactccagttcacattgggcacttctgccaatcccgtaatcgtggacactattgtaatggcaaatctcggctatttccagctcaaggctaatcctggcgcctggatcctccgactcaggaaaggcagaagtgaggatatttaccggatttacagtcacgatggaacagactccccacctgatgcggatgaagttgtcattgttctgaacaacttcaaaagtaagatcattaaggtcaaggttcagaaaaaggctgatatggtcaacgaagatctcctctcggatggaacatctgagaacgagagcggcttctgggactctttcaagtgggggtttacaggccaaaagacagaagaagttaagcaagataaggacgacatcataaacattttttcagtagcctccggccatctttatgagagattcttacggattatgatgctctccgtgctgaagaacaccaaaactcccgttaagttctggttcttgaagaactatctgtccccgacttttaaagagttcattccttacatggctaacgagtataatttccagtacgagcttgtgcagtataagtggccaagatggttgcatcagcagacagagaagcagagaattatctgggggtataagatcctgttcctcgacgtgctgttcccccttgtggtggataagttcctgtttgtggacgcagaccaaattgttcggaccgacctgaaagagctgcgcgattttaatctggatggggccccttacggttatactccattctgcgattcccgtcgggagatggacgggtaccgtttttggaaaagcggctactgggcatcacacctggcaggacgaaaataccacatctctgcactttacgttgtggatcttaaaaaattcaggaaaatagcagctggcgatagactacgtggacagtaccaaggcttatctcaggaccccaactccctaagcaaccttgaccaagatcttcctaacaatatgatccaccaggttcctattaagagcctgccgcaagaatggctttggtgtgagacatggtgcgatgacgctagcaaaaagagagccaaaactatagatctgtgtaataacccaatgaccaaagagccaaagctcgaggctgcagtgcggatcgttccggaatggcaggactatgatcaagagataaagcagctccagatcaggtttcagaaagagaaggaaactggggcactttataaagagaaaaccaaggaaccatctagggaagggcctcagaagagagaggagctctag

SEQ ID NO: 202675 - DNA, 4596 bp, Artificial Sequence
  derived and/or modified sequence
atgggcgtgctggtggtgctgaccgtgctgtggctgttcagcagcgtaaaggcggactctaaagcgattactacctccctgaccaccaaatggttctcgacacccctactgcttgaggcatccgagttccttgctgaagattcccaggaaaagttctggaatttcgtagaggcgtcacagaatattgggtccagtgatcacgacggaaccgactatagctactaccacgctattttggaggcagccttccaatttttgtctcctcttcagcagaatctgtttaagttctgtctgtccctgaggtcttactcagccacgatacaagctttccagcagatcgccgccgatgagcctcctccagaaggctgtaacagctttttttccgtgcacggcaagaaaacttgcgaatccgacaccctcgaggcgctgttgctaacggcctcggaacggcccaagccgctgctgtttaagggtgatcacaggtatcctagctctaacccagagagtcccgtcgttattttttacagcgagattgggtccgaggagttttccaactttcaccgacagctgatttccaagagcaacgcaggcaagatcaactatgtgttccgacattacatttttaacccaagaaaggagcctgtgtacctgagtggatacggcgtggagctggctatcaaatccactgaatacaaagccaaagacgatacccaggtgaaagggaccgaggtgaacaccacagtgatcggtgaaaatgaccctattgacgaggtacagggctttctgtttggcaaactgcgcgacttgcatcctgacctggaaggacagctcaaagaactcagaaagcacctcgtagaatctaccaatgagatggccccattgaaggtatggcagctccaggatctaagttttcagacagcagcgcgtatactggctagccctgtggaattggcattggtggtgatgaaggatctatcgcaaaactttccaaccaaggccagagcgatcacaaaaaccgcggtatcttcagaactgaggactgaggtagaggaaaatcagaaatacttcaaggggacgctcggactgcagcctggggactctgcactgtttataaacgggctgcatatggacctggatacccaggacatttttagcctattcgatgttctccggaatgaggctcgggtgatggaaggcttgcataggctggggatcgagggcctctcattgcacaatgtgctgaaattgaacatccaaccatccgaagccgattatgccgtcgatatccgcagccccgccatctcttgggtgaataacctggaggtagatagcaggtacaactcctggccttcctctctccaagagctacttcgccccacattccctggagtaatccgtcagatacgtaagaacctgcacaacatggtattcatcgttgacccagcccacgaaaccaccgctgaacttatgaatacggctgaaatgtttcttagcaatcacatccctctgcggattggattcatatttgtagtgaatgactctgaggatgtcgacggaatgcaagacgctggggttgcagtgctgcgcgcctataattatgtggctcaggaagtagacgattaccacgccttccagacattgactcacatctataataaggtcagaactggagagaaggtgaaagtggaacacgttgtctcagtcttggaaaagaagtacccgtatgtagaggtaaatagcatattgggcattgattctgcatacgatagaaatcgaaaagaggcccggggctattacgaacaaacaggggtgggacccctgcctgtggtattatttaacgggatgccgttcgagagggaacagctcgatcccgatgaattagaaaccataactatgcataaaatcctggaaaccaccactttcttccagcgagcagtgtacctgggggagctacctcacgaccaggatgtcgtggagtacattatgaatcagcccaacgtggtcccaaggatcaattctaggatcctgaccgccgagagagattatctggatctgaccgcctccaacaatttttttgtcgacgattatgctcgcttcaccatattggacagccagggcaagacggctgccgttgccaattccatgaactacctgacaaagaaggggatgtcctccaaagaaatctatgacgacagctttatccgccccgtgaccttttggatcgtcggcgattttgacagtcctagcggacgccaactcctgtatgatgccattaagcaccaaaaaagcagcaataacgtgagaatcagcatgataaataacccagccaaagagatcagctacgaaaacacccagatcagtcgtgcgatctgggcagcactgcagacccagacatcgaatgccgccaaaaatttcattacaaagatggcgaaagaaggggcggccgaggctctcgccgctggggcggacattgctgagttctctgtcggaggaatggattttagcctgtttaaggaagtgttcgaaagttctaagatggatttcatacttagccatgccgtgtactgccgagacgtactaaagctgaaaaaggggcaaagggcggtgatctcaaacggccgaatcattggtcccctggaggactctgaactctttaaccaggacgacttccatctgttggagaacataatcttgaagacatcaggccaaaaaataaagagccatattcaacagctgcgcgtggaggaagacgtggcatcggatctggttatgaaagtcgacgccctgctgagtgctcagcctaagggcgacccacggattgagtatcagttcttcgaggataggcactctgccatcaagctgcggcctaaagagggtgagacatattttgacgtcgttgccgtggtcgatcccgtaacgagagaggcgcagcgtctggctcctctgctgctggtcctcgcccagcttatcaacatgaaccttcgcgtgttcatgaactgccagtccaaattatctgacatgccacttaagtccttctacagatacgtgttagagcccgaaatcagctttacaagcgacaacagttttgccaagggcccgatagctaagtttctggatatgccccaaagtcccctgttcacattaaatctgaatacacctgagtcgtggatggtggagagcgtacgaacaccgtatgacctggataacatttaccttgaggaggtggattcagtggtcgcagcagagtacgagctggagtatttgctgctggaagggcattgctacgacatcacaacagggcagcctcccaggggacttcagttcaccctaggcacgagcgccaacccagtcatagtcgacaccattgttatggctaatctaggttacttccagttgaaggcaaaccccggggcctggattttgagactgagaaagggtcggtctgaagatatttatcgcatttattctcacgatggtacagactcaccaccagatgccgacgaggttgttattgtgttaaataattttaagtcaaagatcatcaaagtgaaggttcaaaaaaaggcggatatggttaacgaggatctgctctcggatgggactagcgagaatgaaagcggtttttgggacagttttaaatgggggtttaccgggcagaagacagaggaagtgaagcaggacaaagacgatattatcaacatatttagtgtggccagcggacacctttacgagaggttcttgcgaattatgatgttgtctgtgctgaagaatactaagacaccagtcaagttctggttcctcaagaactatctttcgcctacgttcaaagagtttattccctacatggcaaatgaatataactttcagtatgaactggtccagtataaatggccaagatggttgcatcagcagaccgagaagcagcgcattatatggggctataagatactgtttctggatgtgttgtttccactggttgtggacaaattcttgttcgtggacgccgatcaaatcgtgcggaccgatttgaaggagctgcgtgatttcaacttggacggtgccccttatgggtacacacctttttgtgacagccggcgggagatggatgggtatcggttctggaagagcggatattgggcctcccacttggccgggagaaaataccacatctctgctctatatgtcgtagacctcaaaaagttccgaaaaatcgctgccggcgataggctgagagggcagtaccaggggctcagtcaggaccctaatagccttagcaaccttgatcaagatttgcctaacaacatgattcaccaggtgcccattaaatctttacctcaagaatggctgtggtgcgaaacctggtgtgacgacgcaagcaagaagcgggcaaagacgattgacttgtgtaataatcctatgacgaaagaacctaagctcgaagcagccgttaggattgtgcccgagtggcaggattacgatcaggaaataaagcagctacagattcggttccaaaaggagaaggagacgggggctctttataaagagaagacaaaggaacccagccgggaaggacctcagaaacgtgaggaactgtag

SEQ ID NO: 202676 - DNA, 4667 bp, Artificial Sequence
  derived and/or modified sequence
atggggtgcaaaggagatgccagtggtgcttgtgcagcgggtgctcttccagtaaccggggtatgctacaaaatgggggtcctcgttgtgctcacagtattgtggctgttcagcagtgtaaaggcagatagcaaggccataaccacctccctgacaaccaaatggttttccacaccactcctgctcgaggccagtgaatttctggccgaagattcccaggaaaaattttggaacttcgtggaagcttcccaaaatattggcagctctgaccacgatggcaccgactactcctattaccacgcaatcctcgaagcggcttttcaattcctcagcccgcttcagcagaatctattcaagttctgtttgtcgctaagatcatatagcgccacgatacaagccttccaacagatcgccgctgatgaaccaccgcctgaaggctgtaatagtttcttcagcgtacatgggaaaaaaacatgtgagagcgataccctggaagcactcttactgaccgccagcgagcgcccaaagcctttgttattcaagggcgaccacagatatccctcttctaacccagaatctcccgtggtaattttttactccgagatcggatccgaagagttttctaactttcatcgccagttaatctccaaaagtaacgccggaaagattaactatgtgttcagacactatatctttaacccaagaaaggaacctgtatacctttccggatatggcgtcgagctggccattaaatccaccgaatacaaagcaaaagatgatacgcaggtgaagggcacggaggtcaatacaacagtgatcggagagaatgatcccatagacgaggttcagggatttttgttcggaaaactgcgggatctgcaccctgatctcgaaggccaattaaaagagttgcgtaaacatctcgtggagagtactaacgaaatggccccactaaaggtctggcagctccaggatcttagcttccagacagctgcacgaattttagcgtcccccgttgagctagcgttagtggtgatgaaggacctatcccagaacttccccactaaggccagggccatcaccaaaacagccgtgtctagtgagttaagaaccgaagtagaggaaaaccagaagtatttcaaagggacactcggtttacagcctggtgactctgccctattcatcaacggtctacacatggacctggacacccaggatattttttccctgtttgacgtgctcagaaacgaggctcgtgtgatggaaggattgcatcggctcggaattgaggggttatccttacacaacgtactgaagctcaacatacaaccgagcgaagcagactacgccgtggacattcggtcacccgcaattagctgggtgaataacctagaagtggatagccgatacaacagctggccttcttccctccaagagcttctgcggcctacctttcccggtgtgatacggcagattagaaagaatctgcacaatatggtcttcattgtcgaccctgctcatgagaccactgccgaactaatgaataccgccgagatgttcctatccaatcatatccccttgcgcatcggattcatcttcgtggttaatgactctgaggacgttgacggaatgcaggatgctggcgttgctgtgctgcgcgcttataactacgtcgctcaggaggtggacgattaccacgcgttccaaacactgacccacatttataacaaggtgcgtaccggtgagaaggtgaaagtcgaacacgtggtgtccgtgctcgagaaaaaatacccctacgttgaagtgaattcaatcctagggatcgattccgcctacgacaggaatcggaaggaagctaggggctactacgagcagactggcgtgggccctctgcccgttgtgctgtttaatggcatgcccttcgaaagagaacagcttgaccccgacgagcttgagaccatcacgatgcacaagatcttagagactacaacatttttccaacgtgccgtctatctgggagagcttccacatgaccaggacgtggtcgagtatattatgaaccagcccaacgtggtgccccgtatcaactcccggatactcacagcagaacgagattacctggatctcaccgccagcaataacttctttgttgatgattatgccagatttaccattttggacagccagggaaagactgccgcagtcgcaaacagtatgaactatctcacaaagaagggcatgtcctctaaagaaatttacgatgattcctttattcgaccggtcaccttttggatcgttggagattttgacagcccttcaggcaggcagttgctatacgacgcaattaagcatcagaaatcctcaaataatgtgcgcatctccatgatcaataatcccgctaaggagatctcctacgagaacactcaaatttcacgagccatttgggccgcactacagactcaaacgtccaatgcagccaagaacttcataactaaaatggcaaaagagggcgctgccgaggccctggccgcaggcgcagatatcgccgaattttcggtcggcggtatggatttttctcttttcaaggaagtgttcgaatcctccaaaatggactttatcctaagtcacgcggtgtattgcagggatgtgctcaaattgaaaaaggggcaaagggctgtgataagcaatggtcggatcatcgggcctctggaggacagcgagctgtttaatcaggacgactttcatcttctggagaatattatcttgaagacaagtggccagaagatcaagagccatattcaacaactgcgggttgaggaggatgtcgccagtgatctggtaatgaaggtggatgctctcctcagcgctcaacctaaaggggacccaaggatcgaatatcagtttttcgaagataggcattcagcaattaaactccgtcctaaggaaggcgaaacctacttcgatgtcgttgccgtagttgacccggttactcgcgaggcacaaaggcttgcaccactcctgctcgtgctcgcgcaattgattaatatgaaccttcgggtcttcatgaattgtcaatccaagctttcagacatgcccctgaaaagcttctaccgctatgtgctggaacccgagatatctttcacgagcgacaatagtttcgcaaagggcccaatcgcgaaatttctcgatatgccacagtctcccctcttcacgttgaacctcaatacgccagaaagttggatggtggagtctgtgcggacaccatatgacctcgacaacatttacctcgaagaggttgattcagtggtagccgcagaatacgagcttgagtatctcttgttggagggacactgttatgatattaccactgggcagcctcctagaggactgcaatttactttggggacatctgcaaaccccgttatagttgatactatcgtcatggccaacctggggtactttcaactgaaggccaatccaggggcttggatcctgagacttagaaagggacgctccgaggatatttataggatttacagccatgacggcacggatagcccgccagatgcagatgaagtggttattgtactaaataatttcaaaagcaaaatcatcaaagtgaaagtgcaaaagaaggccgacatggtcaatgaggacctcttaagcgacggaacatcagagaatgagtccggcttttgggattcattcaaatggggttttactggacagaagaccgaggaggtaaaacaggataaggacgatatcatcaatatcttttcagtcgcctcaggccatctctacgaacgattcctacgaattatgatgctgtcagtgctcaaaaatactaagacccccgtgaaattctggtttttaaagaattatttgtctcctacctttaaggaatttatcccttatatggctaatgaatataatttccagtacgagctagtgcagtacaaatggcctagatggctccaccaacagactgaaaaacagcgaattatttggggatataagattctatttcttgatgtgctcttccccctggtggtcgacaaatttctgttcgtcgacgccgatcagatcgtcagaacggacctaaaggagctgcgggacttcaacctcgacggagccccatatggatacacaccgttctgcgactcacggagagagatggatggctacagattttggaagagtggctattgggcctctcacctcgccggaaggaagtaccacatcagtgcactgtacgtcgttgatctcaaaaagttccgaaagattgcggctggcgatcgtctacgaggccaatatcagggcctgtcgcaggatccaaattcgctgagtaatctggaccaggacctaccgaacaatatgattcatcaggttcccattaaatccctccctcaggaatggttatggtgtgaaacatggtgcgacgatgcgagcaaaaagagagccaaaacaattgacctgtgcaacaacccaatgaccaaagagccaaagctggaagccgctgtgaggatcgtccccgaatggcaagattatgaccaggaaattaagcaattacagatcagattccaaaaggaaaaggagaccggcgcactatataaggaaaagaccaaggagccttcgcgggaaggcccacagaagcgggaggagcttta

SEQ ID NO: 202677 - DNA, 4595 bp, Artificial Sequence
  derived and/or modified sequence
atgggggtgctggttgtccttaccgttctctggctgtttagtagtgttaaagcagatagcaaggctatcacaaccagccttaccacaaaatggttttccacacctcttcttctcgaagcttccgagtttctcgctgaagatagccaggaaaaattttggaatttcgtagaggcttcgcaaaatattggttcaagtgaccatgacggtactgattactcctattaccatgccatcctggaagctgcttttcagtttctgtcacctttgcagcagaatctgtttaagttttgcttgagtctgagaagctatagcgcaactatacaggcctttcagcaaattgctgccgatgaaccaccccctgaaggatgcaatagctttttcagcgtgcacggtaaaaaaacctgcgagtctgacaccctggaggcgctgttgctgacagctagtgagcggccaaagccgctgcttttcaagggtgatcatcgatacccaagcagcaaccctgaatcacccgtcgtaatcttttactccgagatcgggagcgaagagttttctaactttcaccgccagctgatctcaaagtccaacgccggaaaaattaattacgtcttccgtcattacatctttaaccctagaaaagaaccagtttatctctctggttacggcgtagagctggcaatcaagagtaccgaatacaaggcgaaagacgatacacaggtgaagggaaccgaagtgaatacaacggtcattggagagaacgaccccattgacgaggtccaggggttcctctttgggaagctgagagacttacaccctgacctggaagggcagcttaaggagctgaggaaacacctggtggaaagcacgaacgaaatggctccgttgaaggtgtggcaactgcaagatctgagcttccagacagcggctcgtatccttgcgagtcccgtggaactggcgttggtggtgatgaaagacctatcccagaattttcctacaaaggctcgcgcaatcacaaagactgccgtctcaagtgagctgcggactgaggtagaggagaaccagaaatatttcaagggcactctggggctgcagcctggggacagtgccctgttcataaacggactccatatggatctcgacacgcaggacatcttttcattattcgacgtgttgcgcaacgaggcacgggtcatggaggggctgcacagactgggaatcgaggggcttagcctgcataatgtcctcaagctcaatattcaaccatcagaggccgattatgcagttgatattagatcaccggcaatatcatgggtgaataatctggaagtggacagcaggtacaatagttggcccagttctctccaggagcttctccggccaacctttccaggggtcattaggcagatacggaagaatttacacaacatggtgtttatcgtggatcccgctcacgagactaccgccgaactgatgaacaccgcggaaatgttcctgtccaaccatatccccctccgcatcggtttcatattcgtcgtgaacgacagcgaagacgttgatgggatgcaagatgctggagttgctgtcctgagggcttacaactacgtggcgcaggaggttgatgactaccacgccttccagacgttaacccatatctacaacaaggtcaggactggggaaaaagtgaaggttgagcacgtcgtgtccgtgctggagaaaaaatacccatacgtggaggtgaactccattctgggcatcgattccgcctacgaccggaatcgcaaggaggcgagaggatactatgagcagacgggagttggtcccctgcccgtagttctgttcaatgggatgccctttgaaagggaacagttagaccctgatgagctcgaaacaatcactatgcacaaaatactggagacaaccactttttttcagcgagctgtttacctgggggagctaccacacgatcaggatgtggttgagtacattatgaatcaacctaacgtggtgcccaggataaactcaaggatcctgacagccgaacgggattatctggatctgactgcttcaaacaacttttttgtggacgattatgcgagattcactattcttgattctcagggcaagacagccgcagtcgctaactccatgaactatcttaccaaaaaaggcatgtcttcaaaggaaatttacgacgacagcttcattcgtcctgtaacattttggatcgtaggcgattttgacagtccaagcggccgtcagcttttatatgatgctatcaaacatcaaaagagcagcaacaatgtccggatctctatgataaataatcctgcaaaagagatttcttacgaaaatactcagatcagccgtgccatttgggccgctctgcagacccagacgagcaacgctgcgaaaaatttcattaccaagatggctaaggagggcgctgcagaggccttagctgctggagccgatatcgccgagtttagtgtgggaggcatggacttcagcttgttcaaagaggtcttcgaaagttccaagatggactttatactgtcacacgccgtgtactgccgagacgtgctgaaactaaaaaaggggcagcgagccgtgattagcaacggcaggattatcggtcctctcgaggactctgagctgttcaatcaagatgactttcatcttctagagaacatcatattaaaaacttccggacagaagattaagtctcatattcagcagctgcgcgtcgaggaagacgtcgctagtgacctggtgatgaaagtggacgccttgttaagcgctcagcctaaaggagacccgagaatcgagtaccagttttttgaagacagacattcagccataaagctccggcctaaagaaggtgaaacatacttcgatgtcgttgccgtagttgaccctgtgactcgcgaagcccagcgcttagcacccttgctcctcgtgctggcacaactaattaatatgaatctcagggtgttcatgaattgccagagtaagcttagcgacatgccattaaagtctttttacagatacgtattagaacctgagatcagttttacttcagataattcctttgccaagggtcctatagccaagtttcttgatatgccccagtcgccccttttcacactgaacctgaatacgccagagtcctggatggtcgagtctgtacggaccccctatgacctggataacatttatcttgaggaggtggatagtgtggtcgcagctgaatacgagttggaatatcttctactggaagggcactgctacgatattacaacaggacagcccccaagaggcttgcagttcaccctgggcacgtcggccaatccggttattgtggataccatcgtgatggccaatctgggctactttcagctgaaggctaaccctggagcctggatactgaggcttcgcaagggaaggagcgaggatatctacagaatatacagccacgacggtacggactccccacccgatgccgatgaagtggtgatcgtgctcaataactttaagtcgaaaatcatcaaagtaaaagttcaaaaaaaagctgatatggtcaatgaagacctcctctccgatggcacaagcgaaaacgaatccggcttctgggatagttttaagtggggctttaccgggcagaaaactgaagaagtgaagcaagacaaggacgatattattaatatcttttcagtggctagcgggcatttgtacgagcgatttttgcgcatcatgatgctcagtgtacttaagaacacgaaaacgccagtcaaattttggttcttaaaaaattatcttagccctacttttaaagagttcatcccttacatggccaatgagtacaattttcagtatgagcttgttcagtacaaatggcctagatggctgcatcaacaaacagagaagcagagaatcatttgggggtataaaatcctgtttcttgacgtcctgttccctcttgtggtcgacaagttcctctttgtggacgccgaccagatagtacgaaccgatttgaaggaactgcgcgacttcaatctggatggagcaccttacggctatacccctttctgtgattcaaggcgcgagatggatgggtacaggttttggaaatctgggtactgggcgtcacatttggcaggtcggaagtaccacatctccgccctgtacgtggtggatttaaagaaattccggaagattgccgctggagaccggcttcgcggtcagtaccagggacttagccaggatcctaacagcctgagcaacctggaccaagatctcccaaacaacatgatccaccaagtcccaattaagtcactgccacaggaatggctctggtgcgagacgtggtgcgatgacgcatccaaaaagcgcgcaaagacaatagacctctgtaacaaccctatgactaaggagcccaaactggaggccgctgtgcggatcgtgcctgagtggcaggactatgaccaggaaattaaacagctccagatccggtttcaaaaggaaaaggaaacaggagcactgtacaaggaaaagactaaagaacccagtcgcgaggggcctcagaaaagagaggagttgta

SEQ ID NO: 202678 - DNA, 10650 bp, Artificial Sequence
  derived and/or modified sequence
ccctggcgttgtctctggcactgtggcggactgaccacggcccgggcatgggctgcaagggagacgcgagcggtgcgtgtgccgcgggtgcgctgccggtgacaggagtttgctataaaatgggagttctggttgtactcactgttctgtggctgttctcctcagtaaaggccgactcaaaagccattacaacctctcttacaacaaaatggttttccactccattgttgttagaagccagtgagtttttagcagaagacagtcaagagaaattttggaattttgtagaagccagtcaaaatattggatcatcagatcatgacggtaccgattattcctactatcatgcaatattggaggctgcatttcagtttctgtcacccctccagcagaatttgtttaaattttgtctgtcccttcgttcttactcagctacaatccaagccttccagcagatagcagctgatgaacctccaccagaaggatgtaattcgtttttttcagtgcatggaaagaagacttgtgaatctgatacccttgaggctcttctactgacagcctctgaaagacccaaacctttattgttcaaaggagatcacagatatccctcgtctaatcctgaaagccctgtggtgattttctactctgagattggctctgaggaattttccaattttcaccgccagcttatatcaaaaagcaatgcaggcaaaatcaattatgtattcagacattatatatttaatcccaggaaggagcctgtttacctctctggctatggcgtggaattggccattaagagcactgagtacaaggccaaggatgatactcaggtgaaaggaactgaggtaaacaccacagtgattggtgaaaatgatcctattgatgaggttcaggggttcctctttggaaaattaagagatctgcaccccgacctggagggacagttgaaagaactcagaaagcatcttgtagagagcaccaatgaaatggcacctttaaaggtttggcagttgcaagatctcagtttccagactgctgctcgaatcttggcttctcctgttgagttggctttggttgtcatgaaggatcttagtcagaattttcctaccaaagccagagcaataacaaaaacagctgtgagctcagaacttagaaccgaagtggaagagaatcagaagtatttcaagggaactttaggattacaacctggagattcagccctcttcatcaatggacttcacatggatttagatacacaggatatattcagtctgtttgatgtgttgaggaatgaagctcgggtaatggagggtctgcatagattgggaatagaaggcctttctctgcataatgttttgaagctgaacatccagccctctgaggcagactatgccgtagacatccggagtcctgctatttcatgggtcaacaacctggaggttgatagcagatataattcgtggccttctagtttacaagagttgcttcgacccacctttcctggtgttattcggcagatcaggaaaaacttacataatatggttttcatagttgatcctgcacatgagaccacagcagagttgatgaacacagctgagatgttccttagtaatcatataccactaagaattggttttatctttgtggttaatgactctgaagatgttgatgggatgcaagatgctggagtggctgttcttagagcatataattatgttgcccaagaagtggatgattatcatgccttccagactctgacacatatctataacaaggtgaggactggagaaaaagtgaaagttgaacatgtggtcagtgtcctggagaagaaatatccgtatgtagaagtgaatagcattttggggattgattctgcttatgatcggaatcggaaggaagcaagaggctactatgagcagactggagttggacctctgcccgttgtgctgttcaatggaatgccctttgaaagggaacagctagaccctgatgagttagaaaccatcacaatgcataaaatcctggagaccaccaccttcttccaaagagcggtgtacttgggtgaactgccccatgatcaagatgtggtagagtatatcatgaatcagccaaatgttgttccacgaatcaattctaggattttgacagctgaacgagactacctggatttaacagcgagtaataacttctttgtggatgattatgctagatttactatcttggattcccaaggcaagactgctgctgtagccaatagtatgaactatctgacaaagaaaggaatgtcctccaaggaaatctatgatgattcttttattaggccagtaactttttggattgttggggattttgatagcccttctggacggcagttactgtatgatgccatcaaacatcagaaatccagtaacaatgttagaataagcatgatcaataatcctgccaaagagataagctatgagaacactcagatctccagagcaatctgggcagctctccaaactcagacttccaacgctgctaagaacttcatcaccaaaatggccaaggagggggctgcagaggccctggctgcaggagctgacattgcggagttctctgttgggggaatggatttcagtctttttaaagaggtctttgagtcttccaaaatggatttcattttgtctcatgccgtgtactgcagggatgttctgaagctgaagaagggacagagggcagtgatcagcaatggaaggatcattgggccactggaggatagtgagctctttaatcaagacgatttccacctcctcgaaaatatcatcttaaaaacctcaggacagaaaataaaatctcatattcaacagcttcgggtagaagaagatgtggcaagcgacttggtaatgaaggtggatgctcttctgtcagcgcaaccaaaaggagatccaagaatcgagtaccagttttttgaagacagacacagtgcaatcaaactgaggccgaaggaaggggagacatactttgatgttgtggctgtcgttgaccctgtcaccagagaagcacagagacttgctcctttgctcttggttttggctcagctgataaacatgaatctgagagtatttatgaactgccaatccaaactttctgacatgcctttaaaaagcttttaccgttatgtcttagaaccagagatttctttcacttcagacaatagttttgctaagggtccaatcgcaaaatttttggatatgcctcagtctccactgttcactctgaatttgaacacacctgagagctggatggtagaatctgtcagaacaccatatgatcttgataatatttatttagaagaggtggacagtgtagtggctgctgagtatgagctggaatacctgttactggaaggtcattgctacgacatcaccacaggccagcctccacggggactacagtttaccttaggaacttcagccaacccggtcattgtggacaccattgttatggccaatctgggctactttcagctgaaagccaacccaggagcttggatcctcagacttaggaagggacgctctgaagatatttatagaatttacagccacgatggcactgattctccccctgatgctgatgaggtggttatcgtcctcaacaacttcaaaagcaaaattattaaagtgaaggttcagaagaaggcagatatggtgaacgaagacttgctgagtgatggaacgagtgagaatgaatctggattttgggattccttcaaatggggctttacaggacagaagactgaggaagtgaagcaagataaagatgacataattaatattttctccgttgcatctggtcatctctacgaaagatttcttcgcataatgatgctatccgtgctgaagaataccaagactcctgtgaaattctggttcttgaagaattacttgtcccccacatttaaggagtttataccttacatggcaaatgaatacaatttccagtatgagcttgttcagtacaaatggccccggtggcttcatcaacaaactgaaaaacagcgtatcatctggggttacaagatcctcttcctggatgtacttttcccactagttgttgacaagttcctgtttgtggatgctgatcagattgtacgaacagatctgaaagagttaagagatttcaatttggatggtgctccttatggttacactcctttctgtgacagccgaagagaaatggacggctacaggttctggaagtcagggtactgggccagtcatttagccgggcgaaagtatcatatcagtgcactatatgttgtggatctgaagaagtttaggaaaatagctgctggtgacagactcaggggacagtaccaaggtctgagtcaggaccctaacagcctttcaaatcttgatcaagatctgcccaataacatgattcatcaggtgccaattaaatccctccctcaagaatggctttggtgtgaaacgtggtgtgatgacgcctctaagaaaagggcaaaaaccattgatttgtgtaataatccgatgaccaaagagccgaaactggaagcagctgtgcggattgtcccggagtggcaggactacgaccaagagatcaaacagctacagatccgctttcagaaggagaaagaaacgggagcactgtacaaagagaagacaaaagaaccaagccgagaaggtcctcagaaacgtgaagaattatgatctctggagaaggacaggaaatcaccccatttgaaaaacagtttttataataaatgctagttttttctgatctgtctatacaactgctgataagccggctgggcaggagtgccacaccttttgattctgagcatttgattctgacttctgtactctggtggccactggatctttgggattaaagctctgttggatttgtacctcagaggaagaccaagtggctgatcctttggactctgtaaagagcattcttctagtcagagggtggaatggcagcagcaactggaagaaaatgagttttttggtgcccacacccaagagcacacacatgctgcactgtctcggaaagcagggccagctagagccaccatgttcttccttacctcagtttacctgcggcctgcgctgcactgcagatgcccaccctgccctgggtctggccggcggaagctctgtccaaggtccacacacctccaggtttacgccaacatccttgtgccctccccaccttctcttccaacgcattaggtgcattgtttaattgaaatccaaccaacaattgtgtgtcaaggctggtttggtgcagtggctgggcaaattaattttgggccaggatgggggtgggttgcagtgagggtagggaaaatgtcaggagtaggaaggttcgggggttaagggaagggaaggaagaccagaactggccatcctcttttataatccattagtagcaccatggctcatttgaaatgaaaatattacacttattccccacccaaccgcagtgaactttctaggtaattgttttgaaaacaatttttgtatctgtgaaagtctttgctttttctttccaccttctagaaaagtctgctaccagtttccttactgaatacagccatactcagcccctctcgcatccagcccgtcagggtcagggtcagggtcaggctccctcaagacgagcaccgcattgtctgccctcttttgcgtaggatttttctctcagacccaggggacattgccttggacttttctctacaaatgccctcagatgtaagaccagaaatgattctgcttgtggaactcgtggctttctgtcctattttccttttatgtgagccctgcaggttgcctttggcgcccacaccagttctgtcttcatgtcgctgcatcgtgaagccccatttgcctttagtccctgctttgtgtgtcttcacttccacagccagtgttgcccctcagggcatactttgctggtgaacgggctgtagagtcttgagtatgttattggcctaagtgggcatgaggccccagcatccgactccatctgccaggctgcagggcacagcagcactggcatagacaggcacgctctgtcttccaacgtgcaccagccttttcttacatattttgcctgtttttaaaaaatacgaggagagggtgcagatggatactgtgccctcaccctcctaagccaggtaatatattgatgtgcagacttttaagaaatcttagtcttatcacaaatatcaagtaatttattttttccattttcaaatgcaaaagttagcctaggaagcctcccagtcatcctgaaggaccttttgactttgcttttataattctgttaaaaattgaggaggggattaatgagtacaatgaaaacaaaacaaaacaaaaaattaagaagaggaaagctcaaaagaggataagagactgaaaaggcacctcagaatggctgctgtgggcagagtctgtgacatgactttccccgccctgcccctctgttcagagcagctggaaagatgggatcagtaagattaaaaaacttttgttcggccaggcgtggtggctcacacctgtaatcccagcactttgggaggctgaggcggacggatcatgaggtcaggagttcaagaccagcctggccaatatggtgaaaccccgtctctactaaaaatacaaaaattagccgggtgttgtggctcaccctctattcccagctactcgggaggcagagacaggagaatcgcctgaacccaggaggcagaggttgcagtgagctgagatcgtgccactgcactccagcctgggtgacagagcgagactccatctcagaaaacaaacaaacaaaaagaaacttttgttcaagctgcatcttcacattgaatgaaagcattcagacgggtgactgctgctgtccacaactgtgggcggaagtgtgccttttcccagtttctcgtccaggaggttgcatagcaaatactcaagtcactgggatatatgctttccaaatgctggcccccatagcacctttccccatgtctttctaccaagcctcttatgtttaatctgtgcagggaagacaagagtagaccatattctctgtgtgctgtgcatgtcctggtgtcactcattgcctcttatctgtcgccattctaatataagtcagcttaatagttgactctgaataatgcaaaacccagcttgcttccagaatggcctaggaccctcctcctcctgccagtttttttttttttttttggttcatgtggcataatcatctttcaaaattaaccaaatgccccagaaaatgatgttaccactaaaatattttctccaagaaggcatactgtaacagaaaagataggtaagatatttttttcccaagaagtaagaattgattgtgctgaatgttcaaactctggaaactgttcacagtatgttgttcttagctgttatttatataaagtgaattattttctctctcaatcatgccatagtggagacttttgtttgtgagtaagtgacagagtaatatgaaataatgtgatatgtcagagtgacatgcagcatcctgagcctgtttttatgttctgtgtacagtggcatttgattgagatcaaagcctgtcacagcctgctgctgggggtgtggggatatgccagagtcctgtgtttggttttagaagtttactgaatgtttcccacatggagaataatggatggcatgttagtttctttaagagtggtaaagttgtacatctgtcattgttgcatttcgaattgaacacatagatgcttgcctgtctgcttgggtgaatgcctcttgggagagcgaagattacgtgcatgatgtatgttaagaaacagtttccggtcaggcacagtggcttacacctgtaatcccagcactttgggaagccgaggcgggcggattatgaggtcaagagatagagaccatcctggccaacacggtgaaaccccgtctctactaaaaatacaaaaattagctgggcatggtggcacacacctgtagtcccagctactcgggaggctgaggcaggagaatcacttgaacccgggaggtggaggttgcagtgagccgagatcatgccactgcactccagcctggcaatagagcgagactccgtctcaaaaaaaaaaaaaaaaaaaaaaaaaaaattaaaacagtttccataaatggagcttaatttgctctgctgtccttaagccctcgtgggtttttttttaagagagtctcattctgtcacccaggctggagtgcagtggtgcgatcttggctcacttcaacctctgcctcccaagttcaaacaattctcctgcctcagcctcctgagtagctgggattacaggcgcctgccaccatgcctggttaatttttgtatttttagtagagatggggttttaccatgttggttggccaggctgatctcaaactcctgacctcaggtggtgatctgcccacctcggcctcccaaagtgctgggattacaggcgtgagccactatgtccggtcaagccctcgtgttctgaaccttgtcaaggctctgcctgaatgagttttcatctgattgtggggaccaagtccctgagtagagggccaagagctagggacagggggaagagactggcccaggtggtagggaggaaagaactcccagagtttcctttagccaggaaacctgctctactgaccccgtgacttggacagtcagacatcaccctgagagtgacaagtgtaaaatgactcccttcctcccccgccctccggaagtatatttagatacttgaaagcagtccttttctaaaatggccttacctatgtggcctgaacgattaaaagaaagaactcagagttacaagggaaaaagaaaaagagttacaagggaattgtagtctttttctgaatagaatattagtactgtggtattgcatttcatgggaatggaaatgtattggtaaagctacctgatggaagctttctcttggtaacaaaaatggagggtgtattatgtgcagttatttaaatatatgtattccattgttgcgtggtttttttcccccctcaagacagagatttgctcttgttgcccagggtggagtacaatggtgtgaccttggctcactgcaacctctgcctcctgggttcaggtgattctcctgcctcagccttccgagtagctgggattacaggtgtgcgccaccacacccggctaatttttgctttttttttttttgagacagaatctcgctctgttgctcaggctggagtggagtgcagtggcacaatctcagctcactgcagcctctgcctcccgggttcaagagattctcctgactcaacctcctgagtagctgggattacaggtgcctgccactatgcctagctaatttttgtatttttagtagagacggggttttgccatgttggccagggtggtctcgaactcctgacctcaagtgatccacccgcatcggccccccaaagtgctgggattataggcgtgaaccaccgcgcctgtcccattgttgtgtaattttaataattagttttttaagtacttgattttatgggcacatttttgtgggatgattggagttaatcaaataaagcttgtcatgtgtgtagtttggtaagataacttctttaaattcatgttttctctgccttgaggtagtgagggaaagatcttaatcagtattttggtaattaactgattgaattcaagcaaatgagacatcatgaacttcagtggttattgatatttcagggtatatacctgaaatgcctagaggatacagatttctcatttcattctttggtctttcatttctctatatacagaaatgaaatgacacttctgggaggcagtagaagcaggaagtcaatgaattgagtagagggtcccattccctcaggctgtcattgatcagtgacaatttataaaaacaaactgcaaagtctgtggcaagtggctgcctgcttcctagaaggagcccatgaaggttaaactctgtggtcggtatttgcaagcgccgggcgtggtggctcacgcctgtaatcctagcaccttgggaggccaaggcaggcggatcacccgaggtcaggagtttgaggatttgcaagcaaaaggtcctctcctgagtctttcccagatacccagcagtgcagaggctagctgtggaaggttgcagtgggacaggaatgtattgtatgccttgccttacttgtcaccattgagatttccagagaaatgggcataacgtctcttaacaacaacagcagaaagcaaaatacattaacttaaggttgacaacaaaagattatcaagtaccatgttttccaaccaaccagttattcgtggtaataataaaataaaggtgggaaaatgttataatttttaaggaaactgtgtactttaaaaatcttctttatgaatatccaatgttactgtaatcctgctccattaaatgcagcattgttgtcaggtgctgcctcttgcttgggaacagcattgggcttttaaatgtctgcagaatctctgcgttcgaagggaattgagaatgaacttcctggtactgtaatgaaaataaggtctgctcaacacagtaaacgtttcctctcttctttaaaa

SEQ ID NO: 202679 - DNA, 10930 bp, Artificial Sequence
  derived and/or modified sequence
aattgctttgcgaggctgggtgttgagtcgagccgcgggaaaggcgcgtgtcggcctctcactggcgcagcctgcactgccgctgccgcctcgccccgccctgccctggcgttgtctctggcactgtggcggactgaccacggcccgggcatgggctgcaagggagacgcgagcggtgcgtgtgccgcgggtgcgctgccggtgacaggtacccaggggtggcgtgaggaggcctcgtggacaaagagagggtttggggcacaaggcgaccctgtgcccctgtcacattgagcttccgcctctaccgtgactcagtttaccctctggtgtcctatcccttcccctattcgcgagcgccccgagttgccctcagtggtcttcttggcaaggagtttgctataaaatgggagttctggttgtactcactgttctgtggctgttctcctcagtaaaggccgactcaaaagccattacaacctctcttacaacaaaatggttttccactccattgttgttagaagccagtgagtttttagcagaagacagtcaagagaaattttggaattttgtagaagccagtcaaaatattggatcatcagatcatgacggtaccgattattcctactatcatgcaatattggaggctgcatttcagtttctgtcacccctccagcagaatttgtttaaattttgtctgtcccttcgttcttactcagctacaatccaagccttccagcagatagcagctgatgaacctccaccagaaggatgtaattcgtttttttcagtgcatggaaagaagacttgtgaatctgatacccttgaggctcttctactgacagcctctgaaagacccaaacctttattgttcaaaggagatcacagatatccctcgtctaatcctgaaagccctgtggtgattttctactctgagattggctctgaggaattttccaattttcaccgccagcttatatcaaaaagcaatgcaggcaaaatcaattatgtattcagacattatatatttaatcccaggaaggagcctgtttacctctctggctatggcgtggaattggccattaagagcactgagtacaaggccaaggatgatactcaggtgaaaggaactgaggtaaacaccacagtgattggtgaaaatgatcctattgatgaggttcaggggttcctctttggaaaattaagagatctgcaccccgacctggagggacagttgaaagaactcagaaagcatcttgtagagagcaccaatgaaatggcacctttaaaggtttggcagttgcaagatctcagtttccagactgctgctcgaatcttggcttctcctgttgagttggctttggttgtcatgaaggatcttagtcagaattttcctaccaaagccagagcaataacaaaaacagctgtgagctcagaacttagaaccgaagtggaagagaatcagaagtatttcaagggaactttaggattacaacctggagattcagccctcttcatcaatggacttcacatggatttagatacacaggatatattcagtctgtttgatgtgttgaggaatgaagctcgggtaatggagggtctgcatagattgggaatagaaggcctttctctgcataatgttttgaagctgaacatccagccctctgaggcagactatgccgtagacatccggagtcctgctatttcatgggtcaacaacctggaggttgatagcagatataattcgtggccttctagtttacaagagttgcttcgacccacctttcctggtgttattcggcagatcaggaaaaacttacataatatggttttcatagttgatcctgcacatgagaccacagcagagttgatgaacacagctgagatgttccttagtaatcatataccactaagaattggttttatctttgtggttaatgactctgaagatgttgatgggatgcaagatgctggagtggctgttcttagagcatataattatgttgcccaagaagtggatgattatcatgccttccagactctgacacatatctataacaaggtgaggactggagaaaaagtgaaagttgaacatgtggtcagtgtcctggagaagaaatatccgtatgtagaagtgaatagcattttggggattgattctgcttatgatcggaatcggaaggaagcaagaggctactatgagcagactggagttggacctctgcccgttgtgctgttcaatggaatgccctttgaaagggaacagctagaccctgatgagttagaaaccatcacaatgcataaaatcctggagaccaccaccttcttccaaagagcggtgtacttgggtgaactgccccatgatcaagatgtggtagagtatatcatgaatcagccaaatgttgttccacgaatcaattctaggattttgacagctgaacgagactacctggatttaacagcgagtaataacttctttgtggatgattatgctagatttactatcttggattcccaaggcaagactgctgctgtagccaatagtatgaactatctgacaaagaaaggaatgtcctccaaggaaatctatgatgattcttttattaggccagtaactttttggattgttggggattttgatagcccttctggacggcagttactgtatgatgccatcaaacatcagaaatccagtaacaatgttagaataagcatgatcaataatcctgccaaagagataagctatgagaacactcagatctccagagcaatctgggcagctctccaaactcagacttccaacgctgctaagaacttcatcaccaaaatggccaaggagggggctgcagaggccctggctgcaggagctgacattgcggagttctctgttgggggaatggatttcagtctttttaaagaggtctttgagtcttccaaaatggatttcattttgtctcatgccgtgtactgcagggatgttctgaagctgaagaagggacagagggcagtgatcagcaatggaaggatcattgggccactggaggatagtgagctctttaatcaagacgatttccacctcctcgaaaatatcatcttaaaaacctcaggacagaaaataaaatctcatattcaacagcttcgggtagaagaagatgtggcaagcgacttggtaatgaaggtggatgctcttctgtcagcgcaaccaaaaggagatccaagaatcgagtaccagttttttgaagacagacacagtgcaatcaaactgaggccgaaggaaggggagacatactttgatgttgtggctgtcgttgaccctgtcaccagagaagcacagagacttgctcctttgctcttggttttggctcagctgataaacatgaatctgagagtatttatgaactgccaatccaaactttctgacatgcctttaaaaagcttttaccgttatgtcttagaaccagagatttctttcacttcagacaatagttttgctaagggtccaatcgcaaaatttttggatatgcctcagtctccactgttcactctgaatttgaacacacctgagagctggatggtagaatctgtcagaacaccatatgatcttgataatatttatttagaagaggtggacagtgtagtggctgctgagtatgagctggaatacctgttactggaaggtcattgctacgacatcaccacaggccagcctccacggggactacagtttaccttaggaacttcagccaacccggtcattgtggacaccattgttatggccaatctgggctactttcagctgaaagccaacccaggagcttggatcctcagacttaggaagggacgctctgaagatatttatagaatttacagccacgatggcactgattctccccctgatgctgatgaggtggttatcgtcctcaacaacttcaaaagcaaaattattaaagtgaaggttcagaagaaggcagatatggtgaacgaagacttgctgagtgatggaacgagtgagaatgaatctggattttgggattccttcaaatggggctttacaggacagaagactgaggaagtgaagcaagataaagatgacataattaatattttctccgttgcatctggtcatctctacgaaagatttcttcgcataatgatgctatccgtgctgaagaataccaagactcctgtgaaattctggttcttgaagaattacttgtcccccacatttaaggagtttataccttacatggcaaatgaatacaatttccagtatgagcttgttcagtacaaatggccccggtggcttcatcaacaaactgaaaaacagcgtatcatctggggttacaagatcctcttcctggatgtacttttcccactagttgttgacaagttcctgtttgtggatgctgatcagattgtacgaacagatctgaaagagttaagagatttcaatttggatggtgctccttatggttacactcctttctgtgacagccgaagagaaatggacggctacaggttctggaagtcagggtactgggccagtcatttagccgggcgaaagtatcatatcagtgcactatatgttgtggatctgaagaagtttaggaaaatagctgctggtgacagactcaggggacagtaccaaggtctgagtcaggaccctaacagcctttcaaatcttgatcaagatctgcccaataacatgattcatcaggtgccaattaaatccctccctcaagaatggctttggtgtgaaacgtggtgtgatgacgcctctaagaaaagggcaaaaaccattgatttgtgtaataatccgatgaccaaagagccgaaactggaagcagctgtgcggattgtcccggagtggcaggactacgaccaagagatcaaacagctacagatccgctttcagaaggagaaagaaacgggagcactgtacaaagagaagacaaaagaaccaagccgagaaggtcctcagaaacgtgaagaattatgatctctggagaaggacaggaaatcaccccatttgaaaaacagtttttataataaatgctagttttttctgatctgtctatacaactgctgataagccggctgggcaggagtgccacaccttttgattctgagcatttgattctgacttctgtactctggtggccactggatctttgggattaaagctctgttggatttgtacctcagaggaagaccaagtggctgatcctttggactctgtaaagagcattcttctagtcagagggtggaatggcagcagcaactggaagaaaatgagttttttggtgcccacacccaagagcacacacatgctgcactgtctcggaaagcagggccagctagagccaccatgttcttccttacctcagtttacctgcggcctgcgctgcactgcagatgcccaccctgccctgggtctggccggcggaagctctgtccaaggtccacacacctccaggtttacgccaacatccttgtgccctccccaccttctcttccaacgcattaggtgcattgtttaattgaaatccaaccaacaattgtgtgtcaaggctggtttggtgcagtggctgggcaaattaattttgggccaggatgggggtgggttgcagtgagggtagggaaaatgtcaggagtaggaaggttcgggggttaagggaagggaaggaagaccagaactggccatcctcttttataatccattagtagcaccatggctcatttgaaatgaaaatattacacttattccccacccaaccgcagtgaactttctaggtaattgttttgaaaacaatttttgtatctgtgaaagtctttgctttttctttccaccttctagaaaagtctgctaccagtttccttactgaatacagccatactcagcccctctcgcatccagcccgtcagggtcagggtcagggtcaggctccctcaagacgagcaccgcattgtctgccctcttttgcgtaggatttttctctcagacccaggggacattgccttggacttttctctacaaatgccctcagatgtaagaccagaaatgattctgcttgtggaactcgtggctttctgtcctattttccttttatgtgagccctgcaggttgcctttggcgcccacaccagttctgtcttcatgtcgctgcatcgtgaagccccatttgcctttagtccctgctttgtgtgtcttcacttccacagccagtgttgcccctcagggcatactttgctggtgaacgggctgtagagtcttgagtatgttattggcctaagtgggcatgaggccccagcatccgactccatctgccaggctgcagggcacagcagcactggcatagacaggcacgctctgtcttccaacgtgcaccagccttttcttacatattttgcctgtttttaaaaaatacgaggagagggtgcagatggatactgtgccctcaccctcctaagccaggtaatatattgatgtgcagacttttaagaaatcttagtcttatcacaaatatcaagtaatttattttttccattttcaaatgcaaaagttagcctaggaagcctcccagtcatcctgaaggaccttttgactttgcttttataattctgttaaaaattgaggaggggattaatgagtacaatgaaaacaaaacaaaacaaaaaattaagaagaggaaagctcaaaagaggataagagactgaaaaggcacctcagaatggctgctgtgggcagagtctgtgacatgactttccccgccctgcccctctgttcagagcagctggaaagatgggatcagtaagattaaaaaacttttgttcggccaggcgtggtggctcacacctgtaatcccagcactttgggaggctgaggcggacggatcatgaggtcaggagttcaagaccagcctggccaatatggtgaaaccccgtctctactaaaaatacaaaaattagccgggtgttgtggctcaccctctattcccagctactcgggaggcagagacaggagaatcgcctgaacccaggaggcagaggttgcagtgagctgagatcgtgccactgcactccagcctgggtgacagagcgagactccatctcagaaaacaaacaaacaaaaagaaacttttgttcaagctgcatcttcacattgaatgaaagcattcagacgggtgactgctgctgtccacaactgtgggcggaagtgtgccttttcccagtttctcgtccaggaggttgcatagcaaatactcaagtcactgggatatatgctttccaaatgctggcccccatagcacctttccccatgtctttctaccaagcctcttatgtttaatctgtgcagggaagacaagagtagaccatattctctgtgtgctgtgcatgtcctggtgtcactcattgcctcttatctgtcgccattctaatataagtcagcttaatagttgactctgaataatgcaaaacccagcttgcttccagaatggcctaggaccctcctcctcctgccagtttttttttttttttttggttcatgtggcataatcatctttcaaaattaaccaaatgccccagaaaatgatgttaccactaaaatattttctccaagaaggcatactgtaacagaaaagataggtaagatatttttttcccaagaagtaagaattgattgtgctgaatgttcaaactctggaaactgttcacagtatgttgttcttagctgttatttatataaagtgaattattttctctctcaatcatgccatagtggagacttttgtttgtgagtaagtgacagagtaatatgaaataatgtgatatgtcagagtgacatgcagcatcctgagcctgtttttatgttctgtgtacagtggcatttgattgagatcaaagcctgtcacagcctgctgctgggggtgtggggatatgccagagtcctgtgtttggttttagaagtttactgaatgtttcccacatggagaataatggatggcatgttagtttctttaagagtggtaaagttgtacatctgtcattgttgcatttcgaattgaacacatagatgcttgcctgtctgcttgggtgaatgcctcttgggagagcgaagattacgtgcatgatgtatgttaagaaacagtttccggtcaggcacagtggcttacacctgtaatcccagcactttgggaagccgaggcgggcggattatgaggtcaagagatagagaccatcctggccaacacggtgaaaccccgtctctactaaaaatacaaaaattagctgggcatggtggcacacacctgtagtcccagctactcgggaggctgaggcaggagaatcacttgaacccgggaggtggaggttgcagtgagccgagatcatgccactgcactccagcctggcaatagagcgagactccgtctcaaaaaaaaaaaaaaaaaaaaaaaaaaaattaaaacagtttccataaatggagcttaatttgctctgctgtccttaagccctcgtgggtttttttttaagagagtctcattctgtcacccaggctggagtgcagtggtgcgatcttggctcacttcaacctctgcctcccaagttcaaacaattctcctgcctcagcctcctgagtagctgggattacaggcgcctgccaccatgcctggttaatttttgtatttttagtagagatggggttttaccatgttggttggccaggctgatctcaaactcctgacctcaggtggtgatctgcccacctcggcctcccaaagtgctgggattacaggcgtgagccactatgtccggtcaagccctcgtgttctgaaccttgtcaaggctctgcctgaatgagttttcatctgattgtggggaccaagtccctgagtagagggccaagagctagggacagggggaagagactggcccaggtggtagggaggaaagaactcccagagtttcctttagccaggaaacctgctctactgaccccgtgacttggacagtcagacatcaccctgagagtgacaagtgtaaaatgactcccttcctcccccgccctccggaagtatatttagatacttgaaagcagtccttttctaaaatggccttacctatgtggcctgaacgattaaaagaaagaactcagagttacaagggaaaaagaaaaagagttacaagggaattgtagtctttttctgaatagaatattagtactgtggtattgcatttcatgggaatggaaatgtattggtaaagctacctgatggaagctttctcttggtaacaaaaatggagggtgtattatgtgcagttatttaaatatatgtattccattgttgcgtggtttttttcccccctcaagacagagatttgctcttgttgcccagggtggagtacaatggtgtgaccttggctcactgcaacctctgcctcctgggttcaggtgattctcctgcctcagccttccgagtagctgggattacaggtgtgcgccaccacacccggctaatttttgctttttttttttttgagacagaatctcgctctgttgctcaggctggagtggagtgcagtggcacaatctcagctcactgcagcctctgcctcccgggttcaagagattctcctgactcaacctcctgagtagctgggattacaggtgcctgccactatgcctagctaatttttgtatttttagtagagacggggttttgccatgttggccagggtggtctcgaactcctgacctcaagtgatccacccgcatcggccccccaaagtgctgggattataggcgtgaaccaccgcgcctgtcccattgttgtgtaattttaataattagttttttaagtacttgattttatgggcacatttttgtgggatgattggagttaatcaaataaagcttgtcatgtgtgtagtttggtaagataacttctttaaattcatgttttctctgccttgaggtagtgagggaaagatcttaatcagtattttggtaattaactgattgaattcaagcaaatgagacatcatgaacttcagtggttattgatatttcagggtatatacctgaaatgcctagaggatacagatttctcatttcattctttggtctttcatttctctatatacagaaatgaaatgacacttctgggaggcagtagaagcaggaagtcaatgaattgagtagagggtcccattccctcaggctgtcattgatcagtgacaatttataaaaacaaactgcaaagtctgtggcaagtggctgcctgcttcctagaaggagcccatgaaggttaaactctgtggtcggtatttgcaagcgccgggcgtggtggctcacgcctgtaatcctagcaccttgggaggccaaggcaggcggatcacccgaggtcaggagtttgaggatttgcaagcaaaaggtcctctcctgagtctttcccagatacccagcagtgcagaggctagctgtggaaggttgcagtgggacaggaatgtattgtatgccttgccttacttgtcaccattgagatttccagagaaatgggcataacgtctcttaacaacaacagcagaaagcaaaatacattaacttaaggttgacaacaaaagattatcaagtaccatgttttccaaccaaccagttattcgtggtaataataaaataaaggtgggaaaatgttataatttttaaggaaactgtgtactttaaaaatcttctttatgaatatccaatgttactgtaatcctgctccattaaatgcagcattgttgtcaggtgctgcctcttgcttgggaacagcattgggcttttaaatgtctgcagaatctctgcgttcgaagggaattgagaatgaacttcctggtactgtaatgaaaataaggtctgctcaacacagtaaacgtttcctctcttcttt

SEQ ID NO: 202680 - protein, 1516 aa, Artificial Sequence
  derived and/or modified sequence
MAPAKATNVVRLLLGSTALWLSQLGSGTVAASKSVTAHLAAKWPETPLLLEASEFMAEESNEKFWQFLETVQELAIYKQTESDYSYYNLILKKAGQFLDNLHINLLKFAFSIRAYSPAIQMFQQIAADEPPPDGCNAFVVIHKKHTCKINEIKKLLKKAASRTRPYLFKGDHKFPTNKENLPVVILYAEMGTRTFSAFHKVLSEKAQNEEILYVLRHYIQKPSSRKMYLSGYGVELAIKSTEYKALDDTQVKTVTNTTVEDETETNEVQGFLFGKLKEIYSDLRDNLTAFQKYLIESNKQMMPLKVWELQDLSFQAASQIMSAPVYDSIKLMKDISQNFPIKARSLTRIAVNQHMREEIKENQKDLQVRFKIQPGDARLFINGLRVDMDVYDAFSILDMLKLEGKMMNGLRNLGINGEDMSKFLKLNSHIWEYTYVLDIRHSSIMWINDLENDDLYITWPTSCQKLLKPVFPGSVPSIRRNFHNLVLFIDPAQEYTLDFIKLADVFYSHEVPLRIGFVFILNTDDEVDGANDAGVALWRAFNYIAEEFDISEAFISIVHMYQKVKKDQNILTVDNVKSVLQNTFPHANIWDILGIHSKYDEERKAGASFYKMTGLGPLPQALYNGEPFKHEEMNIKELKMAVLQRMMDASVYLQREVFLGTLNDRTNAIDFLMDRNNVVPRINTLILRTNQQYLNLISTSVTADVEDFSTFFFLDSQDKSAVIAKNMYYLTQDDESIISAVTLWIIADFDKPSGRKLLFNALKHMKTSVHSRLGIIYNPTSKINEENTAISRGILAAFLTQKNMFLRSFLGQLAKEEIATAIYSGDKIKTFLIEGMDKNAFEKKYNTVGVNIFRTHQLFCQDVLKLRPGEMGIVSNGRFLGPLDEDFYAEDFYLLEKITFSNLGEKIKGIVENMGINANNMSDFIMKVDALMSSVPKRASRYDVTFLRENHSVIKTNPQENDMFFNVIAIVDPLTREAQKMAQLLVVLGKIINMKIKLFMNCRGRLSEAPLESFYRFVLEPELMSGANDVSSLGPVAKFLDIPESPLLILNMITPEGWLVETVHSNCDLDNIHLKDTEKTVTAEYELEYLLLEGQCFDKVTEQPPRGLQFTLGTKNKPAVVDTIVMAHHGYFQLKANPGAWILRLHQGKSEDIYQIVGHEGTDSQADLEDIIVVLNSFKSKILKVKVKKETDKIKEDILTDEDEKTKGLWDSIKSFTVSLHKENKKEKDVLNIFSVASGHLYERFLRIMMLSVLRNTKTPVKFWLLKNYLSPTFKEVIPHMAKEYGFRYELVQYRWPRWLRQQTERQRIIWGYKILFLDVLFPLAVDKIIFVDADQIVRHDLKELRDFDLDGAPYGYTPFCDSRREMDGYRFWKTGYWASHLLRRKYHISALYVVDLKKFRRIGAGDRLRSQYQALSQDPNSLSNLDQDLPNNMIYQVAIKSLPQDWLWCETWCDDESKQRAKTIDLCNNPKTKESKLKAAARIVPEWVEYDAEIRQLLDHLENKKQDTILTHDEL

SEQ ID NO: 202681 - DNA, 4551 bp, Artificial Sequence
  derived and/or modified sequence
atggcccccgccaaggccaccaacgtggtgagactgctgctgggcagcaccgccctgtggctgagccagctgggcagcggcaccgtggccgccagcaagagcgtgaccgcccacctggccgccaagtggcccgagacccccctgctgctggaggccagcgagttcatggccgaggagagcaacgagaagttctggcagttcctggagaccgtgcaggagctggccatctacaagcagaccgagagcgactacagctactacaacctgatcctgaagaaggccggccagttcctggacaacctgcacatcaacctgctgaagttcgccttcagcatcagagcctacagccccgccatccagatgttccagcagatcgccgccgacgagcccccccccgacggctgcaacgccttcgtggtgatccacaagaagcacacctgcaagatcaacgagatcaagaagctgctgaagaaggccgccagcagaaccagaccctacctgttcaagggcgaccacaagttccccaccaacaaggagaacctgcccgtggtgatcctgtacgccgagatgggcaccagaaccttcagcgccttccacaaggtgctgagcgagaaggcccagaacgaggagatcctgtacgtgctgagacactacatccagaagcccagcagcagaaagatgtacctgagcggctacggcgtggagctggccatcaagagcaccgagtacaaggccctggacgacacccaggtgaagaccgtgaccaacaccaccgtggaggacgagaccgagaccaacgaggtgcagggcttcctgttcggcaagctgaaggagatctacagcgacctgagagacaacctgaccgccttccagaagtacctgatcgagagcaacaagcagatgatgcccctgaaggtgtgggagctgcaggacctgagcttccaggccgccagccagatcatgagcgcccccgtgtacgacagcatcaagctgatgaaggacatcagccagaacttccccatcaaggccagaagcctgaccagaatcgccgtgaaccagcacatgagagaggagatcaaggagaaccagaaggacctgcaggtgagattcaagatccagcccggcgacgccagactgttcatcaacggcctgagagtggacatggacgtgtacgacgccttcagcatcctggacatgctgaagctggagggcaagatgatgaacggcctgagaaacctgggcatcaacggcgaggacatgagcaagttcctgaagctgaacagccacatctgggagtacacctacgtgctggacatcagacacagcagcatcatgtggatcaacgacctggagaacgacgacctgtacatcacctggcccaccagctgccagaagctgctgaagcccgtgttccccggcagcgtgcccagcatcagaagaaacttccacaacctggtgctgttcatcgaccccgcccaggagtacaccctggacttcatcaagctggccgacgtgttctacagccacgaggtgcccctgagaatcggcttcgtgttcatcctgaacaccgacgacgaggtggacggcgccaacgacgccggcgtggccctgtggagagccttcaactacatcgccgaggagttcgacatcagcgaggccttcatcagcatcgtgcacatgtaccagaaggtgaagaaggaccagaacatcctgaccgtggacaacgtgaagagcgtgctgcagaacaccttcccccacgccaacatctgggacatcctgggcatccacagcaagtacgacgaggagagaaaggccggcgccagcttctacaagatgaccggcctgggccccctgccccaggccctgtacaacggcgagcccttcaagcacgaggagatgaacatcaaggagctgaagatggccgtgctgcagagaatgatggacgccagcgtgtacctgcagagagaggtgttcctgggcaccctgaacgacagaaccaacgccatcgacttcctgatggacagaaacaacgtggtgcccagaatcaacaccctgatcctgagaaccaaccagcagtacctgaacctgatcagcaccagcgtgaccgccgacgtggaggacttcagcaccttcttcttcctggacagccaggacaagagcgccgtgatcgccaagaacatgtactacctgacccaggacgacgagagcatcatcagcgccgtgaccctgtggatcatcgccgacttcgacaagcccagcggcagaaagctgctgttcaacgccctgaagcacatgaagaccagcgtgcacagcagactgggcatcatctacaaccccaccagcaagatcaacgaggagaacaccgccatcagcagaggcatcctggccgccttcctgacccagaagaacatgttcctgagaagcttcctgggccagctggccaaggaggagatcgccaccgccatctacagcggcgacaagatcaagaccttcctgatcgagggcatggacaagaacgccttcgagaagaagtacaacaccgtgggcgtgaacatcttcagaacccaccagctgttctgccaggacgtgctgaagctgagacccggcgagatgggcatcgtgagcaacggcagattcctgggccccctggacgaggacttctacgccgaggacttctacctgctggagaagatcaccttcagcaacctgggcgagaagatcaagggcatcgtggagaacatgggcatcaacgccaacaacatgagcgacttcatcatgaaggtggacgccctgatgagcagcgtgcccaagagagccagcagatacgacgtgaccttcctgagagagaaccacagcgtgatcaagaccaacccccaggagaacgacatgttcttcaacgtgatcgccatcgtggaccccctgaccagagaggcccagaagatggcccagctgctggtggtgctgggcaagatcatcaacatgaagatcaagctgttcatgaactgcagaggcagactgagcgaggcccccctggagagcttctacagattcgtgctggagcccgagctgatgagcggcgccaacgacgtgagcagcctgggccccgtggccaagttcctggacatccccgagagccccctgctgatcctgaacatgatcacccccgagggctggctggtggagaccgtgcacagcaactgcgacctggacaacatccacctgaaggacaccgagaagaccgtgaccgccgagtacgagctggagtacctgctgctggagggccagtgcttcgacaaggtgaccgagcagccccccagaggcctgcagttcaccctgggcaccaagaacaagcccgccgtggtggacaccatcgtgatggcccaccacggctacttccagctgaaggccaaccccggcgcctggatcctgagactgcaccagggcaagagcgaggacatctaccagatcgtgggccacgagggcaccgacagccaggccgacctggaggacatcatcgtggtgctgaacagcttcaagagcaagatcctgaaggtgaaggtgaagaaggagaccgacaagatcaaggaggacatcctgaccgacgaggacgagaagaccaagggcctgtgggacagcatcaagagcttcaccgtgagcctgcacaaggagaacaagaaggagaaggacgtgctgaacatcttcagcgtggccagcggccacctgtacgagagattcctgagaatcatgatgctgagcgtgctgagaaacaccaagacccccgtgaagttctggctgctgaagaactacctgagccccaccttcaaggaggtgatcccccacatggccaaggagtacggcttcagatacgagctggtgcagtacagatggcccagatggctgagacagcagaccgagagacagagaatcatctggggctacaagatcctgttcctggacgtgctgttccccctggccgtggacaagatcatcttcgtggacgccgaccagatcgtgagacacgacctgaaggagctgagagacttcgacctggacggcgccccctacggctacacccccttctgcgacagcagaagagagatggacggctacagattctggaagaccggctactgggccagccacctgctgagaagaaagtaccacatcagcgccctgtacgtggtggacctgaagaagttcagaagaatcggcgccggcgacagactgagaagccagtaccaggccctgagccaggaccccaacagcctgagcaacctggaccaggacctgcccaacaacatgatctaccaggtggccatcaagagcctgccccaggactggctgtggtgcgagacctggtgcgacgacgagagcaagcagagagccaagaccatcgacctgtgcaacaaccccaagaccaaggagagcaagctgaaggccgccgccagaatcgtgcccgagtgggtggagtacgacgccgagatcagacagctgctggaccacctggagaacaagaagcaggacaccatcctgacccacgacgagctgtag

SEQ ID NO: 202682 - DNA, 4551 bp, Artificial Sequence
  derived and/or modified sequence
atggcccccgctaaggcaactaatgtagtgcgtctactgttgggcagcacagcgctctggctgtcacaacttggatctgggacagtggctgcctccaaatcagtaacagctcatctggctgctaagtggccggaaacgccacttctgctcgaggcaagtgagttcatggccgaagagtccaacgaaaagttctggcagtttctggagacggtccaggagctggcgatctataagcagacggaaagtgattacagctactataacctgatcctgaaaaaagccgggcagtttttagacaaccttcacatcaacttgctcaagtttgccttttccatccgcgcgtacagcccagccattcagatgtttcagcagatcgctgctgatgagccaccaccagatggctgtaacgcattcgtcgtgatacacaagaaacatacatgcaaaattaacgagattaaaaaattgctcaaaaaagcagcaagccgtacccgtccctacttgttcaaaggggaccacaaatttcccacaaataaggaaaacctccccgtggttatcctgtacgccgagatggggacccgaacatttagcgcattccacaaagtacttagcgagaaagcccagaacgaggagattctttatgtgctgagacactacattcagaaaccttccagccgaaaaatgtacctctctggttatggggtcgagcttgccatcaagtcaacggaatataaagcattggacgacacacaagtcaaaaccgtgactaatacgacagtcgaagacgagactgagactaatgaagtgcagggattcctcttcgggaaactcaaggagatctattctgacctgcgcgataaccttactgcctttcagaagtaccttatcgagagtaacaagcaaatgatgccgctcaaagtgtgggagcttcaagacttgagctttcaggccgcctcccagatcatgagtgcaccggtctacgactccataaagcttatgaaggacatctctcagaatttcccaatcaaagccaggtctctcacacgtattgcggtgaaccaacatatgcgcgaagaaatcaaagagaaccagaaggacttgcaggtccgatttaaaatacagccaggcgacgctcggctgtttattaacgggctgcgtgttgacatggacgtttatgatgctttctccatcctcgatatgctgaaactggagggcaaaatgatgaatggcctgcggaatttgggcattaatggcgaagatatgagtaaattcttgaagctgaatagtcacatctgggaatatacgtacgtcctggacatccgtcactcaagcatcatgtggatcaacgacctcgaaaatgacgatctgtatatcacctggcccacctcttgccagaaactgttgaaaccagtcttcccaggtagtgttccctctattagacgaaacttccataacctcgtactgtttattgatccagctcaggaatacactttggactttatcaaacttgccgatgtcttctacagccatgaggtccctcttcgcatcggtttcgtttttattctcaacacggatgacgaagtggatggcgcaaatgacgctggggtggccctctggagggcattcaactatattgccgaggagttcgatatctctgaagctttcatctcaatcgtgcacatgtatcagaaggtgaagaaagaccaaaatatcctgacagtggataatgtcaagtctgtgctccaaaacacctttccccatgccaacatctgggatatcttggggattcattcaaaatacgatgaggaacgcaaggccggggcatccttttacaaaatgaccgggctgggtccgttgcctcaggcgctgtataatggtgaaccatttaagcatgaggagatgaatattaaagaactgaagatggcggtactacagagaatgatggatgccagcgtgtacctgcaaagggaagtgtttctgggaacacttaacgaccggaccaatgccatcgatttcctcatggatagaaacaacgtcgtcccgaggatcaacaccctcattctgcgtacaaatcagcagtacctgaacctcatctctacctctgtaacagctgacgttgaagatttttctacatttttttttctggattctcaggacaaaagcgccgtgattgctaagaatatgtattacctgactcaggacgatgagagcatcatttcggcagttaccctctggattatcgctgacttcgataagccatccgggcggaagctgttattcaatgctttgaaacatatgaagacaagtgttcacagcaggttaggtatcatatataaccccacctcaaaaattaatgaagaaaacactgctatttccaggggtatactggccgcctttctgacacagaagaacatgtttctcagatcattcctcggccagttggccaaggaggagatagctaccgcgatttactcaggcgacaaaatcaaaacattcttgattgaagggatggataaaaatgccttcgagaagaagtataatacggttggagtgaatatctttcgtacacatcagttattctgtcaggacgtcctgaagctaaggccaggtgagatggggatagtttcaaacgggaggttcctgggtcccctcgatgaggatttttacgcagaggacttctatctacttgagaaaatcaccttctcaaacttaggggaaaagattaaaggcattgtggagaacatgggaataaacgcaaacaacatgtccgattttataatgaaggtggacgccttgatgagttccgttcctaagagggcaagcaggtacgatgttacatttctaagagagaatcattccgtcatcaagaccaaccctcaggagaacgatatgtttttcaatgttattgcgattgtggaccctcttacaagagaggcccagaagatggcccagctgctggtggtgctaggtaaaatcatcaacatgaagatcaagctcttcatgaactgccgcggaaggctgtcagaagcaccactggagagcttttatagatttgtcttagaaccagagctgatgagcggggcgaacgatgtttccagtcttggtcccgtcgccaagttcctagacattccagagtcccctctgttgattctgaatatgatcacacctgagggctggctcgtggagactgtccactcaaactgtgaccttgataacatacatctgaaggatacagagaagaccgtcactgcagagtacgagctcgagtacttgttattggaggggcagtgcttcgataaggtgactgaacagccaccccgcgggctgcagttcaccctgggcactaagaacaaaccagccgtcgtggacacgatcgtgatggcccaccacgggtacttccagctgaaagccaatccaggagcctggatcctgagactacaccagggaaaaagtgaggatatttatcagatcgttggtcacgagggcacagattcccaggcagatcttgaggacattattgtggtgctgaactcgttcaagagcaaaatcctgaaggtgaaggtaaagaaggagaccgacaagataaaagaggacatactaacagacgaagatgagaagacaaagggactgtgggacagtattaagtcattcacagtctccctacataaggagaataagaaagaaaaagatgtgcttaatattttctctgttgcatctggtcatctgtacgaacgcttcctcagaattatgatgctgagtgttctgagaaacaccaaaacccccgtgaagttctggcttctcaaaaattacctctcccccacattcaaggaggttattccgcatatggcaaaagaatacgggtttcgctacgaattagttcagtacaggtggcccagatggctgagacagcagacggagcggcagcgtattatctgggggtacaaaatcctgtttctggatgtgctttttcctctcgctgttgacaaaatcattttcgtggacgctgaccagatcgtgaggcacgacctgaaggagctgagagatttcgatttggatggggccccctacgggtacactcctttttgcgatagccgtcgcgagatggatggataccgcttctggaagactggctactgggcgtcccatctgctgagaaggaagtatcatataagcgccctgtacgtggtggatttgaagaaatttcgccgaatcggcgcaggcgaccggctcagaagtcagtaccaagccctgtcacaggaccccaacagccttagcaacctggaccaggatttacccaacaatatgatttaccaagtggcaatcaagtcactcccacaggactggttgtggtgtgagacgtggtgcgacgatgaatctaagcagcgggcaaagaccatcgatctctgcaacaatccaaaaacgaaggagtcaaagctgaaggctgctgctagaatcgtccctgaatgggtagagtacgatgcagagatccggcagttactggatcacctcgagaataaaaaacaggataccattctcacacacgatgagctatag

SEQ ID NO: 202683 - DNA, 4551 bp, Artificial Sequence
  derived and/or modified sequence
atggccccagccaaggccaccaacgtggtgcggctgctgctgggcagcacagccctgtggctgagccagctgggcagcggcaccgtggccgccagcaagtctgtgacagcccacctggccgccaagtggccagagacccccctgctgctggaggccagcgagttcatggccgaggagagcaatgagaagttctggcagttcctggagaccgtgcaggagctggccatctacaagcagacagaaagtgactacagctactacaacctgatcctgaagaaggccggccagttcctggacaacctgcacatcaacctgctgaagtttgccttcagcatccgggcctacagccctgccatccagatgttccagcagattgctgctgatgagcccccaccagatggctgcaatgcctttgtggtgatccacaagaagcacacctgcaagatcaatgagatcaagaagctgctgaagaaggccgccagcaggacccggccctacctgttcaagggggaccacaagttccccaccaacaaggagaacctgcctgtggtgatcctgtatgcagagatgggcaccaggaccttcagcgccttccacaaggtgctgtctgagaaggcccagaatgaggagatcctgtatgtgctgcggcactacatccagaagcccagcagcaggaagatgtacctgagcggctacggcgtggagctggccatcaagagcacagagtacaaggccctggatgacacccaggtgaagacagtgaccaacaccaccgtggaggatgaaacagagaccaatgaggtgcagggcttcctgtttgggaagctgaaggagatctacagcgacctgcgggacaacctgacagccttccagaagtacctgattgagagcaacaagcagatgatgcccctgaaggtgtgggagctgcaggacctgtccttccaggccgccagccagatcatgtctgcccctgtgtatgacagcatcaagctgatgaaggacatcagccagaacttccccatcaaggcccggagcctgaccagaattgctgtgaaccagcacatgagggaggagatcaaggagaaccagaaggacctgcaggtgcgcttcaagatccagcctggagatgcccggctcttcatcaatggcctgcgggtggacatggatgtgtatgatgccttcagcatcctggacatgctgaagctggagggcaagatgatgaatggcctgaggaacctgggcatcaacggggaggacatgagcaagttcctgaagctgaacagccacatctgggagtacacctacgtgctggacatccgccacagcagcatcatgtggatcaatgacctggagaatgatgacctgtacatcacctggcccaccagctgccagaagctgctgaagcctgtgtttcctggctctgtgcccagcatcagaagaaacttccacaacctggtgctcttcattgatcctgcccaggagtacaccctggacttcatcaagctggctgatgtgttctacagccatgaggtgcccctgagaattggatttgtgttcatcctgaacacagatgatgaggtggatggagccaatgatgctggggtggccctgtggagggccttcaactacatcgccgaggagtttgacatcagcgaggccttcatcagcatcgtgcacatgtaccagaaggtgaagaaggaccagaacatcctgactgtggacaacgtgaagtctgtgctgcagaacaccttcccccacgccaacatctgggacatcctgggcatccacagcaaatatgatgaggagaggaaggccggggccagcttctacaagatgacaggcctgggccccctgccccaggccctgtacaacggggagcccttcaagcatgaggagatgaacatcaaggagctgaagatggctgtgctgcagaggatgatggatgcctctgtgtacctgcagcgggaggtgttcctgggcaccctgaatgacaggaccaatgccatcgacttcctgatggacagaaataatgtggtgccccgcatcaacaccctcatcctgcggaccaaccagcagtacctgaacctgatcagcacctctgtgacagcagatgtggaggacttcagcaccttcttcttcctggacagccaggacaagtctgctgtgattgccaagaacatgtactacctgacccaggatgatgagagcatcatctctgctgtgaccctgtggatcatcgctgactttgacaagcccagcggcaggaagctgctcttcaatgccctgaagcacatgaagacctctgtgcacagccggctgggcatcatctacaaccccaccagcaagatcaatgaggagaacacagccatcagccggggcatcctggccgccttcctgacccagaagaacatgttcctgcggagcttcctgggccagctggccaaggaggagatcgccacagccatctacagcggggacaagatcaagaccttcctgattgagggcatggacaagaatgcctttgagaagaagtacaacacagtgggcgtgaacatcttccgcacccaccagctgttctgccaggatgtgctgaagctgcggcctggagagatgggcatcgtgtccaatggccgcttcctgggccccctggatgaggacttctatgcagaggacttctacctgctggagaagatcaccttcagcaacctgggggagaagatcaagggcatcgtggagaacatgggcatcaatgccaacaacatgtctgacttcatcatgaaggtggatgccctgatgagctctgtgcccaagagggccagccgctatgatgtgaccttcctgcgggagaaccacagcgtcatcaagaccaacccccaggagaatgacatgttcttcaacgtcatcgccatcgtggaccccctgacccgggaggcccagaagatggcccagctgctggtggtgctgggcaagatcatcaacatgaagatcaagctgttcatgaactgccggggccgcctgtctgaggcccccctggagagcttctacagatttgtgctggagcctgagctgatgtctggggccaatgatgtgagcagcctgggccctgtggccaagttcctggacatccctgagagccccctgctgatcctgaacatgatcaccccagagggctggctggtggagaccgtgcacagcaactgtgacctggacaacatccacctgaaggacacagagaagacagtgacagcagaatatgagctggagtacctgctgctggagggccagtgctttgacaaggtgacagagcagcccccccggggcctgcagttcaccctgggcaccaagaacaagccagctgtggtggacaccatcgtgatggcccaccacggctacttccagctgaaggccaaccctggggcctggatcctgcggctgcaccagggcaagtctgaggacatctaccagatcgtgggccacgagggcacagacagccaggccgacctggaggacatcatcgtggtgctgaacagcttcaagagcaagatcctgaaggtgaaggtgaagaaggagacagacaagatcaaggaggacatcctgacagatgaagatgagaagaccaagggcctgtgggacagcatcaagagcttcaccgtgtccctgcacaaggagaacaagaaggagaaggatgtgctgaacatcttctctgtggccagcggccacctgtatgagcgcttcctgcgcatcatgatgctgtctgtgctgaggaacaccaagacccctgtgaagttctggctgctgaagaactacctgagccccaccttcaaggaggtgatcccccacatggccaaggagtatggcttccgctatgagctggtgcagtaccgctggccccgctggctgcggcagcagacagagcggcagaggatcatctggggctacaagatcctcttcctggatgtgctcttccccctggccgtggacaagatcatctttgtggatgctgaccagatcgtgagacatgacctgaaggagctgcgggactttgacctggatggagccccctacggctacacccccttctgtgacagccggcgggagatggatggctaccgcttctggaagacaggctactgggccagccacctgctgcggaggaagtaccacatcagcgccctgtatgtggtggacctgaagaagttcagaagaattggagctggggaccggctgcggagccagtaccaggccctgagccaggaccccaacagcctgagcaacctggaccaggacctgcccaacaacatgatctaccaggtggccatcaagagcctgccccaggactggctgtggtgtgagacctggtgtgatgatgagagcaagcagagggccaagaccatcgacctgtgcaacaaccccaagaccaaggagagcaagctgaaggctgctgcccgcatcgtgcctgagtgggtggagtatgatgctgagatccggcagctgctggaccacctggagaacaagaagcaggacaccatcctgacccatgatgagctgtag

SEQ ID NO: 202684 - DNA, 4551 bp, Artificial Sequence
  derived and/or modified sequence
atggcccccgccaaggccaccaacgtggtgcggctgctgctgggctcgacagccctctggttatcacaattgggatcaggaaccgtggcagcttccaaatctgttaccgctcacttggccgccaagtggcctgagacccccctgctgctggaagccagcgagttcatggccgaggaatcaaacgagaaattttggcagttcctcgagactgtccaggaactggcaatttacaagcaaacagaatcagattatagctactacaacttgatcctcaaaaaagctggacagttcctggataacctgcatattaacttgcttaagtttgcattctctatccgagcttactcaccagccatccagatgttccagcaaatagccgctgatgaaccacccccagacggctgcaatgcttttgtcgttatccataagaaacatacttgtaagatcaacgagattaagaaattgctcaagaaagcagcaagcagaaccagaccatacttattcaagggtgaccacaaattccccactaacaaagagaatctgcccgtggttattttgtacgctgaaatgggaacgcgtaccttctctgcttttcacaaggtactgtccgaaaaagctcaaaacgaggaaattctgtatgttctgcggcactacatacagaaaccaagtagccggaagatgtacctgagtgggtatggcgtcgagctggctattaagtcgactgagtacaaggccctggacgacacgcaggttaagacggtgacaaacaccacagtggaagatgagacagaaacaaacgaggtccaggggttcctgtttgggaagctgaaagagatttactccgacctccgggacaatcttaccgcattccagaagtatctcattgagtctaacaaacagatgatgccattaaaggtctgggaactccaggatcttagcttccaggctgcctcacagattatgtcggcccccgtttacgattccataaaactcatgaaggacatttcccagaattttccaatcaaggctaggtctctcactcggatcgccgtgaaccaacacatgagagaggaaataaaagaaaatcaaaaagacctgcaggtgagattcaagatccagcccggagatgcaaggctctttattaacggcctgcgcgtggatatggatgtgtatgacgcattttctattctggacatgctgaaactggaaggcaaaatgatgaatgggctgcgcaatcttggaattaacggcgaagatatgtccaaattccttaaactgaatagccatatatgggagtacacatatgtccttgacatccggcattcctcaattatgtggatcaacgacttagagaacgacgatctctacattacctggcctacttcctgtcaaaaactgctgaagccggtgttcccgggatccgtgccctcaattaggcgaaactttcacaacctggtactgtttatcgatcccgcccaagaatacaccctggactttattaagctggcggatgtcttctactctcatgaggtgcctctgcggattggattcgtcttcatccttaatacagacgatgaggtcgacggtgccaatgatgctggagtcgccctttggcgggcattcaactacatcgcggaagaatttgatatttccgaagccttcatctcgattgtgcacatgtatcagaaggtcaaaaaagaccagaatatcctgactgtggacaatgtgaagtccgtgttacagaacacgttcccacatgcaaatatttgggacatcctaggtatacattcaaagtacgatgaagagcgcaaggcaggggctagtttttacaaaatgaccggcctggggccccttccgcaggcactatacaacggcgaaccttttaagcatgaggagatgaatattaaggagttgaaaatggctgtgttgcagcgaatgatggatgccagcgtctatcttcaacgagaggtgttccttggaaccctgaatgaccgaaccaatgctatagacttcctgatggaccggaacaatgtggtgccccgtattaataccctgatcctgcgaacaaatcaacagtacctgaacctgatctctacttctgtcactgcagatgtagaagactttagtactttctttttcctggatagtcaagacaaatctgcagtgatagcaaaaaatatgtactaccttacccaggacgacgagagcattattagcgcagttaccctttggatcatagctgactttgacaaaccctctgggcgtaagttactttttaatgccctgaagcatatgaaaacatcagtgcacagtagactggggattatatacaacccaacctctaagatcaatgaggagaatactgccatttcacgcggcatcctggccgccttcctcactcagaagaatatgtttttgagatctttcttgggccagctagcaaaagaggagatcgccaccgcgatatattccggggataaaattaagacctttctgatagagggaatggataaaaacgcgtttgaaaaaaaatacaatactgtcggagttaatatcttcaggacccaccaattgttctgtcaggacgtgctgaagctgagaccgggagaaatgggcatcgtctctaacgggagattcctgggccccctggatgaagatttttacgccgaagacttttacctgctcgaaaagatcacctttagcaacctgggcgaaaagattaagggcattgtagagaatatgggaatcaacgccaacaacatgagcgacttcatcatgaaagttgacgccctgatgtcgtccgtaccgaagcgagccagccgctacgacgtaactttccttcgagaaaaccactcggtgataaagacaaatcctcaggagaatgacatgttttttaacgtgatcgctatcgtggaccccctgactcgtgaagctcagaaaatggcccaactgctcgtggtgctcggtaagatcatcaacatgaagatcaaacttttcatgaattgtagggggcggctgagcgaggcgccattggagagcttctacaggtttgttctggagcccgaactgatgagtggcgccaacgatgttagctcactcggccccgtggctaagtttctggatataccagaaagcccactgctgattctgaatatgattactcccgagggctggttagtcgagaccgttcactcaaactgtgatttagacaacatccacctcaaagatacggaaaaaaccgtaactgcggaatacgagcttgaatacctcctgctcgagggccagtgtttcgacaaagtgactgagcagccccctcgaggcctacagttcactctcggtaccaaaaataaacctgctgtggtggacacgatagtgatggcgcaccacggctacttccagctcaaggcaaatcccggtgcctggatattgaggctgcatcaggggaagtcagaggacatctaccaaattgtagggcatgaaggtacagacagtcaagcagatctcgaggatattatcgtggtgctgaatagtttcaaatcaaaaatactcaaggtgaaggtgaaaaaagagacagataaaatcaaggaggacattttaactgacgaggacgagaaaacaaagggcctatgggacagtatcaaatcgttcaccgtttccctgcacaaagaaaacaaaaaagagaaggacgttttaaacattttttctgtggcgagcggacacctttacgaacggttcctgcgtataatgatgctatctgtgctgaggaacacaaagactcccgtcaagttttggctgctgaagaactacctcagtccaaccttcaaggaggttattccacacatggctaaggaatacggtttcaggtacgagctggtgcagtacaggtggcctcgatggctgcgacaacaaaccgagcggcagcgtatcatctggggttacaaaatactgtttctggacgtcttattcccccttgccgttgacaaaattatcttcgtcgacgccgatcaaatcgtgagacacgacctgaaggaactgagagattttgacctggacggcgccccctacggttatactccgttctgtgactcccgacgggaaatggacggctacagattttggaaaacgggctattgggcttctcacctactgcgtcggaagtaccatatatcggctctctacgtggtcgacctgaagaaattcaggcgtatcggtgctggggatagactgcgatcgcagtatcaggccctgagccaagacccaaactccttatccaatctggatcaggacctgcccaataacatgatctaccaggtcgcgatcaagagcttaccccaagactggctgtggtgcgaaacctggtgtgacgatgagtcgaaacagagggcgaagaccatcgacctgtgtaataacccaaagactaaagagagcaagttgaaggccgctgcccggattgtcccagaatgggtggagtacgatgccgaaattagacagttgttggatcacttagagaataaaaagcaagatactatcctgacacacgatgagctttag

SEQ ID NO: 202685 - DNA, 4551 bp, Artificial Sequence
  derived and/or modified sequence
atggcacctgcgaaggctactaacgtcgtacggcttttactgggatctactgctttgtggctcagccagctggggtccgggaccgttgctgcgagcaaaagcgttaccgcccatttagctgcgaaatggcctgaaaccccgctccttcttgaggcaagcgaatttatggcggaggagagcaatgagaaattttggcagtttctggagacagtccaggaattggccatctataaacagaccgaaagtgattattcatactacaatctgatactcaagaaagctggtcagttcttggacaacctccacattaacttgctgaaatttgccttcagtatccgggcatactctcctgccatccagatgttccaacagatagctgctgatgaaccaccacctgacgggtgcaatgcttttgtggtaattcacaagaagcatacctgtaagatcaatgaaattaaaaaactcctgaaaaaggcagcatcccgaacgcgcccatatctttttaagggggaccacaagttcccaacgaacaaagagaacctgcccgtggtcatcctctacgcagaaatgggaacacgtacattctctgccttccacaaggttctctccgagaaggcccagaacgaggaaatcttatatgttctgaggcactatatacagaagccatcaagtcgcaaaatgtacctgagcggatacggggttgagctggcaattaagtcgacagagtataaggccctggatgacacccaggtgaaaaccgtgaccaacaccacagtggaggatgaaactgaaacaaacgaagttcaggggttcctcttcgggaagctcaaagagatttacagcgatctgcgggataacctgacggcattccaaaaatacttgattgagagtaacaagcagatgatgcccctgaaagtttgggagctgcaagacctgtcgttccaggccgcaagccagatcatgagcgcgcctgtgtatgactcgatcaagctcatgaaagacatatcccagaacttccctattaaggctaggagcttgactcgcatagctgttaatcaacatatgcgggaagaaattaaggaaaatcaaaaagacctgcaggtgcgcttcaagatacaaccaggggacgctaggctttttattaacggacttcgtgtcgatatggacgtatacgacgcgttctcaattctggacatgctgaagctcgaggggaagatgatgaacggtctgagaaacttgggcattaatggggaagatatgagtaagtttctcaaactgaactctcacatttgggaatatacctatgtgctcgacattcgtcactcctccattatgtggataaacgacctggaaaacgatgatctttacatcacctggcccacttcgtgtcaaaaactcctcaaacccgtgttcccagggagtgtgccgagtatacggcgaaatttccataatctggtgttatttattgacccggctcaggagtatacccttgatttcatcaaactggccgatgtgttttattcccatgaagtgccattgcgaattggctttgtgttcatcctgaatacggacgacgaggtggacggggctaatgatgccggagtcgccctctggcgggcatttaattacatagctgaggaattcgacatctcagaagccttcatctctattgtgcatatgtaccaaaaagtgaaaaaggatcagaatatactgactgtcgacaatgttaagtctgtgcttcaaaatacatttccccacgctaacatttgggatattctgggaatccattccaaatatgatgaggaacggaaggctggggctagcttctacaaaatgactgggctcgggcctttgcctcaagctctctacaatggggagccattcaagcatgaggaaatgaatataaaggagctcaaaatggcagtgctccagcgtatgatggacgccagtgtttatttgcagcgcgaagtgtttctgggcaccctgaatgatagaactaacgccattgacttcctgatggacaggaataatgttgtcccgcgaataaacacactgattctgcggacgaaccagcagtatctaaacctcatatcaacaagcgttactgccgacgtcgaggattttagcacattctttttcctcgacagtcaggacaagagtgcggtcatcgctaaaaatatgtactacttgacccaagacgatgagagcatcatctcagccgtcacactgtggatcatcgcagacttcgacaaaccatcggggcgaaaactgctgtttaatgcacttaaacacatgaagacgagcgtgcattcacggctcggaattatatacaatccaactagcaagattaacgaggaaaacacagccatatcacgcggaatcttagccgcattcctgacccagaaaaacatgtttctgcgcagctttttgggccagcttgcaaaggaggagatagctactgcaatttacagcggggacaagatcaagacctttctcatagaaggtatggacaaaaacgcctttgagaagaagtataatacggtgggcgtgaacatcttccgcactcatcagctgttctgccaagacgttctcaagctgcgaccaggcgagatggggattgtgtcaaacggaagatttctgggccctctcgacgaagacttctacgcagaggacttttacctgcttgaaaaaattactttctcaaatctcggcgagaaaataaagggaatcgttgaaaatatgggcatcaacgctaataacatgtcagactttatcatgaaggtggacgctctgatgtcctccgtcccaaagcgggcttctcgttatgatgtgacattcctgagggagaatcacagcgtaattaagacaaacccacaggagaatgatatgttcttcaacgtgattgccattgtggacccattgacccgggaagcccaaaagatggcacagctgctagtggtgcttggcaagataatcaatatgaaaattaaacttttcatgaactgccggggtcgcctgtccgaggctccattagaaagcttttatcggtttgtccttgagccagaattaatgtcaggcgcaaatgatgtgagctctttaggtcctgttgcaaaatttctggatatccctgagtcccccttactgattttaaatatgatcacgccggaaggttggcttgtggagacagtgcactctaactgcgatctggacaatattcatctcaaagacactgagaagacagttactgccgagtatgagctggaatacctgctgctagagggccagtgtttcgacaaagtgacagaacagccacctcgaggcctgcagtttaccctgggaaccaaaaataagccggcagtagtggacactatcgtgatggcccaccacggatattttcaacttaaggctaaccctggtgcctggattctccgcctgcatcaaggcaagtcagaagacatctatcagattgtgggacacgaggggactgactctcaagccgatttggaggatattatcgtggttttgaattcgttcaaaagtaaaatcctgaaagtcaaagtgaagaaggaaactgataagataaaggaggacatactgactgacgaggacgagaagactaagggcttgtgggatagcatcaaatcatttacagtctctctgcacaaagagaacaagaaggagaaagacgtgctcaatatcttttctgttgctagcggacacttgtacgagagatttctgagaatcatgatgctgtctgtacttaggaataccaaaacacctgtcaagttttggctgctgaaaaactatctctcccccacgttcaaagaggtgatccctcacatggctaaggaatacgggtttcggtatgaactggtacagtacaggtggcccaggtggctcaggcagcaaactgagaggcagaggatcatttggggctataagatcctgtttctcgacgtgctgttcccactggctgttgataagatcatattcgtggatgccgaccagattgttcggcacgatctcaaggagctcagagactttgacctcgacggggcaccctatgggtataccccgttttgtgacagcagacgagaaatggacggatacaggttctggaaaacgggatattgggcatcccacctcctcagacgcaagtaccatatttcagcactctacgttgtcgatttaaagaaatttagacgtattggggctggggaccgcctgcggtcacagtaccaggccctctcccaggatcccaattccctatctaacttagaccaggaccttcctaataacatgatctaccaagtggcgattaagtctctgccacaggattggctgtggtgtgagacttggtgtgacgatgagtcaaagcagagggccaaaaccatagatctctgcaacaaccccaaaactaaggagtctaaactcaaagcagccgctagaattgttcccgaatgggttgaatatgacgccgaaatccgacaacttcttgatcatctcgagaacaagaaacaggacaccattctaacccatgacgagctctag

SEQ ID NO: 202686 - DNA, 4832 bp, Artificial Sequence
  derived and/or modified sequence
gccggccgaagcgtggcggccacagactgtgggtaccgggtccgagggactcgcgcttttctctccgtgccatggcgccagcgaaagccacgaacgtggtgcggctgctactaggctccacagcgctgtggctttcgcagctcggctccgggacggtcgccgcgtccaagtcggtgactgcccacttggccgcgaagtggcccgagaccccgctgctgctggaggcaagtgaatttatggcagaagaaagtaatgaaaaattttggcagtttttggaaactgtgcaagaattagcaatttataagcaaacagaatcagattattcttattacaacttaatcctgaagaaagctggacagtttctagacaatttacacatcaaccttttaaagtttgctttctctataagggcatactccccagctattcagatgtttcagcagattgcagctgatgagccaccaccagatggttgtaatgcatttgtggttattcataagaagcacacctgtaaaattaatgagattaaaaagctgctgaagaaagctgcttcaaggactagaccttatctatttaaaggagatcacaaatttcctacaaacaaagagaacttaccagtggtgattctctatgccgaaatgggtactagaacatttagtgcatttcacaaagtattgtctgaaaaagctcaaaatgaggaaattctgtatgttcttcgccattatattcagaaaccaagctcacggaaaatgtacttatctgggtatggtgtggagctagcaattaagagtacagaatacaaagcactggatgatacccaagttaaaactgtgactaatactactgtagaggatgagactgaaacaaatgaagttcaaggatttctctttgggaaactaaaagaaatatattcagatcttagagataatctgacagcattccaaaaatacctgattgagagtaacaaacaaatgatgcctttgaaagtctgggaactacaagatcttagttttcaagcagcttctcaaataatgtccgctccagtttatgattccattaaattaatgaaagacatttcacagaacttccccataaaagccagatctctaaccagaattgctgtaaatcaacatatgagagaagaaataaaggaaaatcaaaaggatcttcaagttagatttaaaattcagccaggcgatgctcgtctatttataaatggccttcgtgttgatatggatgtttatgacgcttttagtattttggatatgctgaaattagaaggaaaaatgatgaatggccttcgcaatcttgggatcaatggggaagatatgagcaaatttttaaaattaaattcacacatttgggaatatacttatgtattagatattcgacattcttctataatgtggattaatgacttagaaaatgatgatttgtatattacatggcctacaagttgccagaaacttctgaagccagtatttcctggaagtgtaccttccataaggcgcaattttcataatttggttctgtttattgatccggcccaagaatataccttggattttataaaacttgctgatgttttctattctcacgaagttcctcttagaattggttttgtgttcattcttaatacagatgatgaagttgatggagcaaatgatgctggagttgctctctggcgagctttcaactatattgcagaagaatttgatatatcagaagcatttatttctatagtacacatgtaccaaaaagtgaagaaggatcaaaatatactcactgtggacaatgtgaagagtgttctccaaaatacatttcctcatgctaatatttgggatattttgggaattcattctaaatatgatgaagaaagaaaggctggagcaagcttttataagatgactggcctgggtcctttgcctcaagctctttataatggtgaaccctttaaacatgaagagatgaatattaaagaactaaaaatggctgttcttcaaagaatgatggatgcatctgtatatttacaaagagaagtttttttgggcacattaaatgatcgcacgaatgcaattgattttctaatggataggaataatgttgtaccccgtataaatactttgattttgcgtactaaccagcagtacctcaatttaatatctacatcagtaactgctgatgttgaagatttctctactttctttttcttggattcacaagataagagtgctgtaattgcaaagaacatgtattatttaacccaagacgatgagagtataatttctgcagtcactctctggattattgcagattttgataagccttctgggagaaaacttctttttaatgcattaaagcacatgaaaacaagtgttcatagtcggttggggattatttataatcctacatcaaaaataaatgaagagaacacagctatttctagaggaattttggcagcttttcttacacagaagaacatgtttttgagaagctttcttgggcaactggcaaaggaagaaattgctacagctatttactctggagataaaattaaaacattccttattgaggggatggataagaatgcttttgagaaaaaatataatactgttggagtgaatatttttcgaactcaccagttgttctgtcaagatgtacttaaattacgtcctggagaaatgggtattgtcagcaatgggagattcttaggacctttagatgaagatttttatgcagaagatttttacttgttggaaaagataacatttagtaatttaggagagaaaattaaaggcattgttgaaaatatgggaatcaacgcaaataacatgagtgactttattatgaaagttgatgcccttatgtcctctgtgcctaagcgtgcatctcgatatgatgtcacatttcttagggagaatcacagtgttataaagacgaatcctcaagagaatgatatgttcttcaatgtcattgctattgttgatccattaacaagagaagcacagaaaatggcacagttgttggttgtacttggcaagattatcaacatgaagataaagttgttcatgaactgtaggggcaggctttcagaagcccctttagaaagcttttaccgttttgttctggaaccagaactgatgtcaggggctaatgacgtttcttctcttggaccagtggcaaaatttttggatattcctgaatcacccctcctaatcctcaacatgattactccagaaggctggttggttgaaacagtgcacagcaactgtgaccttgataatattcacttaaaggatactgagaaaactgttacagcagaatatgaactagaatacttactactggaaggacaatgctttgataaagtgacagaacagcctcctcggggtctgcagttcacactaggcacaaaaaataaacctgctgtggttgatacaatagtgatggcacatcatgggtattttcaattaaaagcaaacccaggtgcttggatactgaggttacaccaaggaaaatctgaagatatttatcaaatagttgggcatgaaggaactgactctcaagcagacctagaagatatcattgttgtattaaacagcttcaaaagcaagatactcaaagtaaaagtgaaaaaagaaacagacaaaattaaggaagatatccttaccgatgaagatgaaaaaacaaaaggactgtgggattccattaaaagtttcacagtaagcttgcataaagaaaacaaaaaggaaaaagatgtcctaaacattttttcagttgcttctggtcatttatatgaacgttttttaagaattatgatgctttctgttttgcgtaacaccaaaacaccagtgaaattctggttgctaaaaaattatctctcaccgacatttaaagaagtaattcctcacatggctaaagagtatggattccgatatgaactagttcaatataggtggccccgttggcttcgtcaacagactgaaagacagaggattatttggggttacaaaattcttttccttgatgttcttttcccactagcagtggacaaaatcatttttgttgatgctgaccagattgtgagacatgatctaaaagaacttcgagatttcgatctggatggagctccttatgggtatactccattttgtgatagccgcagggaaatggatggatatcgtttctggaaaacaggatactgggcatcacatcttttaagacggaaataccatatcagtgctttatatgtagtggatctcaagaagttcaggagaattggagcaggtgacaggctcaggagccagtatcaagctctcagtcaagatccaaacagtctttcaaacctagatcaggatctccccaataatatgatttaccaagtcgccattaagtctcttcctcaagactggctgtggtgtgaaacctggtgtgatgatgaatccaaacaaagagccaaaacaattgatctgtgcaataatcccaaaacaaaagaatccaaactaaaagctgctgccagaattgtcccagaatgggtggagtatgatgctgagataagacaactattagatcatcttgaaaacaagaagcaagatacaattttgacacatgatgaactctagcactggtgtatatgagaaggaaggcgaaagcatgacaggaaacctgccgcctgctggggaagtctggagcccctgctgagacgatttggaagtctcgttaagatcagtgacatattctttaattttaaaaaattgtaattatttaaaacagttatttaatgtattgaatgagtttaagttatataataaatgaccattgagtatttaaaa

SEQ ID NO: 202687 - protein, 381 aa, Artificial Sequence
  derived and/or modified sequence
MSRHEGVSCDACLKGNFRGRRYKCLICYDYDLCASCYESGATTTRHTTDHPMQCILTRVDFDLYYGGEAFSVEQPQSFTCPYCGKMGYTETSLQEHVTSEHAETSTEVICPICAALPGGDPNHVTDDFAAHLTLEHRAPRDLDESSGVRHVRRMFHPGRGLGGPRARRSNMHFTSSSTGGLSSSQSSYSPSNREAMDPIAELLSQLSGVRRSAGGQLNSSGPSASQLQQLQMQLQLERQHAQAARQQLETARNATRRTNTSSVTTTITQSTATTNIANTESSQQTLQNSQFLLTRLNDPKMSETERQSMESERADRSLFVQELLLSTLVREESSSSDEDDRGEMADFGAMGCVDIMPLDVALENLNLKESNKGNEPPPPPL

SEQ ID NO: 202688 - DNA, 1146 bp, Artificial Sequence
  derived and/or modified sequence
atgagcagacacgagggcgtgagctgcgacgcctgcctgaagggcaacttcagaggcagaagatacaagtgcctgatctgctacgactacgacctgtgcgccagctgctacgagagcggcgccaccaccaccagacacaccaccgaccaccccatgcagtgcatcctgaccagagtggacttcgacctgtactacggcggcgaggccttcagcgtggagcagccccagagcttcacctgcccctactgcggcaagatgggctacaccgagaccagcctgcaggagcacgtgaccagcgagcacgccgagaccagcaccgaggtgatctgccccatctgcgccgccctgcccggcggcgaccccaaccacgtgaccgacgacttcgccgcccacctgaccctggagcacagagcccccagagacctggacgagagcagcggcgtgagacacgtgagaagaatgttccaccccggcagaggcctgggcggccccagagccagaagaagcaacatgcacttcaccagcagcagcaccggcggcctgagcagcagccagagcagctacagccccagcaacagagaggccatggaccccatcgccgagctgctgagccagctgagcggcgtgagaagaagcgccggcggccagctgaacagcagcggccccagcgccagccagctgcagcagctgcagatgcagctgcagctggagagacagcacgcccaggccgccagacagcagctggagaccgccagaaacgccaccagaagaaccaacaccagcagcgtgaccaccaccatcacccagagcaccgccaccaccaacatcgccaacaccgagagcagccagcagaccctgcagaacagccagttcctgctgaccagactgaacgaccccaagatgagcgagaccgagagacagagcatggagagcgagagagccgacagaagcctgttcgtgcaggagctgctgctgagcaccctggtgagagaggagagcagcagcagcgacgaggacgacagaggcgagatggccgacttcggcgccatgggctgcgtggacatcatgcccctggacgtggccctggagaacctgaacctgaaggagagcaacaagggcaacgagcccccccccccccccctgtag

SEQ ID NO: 202689 - DNA, 1146 bp, Artificial Sequence
  derived and/or modified sequence
atgagccgccatgaaggggtaagctgcgatgcatgtctgaagggaaatttcagggggcgaagatataagtgcctgatctgttacgactatgacctatgtgcgagttgctatgagtcaggtgcaaccacgactagacacaccactgaccatcccatgcaatgcatcctgacgagagtggattttgacctctattacggaggggaagccttctccgtggaacagccccagtcctttacatgtccatattgtggcaaaatgggctacactgagacttctttgcaggagcatgttacctccgagcatgctgagactagtactgaagtgatctgtccaatctgcgccgccctgccagggggtgaccccaatcacgtgacagacgattttgccgctcacctcactctggagcacagggctcccagagacttagatgaaagttctggcgttaggcatgtccgacgcatgttccaccctgggagaggtctcggaggaccgagggcccgacgatcaaacatgcacttcacctcatctagtacaggaggcctgtcatcttctcagagttcttactccccatccaatcgcgaagctatggatcctatcgccgagctcctgtcccaactgtctggcgtccgccgatccgctgggggccagttaaactcctcagggccttcagcaagccagctccagcagctgcagatgcagctgcaactagagcggcaacacgctcaagcagcccgacagcagctggagaccgcccgaaatgccactcgcagaaccaatacctcttccgtgacgacaactattactcagtctacagctacaacaaatattgccaatacggagagctcacagcagaccctccagaattcacaattcctgcttaccaggctgaatgatcctaagatgagtgaaaccgagcggcagtccatggagagcgagcgagcggataggtccttgttcgtccaggagctccttctctctacacttgtgcgcgaggagagcagtagttccgacgaagacgaccgaggggagatggcggatttcggagcgatgggttgcgtcgatatcatgcccctggacgtggctctggagaacttgaacctgaaagagtcgaacaagggcaatgaaccccctccacctccactgtag

SEQ ID NO: 202690 - DNA, 1146 bp, Artificial Sequence
  derived and/or modified sequence
atgagcagacatgagggcgtgtcctgtgatgcctgcctgaagggcaacttccggggccgccgctacaagtgcctgatctgctatgactatgacctgtgtgccagctgctatgaaagtggggccaccaccaccaggcacaccacagaccaccccatgcagtgcatcctgaccagggtggactttgacctgtactatggaggagaggccttctctgtggagcagccccagagcttcacctgcccctactgcggcaagatgggctacacagagaccagcctgcaggagcacgtgaccagcgagcacgccgagaccagcacagaggtgatctgccccatctgtgccgccctgcctggaggagaccccaaccacgtgacagatgactttgctgcccacctgaccctggagcaccgggccccccgggacctggatgagagcagcggcgtgcgccacgtgcggaggatgttccaccctggccggggcctgggcggcccccgggcccggcgcagcaacatgcacttcaccagcagcagcactggaggcctgagcagcagccagagcagctacagccccagcaaccgggaggccatggaccccatcgccgagctgctgagccagctgtctggagtgcggcgctctgctgggggccagctgaacagcagcggccccagcgccagccagctgcagcagctgcagatgcagctgcagctggagcggcagcacgcccaggccgcccggcagcagctggagacagccagaaatgccaccaggaggaccaacaccagctctgtgaccaccaccatcacccagagcacagccaccaccaacatcgccaacacagagagcagccagcagaccctgcagaacagccagttcctgctgacccggctgaatgaccccaagatgtctgaaacagagcggcagagcatggagagcgagagagctgacaggagcctgtttgtgcaggagctgctgctgagcaccctggtgcgggaggagagcagcagcagtgatgaagatgacagaggagagatggctgactttggagccatgggctgtgtggacatcatgcccctggatgtggccctggagaacctgaacctgaaggagagcaacaagggaaatgagcccccacctccacccctgtag

SEQ ID NO: 202691 - DNA, 1146 bp, Artificial Sequence
  derived and/or modified sequence
atgagccggcacgagggcgtgagctgcgacgcctgcctgaagggcaacttcagaggacgcagatataagtgcctcatctgttacgattacgatttgtgtgcatcgtgctacgagtctggggctaccaccactcgccacacaactgatcaccctatgcagtgcatacttactagggtcgatttcgacctctactacggcggtgaggccttctctgtggagcaaccccaaagttttacttgcccctactgcggaaaaatgggctatacagaaacatcgctccaggaacacgttacctctgagcacgcagagacttcaactgaagtcatctgcccaatatgcgcagcactccctgggggagatccgaatcacgttacagatgactttgctgcacatttaaccctcgaacacagagccccaagggatctggacgagtccagcggtgtgcgtcacgtgagacgcatgtttcaccctggaagaggcctcggcgggcccagggcccggaggagtaatatgcactttacgtccagcagcacggggggcctgtctagttctcagtcgtcatattctccttctaatcgcgaagccatggatcccattgctgagttactctctcagctttccggcgtccggcggtccgctggagggcaactgaattccagtgggccctccgcgtcccagctccagcaacttcagatgcagctgcagctcgagcgacagcacgcccaggccgcacggcagcagctggagactgccaggaacgcgacacgacgcactaacacgtcaagtgtgactacaacaattacacagtcaactgccactaccaatatagcaaacactgaaagttctcagcagactttacagaacagtcagtttcttcttacccgactgaatgaccccaaaatgtccgagacggagaggcagtctatggagtctgagagggccgaccgctcactttttgtccaggaattgctactgagcacactcgtcagagaagagagttcttccagcgatgaggacgaccgaggtgaaatggccgacttcggcgcgatgggctgcgtggatatcatgcctctcgacgtggccctggagaatcttaatttgaaagagagcaacaagggtaacgagcctcctcctccacccctgtag

SEQ ID NO: 202692 - DNA, 3533 bp, Artificial Sequence
  derived and/or modified sequence
gcggggggtgggccgggggaggggaggagcgggatttgcggagcgccgcgccgctgccgggagccggcaggcccgagagtgaccggagtcacggcgggcgccggcggagctgcggcgtcggacccgcctcctggaggagctcagccccgaccaggcccggccccattcccgccccgcgccgcctccccgccgccgccgccgccgccgccgcgggagcgctcccctgcccaccccgcccccgcggccgagcccgggagtcgagtgggagtcggccggccggcgcgggcagcgccgggaccccgcgggggacactgcagccggagcccgggaggggccgcgccgccaccgtctgaactaggatgtcccgacatgaaggtgtcagctgtgatgcatgtttaaaaggaaattttcgaggtcgcagatataagtgtttaatttgctacgattacgatctttgtgcatcttgttatgaaagtggtgcaacaacaacaaggcatacaactgaccacccaatgcagtgcatattaacaagggtagattttgatttatactatggtggggaagctttctctgtagagcagccacagtcttttacttgtccctattgtggaaaaatgggctatacggagacatctcttcaagaacatgttacttctgaacatgcagaaacatcaacagaagtgatttgtccaatatgtgcagcgttacctggaggcgatcctaatcatgtcacggatgactttgcagctcatcttacacttgaacacagagcccctagagatttagatgaatcgagtggtgttcgacatgtacgtagaatgtttcaccctggccggggattaggaggtcctcgtgctcgtagatcaaacatgcactttactagcagttctactggtggactttcttcttctcagagttcatattctccaagcaatagggaagccatggatcctatagctgagcttttatctcagttatcaggagtgagacgttctgcaggaggacagcttaattcctctggcccttccgcttctcagttacaacaactgcagatgcagctgcagctagaacggcagcatgcccaggcagcacggcaacaactggagaccgcacgcaacgcaacccggcgtactaacacaagcagtgtcaccactacaatcacacaatccacagcaacaaccaacatagctaatacagaaagcagtcagcagactctacagaattcccagtttcttttaacaaggttgaatgatcctaaaatgtctgaaacggagcgccagtccatggaaagcgagcgtgcagaccgcagcctgtttgtccaagagctccttctgtccactttagtgcgtgaagagagctcatcctcagatgaggatgatcggggggagatggcagattttggtgctatgggctgtgtagatattatgcctttagatgttgctttagaaaacctaaatttaaaagagagtaataaaggaaatgagcctccaccacctcctctttgatgacatcccaattcgcagacaatgtcctctgtgctgtatttgccaatgaaagtggacaacaactatcttgggtttgtttggtgattgtaatttcaggtctgtcactcttgttacattgtgtacattcaaaaggaagagagaaaatatatatgataatcatttccacttaactaatttttacttctagcaggtaaatgtaggtagcagtgcaggggtgatctctgcttcctgtaccttgacatgcaaaaggctctcctaatactccacattcaaactgaagaggaaaattgaaatctctaatgaagctgctgtgtgtatttatgaatattaatgaataaaaactgcttggatggtttaccttaactactgcatgaggttttttgcagcgtgcatgagttttagtgaccttgttatttaagaagttaaatacaaggagtaaaacttaaaaaaaaaatacaaagcccaaagctttcccaaacattattcaatggttacacgacgaagtagcttttgaataatgtctgcctgaatcacctttctttgtgtgcctcctacgcacaaagccagctctgcagtggaatctggggattatagccgggtgtggcactccgccctgtgtgactgtcctgtcgccctgttagtcatcttgcctgtgtggagctcagcctgtctctttaactcatctgtagaagacacaccagtaaagctactgttggaatctgctgcaggggcctttgtgtgccctaaaaacaaatcctgttcatgtttgtttaaagtttttactttttgtggttgtttaaaattttttcaattgttaaatatgttttattcaggtgtagatgaatttcatttattgactgttcaacagagttaacctgaattatgttgtctttgtttttaaaaatctcacattctcaatcatattttgcattatttatgtatttgctttgtagtttgctgagacagatcagtatcaggggagctttgaggatttgccttcccagatttgtcagtatattacaaccaaattcttaatgctaattttagcaccttttatttattgggttttttctggcataaaaagtaaagccttttaattgaatcatgccacctatatgcctatattattaatcctatgtgtaaaaaaaatgtacagctttttttgggtttgttttggggtttggaagggccgggttattttttatttcctgtttcagtttttgtgcatagactttcacaatagctccaaggcagggacagcgggtttgggggttgggagggcagtttttggaatgtaaatttaggacttttaaaaaggtgcgcacagcttctgataaatttataactagacttaacctaatcatgtctcgttccagttctcttttctctgagcccttttcaaagtctcctctctttctcctgtcatccttttcctttcctgtccgtgtatctccgtttcttcaacatgacaagcatacagacttgaacacccctccggtgttcttccgagaactgtgaagtccatgttcatccaaatgtaaccaaaaaagaagtcaccctacatgtctgaaaaactgttgcttctcctctgaaacttcaaactccaacgatttccaaatacaatagctttgttttctttagttctgtaatggataatgtttaaaggaaaactttacaccaggcttctggttacactagaagtcaagcccattagggattttcattttttttcatttggttgttgagaagtttcaaaaatcagttttcaagctgtggtctttcaaacacatctgcacataagtcacacatttcaataaagcattttcaagactgttgaccacttgaatttctttggtgttagtggattaacctaaccattactctgagattttatatctctaatccagtattttttttctttttatgctaaacatgggagatcctggttttgtgtgaatgcattattttggatgtgagaaataaatgccaattatatgtactttcccttttctgcacaaattctgggaa

SEQ ID NO: 202693 - DNA, 1146 bp, Artificial Sequence
  derived and/or modified sequence
atgagcaggcacgagggcgtctcatgcgacgcctgcctcaaagggaacttccggggaaggcggtataagtgcctgatctgctatgattatgacctctgcgccagctgctacgagtctggtgcaactactacgcggcacaccacagaccaccctatgcaatgtattctcacaagggtggacttcgatctctactacggaggcgaggctttctccgtggagcagccccaatctttcacttgcccctattgcggaaaaatgggatacacagagacctctttacaggagcacgtcacctctgagcatgcggaaacttctactgaagtcatatgtccgatctgcgccgcactaccaggaggtgatcccaaccacgtcacggacgatttcgccgctcacctaacactcgagcatagagcaccccgtgatctggatgagtctagtggtgtgcgacacgttcgacgcatgttccacccagggagggggctggggggtcccagggctaggcgaagtaatatgcactttacgagctcaagcacaggcggtctttccagttctcaatcgtcatactccccgagtaacagggaggccatggatcctattgccgagctcttgagtcagctgagcggcgttcgtcgcagcgccggtgggcagctgaactcctccgggcctagtgcgagtcagctgcagcagctgcaaatgcagctccagctggaacgccaacatgcacaggcagcacgtcagcaactcgagactgccaggaacgccactagaaggacaaatacctcaagtgtgactactactatcacccagtccactgctaccaccaacattgcaaatacggagagctcgcaacagacgctccagaactctcagtttctgctgacacggctcaatgatccgaagatgagcgagactgaaaggcagtcaatggagtccgagagagccgatcggtccctgtttgtccaagagctccttctttccaccctggtgcgggaggaatcaagctcttctgacgaagatgatcgcggtgaaatggcagactttggagctatggggtgcgtggatatcatgcctctcgatgtggctctcgaaaaccttaacttaaaggagagcaacaaaggtaacgaacccccacctcctccactatag

SEQ ID NO: 202694 - protein, 207 aa, Artificial Sequence
  derived and/or modified sequence
MSTKPDMIQKCLWLEILMGIFIAGTLSLDCNLLNVHLRRVTWQNLRHLSSMSNSFPVECLRENIAFELPQEFLQYTQPMKRDIKKAFYEMSLQAFNIFSQHTFKYWKERHLKQIQIGLDQQAEYLNQCLEEDKNENEDMKEMKENEMKPSEARVPQLSSLELRRYFHRIDNFLKEKKYSDCAWEIVRVEIRRCLYYFYKFTALFRRK

SEQ ID NO: 202695 - DNA, 624 bp, Artificial Sequence
  derived and/or modified sequence
atgagcaccaagcccgacatgatacagaagtgcctgtggctagagatcctgatgggaatcttcatcgcaggcacccttagtttagattgcaacctgttaaatgttcatcttcggcgagtcacttggcagaacctgcgtcacctatcttctatgtccaatagttttcctgtcgaatgtctacgcgaaaacatcgcctttgagctgccccaagagtttctgcagtatactcagccaatgaaacgagacattaaaaaagccttctatgaaatgtctctgcaagcctttaatattttctcgcagcatacctttaagtattggaaagagcgacacctgaagcagattcagataggcctggaccaacaagccgagtacctcaaccaatgtctggaggaagacaaaaacgaaaacgaggatatgaaggaaatgaaggagaatgagatgaaaccatccgaggcgagggtacctcaactcagtagtctggagcttcggagatattttcatcgaatcgataattttcttaaggagaagaagtacagcgactgtgcgtgggagatcgtgcgtgtagaaatcagaaggtgcctgtattacttttacaagttcaccgctctattccgcagaaagtag

SEQ ID NO: 202696 - DNA, 624 bp, Artificial Sequence
  derived and/or modified sequence
atgtcgactaaacctgatatgatccagaaatgcttgtggttggaaatcctcatgggaatatttatcgcaggaacactttcactggattgtaacttactcaacgtgcacctgagacgcgtgacttggcaaaatttgagacacctcagctctatgtcaaattcattccccgtggagtgtctcagagagaatatagccttcgagctcccgcaagagtttcttcagtacactcaaccaatgaagagagacatcaaaaaagcgttctacgaaatgtcactgcaggcattcaacatcttctctcagcatactttcaaatattggaaagagcgacatctgaaacagatacagattgggttggatcaacaagcggaataccttaatcaatgccttgaagaagacaagaacgagaatgaggacatgaaggagatgaaggaaaacgagatgaagccatcggaggctcgggtgccacagctgtcatctctagagttgcgacgctattttcacagaattgataattttctgaaagaaaaaaaatactcggactgcgcatgggagatcgtgagagtggagattcgccggtgcctctactacttctataagttcacagcactgtttagacggaaatag

SEQ ID NO: 202697 - DNA, 624 bp, Artificial Sequence
  derived and/or modified sequence
atgagtaccaagcccgacatgattcagaaatgcttgtggctagaaatactgatgggcatctttattgctgggactttgagcctcgattgtaacctactgaacgtgcacctgagaagggtcacgtggcagaacttgcgccacttatcctccatgtccaattcctttcctgtcgaatgtctcagagagaatattgcgtttgagctcccacaggaattccttcagtatacccaacctatgaaaagagatatcaaaaaagccttctacgaaatgtcactgcaagcctttaatatcttttcccagcacaccttcaaatattggaaagaacgccacctgaagcaaatacagatcggactcgatcagcaagccgagtatctgaaccaatgcctggaagaagacaagaatgagaacgaggatatgaaggaaatgaaggagaacgagatgaagcctagcgaagccagagtgcctcaattaagcagccttgagttacggcgttatttccatagaatcgacaactttctcaaggaaaagaagtatagtgactgtgcctgggaaatcgttagagtggaaattcggcggtgcttatactatttctataaatttacagccctctttagaagaaaatag

SEQ ID NO: 202698 - DNA, 1140 bp, Artificial Sequence
  derived and/or modified sequence
ggattttttagcttgcaaaaaaaatgagcaccaaacctgatatgattcaaaagtgtttgtggcttgagatccttatgggtatattcattgctggcaccctatccctggactgtaacttactgaacgttcacctgagaagagtcacctggcaaaatctgagacatctgagtagtatgagcaattcatttcctgtagaatgtctacgagaaaacatagcttttgagttgccccaagagtttctgcaatacacccaacctatgaagagggacatcaagaaggccttctatgaaatgtccctacaggccttcaacatcttcagccaacacaccttcaaatattggaaagagagacacctcaaacaaatccaaataggacttgatcagcaagcagagtacctgaaccaatgcttggaggaagacaagaatgaaaatgaagacatgaaagaaatgaaagagaatgagatgaaaccctcagaagccagggtcccccagctgagcagcctggaactgaggagatatttccacaggatagacaatttcctgaaagaaaagaaatacagtgactgtgcctgggagattgtccgagtggaaatcagaagatgtttgtattacttttacaaatttacagctctattcaggaggaaataagaatcatctaccttcaagcaagaattaacagagattgtggctacgcaaatgcaccaaaaaagggtgaaatatatctgaaatgtacctggttctgcccttggaagccatttcctgctcatgccactaacagcatgctgccaaactgttcagattcaagattattccaagcgcagggcccaaatgttatagccaaagaaagtcttatgataaaagtgaggcaaatttcagccaagaagttagaagagatgtttaaaagaacaagaacaaattgtggatcatggtatatgcaggctatcagcagaaggatcagacaataaaatgagttagtgcaaaccatttagtaaaaataactatcagcagagttgttccagattaaaaatagtactacaagcttgtaaaggagttaggacatgcaagctactgagcataaaatatatacttgctatttttcatgactttctctaataaagtctttgcctgttctctctaataa

SEQ ID NO: 202699 - DNA, 624 bp, Artificial Sequence
  derived and/or modified sequence
atgagcaccaagcccgacatgatccagaagtgcctgtggctggagatcctgatgggcatcttcatcgccggcaccctgagcctggactgcaacctgctgaacgtgcacctgagaagagtgacctggcagaacctgagacacctgagcagcatgagcaacagcttccccgtggagtgcctgagagagaacatcgccttcgagctgccccaggagttcctgcagtacacccagcccatgaagagagacatcaagaaggccttctacgagatgagcctgcaggccttcaacatcttcagccagcacaccttcaagtactggaaggagagacacctgaagcagatccagatcggcctggaccagcaggccgagtacctgaaccagtgcctggaggaggacaagaacgagaacgaggacatgaaggagatgaaggagaacgagatgaagcccagcgaggccagagtgccccagctgagcagcctggagctgagaagatacttccacagaatcgacaacttcctgaaggagaagaagtacagcgactgcgcctgggagatcgtgagagtggagatcagaagatgcctgtactacttctacaagttcaccgccctgttcagaagaaagtag

SEQ ID NO: 202700 - DNA, 624 bp, Artificial Sequence
  derived and/or modified sequence
atgtccacaaaacccgatatgatacagaagtgcctctggctggaaatcctgatgggtatttttatagcaggcacactctcgctggactgcaacctgctcaatgttcatttaagacgggtaacttggcagaacttacgtcatttgagctctatgagcaattcctttcctgtggaatgcctgagggaaaatatcgccttcgagctgccccaggaattcctgcagtacactcagcctatgaagcgagacatcaaaaaggctttttacgaaatgagcctgcaggcatttaacatcttctcacaacacacctttaagtactggaaagagagacatctgaagcagatccagattggcctagaccagcaggccgagtacttaaatcaatgccttgaagaggataagaacgagaatgaggacatgaaagaaatgaaggagaacgaaatgaaaccctcagaagcccgggtaccccagctatcatctctggagctgcggagatacttccaccggattgacaactttttaaaagaaaaaaagtattccgattgcgcatgggaaatcgtgcgcgtcgaaataaggaggtgtctttactacttttataaattcacagcactgtttagacgtaagtag

SEQ ID NO: 202701 - DNA, 624 bp, Artificial Sequence
  derived and/or modified sequence
atgagcaccaagccagacatgatccagaagtgcctgtggctggagatcctgatgggcatcttcatcgccggcaccctgagcctggactgcaacctgctgaatgtgcacctgcggcgggtgacctggcagaacctgcggcacctgagctccatgagcaacagcttccctgtggagtgcctgcgggagaacatcgcctttgagctgccccaggagttcctgcagtacacccagcccatgaagagggacatcaagaaggccttctatgagatgagcctgcaggccttcaacatcttcagccagcacaccttcaagtactggaaggagcggcacctgaagcagatccagatcggcctggaccagcaggccgagtacctgaaccagtgcctggaggaggacaagaatgaaaatgaagacatgaaggagatgaaggaaaatgagatgaagcccagcgaggcccgggtgccccagctgagcagcctggagctgcggcgctacttccacagaattgacaacttcctgaaggagaagaagtacagcgactgtgcctgggagatcgtgcgggtggagatccgccgctgcctgtactacttctacaagttcaccgccctcttccggaggaagtag

SEQ ID NO: 202702 - DNA, 624 bp, Artificial Sequence
  derived and/or modified sequence
atgagcaccaagcccgacatgatccagaagtgcctgtggctggagattttaatgggcattttcatcgcaggcactctgtccctagattgcaatttattaaacgtgcatctcagacgcgtgacatggcaaaacctccggcacctctcctctatgagtaactcttttcctgtggaatgtctaagggagaatatcgcctttgagcttccacaggaatttttgcagtatactcagccaatgaagcgggacatcaagaaagcattttatgaaatgagccttcaggccttcaatattttctctcaacatacattcaaatactggaaagaacgccatctcaaacagatccaaataggcctagatcagcaagcagagtacctgaatcagtgtctggaagaggacaagaacgagaacgaagatatgaaagaaatgaaagaaaacgaaatgaaacctagcgaagcccgggttcctcagctcagcagcctggaacttaggcggtacttccaccgaattgataatttcttgaaagagaagaagtattctgactgcgcctgggagatcgtgcgagtggaaatccgacgttgcctgtattacttttataagtttacagcgctgtttagaagaaagtag

SEQ ID NO: 202703 - RNA, 624 nt, Artificial Sequence
  derived and/or modified sequence
augucgacuaaaccugauaugauccagaaaugcuugugguuggaaauccucaugggaauauuuaucgcaggaacacuuucacuggauuguaacuuacucaacgugcaccugagacgcgugacuuggcaaaauuugagacaccucagcucuaugucaaauucauuccccguggagugucucagagagaauauagccuucgagcucccgcaagaguuucuucaguacacucaaccaaugaagagagacaucaaaaaagcguucuacgaaaugucacugcaggcauucaacaucuucucucagcauacuuucaaauauuggaaagagcgacaucugaaacagauacagauuggguuggaucaacaagcggaauaccuuaaucaaugccuugaagaagacaagaacgagaaugaggacaugaaggagaugaaggaaaacgagaugaagccaucggaggcucgggugccacagcugucaucucuagaguugcgacgcuauuuucacagaauugauaauuuucugaaagaaaaaaaauacucggacugcgcaugggagaucgugagaguggagauucgccggugccucuacuacuucuauaaguucacagcacuguuuagacggaaauag

SEQ ID NO: 202704 - RNA, 624 nt, Artificial Sequence
  derived and/or modified sequence
augaguaccaagcccgacaugauucagaaaugcuuguggcuagaaauacugaugggcaucuuuauugcugggacuuugagccucgauuguaaccuacugaacgugcaccugagaagggucacguggcagaacuugcgccacuuauccuccauguccaauuccuuuccugucgaaugucucagagagaauauugcguuugagcucccacaggaauuccuucaguauacccaaccuaugaaaagagauaucaaaaaagccuucuacgaaaugucacugcaagccuuuaauaucuuuucccagcacaccuucaaauauuggaaagaacgccaccugaagcaaauacagaucggacucgaucagcaagccgaguaucugaaccaaugccuggaagaagacaagaaugagaacgaggauaugaaggaaaugaaggagaacgagaugaagccuagcgaagccagagugccucaauuaagcagccuugaguuacggcguuauuuccauagaaucgacaacuuucucaaggaaaagaaguauagugacugugccugggaaaucguuagaguggaaauucggcggugcuuauacuauuucuauaaauuuacagcccucuuuagaagaaaauag

SEQ ID NO: 202705 - protein, 285 aa, Artificial Sequence
  derived and/or modified sequence
MVMRPLWSLLLWEALLPITVTGAQVLSKVGGSVLLVAARPPGFQVREAIWRSLWPSEELLATFFRGSLETLYHSRFLGRAQLHSNLSLELGPLESGDSGNFSVLMVDTRGQPWTQTLQLKVYDAVPRPVVQVFIAVERDAQPSKTCQVFLSCWAPNISEITYSWRRETTMDFGMEPHSLFTDGQVLSISLGPGDRDVAYSCIVSNPVSWDLATVTPWDSCHHEAAPGKASYKDVLLVVVPVSLLLMLVTLFSAWHWCPCSGKKKKDVHADRVGPETENPLVQDLP

SEQ ID NO: 202706 - DNA, 858 bp, Artificial Sequence
  derived and/or modified sequence
atggtgatgcggcccctgtggagcctcttgttgtgggaagccctcctgccaattactgtgacgggggcccaggtgctgagtaaggtcggtggctctgttctcctcgtagctgcccgccctccaggatttcaggtgagagaggcaatttggcgctcactgtggcctagcgaggagctgctggctacttttttcagaggcagtctggagactttataccattctcgctttctgggccgtgcgcagctccacagcaacctgtcactggagttgggaccactagagtccggagactccggcaacttctcagttttgatggttgacacccgggggcagccctggactcagactttgcagcttaaggtgtatgatgctgtgccacgccctgtggttcaagtctttattgcagtcgaaagagacgcacaaccctccaagacctgtcaggtattcctgagttgctgggcccccaatattagcgaaattacctattcctggcgccgggagaccaccatggatttcggaatggaacctcacagcctgtttactgacgggcaggtgctgagcatttccctgggacccggggaccgcgacgtggcctattcatgcatagtgagcaaccccgtctcatgggatcttgccactgtcacaccatgggactcctgtcaccatgaagcggccccgggaaaggccagctataaagacgtgcttctcgtggtagtgcccgtgtcgctcctgcttatgttggtgacactcttctccgcatggcattggtgcccttgttctggaaaaaaaaagaaggacgtccatgctgatcgagtcggaccggagactgagaaccccctggtgcaggacctaccatag

SEQ ID NO: 202707 - DNA, 531 bp, Artificial Sequence
  derived and/or modified sequence
atggtcatgagacctctttggtcactgctgctgtgggaagacgctgttcctcgcccagtagtccaggtatttattgcagtcgagcgggacgcacagccctccaagacctgccaagttttcctctcttgttgggcccctaatatctctgagatcacgtattcatggcgccgtgagacaacaatggacttcggtatggaaccccactctttatttacagatggtcaagtgctgagcattagcttaggtcccggcgacagggatgtcgcctactcttgcatagtttctaatcctgtttcctgggatctggcaactgttaccccttgggatagttgccaccacgaagcagccccgggcaaagcctcttacaaagatgtcttattggtggtcgtgcctgtgtctctgctgctgatgttggtgaccctcttcagcgcttggcactggtgcccctgttccggtaaaaagaagaaggatgtgcacgcagatcgcgtgggccctgagacggagaacccgctcgtgcaggatctaccatag

SEQ ID NO: 202708 - DNA, 858 bp, Artificial Sequence
  derived and/or modified sequence
atggtgatgaggcccctgtggagcctgctgctgtgggaggccctgctgcccatcaccgtgactggagcccaggtgctgagcaaggtgggcggctctgtgctgctggtggccgcccggcccccaggcttccaggtgcgggaggccatctggaggagcctgtggcccagcgaggagctgctggccaccttcttccggggcagcctggagaccctgtaccacagccgcttcctgggccgggcccagctgcacagcaacctgagcctggagctgggccccctggagagcggggacagcggcaacttctctgtgctgatggtggacacccggggccagccctggacccagaccctgcagctgaaggtgtatgatgctgtgcccaggcctgtggtgcaggtgttcatcgctgtggagagagatgcccagcccagcaagacctgccaggtgttcctgagctgctgggcccccaacatcagcgagatcacctacagctggaggcgggagaccaccatggactttggcatggagccccacagcctcttcacagatggccaggtgctgagcatcagcctgggccctggggacagagatgtggcctacagctgcatcgtgagcaaccctgtgtcctgggacctggccaccgtgaccccctgggacagctgccaccacgaggccgcccctgggaaggccagctacaaggatgtgctgctggtggtggtgcctgtgtccctgctgctgatgctggtgaccctcttcagcgcctggcactggtgcccctgcagcggcaagaagaagaaggatgtgcatgctgacagagtgggccctgagacagagaaccccctggtgcaggacctgccctag

SEQ ID NO: 202709 - DNA, 531 bp, Artificial Sequence
  derived and/or modified sequence
atggtgatgaggcccctgtggagcctgctgctgtgggaggatgctgtgcccaggcctgtggtgcaggtgttcatcgctgtggagagagatgcccagcccagcaagacctgccaggtgttcctgagctgctgggcccccaacatcagcgagatcacctacagctggaggcgggagaccaccatggactttggcatggagccccacagcctcttcacagatggccaggtgctgagcatcagcctgggccctggggacagagatgtggcctacagctgcatcgtgagcaaccctgtgtcctgggacctggccaccgtgaccccctgggacagctgccaccatgaagctgcccctgggaaggccagctacaaggatgtgctgctggtggtggtgcctgtgtccctgctgctgatgctggtgaccctcttcagcgcctggcactggtgcccctgcagcggcaagaagaagaaggatgtgcacgccgacagagtgggccctgagacagagaaccccctggtgcaggacctgccctag

SEQ ID NO: 202710 - DNA, 858 bp, Artificial Sequence
  derived and/or modified sequence
atggtgatgcggcccctgtggagcctgctgctgtgggaggccctgctcccgatcacagttactggagctcaagtgttgagtaaggttggcggtagcgtgctgctggtagcagctcggcctcccggcttccaagtgcgcgaggccatctggcggtcattatggccatctgaggagctcctggcaactttcttccgagggagccttgagacactgtatcacagtagatttcttgggcgcgcccaattgcactctaacttatcccttgaactgggacctctcgagtccggtgatagcggtaatttttccgtcctgatggtggacacgcgtggtcagccgtggacacagactctccagctgaaggtctacgatgcagtgccacggcccgtcgtgcaggtgttcattgcagtggaacgggacgcacagccctcaaagacttgtcaggtgttcctttcatgctgggctcctaacatctctgagatcacatactcgtggaggcgcgagacaactatggacttcgggatggaaccccatagtctatttacggatggccaggtgttgtcaatctcccttggccccggcgatagggatgttgcctactcctgcattgtgtctaatcccgtcagctgggacctggccacggtgacaccgtgggattcctgccatcacgaggccgcccccggaaaggcttcttataaggacgtcctgcttgtcgtggtgcccgtgtcactgctgctgatgctggtcacactgttttcggcatggcactggtgcccttgctcgggtaaaaagaagaaggacgtgcacgctgacagagtgggacctgaaaccgagaacccactggtgcaagacctgccatag

SEQ ID NO: 202711 - DNA, 531 bp, Artificial Sequence
  derived and/or modified sequence
atggtgatgcggcccctgtggagcctgctgctgtgggaggacgccgtcccccgtccagtggtccaggtctttatcgcagtagaaagggacgcgcagcctagtaaaacctgtcaggtcttcttatcgtgttgggcacccaatatctcagagataacatactcttggcggagagaaacgacaatggacttcggtatggaaccgcattctttgttcaccgatggtcaggtcctgtccatatctcttggcccaggagatcgggatgtcgcgtactcatgcatcgtctcaaatcctgtctcctgggaccttgcaaccgttacaccctgggatagctgtcatcatgaggcagccccaggtaaagcatcctacaaggatgtgctgctcgtcgtcgttccggtatctttgctcctgatgctggtgaccctgttctccgcatggcactggtgcccctgtagcggaaaaaagaagaaggatgtgcatgccgacagggtgggccctgaaactgaaaaccctctcgtacaggatctcccttag

SEQ ID NO: 202712 - DNA, 858 bp, Artificial Sequence
  derived and/or modified sequence
atggtgatgagacccttatggtccctcttactgtgggaggctttgttgccaatcaccgtgaccggggcacaggtgttaagcaaggttgggggaagtgtcttgctagtcgctgcaaggccccctggcttccaggttcgggaggctatctggcgttccctctggccttcagaggaattacttgccactttcttccgcggttccctcgagacactctatcactccaggtttcttgggagggcccagctccacagcaatctttcactggagctgggacctctcgagagcggtgatagcggaaactttagcgtgctgatggttgacacacgcggacagccctggacacaaacattacagcttaaagtttatgatgcagttccacggccagtagtgcaggtatttattgctgtcgagcgggatgcgcagccaagcaagacatgccaagtgtttctctcctgctgggccccaaatatttctgagattacgtactcctggcggcgtgaaacaaccatggatttcggcatggaacctcacagtctctttactgatgggcaggtgctttccatttcccttggcccaggagacagggacgttgcctactcttgcatagtttctaatcctgtttcttgggacctggctactgtcacaccgtgggactcatgtcaccatgaagcggctcctggcaaagcttcatacaaggacgtgctgttagttgtcgtgcctgtgtcgctcctccttatgctcgtcactctgttctcagcctggcattggtgcccatgcagcgggaagaagaagaaggatgtccatgcagacagggtcggtcctgaaaccgaaaaccccttggtgcaggacttgccttag

SEQ ID NO: 202713 - DNA, 531 bp, Artificial Sequence
  derived and/or modified sequence
atggtcatgcgtcctctgtggtcactcctgctgtgggaagatgccgtccctcgcccagtggtccaagtgttcattgcagtggagagagatgcacagccctccaaaacttgccaggtgttcctatcctgttgggcaccgaacatttccgaaatcacatactcctggaggcgggaaaccaccatggactttggcatggagccgcactctctgtttacagatgggcaggttctgtcaatttctctcggccctggggacagagatgtggcgtattcttgtatcgtcagcaatccagtgagctgggacctcgccacagtgaccccgtgggattcttgccaccatgaggcagctcccggtaaggctagttacaaagacgtcctcctagttgtcgtcccagtgagtcttctgctcatgcttgtcacactctttagcgcatggcattggtgcccatgttccgggaagaaaaagaaggacgtgcatgccgatagagtgggccctgaaacagagaatcccctagttcaggatctgccctag

SEQ ID NO: 202714 - DNA, 2996 bp, Artificial Sequence
  derived and/or modified sequence
acttttgggacatcctgttctgagtcaagattcctccttctgaacatgggactttccagaaggaccacagctcctcccgtgcatccactcggcctgggaggttctggattttggctgtcgagggagtttgcctgcctctccagagaaagatggtcatgaggcccctgtggagtctgcttctctgggaagccctacttcccattacagttactggtgcccaagtgctgagcaaagtcgggggctcggtgctgctggtggcagcgcgtccccctggcttccaagtccgtgaggctatctggcgatctctctggccttcagaagagctcctggccacgtttttccgaggctccctggagactctgtaccattcccgcttcctgggccgagcccagctacacagcaacctcagcctggagctcgggccgctggagtctggagacagcggcaacttctccgtgttgatggtggacacaaggggccagccctggacccagaccctccagctcaaggtgtacgatgcagtgcccaggcccgtggtacaagtgttcattgctgtagaaagggatgctcagccctccaagacctgccaggttttcttgtcctgttgggcccccaacatcagcgaaataacctatagctggcgacgggagacaaccatggactttggtatggaaccacacagcctcttcacagacggacaggtgctgagcatttccctgggaccaggagacagagatgtggcctattcctgcattgtctccaaccctgtcagctgggacttggccacagtcacgccctgggatagctgtcatcatgaggcagcaccagggaaggcctcctacaaagatgtgctgctggtggtggtgcctgtctcgctgctcctgatgctggttactctcttctctgcctggcactggtgcccctgctcagggaaaaagaaaaaggatgtccatgctgacagagtgggtccagagacagagaacccccttgtgcaggatctgccataaaggacaatatgaactgatgcctggactatcagtaaccccactgcacaggcacacgatgctctgggacataactggtgcctggaaatcaccatggtcctcatatctcccatgggaatcctgtcctgcctcgaaggagcagcctgggcagccatcacaccacgaggacaggaagcaccagcacgtttcacacctcccccttccctctcccatcttctcatatcctggctcttctctgggcaagatgagccaagcagaacattccatccaggacactggaagttctccaggatccagatccatggggacattaatagtccaaggcattccctcccccaccactattcataaagtattaaccaactggcaccaaggaattgcctccagcctgagtcctaggctctaaaagatattacatatttgaactaatagaggaactctgagtcacccatgccagcatcagcttcagccccagaccctgcagtttgagatctgatgcttcctgagggccaaggcattgctgtaagaaaaggtctagaaataggtgaaagtgagaggtgggggacaggggtttctctttctggcctaaggactttcaggtaatcagagttcatgggccctcaaaggtaaattgcagttgtagacaccgaggatggttgacaacccatggttgagatgggcaccgttttgcaggaaacaccatattaatagacatcctcaccatctccatccgctctcacgcctcctgcaggatctgggagtgagggtggagagtctttcctcacgctccagcacagtggccaggaaaagaaatactgaatttgccccagccaacaggacgttcttgcacaacttcaagaaaagcagctcagctcaggatgagtcttcctgcctgaaactgagagagtgaagaaccataaaacgctatgcagaaggaacattatggagagaaagggtactgaggcactctagaatctgccacattcattttcaaatgcaaatgcagaagacttaccttagttcaaggggaggggacaaagaccccacagcccaacagcaggactgtagaggtcactctgactccatcaaactttttattgtggccatcttaggaaaatacattctgcccctgaatgattctgtctagaaaagctctggagtattgatcactactggaaaaacacttaaggagctaaacttaccttcggggattattagctgataaggttcacagtttctctcacccaggtgtaactggattttttctggggcctcaatccagtcttgataacagcgaggaaagaggtattgaagaaacaggggtgggtttgaagtactattttcccagggtggcttcaatctccccacctaggatgtcagccctgtccaaggaccttccctcttctccccagttcctgggcaatcacttcaccttggacaaaggatcagcacagctggcctccagatccacatcaccactcttccactcgattgttcccagatcctccctgcctggcctgctcagaggttccctgttggtaacctggctttatcaaattctcatccctttcccacacccacttctctcctatcaccttcccccaagattacctgaacagggtccatggccactcaacctgtcagcttgcaccatccccacctgccacctacagtcaggccacatgcctggtcactgaatcatgcaaaactggcctcagtccctaaaaatgatgtggaaaggaaagcccaggatctgacaatgagccctggtggatttgtggggaaaaaatacacagcactccccacctttctttcgttcatctccagggccccacctcagatcaaagcagctctggatgagatgggacctgcagctctccctccacaaggtgactcttagcaacctcatttcgacagtggtttgtagcgtggtgcaccagggccttgttgaacagatccacactgctctaataaagttcccatccttaatga

SEQ ID NO: 202715 - DNA, 858 bp, Artificial Sequence
  derived and/or modified sequence
atggtgatgagacccctgtggagcctgctgctgtgggaggccctgctgcccatcaccgtgaccggcgcccaggtgctgagcaaggtgggcggcagcgtgctgctggtggccgccagaccccccggcttccaggtgagagaggccatctggagaagcctgtggcccagcgaggagctgctggccaccttcttcagaggcagcctggagaccctgtaccacagcagattcctgggcagagcccagctgcacagcaacctgagcctggagctgggccccctggagagcggcgacagcggcaacttcagcgtgctgatggtggacaccagaggccagccctggacccagaccctgcagctgaaggtgtacgacgccgtgcccagacccgtggtgcaggtgttcatcgccgtggagagagacgcccagcccagcaagacctgccaggtgttcctgagctgctgggcccccaacatcagcgagatcacctacagctggagaagagagaccaccatggacttcggcatggagccccacagcctgttcaccgacggccaggtgctgagcatcagcctgggccccggcgacagagacgtggcctacagctgcatcgtgagcaaccccgtgagctgggacctggccaccgtgaccccctgggacagctgccaccacgaggccgcccccggcaaggccagctacaaggacgtgctgctggtggtggtgcccgtgagcctgctgctgatgctggtgaccctgttcagcgcctggcactggtgcccctgcagcggcaagaagaagaaggacgtgcacgccgacagagtgggccccgagaccgagaaccccctggtgcaggacctgccctag

SEQ ID NO: 202716 - DNA, 531 bp, Artificial Sequence
  derived and/or modified sequence
atggtgatgagacccctgtggagcctgctgctgtgggaggacgccgtgcccagacccgtggtgcaggtgttcatcgccgtggagagagacgcccagcccagcaagacctgccaggtgttcctgagctgctgggcccccaacatcagcgagatcacctacagctggagaagagagaccaccatggacttcggcatggagccccacagcctgttcaccgacggccaggtgctgagcatcagcctgggccccggcgacagagacgtggcctacagctgcatcgtgagcaaccccgtgagctgggacctggccaccgtgaccccctgggacagctgccaccacgaggccgcccccggcaaggccagctacaaggacgtgctgctggtggtggtgcccgtgagcctgctgctgatgctggtgaccctgttcagcgcctggcactggtgcccctgcagcggcaagaagaagaaggacgtgcacgccgacagagtgggccccgagaccgagaaccccctggtgcaggacctgccctag

SEQ ID NO: 202717 - protein, 390 aa, Artificial Sequence
  derived and/or modified sequence
MNGTRNWCTLVDVHPEDQAAGSVDILRLTLQGELTGDELEHIAQKAGRKTYAMVSSHSAGHSLASELVESHDGHEEIIKVYLKGRSGDKMIHEKNINQLKSEVQYIQEARNCLQKLREDISSKLDRNLGDSLHRQEIQVVLEKPNGFSQSPTALYSSPPEVDTCINEDVESLRKTVQDLLAKLQEAKRQHQSDCVAFEVTLSRYQREAEQSNVALQREEDRVEQKEAEVGELQRRLLGMETEHQALLAKVREGEVALEELRSNNADCQAEREKAATLEKEVAGLREKIHHLDDMLKSQQRKVRQMIEQLQNSKAVIQSKDATIQELKEKIAYLEAENLEMHDRMEHLIEKQISHGNFSTQARAKTENPGSIRISKPPSPKPMPVIRVVET

SEQ ID NO: 202718 - DNA, 1316 bp, Artificial Sequence
  derived and/or modified sequence
gggaaataagagagaaaagaagagtaagaagaaatataagagccaccatgaatggtacgcgcaactggtgcactctcgtggatgtgcacccggaagatcaggcagctgggtccgtcgacattctccggctgacacttcagggggaactgaccggggacgagctggagcacatcgcgcagaaagcgggtcgaaaaacatacgcgatggtgagctcgcactcggctgggcactccctcgcctcagaactggtggaatcacacgatggacatgaagagatcatcaaagtatatctcaagggacgctccggagacaagatgattcatgagaagaatatcaaccaattgaagtcagaagtccagtatatccaagaggcgcggaactgtttgcaaaagctgagagaggacatttcgtcaaagctcgataggaacttgggcgatagcttgcaccgacaggagattcaagtagtactcgaaaagcccaatggcttttcccagtcgccaaccgccttgtattcgtcaccccctgaggtcgacacatgcatcaatgaggacgtcgaatcacttagaaagacagtgcaagaccttttggcgaaactccaagaagcgaagcgccagcatcagtcggattgtgtagccttcgaagtaacgttgtcaaggtaccagagagaggcggagcagtcgaacgtggcgcttcaacgcgaagaggatcgcgtagagcaaaaagaggctgaggtcggtgagcttcagagaaggttgctcgggatggaaacggagcaccaggcactcttggccaaagtcagagagggagaggtggcattggaagaacttaggtccaacaatgcggattgccaggccgaacgggaaaaggcggccactctcgagaaagaggtcgcgggattgcgagagaagatccatcatttggacgacatgcttaagtcgcagcagcggaaagtgaggcagatgatcgagcagctgcagaactcgaaagccgtgatccagtccaaagatgcaacgattcaagagctcaaagagaaaattgcgtacttggaagccgagaatctcgaaatgcatgaccgcatggaacaccttatcgaaaagcagatttcacacggaaatttcagcacgcaggcgagagcaaagaccgaaaacccggggtcgattcggatcagcaaaccgccttcgccgaagcccatgcccgtcatcagagtcgtggaaacgtaatgagctgccttctgcggggcttgccttctggccatgcccttcttctctcccttgcacctgtacctcttggtctttgaataaagcctgagtaggaag

SEQ ID NO: 202719 - DNA, 1170 bp, Artificial Sequence
  derived and/or modified sequence
atgaacggcacccgaaattggtgtaccctggtcgacgttcatcccgaggaccaagctgccggatcagtggatatcctcagactgaccctgcaaggggaacttactggggatgagctagaacacatcgcccagaaagctggcaggaaaacctatgcaatggtcagctctcactcagcaggacattcattggccagtgagctggtggagtcgcacgacggccatgaggagatcattaaagtctacctaaaggggcgctctggcgacaagatgatccatgaaaagaacatcaatcagctgaagtcagaggtccagtatatccaggaggcaaggaactgcttacaaaagctgcgtgaggacatctcatctaaattggatcgtaatctaggcgattctctgcaccgccaggaaatccaggtcgtgctcgaaaagcctaacggattctctcagagcccaaccgccctgtactcatctccaccggaagtggatacctgcatcaacgaagacgtggaaagcttgaggaaaacagtacaggaccttcttgccaaacttcaggaggccaagcgacagcatcagtccgattgtgtggcctttgaagtgaccctgtcgaggtatcagcgtgaggcagaacagtcgaatgtcgcattacagagggaggaggatcgagttgaacagaaagaagccgaagtgggagagctccagcgcaggctgttgggcatggagacggaacatcaagccctcctggccaaagtgagggagggagaggtcgcgctggaggaactgagatctaataacgctgattgccaggccgaacgagaaaaagcagcaaccctggagaaggaagtcgcaggcctcagggaaaagatccaccacctagacgatatgctgaaaagtcagcagcgcaaggtacgacagatgatcgaacagcttcagaacagcaaagcggttattcagagcaaggacgctaccattcaggagctgaaagaaaagattgcctacctggaggcggaaaacctggagatgcatgatcgaatggaacacctgatcgagaaacagatctcccacgggaacttcagcacacaggcacgcgctaaaaccgaaaatcccggtagcattcggatttccaaaccaccttcccctaaacctatgcccgtcatccgtgtggtggagacg

SEQ ID NO: 202720 - DNA, 1170 bp, Artificial Sequence
  derived and/or modified sequence
atgaacggaacccgcaattggtgtaccctcgtggatgtccacccagaagatcaagcagcggggtcggtggatatactgaggcttacgctgcagggagaactcactggcgatgagctggaacatattgcgcaaaaggccggaaggaaaacctacgcaatggtgtcatcccattcagctggccactctcttgcatccgaactggtggaaagccacgacgggcatgaagagatcatcaaagtgtatctcaaaggaagatcgggggataagatgatccatgagaagaatatcaatcagctgaagagcgaagtccagtacatacaagaggcacgtaattgtctgcaaaagctcagagaggatatctcgtcgaaactcgaccggaacttgggtgacagcctgcaccggcaggagattcaggtcgtgctcgaaaaaccaaacggtttctcccagtcccctactgctctgtacagcagccctcccgaggtggatacctgtatcaacgaggatgtggaatcactccggaaaactgtgcaagatctcctcgcaaagctgcaagaagcaaaacggcagcatcagtccgattgtgttgcatttgaagtgactctgtcaaggtaccagcgggaggccgagcagtccaacgtcgcgctgcaaagggaggaggacagggtggagcaaaaggaggcagaagtcggtgaactgcaacgtcgtttgcttgggatggaaactgaacaccaagcattgcttgccaaggtgagagagggagaagtcgcattggaggaactgagaagcaacaacgccgattgccaagcagaacgcgaaaaagcagcaacccttgaaaaagaggtggcgggtttgcgtgaaaagatccatcatctggacgacatgcttaagtcgcagcaacgcaaggttagacaaatgattgagcaattgcagaactcgaaggctgtgatacagtcgaaagacgcaacgattcaagaactcaaggagaagattgcctaccttgaggccgaaaatcttgagatgcatgaccgtatggaacatcttattgagaagcagataagccacggcaacttttcgacccaagctcgggcaaagaccgaaaatcctgggtcaatccgaatttccaaaccccctagcccaaaacccatgcctgtcattcgcgtggtggaaact

SEQ ID NO: 202721 - DNA, 1170 bp, Artificial Sequence
  derived and/or modified sequence
atgaacgggaccaggaactggtgcactctggttgatgtccatccggaagatcaagccgcagggtcagtggatatcctccgcctgaccttgcagggagaacttactggagatgaattggaacatatcgcgcagaaggccggcagaaagacttacgccatggtgagcagccatagcgctggccattccctggcgtcggagctcgtggaatcacatgacggccatgaggagatcattaaggtgtatctcaagggacgctcaggagacaaaatgatccacgaaaagaacatcaatcagcttaagagcgaggtgcagtatatccaggaggcgcggaattgtctccagaaactgagggaggacatctcatccaaacttgaccgcaacctgggggactcccttcacagacaggaaatccaagtggtgttggaaaagccgaacggcttctcgcaaagcccgaccgctctctacagctcgccgccggaggtcgacacgtgcatcaacgaggacgtggaatcactccggaaaaccgtgcaggatttgctggctaagctccaggaggctaagcggcagcatcagtccgactgcgtcgccttcgaggtgaccttgtcacggtaccagagggaggcagagcaatcgaacgtcgccctccagcgggaggaggaccgcgtggaacagaaggaggccgaggtgggcgaactgcaaagacggctgctcggcatggagacggagcaccaggctctgctcgctaaggtcagagaaggagaggtggctctggaggagttgcgctcgaacaatgcggactgccaagcggagagagaaaaggccgcgactcttgaaaaggaggtggccggactgcgcgaaaagatccaccatctcgatgatatgctgaagtcccagcagcgcaaagtgagacagatgatcgaacaactccaaaactcaaaggcggttatacaatcgaaggatgccactatccaggaactgaaggaaaagatcgcctacctggaggcagagaatctcgaaatgcatgatcggatggaacatctgatcgagaagcaaatcagccacggaaacttttcgacccaggccagggccaagactgagaatccaggatcgatccggatctcaaaaccccccagcccaaagcctatgccggtcatccgggtggtcgagacg

SEQ ID NO: 202722 - DNA, 1170 bp, Artificial Sequence
  derived and/or modified sequence
atgaacggaacgaggaactggtgcacactggtggacgtgcaccctgaagaccaggctgcgggatctgtggacatcctgaggctgacccttcagggtgaactgaccggcgatgaactcgaacacatagctcagaaggccggccggaaaacttatgcgatggttagctcacactcagccggccactctctggcttccgagctggttgagagccacgatggccacgaggagatcatcaaagtgtatttaaagggccgcagcggagataagatgattcatgagaagaacatcaatcagttaaagtccgaagtgcagtacatccaggaggcgaggaattgtttgcagaaacttcgggaagatatttcttccaaactggatcggaacctgggcgatagcctgcacaggcaagagattcaagtggttcttgagaagcccaacgggttcagccagagccccacagccctgtattccagtccgcccgaggttgacacctgcatcaacgaagatgttgagagtttgaggaaaacagtgcaggatttgctggcaaaacttcaggaggctaagaggcagcaccagtcagattgcgtggcgttcgaggtcaccctgtctcgataccaacgggaggctgagcagtccaacgtggcgttgcagagggaggaagatcgcgtggagcagaaagaggccgaggtgggcgaactgcaacgcagactgctgggcatggagacggaacatcaggccttactcgctaaggtgagggaaggggaggttgccctcgaggagctgaggtcaaataatgccgattgccaggccgagcgagaaaaagccgccactctggaaaaggaagtggccggtttgcgggaaaagatccaccacttggatgatatgctgaagtcccagcagcggaaggtgcggcagatgattgagcaattgcagaactctaaagccgttatccagtctaaggatgccacaattcaagaactgaaggagaagatcgcctatctggaagctgaaaaccttgaaatgcatgaccgtatggagcatttaatcgaaaaacagatctcccatggtaatttctcgacccaggctcgcgcaaaaacggagaacccagggtcaatcaggatatctaagcctccatctccaaaacccatgcccgtaattcgggttgtggaaacc

SEQ ID NO: 202723 - DNA, 1170 bp, Artificial Sequence
  derived and/or modified sequence
atgaacggaactaggaattggtgtactctggtggatgtgcatccagaagatcaagctgcagggtctgtcgacattctgagactgaccctccagggtgagctgaccggagacgaactggaacacattgcgcaaaaggccggacgtaaaacgtacgccatggtgtcgtcacattccgccggacacagtctggcctctgaacttgtggaatcccacgatggccacgaagagatcatcaaagtctacctcaaaggcagaagcggagataagatgatccatgagaagaacattaaccagctgaaaagcgaggttcagtacatccaggaagcaagaaattgcctccagaaactcagggaggacatctcgtccaagctcgaccgcaatctgggtgactcccttcaccggcaggaaatccaggtggttctcgagaagccgaatggattttctcagtccccaaccgccctgtattcgtcgccacctgaggtggatacttgtatcaacgaggacgtcgagagcctgcggaaaactgtgcaggatctcttggctaaactccaggaggcgaagcggcagcatcaatcggattgcgtggccttcgaggtgacgctgtccaggtaccagagggaggctgaacaatccaatgtagctctgcaacgggaggaagatcgcgtggaacagaaggaagcagaagtcggagagttgcagcgacggctcctgggaatggaaaccgagcaccaggcactcttggcaaaggttcgcgaaggagaggtggctctcgaggaacttcgcagcaacaacgctgattgccaagccgaaagagaaaaggccgcgactctcgaaaaagaggtggccggactgagggaaaagatccaccaccttgacgacatgctcaaatcccaacaacgcaaggtccgccaaatgatcgaacagctgcagaacagcaaagccgtcatccaatcaaaggacgcaactatccaggagctgaaagagaagatagcttacctggaagccgagaatcttgaaatgcacgataggatggaacatcttatcgaaaagcaaatctcccatggaaacttcagcacccaagcaagagcaaagaccgaaaacccaggatcaatcaggatctccaagccgccatcaccaaagccgatgccggtgattcgcgtggtggaaacc

SEQ ID NO: 202724 - DNA, 1170 bp, Artificial Sequence
  derived and/or modified sequence
atgaacggcacaaggaattggtgcactctagtcgacgtgcatccagaggaccaggccgccggctctgtggatatcctgaggctgacgcttcagggcgagctcacaggagatgagctcgagcatatcgcccaaaaagctgggcgaaaaacatacgcaatggtctcttcccactctgcgggccattcccttgcgagtgagctggttgagtcacacgacgggcatgaggaaatcattaaagtgtacttgaagggtcgctccggggataaaatgattcatgaaaagaacatcaatcagttaaagtcagaggtccaatatatccaggaagccaggaactgtctgcagaagctacgcgaggacatttcctcaaaactggacagaaaccttggtgacagtctccacagacaggagattcaggtggttctggagaaaccaaatgggtttagtcaatcacctactgctctttattccagcccaccagaggtggacacctgtatcaacgaagatgtcgaatcactccgaaaaacagtgcaggatctgctcgccaaattgcaggaggctaaaagacaacatcaatctgactgtgtcgcctttgaggtgacactctctaggtatcagcgggaagccgaacaatccaacgtcgcgctgcagagagaggaagacagagtggagcaaaaagaggcagaggtcggagaacttcagagaagattgttggggatggaaactgagcaccaggctctgctggcaaaagtgcgagagggtgaggtggcccttgaggagcttcggagcaacaacgcggattgccaggcagagcgcgagaaagctgctaccttagaaaaagaagtagcaggcctgagggaaaagattcaccatctcgacgatatgttaaagagccagcagcgtaaagtgcgacaaatgatagaacagcttcagaactccaaagcagttatccagagtaaggacgcaaccatccaagagctaaaagagaaaatcgcctatctcgaggccgagaacttggagatgcatgaccggatggagcacctgatcgagaagcaaatttctcacgggaacttctcaacccaggcacgggctaagactgagaaccctgggagcatcaggataagcaaaccccccagtcccaagccaatgccggtgattagagttgtagagaca

SEQ ID NO: 202725 - DNA, 1170 bp, Artificial Sequence
  derived and/or modified sequence
atgaacggcacgcgcaactggtgtacacttgtggacgtccaccccgaggaccaagccgccggaagcgtcgatatcttgaggttgacgttgcaaggggagctgaccggcgacgaacttgagcatattgctcagaaagctggcaggaagacttatgctatggtgtcctcacactccgccggacatagcctggcttctgaactggttgaaagccatgatggccacgaggagataatcaaggtctacctgaaggggcgcagcggcgataagatgatccacgagaagaatatcaaccaactcaagtctgaggtgcagtatatccaagaagcccgcaattgcctgcagaaactccgggaggacatttcctcgaagctggatcgcaatctcggcgactctttacatagacaggagatacaagtcgtgctggaaaagccaaacggcttctcccagtccccgactgccctgtattcatcccctccggaggtggacacatgtataaatgaggatgtggaatcattgcggaaaactgtacaagatctccttgctaaattgcaggaagcaaaacgacagcaccagagcgactgtgtggccttcgaagtgaccctgtcaagataccagagagaagctgagcagagcaacgtcgccctgcagcgcgaagaagaccgcgtggaacaaaaggaagccgaagttggagaactccagcgcaggctcctgggaatggagaccgaacaccaggccttgctggctaaagtccgggaaggagaggttgctttagaggaattgagatccaataatgctgattgtcaagcagagagggagaaggctgctacacttgagaaagaggtagctggtctgagggagaagatccaccacttggatgacatgctgaagagtcaacagcgaaaagtccgtcaaatgatcgaacagttgcaaaactccaaagcagtgattcagagcaaggatgctaccatacaggagttgaaggagaagatagcgtatctagaggccgagaacttggagatgcatgaccggatggaacatctaatcgagaaacaaatttctcatggaaatttttcaacacaggccagagccaagaccgaaaacccggggtcaatcaggatctctaagcctccatctcctaaacccatgccggtgatcagggtggtcgagaca

SEQ ID NO: 202726 - DNA, 1170 bp, Artificial Sequence
  derived and/or modified sequence
atgaatgggactcgcaattggtgcacgctagtagatgtgcatcccgaggatcaggctgcgggctccgtggacatcctgaggttaacactgcagggtgagctgaccggggatgagctcgagcacatagcccaaaaagcaggacggaaaacgtatgccatggttagcagtcattccgctggacactctttggccagtgaactggtggaatcccatgatgggcacgaggagattatcaaggtctacctcaaaggccggagtggggacaagatgatacatgaaaagaatattaaccaactgaagagcgaggtccagtacatccaggaagcacggaactgtctacaaaaactgcgtgaggacatatccagcaagctggacaggaatcttggagattctctccataggcaagagatccaggtggtgctagagaaaccaaatggtttcagccagtcccccacagccctgtattctagcccgcccgaagttgatacctgcatcaacgaagacgtggaatctctccgcaaaactgttcaggacctgctcgcaaagttgcaggaggctaagaggcagcaccagtctgactgcgtggctttcgaagtcacgcttagcaggtatcagagggaggctgaacaaagtaatgtggcactgcagcgggaggaggaccgggttgaacagaaggaggccgaagtgggcgaactgcagagaagactgttagggatggagacagagcaccaagccctccttgccaaagttcgagaaggagaggtggcgctggaggagctgagatccaataacgcagactgccaagcagagagagagaaagcagcaacgcttgaaaaagaagtggccggattgcgagaaaaaatacaccatctggacgatatgctgaagagccagcagagaaaagtgcgacagatgattgaacagctacagaattcgaaagctgtgatccaatccaaagacgccactatccaggaactgaaagagaagatcgcctacctagaggccgagaacctggaaatgcatgaccggatggaacacctgatagaaaagcagattagtcatggcaattttagtacccaggcgcgggccaagaccgaaaatcctggctctattaggatcagcaagcccccctcccctaagcctatgcctgtgattagggtcgtcgaaaca

SEQ ID NO: 202727 - DNA, 1170 bp, Artificial Sequence
  derived and/or modified sequence
atgaacggaacccggaattggtgtaccctggtggacgtgcaccctgaagatcaagcagcgggctccgtcgacattctccggctgactcttcagggggagctgaccggagacgagctggagcacatcgcgcagaaggccgggcgaaaaacttacgcgatggtgtcctcgcatagcgcaggccactcattggcgtccgaacttgtcgaaagccatgatggccatgaagagatcattaaggtgtacttgaaaggacgatcgggggataagatgatacatgaaaagaacataaatcagctgaagtcggaagtgcagtatatccaagaagcacgaaactgccttcaaaaactgcgggaagatatctcctcgaagctggatagaaaccttggagactcccttcaccggcaagagattcaagtggtgctcgaaaagccaaacggtttttcgcagtccccaactgctctgtactcatccccgccagaggtggatacttgcataaatgaggacgtcgaatcccttagaaagaccgtccaggatctgttggccaaacttcaagaggctaaacgccagcatcaaagcgattgtgtggcattcgaagtgactctgtctaggtaccaaagggaggctgagcaatccaacgtagcactccaacgcgaagaggatcgtgtggagcagaaggaagcagaggtcggtgaattgcagagacgtctgttgggaatggaaaccgaacatcaagccctcctggcaaaggtgagagaaggggaggtggcactggaagagttgagatcaaacaacgcagactgtcaagccgaacgagaaaaggcagcaacgctcgagaaggaagtggcaggcctcagggaaaagatacaccatctcgacgatatgttgaagtcgcaacagcgaaaagtgcggcaaatgatcgagcaactgcaaaattcaaaagcagtgatacagtcaaaggatgccactatccaggaactcaaggaaaagattgcatacttggaagcagagaatctggagatgcacgatcgaatggagcatctgattgagaaacagattagccatggaaacttttccacccaggcaagggcgaaaaccgaaaatcccggcagcatcagaattagcaagcctccttctcctaaacctatgcccgtcattcgagtcgtcgaaacc

SEQ ID NO: 202728 - DNA, 1170 bp, Artificial Sequence
  derived and/or modified sequence
atgaacgggacgcgcaattggtgtactctggtggacgtgcatccagaagaccaggccgctggcagcgttgacattttgaggctgactttacagggcgagctcacgggcgacgagctcgaacacatcgcacagaaagcaggtaggaagacctatgctatggtaagttcacactctgccgggcacagtctggcctcagagctggtggagtcccatgacggtcacgaagagatcatcaaggtctacctgaaaggccgatcaggagataaaatgattcatgaaaagaatatcaaccagctgaaatctgaagtgcagtacattcaggaagcccgaaattgcctgcagaaactgcgagaagatatcagttccaaactcgacaggaatctgggcgattctttgcatagacaggagattcaggtggtgcttgagaagcctaacggattttcccagagccccactgccctttacagctcgccgcctgaggtcgatacatgcattaatgaagacgtggagtccctcaggaagacagttcaagacctgttagctaagctccaagaggcgaaaaggcagcaccagagtgactgcgtggcatttgaggttactctatctcgctatcagcgtgaagctgagcagtccaacgtggccttgcagcgggaggaggacagggtcgaacagaaagaggccgaggtcggagaactacagagacggcttctcggtatggagacagaacaccaggcactgctggctaaggtacgtgagggtgaggttgctctggaggagctaaggagtaacaacgccgactgtcaggccgaacgcgagaaggctgccacattagagaaagaagtggccggcctgcgagagaagattcatcaccttgacgacatgttgaagtcccagcagcggaaggtgagacaaatgatagagcagctgcagaactctaaagccgtgatacagagtaaagacgcgacaatccaggaattaaaggagaagatagcctatctagaagccgaaaatctggaaatgcacgataggatggagcatttgatcgagaaacagattagccacggtaacttttcaacccaggctagggctaaaacagaaaatccgggctcaattcgcatctccaagccccctagtcccaagccaatgccggttattcgggtggtggagaca

SEQ ID NO: 202729 - DNA, 1170 bp, Artificial Sequence
  derived and/or modified sequence
atgaacggaactcgcaactggtgcaccctcgtggacgtgcacccggaggaccaagctgcaggcagcgtggatattctgagactgacgctgcaaggcgaactgacgggggacgaactcgagcatatcgcacagaaggcggggcggaaaacttatgctatggtgtcatcacactcggccgggcactccctcgcctccgaactcgtcgaaagccacgatggacacgaagaaatcatcaaagtttatctgaagggccggtccggcgataagatgatccatgaaaagaacatcaaccaactgaagtcggaggttcagtacattcaggaggcccgcaactgtctccagaaacttcgggaagatatctcatcgaagctggatagaaatctgggagactcgctccaccggcaggaaatccaggtggtgcttgaaaagccgaatggattttcgcaatcccctaccgcactgtactcctcgcccccggaggtggacacctgcatcaacgaggacgtggagagcttgagaaagactgtgcaggaccttctcgccaagctccaagaagcaaaacggcagcatcagagcgactgtgtggcgttcgaagtcaccttgtccagataccaacgcgaggccgagcaatcgaacgtggcccttcagcgggaagaggatcgcgtcgaacaaaaggaagccgaagtcggggaactgcagcggcgactgctgggaatggaaaccgagcatcaggcgctgctggccaaggttagagaaggagaggtggctctggaagagctcaggtccaataatgcagattgtcaagccgaacgcgagaaggcagccactttggaaaaggaggtcgcaggactgcgcgagaaaattcaccacctcgacgacatgctcaagagccagcagcgcaaggtgaggcagatgattgagcagctgcagaattcgaaggccgtgatccagtctaaagatgcaacgatccaagaattgaaggagaagatcgcctatctggaggcggagaatctggagatgcatgacaggatggaacatctgatcgaaaagcaaatctcccacggaaacttctctacccaggcgcgcgccaaaaccgaaaacccaggaagcatcagaatctcgaagcctccatctccgaaaccaatgccggtcatccgcgtcgtcgaaact

SEQ ID NO: 202730 - DNA, 1170 bp, Artificial Sequence
  derived and/or modified sequence
atgaatgggacacgcaattggtgcacgttggtagatgtgcaccctgaagatcaggccgctggaagcgtcgatatattgcggctgacgctgcaaggtgaactcaccggcgatgagctcgagcacattgcgcagaaggctggacgcaaaacttacgcaatggtgtcctcacattctgctggccactctctggcttctgagttggttgagagccacgacggtcacgaggagatcatcaaggtgtatctcaagggacgcagtggcgacaaaatgattcatgagaaaaacataaaccaactgaaaagtgaagtgcagtatatccaagaggcaaggaattgtttgcagaagctgcgggaagacatctcatctaagctggaccggaacctgggggattcccttcacaggcaggaaatccaggtggtccttgaaaaaccaaacggattctcacagagtccaacagcactgtactcctccccacctgaagttgacacttgcattaacgaagatgtcgaatccttgcggaaaactgtacaggatcttctcgccaagctgcaggaagctaagagacagcaccagtctgactgtgtcgcatttgaggtcactctgagtcgatatcaaagagaagctgaacagtccaacgtggctctccagagagaggaagaccgagtcgagcagaaggaagccgaagttggcgagttgcaaaggagactgttgggcatggaaaccgaacatcaggccctgcttgccaaggtgagagagggtgaggtggcacttgaggagcttcgaagcaacaacgcagactgtcaggccgagagggagaaggcagcaactctggagaaggaggtggccggccttcgggaaaaaatccatcacctggatgacatgctgaaatctcagcaacgaaaagtgaggcagatgatagaacagctccagaactcaaaggctgtcatccagtctaaagacgccaccatacaggaattgaaagagaagatcgcttatctggaggccgaaaatctggaaatgcacgatcggatggagcatttgatcgaaaaacagatcagccacggcaactttagcacgcaggctagagcaaaaactgaaaatccaggatccatcaggatttctaaaccgcctagcccaaagccgatgcctgttatccgcgttgtcgagact

SEQ ID NO: 202731 - DNA, 1170 bp, Artificial Sequence
  derived and/or modified sequence
atgaacggaactagaaactggtgtaccctcgttgacgtgcacccggaagatcaggcggcgggaagcgtggacatcctgagactgactctccaaggtgaactgactggagacgagctggaacacatcgcccaaaaagcgggccgcaaaacctacgctatggtatcgtcgcactcggctggccactcccttgcatccgagctcgtcgaatcacatgacggccatgaagaaatcatcaaggtgtacctgaagggaagatccggagacaaaatgatccatgaaaagaacatcaatcaactgaaaagcgaagttcagtacattcaggaggcccgcaattgcctgcaaaagctccgggaagacatctcatccaagctggatcgcaacctcggcgactccctccaccgccaagaaattcaggtcgtgttggagaaacccaacggattctcccagagcccgaccgccctctactcgagcccgcctgaggtggatacctgcatcaacgaggatgtggagagcctgcgcaaaacggtccaagatctgctggccaaactgcaagaagctaaacgccagcatcagtcggactgcgtggcgttcgaagtgaccctgtcccggtaccagagggaggcagaacagtcgaacgtggccctccaacgcgaagaagaccgggtggagcagaaggaagccgaagtgggagaactgcaacgccggttgttgggaatggaaaccgagcaccaggctctgttggcgaaggttcgcgagggagaggtcgccctggaagaactgcgctcaaacaacgcagattgtcaagcggagcgtgagaaggcagccacgctggagaaagaagtggccggattgcgcgaaaagatccatcacctggacgacatgctgaagtcccagcagagaaaagtccgccagatgatcgaacagctgcagaattcaaaagccgtgattcagtccaaggatgcgaccatccaggaactgaaggaaaagattgcttacctggaagcagagaacctggagatgcacgaccggatggagcatcttatcgaaaaacagatctcacacggaaacttcagcactcaggcaagagccaagaccgaaaaccccggctcgatccgcatcagcaagcccccgagccccaagccaatgccagtgatcagagtggtcgaaact

SEQ ID NO: 202732 - DNA, 1170 bp, Artificial Sequence
  derived and/or modified sequence
atgaatggaacgagaaattggtgtactcttgtcgacgtgcatcctgaggatcaagcagccggctcggtggatatcctcaggctgactctgcagggtgaactgaccggagatgagctggaacacatcgcacagaaggccggccgcaagacgtacgcaatggtgtctagtcactcagcaggccattccctggcatcggaacttgtggaatcacacgatggacacgaggagatcattaaggtgtaccttaaaggacgaagcggagacaagatgattcatgagaagaacattaaccagctcaagagcgaagtccaatacatccaagaggcccgtaactgtctccagaagttgagggaagatatttcatccaaacttgaccgtaaccttggagactcgcttcatcggcaagagattcaagtggtcctggaaaaaccaaacggattttcccaaagccctaccgccttgtactccagcccgcccgaggttgatacctgtattaacgaggacgtggagtcactgcgcaaaaccgtccaagatctgcttgcgaagctgcaggaagccaaaaggcagcatcagtcagattgtgtcgcatttgaagtgacgttgtcccggtaccaacgcgaggccgagcagtctaacgtggcattgcagagagaagaggaccgcgtcgaacagaaagaggcagaagtgggcgagcttcaacgtaggctgctggggatggaaaccgaacaccaagcactcctggccaaggttcgggagggggaagtcgcactggaagaactgcgttcgaacaacgcggattgtcaagccgagagagagaaagcggcaaccctcgaaaaagaagtcgctggccttcgggaaaagatacaccatctggatgacatgcttaaaagccaacagagaaaagtcaggcagatgattgagcaactccagaattcgaaggcagtgatccaaagcaaagatgcaaccatccaagaactcaaggaaaagatcgcataccttgaagcagagaaccttgaaatgcatgacagaatggaacatttgattgaaaaacaaatttctcatgggaactttagcactcaggccagagccaaaactgagaatcccggatccattagaatctccaaaccaccaagccctaagcctatgcctgtgatccgcgtcgtggagacg

SEQ ID NO: 202733 - DNA, 1170 bp, Artificial Sequence
  derived and/or modified sequence
atgaacggcaccaggaactggtgtacccttgttgatgttcatccagaggaccaagctgctggatcggtggatattctgagacttactttgcaaggtgaactcactggtgatgaacttgagcacatagctcaaaaagccggtaggaagacatacgcaatggtttcttctcattcagcaggacactctttggcttctgagttggttgagtctcacgatggccatgaagagataataaaggtatatctgaaggggcgctcaggtgacaaaatgattcacgagaagaacatcaatcaattgaagtcagaagtgcaatatatacaggaagcaaggaactgcttgcaaaagcttcgagaagatatttcatcgaagcttgatcgtaatctgggagactccctccatcgccaagaaattcaagttgttcttgaaaagccaaatggattctcacaatctcctacggctttgtacagttcacctcccgaggttgacacttgtatcaatgaggacgtcgaatcccttaggaagactgttcaagatcttttggctaagttgcaggaagcaaaacgtcagcaccagtctgattgcgtagcattcgaagttactttgtcaagataccaaagggaagccgagcagtcaaacgttgcacttcagcgtgaggaagatcgcgtagagcaaaaggaagcagaagttggagaattgcaacgaaggttgctaggaatggagactgagcaccaagctcttttggctaaagtccgtgagggcgaagttgccctggaggagcttcggtcaaataatgctgactgccaggctgagcgagaaaaggctgctacccttgaaaaggaggtagccggacttagggaaaaaattcatcatttggatgacatgctcaagtcacagcagagaaaagttagacagatgattgaacaattacaaaattcaaaggcagtgatccaatccaaggatgccacaattcaagaattgaaggagaaaatcgcttatctcgaagcagagaatttggagatgcatgacagaatggaacacttaattgaaaaacaaatctctcacggaaacttttcaacacaggcccgcgctaagactgaaaaccccgggtctattcgtatatctaagccacctagtcccaaaccaatgccagttattcgtgtggtggaaaca

SEQ ID NO: 202734 - DNA, 1170 bp, Artificial Sequence
  derived and/or modified sequence
atgaacgggacaagaaactggtgtaccctggtcgatgtgcatcccgaggaccaagccgcgggtagcgtggacattcttcggcttacgttgcagggcgagcttacaggggacgagctggaacatattgcacagaaggcaggcaggaaaacctacgcaatggtcagcagtcatagcgccggtcactctcttgcctcagaactcgtcgagagtcacgatgggcacgaagaaattattaaggtttatctgaagggccggtctggcgacaagatgattcatgagaagaacatcaaccagctcaaaagcgaggtgcagtacatccaggaagcacggaactgcctgcagaaactgcgcgaagacatctcatctaaattggaccggaatctcggcgatagcttgcaccgccaggaaattcaggtagtcctggagaagcctaacgggttctctcagagccccaccgctctgtattcttcccctccggaggttgacacatgcattaatgaggatgtcgaaagtctgagaaagacggtgcaggatctgctcgccaaactgcaggaagcgaagagacagcatcagtccgactgcgtggcgtttgaggtaactctgagccggtatcagagagaggcggaacaaagcaatgtggccctgcagcgcgaggaggacagagtcgagcagaaggaagcagaggtcggggagctccagcgcaggctgctgggcatggagacagagcatcaggccctcctggccaaagtcagggagggggaggtggccctcgaggagcttcgctctaataacgcggactgccaagccgaacgcgaaaaggcggcaacactcgaaaaggaagtcgctgggctcagggaaaaaattcaccatttggatgatatgctgaagtctcaacaaagaaaggtcaggcagatgatagaacagcttcagaatagtaaggccgttatccagagcaaggacgccaccatccaggaactgaaggaaaagatcgcttaccttgaagcggaaaatctcgaaatgcacgatcggatggaacacttgatcgaaaaacagatttctcacggcaatttcagcactcaggctcgcgctaaaactgaaaatcccggttccatccggatcagtaagccaccaagcccgaagccaatgcccgtcatacgcgtggtggagacc

SEQ ID NO: 202735 - DNA, 1170 bp, Artificial Sequence
  derived and/or modified sequence
atgaacggaactaggaactggtgtactcttgtcgatgtgcacccggaggaccaagccgcggggtcggtggatatcctcaggctgaccctccaaggtgaacttaccggtgatgagttggagcatatagcacaaaaggctggacggaaaacctacgcaatggtatcttctcattctgccggacatagcctcgcttcggaacttgtcgagtcgcatgatggtcacgaggagattatcaaggtgtacctcaagggaagatcgggggataagatgattcatgaaaagaacattaaccagctgaagtcggaggtgcagtacattcaagaagcccgaaattgccttcaaaagctgagggaagatatttcatcgaagctggatcgcaatcttggtgatagcctgcacaggcaggaaattcaggtggtgcttgaaaaacccaacggcttttcacagtcgcccacggcactgtactcatcgccacctgaggtcgacacctgcattaatgaggatgtggagtcgcttcgaaagaccgtccaagatctgcttgcaaaactgcaggaagccaagcgacagcatcagtccgattgcgtggcctttgaagtgactctgagcaggtaccagagagaagcagaacaaagcaatgtcgctcttcagcgggaggaggaccgtgtggaacaaaaggaagcagaagtgggtgaacttcaaagaaggctgctcggaatggaaaccgaacatcaagcactgctcgcaaaggtccgtgaaggagaagtcgcgctggaagaacttcgttcgaataacgcagactgtcaggcagaaagagaaaaggctgccacgctggaaaaggaagtcgcgggactgagagaaaagattcaccatctggacgatatgcttaaaagtcaacaaaggaaggtgcggcaaatgatcgagcaactgcaaaattccaaagcagtgatccagagcaaggatgcaactattcaagaactcaaagaaaagatcgcataccttgaggccgagaaccttgaaatgcatgatcgtatggaacaccttattgaaaagcaaatctctcacggaaacttctcaacccaggcacgagcaaagaccgaaaaccctgggtcgattcgcatctccaaaccaccttcgcctaagcctatgcccgtcattcgcgtcgtggaaacc

SEQ ID NO: 202736 - DNA, 1170 bp, Artificial Sequence
  derived and/or modified sequence
atgaacggcactcgtaattggtgtacactggtcgacgtacaccccgaggatcaggcggcgggttccgtcgatattctgcggctgacactccaaggagagctgacgggcgatgagcttgagcacattgcccagaaggctggccgtaagacctacgcaatggtgtcatcccatagcgctggccactcgttagccagtgagcttgttgagagccacgacggtcacgaggagatcattaaggtttacctgaagggtcgtagcggtgataagatgatccacgaaaagaacattaaccagttgaaaagcgaggtccagtacatccaggaggctcggaactgtctgcaaaagcttcgcgaggacatttccagcaagctggatcgaaacctcggagactctctgcaccgccaagagattcaggttgtcctggagaagcccaacggcttttcccagagccctacggcgctgtatagcagcccccccgaggtcgatacgtgcatcaacgaagacgtcgagtccctgcggaagaccgttcaagatttgttggcgaagctccaggaggccaagcgccagcaccagtcggactgcgtcgcgtttgaagtgaccctgtctcgttatcagcgtgaagctgagcagtccaatgttgccctccagcgcgaggaggaccgagtagagcagaaggaggcagaggtgggtgagcttcagcgtcgtcttcttggcatggagactgagcaccaggccctgttggcgaaggtccgggaaggggaagtagccctggaagagctacgctctaacaacgccgattgtcaggccgagcgcgagaaggctgctaccctagaaaaggaagtggccggtctccgggagaagattcaccacctggacgatatgcttaagagccagcagcgcaaggtcaggcaaatgatcgaacagcttcagaactccaaagctgtcatccaatctaaggacgctaccattcaggagttgaaggaaaaaatcgcctacctggaggccgagaacctggagatgcacgaccgtatggaacacctgatcgaaaagcagatttcgcacggtaacttctcgacacaggcccgcgccaagacggagaaccccggctcgattcgaatctccaagcccccttcccctaagcccatgcccgtgattcgggttgtagagacc

SEQ ID NO: 202737 - DNA, 1170 bp, Artificial Sequence
  derived and/or modified sequence
atgaacgggacacgcaattggtgtacactggtggatgtgcaccctgaggatcaggccgctggctcagtagatattcttagattgacactgcaaggcgaattgacaggtgacgagctggagcacattgcccagaaagctggaagaaagacctacgcgatggtatctagccactcagccgggcacagcttggcgtccgaactggtcgaatcacatgatggacatgaagaaattatcaaagtgtacttgaaggggcggtctggcgataagatgattcacgagaaaaatatcaaccaactcaagtcagaagtgcagtatatccaggaagctcggaactgtcttcagaaactcagggaagatatttcaagcaagctggaccgcaacctcggtgattctctgcacagacaggagatccaggtggtcctggaaaagcccaacggtttctctcagtctccaacagccctgtattcaagccctcctgaggttgacacttgcattaatgaggacgtggagtccctgagaaagaccgtgcaggacctgcttgcaaagttgcaggaggctaaacgacagcaccaatctgactgtgtggcctttgaagtaaccctgtctaggtatcagcgtgaagctgagcagagtaacgtcgccttgcagcgggaggaagatcgcgtggagcaaaaagaagccgaagtgggagagcttcagcgacgccttctgggcatggaaaccgagcaccaggccctcttagcaaaggtgcgcgaaggcgaagtagccttggaagagctgaggagcaataacgccgattgccaagccgagcgcgagaaggcagccactctggagaaggaagtggctggacttcgcgaaaaaatacaccacctcgatgatatgcttaagtcccaacagcggaaagttagacagatgatcgaacaactgcagaatagcaaggctgtaatccagtctaaagacgccaccatccaggaactgaaagagaaaatagcttacttggaggccgaaaacctggagatgcatgaccgaatggaacaccttatcgagaagcagatttctcatggcaacttctctactcaggctagggcaaaaaccgagaatccaggatcgatcagaatatctaaacccccatctcccaaaccaatgcccgttatccgggtcgtggaaacc

SEQ ID NO: 202738 - DNA, 1170 bp, Artificial Sequence
  derived and/or modified sequence
atgaacggaaccagaaactggtgcacactggttgacgtccatcccgaggaccaggccgctggtagcgtggatattctgaggctcacactgcagggtgaattgactggtgacgaacttgagcacatcgctcagaaggccggacgtaagacttacgcaatggtgtccagtcacagcgctggccacagtctggcttccgagctcgtagagtcacacgatggtcacgaggagatcattaaggtgtatctgaagggtcgctctggcgacaagatgatccacgaaaagaatataaatcagctgaagagcgaggtccagtatatccaggaggctaggaactgccttcagaagcttagagaagacatatcttctaagctggatagaaacctcggcgactccctccacaggcaagagatccaggttgtgctcgagaaacccaacggattctctcagtctcctacagctctgtactctagtcctcctgaagttgatacatgcattaacgaagacgtcgagtccctgaggaagacagtacaggaccttctggcaaagcttcaagaagcaaagagacaacatcagagcgactgtgtggcttttgaagtcacactctcaaggtaccaacgcgaggccgagcagagcaacgttgccctccagcgtgaagaggatagagtggagcagaaggaggctgaggttggagaactgcagagaaggctgcttggaatggagacagagcatcaggctctgctcgccaaggttcgtgagggagaagtcgccctcgaggagctgaggagtaacaatgcagattgtcaggcagagcgcgagaaagccgccacactcgagaaagaggttgctggactcagagagaaaatccatcaccttgacgacatgctgaagagccagcaaagaaaggtgaggcagatgattgaacagttgcagaactccaaggctgtcattcagagtaaagatgccaccatccaggagctgaaggaaaagatcgcttacctcgaggcagagaacctggagatgcacgaccgcatggagcacctgatcgaaaaacagattagtcatggtaactttagtacccaggctcgtgccaaaacagagaacccaggctccatacgtatttcaaagcctccaagcccaaagcctatgcctgttatacgtgtcgtggaaacc

SEQ ID NO: 202739 - DNA, 1170 bp, Artificial Sequence
  derived and/or modified sequence
atgaacggaactcggaactggtgtacgctggtcgatgttcacccagaagatcaagcggcaggatctgtggacatcctccggctcactctgcaaggagagctcactggggatgagctcgaacacattgcacagaaagccggacgaaagacctacgcgatggtgtcatcccactcggccggacattcgctggcctcagagctggtagaatcccatgatggacacgaggaaatcatcaaggtttacctgaagggcagaagcggcgacaaaatgatccacgagaaaaacatcaaccagctgaagtcggaagtccagtacatccaggaggcacggaactgcctccagaagctgcgcgaggatatttcttcgaaacttgataggaacctgggcgattccctgcaccgccaggagatccaggtggtgctcgaaaagccaaacggattttcacagtcgccgactgccttgtactcatctcctcccgaggtggacacctgcatcaacgaggacgtcgaatcgctccggaaaactgtccaggatctgctggccaagttgcaggaagcgaagaggcagcatcagtccgactgtgtcgcgttcgaggtgactctgtcgagataccaaagggaggcagagcagagcaacgtggcgttgcagagagaagaagatcgcgtggaacaaaaagaagcagaagtgggcgagctgcagagaaggctcttgggaatggaaaccgaacatcaggccctcttggcaaaggtgcgggagggggaggtggccctggaggagctgcggagcaataacgccgactgccaagcagaacgcgaaaaggcggcaactctggagaaggaggtggccggtttgcgggaaaagatccaccacctggacgacatgcttaaatcgcaacagcgcaaggttaggcaaatgatcgagcaacttcaaaactccaaagccgtgattcagtccaaagatgccaccatccaggaacttaaggaaaagatcgcctacctggaggctgagaatttggagatgcatgatcgtatggaacacctgattgagaaacagatctcgcacggaaacttctcaacccaggcgagagccaagactgaaaacccgggaagcattcgcattagcaaacccccatccccgaagccgatgccagtgatccgggtggtcgagact

SEQ ID NO: 202740 - DNA, 1170 bp, Artificial Sequence
  derived and/or modified sequence
atgaacgggacccgcaattggtgcaccctggtcgacgtgcacccggaggaccaggctgctgggtcggtcgatatcctgcgcctcaccctgcagggagaattgaccggagacgagctggagcacattgcccaaaaagctggtcgcaaaacctatgcgatggtcagctcgcattccgcgggccactcgctggcctcggaactcgtcgagtcccacgacgggcatgaagaaatcattaaggtgtacctcaaggggcgctcgggagacaagatgatccacgagaagaatatcaaccaactgaaatccgaggtgcagtacatccaggaagcaagaaactgtctgcagaaactcagagaggacatttcctcaaagctcgataggaatctcggagactcgctgcatcgccaggaaatccaagtggtgctggagaagccgaatggattcagccagtcccctactgctctgtattcctcacctccggaagttgacacttgtatcaacgaagatgtggagagcttgaggaaaactgtccaagatctgttggccaaactccaggaagccaagcggcagcatcaatcagattgcgtggcgttcgaagtgactctttcgcggtaccagcgcgaggcggaacagagcaacgttgcactccaacgcgaggaggacagagtggagcaaaaggaagccgaggtgggagagctgcagcgccgtctgctggggatggagactgagcatcaggctttgctcgcgaaagtccgggaaggagaagtggcactcgaggaactgcgctcaaataacgccgactgccaggccgaacgcgaaaaggcagccacgctggagaaggaagtggcgggactcagggagaagatccaccatctggacgacatgctgaagtcccagcagcggaaggtccgacagatgatcgaacaactgcagaactcgaaagccgtgatccagtccaaagacgccaccatccaggagctgaaggagaaaatcgcctacctcgaagccgagaacctggaaatgcacgatagaatggaacacctgatcgagaagcagatctcgcacggcaacttcagcacccaagcgagagccaagaccgagaatcccggatccatccgcatctccaaacctccgagcccaaaaccgatgccggtcatcagagtcgttgagact

SEQ ID NO: 202741 - DNA, 1170 bp, Artificial Sequence
  derived and/or modified sequence
atgaacggcacgagaaactggtgcaccctggtcgacgtccacccagaagatcaggcagcggggagtgttgacatcctgagactgaccctgcaaggcgagctgaccggggacgagctggagcacatcgcacagaaagccgggcgaaagacttacgctatggttagctcgcactcggcaggtcatagcctggcgtcagagctcgtcgaaagccatgacgggcacgaggaaatcattaaggtgtacctcaaaggacggtccggcgataagatgatccacgaaaagaatatcaatcaactgaagtcggaagttcagtacatccaggaagcgcgtaattgtctgcaaaagctgagagaagatattagctcaaagctcgacagaaacctcggagattcacttcatcggcaggagatccaggtcgtgctcgaaaaaccaaacggattctcccagagcccgactgctctctactcgtccccgccagaggtggacacgtgcatcaacgaagatgtcgagtcattgaggaaaacggtccaggatctcctggcaaagctgcaggaggccaagcggcagcaccagtctgattgcgtggcatttgaggtcacgttgagccgctaccaaagagaagcggaacagagcaatgtggcgctgcagagagaagaagatcgcgtcgaacaaaaggaagcagaagtgggagaattgcagaggcgcctgctgggaatggagactgaacaccaagcactcttggccaaggtgcgggaaggagaggtcgcactcgaggaactccggtccaacaacgccgattgtcaggctgagcgcgaaaaagccgcgaccctggaaaaggaggtcgcaggactgcgggagaagatccatcatttggatgacatgcttaaatcccaacagcggaaggtcagacagatgatcgaacagttgcaaaactcgaaggccgtcatccaatcgaaagacgcgactatccaggaactgaaagaaaagatcgcgtacctggaagcagaaaatctcgagatgcatgacagaatggaacatctgattgaaaagcagatttcacacggcaatttctcaactcaagcgcgcgccaagaccgagaaccctgggtccatccggatatcgaagccgccaagcccaaagcccatgcctgtaatccgggtggtggaaacc

SEQ ID NO: 202742 - DNA, 1170 bp, Artificial Sequence
  derived and/or modified sequence
atgaacggcactaggaactggtgcacactcgttgatgtgcaccctgaggatcaggctgcgggttccgtcgacattttgcgccttacattgcaaggggagctcactggggatgaactcgagcatatcgcgcagaaagccggtcgaaaaacatatgcaatggtaagcagccatagtgctgggcactcattggctagtgagctcgtcgaatcccatgacggacacgaggagattatcaaagtctacctgaaagggcgaagtggcgacaagatgatacatgagaaaaacatcaatcagctgaaatctgaggttcaatacatccaggaggcacggaactgccttcagaaactccgcgaggatattagctcaaagttggatcgaaacctcggggattctctgcacaggcaagaaatccaggtggtcttagagaaaccgaatgggtttagccaaagccccactgctttgtatagcagtcctcccgaggttgacacttgcatcaatgaggacgttgagagccttcggaaaacggtgcaggacctgctcgccaagctgcaggaggccaaacgacaacaccagagcgactgtgtggcctttgaggtgacactctctaggtaccagcgagaagctgagcaatcgaacgtggcccttcagcgagaagaggatcgcgtcgagcaaaaagaggctgaagtcggggagctgcagcgacggctgcttggaatggaaaccgaacatcaggctctgttggccaaggtgcgggagggcgaggttgccctcgaagagctgagaagtaataatgccgattgccaggcagagagggagaaggccgccacattggaaaaagaggtggcaggactgcgagagaagatccatcacttagatgatatgctcaaatcgcaacaaagaaaggtgaggcagatgatcgagcagttgcagaacagcaaagctgtgatccagtccaaggacgccaccattcaggagctgaaagaaaaaattgcataccttgaagctgaaaacctggagatgcatgatcgtatggaacacctgattgaaaaacagatttcccacggaaactttagcacgcaagcccgagcgaaaacagaaaaccccggatctattcgcatcagcaagcccccgtcacccaaacctatgcctgtgattcgtgtggtagaaacc

SEQ ID NO: 202743 - DNA, 1170 bp, Artificial Sequence
  derived and/or modified sequence
atgaatggaacaaggaattggtgtacactggttgatgtacatcctgaagatcaggcagctgggtcggtggacatcctcaggttgactctccagggagagctcactggtgacgagcttgaacatattgcgcagaaggccggtcgcaaaacatacgccatggtttcaagccatagtgccggccacagcctggcctctgaattagtggagagccacgacggccacgaggaaatcatcaaagtttatcttaagggacgaagtggcgataaaatgatccatgaaaagaacatcaaccagctcaagagtgaggttcaatacattcaggaagcccgcaattgcctccagaagctgagggaggacatttcatcgaagctcgatagaaacctgggtgattcactgcatcgtcaggagatccaggtcgtactagagaagcccaatggattctctcagagcccaacagcattatacagtagcccaccagaagtggacacctgcatcaacgaagacgtcgaaagcctgaggaaaaccgtccaggatctgctcgctaagctccaggaagccaaaagacagcatcagtctgactgtgtggctttcgaagtaaccctgagccggtatcagcgagaagcagagcagagcaacgtggctcttcaaagagaagaggaccgtgtcgagcagaaggaggctgaggtcggggaactacagcggcggcttctgggcatggaaactgagcaccaggccttgctcgcaaaagtgcgggagggagaggttgctctcgaggagttgcgatctaacaacgccgactgccaagcggaaagagagaaggctgccactttggagaaggaggtggccggcctgcgtgagaaaattcatcatctcgatgatatgctgaagtcccagcagaggaaggttaggcagatgattgagcagctgcagaattctaaagcagtgatccagtcgaaggacgcaactatccaggagctgaaggaaaaaattgcctatctggaggcagagaatctagagatgcacgatcggatggaacacctaatcgagaaacaaatctctcatggaaacttttccacgcaagctagagcaaaaacggagaatcctggttcgattcgaatatccaagcctccatcccccaaaccaatgcctgtgatcagggtggtggagacg

SEQ ID NO: 202744 - DNA, 1170 bp, Artificial Sequence
  derived and/or modified sequence
atgaacgggaccaggaattggtgcacccttgttgatgtacaccccgaggatcaggcggccggtagcgtggacattttgaggctaacccttcaaggcgaactgaccggagacgagttggagcacatcgctcagaaagcgggacgcaagacatacgccatggtctcgtcacattctgcgggtcacagtctggcaagcgagttggtggaatcccatgacggccacgaagagatcatcaaagtgtacctcaaggggaggtcgggcgataagatgatacacgaaaagaatatcaaccagctgaaaagtgaagttcaatacattcaggaggcccgcaattgtctgcagaagcttcgagaagatatatcttccaagctggatcggaatctcggcgatagcctccaccggcaggagatccaggtcgtgcttgagaagccgaacggctttagccagtcacctacagctctctactctagccccccggaagtggacacctgcatcaatgaggacgtagagagtcttcgaaagaccgttcaggatctcttggccaaactgcaagaggcaaaacggcagcaccagtctgattgcgttgcattcgaagtgactctttcccgttaccagcgagaagcggaacagagcaatgtcgcactgcaacgggaggaggacagagtggagcagaaggaagcagaggtgggcgaactgcagcggagactgctgggcatggagacggagcatcaggctctgctagccaaagttcgagaaggcgaagtcgctctggaggagctgaggtctaataacgcagattgccaggctgaacgggagaaggccgcgaccctggagaaagaggttgccggtttgcgcgagaagatccatcacctcgatgacatgttaaagtcccagcagaggaaggtgaggcagatgattgagcagctgcagaacagcaaggcagtgatccaatcgaaggatgcaacaatacaagagttgaaggagaagatcgcgtacttggaggccgaaaacctagagatgcatgaccgtatggagcatctgatcgaaaagcagatttcccatggcaacttcagcactcaggcgcgtgccaaaaccgagaaccctgggtctatcaggatttcaaagcctccatcccctaaacccatgcccgtgattcgagtggtcgaaacc

SEQ ID NO: 202745 - DNA, 1170 bp, Artificial Sequence
  derived and/or modified sequence
atgaacggtacgagaaactggtgtaccctcgtggatgttcacccggaggaccaggccgccggatccgtcgatatcctgagactgacccttcaaggagagctgactggcgacgagttggagcacattgcccaaaaggcagggcggaaaacttacgctatggtatcaagccattcggccggtcactcgctggcctcggaactcgtggaatctcatgatggccatgaagaaatcatcaaggtgtacctgaaggggcggtcaggtgataagatgatccacgagaaaaacatcaaccaattgaagtcagaagtccaatacatccaagaagcacggaactgcctgcagaaattgcgcgaagatatctcctcgaagctggaccgcaatctgggagactcccttcaccggcaagagatccaggtggtcctcgagaaacccaatgggtttagccaatcacctaccgcgctgtattcaagtccacctgaggtggacacttgcattaatgaagatgtggaatcgttgcgcaagaccgtccaggacctgctggctaagctgcaggaagccaagcgccagcaccagtcggactgtgtcgctttcgaagtcaccctgtccagataccaacgcgaggctgagcagtcgaatgtcgcgcttcagcgcgaggaagatcgcgtggaacaaaaagaagctgaggtcggagagcttcaaagacggctcttgggcatggaaactgaacatcaggcgctgctcgctaaagtgcgggaaggggaagtggccctcgaggagctgcgctcgaacaacgcggactgccaggcggagagggagaaagcagcaactttggagaaagaagtggccggactgcgtgagaagattcatcacctggacgatatgctgaagtcgcagcaacggaaggtgaggcagatgatcgaacaactgcaaaattcgaaggcggtcatccagtccaaggatgccaccatccaggaactgaaggagaagatcgcctaccttgaggccgagaatctggaaatgcatgaccgcatggagcatctgatcgaaaagcagatatcgcacggcaacttctctacccaagcaagggccaagactgagaaccctggaagcatcaggatttcgaaacccccatcccccaagccaatgccggtgatccgcgtagttgaaacc

SEQ ID NO: 202746 - DNA, 1170 bp, Artificial Sequence
  derived and/or modified sequence
atgaatgggacacgaaactggtgcaccttggtggatgtccatccggaggatcaagccgccggtagcgtcgacatcctgcggctgacgctccagggggaactgacaggagatgagcttgagcacattgctcaaaaggccggacggaaaacttatgcaatggtaagcagccatagtgccgggcattccctggcaagtgagctcgtggagagccatgacggacatgaagagatcatcaaggtttacttgaagggtaggtccggggataagatgatccacgagaagaacatcaaccagttgaagagcgaagtgcagtatatccaggaggctagaaattgccttcaaaagttgagagaggacatttcttctaaactggaccgcaatctgggcgacagcttgcatagacaggagatccaggtagtgctcgaaaagcccaacggcttttctcagagccctactgcactgtattcaagcccgccggaagtggacacttgcattaatgaagacgtcgagagtctgcggaagaccgttcaggacctgcttgctaagctgcaggaggccaaaagacagcaccagagcgattgcgttgcttttgaggttacactttctcgctaccagagggaagctgagcagtccaatgttgccctgcagcgagaggaagatagggtcgaacagaaggaggcagaagtcggggagcttcagcgccgactgttgggcatggagacagaacaccaagcactcttggccaaagtgagggaaggcgaggtggcattggaggagctcaggtccaacaatgctgactgccaggccgagcgggagaaggctgccaccctcgagaaggaagtggccggcctccgcgaaaaaatacaccacttggacgacatgctcaaatctcagcagcgcaaagtccgacagatgatagagcagctgcagaatagcaaggctgtcattcagagcaaagacgctaccattcaggaactgaaggaaaaaatcgcttacctcgaggccgagaatttggaaatgcacgatcggatggagcatttgattgaaaagcaaatctcccacggaaacttctccacccaagctagagccaagactgagaatccaggatctatccggatatctaagcccccttccccaaagccaatgccagtaatcagggttgtggagaca

SEQ ID NO: 202747 - DNA, 1170 bp, Artificial Sequence
  derived and/or modified sequence
atgaatggaacccggaattggtgtaccctagttgacgtccaccctgaggaccaagctgctgggtccgtcgatattcttcggctgacattgcagggggagctgaccggcgacgaactggaacatattgcgcagaaagcaggaaggaagacctatgccatggtaagttctcattcggcgggccattcgctggcatctgagttagtggaaagccatgatggacatgaagagatcattaaagtgtatttgaaggggcggtccggcgacaagatgatccacgagaagaatatcaatcagctcaaaagtgaggtccagtacattcaggaggcccgtaactgtcttcagaagcttcgtgaggatatatcaagcaagctggacagaaatctcggcgattctctacatagacaggagattcaggtagtcctggagaagccaaatggatttagccagagcccgacagctctgtacagcagtccgccagaagtcgacacctgtatcaacgaagacgtcgagtccctcagaaaaactgtacaggatttgctggcgaagttgcaagaagcaaaaagacagcaccaaagcgactgtgtcgcatttgaggtgacactttcacggtatcagagggaggctgagcaatcaaatgtggcccttcagcgggaggaggaccgggttgagcaaaaagaggccgaagttggagagctccagcgccggttgctgggaatggagactgagcaccaggctttgctagcaaaggtaagggagggcgaggtggctctggaagaattgcggtcaaataacgctgattgccaagctgagagagagaaggctgccacattggagaaagaggtggcaggactgcgcgagaaaattcaccatctggatgacatgttgaagagccagcaaagaaaagtgaggcagatgatcgagcagctgcagaactccaaagcggtgatacagagtaaagacgccactatccaggagctcaaagagaagatcgcatacctggaggccgaaaatctagagatgcacgaccggatggaacacttgatcgaaaaacagatcagtcatgggaatttttcaacccaagccagggccaagacagagaatccaggctccatacggatcagcaagccgcccagcccaaaacctatgcccgtgatacgcgtagttgagacc

SEQ ID NO: 202748 - DNA, 1170 bp, Artificial Sequence
  derived and/or modified sequence
atgaacggaacccggaactggtgcaccctggtggatgtgcatccagaagatcaagcagcaggcagcgtggacattctcagactcacgttgcaaggggaacttaccggggatgagctggaacatattgcacaaaaggcaggacggaaaacttacgcaatggtgtcctcccattcggcaggacattcgctcgcctcggaattggtggaaagccatgatggtcatgaagagatcattaaggtgtatctgaaaggaagatcaggtgacaagatgattcacgaaaagaacataaatcagctcaagtcggaggtgcaatacattcaggaggcccggaactgtctgcaaaagctgcgagaagatattagctcaaaacttgatcgcaatctcggagatagtctgcacagacaggaaatccaggtggtgctcgaaaagcccaatggtttttcgcagagccccaccgctctttactcgagccctcctgaggtcgatacctgtatcaatgaagatgtggaatcgcttaggaaaactgtgcaagatctccttgcaaagctgcaggaagccaagcggcagcatcagtcggattgcgtggcttttgaggtgactctgtctaggtaccagagagaagccgaacaatcgaacgtggcccttcagagggaagaggatcgggtggagcagaaggaggcggaagttggggaactccaaaggagactccttggtatggaaaccgagcaccaagccctgcttgcaaaagtgagggaaggtgaggtggctctggaagagttgagatccaataacgccgattgccaggcagaacgtgagaaggcggccaccctggagaaagaagtggcaggtttgcgtgaaaagatccaccatctggatgacatgctgaagtcccagcagaggaaagtgcgtcaaatgatcgaacagctccaaaactcgaaggcggtgattcagagcaaagacgcaaccatccaagagctgaaggagaaaattgcatacctggaggccgaaaacctcgagatgcacgatagaatggaacaccttatcgaaaagcaaatatcccatggaaactttagcacccaagcacgggcaaagactgaaaacccaggctccattcgcatttccaagcccccctcaccgaagcctatgcccgtcatcagagtggtggaaacc

SEQ ID NO: 202749 - DNA, 1170 bp, Artificial Sequence
  derived and/or modified sequence
atgaatggtacgcgtaattggtgtacgctagtagatgtacatccggaagatcaagcggcgggttcggtagatatactacgactaacgctacaaggtgaattaacgggtgatgaattagaacatatagcgcaaaaagcgggtcgaaaaacgtatgcgatggtatcgtcgcattcggcgggtcattcgttagcgtcggaactagtagaatcgcatgatggtcatgaagaaataataaaagtttatctaaaaggtcgatcgggtgataaaatgatacatgaaaaaaatataaatcaactaaaatcggaagttcaatatatacaagaagcgcgaaattgtctacaaaaactacgagaagatatatcgtcgaaattagatcgaaatctaggtgattcgttacatcgacaagaaatacaagttgtactagaaaaaccgaatggtttttcgcaatcgccgacggcgctatattcgtcgccgccggaagtagatacgtgtataaatgaagatgtagaatcgttacgtaaaacggtacaagatttattagcgaaactacaagaagcgaaacgacaacatcaatcggattgtgtagcgtttgaagttacgctatcgcgttatcaacgagaagcggaacaatcgaatgtagcgctacaacgagaagaagatcgagtagaacaaaaagaagcggaagttggtgaactacaacgacgtctactaggtatggaaacggaacatcaagcgttactagcgaaagttcgagaaggtgaagttgcgttagaagaactacgatcgaataatgcggattgtcaagcggaacgtgaaaaagcggcgacgttagaaaaagaagtagcgggtttacgtgaaaaaatacatcatctagatgatatgttaaaatcgcaacaacgtaaagttcgtcaaatgatagaacaattacaaaattcgaaagcggttatacaatcgaaagatgcgacgatacaagaactaaaagaaaaaatagcgtatttagaagcggaaaatctagaaatgcatgatcgtatggaacatttaatagaaaaacaaatatcgcatggtaatttttcgacgcaagcgcgtgcgaaaacggaaaatccgggttcgatacgtatatcgaaaccgccgtcgccgaaaccgatgccggttatacgagttgtagaaacg

SEQ ID NO: 202750 - DNA, 1170 bp, Artificial Sequence
  derived and/or modified sequence
atgaacggaaccagaaactggtgcacactggtcgacgtccatcccgaagatcaagcagcaggttcagtggacatacttaggcttaccctgcaaggagaactgaccggagatgagcttgaacacatcgctcagaaagctggaaggaagacgtatgcaatggtttctagccactccgcaggacattcactggctagcgaactcgtcgagagccacgacggacacgaggagattatcaaggtctacttgaaagggagaagcggcgataagatgatccatgagaagaacataaaccagctgaagagcgaagtgcaatatatccaggaggctaggaactgcctacagaagctgcgggaggacatctccagcaagttggacaggaacctcggtgactctctgcatagacaggaaatccaggttgtgttggagaagcccaacggattctctcagtctcctaccgctctctattcgagcccgcctgaagttgatacttgtataaacgaagatgttgaaagcctgcgcaaaaccgttcaagatttactggccaaactgcaggaggccaaaaggcaacatcaaagcgactgcgttgcttttgaagtgacgctcagtagataccagagggaggctgagcaatctaatgttgccttgcagagagaagaagacagagtggaacaaaaagaagccgaagtgggggaactgcaaagaaggcttcttggaatggaaacagagcatcaggctctgctggctaaagtaagggaaggcgaggtagccttagaggaactccgaagcaacaacgcggactgccaggccgagcgcgaaaaggccgccacactggagaaggaagtcgccggcctccgggaaaagatccaccacttagacgacatgctgaagagccaacagaggaaggtgagacaaatgatcgaacagctgcaaaacagcaaagccgtcattcagtcaaaagacgcgactatccaggaactcaaggaaaagatcgcttatcttgaagccgagaatcttgagatgcatgaccgcatggagcatctgatagaaaagcaaatttcccacggaaactttagcacacaagccagggctaagacagaaaatcccggcagcatcagaatatccaaacccccatcacccaagccaatgcccgtcatcagggtggtggaaaca

SEQ ID NO: 202751 - DNA, 1170 bp, Artificial Sequence
  derived and/or modified sequence
atgaatggcaccaggaattggtgtacattagtcgacgtgcatcctgaggatcaggcagccggtagcgtggatattctgaggctgaccctacaaggggagctcacaggcgatgagctggagcatatagctcaaaaggccgggcggaagacatatgccatggttagttctcactccgccggccactctctggctagcgagcttgtggagagtcacgatgggcacgaagagatcataaaggtgtatctaaaggggcgtagcggcgataagatgatccacgagaagaacataaaccaactcaaatccgaagtgcagtacatccaggaagcaagaaactgcctccagaagttacgagaagatatatcaagcaaattggataggaacctgggcgatagtctgcacaggcaggagattcaggtcgtccttgagaagcctaatggcttttctcagagtcccacagcactgtacagctctcctcctgaggttgacacctgtatcaacgaggatgtggagagtttgagaaagaccgtgcaggacctcctggctaagttacaagaggcaaagcgccaacatcagagtgactgcgttgcatttgaggttactctcagtagatatcagcgggaagccgagcaaagcaatgtcgcattgcagagagaggaagacagggttgaacaaaaggaggctgaggtgggcgagctacagcgccggttattaggcatggaaacagagcatcaggccttactggcaaaggttagggagggggaagtcgcacttgaggaactgaggagcaacaacgccgattgccaggccgagagagagaaggccgctactctggaaaaggaggtggccggtcttcgcgagaaaattcatcaccttgatgacatgcttaagtctcagcagaggaaagtacgccagatgattgagcaactgcagaactccaaggccgtgatccagagcaaagatgccactatccaagagctgaaggagaaaatcgcctatctggaggctgaaaatcttgagatgcatgataggatggaacacctcatagaaaagcagatatcccacggcaatttctcaacccaggcccgcgcaaaaaccgagaatccaggatccattaggatctccaaaccaccttctcccaagcctatgcctgttattagggtggtcgaaact

SEQ ID NO: 202752 - DNA, 1170 bp, Artificial Sequence
  derived and/or modified sequence
atgaatggaacacgaaactggtgtactctagtggacgttcatccagaagatcaagcagctggatccgttgatattctccgtcttactctacagggagaactcacgggagatgaactcgagcacattgcacaaaaagcggggagaaagacctatgcgatggtgtcatcccactccgccggtcacagcctggcaagtgagctcgtcgagtcacatgatggacatgaagaaatcattaaggtttacctgaagggacggtcaggagataagatgattcatgagaaaaatattaatcaattgaagtccgaggtccaatatattcaggaagctcgcaattgtctacaaaagcttagagaagacatctcttctaaattagatcgaaatctaggagattctctacatagacaagaaattcaagttgtgcttgaaaagccaaacggttttagccagagcccaaccgcactctacagctcgcctccagaagttgacacgtgtattaatgaggatgtagagtcccttcgtaaaacggttcaagatctacttgctaaactgcaggaagctaaaagacaacatcagtcagattgcgtcgcatttgaagtaacattatccagatatcagcgtgaggcagagcagtcaaacgtggcccttcagcgtgaggaagaccgtgtggagcagaaggaagcagaagttggagaattgcaacgaaggcttcttggaatggagactgagcaccaagctcttttagctaaggtgagagagggtgaggtggcactcgaagagctacgctcaaataacgcggattgccaagccgaacgagagaaggcggctacccttgaaaaagaagtcgctggattgcgggagaaaatccaccacttagacgatatgcttaaatctcagcaaagaaaagtcaggcaaatgattgaacaattacaaaactcaaaagcagtgatccagtccaaagatgctacaatccaggagctaaaggagaagatcgcttacttagaggcggagaatctcgaaatgcatgatcgtatggaacaccttatcgagaagcagattagtcatggtaatttctctactcaagctcgggcgaagacggaaaaccctggaagtattcgtattagtaagccaccaagcccaaaaccaatgccagtgattcgtgtggtcgagaca

SEQ ID NO: 202753 - DNA, 1170 bp, Artificial Sequence
  derived and/or modified sequence
atgaacggaacgcgaaactggtgtaccctcgtggatgtccatccggaagatcaagcggctggatcggttgatattctgagactcaccctccagggtgaacttaccggagacgaactcgagcacatagcccaaaaagcagggcgtaaaacttacgccatggtcagctcccacagcgcaggacattcgctggcatccgagctggtcgaatcccatgacggtcacgaagaaatcatcaaggtgtaccttaagggtcgctcaggcgacaagatgattcatgagaagaacatcaatcagctgaaatctgaggtgcagtacatccaagaagcacgtaactgtctgcagaaacttagagaagatatctcttcgaaacttgatcggaaccttggggattcgcttcatcgtcaggaaattcaggtcgtgcttgagaaaccgaatggattttcgcagagcccgaccgcgttgtattcgagccctccagaagtggatacgtgtattaacgaggatgtggaatccctgcgtaagactgtgcaggatctgctggcgaagttgcaagaagcaaagagacaacaccagtccgattgtgtggcattcgaagtaacgctttcgaggtaccagagagaagcagagcagagcaatgtggcactccaaagggaggaggatcgcgtggagcaaaaggaagcagaggtcggagaactgcaaaggcggcttttggggatggaaaccgagcatcaggcacttctcgctaaggtgcgggaaggcgaagtcgcacttgaagaacttcgctccaataacgctgattgtcaggccgaacgggagaaggcagccactctcgaaaaagaagtcgcaggactccgagagaaaatacatcatctggacgacatgctgaagtcgcagcaaaggaaggtgagacaaatgatcgagcagctccagaacagcaaggcggtcatccaatcgaaggatgcaaccattcaggagcttaaggagaaaatcgcatacctggaagcagaaaacctcgagatgcatgatagaatggaacacctgattgaaaagcaaatttcccacggtaacttctctacccaagcaagggcaaagactgaaaaccccggttcgatcaggatttccaagcccccttctcctaaacctatgccagtgattagagtggttgaaacc

SEQ ID NO: 202754 - DNA, 1170 bp, Artificial Sequence
  derived and/or modified sequence
atgaacggtacccgtaattggtgcactttggtggacgtgcatccagaagatcaagcagcgggatccgtggacattctgcgccttactctgcagggcgaacttacgggggatgaactcgagcatatagcgcaaaaggcaggccggaaaacttacgctatggtgtcgtctcattcagcaggacatagcctggcatcggagctcgtggaatcacatgatgggcatgaggaaatcatcaaggtgtacttgaagggtaggtcgggcgataagatgattcacgagaagaacattaaccaactgaagtccgaagtgcagtatatccaggaagcgagaaactgccttcaaaaactccgagaggatattagcagcaaacttgatagaaaccttggggattcgctccataggcaggaaatccaagtcgtgctcgagaagcctaatgggttctcgcagagcccgaccgctctctactcgtcgcctcccgaagtggatacttgtatcaacgaagatgttgaaagcctcagaaagacggtgcaagatctgctggcaaagctgcaagaggcgaagcgacaacaccaatccgattgtgtggccttcgaagtcactctgtcgaggtaccaaagagaagccgaacagtcgaatgtggccctccagagggaagaggacagagtggaacagaaggaggcagaagtgggtgagcttcaacgccggcttctcggtatggagactgagcatcaagccctcctggcaaaggtgagggaaggtgaagtcgcgctggaagagcttcgctccaacaacgctgattgtcaagccgagagagaaaaagcagccacccttgaaaaggaggtggccggactgcgagaaaagatccatcacctggatgacatgctgaagtcgcaacaaagaaaggtcagacaaatgattgaacagcttcaaaactcaaaagctgtgattcaatcaaaggatgcgaccatacaggagctgaaagaaaagattgcatacttggaggccgagaatctggagatgcatgataggatggaacatctgattgaaaaacaaattagccatggcaacttttcaacgcaggctagagccaaaactgaaaatcccggttcgattaggatttcaaagcctccgtcccccaagccaatgcctgtgattcgtgtggtggagact

SEQ ID NO: 202755 - DNA, 1170 bp, Artificial Sequence
  derived and/or modified sequence
atgaacggcacccgcaactggtgtacattggtggacgttcatcctgaagatcaggctgcagggtctgtagatattctccggctgacactacagggagaactcacgggcgatgagctggaacacatcgctcagaaagctggcaggaaaacttacgctatggtgtcttcccacagtgcaggccattctcttgcctcagaactagtggagtctcatgacggacatgaggaaataattaaggtgtacctgaagggccggagtggcgacaaaatgatccacgaaaaaaacataaatcagttgaagagcgaggtacagtatattcaagaggcccgaaactgtctgcaaaagctgagagaggacattagcagtaaactggatcgtaacctgggtgacagtctgcaccgccaggagattcaagtggtgctggaaaagcccaacgggttcagccaaagccctactgctttatatagttctccacctgaggttgacacctgcatcaacgaggacgtggaatcactgcgtaagaccgtccaagacctcttggcaaagttgcaagaggccaaaaggcagcaccaatccgactgcgtggcctttgaagtcacactctcacgctaccagagagaggcagagcagtccaatgtagcgctgcagcgcgaagaggatcgcgtggaacagaaagaggctgaggtgggcgagctacaacgaagattattggggatggaaaccgagcaccaagcgcttctggctaaagtgcgggagggcgaggtcgctctggaggaactgcgcagtaataacgcagattgccaggcagagcgcgagaaggcggctaccctggagaaggaagtagctggtcttcgcgaaaaaatccaccacctggatgacatgcttaagagccaacaaagaaaagtacgccagatgatagaacagctacagaactccaaggctgtcatccagtcaaaggacgcaaccattcaagaacttaaagaaaagatcgcctacttggaagccgaaaatttggaaatgcacgataggatggagcatctgattgaaaagcaaatctcccacggcaatttctctacccaggcccgcgcgaaaaccgaaaaccctgggagcatccgtatcagcaaaccccctagccccaagcctatgccagtcattagggtggtggagaca

SEQ ID NO: 202756 - DNA, 1170 bp, Artificial Sequence
  derived and/or modified sequence
atgaatggaactcgaaattggtgcacgcttgtggatgtccaccccgaggatcaggcagccggttccgtggacatccttcgccttacccttcaaggtgagctgactggcgatgaattggaacatatcgcacaaaaggctgggagaaaaacttatgcgatggtgtcctcccacagcgcggggcattcactggcgtcggaacttgtggaatcacatgacggtcatgaggagattatcaaagtctacctcaaggggaggtcaggagacaaaatgattcatgagaagaatatcaatcagctcaagtcggaagtgcaatacatccaagaagcaaggaattgtctgcaaaaactgagagaagatatttcgtccaagctcgacagaaacctgggcgattcactccatcggcaggaaatacaggtggttcttgagaagccaaacggtttttcccaatcccctaccgccctttacagcagcccgccagaagtggatacctgtataaacgaagatgtggagagcctccgcaagactgtgcaggatcttcttgcaaagctgcaggaagcaaagcgtcagcatcaatcggactgtgtcgcatttgaggtgactctttccagataccaacgggaggctgaacagtcaaacgtcgccttgcaaagggaggaagatagggtggaacagaaggaagccgaggtcggagaactgcaacgcagactgctgggaatggagacggaacaccaagcccttcttgcaaaagtgcgcgaaggcgaagtggctttggaagaactgagatccaataacgcagattgccaggcggagagggaaaaggcggcaactctggaaaaagaggtggcgggactgcgcgaaaagatacaccatctggacgacatgctcaagtcccagcagcgaaaggtcagacagatgattgaacagctccaaaactccaaagcagtgattcaatctaaagacgcaacgatccaggaattgaaagaaaagatcgcataccttgaagcagagaatctcgaaatgcatgatcgtatggaacaccttattgagaaacaaatttcgcatggcaacttctcaacgcaagcacgcgcaaagaccgagaacccaggttcgatcagaatctccaagccgccatccccaaaacccatgccggtgattcgtgtcgtggagact

SEQ ID NO: 202757 - DNA, 1170 bp, Artificial Sequence
  derived and/or modified sequence
atgaatgggaccaggaattggtgcacattggtcgatgtgcaccccgaagaccaggccgccgggagcgtggatatattaaggctaacactgcaaggtgagctgactggcgatgaattggagcatattgcccagaaggccgggcgcaagacttatgccatggtgagctcccatagtgccggccatagcctggcctcagaactcgttgaatcacatgacggacacgaggaaattattaaggtctacttaaagggaagaagtggcgacaaaatgatccacgaaaagaatattaaccagctaaaaagcgaggtgcagtatatccaggaagctaggaactgtctccagaagctgagagaggatattagttctaagctggataggaatctaggagatagcctgcaccggcaggaaattcaggttgtgttagaaaagcccaacggattcagtcagagtccaaccgcgctttattcgtcgccgcctgaagtggacacctgtattaacgaggacgtggagtcactgcggaagaccgtgcaggacctgctagccaagctgcaggaagcaaagcgacaacatcagagcgattgcgtggctttcgaggtgacactttctagatatcagcgggaggccgaacagagtaacgttgcccttcaacgcgaagaggaccgcgtcgagcagaaggaggccgaggtcggggagctgcagagaaggctgttgggaatggaaaccgaacaccaagcattactggcaaaggtccgcgagggtgaggttgccctggaggaacttagaagcaacaatgccgactgccaagctgagagagagaaggctgctactctcgaaaaagaagtggctggcctgagggagaagatccaccatctggacgacatgctgaagagtcaacagagaaaagtgaggcagatgatcgaacagctccagaatagcaaagcagttatacagtctaaggatgccaccatccaagagcttaaagaaaagatcgcctatttagaggccgaaaacctggagatgcatgacaggatggaacatctgatcgagaagcagatctcacacggcaacttctccacacaggcccgcgccaagaccgaaaaccctggctccatcagaattagcaaacccccgtcgccaaaacctatgcctgttatccgagtggttgaaacc

SEQ ID NO: 202758 - DNA, 1170 bp, Artificial Sequence
  derived and/or modified sequence
atgaatggtacccgtaactggtgcaccttggtggacgtacacccggaagatcaggcggctgggtcggtggacatcttgagactcaccctccagggggagctgaccggagatgaactggaacatatcgcccagaaggccggacgcaagacttacgccatggtgtcgtcccattccgccggacatagtctggcctccgagctggtggagtcgcatgacgggcacgaagagattatcaaggtgtacctgaaaggacggtcgggcgacaaaatgatccatgagaaaaacatcaaccagcttaagtcggaggtgcaatacatccaggaagcacgcaattgcctccagaagttgcgcgaagatattagctccaaactggatagaaatctgggcgactccctccaccgccaggagatccaggtggtactggaaaagcctaacggttttagccagtcacctaccgcgctgtacagcagcccgccggaagtggacacctgtatcaacgaagatgtggagagcctgcgcaaaactgtgcaggacctgctggcgaagctccaggaggctaagagacagcaccaatcggactgcgtggcttttgaggtgaccctgtcacgctaccaaagggaggcagaacagtcgaacgtggccctgcagagagaagaggaccgggtcgaacaaaaagaagctgaagtgggcgaactccaacggaggttgctgggaatggagactgaacaccaagcactcttggctaaagtgcgtgagggggaggtcgccctggaagaactcagatccaacaatgccgattgccaggccgaaagggaaaaggccgcgacccttgagaaggaggtcgccggactccgcgagaagatccatcacctggacgatatgctgaaaagtcagcagcggaaagttcgacaaatgatcgaacaacttcaaaactccaaggccgtcatacaatctaaggatgcaaccatccaggagctcaaggaaaagattgcatatctggaggctgagaaccttgaaatgcacgaccggatggaacatcttatcgaaaagcaaatctcacacggaaacttctccactcaagcgcgcgccaagacggagaatccaggttcgattaggatttccaagcccccatctcctaagccgatgccggtgatccgcgtcgttgaaacc

SEQ ID NO: 202759 - DNA, 1170 bp, Artificial Sequence
  derived and/or modified sequence
atgaatggcaccaggaattggtgtaccctggttgacgttcatccagaagaccaagccgccggcagcgtcgatattctgcgcctgaccttgcagggtgagctcaccggcgatgaactggaacacatcgcccaaaaagccgggcgcaagacatacgctatggtgtcctcacacagcgctggccactctctggcttcggagttggtagaatcacatgacgggcacgaggagattattaaagtgtatttgaaaggccgctctggcgacaagatgatccacgaaaagaacattaaccagctgaaatctgaggtacagtatattcaggaagcacggaactgtctccagaagctgcgcgaggacatttcatccaaactggatcgtaatctgggcgattcattgcacaggcaggagatacaagtggtgctggaaaagcccaacggcttctcccagagccctacagccctgtactcttctccacctgaagttgatacctgcatcaacgaagatgttgaaagtctgcgcaagacagtccaggatcttttggcgaaactgcaagaagcaaagcggcagcatcagtcagattgtgtggccttcgaagttactctatctagataccagcgagaagccgagcagtctaatgtggcccttcagcgcgaggaagaccgtgttgagcagaaagaggctgaagttggtgaattgcaaaggcgcctgctgggcatggagactgaacatcaggcgctactggcaaaggttcgcgagggagaagtcgctttggaagaactacgctctaataacgcagactgtcaggccgagcgggagaaagccgccactctggagaaggaagtggccgggctccgagagaaaatacatcacctcgacgacatgctgaaatcccagcagaggaaggtccgccagatgattgagcaactgcagaacagcaaggccgttattcagtcgaaggacgccacaatccaggagttgaaagagaaaattgcttaccttgaagccgagaatctagaaatgcatgatagaatggaacacctgattgagaaacaaataagccatggcaatttcagcacccaggcccgggcgaaaaccgagaaccccgggtccattcgcattagtaaaccaccctctccaaaacccatgcccgttatacgggtagtagaaacc

SEQ ID NO: 202760 - DNA, 1170 bp, Artificial Sequence
  derived and/or modified sequence
atgaacggaacccggaactggtgtactctggtcgacgtccatccggaagatcaggcagccggttccgtcgacatcctccggctgactctgcagggagagctcactggagacgagctcgaacacatcgctcagaaggccggcagaaaaacctacgccatggtgtcctcccactccgccggccattcactggcgtcagaactggtggagtcacacgacggccacgaggagatcattaaggtttatctgaagggccggtccggtgataagatgatacacgagaaaaacattaatcagctgaaaagcgaagtccagtacatccaagaagcgcggaattgtctgcaaaagttgcgggaggacatcagcagcaagctggacagaaacctcggagactcgctgcatcggcaggaaatccaagtggtccttgaaaaacccaacggattcagccagtcgccgacggccctgtacagctcgcctccagaggtggatacttgtatcaacgaggacgtcgaatcgctccggaaaactgtccaagatctgcttgccaaacttcaggaagcaaagcgtcagcatcagagcgattgcgtggcattcgaagtgactctgtcgcgctaccagcgcgaagctgagcaaagtaacgtcgcgctccagagggaggaagatcgggtggaacaaaaagaggccgaagtgggggagctccagcgccggctcctgggaatggaaactgagcaccaggccctcttggcgaaggtccgcgagggcgaagtggcgttggaggaactgcggtcaaataacgcggactgccaagctgagcgcgaaaaggctgccactctcgagaaggaagtggccggactgcgcgaaaagatccatcatctcgacgacatgctgaaatcccagcagcgcaaggtcagacaaatgatcgaacagctccagaactcgaaggcggtcatccaatcgaaggatgccaccatccaggagctgaaagagaagatcgcgtacctggaggctgaaaacctggaaatgcatgaccggatggagcacctgatcgagaaacagatctcacacggcaacttcagcacccaggctagagccaaaaccgagaacccgggctccatccggatctcaaagccgccatcgccgaagcctatgccagtgatccgcgtcgtcgagact

SEQ ID NO: 202761 - DNA, 1170 bp, Artificial Sequence
  derived and/or modified sequence
atgaacggaacgaggaattggtgtaccctcgtggacgtacatcccgaagatcaggccgccgggagtgtagacattttgagactaacgctgcagggtgagcttactggggatgagctcgagcatattgcccagaaggctggccggaaaacttacgcaatggtgtcaagccattccgccggacattctttagccagtgaactggtggagtcacatgacgggcacgaggaaattatcaaagtctatcttaagggtcgtagtggagataagatgattcatgaaaaaaatatcaaccagctcaaaagcgaggtgcagtatatccaggaagcaaggaattgtctccaaaagctgagggaagatattagcagcaaactggataggaacctcggtgacagcctgcatagacaggagatccaggtcgtcctggaaaaaccaaacggcttttcacagagccccaccgccctgtattccagtccaccagaagttgatacctgcattaacgaagacgtcgaatccttgaggaagaccgtgcaggatttgttggcaaaactgcaggaagccaagcgacagcatcaatccgattgcgtggcgttcgaggtaacactctctagatatcagagagaggctgagcagagtaatgttgcactgcagagggaggaagaccgggttgaacagaaggaagctgaagtcggagaactgcagaggcgactactcggaatggaaactgaacaccaggctcttctggccaaagtgagggaaggcgaagtagcgctcgaagaactaaggtctaacaatgctgattgtcaggccgaaagagagaaagcggcaaccctggagaaggaagttgctggattacgtgagaagatccaccacctggacgacatgcttaagtcccagcagcgaaaagtaaggcagatgattgaacagttgcagaatagcaaggccgtgatccaaagtaaagatgcaaccatccaggagctgaaagaaaagatagcttacttggaggctgaaaatctggagatgcacgatagaatggaacacctgatagaaaaacagatttcgcatgggaatttcagcacccaagcccgggcgaaaaccgagaatcccggctccattaggatttccaaacctccaagccccaagccgatgccagttatcagggtcgtggagacc

SEQ ID NO: 202762 - DNA, 1170 bp, Artificial Sequence
  derived and/or modified sequence
atgaatgggaccaggaactggtgtacactggtcgacgtgcacccggaagaccaagcagcggggtcagtggacatattgagacttactctccagggcgagctgaccggcgacgagttagagcacatagcccagaaagctgggcggaaaacatatgcaatggtgtcctctcattctgctggccatagcctggcctctgagctggtggaatcccacgacggccatgaggaaataatcaaggtatatctgaaagggaggagtggggataaaatgatacatgagaagaacatcaatcaactcaaaagcgaagtgcagtatatccaggaggctagaaattgtctccagaaactacgtgaagacatttcaagtaagttggacagaaacttgggggatagcctgcaccgacaagagatccaggtggttctggagaaaccaaacgggtttagtcagtcccctaccgctctatactcgagcccgcccgaggtagacacttgtataaacgaagacgttgagtctctcagaaagacagtccaggatctgctggctaagctccaggaggctaagaggcagcaccagagcgactgcgttgccttcgaggtcactctgagcaggtaccagagggaagccgagcagagcaacgtagcactgcagcgagaagaagatcgggtggaacagaaggaggccgaggtgggcgagctgcagaggcggctcctaggcatggaaaccgaacaccaagccctgctcgcgaaagtccgcgagggggaagtggccctggaggaactgaggtctaacaacgcagattgtcaagcagaacgtgagaaagctgcaaccttggaaaaggaagtggccggacttagggaaaagatccaccacctggacgacatgctaaaatcacagcaacggaaggtgaggcagatgattgagcagcttcagaactcaaaggctgttattcagtctaaggacgctacaattcaggagctcaaagagaaaatcgcttacctggaggcagaaaacctcgagatgcacgacaggatggagcacctaatcgaaaagcagatctcgcatggcaatttctccactcaagcaagagccaagacggagaacccaggaagcatcagaatatccaagccgccgagtccaaagccaatgccagtgatccgggtggtggagact

SEQ ID NO: 202763 - DNA, 1170 bp, Artificial Sequence
  derived and/or modified sequence
atgaacgggacccgcaactggtgcacgctcgttgacgttcatccagaagatcaagcggctggatcggtggacatcctgaggctcacgcttcagggggagcttactggagacgaactggagcacattgcccagaaggctggacggaaaacctacgcgatggttagctcccattcagcgggacactcgctcgcaagcgaactcgtcgagtcacacgacggtcacgaagagatcatcaaagtgtacttgaagggacggagcggtgacaagatgatccatgaaaagaacatcaaccagctcaagtccgaggtgcagtatatccaggaagcccgcaattgcttgcaaaagctgagagaggatatctcctccaaactggataggaacctcggcgattcactccaccgccaggagattcaagtggtcttggaaaagccgaacgggttttcacaatcgcccaccgcactgtactcaagcccccctgaggtcgacacctgcatcaacgaggacgtggaatcactccgcaaaacggtgcaagacctgctcgccaagctgcaggaagcaaagcggcaacatcagtccgactgcgtcgcgttcgaggtgactctgtcacggtaccagcgggaggccgagcagagcaatgtggctctgcagagggaggaagatcgcgtcgaacagaaagaagcagaagtgggtgagctgcagagacgacttctggggatggaaaccgaacaccaggcccttctggccaaggtgagggaaggcgaggtggctcttgaagagttgcggagcaataatgcagactgccaagccgaacgcgagaaggcagccactctcgagaaggaagtggccggactgcgggaaaagatccaccatttggatgacatgctgaaatcgcaacagcgcaaagtcaggcagatgatcgagcagctgcaaaatagcaaggccgttatacaatccaaagatgccactatccaggaactgaaagaaaagatcgcgtaccttgaagccgaaaatctggaaatgcatgatcggatggagcacctgattgagaagcagatttcgcatgggaacttctcaactcaagcccgggcaaagactgaaaacccgggatcaatccgcatcagcaaaccaccttcccccaagccgatgccagtgatcagagtggtcgagact

SEQ ID NO: 202764 - DNA, 1170 bp, Artificial Sequence
  derived and/or modified sequence
atgaacggaactaggaattggtgtacactagttgacgtacaccccgaggaccaggcagcagggagtgtggacattcttagactcacgcttcagggggagttgacgggggatgagctcgaacatatcgcccagaaggccggacgaaaaacttacgcaatggtaagcagccattcggctggccacagccttgcgagtgagctggtggagagccacgacggccatgaggagattatcaaggtctatctgaagggtagaagtggggataagatgattcatgaaaagaacattaaccagctcaaaagcgaagtccagtatatccaggaggccagaaactgtctgcagaaactccgggaggatatatccagcaaactcgaccgcaatctgggggattcattacatagacaggaaatccaagtcgttctcgagaaacccaacggatttagccagtctcccaccgctttgtactcgtctcctccagaggtggacacatgtatcaacgaggatgtcgaatccctgcgtaagaccgtccaggacctgctggccaaattacaagaggcgaagagacaacatcaatcagactgcgtcgcttttgaagtgacactgtctaggtaccagcgagaggcagagcaatctaacgtcgctctgcaacgagaggaggaccgcgtcgagcagaaagaagcagaagtgggcgagcttcagcgtaggctgcttgggatggagacagaacaccaggcattgttggcaaaagtcagagagggggaggtagccttagaggagttacggtccaataacgcagattgccaagccgagagagagaaggcagctactctggagaaggaagtagctgggctgcgggaaaagattcaccacctagatgatatgttgaaaagccagcagcggaaggttcggcaaatgatcgagcaattgcagaactcaaaagccgtgatacaatccaaggatgctaccattcaagaactgaaagagaaaatcgcatatcttgaggcagaaaaccttgaaatgcatgatcgcatggaacacctgattgagaaacagatctcacatggtaactttagcacacaagctagggccaagaccgagaatcccggtagtattaggatcagcaaaccaccctctcctaagcccatgcctgtcatcagggtggtggaaaca

SEQ ID NO: 202765 - DNA, 1170 bp, Artificial Sequence
  derived and/or modified sequence
atgaacggtacgagaaactggtgtacgttggtggacgttcatcccgaagaccaggcagcgggtagcgttgacatcctgagactgaccctgcagggagagctgactggtgacgagcttgagcatattgctcagaaagccggaaggaagacgtacgcaatggtctcctcccattccgcgggccattccctcgcaagcgagctggtagagagccacgacggccacgaagaaatcataaaggtgtacttgaagggtcgcagtggagataaaatgatccacgagaagaatatcaaccagcttaagagtgaggtgcagtatattcaagaggctcgcaactgtctgcagaaattgagagaagacataagcagtaagttggacagaaatttgggtgatagtctccacagacaggaaatccaagttgtgctggagaagccaaatggatttagccagtcccctaccgcactttactcctcacctccagaagttgacacatgtattaatgaggatgtggagtccctgaggaaaaccgtccaggaccttttggcgaaactgcaggaggcaaagcgccagcaccagtcagactgcgtcgcttttgaggtaacgctgtcaagataccagagagaggctgagcagtccaacgtcgctctgcagcgcgaagaggatcgcgttgagcagaaggaggcagaggtgggtgaactgcaaaggcgcctgttgggcatggaaacggaacaccaggcactgttggccaaggtgagagagggcgaggttgctctggaagaactcaggtctaacaacgctgattgtcaggctgaaagagaaaaggccgccacgctcgaaaaggaagtggcaggactgcgcgagaaaatccatcacctggacgacatgcttaaatctcagcagaggaaggtgagacaaatgatcgagcaactccagaatagcaaggctgtcatccagagtaaggatgccacgatccaagagctcaaggagaaaatcgcgtacctcgaggctgagaatttggagatgcacgataggatggaacatctgatcgaaaaacaaatttctcatggcaatttttccacgcaagctagggccaaaaccgaaaaccctggttcaattagaatttcaaaacctcccagtccaaagcccatgccagtaatcagagtagttgagact

SEQ ID NO: 202766 - DNA, 1170 bp, Artificial Sequence
  derived and/or modified sequence
atgaatggtacccgcaactggtgcacccttgtcgacgtgcatcctgaagatcaggccgcagggtctgtggatattctgcggctcacccttcaaggagaacttaccggtgatgaactggagcatatagcccagaaagcaggtagaaagacctacgccatggtgtcgagccattcagcaggacatagcctggcatccgaactggtcgaaagccatgatggccacgaagaaatcatcaaggtgtatctcaagggaaggagcggagacaaaatgattcacgaaaagaacattaatcagcttaagtcggaagtgcaatacatccaggaggctagaaattgcctgcagaaattgagagaggatatctcaagcaaactggacaggaaccttggggactccctgcatagacaagaaattcaggtcgtgctcgaaaagcctaacggctttagccaatcacctactgcactttattcctccccacctgaggtggatacttgtatcaatgaggatgttgagtccctgagaaagactgtgcaagacctgcttgccaaactccaggaggccaagcggcagcaccaatcggactgtgtcgcgttcgaagtgactctgagccgataccaaagagaagccgaacagtcaaatgtcgcacttcaaagggaggaggatagagtggagcaaaaagaggcggaagtgggggagctgcaaagacgtctccttggaatggaaactgagcatcaggcgcttctggcgaaagtgagagagggtgaagtggctcttgaagagctgcgctccaacaatgcggattgtcaggcggagcgcgagaaagcagcgaccctggagaaagaagtggcaggtttgagagagaaaattcatcacctggatgacatgctgaaaagccaacaacgtaaagtgcgccaaatgattgaacaactgcaaaactcgaaggctgttattcaaagcaaggatgctaccattcaagaactgaaggagaagatcgcatacctcgaggcagagaacctggaaatgcacgacaggatggaacacctcattgaaaaacagatttcccatggtaacttttcgactcaagcccgcgcaaagactgagaatcctggctccatcagaattagcaagcctccctcccctaagccaatgcctgtcatcagagtagtggaaact

SEQ ID NO: 202767 - DNA, 1170 bp, Artificial Sequence
  derived and/or modified sequence
atgaatggcactaggaactggtgtactctggtcgatgttcatccagaagaccaggcggccggatctgtggacatactgaggctgactctccagggggagctaacaggcgacgagctggagcatatcgcgcagaaggccggccgtaaaacatacgccatggtgagctcacacagtgccgggcactccctggcctcagagcttgtggaatctcacgacggccacgaggagattatcaaggtgtaccttaagggacgctctggggacaaaatgatccacgagaaaaatattaaccagctgaagtccgaggtgcagtacatccaagaagcccgcaattgcttgcagaaactcagagaggacatctctagtaaactcgatcggaatctaggggattcgctccacagacaggaaatccaggtcgtactggaaaagcccaatggtttttctcagagccccaccgcactctattcttctccccccgaagtcgacacctgtatcaatgaagacgtggagtccctgcggaaaacagtccaggatctactagccaagctgcaggaggcaaagcggcagcaccagagtgattgtgtcgccttcgaagtaaccctgagtcgttaccagcgggaggcagagcagagcaacgttgcgctccagcgcgaagaagatcgagtggaacagaaagaagcagaagtgggcgagcttcagcggagactgctgggtatggagacggaacaccaagctctgctcgctaaggtgagggagggcgaagtggctttagaggaacttcgctcaaacaatgcggattgccaggccgaaagagagaaggctgccaccttggaaaaggaggtcgcgggtcttcgggagaagatccatcatttggacgatatgctcaagtcccagcagcggaaggtgcgacagatgatcgagcaactgcagaactcaaaagccgtcatccagtctaaggacgctacaattcaggagctaaaggaaaagatcgcgtacttagaagccgagaacctcgagatgcatgatcgtatggagcatttaatcgaaaaacagattagccatggaaatttttccacccaggcgcgggcaaaaaccgaaaatcccggttctatcagaattagcaagccaccctcgcccaagccaatgccggtcatccgggtagtggaaact

SEQ ID NO: 202768 - DNA, 1170 bp, Artificial Sequence
  derived and/or modified sequence
atgaacggtactagaaattggtgcacactagtagatgtgcatcccgaagatcaggccgcaggctctgtagacattctgagacttacactccaaggggaattaacgggcgacgagctcgagcacattgcccagaaagctggacggaaaacatatgccatggtgtcatcgcacagtgctggtcactccctagctagtgagctggttgagtcacacgacggtcacgaagagatcatcaaagtgtacctgaagggtaggagcggagacaagatgatacacgagaaaaatatcaaccaattgaagtcagaggtccaatatatccaggaagccagaaactgtctgcaaaagctgagggaagacatcagttctaagctggaccgtaacctgggcgattcacttcatagacaggaaatccaggtagtattggagaagcccaacggcttctcccagtcccccacggccttgtattccagccccccggaagtggacacctgtattaacgaggatgttgagtcactgcgaaagaccgtgcaagacttgttagccaaacttcaagaagccaaaaggcagcaccagagcgactgtgtggccttcgaggtaaccctgtctcggtatcaacgggaagccgagcaatctaatgtcgcccttcaacgggaggaggatagggtggagcaaaaggaggccgaggtgggggagctgcaacgcagattgctaggaatggaaaccgaacatcaagccctgttagctaaggtgcgcgaaggagaagtggcattggaagagctccgctctaataacgccgattgccaggctgagcgggaaaaggccgccaccctagaaaaagaggtcgctggcctgagggagaagatccaccatctcgatgacatgctgaagtcacaacagagaaaggtgagacagatgattgagcagttacagaacagtaaagctgtgattcagtcgaaagacgctaccatccaggagctcaaagaaaagattgcctatttagaagcagaaaatctggagatgcacgaccgaatggagcacctcatcgagaaacaaatcagtcatggcaatttctccacccaagcccgcgccaaaacagagaacccagggagcatcagaatctccaagcctccttctcccaaacccatgccagtaatccgagtggtcgaaaca

SEQ ID NO: 202769 - DNA, 1170 bp, Artificial Sequence
  derived and/or modified sequence
atgaacggaactcgcaactggtgtactctggtggacgtgcaccccgaggaccaggccgccgggtccgtggatattctgcgcttgaccctgcagggagaactcaccggagatgaactggagcatatcgcacaaaaagccggaagaaagacttacgcgatggtttcatcccactcggccgggcactcccttgccagcgaactcgtggaaagccacgacggacacgaagagatcatcaaggtctacctcaaaggacgcagcggagacaagatgatccacgagaagaacattaaccaactcaagtcagaagtgcagtacattcaggaagcgaggaattgtctgcagaagctgcgagaagatatctcctccaagctcgaccggaacctgggagactcgcttcacagacaagagatccaggtggtcctcgaaaaaccgaacggatttagccaatcacccaccgcactgtactcaagcccaccggaggtggacacctgcattaacgaagatgtcgaatcactgcggaaaaccgtgcaagatttgctggcaaaattgcaagaagcaaagcggcaacaccagtcggactgcgtggcatttgaagtgacgctgtcccgctaccagcgggaggccgagcagtcaaacgtggccctccagcgggaggaggacagggtggagcagaaggaagcggaggtgggcgagctgcagaggcggctgctggggatggaaaccgagcatcaggctctgctggcgaaggtgcgagaaggagaggtcgctcttgaggagctccgctcaaataacgccgattgccaggccgaacgggaaaaggctgctaccctcgaaaaagaagtggcgggactgagggagaagatccaccatctcgacgacatgctcaagtcccagcagcgcaaggtgcgccaaatgatcgaacagctgcagaactcgaaagccgtcattcagagcaaagacgctactatccaggagctcaaggaaaagatcgcatacctcgaagcagagaacctggagatgcatgaccgcatggaacaccttattgagaaacaaatcagccacggaaatttctccacccaggcccgcgctaaaactgagaacccagggtcaatccggataagcaaacctccgtcccctaagcctatgccagtgatccgagtcgtggaaact

SEQ ID NO: 202770 - DNA, 1170 bp, Artificial Sequence
  derived and/or modified sequence
atgaatggtacccggaactggtgcaccctcgttgatgtgcatcccgaagatcaagccgcagggtccgtcgatatcctgagactgactctgcagggcgaactcaccggagacgagcttgagcatattgcccagaaagcaggtcggaaaacttacgctatggtcagctcccatagcgctggtcacagcttagcatctgagctggtcgaaagccatgatggacatgaggaaataataaaggtgtacctgaaaggtcgcagtggtgataagatgatccacgagaagaacatcaaccagctgaagagcgaggtgcagtacattcaggaagcccggaattgtctccagaagctcagggaagacatctcaagcaagttagatcgtaacctgggcgatagtctgcatagacaggagatacaagtggtactcgagaaacccaatgggtttagccaatctcccaccgctctctattcttcacctcctgaagttgacacatgtataaatgaagacgtggaatctctccgcaagacggtccaggatcttctggctaagctccaggaagccaaaaggcaacaccagtccgactgcgtcgccttcgaagtcacccttagtcgctaccagcgggaggctgagcagtccaacgtggccttgcagagggaagaggaccgcgttgagcagaaagaagcggaagtgggggagctgcagcggaggctcttagggatggagacagagcatcaggccctattggcaaaagtgcgcgagggtgaggtagcactggaagaactccggagcaacaacgcagactgccaggcagaaagggaaaaagccgcgaccctcgaaaaggaagtggctgggttgagggaaaagattcatcatctggacgacatgctgaagtcccagcagcggaaagttaggcaaatgattgagcagcttcagaattccaaggctgtcatccagtctaaagacgcaacaatccaagaactaaaagagaaaattgcatacctggaagctgagaacctggaaatgcatgatagaatggaacacctgatcgaaaagcagattagccacggcaatttttctactcaggccagagctaagacggaaaacccgggcagtatcaggattagtaagccaccgtctccaaaaccaatgcccgtgattagagtggtggaaacc

SEQ ID NO: 202771 - DNA, 1170 bp, Artificial Sequence
  derived and/or modified sequence
atgaatggtactcggaactggtgtactctagtagacgttcatcctgaggaccaggcggcgggcagcgtggatatcttacgactcacgctgcaaggcgaacttacaggcgacgaacttgagcatattgcccagaaggctgggaggaaaacctacgccatggtctcttcacactctgccggacactccctggcttcggaactcgtcgagtctcacgatggtcacgaggaaatcataaaggtttacctgaaagggcgttccggagacaagatgattcacgagaagaatataaatcagctgaagtctgaggtacagtacattcaggaagctagaaattgcctgcaaaaattacgtgaggatatcagctctaagctcgaccgaaatttaggcgacagcctccaccgtcaggagattcaggtcgtcctcgagaagcctaatggtttctcgcagagcccgactgcattgtattcttctcctccagaggtcgatacatgcattaacgaggatgtggagtctcttcgaaagaccgttcaggacctacttgccaagcttcaagaggcaaagcggcagcaccagtcagactgcgtggctttcgaggtaactctgtccaggtatcaacgtgaagcagaacagtcaaatgtggctcttcagcgcgaggaggatagagtggagcagaaagaggctgaggtaggggagctccaacgacgcttgctcggaatggagactgaacatcaggcactgttggcgaaagtcagggagggcgaggtcgctcttgaggagctccggtctaacaatgcagactgccaagcggagagggaaaaggcagccaccctcgagaaggaggtagcgggcctgcgtgaaaagatccatcatttggatgatatgttgaagtctcagcagcgtaaggtgagacaaatgattgagcagctgcaaaattccaaggctgtcattcagagtaaggatgcaaccattcaggagttgaaggaaaaaatagcgtatctcgaggccgagaacctggaaatgcacgatcgtatggagcatctgatagagaagcaaatttcccacggcaacttcagcactcaggcccgtgctaaaaccgagaatcccggaagtatccgtatctccaaaccgccatcgccaaagccgatgccagtgatccgcgttgttgagact

SEQ ID NO: 202772 - DNA, 1170 bp, Artificial Sequence
  derived and/or modified sequence
atgaatggtacaagaaattggtgcactttagtggatgtacatccagaagaccaggctgctggaagcgtggacattctccgcctcaccctacagggcgagctgaccggtgatgagctagaacacatcgctcagaaggctggccggaaaacatacgctatggtgagctctcactccgccggccactcattggcctctgaactggtagaaagccatgatgggcatgaggaaatcattaaagtgtatctcaaaggaaggagtggagacaaaatgatccacgaaaagaacatcaaccaactgaaaagtgaggttcagtacatacaggaagcgaggaattgcctccagaaactaagggaggatatcagctctaagttggatagaaacctcggcgactctctgcacagacaggagatccaggtggttctcgaaaaacctaacggattctcccagtcacctacagcgctctactcctcaccacccgaggtggatacctgcatcaatgaggacgtggagtcgttacgcaagaccgtgcaagatctcctcgcaaaactgcaggaagcaaagagacagcaccagtcagactgtgtcgccttcgaggtcaccctctccaggtatcagcgggaggccgagcagtctaacgtggctctgcagcgagaagaggatagagtcgagcagaaagaggccgaggttggggagctgcagcgccgactcctgggtatggagacagaacaccaagcattgctggctaaagtcagggaaggcgaggtggcgctggaagaacttcgcagcaataacgcggactgccaggccgagcgggagaaggctgctactcttgagaaagaggtggcaggactgcgggagaagatccatcatttggatgatatgctgaagtctcaacagcggaaggtgaggcagatgattgaacagctccagaactcgaaggcagtcattcagagcaaggacgcaactattcaggagctaaaagagaagatcgcttacctcgaagccgagaatctagagatgcacgaccggatggagcacttgatcgagaagcagatctcccatggaaatttttctactcaggcaagagccaagacagaaaatccaggaagtattcggattagcaagcccccctcccctaagccaatgccggtgattagggtggtcgaaacc

SEQ ID NO: 202773 - DNA, 1170 bp, Artificial Sequence
  derived and/or modified sequence
atgaatggtacccggaattggtgcacactggtcgatgtccatcctgaagatcaggctgccggcagcgttgatattttgagactaaccctacagggcgagctcaccggcgacgaattggaacacatcgcacaaaaggccggaagaaagacctatgccatggttagctcccactccgccggacattcacttgcgtctgagctggtggagtctcatgacggtcacgaagaaattatcaaagtctatcttaaagggaggtcaggcgacaagatgatacatgagaaaaatataaaccagcttaagtccgaggtgcagtatatccaggaggcaagaaactgcctccagaaactgcgggaggacatatccagcaaattggaccggaacctgggcgactctttgcatcggcaggagatccaggtggtgctggagaaaccaaatggctttagtcagtcccccaccgctctctacagctcacctcctgaggtggatacctgcattaatgaagatgtggaaagtctgaggaagaccgtgcaggatctgctggcaaagctgcaggaggcaaagcggcagcaccaatccgattgtgttgcctttgaagtaacactatctcgatatcagcgagaggccgagcagtcgaacgtggccttacagagggaggaggatagggtcgagcagaaggaggctgaagtgggtgagctgcaaaggaggcttctgggaatggagactgagcaccaggccctgcttgctaaagtgcgcgagggggaagtcgcactggaagagctgagatcaaacaacgcagactgccaggccgaaagagagaaggccgctacgcttgagaaggaggtggccggactgcgcgaaaagatccatcatctagacgatatgctgaaaagccagcagcgcaaggttcgccagatgatcgagcagttgcagaattcaaaggccgtgatccagtccaaagacgctactatacaggaacttaaagagaaaattgcttatttggaagctgagaacttggaaatgcatgatagaatggagcacctgatcgaaaagcagatctcccacgggaattttagcacacaagcgcgggcaaagaccgaaaaccctggctccatacgaatatccaaacccccttcccccaagccaatgcctgtcataagggtcgtcgagaca

SEQ ID NO: 202774 - DNA, 1170 bp, Artificial Sequence
  derived and/or modified sequence
atgaacggaacgaggaattggtgtacgttggtcgacgtgcacccagaagatcaagcggccgggtcggtggacattctgcgattgaccttgcagggagaacttaccggggacgaactcgagcacatagcccaaaaggctggacgtaagacctacgcgatggtttcgagccacagcgctgggcattccctggcctctgagctggtcgaatcgcacgacggccatgaagaaatcatcaaggtgtacctgaagggacgcagcggcgacaaaatgatccatgagaagaatatcaaccagctcaagtccgaagtgcaatacatccaggaagcgcgcaattgccttcaaaagctcagagaagatattagttcaaagctggaccggaacctcggcgactcactccatcgccaagaaatccaagtggtcctcgaaaaaccgaatggctttagccagtcaccgactgctctgtactcgtccccgccggaagtggacacctgtatcaatgaggacgtcgagtcactgcgcaaaaccgtacaagacctgctggctaaacttcaagaagcaaagcgccagcaccagagcgactgcgtggcgtttgaagtcactctgtcgcggtaccagagggaggccgagcagtcaaacgttgcccttcagcgagaagaggacagagtggagcagaaggaggcggaagtgggtgaactgcagagacgcctgcttggaatggaaacggagcaccaggcactccttgctaaagtgagagaaggagaggtggcactggaggagctccgttcgaataacgctgattgccaggccgaaagagaaaaggctgcgactctggagaaggaagtcgcgggacttcgggagaaaatccaccatctggatgatatgctcaaatcacaacagaggaaggttcggcaaatgatagagcaattgcagaactcaaaagcagtgatccagtctaaggatgctactatccaggagctcaaggaaaagatcgcatatctcgaagcagagaacctggagatgcatgatcggatggagcatctcatcgaaaaacagatttcgcacgggaacttcagcactcaggcccgggcaaagactgaaaaccccggctctatcagaatctcgaaacctccaagcccgaaacctatgccagtgatccgggtcgtggagact

SEQ ID NO: 202775 - DNA, 1170 bp, Artificial Sequence
  derived and/or modified sequence
atgaacgggactcgcaactggtgcactttagtggacgtgcatcctgaggatcaggccgctggaagtgtcgatatacttcggcttactcttcagggagagcttacaggagacgaactcgaacacatcgcccagaaagccgggagaaagacatacgcaatggtttcctcacattcagccgggcatagtctggcatctgaattagtcgaatcacatgatgggcatgaggaaataatcaaagtttatctgaaagggaggagtggagacaaaatgatccatgaaaaaaatatcaatcagctgaaaagtgaagtccagtatattcaggaagctcggaattgtctccagaaattacgagaagatatctcatcaaaactcgataggaacctcggagattcactccatcggcaggaaattcaggtggttttggaaaagcccaacggattttcgcagagtcctacagccctctatagttcgcctcctgaggtggatacatgtatcaacgaagatgttgaatccctacgaaaaacagtgcaggatctgcttgcaaaacttcaggaagccaagcggcagcaccagtctgattgcgtggcgtttgaagtgactctcagtaggtatcaacgcgaagcagaacagtcaaatgtggctctgcagagagaagaggatcgagtggaacagaaagaagctgaggtaggagaactccagaggcggctcctcggaatggaaacagagcatcaggcattattagcaaaggtcagagagggagaggttgctctggaagaattacggtctaacaacgctgattgtcaggcagaaagagaaaaagccgccacattggaaaaggaggtggctgggttgagggaaaagatacaccaccttgatgatatgctcaagtcacagcagagaaaggtcaggcagatgatagaacagcttcagaattcgaaggctgttatccagtctaaagatgccactatccaggaattaaaagaaaaaattgcgtacctggaagccgaaaaccttgaaatgcatgataggatggagcatcttatagaaaagcagatttctcacgggaatttttccactcaggctagggcgaaaacagagaaccctggatcgatccgaatatctaagcccccctcccctaaaccaatgcctgttatcagagttgttgaaact

SEQ ID NO: 202776 - DNA, 1170 bp, Artificial Sequence
  derived and/or modified sequence
atgaacggaactcggaattggtgcactctggtggacgttcatccggaagatcaagcagcgggctctgtggatatccttagactgactctgcaaggcgaactcaccggcgatgagttggagcatatcgcccaaaaagctggaaggaaaacttacgctatggtgtcgtctcacagcgccggacacagcctggcctccgaactggtggaatcccatgacggccatgaagaaatcattaaagtgtacctgaagggacgctcaggagacaaaatgatccacgaaaagaacattaatcagctgaagtccgaggtgcagtacatccaggaagcgcggaactgtctgcagaagctcagagaagatatcagctccaagttggatagaaacctcggagactcactccatcgccaggagatccaagtggtgctggagaaaccgaacggattctcacaaagcccaaccgccctttactcaagcccgcctgaggtggacacttgcatcaacgaggacgtggaatccttgagaaagaccgtgcaagacctgctcgctaagctccaagaggctaaacgccagcatcaatcggattgcgtcgcttttgaagtcactttgagccgataccagagagaggcagaacaatcgaatgtggctctgcaacgggaagaagatagggtggaacagaaggaagctgaagtgggagaactgcagcgccgcttgctcggaatggaaaccgaacatcaggctttgctggccaaagtgagagaaggcgaggtcgccctggaagagctccgttcaaataacgcagactgccaagcggagcgcgaaaaggccgccaccctcgagaaggaagtcgccggcctccgggagaagatccatcacctggacgatatgctgaagtcccaacagcgcaaggtcagacagatgattgaacagctgcagaactccaaggccgtcattcagtcgaaggacgccaccatccaggaactgaaagaaaagattgcctacctggaggccgaaaaccttgagatgcacgacaggatggaacacctgatcgaaaagcagatcagccatgggaatttcagcacccaggcgcgggctaaaactgaaaacccaggatccataagaatctcgaaacctcccagccctaagccaatgccggtcatccgcgtggtcgaaact

SEQ ID NO: 202777 - DNA, 1170 bp, Artificial Sequence
  derived and/or modified sequence
atgaatggtaccagaaattggtgcactcttgtggatgtgcaccctgaggaccaggcagcagggtcagtcgatattctccgcctgactctgcaaggagaactcaccggggatgagctcgagcacatcgcacaaaaggccggtcgcaaaacctacgctatggtgtcctcgcattcggctggacactccctggcatccgaacttgtggagtcacatgatggacatgaagaaatcattaaggtctacctgaagggtcggagcggtgataagatgatacatgagaagaacattaatcagctgaagagcgaggtgcaatacattcaagaagcaagaaactgcctgcaaaagctgcgggaagatatttcctcgaagctcgaccgcaacctcggggattcactgcacaggcaagagattcaggttgtgcttgagaaacctaacgggttttcgcagagcccaactgcactttacagctccccaccggaggtggacacctgtattaacgaggacgtcgagagcctgcggaaaactgtgcaagacctgctcgcgaaactgcaggaagcaaagagacagcatcaatccgattgcgtggcgttcgaagtgactctgtcgcgttaccaacgtgaagcagagcagtcgaacgttgcgcttcagcgtgaggaggatcgagtggaacaaaaggaagccgaggtcggtgaactgcagagaagattgcttggaatggagactgagcaccaggctctgcttgcaaaggtgcgcgagggagaagtggcactcgaagaactgcggtcgaacaacgcggactgccaggcagaacgggaaaaggccgccaccctggagaaggaagtggcaggattgcgagaaaagatccatcatctggacgatatgctgaagtcccagcaaaggaaggtgagacagatgattgaacaattgcagaattcgaaagcagtgatacaaagcaaagacgcaactatacaagaacttaaagaaaagatcgcatacttggaggctgagaacttggaaatgcatgacaggatggaacatcttatcgaaaaacagatttcgcatggaaacttttccacgcaagcgcgagccaagactgaaaacccaggatcgattagaatttcgaagcctccttcccccaagcctatgccagtgataagagtggtggagact

SEQ ID NO: 202778 - DNA, 1170 bp, Artificial Sequence
  derived and/or modified sequence
atgaatgggacgcgtaattggtgtaccctcgttgatgtgcatcctgaagatcaagcagcaggtagcgttgatatacttagattgactcttcaaggagaactcacgggggatgaacttgaacatattgcccagaaggccggaagaaagacctacgctatggtgagctcgcattcagcaggtcattcgcttgcgagtgaactcgtcgaaagccacgatgggcacgaggaaatcattaaagtgtacctcaagggaagatccggcgataagatgattcacgaaaagaacataaaccagctcaaatcggaagtccagtacatccaggaggcacgcaactgcctgcagaaacttcgggaagatatttcctcaaagctggaccgaaacctcggggattcactgcatagacaggaaattcaggtcgtattggaaaagcctaatggtttttcacagtccccaactgcgctctacagctcgccaccagaggtcgatacttgtattaacgaggatgtggagtcacttcgcaagaccgtgcaggacctcctggcaaagctccaagaagcaaaacgacagcaccagtcagattgcgtggcatttgaggtcaccctgtcgcgttatcaaagggaagcagaacaaagcaatgtggcactgcagcgggaggaggacagggtcgaacagaaggaggcagaagtcggagagctgcaaagacgacttctgggaatggaaactgagcaccaagcacttctggctaaggtacgggagggggaagtggcacttgaagaactgagaagcaataatgccgactgccaagcagaacgggagaaggcggcaactctcgaaaaggaagtggcaggactcagggaaaagattcatcatctggacgatatgcttaagtcccaacaacggaaagtgagacaaatgattgaacaacttcagaactccaaggctgttatccaatcgaaggacgccactatccaagaactcaaagagaaaatagcgtatttggaagctgaaaacctggaaatgcatgaccgtatggaacacctgatcgaaaagcaaatttcccatggcaacttctcgacccaggcaagagcaaaaaccgaaaaccctggatcaatccggatatcgaaaccccctagcccaaagccaatgcctgtgatccgggtggtcgaaacc

SEQ ID NO: 202779 - DNA, 1170 bp, Artificial Sequence
  derived and/or modified sequence
atgaacggcactagaaattggtgcacattggtggatgtccacccagaggatcaggctgccggatcggttgatattttgaggctcactctccaaggggagctgaccggagatgagttagagcatattgcacagaaggcaggccgaaagacatacgctatggtctctagccacagtgctggacactctctggccagcgagttagtagaaagtcacgacggacacgaagagatcattaaggtatacctgaaaggacgtagtggtgataaaatgattcacgaaaagaacataaaccagttgaaatctgaggtgcagtatatccaggaggcgcgtaactgcctgcaaaaattgcgcgaggatatttccagcaaactggatcggaacctcggagacagcctgcatagacaggagatccaggtagtactcgagaaaccgaacggattctctcagtcccctaccgcactctacagttcaccccctgaggtggatacgtgcatcaatgaagatgttgaatccctcagaaagaccgtgcaggacctcctggcaaaactccaggaggccaagcgccagcaccaatctgactgcgtggcctttgaagtaaccctgagtaggtatcaacgggaggctgagcagtctaatgttgccctgcaaagggaagaagatagagtcgaacagaaggaagcggaagtcggggaacttcaaaggcgcctgttagggatggaaacggaacatcaagcccttctcgccaaggtccgggagggggaggtggctttagaggagcttcggtctaataatgcagattgtcaagccgagcgggagaaagcagctactctggaaaaggaagttgctgggcttcgggaaaagatccaccatctggacgacatgcttaagagccaacagcgcaaggtacgtcagatgatcgagcagttgcagaattcgaaagctgtgattcagtcaaaggacgccactattcaggagttaaaagagaagatcgcatacttagaggctgaaaatttggagatgcatgataggatggagcacttgattgagaagcagatcagccacgggaattttagcacacaggcccgagcaaagacggagaatccgggctccatccggattagcaagcccccgtctccaaaacccatgcctgtgataagggttgtagaaaca

SEQ ID NO: 202780 - DNA, 1170 bp, Artificial Sequence
  derived and/or modified sequence
atgaacggtactaggaactggtgtaccctagtggacgtgcacccagaagaccaggcggcgggctctgttgatatcctgcgactgactctccaaggcgagttaacgggagacgagttggagcacatcgcacagaaggctggacgtaaaacttatgctatggtatcctctcactccgctggccacagcttggcttctgaactggttgagtcacatgatggccatgaggaaataatcaaggtgtacctcaagggaaggtctggcgacaagatgatccacgagaagaatattaatcagctgaaatctgaggtccagtacatacaggaggctcgaaattgcctgcaaaagttgcgggaagatattagctctaagctcgaccgcaacctcggagactcactgcaccgccaggaaatccaggtagttttggaaaaaccgaacggattctctcagtctcccaccgccctgtactcttcccccccggaagtcgatacatgcatcaatgaggacgtggagtccctgcggaagaccgtgcaggatctgctggctaagcttcaggaagctaaacgtcagcatcagtctgactgtgtcgcgttcgaggtaacattgagtagatatcagcgggaggccgagcagtccaacgtggcccttcagcgggaagaagacagagttgaacaaaaggaagccgaggtgggagaactccaacggaggctgttagggatggagaccgagcatcaggcactgctggccaaagttcgggagggagaagtagccctcgaggagctgcgcagtaataacgccgattgtcaggccgagcgggaaaaagctgccacactagagaaggaagtggccggactgcgcgaaaagatccaccacctggatgatatgctgaagtctcagcagcggaaagtgcgccagatgatcgaacagctgcagaactccaaggcagtaatacaatccaaagacgcaacgatccaggaactgaaagaaaaaattgcttatctggaggctgagaacctggaaatgcacgaccgcatggaacacctgattgagaaacaaatttcacacggaaatttctcaacccaggcacgcgccaaaacggaaaaccctggaagcatcagaatcagtaagcctccatcacctaagcctatgcctgtgattcgcgtggtggaaact

SEQ ID NO: 202781 - DNA, 1170 bp, Artificial Sequence
  derived and/or modified sequence
atgaacggaaccaggaattggtgtacgctggtggacgtgcaccccgaagaccaagcagctggatctgtcgatatcctcagactcactctccaaggcgaactcaccggagacgaactggagcacatcgctcagaaggccggccgtaaaacctacgccatggtctcgtcccatagcgctggccactccctggccagtgagctggttgagtcccacgatggccatgaggaaatcatcaaggtgtatctaaagggacggagcggggataagatgatccacgagaaaaatatcaaccaactcaaatccgaagtccagtatatacaagaggcaaggaactgcctgcagaagctgcgtgaagacatctcatcaaagcttgacaggaatctcggggactcccttcaccggcaggagatccaggtggtccttgaaaaaccgaacgggttctctcaatctccaactgcgctctacagttctccccctgaggtggacacctgtattaacgaagatgtcgagagtttaaggaaaacagtccaggatctgttggctaagctgcaagaggccaaaagacagcatcaatccgactgcgttgcattcgaggtgaccttgagcagatatcaaagggaagccgagcagtccaatgtggccctgcagcgcgaggaagaccgagtcgaacaaaaggaagccgaggttggcgaactgcaaaggagactgctcgggatggaaactgagcaccaggcactgctcgctaaggtgcgggagggtgaagttgccctggaagagctgagaagcaacaatgccgattgtcaggcagaaagagaaaaggcagccacgctggaaaaggaggtcgccggactgcgcgaaaagattcatcacctggacgacatgctgaagtcacagcagcgcaaggtccgtcagatgattgaacagctgcaaaactcgaaggctgtgatacagtcaaaggatgcaaccatacaggagctgaaagaaaagatagcgtacctagaagctgaaaacctggaaatgcatgatagaatggagcacctgatcgaaaagcagatttcccacggaaacttcagcactcaggctcgggccaagactgagaaccctgggagcattcgaatatctaaaccaccatcccctaagccaatgccagtgattcgggtcgtggaaacc

SEQ ID NO: 202782 - DNA, 1170 bp, Artificial Sequence
  derived and/or modified sequence
atgaatggtacacgtaattggtgcaccctggtggatgtccatcctgaggatcaggccgcgggttcggtggatatcttgcgtctcacactacaaggagaactcaccggagacgaattggaacacatcgcccagaaggccggacgcaagacgtatgccatggtgtccagccacagcgccggtcatagtctggctagcgagctggtagaatcccacgatggccacgaggaaatcatcaaggtctatctgaagggccgaagtggcgataagatgatccacgagaaaaacatcaatcagctaaagtccgaagtgcaatatatccaagaggcccgaaactgcctccagaagctgcgtgaggatatcagtagcaagctcgatcgaaatctgggcgattctctgcaccgacaggaaattcaagtggtgcttgaaaaaccaaacggtttcagccagtcccctaccgcgctgtactcgagcccgcccgaggtggatacctgcattaacgaagacgtcgagagcttgcgaaagacagtgcaggacctcctagccaaactgcaggaggcgaaaaggcagcaccagtcagactgtgttgccttcgaagtcacgttgagccgttatcagcgcgaggctgaacaaagcaacgtggccctgcaacgtgaggaggacagagtggagcagaaggaagcggaggtgggagagctccagaggcgcttgttgggcatggagactgaacaccaagccctcctcgccaaggtgcgcgagggtgaagtggccttggaggagctgcggtccaataatgcggactgccaggcggaaagagagaaagccgccacgctggaaaaggaggtggcaggtctgagagagaagatccaccacttggacgacatgctgaagtcccagcaacgtaaggtgcggcagatgatcgagcaactgcagaactccaaagcggtgattcagtcgaaggatgctaccatccaggagttaaaggaaaaaatcgcctacctagaggccgagaacttggaaatgcacgataggatggagcatcttattgaaaagcagataagtcatggtaacttcagtacgcaggcgagagccaagacggagaaccccggatcgattcggatatctaaacctccaagcccgaaaccaatgccggtcatccgggtggtggagacc

SEQ ID NO: 202783 - DNA, 1170 bp, Artificial Sequence
  derived and/or modified sequence
atgaacggaactcgtaactggtgcacccttgtggatgtgcacccagaagatcaagccgccgggagcgtcgatatcctgagactcaccctgcagggcgagctcactggtgatgaactggaacacatagcacaaaaggcggggcgtaagacctacgcaatggtcagctcacattcagcaggacattcactggccagcgaactggtagaatcccatgatggacatgaagagattatcaaagtgtacctgaaggggcgttcgggtgacaaaatgattcatgaaaagaacatcaatcagctgaagagcgaggtgcagtatatccaagaagcacggaactgtctgcagaagctgagagaggatatctcaagcaagctggaccgcaaccttggagactccctgcatcggcaggagatccaagtggtgctcgagaaaccgaatggtttctcgcagtcacccactgcactgtactcctcacctcctgaggtcgacacctgcatcaacgaggatgtggaaagcctgcgtaagacggtgcaagatctccttgcgaagctgcaggaagcgaaacgccaacatcagtccgattgcgtggcgtttgaggtcaccttgagccgttaccaaagagaggcagagcagtcgaacgtggctttgcaaagagaagaggaccgagtggaacaaaaagaggcagaagtgggcgaactccaacgacgattgctcggcatggaaacggaacatcaagcactccttgcaaaggtcagagagggagaggtcgcactggaagaacttcgcagcaacaatgcagattgccaggcagaaagagaaaaagctgctaccctcgaaaaagaggtggccggactccgcgaaaagattcatcatcttgacgacatgctcaagtcgcaacagaggaaggtgcggcagatgattgaacagctccaaaactcaaaagctgtcattcaatcgaaggatgcaaccatccaagagcttaaggagaagatcgcataccttgaggcagaaaatctggagatgcatgatagaatggaacacttgattgaaaagcaaatatcccacggcaacttcagcacgcaggctagagcaaagactgaaaacccaggctccattcgaattagcaaacccccttcgcccaagccaatgcctgtcatcagagtggtcgaaacc

SEQ ID NO: 202784 - DNA, 1170 bp, Artificial Sequence
  derived and/or modified sequence
atgaacggaacgaggaattggtgcaccttggttgacgtccaccctgaagaccaagccgctggaagcgtggatatcctgcggcttacactgcagggcgaactgaccggggatgagctggaacacatcgcccagaaagcaggaagaaagacatacgcaatggtgtcctctcattcagccggtcatagcctggcatctgagctggtcgaatctcacgatgggcatgaagaaatcattaaggtgtatctcaagggtaggagtggcgacaaaatgattcatgaaaaaaatattaaccaactgaagtcggaagttcagtatatccaggaggctcggaattgcctgcagaaactgcgggaagacatctcttcaaaactagataggaatctgggagactcgcttcataggcaagaaatacaggttgttttggagaaacccaacggattctcacagtctccgacagcactgtatagcagccctcctgaagtggatacatgcattaatgaggatgtcgagtcattacgcaagacagtccaagatcttctggctaaactgcaggaagctaaacggcagcaccaatcagattgtgtggcgttcgaagtgactttgtcacgctaccagcgcgaggcagagcaaagtaacgtcgctctgcagagggaagaggatcgggtcgagcaaaaggaagctgaagtgggagaactgcagagacgcctgctgggcatggagactgaacaccaggcccttctggccaaggtgcgggaaggagaagtcgccctggaggagctcagatctaacaacgcagattgccaagcagagcgtgaaaaggccgcgacattggagaaggaagtggccgggctgcgggagaagattcaccacttggacgacatgctgaaatcccagcagaggaaagttaggcagatgatcgaacagctgcagaacagcaaagcggttattcagtccaaagatgccaccatacaggagctgaaagaaaagattgcttatctggaggcagagaacctggagatgcatgatagaatggagcaccttatagagaagcaaatctctcacgggaattttagtactcaggcgcgagcaaaaaccgagaaccccgggtccatcaggatctctaagcccccctccccgaaacctatgcctgtgatcagagtagttgagacc

SEQ ID NO: 202785 - DNA, 1170 bp, Artificial Sequence
  derived and/or modified sequence
atgaatggaactcggaattggtgtacgctcgtggacgtgcacccggaggaccaagctgccggatccgtggacatcctccgactgacccttcagggagagctgaccggagacgagctcgaacatattgcgcagaaggccggtcggaaaacctacgccatggtgagctcccactcagcgggacattccctggcctcggaactggtggagagccatgatggacatgaagaaatcatcaaggtgtacctgaagggaaggagcggagataagatgatccatgagaagaatatcaatcagctcaaaagcgaggttcagtacattcaagaagctcggaactgcctgcagaagctgagagaagatatctcgtccaagctggacagaaatctgggtgactcactccatcgccaggaaatccaagttgtgttggaaaagccgaacgggttctcgcagtccccgaccgccctttactcatccccgccagaagtggatacctgcatcaacgaggacgtggagtcactgagaaagactgtgcaagatctgctggcgaaacttcaagaggcgaagaggcagcaccaatcggactgcgtggccttcgaggtcaccctgtcacgctaccagcgggaagccgagcagtcgaatgtggcactccagcgcgaagaggatcgggtggagcaaaaggaagcggaggtgggcgagctccagagacgactcctgggcatggagactgagcaccaggccttgttggcaaaggtcagggaaggagaggtcgcgctggaagagctccggtcaaacaacgcggattgccaggcagagcgagaaaaggccgccactctggagaaggaagtggcggggcttcgtgagaaaatccatcatctcgatgacatgctgaagtcacagcaacggaaggtgaggcaaatgattgaacaactccaaaacagcaaggccgtgatccagtcaaaggacgccaccatccaggaactcaaggagaagatcgcctacctcgaagcggaaaacctggaaatgcatgataggatggaacacctgattgagaaacaaatttcccacgggaacttctcgactcaagctcgcgcaaaaaccgaaaaccctggctccattagaatctcgaagccgccatcgcctaaacctatgccggtgatccgggtcgtggagact

SEQ ID NO: 202786 - DNA, 1170 bp, Artificial Sequence
  derived and/or modified sequence
atgaacggaactagaaactggtgtactctggtggatgtgcatccggaagatcaagcagcgggatcggtggatatcctgcgcctcaccctgcagggcgaactgacgggagacgagttggaacacatcgcccagaaggctggccggaaaacctacgccatggtgtcgagccatagcgcgggccacagcctcgccagcgagctggtcgagtcgcatgacggacatgaagagattatcaaggtctacctgaaagggcggtccggtgacaagatgattcacgagaagaacatcaaccagctcaagtccgaggtgcaatacatccaagaggcacgcaactgcttgcaaaaactcagggaggacatcagctccaagctggatcgcaacctgggagattcgcttcatagacaagagatccaagtcgtgctcgaaaagccgaacggcttctcccagtcgccgactgccctctactcgtccccaccggaggtggatacctgcataaacgaggacgtggaatccctgaggaaaactgtccaggacttgctggccaagctgcaggaagctaagcgccagcatcagagcgactgtgttgctttcgaggtgactctgtcccggtaccaacgcgaggcggagcagtctaatgtggccctgcaacgggaggaagatcgcgtggaacagaaggaggccgaggtgggggaactgcagagacggcttttgggcatggagactgagcaccaggccctcctcgccaaagtgagagaaggagaagtggccctggaggaactgcggtcaaacaatgccgactgtcaagcggagcgcgaaaaggcggccaccctcgagaaagaagtggccggacttcgcgaaaagatccaccatctggacgacatgcttaagtcgcagcagagaaaggtccggcaaatgattgagcagcttcaaaatagcaaggcagtgatccagtcgaaagatgccaccatccaggaactgaaggaaaagatcgcctacctggaggccgagaacctcgagatgcacgacagaatggagcacttgatcgagaagcagatctctcatggaaatttcagcacccaggccagagccaagaccgaaaacccgggatccattcggatctccaagccaccctcgccgaagccgatgcctgtgatccgggttgtggaaact

SEQ ID NO: 202787 - DNA, 1170 bp, Artificial Sequence
  derived and/or modified sequence
atgaacggtacgcgcaattggtgcactctcgtcgacgtccaccctgaagaccaagccgcaggttcagttgacatactcaggctaaccctgcaaggcgagcttactggcgacgagctggagcacatcgctcaaaaagccggccggaagacatacgcaatggtgagctcccattccgcagggcactccctcgcgtccgagttagtggagtctcacgacggacatgaagagattattaaagtctatctaaaaggcagatcaggagacaagatgatacacgagaagaatattaaccagctcaagagcgaggttcagtacatccaggaagctcggaattgtctgcagaaacttagagaggacatctcatcgaagttggatcggaacttgggcgatagcctgcatcgtcaggagatccaggtggtgctcgagaaacccaacggcttttcacagagcccgaccgccctttactcaagtcccccagaggtggacacatgtattaatgaagatgtggagagtctgaggaaaacagttcaggaccttctggccaaactccaggaagctaagaggcagcaccaaagcgactgcgttgcattcgaagttacgctgagtaggtaccagcgcgaggctgagcaatccaatgtggctctacaacgagaggaagacagagtggaacagaaagaagcagaggtcggggaattgcagaggcggttattggggatggaaaccgagcaccaggccctgctggccaaggttagagagggagaggtggccttggaggagttacgttccaacaacgcggactgccaggccgagagagaaaaagcagccacgttagaaaaagaagtggccggcctccgtgaaaaaatccatcatctcgacgatatgctgaagagtcagcaaagaaaagtgcggcagatgatagaacagctgcaaaactctaaggcggtaatccaatcaaaggatgctacaatccaggagttaaaggagaaaattgcgtacctcgaagccgaaaatctggagatgcatgacagaatggagcatctgatcgaaaagcaaattagccacggcaatttctccactcaggcacgggccaaaaccgaaaatccgggcagtatacgaataagcaagcctccctccccgaagcccatgcccgttattcgagtcgtcgagact

SEQ ID NO: 202788 - DNA, 1170 bp, Artificial Sequence
  derived and/or modified sequence
atgaacggcacgcggaactggtgtactctcgtggatgtccacccagaagatcaggctgcaggatcggtcgacatcctccggctgacccttcaaggcgaactgacgggagacgaactcgaacacattgcccaaaaggcagggcgaaagacctacgcaatggtgtccagccacagcgccggacattcactcgcgtcagagcttgtggagtcgcacgatgggcatgaggagattatcaaggtgtacctgaaaggtcgctccggagataagatgatccatgagaaaaacatcaatcaactcaagtccgaagtgcagtacattcaagaggcaagaaactgtttgcagaagttgagagaagatatctcgtcgaaactggaccggaatttgggcgattcacttcaccgccaagagatccaggtggtgctggaaaaacctaacggattcagccaaagcccaaccgccctttacagctctcctcctgaagtggatacctgtattaacgaagatgtggaaagcctgcgcaagaccgtgcaggacctgctggcaaagctgcaagaagccaagcgccagcaccaaagcgattgcgtggcatttgaagtcactctgtcgcgctaccaaagagaggcggagcaatcgaacgtcgcgcttcaacgagaagaagatcgcgtcgagcagaaggaagctgaagttggagaacttcagaggagactgcttgggatggagactgaacaccaagctcttctggcaaaagtgagagagggagaagtggcgctggaagaactcaggtcaaacaatgcagattgccaagccgaaagagaaaaagcagcgacgctcgaaaaggaagtggcaggcctcagagaaaagatacatcatcttgatgatatgctgaagtcgcagcaacgtaaagttcggcaaatgattgaacagcttcagaattcgaaggcagtgatacagtctaaagatgcgaccattcaggagcttaaagaaaagattgcgtatttggaagcggaaaacctggaaatgcatgataggatggaacacctcatcgagaaacaaatttcgcacggtaacttttccacccaggcacgtgcaaagaccgaaaatcctggttcaatcaggatttccaaaccaccttccccaaagccaatgcctgtgatacgtgtggtggaaact

SEQ ID NO: 202789 - DNA, 1170 bp, Artificial Sequence
  derived and/or modified sequence
atgaatggtacaagaaattggtgcacgttggttgatgtgcatccggaagatcaagcagcgggatcagttgatattttacgtcttacgctacagggggaactgacgggggatgaactcgagcacattgctcaaaaagcggggaggaaaacgtacgccatggtctccagccatagcgctggtcattctttagcctcagagttggtagaatcgcatgacggacacgaagaaatcattaaagtctatctgaagggaagatctggcgacaagatgattcacgaaaaaaatattaaccaattaaaaagcgaggttcagtatatccaggaggccagaaactgcttacagaaattacgggaggatatctcctctaaacttgaccggaacttaggcgacagtctgcatcgacaggaaattcaggtggtgcttgaaaaaccgaatggtttttctcagtcaccgactgctctgtatagctcgcctccggaagttgatacatgcattaatgaggatgtggaatcacttagaaagacagttcaggacctccttgccaaacttcaggaggccaagcgtcaacaccagtccgattgcgttgcttttgaagttacactgtctagatatcagcgggaagcggaacaatccaatgtcgcgctccagagagaggaagaccgagttgagcagaaagaagccgaggtgggtgaattgcaacgtagattgcttggcatggaaacagagcaccaggcacttctggcgaaagtgcgtgagggggaggtcgcattggaagaactgcgtagtaacaacgcggattgtcaagcggagcgggaaaaggcagcgactctggaaaaagaagttgccggtctaagagagaaaatccatcatttagatgatatgctcaaatctcaacagcgcaaagttcgccagatgattgaacaacttcagaatagtaaagcagttatacagagcaaagatgctacgatacaagagctgaaagagaaaattgcttacttagaagcggaaaacctggagatgcatgaccgaatggaacatttaattgagaagcagatttctcacggcaatttttctacacaggcacgcgcgaaaacagagaatcccggtagtattcggattagtaaacccccgtctccgaagcctatgccggtaatacgcgttgtcgaaacg

SEQ ID NO: 202790 - DNA, 1170 bp, Artificial Sequence
  derived and/or modified sequence
atgaacggtaccaggaactggtgcacactagtggacgtgcatcctgaagatcaagccgctggctccgtggatattctgagactgactctgcaaggagagctgactggggacgagttggagcatatcgcacagaaggcaggacgcaagacatacgccatggtttcatcgcatagtgccggacatagcctggcctccgaactggtggagagccacgatggacacgaggagataatcaaggtctatctcaagggaaggagcggagataaaatgattcatgaaaaaaatattaaccagctcaagtccgaagtgcagtatattcaggaggccagaaattgtttgcagaaactccgcgaggacatcagtagtaaactcgacaggaatcttggagattcactccacaggcaggaaatccaggtcgtactggagaagcctaacgggttcagccagagcccgacagctttatatagttctcccccagaggtagacacctgtattaatgaggacgtggaaagcttaaggaaaacagtacaagacctgttggctaaactgcaggaagccaaaaggcagcatcagagcgattgcgtggctttcgaggtgaccttatcgcggtaccaacgtgaagcggaacagtccaacgtcgccttgcaacgggaggaggatagagtcgagcagaaagaggctgaagtgggagaattgcagcgtagactccttggcatggagacagagcaccaggcactcctggctaaggtgcgcgaaggtgaagtcgcactcgaagagctgagaagcaataatgcagattgccaggcagaacgggaaaaggccgccaccctagagaaggaagttgccggcctgcgagagaagatccaccaccttgatgatatgctgaaatcccagcagagaaaagtgcggcaaatgatagagcagctgcagaattcgaaagccgtgatccagtccaaagacgccacaattcaggaattgaaggaaaaaatcgcatatcttgaagccgaaaacctggagatgcatgataggatggaacatttgattgagaaacagattagccatggcaacttctctacacaggcacgagcaaaaaccgagaatcctggatctatcagaatttctaagcctccaagcccaaagcctatgccagtgatcagagtcgtcgaaaca

SEQ ID NO: 202791 - DNA, 1170 bp, Artificial Sequence
  derived and/or modified sequence
atgaacgggactagaaattggtgtactctggtggatgtgcaccccgaggaccaggctgccgggtcagtcgacatattgcggcttacccttcagggtgaactgaccggtgatgaactcgaacacattgcgcagaaggccggaaggaaaacgtatgccatggtgagctctcattcggcaggacattcgctggcttctgaacttgtggaatcccacgacggccatgaggagatcattaaggtgtacctcaaaggacggtcgggtgacaaaatgattcacgaaaagaacatcaatcaacttaagtccgaagtccaatacattcaggaagcacgtaactgtctgcagaagctgcgtgaggatatctcgtctaagctggatagaaacctgggggactccctccaccgccaagaaatacaagtcgtgcttgaaaagcccaacggcttctcgcagagccctactgccctttactcgagcccaccagaagtggatacctgtataaacgaggatgttgaaagccttcgcaagacggttcaggatctccttgcgaagctgcaagaggccaagaggcaacatcaatcagattgtgtggcttttgaagtgacgctgtcccggtaccaacgggaagcagaacaaagcaatgtggcactgcagagagaggaggatcgcgtggaacaaaaggaggcagaagtcggcgaacttcaacggagattgttgggaatggaaaccgagcatcaggcactcctggcgaaggtgagagaaggtgaagtggccctggaagaactgcgttccaacaacgccgactgccaggcagaacgggaaaaggcagccactttggagaaagaagtggctggactcagagaaaagattcatcatctggatgatatgcttaaatcacagcagcggaaggtccggcagatgatagaacagctgcaaaattccaaagcggtgatccagagcaaggatgctaccattcaggagctgaaggaaaagattgcctaccttgaggcagaaaaccttgagatgcatgacaggatggaacatcttattgaaaagcagatttcgcatgggaacttttctactcaagccagggcaaagaccgagaacccaggctccatccggatttccaagcctccttcacctaagcctatgccggtgatcagagtggtggaaact

SEQ ID NO: 202792 - DNA, 1170 bp, Artificial Sequence
  derived and/or modified sequence
atgaacggtactagaaactggtgtacccttgtggatgtccatcctgaggaccaggccgcaggtagcgtcgatatacttcggctcactttgcagggagaactcaccggagatgaacttgaacatatcgcacagaaggctggtcgaaaaacctacgcaatggtttcaagccattcggcaggacattcactggcatccgagctggtggaaagccatgatggccacgaagagatcatcaaagtgtacctgaaaggacggtcaggtgataagatgattcatgaaaagaacattaaccaacttaaaagcgaagtgcaatacatacaagaggcaagaaattgtctgcaaaagctgcgagaggacatctcatccaagctggataggaaccttggagattcgctccatagacaagagatccaggtggtccttgaaaagccaaatgggttttctcaatccccaacggcgttgtactcgagtccacctgaggtggatacttgcatcaacgaagatgtggaatcgcttagaaagaccgtgcaagaccttctcgccaaactgcaagaagcaaagagacagcatcagtcagattgcgtggcattcgaagtcacgctttctcgataccaacgcgaggcagagcagtcgaacgtggcacttcaacgcgaagaagatagagtagagcaaaaggaagcagaagtcggagaacttcagcgcagacttctgggtatggaaaccgaacaccaggcactgcttgctaaggtgcgagagggagaagtggcactggaagaactgagatcgaataatgccgactgtcaagcggaacgagaaaaggcagccactctggagaaggaggtggcaggattgagggaaaagatccaccatcttgatgacatgttgaagtcccaacaaagaaaggtgagacagatgattgagcaactgcagaacagtaaggccgtcatccagagcaaggacgcgactattcaagagctgaaagagaagattgcctaccttgaggcagaaaatcttgaaatgcacgacagaatggaacatctgattgaaaaacaaatttcgcatggtaacttcagcacccaggcgcgtgccaagactgaaaaccctggttcgattagaatctcgaagcctccttcacccaagcctatgccagtcattcgcgtcgtggaaacc

SEQ ID NO: 202793 - DNA, 1170 bp, Artificial Sequence
  derived and/or modified sequence
atgaacggcacgcgaaactggtgcaccttggtcgatgtgcacccggaggatcaagctgccggttcggtcgacatcctgcggctgaccctccagggtgaactcaccggggacgaactggaacatatcgcccagaaggccggaagaaaaacctacgctatggtcagctcacactcggccggacactcgctcgcctcggagttggtcgagtcgcacgatggccacgaagaaatcatcaaggtgtacctgaagggccgctccggggataaaatgatccatgagaagaacattaatcaactgaagtcagaagtgcagtacattcaggaggcgcgcaactgcctgcaaaagctgagagaggacatctccagtaagctcgatcggaaccttggagactcactgcatcggcaggaaatccaggtggtgttggagaaaccgaatggatttagccagtccccgactgctctttactccagccctccagaggtggacacttgcatcaatgaggatgtggaatcgctgcgcaagactgtccaagacctcctggccaagctccaagaggcaaagcggcagcaccaatccgactgcgtggccttcgaagtgaccctgagccgttatcagcgggaggcggaacagtccaacgttgcccttcagagagaggaggatagggtcgagcagaaagaagcagaggttggagaactgcaacgcagacttctggggatggaaactgagcaccaggcgctgttggcaaaggtccgcgaaggagaggtagcactcgaagaactgaggagcaataacgcggactgtcaggctgaacgagaaaaggcagccactctcgaaaaggaggtggctggactgagagaaaaaatccatcatctggacgacatgctgaagtctcaacagcggaaagtgcgccagatgatagagcagctccagaactcaaaagcggtgatccagtcgaaagacgccacgatccaagagctgaaggaaaagatcgcctacctggaagcggagaatctcgaaatgcacgatcgcatggaacatctcatcgaaaagcaaatttcccacggcaatttctcaacccaagcgcgggcaaagactgagaacccgggatcgattaggatcagcaaaccaccctctccaaagccgatgcctgtgatccgcgtggtggaaacc

SEQ ID NO: 202794 - DNA, 1170 bp, Artificial Sequence
  derived and/or modified sequence
atgaacggaacccgcaactggtgcacccttgtcgatgtgcatccggaggaccaggccgctgggtccgttgacatcctccggctgacccttcaaggtgaactgactggcgacgaattggaacacattgcacaaaaggcgggtcgaaagacttacgcaatggtcagttcgcattccgcgggacactccctggcaagcgagctggtggaatcgcacgatggacacgaggagataatcaaagtgtacctgaagggcagatccggagacaagatgatccatgaaaagaacataaatcagcttaagtcggaagttcagtacatccaggaagcccgcaactgccttcagaagctgagggaggatattagctcgaagctggaccgcaatctgggagattccttgcaccggcaggagatccaagtggttctcgagaagccaaacgggttctcgcaaagccccaccgccttgtactcatcgccccctgaggttgacacctgtatcaacgaggacgtggaaagcctccgaaaaactgtccaggatctccttgctaagctccaagaggcaaagcgccagcatcagagcgactgcgtcgcgttcgaagtcactttgtccagataccaaagggaggctgagcaatcgaatgtggcgctccagcgcgaggaggaccgggtcgagcagaaggaagcggaggtgggcgagctgcagcggcgcctgctgggtatggaaacggaacaccaggcacttctggccaaggtccgggaaggggaagtggcgctggaggaacttcggtccaacaacgctgattgtcaggcagagcgtgagaaggctgccactctggagaaggaagtcgctggcctgcgcgaaaagatccaccacctcgatgacatgctcaaaagccaacaaaggaaggtcagacagatgatcgaacagctgcaaaattccaaggcagtgatccagtccaaagatgctaccatccaagaactgaaggagaagatcgcatatctggaggctgagaacctggagatgcatgatcggatggaacacctgattgaaaaacagatcagccatggaaatttctccacgcaggcgcgggccaagacggaaaaccccggatcaatcagaatttcgaagccgccaagccctaaaccaatgcctgtcatcagagtggtggaaacc

SEQ ID NO: 202795 - DNA, 1170 bp, Artificial Sequence
  derived and/or modified sequence
atgaatggcacccgaaactggtgtaccctggttgatgtgcatcccgaagatcaagcagccggatcggtggatattcttcgccttacccttcagggtgagctgacgggtgatgagctggagcacatcgcccagaaggctggtcgtaagacttacgcaatggtatcatcgcactccgccgggcacagcctggcatcagaacttgtggaatcgcacgacggtcatgaggagatcattaaggtgtacctcaagggtcgctccggggataagatgatccatgaaaagaatatcaaccaactgaagtcagaagtgcagtacattcaggaagcaagaaactgtctgcaaaagttgagggaggacatatcgtcgaaactggaccgtaaccttggagattcgctgcataggcaagaaattcaagtggtgcttgaaaaacctaacggcttctcgcagagccctactgcgctgtacagctccccaccggaagtcgacacctgcattaacgaggacgtcgagagccttagaaagaccgtgcaggatcttctcgcaaaacttcaggaagccaagagacagcatcagtccgactgtgtcgcgtttgaagtgaccctgagccggtaccagagggaagcggaacagtcgaacgtggcactgcagcgtgaagaggaccgcgtcgagcaaaaggaggctgaagtgggcgaacttcaacggagactgctgggcatggaaacggagcaccaagcacttcttgcaaaagtgagagaaggagaggtggcattggaggaactgagatccaacaacgcagattgccaagccgagcgcgaaaaagcggcgactcttgaaaaggaggttgcaggcttgagggaaaagatccatcatctcgatgacatgctgaaatcccaacaacgcaaggtgagacaaatgatcgaacaactgcagaactccaaggcagtgattcagagcaaggatgcaaccattcaagaacttaaggagaaaatcgcatacctcgaagccgaaaaccttgaaatgcacgataggatggaacaccttattgagaagcagatttcccacggtaatttcagcactcaagccagagccaaaaccgaaaacccaggaagtattcgtatctccaagccaccatctccaaagcccatgcccgtgatccgggtcgtggaaacc

SEQ ID NO: 202796 - DNA, 1170 bp, Artificial Sequence
  derived and/or modified sequence
atgaatggaacaagaaattggtgtactttagtagatgtacatccagaagatcaagcagcaggtagtgtagatattcttagactaactcttcagggggaattaacaggagatgaattagaacatattgctcaaaaagcaggtagaaagacatatgctatggtctcaagtcatagtgctggacattctcttgcttccgaacttgttgagagtcatgatggtcatgaagaaataattaaagtttatttgaaaggaagatcaggagataaaatgattcatgaaaaaaatataaatcaattaaaatcagaggtccaatatattcaagaagcaaggaattgtttgcaaaaacttcgtgaagatattagtagtaaattagatcgtaatcttggagattctttacatcgtcaagaaattcaagttgtccttgaaaaaccaaatggattttctcaatcaccaactgcattatattcttcacctccagaggttgatacttgtattaatgaagatgttgaaagtcttagaaagactgtacaagatttattagctaaattgcaagaagctaaaagacaacatcaatctgattgtgttgcttttgaagtaacattatcacgttaccaaagagaagctgaacaatctaatgtagctttacaaagagaagaagatagagttgaacaaaaagaagcagaagttggagaacttcaaagaagattacttggaatggaaacagaacatcaagctctattagctaaagtacgagaaggtgaagttgctttagaagaattaagatcaaacaatgctgattgtcaagcagaaagagaaaaagcagcaactcttgaaaaagaagtggctggtcttagagaaaaaattcatcacttggatgatatgttaaagtcccaacaaagaaaagtaagacagatgattgaacaattacaaaatagtaaagctgttattcaatctaaggacgctactatccaagaattaaaagaaaaaattgcttacttagaagcagaaaaccttgaaatgcatgatagaatggaacatcttattgaaaaacaaatttctcatggaaattttagtacacaagcaagagcaaaaactgagaatcctggatcaatcagaatatcaaaaccaccttcaccaaagccaatgccagttattagagttgttgaaact

SEQ ID NO: 202797 - DNA, 1170 bp, Artificial Sequence
  derived and/or modified sequence
atgaacggaactcggaattggtgtactctcgtagatgtccatcccgaggatcaggccgctggatctgtggatatcttacggttaactctgcagggggagctaacaggggatgaactggagcatatagcacagaaagccggacggaaaacatacgctatggtctcgagtcacagtgccggacattcccttgcgtccgaactcgtggaatcacatgacgggcatgaggaaataattaaagtctacctcaaagggagatcaggagataaaatgatacacgaaaaaaacataaaccaactaaaaagtgaagtgcagtacatacaggaagccaggaactgcctgcagaaacttcgcgaagatatatcttccaaactcgataggaatctcggagattccctacatagacaggaaatacaggtagttttggaaaagccaaatggattctcacagtctcccactgctctctacagttcaccccctgaagttgatacatgcatcaacgaagacgtagaatccctccggaagacagtccaggatctattagcaaagttgcaagaagctaaaaggcagcatcagagtgattgtgtggcttttgaagtaacactgtctaggtatcagcgggaggccgaacaaagtaacgtcgccctacaacgtgaggaggatcgcgtcgaacagaaggaggccgaagtgggagagctccagagacggctgcttgggatggaaacagagcatcaggcactgctcgctaaagttcgcgaaggggaggtggctctagaggaactgaggtccaacaatgcagattgccaggccgaacgggagaaagctgcgacgctcgaaaaagaggtagccggacttagagaaaaaatacatcacctggatgatatgctcaaaagtcagcagcgcaaagtacgccagatgattgaacagctgcagaattctaaagccgtcatccagtctaaagacgctacaatccaggaactgaaagaaaagatagcctatctagaagccgaaaatctagaaatgcacgataggatggaacatcttatagaaaaacagatctctcatgggaatttttctacacaggcaagggccaaaacagagaatcccggatccatacgaatctctaaacccccaagtcctaaacctatgccggtgatcagagttgtggagaca

SEQ ID NO: 202798 - DNA, 1170 bp, Artificial Sequence
  derived and/or modified sequence
atgaatggcacccgcaattggtgtaccttggtggacgtgcaccccgaggatcaggccgctggctcggttgacatcctgagactgaccctgcagggcgaactgactggcgacgagctggagcacattgctcagaaagcgggccgcaagacctacgctatggtcagtagccacagcgccggccacagcttagccagcgaactagttgagagccacgatggccacgaagagattatcaaagtttatctgaagggtcgatctggtgataaaatgatccatgaaaagaacatcaaccagctgaaaagcgaggtccaatacatccaggaggctcgcaactgcctgcagaaactgcgcgaagatattagctctaagctcgacaggaacctgggggatagcctgcaccgtcaagagatccaagtcgtgttggagaaaccaaacggcttttctcagagcccgacagcgctgtatagctcaccgcctgaggttgacacttgcatcaatgaagacgtggagtccctgcgcaaaaccgtgcaggacctgctggccaagctgcaagaagctaagcgccagcaccagtccgattgtgtggccttcgaagtgaccttatctcgctaccagcgtgaggcggagcagagcaatgttgccctgcaacgcgaagaggaccgcgtcgaacaaaaggaagccgaggtgggtgaactccagcgtaggttgcttggcatggaaaccgagcaccaggccctgctggcaaaagtccgcgagggtgaggtcgcactggaggagttgcgttccaacaatgccgactgtcaggccgaaagagaaaaagcggcaaccctggaaaaggaggtggcaggtctacgcgaaaagatacatcacttggacgatatgctgaagtcacaacagcgtaaggtccgccagatgatcgaacaactccaaaatagcaaagctgttatacagagcaaggatgcaacaatacaggagctgaaggagaagatcgcatacctggaagctgagaacctggagatgcatgatcgcatggaacacctgatcgagaaacagattagccatggtaacttctctacccaagcccgcgccaaaactgaaaacccagggtctatcagaatctctaaaccgccgagcccaaagccaatgcctgtgattcgtgtggttgaaacc

SEQ ID NO: 202799 - DNA, 1170 bp, Artificial Sequence
  derived and/or modified sequence
atgaatgggacccggaactggtgcacactagtggatgtgcatcctgaagatcaggccgcgggctccgtcgatattctccggttgactcttcagggggaattgactggagacgaactcgagcacatagcccagaaagccggccgaaagacctatgcgatggtgtcctcccactcagctggccactccttggctagtgagctcgtggagtctcatgacggtcacgaggaaatcatcaaagtatatctgaaggggaggtccggcgataaaatgatccatgagaagaacataaatcaattaaagagtgaagtacagtatatccaggaagcccgaaactgcctccaaaagctgcgggaggatatcagcagcaaactagatcggaatctcggggatagtctgcatagacaggaaatccaagtggtgttagaaaagcctaatggattttcacagagccccacggcactttacagtagcccgcctgaagttgatacctgtattaatgaggacgtggagtccttgagaaagacggtccaggatcttctggccaaactgcaggaggccaagcggcagcaccagagcgattgcgtcgcatttgaggttacactcagtcgatatcagcgggaagccgagcagtcgaatgtagcgctgcagcgtgaggaggacagggttgaacagaaagaagcagaggtaggcgagttgcagcgacgtctgctgggaatggagacagaacatcaggcccttctggccaaggtgcgtgagggagaggtggcacttgaagaacttcgctccaacaatgcagattgtcaagcagagagagaaaaagccgctaccctcgagaaggaggtggccgggctgcgggaaaaaatccaccacctggatgacatgttgaaatcccagcaaagaaaagttagacagatgatagaacagctccagaactcgaaggcggtgatccaaagcaaagatgctacaatacaggaactcaaggagaaaatagcctacctggaagctgaaaacctggagatgcacgacaggatggagcatctgatcgagaagcagatatctcacggcaatttctcaacccaggcgagagctaaaactgagaaccctggttccattcggatctctaagccaccaagcccgaagccgatgcctgtgatcagggtagttgagaca

SEQ ID NO: 202800 - DNA, 1170 bp, Artificial Sequence
  derived and/or modified sequence
atgaatggaaccagaaattggtgcaccctggtggatgtacatccggaagatcaggcagctggtagcgtcgatatattaaggcttaccctccaaggtgagctgaccggggatgagctggagcacatcgcacagaaagcaggcagaaaaacttatgcaatggtaagcagccattctgcaggtcacagccttgctagcgaactggtcgaatcccacgacggccacgaagaaatcatcaaagtgtacttgaagggtcgttctggtgacaagatgatccatgaaaagaacatcaatcagctgaagtccgaggtacagtacatccaggaggcccgcaactgtctccagaagttgcgagaagatatttcatctaaattggatcgcaatctgggggattccttgcacagacaagagattcaagtcgtgttggaaaagccgaacggcttcagccagtcacccacagccttgtactcttcacctccggaagttgatacatgcatcaacgaggatgttgagtccctccgaaaaacggtccaagacttgttggcaaagttgcaagaggctaagaggcagcatcagtccgattgtgttgcatttgaggttacactgtccagatatcagagggaagctgagcagtccaatgtcgctttgcagagggaggaggatagggtcgaacagaaagaggcagaggtgggagaactccagagacgcctgctgggtatggagaccgaacatcaggccctactcgccaaagtacgggaaggcgaggttgccctcgaagagctgcgcagcaacaacgctgattgtcaggctgaaagagaaaaggcagcgacgctcgagaaggaggtggctggcctgcgggaaaagatccatcacctcgatgacatgctgaagtcacaacagcgcaaggtgcgtcagatgatcgagcagctgcagaatagcaaggcggtaatccagagtaaagacgcgaccattcaggaactgaaggaaaagatcgcctatcttgaagcagaaaacctggagatgcatgacagaatggagcacctgattgagaagcagatttcccacggcaacttttcgacccaggccagggccaagaccgagaatccgggctctataagaatttctaagcccccttcgcccaaacctatgccagtgatccgcgtggtagaaacc

SEQ ID NO: 202801 - DNA, 1170 bp, Artificial Sequence
  derived and/or modified sequence
atgaatggaaccagaaattggtgtacccttgtggacgtgcatccagaagatcaagccgcaggctcggtcgatatccttcgtttgacgctgcaaggtgaactcaccggagacgaactggaacatattgcacaaaaggctggaagaaaaacttacgcaatggtgtcctcacactcagccggtcatagcctggcatcagaacttgttgaatcccatgatggacatgaagagattatcaaagtctacctcaaaggaaggtcgggcgataagatgatacatgagaagaacattaaccaactgaagtccgaggtccagtatattcaggaggcacgaaactgccttcaaaagttgcgcgaagatatctcatccaaactcgatagaaatctgggagattcccttcatcgacaagaaatacaggtggtgctcgaaaagcctaacggattctcccaatcaccaactgcactgtacagctcaccacccgaggtcgatacgtgcattaacgaggatgtcgagtccctccgaaaaactgtgcaggatctgctcgcaaaactgcaagaagcgaagcggcaacatcaaagcgattgtgtggcatttgaggtcacccttagccgttaccaacgggaagcagaacaaagtaatgtggcgcttcaacgcgaagaagatcgagttgagcagaaagaagcagaagtgggcgaactgcagcgccggctgcttggaatggaaaccgaacatcaagctctgttggcgaaggtgcgagagggtgaagtcgcactcgaagaacttcggtccaacaacgcggattgccaagcggaaagagagaaggccgcgactcttgaaaaggaagtggccggacttcgggagaagatacatcacttggacgacatgcttaagtcgcagcagcgaaaggtgcggcagatgattgaacaactgcaaaacagcaaggcggtcattcagtccaaagatgccaccatccaagagttgaaagagaaaatcgcatacctcgaggcggagaaccttgaaatgcacgacaggatggaacaccttattgagaaacaaatcagccatggcaacttttcaactcaagcacgggcaaagactgagaaccctggttcgatcagaatctcaaagcccccaagccctaaacctatgccggtcattcgtgtggtggaaacc

SEQ ID NO: 202802 - DNA, 1170 bp, Artificial Sequence
  derived and/or modified sequence
atgaatgggaccaggaactggtgcacccttgtcgacgtccaccctgaagatcaggctgcgggctcggtcgacattctccggctcactctgcagggagaactgactggagacgagttggagcacatcgcgcagaaggccggccgaaaaacttacgccatggtgtcctctcacagcgcaggacattcactcgcttcggaactcgtggagtcccatgacggccatgaggaaatcattaaggtctacttgaagggacgcagcggggataagatgatccatgaaaagaatatcaatcagcttaagagcgaagtccaatacatccaagaagcaagaaactgcttgcagaagttgcgcgaggacatcagcagcaagctcgatagaaacctgggcgatagcttgcatcggcaagagatacaggttgtgctggagaagccgaacggattcagccagtcgcctacggccctgtacagctcaccgccggaagtcgacacctgcattaacgaggacgtagaatcactccgcaagaccgttcaagacttgctcgcaaaactccaggaagccaagagacagcaccagtcggattgtgtggccttcgaagtgaccctctcccgctaccagcgcgaagcggagcagtcaaacgtggccctgcagagagaagaagatcgcgttgagcagaaggaagccgaagtgggtgagttgcagaggcgcctcctggggatggaaacggagcaccaggcactgctggccaaagtgcgcgagggggaggtggctctggaagagcttcggtccaacaatgcagactgtcaagctgagagagaaaaggctgccaccttggagaaggaagtggctggattgcgggagaagatccaccacctggatgacatgctgaaatcacaacagagaaaggtgcgacagatgatcgagcagctgcaaaattcgaaggcggtcattcagtccaaggatgccactatacaggagcttaaggaaaagatcgcttatcttgaagccgaaaacctggagatgcatgatcgcatggagcacctcatcgagaaacaaatctcccatggaaactttagcacccaggcgcgagcgaaaactgagaatcctggctcaatcaggatctccaaacccccttcccctaaaccgatgccagtgatccgggtggtggaaact

SEQ ID NO: 202803 - DNA, 1170 bp, Artificial Sequence
  derived and/or modified sequence
atgaatggtacccgtaattggtgtacccttgtggacgtgcacccggaagatcaggccgcgggcagtgtagatatcctccgcctaactcttcagggagagctgacaggcgatgagctggagcacatagcccaaaaggcaggtaggaagacgtatgcgatggtgtcctcacactcagctggacactcgctcgcttcagaactggtcgagagtcatgacggccacgaggaaatcatcaaggtctatttgaagggacgatcaggcgacaaaatgattcacgagaaaaatataaatcagcttaagagcgaggtacagtacatccaggaggcaagaaattgtttgcagaagcttcgggaagacatctcctccaagctcgataggaacctgggcgacagtctgcaccgccaggaaattcaggtggtccttgaaaagcctaatggattctcacaaagtcccacagctctttattctagccctccggaagtggacacctgtattaacgaagacgtggagtccctcagaaagaccgtccaggacctgttagccaagctgcaagaggcaaagcgccagcatcaaagtgactgtgtggcattcgaggtgaccttatcaaggtaccagagagaggcggagcaaagcaatgtcgccctacagcgggaggaggaccgggtggaacagaaagaagctgaagtgggggagcttcagaggaggttgctgggtatggaaaccgaacatcaggcactactggcaaaggtacgggaaggtgaggtggcactggaagagctgcgatcaaataatgcggactgtcaagcagagagggaaaaggcggcgacactggagaaggaagtggcaggtcttcgcgagaaaatccatcacctcgatgatatgctgaagtcacagcagaggaaggtccggcaaatgattgagcagttgcagaactcaaaagcagtcatccaatcgaaggacgctaccatccaggagctgaaggagaaaattgcctatctggaagcagagaacctggagatgcatgacaggatggaacacctcatcgagaagcagatctcccacgggaacttctcaactcaggctagagctaagactgagaacccagggtctataaggatatctaaacctcccagtccaaaacccatgccagtgattcgggtggtcgagacg

SEQ ID NO: 202804 - DNA, 1170 bp, Artificial Sequence
  derived and/or modified sequence
atgaacgggacacgcaactggtgtaccctggtcgatgtgcacccagaagaccaagccgcaggcagcgtcgacatcttgcggctgacgctgcagggggagttgacgggtgacgagctcgagcacattgcgcagaaagccggtcggaaaacttacgcaatggtatccagtcactcggctggccacagcttggccagtgaacttgtcgaaagccatgatggccacgaggaaattataaaggtctatttaaaaggacggtcaggggataaaatgatacacgaaaagaacattaatcaactcaaatccgaggtgcagtacattcaggaagcccggaactgtctccagaaactacgggaggatatctcctcaaagctggatagaaatctgggggactccctgcatcgtcaggagattcaggtagtattggagaagcccaatgggttcagtcaaagtccaaccgcactatactcttcacctccagaagtagatacttgcatcaacgaagacgtagagtccctccgcaaaaccgtccaagaccttctggccaaacttcaggaagctaaaaggcagcatcagtccgactgtgtagcgttcgaggtaacactcagccgctatcagcgggaggcggagcagagcaacgtggcgctgcagcgggaggaagatcgagtggagcaaaaggaagccgaagtgggtgagctgcagagacgactactcggaatggagaccgaacatcaggccttgctggccaaggtgcgggagggcgaggtggcacttgaagaactgcgctccaataatgctgactgccaggctgagagagaaaaagcagcgaccctggaaaaagaagtggctggactacgcgagaagattcatcatctggacgacatgttaaagagtcagcagagaaaggtcagacagatgattgaacagcttcagaacagcaaggccgttatccagtccaaggatgccacaatacaagaattaaaagagaaaattgcgtatctcgaagcagagaatctcgagatgcacgaccggatggaacatctgatcgaaaagcagatttctcatgggaacttctcaacgcaggctcgcgccaaaactgagaacccgggcagcatcaggattagtaagccgccctcccccaagcccatgcctgtcattagggttgttgagacc

SEQ ID NO: 202805 - DNA, 1173 bp, Artificial Sequence
  derived and/or modified sequence
atgaacggcaccagaaactggtgcaccctggtggacgtgcaccccgaggaccaggccgccggcagcgtggacatcctgagactgaccctgcagggcgagctgaccggcgacgagctggagcacatcgcccagaaggccggcagaaagacctacgccatggtgagcagccacagcgccggccacagcctggccagcgagctggtggagagccacgacggccacgaggagatcatcaaggtgtacctgaagggcagaagcggcgacaagatgatccacgagaagaacatcaaccagctgaagagcgaggtgcagtacatccaggaggccagaaactgcctgcagaagctgagagaggacatcagcagcaagctggacagaaacctgggcgacagcctgcacagacaggagatccaggtggtgctggagaagcccaacggcttcagccagagccccaccgccctgtacagcagcccccccgaggtggacacctgcatcaacgaggacgtggagagcctgagaaagaccgtgcaggacctgctggccaagctgcaggaggccaagagacagcaccagagcgactgcgtggccttcgaggtgaccctgagcagataccagagagaggccgagcagagcaacgtggccctgcagagagaggaggacagagtggagcagaaggaggccgaggtgggcgagctgcagagaagactgctgggcatggagaccgagcaccaggccctgctggccaaggtgagagagggcgaggtggccctggaggagctgagaagcaacaacgccgactgccaggccgagagagagaaggccgccaccctggagaaggaggtggccggcctgagagagaagatccaccacctggacgacatgctgaagagccagcagagaaaggtgagacagatgatcgagcagctgcagaacagcaaggccgtgatccagagcaaggacgccaccatccaggagctgaaggagaagatcgcctacctggaggccgagaacctggagatgcacgacagaatggagcacctgatcgagaagcagatcagccacggcaacttcagcacccaggccagagccaagaccgagaaccccggcagcatcagaatcagcaagccccccagccccaagcccatgcccgtgatcagagtggtggagacctag

SEQ ID NO: 202806 - DNA, 1173 bp, Artificial Sequence
  derived and/or modified sequence
atgaacggaacacgtaactggtgcaccctggtcgacgtgcatcccgaagaccaggctgcagggagcgtagacatcctgcgacttaccttgcagggcgagctcaccggtgatgagctcgagcacattgcacaaaaggcgggtcgcaaaacctacgccatggtttcgagccacagtgctggacactcactcgcgagcgagctcgttgaatcccacgatggacacgaggagattatcaaagtgtacctgaagggcagaagtggcgacaaaatgatccacgagaaaaacatcaaccagctgaagagcgaggtgcagtatattcaggaagcccggaattgtttacaaaagttgcgcgaggacatcagctctaagctggaccgtaacttgggcgattctttacacagacaggagattcaggttgtcctcgaaaagcccaacggcttctcccagagcccaacagctctgtactcctccccccccgaagtcgacacctgtattaatgaggacgtggaaagtcttaggaaaaccgttcaggatcttctcgccaagttgcaagaggcaaagcgtcaacaccagagtgactgcgtggccttcgaggtgacactttcacgatatcaacgcgaggccgagcagtccaatgtggcgctgcagcgggaggaggacagagtcgagcagaaagaggcggaagtgggtgagctccagagaaggcttttgggtatggaaacagaacatcaggccctcctggccaaagtccgtgaaggagaagttgctctcgaggagttaagaagcaataacgctgactgccaggcagaacgagagaaggccgccactctggagaaggaagttgcggggttgcgggagaaaatccaccacctggacgatatgctcaaatcccagcagcgcaaagtgcgccagatgatcgaacaactccagaattctaaagccgtcattcaaagcaaggacgcaacaatccaggagctgaaagagaagatcgcatacctggaagcggaaaatctggagatgcacgatagaatggagcatttaattgaaaagcagatctctcacggaaatttcagcacacaagcacgagctaagactgagaacccaggtagcatccgaatttcaaaaccaccctcccccaaacccatgccagtgattcgtgtggtggaaacttag

SEQ ID NO: 202807 - DNA, 1173 bp, Artificial Sequence
  derived and/or modified sequence
atgaatggcaccaggaactggtgcaccctggtggatgtgcaccctgaggaccaggccgccggctctgtggacatcctgcggctgaccctgcagggcgagctgactggagatgagctggagcacatcgcccagaaggccggcaggaagacctacgccatggtgagcagccacagcgctggccacagcctggccagcgagctggtggagagccatgatggccacgaggagatcatcaaggtgtacctgaagggccgcagcggggacaagatgatccacgagaagaacatcaaccagctgaagtctgaggtgcagtacatccaggaggccaggaactgcctgcagaagctgcgggaggacatcagcagcaagctggacaggaacctgggggacagcctgcaccggcaggagatccaggtggtgctggagaagcccaacggcttcagccagagccccacagccctgtacagcagccccccagaggtggacacctgcatcaatgaagatgtggagagcctgaggaagacagtgcaggacctgctggccaagctgcaggaggccaagaggcagcaccagagcgactgtgtggcctttgaggtgaccctgagccgctaccagcgggaggccgagcagagcaatgtggccctgcagcgggaggaggacagagtggagcagaaggaggccgaggtgggggagctgcagaggcggctgctgggcatggagacagagcaccaggccctgctggccaaggtgcgggagggggaggtggccctggaggagctgcggagcaacaatgctgactgccaggccgagcgggagaaggccgccaccctggagaaggaggtggccggcctgcgggagaagatccaccacctggatgacatgctgaagagccagcagaggaaggtgcggcagatgattgagcagctgcagaacagcaaggccgtcatccagagcaaggatgccaccatccaggagctgaaggagaagatcgcctacctggaggccgagaacctggagatgcatgacaggatggagcacctgattgagaagcagatcagccacggcaacttcagcacccaggcccgggccaagacagagaaccctggcagcatccgcatcagcaagccacccagccccaagcccatgcctgtgatccgggtggtggagacctag

SEQ ID NO: 202808 - DNA, 1173 bp, Artificial Sequence
  derived and/or modified sequence
atgaacggcacccggaactggtgcaccctggtggacgtgcaccccgaagaccaggcagcagggagcgtcgatatcctgcgtttgaccctgcagggcgaactgaccggcgacgagctcgaacacatcgcccaaaaggctggaaggaagacgtacgctatggtgagctctcatagcgcaggccactcccttgcatcagaactggtcgagagccacgacggccatgaagagattatcaaagtttacctgaaggggaggtcaggggacaagatgatccacgaaaaaaacattaaccagctgaagtcagaagtgcagtatattcaggaggctaggaactgcctgcagaaactgcgtgaagatatcagctcaaagctggatcgcaacctgggggacagcctgcatcgacaggagattcaggtggtgttggagaagcctaacggcttctcccaatccccaacggccctttattcaagcccacccgaggtggatacatgcatcaacgaggatgtcgagagccttagaaagacggtccaggacctgttggcgaaactccaggaagcaaagcgtcagcaccagagtgattgcgtggctttcgaggttacactctcacggtatcagcgcgaagccgagcagtcaaacgttgccctacagagagaagaagatcgcgtcgaacagaaagaggccgaagtcggcgaactgcagcggcgtttgctaggcatggaaaccgagcaccaagccttactagccaaggtgagggaaggagaggtagcactagaagagttgaggtcgaacaatgccgactgtcaggctgagagagaaaaagccgccaccctagaaaaggaggtcgctggcctgcgcgagaagatccatcacctggacgatatgctgaagtctcagcagcgcaaggttcgccaaatgatcgagcagttacaaaactctaaagccgttatccaatcaaaagacgctactatccaggagctaaaggaaaagatcgcttatttggaagctgaaaacctggagatgcacgatcggatggaacatctgattgagaagcagatctcacatggtaattttagcacacaggcgagggccaaaaccgagaaccctggaagtataagaatatcaaagcctccatctcccaaacctatgcccgtgatccgagtggtagagacgtag

SEQ ID NO: 202809 - DNA, 1173 bp, Artificial Sequence
  derived and/or modified sequence
atgaacggaacaagaaactggtgtacactggttgatgtgcatccggaggaccaggctgctgggtcagtggacattttgcgccttactctgcagggagagttgacaggcgatgagctggaacacatcgctcaaaaagcgggacggaaaacctacgctatggtgagttctcattccgccggacactcacttgcctcggagctcgtggaaagtcacgacggccacgaggagatcatcaaggtgtacttaaaaggacgctcaggtgacaagatgatccatgagaagaacatcaatcagctgaagagtgaggtgcaatacattcaagaggcaagaaactgcctgcagaagcttagagaggacatcagttcaaagcttgacaggaacctgggtgactcgttgcaccggcaggaaattcaggtggtcttggaaaaaccaaatgggttttcacagtctcccaccgctctgtactctagcccccctgaggttgacacgtgcataaatgaagacgtcgagtccctccggaaaaccgtgcaggatctactggcgaagctgcaggaagctaaacgccagcaccagtccgattgtgtggccttcgaagtcactctgtcaaggtaccagagggaagcggagcagagtaatgtggctctccagcgggaggaggaccgggttgaacagaaagaagcggaagtgggggagctccagagacggctgcttggcatggagactgaacatcaagcgctcttggcaaaggtgcgcgaaggagaggttgccctagaggagttgcggtctaacaacgcagattgtcaggcagagagagagaaggccgcaaccctggaaaaggaagtggccggtttgcgggaaaagatccatcatctagacgatatgctcaagagccaacaacgaaaagtccggcagatgattgagcagctccagaattctaaagctgtgatccagtctaaagatgctacaatccaggagctcaaagagaagattgcttatctggaagcagagaaccttgaaatgcacgatcgaatggaacatctaatcgagaaacaaatcagccacggtaatttctccacgcaggctcgggcaaagaccgaaaatcctggctcaataagaatttccaagcctcccagccctaaacctatgcccgttattagggtggtcgaaacctag

SEQ ID NO: 202810 - DNA, 1173 bp, Artificial Sequence
  derived and/or modified sequence
atgaacggaactagaaattggtgcaccctagtggacgtgcatccagaggaccaagccgcaggtagcgtggacattctaagactgactcttcagggcgagttaaccggggacgagttggagcatattgcccagaaggccggacgcaaaacatacgctatggtgtcgagtcacagcgcaggccacagtttagctagtgaacttgtcgaaagtcatgacgggcacgaggagataataaaggtgtatttaaaaggccgttccggggataagatgatccacgagaagaacattaatcagctgaagagtgaagtacagtacattcaggaagccagaaattgcctacagaaactccgggaggatatctcttccaagctggacaggaacctgggggacagtctgcacagacaagaaattcaggtcgttctggagaaacctaatggcttcagtcagtcacccacagcgctttactcatccccccctgaggtcgatacctgcatcaatgaagacgtcgagagcttgcgaaagactgttcaggacctcttggccaaacttcaggaagccaaacggcagcatcaatctgactgcgtggcattcgaagtgaccctgtctaggtatcagagagaggcagaacagtccaacgtagccttgcaaagggaggaggaccgggtagaacagaaggaagccgaggtgggcgagctacaaaggcggctactaggtatggaaaccgagcaccaggctctcctagctaaggtcagggagggagaggtcgccctggaggaattgagatcaaataatgccgactgtcaagcagaaagggaaaaagccgctaccctagaaaaggaagtcgccggcctgagggagaagatacaccacctcgacgacatgctgaaatcgcagcaacgaaaagtgcgtcagatgattgaacagttgcaaaactctaaagctgttatccaatccaaggatgcgaccatccaggaactgaaggagaaaattgcatacctcgaggcagaaaatttggaaatgcacgaccgcatggaacatctgattgagaagcaaatctcccacggcaatttcagtacccaggcccgtgctaagactgagaaccccggcagtattaggatttctaaacctcccagtccaaaaccgatgcccgtcatcagagttgtggagacttag

SEQ ID NO: 202811 - DNA, 1173 bp, Artificial Sequence
  derived and/or modified sequence
atgaacgggacccgcaattggtgcacactggtagacgtgcatcctgaagatcaagcagcaggctccgtagacattctccgcctcacactgcagggagaactaaccggagacgaactcgagcacatcgcacagaaggctggccgcaagacctacgctatggtttcttcacactctgccgggcattcgctagcctctgagttagttgaatcacacgacggccacgaagagatcatcaaggtatatttgaaaggtcgctccggggacaaaatgatccatgaaaagaacattaaccagctgaagagtgaggtacagtacattcaagaagcacgcaactgcctacaaaagctacgcgaggatattagctcaaaactggatagaaacctgggggactcgctacatagacaagagatccaagttgttcttgaaaagcccaacggcttctcccagagccctaccgctctttacagttctccaccagaggtggatacctgcatcaatgaagatgtggaatccctaaggaaaacagtgcaggatctgctagcaaagctccaggaggcgaaaaggcaacatcaaagtgattgcgtggccttcgaggttaccttgagtcgataccagagagaagccgagcagagtaacgtcgcactccagcgtgaagaggatagggttgaacagaaagaggcagaagtgggggaactccaaagaaggctgcttggaatggagaccgaacaccaggcgcttttggcaaaggtacgtgaaggcgaggtggctttggaagaactcagatccaacaatgcggactgtcaagcggaaagagaaaaggccgcgactctcgaaaaggaggttgcaggcctacgggagaagatccaccaccttgacgacatgctaaaatcccagcagcgcaaagtcaggcaaatgattgagcaattacagaattccaaggccgtgatacagagtaaagatgcaactatccaagaacttaaggaaaagatcgcctatctggaagccgaaaacctagaaatgcatgacaggatggagcacctcatagaaaagcagattagtcacggaaatttttcaacacaagcaagagccaagaccgagaatcccggaagcatccgtattagcaagcccccaagcccaaaaccaatgcctgtgattagggtggtcgagacctag

SEQ ID NO: 202812 - DNA, 3111 bp, Artificial Sequence
  derived and/or modified sequence
gcccagttggagccagacagcggggtggacaagtggcgtgtgtgctgcgaccccgagggaagatgaacgggacgcggaactggtgtaccctggtggacgtgcacccagaggaccaggcggcgggcagcgtggacattctcaggctgactctccagggtgaactgacaggagatgaacttgaacacatagcccagaaggcgggcaggaagacctatgccatggtgtccagccactcagctggtcattctctggcttcagaactggtggagtcccatgatggacatgaggagatcattaaggtgtacttgaaggggaggtctggagacaagatgattcacgagaagaatattaaccagctgaagagtgaggtccagtacatccaggaggccaggaactgcctacagaagctccgggaggatataagtagcaagcttgacaggaacctaggagattctctccatcgacaggagatacaggtggtgctagaaaagccaaatggctttagtcagagtcccacagccctgtacagcagcccacctgaggtggacacctgtataaatgaggatgttgagagcttgaggaagacggtgcaggacttgctggccaagcttcaggaggccaagcggcaacaccagtcagactgtgtggcttttgaggtcacactcagccggtaccagagggaagcagaacaaagtaatgtggcccttcagagagaggaggacagagtggagcagaaagaggcagaagtcggagagctgcagaggcgcttgctagggatggagacggagcatcaggccttactggcgaaagtgagggaaggggaggtggccctagaggaacttcggagcaacaatgctgactgccaagcagaacgagaaaaggctgctaccctggaaaaggaagtggccgggttgcgggagaagatccaccacttggatgacatgctcaagagccagcagcggaaagtccggcaaatgatagagcagctccagaattcaaaagctgtgatccagtcaaaggacgccaccatccaggagctcaaggagaaaatcgcctatctggaggcagagaatttagagatgcatgaccggatggaacacctgatagaaaaacaaatcagtcatggcaacttcagcacccaggcccgggccaagacagagaacccgggcagtattaggatatccaagccgcctagcccgaagcccatgcctgtcatccgagtggtggaaacctgagctgcctggagatggttgctgccattgctgctgcctctgcctcggagaagcccactgcccctgttggctgttaacactgcctttgacttcctgactgtcccctggctgcacccaggacttcgggctcctgtgtctcaccattcccaagcccctggccactctaagctgggcagacggagcacgagcacctattcaaggcactgcagccctttggaagacattgtcctgcaagcaggagccagggcaatatctatattcctacagtgactatttttctctgtagagagcctcccttctgttgtagactggactctggctgtgccataagccaggccttcatcagattgggagaggtgacaagatttgcctcagccctaaaagctggagacacagatgtccagagtgattggagaatgtcctgggggaatgaagttccttccacaaacacagctcagttcttagcaacaaactgtttgtttttctacttgctccatctgcagcctacgctgccctggcctcctgcagacagatagtggggttacctggcaaggcctggtgagagccagtgaacctaagctttgactgggtggccttgtctttctggggaggagggaatgtacattcagggagtagccttttgcggaaaaattctctagggctacagacagtcatgtgtgacttctctctgctgtgaaaactcccagagtctctttagggattttccctaaggtgtaccaccaggcacacctcagtcttcttgacccagagcctgaaaactgttttcactgggttccaccagtcccagcaaaatcctctttgtatttattttgctaagttattggtggttttgcttacatctcatgattgatataataccaaagttctatagccttctcttgcagtatttggatttgcttgaaaccgggaaaactgttcccattaggcttgttaatgtcagagtgacactattatgaatctttctctccctttcctctgcctgtttcttctctctttctccttcaaacttgctctgcagctaaggaaggtgagtctactttccctgaggctttggggtcagagtatatgttgtttggagaaagagggcaatcaggactcttctgggacccagatgagttcttcactagcccttctgaaccccttgctccataattggtcttttatcctggctctgaatgaccctgcaggtcatcatggttttctttttttattgtttttttttttttctgagacagagtctcactctgtcacccaggctggagtgcagtggcgcgatctcagctcactgcaacctctgcctcccggatttaagcgattcttctgcctcagcctcccgagtagctgggactacaggtgtgccaccacgcctggctgatttttgtatttttagtagagatggggtttcaccatactggctaggctggtctcgaattcctgacctcaggtgatccacccacctcggcttcccaaagtgctaggattataggcttgagctactgcgcccggcccatggtgtttttctttagggctcttcctacaaccttgagaagtagataggcatcagagtatggtactataggaatcagaaaaattcaaaacaaatgtggattaagtgtttaggctctatgtggctcacgcagccagaatccttaagtctgtgtgtttctgtgtctcaagactgggctcacattctggctttgtccataacaatgctctgggatttcagggagttccctcatttgtaaaatgagggggtcagagcaggtgatatccatgtttcttccctttctgatattgttgtctgtggcatattctttgtatggcgaatttaataaattatattaatgtgtctctttga

SEQ ID NO: 202813 - RNA, 1316 nt, Artificial Sequence
  derived and/or modified sequence
gggaaauaagagagaaaagaagaguaagaagaaauauaagagccaccaugaaugguacgcgcaacuggugcacucucguggaugugcacccggaagaucaggcagcuggguccgucgacauucuccggcugacacuucagggggaacugaccggggacgagcuggagcacaucgcgcagaaagcgggucgaaaaacauacgcgauggugagcucgcacucggcugggcacucccucgccucagaacugguggaaucacacgauggacaugaagagaucaucaaaguauaucucaagggacgcuccggagacaagaugauucaugagaagaauaucaaccaauugaagucagaaguccaguauauccaagaggcgcggaacuguuugcaaaagcugagagaggacauuucgucaaagcucgauaggaacuugggcgauagcuugcaccgacaggagauucaaguaguacucgaaaagcccaauggcuuuucccagucgccaaccgccuuguauucgucacccccugaggucgacacaugcaucaaugaggacgucgaaucacuuagaaagacagugcaagaccuuuuggcgaaacuccaagaagcgaagcgccagcaucagucggauuguguagccuucgaaguaacguugucaagguaccagagagaggcggagcagucgaacguggcgcuucaacgcgaagaggaucgcguagagcaaaaagaggcugaggucggugagcuucagagaagguugcucgggauggaaacggagcaccaggcacucuuggccaaagucagagagggagagguggcauuggaagaacuuagguccaacaaugcggauugccaggccgaacgggaaaaggcggccacucucgagaaagaggucgcgggauugcgagagaagauccaucauuuggacgacaugcuuaagucgcagcagcggaaagugaggcagaugaucgagcagcugcagaacucgaaagccgugauccaguccaaagaugcaacgauucaagagcucaaagagaaaauugcguacuuggaagccgagaaucucgaaaugcaugaccgcauggaacaccuuaucgaaaagcagauuucacacggaaauuucagcacgcaggcgagagcaaagaccgaaaacccggggucgauucggaucagcaaaccgccuucgccgaagcccaugcccgucaucagagucguggaaacguaaugagcugccuucugcggggcuugccuucuggccaugcccuucuucucucccuugcaccuguaccucuuggucuuugaauaaagccugaguaggaag

SEQ ID NO: 202814 - RNA, 1173 nt, Artificial Sequence
  derived and/or modified sequence
augaacggaacuagaaauuggugcacccuaguggacgugcauccagaggaccaagccgcagguagcguggacauucuaagacugacucuucagggcgaguuaaccggggacgaguuggagcauauugcccagaaggccggacgcaaaacauacgcuauggugucgagucacagcgcaggccacaguuuagcuagugaacuugucgaaagucaugacgggcacgaggagauaauaaagguguauuuaaaaggccguuccggggauaagaugauccacgagaagaacauuaaucagcugaagagugaaguacaguacauucaggaagccagaaauugccuacagaaacuccgggaggauaucucuuccaagcuggacaggaaccugggggacagucugcacagacaagaaauucaggucguucuggagaaaccuaauggcuucagucagucacccacagcgcuuuacucaucccccccugaggucgauaccugcaucaaugaagacgucgagagcuugcgaaagacuguucaggaccucuuggccaaacuucaggaagccaaacggcagcaucaaucugacugcguggcauucgaagugacccugucuagguaucagagagaggcagaacaguccaacguagccuugcaaagggaggaggaccggguagaacagaaggaagccgaggugggcgagcuacaaaggcggcuacuagguauggaaaccgagcaccaggcucuccuagcuaaggucagggagggagaggucgcccuggaggaauugagaucaaauaaugccgacugucaagcagaaagggaaaaagccgcuacccuagaaaaggaagucgccggccugagggagaagauacaccaccucgacgacaugcugaaaucgcagcaacgaaaagugcgucagaugauugaacaguugcaaaacucuaaagcuguuauccaauccaaggaugcgaccauccaggaacugaaggagaaaauugcauaccucgaggcagaaaauuuggaaaugcacgaccgcauggaacaucugauugagaagcaaaucucccacggcaauuucaguacccaggcccgugcuaagacugagaaccccggcaguauuaggauuucuaaaccucccaguccaaaaccgaugcccgucaucagaguuguggagacuuag

SEQ ID NO: 202815 - RNA, 1173 nt, Artificial Sequence
  derived and/or modified sequence
augaacgggacccgcaauuggugcacacugguagacgugcauccugaagaucaagcagcaggcuccguagacauucuccgccucacacugcagggagaacuaaccggagacgaacucgagcacaucgcacagaaggcuggccgcaagaccuacgcuaugguuucuucacacucugccgggcauucgcuagccucugaguuaguugaaucacacgacggccacgaagagaucaucaagguauauuugaaaggucgcuccggggacaaaaugauccaugaaaagaacauuaaccagcugaagagugagguacaguacauucaagaagcacgcaacugccuacaaaagcuacgcgaggauauuagcucaaaacuggauagaaaccugggggacucgcuacauagacaagagauccaaguuguucuugaaaagcccaacggcuucucccagagcccuaccgcucuuuacaguucuccaccagagguggauaccugcaucaaugaagauguggaaucccuaaggaaaacagugcaggaucugcuagcaaagcuccaggaggcgaaaaggcaacaucaaagugauugcguggccuucgagguuaccuugagucgauaccagagagaagccgagcagaguaacgucgcacuccagcgugaagaggauaggguugaacagaaagaggcagaagugggggaacuccaaagaaggcugcuuggaauggagaccgaacaccaggcgcuuuuggcaaagguacgugaaggcgagguggcuuuggaagaacucagauccaacaaugcggacugucaagcggaaagagaaaaggccgcgacucucgaaaaggagguugcaggccuacgggagaagauccaccaccuugacgacaugcuaaaaucccagcagcgcaaagucaggcaaaugauugagcaauuacagaauuccaaggccgugauacagaguaaagaugcaacuauccaagaacuuaaggaaaagaucgccuaucuggaagccgaaaaccuagaaaugcaugacaggauggagcaccucauagaaaagcagauuagucacggaaauuuuucaacacaagcaagagccaagaccgagaaucccggaagcauccguauuagcaagcccccaagcccaaaaccaaugccugugauuaggguggucgagaccuag

SEQ ID NO: 202816 - protein, 222 aa, Artificial Sequence
  derived and/or modified sequence
MPVRFKGLSEYQRNFLWKKSYLSESCNSSVGRKYPWAGLRSDQLGITKEPSFISKRRVPYHDPQISKSLEWNGAISESNVVASPEPEAPETPKSQEAEQKDVTQERVHSLEASRVPKRTRSHSADSRAEGASDVENNEGVTNHTPVNENVELEHSTKVLSENVDNGVGIFTAFLFKSIEFFIGFIVISVILHFVFQNFPLLFSCLMSIRIVDNRLLTLVIVN

SEQ ID NO: 202817 - DNA, 669 bp, Artificial Sequence
  derived and/or modified sequence
atgcctgtccggttcaaggggctgtctgagtaccagagaaattttctgtggaagaaatcatatttatccgagtcttgcaacagctctgtggggcggaagtatccctgggccgggctgaggtcagatcagctggggattaccaaggaaccctctttcatttctaaaaggcgagtcccttatcatgacccccaaattagtaagagtctcgaatggaatggggctatctccgagtccaacgtcgtggccagccccgaacctgaagcgccggagactccaaaatcacaggaagcagagcagaaggacgtgacccaggagcgggtacacagtcttgaagcgagccgagtgcccaagcgaacacgatctcactccgcagacagcagagcggaaggggcgagcgatgtggaaaacaatgagggcgtcacaaaccacacacccgtaaacgagaatgttgagctcgaacactcgacaaaggtgctgtctgagaacgtcgataacggcgtcgggattttcaccgcatttctgttcaagtccattgagttttttatcggattcatcgtcatcagcgtaatactccacttcgttttccagaacttcccactgctttttagttgtcttatgtctatcaggatagtcgacaatcgcttgctgacactggtaattgtgaactag

SEQ ID NO: 202818 - DNA, 669 bp, Artificial Sequence
  derived and/or modified sequence
atgcctgtgcgcttcaagggcctgtctgagtaccagaggaacttcctgtggaagaagagctacctgtctgagagctgcaacagctctgtgggcaggaagtacccctgggccggcctgcggagtgaccagctgggcatcaccaaggagcccagcttcatcagcaagagaagagtgccctaccatgacccccagatcagcaagagcctggagtggaatggagccatcagcgagagcaatgtggtggccagccctgagcctgaggcccctgagacccccaagagccaggaggccgagcagaaggatgtgacccaggagcgggtgcacagcctggaggccagccgggtgcccaagaggaccaggagccacagcgctgacagcagagctgagggcgccagtgatgtggagaacaatgaaggagtgaccaaccacacccctgtgaatgaaaatgtggagctggagcacagcaccaaggtgctgtctgaaaatgtggacaatggagtgggcatcttcaccgccttcctgttcaagagcattgagttcttcatcggcttcatcgtcatcagcgtcatcctgcactttgtgttccagaacttccccctgctcttcagctgcctgatgagcatccgcatcgtggacaaccggctgctgaccctggtgattgtgaactag

SEQ ID NO: 202819 - DNA, 2718 bp, Artificial Sequence
  derived and/or modified sequence
acactgttatcgccccgccccctcggagctttttctccagttaactgtcggagtagcgggggctccggcgccgggcgacatgccggtgcgcttcaaggggctgagtgaataccagaggaacttcctgtggaaaaagtcttatttgtccgagtcttgtaattcctccgtggggcgaaagtacccatgggctggacttagatcagatcaattaggaaatcaaggcagatgtagaaccaagatccagcacagtgacatctcatcccttctcatcttggtctgctccacataagagaagctttgtgaaaagttccaaattttgacagtaccagggcccattgttctgttaagtagcacaggaaagtaattagaaacgaggcagcatgtactgcctggcctgccaggtctatcacgttgcaattctagtgacttttgttaggataactggaacattttgtgaccccctgatttttaattttttgttatggtcaaatttttaatgcttttaaaagcaaaattaaatattttatgttgaaaagctgtacttttaaaatcctataatctgaaggatattgtgtgtatatataggtacatatatctgaactaaatttaaaatttcatttctcctccacaagtgttcttaaaagttgtctttgtaactttttgctttagtagctactatttttgtataccgtgttttgtaggcatcacgaaagagccaagttttatttcaaaaagaagagtcccttaccatgacccacagatttcaaaatctctggagtggaatggagctatctcagagagcaatgtggttgcatcaccagaaccagaagccccggaaacaccaaaatcacaagaagcagaacaaaaggatgttactcaagaaagagttcactcactagaagcttccagggttcccaaaagaaccagatctcactctgcagactccagagctgaaggggcttcagatgtggaaaataatgagggtgtaacaaaccatacaccagttaatgaaaatgtggaactggaacattctaccaaggttctttcagaaaatgtagataatggggtaggcatattcactgcatttcttttcaaaagcatagaattcttcattggtttcattgtcatttctgtaatattacattttgtgtttcagaattttccattgttgttttcttgtctaatgtctataagaatagttgataacaggctgttgactttagttattgtgaattagttctattctgactactcgctattttgtagtagttgtactatgataatctgtttattggatggacctcctgcgtctggattttattcatcatatattagcacctgagtcctaagggagagatcaagttgagacagagaagggaagtaggcccttacttctggcagggtgctgagctgacttctacctagccccttttcagtttcttatcgtgtacaagaagacaaacagaaattcaattgatgaaatgcaaaaggaaggagagctctggctgtctctcagagatcttgcatttctgctctcttatgtcacagctggcctgcagcaggtccctgtgagcacataagcagaggctgcaggaacttgtgtggggatctcaatgctttccacatttctttctccattctgttccactgctcttctctggttcatgtccaccactgactgggaccctgaagaggcatttcagagtgttggagaagaatctgtagcttgttgaaaaagctgggggtgaaagggaacaaggaaggtgatgtgtgagtctggcaggcaggagaaggggtgttcatagaagcagtgtgcaggtgaggcaaagtgctgggactttttggtaatagatttaattatgaatgattagtaggaaaggactgagagtattatatttttcctgggatgcctaatagtcctttgatagaaaggaattttaaatagtttgacacttgaaaaaagatactatttataagttgaagaaagtttgctgtaccacaatgcgcatgtagttaacaattttgcactgtagatttaacattttgttaagaggatagatttcatgttatgcattttttaccacaatttttaaaaagtttgaatagaaatttttaatgtctttgagtggattttgttttttgaacagttggatagacttctgcgtaagaaagctggattgactgttgttccttcatataatgccttgagaaattctgaatatcaaaggcagtttgtttggaagacttctaaagaaactgctccagcttttgcagccaatcaggtagcttaatggatgtaatacatttctgagtaccattatcttatctagtaatgtagatttacatagaattaagagttgaaagaaattaagtacttaagtagcctggaggtaggttctagaaaaccaaaatgagagttttgctaaaatcatcctattacttatgatttatggtagtaatattatactgtcctaggcttctgatgatcattgttgccagatgcagcacatatactaaatatgagacagggtaatgaaaacttggggaactggtaagtttttgcatgctacaagatttttttacttattaaaaaattattaaattgattttattctaaaatgttgtgttttgttgactaatatattgcgtgtttcctgtattctaagaaaggcgtaactgctttgaatatttaataaatacaaaatatgttgacagtaa

SEQ ID NO: 202820 - DNA, 2170 bp, Artificial Sequence
  derived and/or modified sequence
aagcgcggagtgcgccggcgcgtagtcggggacgccgggccgaggctttgctagggaacactgttatcgccccgccccctcggagctttttctccagttaactgtcggagtagcgggggctccggcgccgggcgacatgccggtgcgcttcaaggggctgagtgaataccagaggaacttcctgtggaaaaagtcttatttgtccgagtcttgtaattcctccgtggggcgaaagtacccatgggctggacttagatcagatcaattaggcatcacgaaagagccaagttttatttcaaaaagaagagtcccttaccatgacccacagatttcaaaatctctggagtggaatggagctatctcagagagcaatgtggttgcatcaccagaaccagaagccccggaaacaccaaaatcacaagaagcagaacaaaaggatgttactcaagaaagagttcactcactagaagcttccagggttcccaaaagaaccagatctcactctgcagactccagagctgaaggggcttcagatgtggaaaataatgagggtgtaacaaaccatacaccagttaatgaaaatgtggaactggaacattctaccaaggttctttcagaaaatgtagataatggggtaggcatattcactgcatttcttttcaaaagcatagaattcttcattggtttcattgtcatttctgtaatattacattttgtgtttcagaattttccattgttgttttcttgtctaatgtctataagaatagttgataacaggctgttgactttagttattgtgaattagttctattctgactactcgctattttgtagtagttgtactatgataatctgtttattggatggacctcctgcgtctggattttattcatcatatattagcacctgagtcctaagggagagatcaagttgagacagagaagggaagtaggcccttacttctggcagggtgctgagctgacttctacctagccccttttcagtttcttatcgtgtacaagaagacaaacagaaattcaattgatgaaatgcaaaaggaaggagagctctggctgtctctcagagatcttgcatttctgctctcttatgtcacagctggcctgcagcaggtccctgtgagcacataagcagaggctgcaggaacttgtgtggggatctcaatgctttccacatttctttctccattctgttccactgctcttctctggttcatgtccaccactgactgggaccctgaagaggcatttcagagtgttggagaagaatctgtagcttgttgaaaaagctgggggtgaaagggaacaaggaaggtgatgtgtgagtctggcaggcaggagaaggggtgttcatagaagcagtgtgcaggtgaggcaaagtgctgggactttttggtaatagatttaattatgaatgattagtaggaaaggactgagagtattatatttttcctgggatgcctaatagtcctttgatagaaaggaattttaaatagtttgacacttgaaaaaagatactatttataagttgaagaaagtttgctgtaccacaatgcgcatgtagttaacaattttgcactgtagatttaacattttgttaagaggatagatttcatgttatgcattttttaccacaatttttaaaaagtttgaatagaaatttttaatgtctttgagtggattttgttttttgaacagttggatagacttctgcgtaagaaagctggattgactgttgttccttcatataatgccttgagaaattctgaatatcaaaggcagtttgtttggaagacttctaaagaaactgctccagcttttgcagccaatcaggtagcttaatggatgtaatacatttctgagtaccattatcttatctagtaatgtagatttacatagaattaagagttgaaagaaattaagtacttaagtagcctggaggtaggttctagaaaaccaaaatgagagttttgctaaaatcatcctattacttatgatttatggtagtaatattatactgtcctaggcttctgatgatcattgttgccagatgcagcacatatactaaatatgagacagggtaatgaaaacttggggaactggtaagtttttgcatgctacaagatttttttacttattaaaaaattattaaa

SEQ ID NO: 202821 - DNA, 669 bp, Artificial Sequence
  derived and/or modified sequence
atgcccgtgcggttcaagggcctgagcgagtaccagcggaacttcttgtggaagaagtcttacctgagtgagtcctgcaacagtagcgtgggacgcaaatacccttgggccggcttgcggagcgatcagctaggaatcaccaaggagccctctttcattagcaagcgacgcgtcccctaccatgacccccagataagcaagagtctggagtggaatggtgcgataagtgagagtaacgtagttgcctctcccgaaccagaggcgccagagacacctaagtctcaggaggctgagcagaaagacgtgacacaggaacgggtgcactctctggaagcaagccgggttccaaagagaacccgaagccacagcgccgactcacgggccgagggggcttcagacgtggaaaataacgaaggagtgactaaccatacgcccgtgaacgagaatgtggaactggagcactcaaccaaggtgctcagtgagaatgtagacaacggtgtgggaatcttcacagccttcctttttaagtccattgagttcttcattggctttatcgtcatctccgtaatcctgcattttgtgttccagaatttcccgttgctgttttcctgtctgatgagtatccgtattgtcgataaccgcttacttacactggtgattgtgaattag

SEQ ID NO: 202822 - DNA, 669 bp, Artificial Sequence
  derived and/or modified sequence
atgcccgtgcggtttaaaggcctgtcagagtatcagcggaacttcttatggaaaaagtcgtatctgtcagaatcttgcaacagtagtgtcgggagaaaatacccttgggctgggcttcgctctgatcagctcggcatcacgaaggaaccttcatttatctcaaaaaggcgcgtgccatatcatgacccccaaatttcgaaatcgttggaatggaatggagccatcagcgagtctaacgtagtggcatcccctgagcccgaggctcccgagactccaaaaagccaggaggctgagcaaaaggatgtgactcaagaaagagttcattccctcgaagcctctagagtgccgaagcgcacccggagccatagtgcagactccagagccgaaggtgcatccgatgtcgagaacaacgaaggcgtgaccaaccatacgcccgtgaatgagaacgtggaactcgagcactcaacaaaagtcttaagtgaaaacgtggataacggcgtggggattttcactgccttcctttttaagtctattgagttcttcattggattcatcgtcatctcggtaattctgcactttgtcttccagaacttccccttactcttttcttgccttatgtctattagaatagttgataaccgattgcttaccctcgtcattgtcaattag

SEQ ID NO: 202823 - DNA, 669 bp, Artificial Sequence
  derived and/or modified sequence
atgcccgtgagattcaagggcctgagcgagtaccagagaaacttcctgtggaagaagagctacctgagcgagagctgcaacagcagcgtgggcagaaagtacccctgggccggcctgagaagcgaccagctgggcatcaccaaggagcccagcttcatcagcaagagaagagtgccctaccacgacccccagatcagcaagagcctggagtggaacggcgccatcagcgagagcaacgtggtggccagccccgagcccgaggcccccgagacccccaagagccaggaggccgagcagaaggacgtgacccaggagagagtgcacagcctggaggccagcagagtgcccaagagaaccagaagccacagcgccgacagcagagccgagggcgccagcgacgtggagaacaacgagggcgtgaccaaccacacccccgtgaacgagaacgtggagctggagcacagcaccaaggtgctgagcgagaacgtggacaacggcgtgggcatcttcaccgccttcctgttcaagagcatcgagttcttcatcggcttcatcgtgatcagcgtgatcctgcacttcgtgttccagaacttccccctgctgttcagctgcctgatgagcatcagaatcgtggacaacagactgctgaccctggtgatcgtgaactag

SEQ ID NO: 202824 - protein, 139 aa, Artificial Sequence
  derived and/or modified sequence
MSSLPVPYTLPVSLPVGSCVIITGTPILTFVKDPQLEVNFYTGMDEDSDIAFQFRLHFGHPAIMNSCVFGIWRYEEKCYYLPFEDGKPFELCIYVRHKEYKVMVNGQRIYNFAHRFPPASVKMLQVFRDISLTRVLISD

SEQ ID NO: 202825 - DNA, 777 bp, Artificial Sequence
  derived and/or modified sequence
gctgcattacagacacagacctgcaaacatctatggttgtgacagagtttctttctgacacctgagtctttctcctgctgcacggaaagcttgctgggaggggcttggaatctggcatgaagccaaagggcatctctgagttgcagcatttaaatgatcccactcagagattcacacagaagactggacacaattccgaagagctgcccagaaggagagaacaatgtcatcactacccgtaccatacacactgcctgtttccttgcctgttggttcgtgcgtgataatcacagggacaccgatcctcacttttgtcaaggacccacagctggaggtgaatttctacactgggatggatgaggactcagatattgctttccaattccgactgcactttggtcatcctgcaatcatgaacagttgtgtgtttggcatatggagatatgaggagaaatgctactatttaccctttgaagatggcaaaccatttgagctgtgcatctatgtgcgtcacaaggaatacaaggtaatggtaaatggccaacgcatttacaactttgcccatcgattcccgccagcatctgtgaagatgctgcaagtcttcagagatatctccctgaccagagtgcttatcagcgattgagggagatgatcagactcctcattgttgaggaatccctctttctacctgaccatgggattcccagagcctactaacagaataatccctcctcaccccttcccctacacttgatcattaaaacagcaccaaacttc

SEQ ID NO: 202826 - DNA, 420 bp, Artificial Sequence
  derived and/or modified sequence
atgtcctctctgcctgtgccctataccctgcctgttagtcttccggttggtagctgtgtaataattacaggcacgccgattctcacattcgtaaaggacccccagctggaggtgaatttttatacaggaatggatgaagatagtgacattgcgttccagttccgccttcattttgggcaccctgccatcatgaattcctgcgtgtttggaatctggagatatgaggaaaagtgctattatcttcccttcgaagatggcaagccctttgagttgtgcatttatgtgcgccacaaagaatataaagtaatggtgaacggacaacggatttacaactttgctcatagatttcctccagcctccgtgaagatgcttcaagtgttcagggatattagcctaaccagggtgctaatcagtgactag

SEQ ID NO: 202827 - DNA, 420 bp, Artificial Sequence
  derived and/or modified sequence
atgagcagcctgcctgtgccctacaccctgcctgtgtccctgcctgtgggcagctgtgtgatcatcaccggcacccccatcctgacctttgtgaaggacccccagctggaggtgaacttctacacaggcatggatgaggacagcgacatcgccttccagttccggctgcacttcggccacccagccatcatgaacagctgtgtgtttggcatctggaggtatgaggagaagtgctactacctgccctttgaagatggcaagccctttgagctgtgcatctacgtgcgccacaaggagtacaaggtgatggtgaatggccagaggatctacaactttgcccaccgcttccccccagcctctgtgaagatgctgcaggtgttccgggacatcagcctgaccagggtgctgatcagtgactag

SEQ ID NO: 202828 - DNA, 420 bp, Artificial Sequence
  derived and/or modified sequence
atgagcagcctgcccgtgccctacaccctgcccgtgagcctgcccgtgggcagttgtgttatcattactggcacgcccattctgacattcgtgaaggacccacagttagaagtcaatttttacaccgggatggacgaggactctgacatcgccttccagttcaggctgcacttcggccatcccgcaatcatgaactcatgcgtcttcggaatttggcgctacgaagaaaaatgttattatctgccttttgaagacggaaagccttttgagttatgtatctatgtgcgtcataaagaatataaagtgatggtgaatgggcagaggatctataattttgctcaccgctttcccccagcgagcgttaagatgctccaagtgtttagagatattagcctgacccgggtgctgatctcagattag

SEQ ID NO: 202829 - DNA, 420 bp, Artificial Sequence
  derived and/or modified sequence
atgtcttctcttcctgtgccctacaccctccccgtctccctcccggttggaagctgtgtgatcatcactgggactcccatcctcactttcgtgaaagaccctcagctcgaggtaaatttttacaccggtatggatgaggattctgacatcgctttccagtttaggctccattttggacaccccgctatcatgaatagttgtgtctttggtatctggagatatgaagaaaagtgctactatcttccattcgaggatggcaagccgtttgagctctgcatttacgtgcgccacaaggagtataaggtgatggttaacggtcagcggatatacaatttcgcacatcgttttccccctgccagtgttaagatgcttcaggtgttcagggatatttccctaacaagggtcctcatctctgattag

SEQ ID NO: 202830 - DNA, 420 bp, Artificial Sequence
  derived and/or modified sequence
atgagcagcctgcccgtgccctacaccctgcccgtgagcctgcccgtgggcagctgcgtgatcatcaccggcacccccatcctgaccttcgtgaaggacccccagctggaggtgaacttctacaccggcatggacgaggacagcgacatcgccttccagttcagactgcacttcggccaccccgccatcatgaacagctgcgtgttcggcatctggagatacgaggagaagtgctactacctgcccttcgaggacggcaagcccttcgagctgtgcatctacgtgagacacaaggagtacaaggtgatggtgaacggccagagaatctacaacttcgcccacagattcccccccgccagcgtgaagatgctgcaggtgttcagagacatcagcctgaccagagtgctgatcagcgactag

SEQ ID NO: 202831 - protein, 106 aa, Artificial Sequence
  derived and/or modified sequence
MKAKRSHQAVIMSTSLRVSPSIHGYHFDTASRKKAVGNIFENTDQESLERLFRNSGDKKAEERAKIIFAIDQDVEEKTRALMALKKRTKDKLFQFLKLRKYSIKVH

SEQ ID NO: 202832 - DNA, 321 bp, Artificial Sequence
  derived and/or modified sequence
atgaaggctaaacgttcacaccaggccgtgattatgagcacaagtctacgagtgtccccgtctatccacggataccattttgacaccgcgtctcgaaaaaaggctgtgggcaatatattcgagaacacagaccaggaatcactggaaagattgtttagaaactccggggacaagaaagctgaagagagggcgaagatcatttttgcaattgatcaagatgtagaggagaagaccagggctcttatggccctcaaaaagcgaaccaaggataaattattccagttcctgaagctcagaaaatactctattaaggtgcactag

SEQ ID NO: 202833 - DNA, 321 bp, Artificial Sequence
  derived and/or modified sequence
atgaaggccaagaggagccaccaggccgtcatcatgagcaccagcctgcgggtgagccccagcatccacggctaccactttgacacagccagcaggaagaaggctgtgggcaacatctttgaaaatacagaccaggagagcctggagcggctcttcagaaattctggggacaagaaggccgaggagcgggccaagatcatctttgccatcgaccaggatgtggaggagaagacccgggccctgatggccctgaagaagaggaccaaggacaagctgttccagttcctgaagctgaggaagtacagcatcaaggtgcactag

SEQ ID NO: 202834 - DNA, 321 bp, Artificial Sequence
  derived and/or modified sequence
atgaaggccaagcggagccaccaggccgtgatcatgagcaccagcctgagggtctccccctccatacacgggtatcactttgacaccgcctctaggaagaaggcagtggggaacatttttgagaataccgaccaggagagcctcgagagactctttcggaactcaggtgacaagaaagccgaggagcgggcgaagatcatctttgccatagaccaggacgtagaggagaagactcgcgcccttatggccctcaaaaaacggactaaggacaagcttttccagtttctcaaactgaggaaatattctatcaaggttcattag

SEQ ID NO: 202835 - DNA, 321 bp, Artificial Sequence
  derived and/or modified sequence
atgaaggcaaagagaagccaccaggccgttattatgagtacctctcttcgcgtgagcccaagcatccacggctaccacttcgatacagcgtcgagaaaaaaagccgtcggcaatatttttgagaacacagatcaggagagcctggaaaggctgttccgtaactcaggcgacaagaaggcggaagagagagcgaagattatcttcgctattgatcaagatgtggaggaaaaaacaagggcactgatggcgctgaagaagcggacgaaggacaagttgttccagttccttaaactgcgaaaatattccataaaagttcattag

SEQ ID NO: 202836 - DNA, 1833 bp, Artificial Sequence
  derived and/or modified sequence
aatgatttcactacagactctctggaaagcctgggagctgaattccggaagatccccacatcgatgaaagcaaagcgaagccaccaagccgtcatcatgtccacgtcgctacgagtcagcccatccatccatggctaccacttcgacacagcctctcgtaagaaagccgtgggcaacatctttgaaaacacagaccaagaatcactagaaaggctcttcagaaactctggagacaagaaagcagaggagagagccaagatcatttttgccatagatcaagatgtggaggagaaaacgcgtgccctgatggccttgaagaagaggacaaaagacaagcttttccagtttctgaaactgcggaaatattccatcaaagttcactgaagagaagaggatggataaggacgttatccaagaatggacattcaaagaccaagtgagtttgtgagattctaacagatgcagcattttgctgctaccttacaagcttctcttctgtcaggactccagaggctggaaagggaccgggactggaaagggaccaggactgaacagactggttacaaagactccaaacaatttcatgccctgtgctgttacagaggagaacaaaatgctttcagcaaggatttgaaaactcttccgtccctgcaggaaaggattgatgctgatagaagagcctggacagatgtaatgagaactaaagaaaacagatggctggagatgacatttatccagggtcactttgtcaggccctaggacttaaatcgaagttgaacttttttttttttttttaaccaaatagataggggaagggaggagggagagggaggacagggagagaaaataccatgcataaattgtttactgaatttttatatctgagtgttcaaaatatttccaagcctgagtattgtctattggtatagatttttagaaatcaataattgattatttatttgcacttattacaatgcctgaaaaagtgcaccacatggatgttaagtagaaattcaagaaagtaagatgtcttcagcaactcagtaaaaccttacgccaccttttggtttgtaaaaggttttttatacatttcaaacaggttgcacaaaagttaaaataatggggtcttttataaatccaaagtactgtgaaaacattttacatattttttaaatcttctgactaatgctaaaacgtaatctaattaaatttcatacagttactgcagtaagcattaggaagtgaatatgatatacaaaatagtttataaagactctatagtttctataatttattttactggcaaatgtcatgcaacaataataaattattgtaaactttgtggcttttggtctgtgatgcttggtctcaaaggaaaaaataagatggtaaatgttgatatttacaaacttttctaaagatgtgtctctaacaataaaagttaattttagagtagttttatattaattaccaaactttttcaaaacaaattcttacgtcaaatatctgggaagtttctctgtcccaatcttaaaatataaaatatagatatagaagttcatagattgactccttggcatttctatttatgtatccattaaggatgagttttaaaaggctttctcttcatacttttgaaaaatttcttctatgattacagtagctatgtacatgtgtacatctatttttcccaagcaatatgttttgggtttagagtctgagtgatgaccaagattctgtgtgttactactgtttgtttaataggaacaaatatagaaataatattatctctttgcttatttcccgttaaaactataataaaatgtttctagg

SEQ ID NO: 202837 - DNA, 321 bp, Artificial Sequence
  derived and/or modified sequence
atgaaggccaagagaagccaccaggccgtgatcatgagcaccagcctgagagtgagccccagcatccacggctaccacttcgacaccgccagcagaaagaaggccgtgggcaacatcttcgagaacaccgaccaggagagcctggagagactgttcagaaacagcggcgacaagaaggccgaggagagagccaagatcatcttcgccatcgaccaggacgtggaggagaagaccagagccctgatggccctgaagaagagaaccaaggacaagctgttccagttcctgaagctgagaaagtacagcatcaaggtgcactag

SEQ ID NO: 202838 - protein, 378 aa, Artificial Sequence
  derived and/or modified sequence
MDLAGLLKSQFLCHLVFCYVFIASGLIINTIQLFTLLLWPINKQLFRKINCRLSYCISSQLVMLLEWWSGTECTIFTDPRAYLKYGKENAIVVLNHKFEIDFLCGWSLSERFGLLGGSKVLAKKELAYVPIIGWMWYFTEMVFCSRKWEQDRKTVATSLQHLRDYPEKYFFLIHCEGTRFTEKKHEISMQVARAKGLPRLKHHLLPRTKGFAITVRSLRNVVSAVYDCTLNFRNNENPTLLGVLNGKKYHADLYVRRIPLEDIPEDDDECSAWLHKLYQEKDAFQEEYYRTGTFPETPMVPPRRPWTLVNWLFWASLVLYPFFQFLVSMIRSGSSLTLASFILVFFVASVGVRWMIGVTEIDKGSAYGNSDSKQKLND

SEQ ID NO: 202839 - protein, 159 aa, Artificial Sequence
  derived and/or modified sequence
MDLAGLLKSQFLCHLVFCYVFIASGLIINTIQLFTLLLWPINKQLFRKINCRLSYCISSQLVMLLEWWSGTECTIFTDPRAYLKYGKENAIVVLNHKFEIDFLCGWSLSERFGLLGVSQKCIPPCLTHFSGSAPPLVFLLLVIQNLQKNQQSFYLMKWS

SEQ ID NO: 202840 - protein, 124 aa, Artificial Sequence
  derived and/or modified sequence
MLLEWWSGTECTIFTDPRAYLKYGKENAIVVLNHKFEIDFLCGWSLSERFGLLGGSKVLAKKELAYVPIIGWMWYFTEMVFCSRKWEQDRKTVATSLQHLRDYPEKYFVCRHQSSCVPRAPAGL

SEQ ID NO: 202841 - protein, 118 aa, Artificial Sequence
  derived and/or modified sequence
MDLAGLLKSQFLCHLVFCYVFIASGLIINTIQLFTLLLWPINKQLFRKINCRLSYCISSRLQGPGQERAGLCPNYRLDVVLHRDGLLFAQVGAGSQDGCHQFAAPPGLPREVFFPDSL

SEQ ID NO: 202842 - DNA, 1137 bp, Artificial Sequence
  derived and/or modified sequence
atggacctggccggcctgctgaagagccagttcctgtgccacctggtgttctgctacgtgttcatcgccagcggcctgatcatcaacaccatccagctgttcaccctgctgctgtggcccatcaacaagcagctgttcagaaagatcaactgcagactgagctactgcatcagcagccagctggtgatgctgctggagtggtggagcggcaccgagtgcaccatcttcaccgaccccagagcctacctgaagtacggcaaggagaacgccatcgtggtgctgaaccacaagttcgagatcgacttcctgtgcggctggagcctgagcgagagattcggcctgctgggcggcagcaaggtgctggccaagaaggagctggcctacgtgcccatcatcggctggatgtggtacttcaccgagatggtgttctgcagcagaaagtgggagcaggacagaaagaccgtggccaccagcctgcagcacctgagagactaccccgagaagtacttcttcctgatccactgcgagggcaccagattcaccgagaagaagcacgagatcagcatgcaggtggccagagccaagggcctgcccagactgaagcaccacctgctgcccagaaccaagggcttcgccatcaccgtgagaagcctgagaaacgtggtgagcgccgtgtacgactgcaccctgaacttcagaaacaacgagaaccccaccctgctgggcgtgctgaacggcaagaagtaccacgccgacctgtacgtgagaagaatccccctggaggacatccccgaggacgacgacgagtgcagcgcctggctgcacaagctgtaccaggagaaggacgccttccaggaggagtactacagaaccggcaccttccccgagacccccatggtgccccccagaagaccctggaccctggtgaactggctgttctgggccagcctggtgctgtaccccttcttccagttcctggtgagcatgatcagaagcggcagcagcctgaccctggccagcttcatcctggtgttcttcgtggccagcgtgggcgtgagatggatgatcggcgtgaccgagatcgacaagggcagcgcctacggcaacagcgacagcaagcagaagctgaacgactag

SEQ ID NO: 202843 - DNA, 7865 bp, Artificial Sequence
  derived and/or modified sequence
gctttttctttccagtgttggctgacttacagctcttataaactagtggcaatttctgaacccagccggctccatctcagcttctggtttctaagtccatgtgccaaaggctgccaggaaggagacgccttcctgagtcctggatctttcttccttctggaaatctttgactgtgggtagttatttatttctgaataagagcgtccacgcatcatggacctcgcgggactgctgaagtctcagttcctgtgccacctggtcttctgctacgtctttattgcctcagggctaatcatcaacaccattcagctcttcactctcctcctctggcccattaacaagcagctcttccggaagatcaactgcagactgtcctattgcatctcaagccagctggtgatgctgctggagtggtggtcgggcacggaatgcaccatcttcacggacccgcgcgcctacctcaagtatgggaaggaaaatgccatcgtggttctcaaccacaagtttgaaattgactttctgtgtggctggagcctgtccgaacgctttgggctgttagggggctccaaggtcctggccaagaaagagctggcctatgtcccaattatcggctggatgtggtacttcaccgagatggtcttctgttcgcgcaagtgggagcaggatcgcaagacggttgccaccagtttgcagcacctccgggactaccccgagaagtattttttcctgattcactgtgagggcacacggttcacggagaagaagcatgagatcagcatgcaggtggcccgggccaaggggctgcctcgcctcaagcatcacctgttgccacgaaccaagggcttcgccatcaccgtgaggagcttgagaaatgtagtttcagctgtatatgactgtacactcaatttcagaaataatgaaaatccaacactgctgggagtcctaaacggaaagaaataccatgcagatttgtatgttaggaggatcccactggaagacatccctgaagacgatgacgagtgctcggcctggctgcacaagctctaccaggagaaggatgcctttcaggaggagtactacaggacgggcaccttcccagagacgcccatggtgcccccccggcggccctggaccctcgtgaactggctgttttgggcctcgctggtgctctaccctttcttccagttcctggtcagcatgatcaggagcgggtcttccctgacgctggccagcttcatcctcgtcttctttgtggcctccgtgggagttcgatggatgattggtgtgacggaaattgacaagggctctgcctacggcaactctgacagcaagcagaaactgaatgactgactcagggaggtgtcaccatccgaagggaaccttggggaactggtggcctctgcatatcctccttagtgggacacggtgacaaaggctgggtgagcccctgctgggcacggcggaagtcacgacctctccagccagggagtctggtctcaaggccggatggggaggaagatgttttgtaatctttttttccccatgtgctttagtgggctttggttttctttttgtgcgagtgtgtgtgagaatggctgtgtggtgagtgtgaactttgttctgtgatcatagaaagggtattttaggctgcaggggagggcagggctggggaccgaaggggacaagttcccctttcatcctttggtgctgagttttctgtaacccttggttgccagagataaagtgaaaagtgctttaggtgagatgactaaattatgcctccaagaaaaaaaaattaaagtgcttttctgggtcatctgtggtgtatgttgacatggaccgctgcccctccatcctgcccttgcccgtggctttggtgtttcagatcctactcacgggaggcagctgccgcggaggtgtgggcagctgagaggggtgggcaggccagcacagctcctggcaggagacacaggtccaggagcccgtgagcatttgtgagagcagagatggcaagcacgtgcgtggagaccaacgaagcgtgtccctggcacacagcaagggagagtttcgctcggtctctgcagtgcagtctcctggcgtaagtcttgaagatggacccaactccctgaagaaatggatcttgaaattgaacacaaacatcatgaacgtacagcctgggcattctgcagtgatttgtgagatgagcttgcatcgactgttcctctcagcagtgacagccaaagtcacccctgataaaatgcagtttcactttataaaatgcctcgccccttcccagcatgtagagcttgtctgcagccctaaaggagccaggtcctgctctgatgagggtcaaatcagagccgacatcccatgtacaaaaaacccccaggcttctgccttccttccgggctcctgtctgctcccattttactccacggaatagttctgccctgtagcatctccagcggcctttgcagactgctgtcagccaacaggtgccaaaaatgcaaaagaagaagaaactaaaagcagtgctatttttgcagaacaaatgctagctattaaatcatcttaggccaagacaccaatggcacttggaccgataggtatttggagcatgagttaggaaggatatgtctttctccaggtgcgcagctgaaagttgctgagaaaagctgcctgtgttgctgtggtaacatgagaaggaatgaacagctctatacaaaaactggccacacattataaggcctattctatgcagttatgtttttggctatttgctcatttagtcattgtttatcaaccaaactaggtaagccaaggagttacaagacagctctagagaagctccctctgcttacaggacaataatgcattgtttgtttgttgatacaaatgaattatttgaatccacagaagtgaaaaagggaaaaaatcctggctgacttgtgggaagagcgtactgcagagcctagggcctgagttaactcgctggcggccctgcaggcaggcttgatgggagcgcccagcacatctgcccaccctgcacagggcatgaagcaccgtgtgcagagatctgtgggcaaaagcccaggacgtgaccttaggcaagaggggtccttggagaagtggaggtgtgcatggtgtgtagccttgcgtgtctgtgagcacgccctagtggacctgcgcctggattatcgggccagtctctcggaggggtccgtgatgctgagttacgccattcacctgaactctgcagctcatcggctgtaggatttgggtgagacacttttccttgctgactcatttccccatctgcaaaatgggggtgacgatatctacctcttggggtgtgtcaagggtaaaagagcacactttaagaatcctaaagcactaagccaaggatgaaagactagaaagctgcctctatgttgctactctcaaaaatgctcagaaattttcttgtcgtactaaaaatgtgttatttttctcattttcattcttccattcaacacagaagtaatctaagtaagttctaaaaacatagatccgggggcccacagacattcaattttcttctgaattggctctggtatcacacaacacacaagcaagcaaacagcctgcctgctagggccttgggttccaggctggaggaatgcaggcagaaatctcttaggaaataactaagtgagcgccaagttttgaattgccttagagccgaaagagaatgtggcgtgctggggagagatctggacctctttctcatcagtcatttgacctgtccacgaagaacaattttgttatgcagcctgggaacctggtttccttacaccctgcgcccttaatgacacagacaaccacgggtactcctggacggaagctcatcacgcctcctcaaataccttcacccatgttcaggtcacacggaggtcaccatctcctcagcacacaacaactgctttggttcccagggttattttttctacgagttgaaaacccacggagcctaagccatctttttgtcccctaaggagagccccatagactaagagctacacttcctgtctgtctttcccacctttccatctcattctagcttaaagcttatcacgctactgagagcctgttctgtagttcaaggtggcagagaaaaatacgaaccttgagtgaaatctggagagcagtgcagggtcatccccagacgtgacgggccatatcctaggcgactcctgcagcttatagaagcagggaatttaatggacttcttccaggaaagccagcccacggggactcttaaaaagacaccaaccatttggaagatgcagcttgaggtctgggggactggactgattctgccaccatatagtgaacacgattaatcgggaggaagaagtaaggcactctgtgagttagtctaccaccctattgactttgacagagagaaaaccaacttttttcatatgatcacacagtagtactggaatatctcgactgcaatatcctctaaacaaatgcatgcaaagctttgtaaaagcagctgatgattaaaaaaattttaaaacattagggtttttctaatatatccatatgtgggacagtgatttaaatgtcattaattgtccagccacaacttgtaacagtgatgtgaaagacacaaaaaaggccccactggagtggaggagtggtctggctggtccccaagcaaaacagaatgggcttcgcataggctttagaacttattcataaatattgaccaaagtgtgaagcaaggtatccagtgaagattctctagggtctctacttctgctcaagagatttaatccagctttctctaaagcagtggtccagacttgccacatactaggttaaagataaagtgagaaaaacaaatactttggtttgcacgtctcttgaggggccctaggctgtatggaggaatatttagaggaatatttgtgagctgccatttgtgtttaaaagaacatgaaagcaagacgggccctaacccgcctgtgtctgtagctgaccaggaggccactgcttccttcccccagagcttctaggagagccccccaaaatgcaactctccaaggtcctgtggagtagtcccctcataatgcctccaccacacctgtgtctcacgatgccttaactgacgtagctcctaagtgatgttcacagagaaggaaatacttaggcaagcccatgtgtaacatgctcacagatgtgctggctttgccaatgctttcggactccaccatgctttctgattcttctggtcctagtcacgccttggcacggggcagaagcggccgagctatgctgacaggtgctgctgagagccaacagccattcagccgagaaggcgtttctaggtgagggcatgagagctggcattccaggctgctgagtgcggcatctgcaggtgcaccacattgctccacggtgtgttcagaagagaccagcatcttgaatctcaggctctgggctcattctttgcctctgccaagggaccattcaggggcttcaagccagctgctgaaaatcccccttttctggatttttccccatctatataaggatatggtggctgtgtggacaagaaattggtttcatctcagaagggtgcttccctacaaagatcttcagaaatttaattgaaaacaattttttgaactttttttgtttggccaggatgaatgaagctgaagtcacatcctgaatgtgcatgccagacaaagggtaagcaagcagtctttacaaatgccaatccctctgcactccaaaaccggagcccgtaatgaaggcccaggttccagtcatcacaggatcccccaagccagcacagtgcctgatgcctccctaggcattagcacatcccagcactctaattcacatcctcagcatccctgcctcctgcatccagggcttaggttgagtgtttccagagtgtcaagtacatttaaacacaaaccaaatactccagggttttgacctgtcacaatggcttttgaaaacaacagacgtacaatttgagagaaggactcgatggacttcttaggctgaggactaaggacatgttgctgttcctcttggtccaggacattcaataccattcacagcattcatcaccaactgacatagtatcgatcacgacattcaactgtttgaaattactgctattttggtcaaaaactaagaaatcagaaattgcacctacatagtgtgtctcctcattggagtcccatctctctgagcacagggatgggctcctgagctcacagccctgccctgcccccccagcagggcctcaccctcatggccctcagtgaatagtgactacatgaagggggcacttactagaggcctgagtaatggaatttcaattagcttctgcttcccttttctaaaaaagaaccacctttcttaagaataattaggccaaaataaacttgagtaatttgtacagtcaatattttgaagtttcggagttaccagtgaaatagcaaagctgttctccaggaaaggacatccaggttcccacccaggccttccttcctcagctcctgcagcctcatcctagtttaatatgaaggttgtgaatgggttaaaaagcagttcttaagcacctacttagatcttttcagtatctggaaatagcacccagggctgtgttagtaaagcttttcactgggtaagagtcatacaatttttacatttaatttgtttttttaaaacaaggcagtcttgttttacatattggaatgactagatattttttgacatttctggcacctctggttctgctgaattttaagggaggtgagtggtatgtacacaaagttaagattgctgcataataattcctttgcatttccaaaataaattacacaaatgtcacttttccttttctattccatagtactagttttagccagatctttgccaaacattctaggacattcagaaaagtcatccatggaattttggaatgccattctctctgtatctttgcagatcatgaggaaggaaagttgatgaactagtacgggatggctcagacttgtaaagtgtctaagtcacaacgctgcagagccagcttccgggtagcaatggcatggcctcagctgtgccaaggctacaactggagcttccttactcgcatctgaggcaaacacagcaaggctggcccaggccgcccacagtcaacagatgttcacgggagatggatcagcccctcttttgcttgttctatcaaggaaagagatctaaccatgggcaagggtggaacacacccggttcaggtcagggaatgagttgctctaagtgaacagtgaattcttacttctcagcctgtatcaattgtacccagggttcatgattactgtgacccactaagggatgatctttgaggaaacagacctggagggaggtaatttaaggagggaaagcgagtgggttttacagactgctttgtggcgacattcaggaacagaccattcaatggatgacttttcagtacataaaagcaagcagtaatggccaggagagagcaaagatgccctaagaatgacatcagactgaccaaatgtgccttttcaaataagttatgagaacgaatgaattggaattagagcaaggtattggacagaaccatgctagtctttgagagaacgtgtggattgggtggatgtttggaccgaatgaatggtaactttttaatgtgaaacagagaactgatatatgggctgtcatgtcaccctagggtactgtcgctctgtcatgtgtagcaatctttccaaatttttgttggtgggctgaacaaagataaaactaataaagtatgtgtggataccactaga

SEQ ID NO: 202844 - DNA, 7705 bp, Artificial Sequence
  derived and/or modified sequence
tataaactagtggcaatttctgaacccagccggctccatctcagcttctggtttctaagtccatgtgccaaaggctgccaggaaggagacgccttcctgagtcctggatctttcttccttctggaaatctttgactgtgggtagttatttatttctgaataagagcgtccacgcatcatggacctcgcgggactgctgaagtctcagttcctgtgccacctggtcttctgctacgtctttattgcctcagggctaatcatcaacaccattcagctcttcactctcctcctctggcccattaacaagcagctcttccggaagatcaactgcagactgtcctattgcatctcaagccggctccaaggtcctggccaagaaagagctggcctatgtcccaattatcggctggatgtggtacttcaccgagatggtcttctgttcgcgcaagtgggagcaggatcgcaagacggttgccaccagtttgcagcacctccgggactaccccgagaagtattttttcctgattcactgtgagggcacacggttcacggagaagaagcatgagatcagcatgcaggtggcccgggccaaggggctgcctcgcctcaagcatcacctgttgccacgaaccaagggcttcgccatcaccgtgaggagcttgagaaatgtagtttcagctgtatatgactgtacactcaatttcagaaataatgaaaatccaacactgctgggagtcctaaacggaaagaaataccatgcagatttgtatgttaggaggatcccactggaagacatccctgaagacgatgacgagtgctcggcctggctgcacaagctctaccaggagaaggatgcctttcaggaggagtactacaggacgggcaccttcccagagacgcccatggtgcccccccggcggccctggaccctcgtgaactggctgttttgggcctcgctggtgctctaccctttcttccagttcctggtcagcatgatcaggagcgggtcttccctgacgctggccagcttcatcctcgtcttctttgtggcctccgtgggagttcgatggatgattggtgtgacggaaattgacaagggctctgcctacggcaactctgacagcaagcagaaactgaatgactgactcagggaggtgtcaccatccgaagggaaccttggggaactggtggcctctgcatatcctccttagtgggacacggtgacaaaggctgggtgagcccctgctgggcacggcggaagtcacgacctctccagccagggagtctggtctcaaggccggatggggaggaagatgttttgtaatctttttttccccatgtgctttagtgggctttggttttctttttgtgcgagtgtgtgtgagaatggctgtgtggtgagtgtgaactttgttctgtgatcatagaaagggtattttaggctgcaggggagggcagggctggggaccgaaggggacaagttcccctttcatcctttggtgctgagttttctgtaacccttggttgccagagataaagtgaaaagtgctttaggtgagatgactaaattatgcctccaagaaaaaaaaattaaagtgcttttctgggtcatctgtggtgtatgttgacatggaccgctgcccctccatcctgcccttgcccgtggctttggtgtttcagatcctactcacgggaggcagctgccgcggaggtgtgggcagctgagaggggtgggcaggccagcacagctcctggcaggagacacaggtccaggagcccgtgagcatttgtgagagcagagatggcaagcacgtgcgtggagaccaacgaagcgtgtccctggcacacagcaagggagagtttcgctcggtctctgcagtgcagtctcctggcgtaagtcttgaagatggacccaactccctgaagaaatggatcttgaaattgaacacaaacatcatgaacgtacagcctgggcattctgcagtgatttgtgagatgagcttgcatcgactgttcctctcagcagtgacagccaaagtcacccctgataaaatgcagtttcactttataaaatgcctcgccccttcccagcatgtagagcttgtctgcagccctaaaggagccaggtcctgctctgatgagggtcaaatcagagccgacatcccatgtacaaaaaacccccaggcttctgccttccttccgggctcctgtctgctcccattttactccacggaatagttctgccctgtagcatctccagcggcctttgcagactgctgtcagccaacaggtgccaaaaatgcaaaagaagaagaaactaaaagcagtgctatttttgcagaacaaatgctagctattaaatcatcttaggccaagacaccaatggcacttggaccgataggtatttggagcatgagttaggaaggatatgtctttctccaggtgcgcagctgaaagttgctgagaaaagctgcctgtgttgctgtggtaacatgagaaggaatgaacagctctatacaaaaactggccacacattataaggcctattctatgcagttatgtttttggctatttgctcatttagtcattgtttatcaaccaaactaggtaagccaaggagttacaagacagctctagagaagctccctctgcttacaggacaataatgcattgtttgtttgttgatacaaatgaattatttgaatccacagaagtgaaaaagggaaaaaatcctggctgacttgtgggaagagcgtactgcagagcctagggcctgagttaactcgctggcggccctgcaggcaggcttgatgggagcgcccagcacatctgcccaccctgcacagggcatgaagcaccgtgtgcagagatctgtgggcaaaagcccaggacgtgaccttaggcaagaggggtccttggagaagtggaggtgtgcatggtgtgtagccttgcgtgtctgtgagcacgccctagtggacctgcgcctggattatcgggccagtctctcggaggggtccgtgatgctgagttacgccattcacctgaactctgcagctcatcggctgtaggatttgggtgagacacttttccttgctgactcatttccccatctgcaaaatgggggtgacgatatctacctcttggggtgtgtcaagggtaaaagagcacactttaagaatcctaaagcactaagccaaggatgaaagactagaaagctgcctctatgttgctactctcaaaaatgctcagaaattttcttgtcgtactaaaaatgtgttatttttctcattttcattcttccattcaacacagaagtaatctaagtaagttctaaaaacatagatccgggggcccacagacattcaattttcttctgaattggctctggtatcacacaacacacaagcaagcaaacagcctgcctgctagggccttgggttccaggctggaggaatgcaggcagaaatctcttaggaaataactaagtgagcgccaagttttgaattgccttagagccgaaagagaatgtggcgtgctggggagagatctggacctctttctcatcagtcatttgacctgtccacgaagaacaattttgttatgcagcctgggaacctggtttccttacaccctgcgcccttaatgacacagacaaccacgggtactcctggacggaagctcatcacgcctcctcaaataccttcacccatgttcaggtcacacggaggtcaccatctcctcagcacacaacaactgctttggttcccagggttattttttctacgagttgaaaacccacggagcctaagccatctttttgtcccctaaggagagccccatagactaagagctacacttcctgtctgtctttcccacctttccatctcattctagcttaaagcttatcacgctactgagagcctgttctgtagttcaaggtggcagagaaaaatacgaaccttgagtgaaatctggagagcagtgcagggtcatccccagacgtgacgggccatatcctaggcgactcctgcagcttatagaagcagggaatttaatggacttcttccaggaaagccagcccacggggactcttaaaaagacaccaaccatttggaagatgcagcttgaggtctgggggactggactgattctgccaccatatagtgaacacgattaatcgggaggaagaagtaaggcactctgtgagttagtctaccaccctattgactttgacagagagaaaaccaacttttttcatatgatcacacagtagtactggaatatctcgactgcaatatcctctaaacaaatgcatgcaaagctttgtaaaagcagctgatgattaaaaaaattttaaaacattagggtttttctaatatatccatatgtgggacagtgatttaaatgtcattaattgtccagccacaacttgtaacagtgatgtgaaagacacaaaaaaggccccactggagtggaggagtggtctggctggtccccaagcaaaacagaatgggcttcgcataggctttagaacttattcataaatattgaccaaagtgtgaagcaaggtatccagtgaagattctctagggtctctacttctgctcaagagatttaatccagctttctctaaagcagtggtccagacttgccacatactaggttaaagataaagtgagaaaaacaaatactttggtttgcacgtctcttgaggggccctaggctgtatggaggaatatttagaggaatatttgtgagctgccatttgtgtttaaaagaacatgaaagcaagacgggccctaacccgcctgtgtctgtagctgaccaggaggccactgcttccttcccccagagcttctaggagagccccccaaaatgcaactctccaaggtcctgtggagtagtcccctcataatgcctccaccacacctgtgtctcacgatgccttaactgacgtagctcctaagtgatgttcacagagaaggaaatacttaggcaagcccatgtgtaacatgctcacagatgtgctggctttgccaatgctttcggactccaccatgctttctgattcttctggtcctagtcacgccttggcacggggcagaagcggccgagctatgctgacaggtgctgctgagagccaacagccattcagccgagaaggcgtttctaggtgagggcatgagagctggcattccaggctgctgagtgcggcatctgcaggtgcaccacattgctccacggtgtgttcagaagagaccagcatcttgaatctcaggctctgggctcattctttgcctctgccaagggaccattcaggggcttcaagccagctgctgaaaatcccccttttctggatttttccccatctatataaggatatggtggctgtgtggacaagaaattggtttcatctcagaagggtgcttccctacaaagatcttcagaaatttaattgaaaacaattttttgaactttttttgtttggccaggatgaatgaagctgaagtcacatcctgaatgtgcatgccagacaaagggtaagcaagcagtctttacaaatgccaatccctctgcactccaaaaccggagcccgtaatgaaggcccaggttccagtcatcacaggatcccccaagccagcacagtgcctgatgcctccctaggcattagcacatcccagcactctaattcacatcctcagcatccctgcctcctgcatccagggcttaggttgagtgtttccagagtgtcaagtacatttaaacacaaaccaaatactccagggttttgacctgtcacaatggcttttgaaaacaacagacgtacaatttgagagaaggactcgatggacttcttaggctgaggactaaggacatgttgctgttcctcttggtccaggacattcaataccattcacagcattcatcaccaactgacatagtatcgatcacgacattcaactgtttgaaattactgctattttggtcaaaaactaagaaatcagaaattgcacctacatagtgtgtctcctcattggagtcccatctctctgagcacagggatgggctcctgagctcacagccctgccctgcccccccagcagggcctcaccctcatggccctcagtgaatagtgactacatgaagggggcacttactagaggcctgagtaatggaatttcaattagcttctgcttcccttttctaaaaaagaaccacctttcttaagaataattaggccaaaataaacttgagtaatttgtacagtcaatattttgaagtttcggagttaccagtgaaatagcaaagctgttctccaggaaaggacatccaggttcccacccaggccttccttcctcagctcctgcagcctcatcctagtttaatatgaaggttgtgaatgggttaaaaagcagttcttaagcacctacttagatcttttcagtatctggaaatagcacccagggctgtgttagtaaagcttttcactgggtaagagtcatacaatttttacatttaatttgtttttttaaaacaaggcagtcttgttttacatattggaatgactagatattttttgacatttctggcacctctggttctgctgaattttaagggaggtgagtggtatgtacacaaagttaagattgctgcataataattcctttgcatttccaaaataaattacacaaatgtcacttttccttttctattccatagtactagttttagccagatctttgccaaacattctaggacattcagaaaagtcatccatggaattttggaatgccattctctctgtatctttgcagatcatgaggaaggaaagttgatgaactagtacgggatggctcagacttgtaaagtgtctaagtcacaacgctgcagagccagcttccgggtagcaatggcatggcctcagctgtgccaaggctacaactggagcttccttactcgcatctgaggcaaacacagcaaggctggcccaggccgcccacagtcaacagatgttcacgggagatggatcagcccctcttttgcttgttctatcaaggaaagagatctaaccatgggcaagggtggaacacacccggttcaggtcagggaatgagttgctctaagtgaacagtgaattcttacttctcagcctgtatcaattgtacccagggttcatgattactgtgacccactaagggatgatctttgaggaaacagacctggagggaggtaatttaaggagggaaagcgagtgggttttacagactgctttgtggcgacattcaggaacagaccattcaatggatgacttttcagtacataaaagcaagcagtaatggccaggagagagcaaagatgccctaagaatgacatcagactgaccaaatgtgccttttcaaataagttatgagaacgaatgaattggaattagagcaaggtattggacagaaccatgctagtctttgagagaacgtgtggattgggtggatgtttggaccgaatgaatggtaactttttaatgtgaaacagagaactgatatatgggctgtcatgtcaccctagggtactgtcgctctgtcatgtgtagcaatctttccaaatttttgttggtgggctgaacaaagataaaactaataaagtatgtgtggataccactagacagcacagcttactggactggatgtaataaaactgactgaaacttt

SEQ ID NO: 202845 - DNA, 1137 bp, Artificial Sequence
  derived and/or modified sequence
atggacctggccggcctgttgaaatcccaatttctgtgccacttagtgttttgctacgtgtttatagccagcggtctgataatcaacaccatccagctatttactctcttgctgtggccaatcaacaagcaattgttccgtaaaatcaactgccgtctgagttattgtatctccagtcagctcgtgatgctccttgaatggtggagcgggaccgagtgcactatttttaccgaccctagggcttatctcaagtatggcaaggaaaacgccatcgtggtgctaaaccacaagttcgagattgattttctgtgcggctggagcctttctgagcggtttggcctgcttggcggcagcaaagttctggccaagaaggagctggcctatgtcccgattatcggatggatgtggtatttcaccgagatggtcttttgtagtcgtaagtgggaacaggaccgcaaaacagtcgccacttcgctccagcacctgcgcgactatcccgagaagtactttttcctgattcactgcgagggtacccgcttcacagaaaagaaacatgaaataagtatgcaggtggcccgagccaagggtctcccgcgtcttaagcatcatctcctgccccgaaccaaaggattcgcaattactgtccgaagcctccggaatgtggtgtcagccgtgtacgactgtactctgaatttccgaaataatgaaaacccgaccctgcttggtgtcctcaatgggaagaagtaccatgcggatttgtatgtgcgccggatcccacttgaggacattccagaggatgacgatgaatgttcagcttggctacataagctctatcaggagaaggacgcattccaagaagagtactacaggacaggcacattccctgagaccccgatggtgccaccgcgccggccatggaccctggtgaactggctgttttgggcaagcttggtcctctacccattcttccagtttctggtttctatgatccgctccgggtccagtcttactctagccagttttatcctggtctttttcgtcgccagtgtgggtgtccgctggatgataggtgtgaccgaaattgataaaggtagtgcatacggaaactcagactctaagcagaaacttaacgactag

SEQ ID NO: 202846 - DNA, 1137 bp, Artificial Sequence
  derived and/or modified sequence
atggacctggccggcctgctgaagagccagttcctgtgccacctggtgttctgctacgtgttcatcgccagcggcctcatcatcaacaccatccagctgttcaccctgctgctgtggcccatcaacaagcagctgttcaggaagatcaactgccgcctgagctactgcatcagcagccagctggtgatgctgctggagtggtggagcggcacagagtgcaccatcttcacagacccccgggcctacctgaagtatggcaaggaaaatgccatcgtggtgctgaaccacaagtttgaaattgacttcctgtgtggctggagcctgtctgagcgcttcggcctgctgggcggcagcaaggtgctggccaagaaggagctggcctacgtgcccatcatcggctggatgtggtacttcacagagatggtgttctgcagcaggaagtgggagcaggacaggaagacagtggccaccagcctgcagcacctgcgggactacccagagaagtacttcttcctgatccactgtgagggcacccgcttcacagagaagaagcatgagatctccatgcaggtggcccgggccaagggcctgccccggctgaagcaccacctgctgcccaggaccaagggctttgccatcaccgtgcgcagcctgagaaatgtggtgtctgctgtgtatgactgcaccctgaacttcagaaataatgaaaaccccaccctgctgggcgtgctgaatggcaagaagtaccacgccgacctgtatgtgcggcgcatccccctggaggacatcccagaagatgatgatgaatgttctgcctggctgcacaagctgtaccaggagaaggatgccttccaggaggagtactacagaacaggcaccttccctgagacccccatggtgcccccaagaagaccctggaccctggtgaactggctgttctgggccagcctggtgctgtaccccttcttccagttcctggtgtccatgatccgcagcggcagcagcctgaccctggccagcttcatcctggtgttctttgtggcctctgtgggcgtgcgctggatgattggagtgacagaaattgacaagggcagcgcctacggcaacagcgacagcaagcagaagctgaatgactag

SEQ ID NO: 202847 - DNA, 1137 bp, Artificial Sequence
  derived and/or modified sequence
atggacctggccggcctgctgaagagccagttcctgtgccacctggtgttctgttatgtgttcatcgctagcggactgatcattaacacaattcagctttttacattgttgttatggccaatcaacaagcagctgtttcggaaaatcaactgcagactcagctattgtataagttcacagttagtgatgcttttggaatggtggagcggtaccgaatgtacaatttttacagatccacgagcttaccttaagtatggcaaagagaacgcaatcgtcgtgctgaatcataaatttgaaatcgacttcctgtgtggctggtccttatctgaacgttttggactcctgggaggtagtaaagtactggcgaaaaaggagttggcctacgtacccattattggttggatgtggtacttcacagaaatggtcttttgcagccgaaaatgggaacaggatcgaaaaaccgttgcaacgagtcttcagcatctgagggattacccggagaaatacttcttccttatccactgcgagggtacaagatttacagagaaaaaacacgaaatttccatgcaggttgctagagcaaagggacttcccaggttgaaacatcatcttctcccgagaacgaagggatttgctattaccgttcggagtctaaggaacgtggtaagtgccgtttacgattgcacactcaacttcagaaataacgagaatcccactcttctgggggtgctcaacggtaagaagtatcatgctgacctgtacgtccgacgaatacccttagaagacatccctgaggacgacgatgagtgttctgcatggctacacaaattgtatcaggaaaaagacgcctttcaagaagagtattatagaaccggcacatttcctgagacacctatggttcccccacgtaggccctggaccctggtgaactggctcttctgggcaagcctggtgttgtaccctttctttcagttcctggtgtctatgattaggagcgggagcagcctgacactggcatcatttattcttgtatttttcgtcgcatcagttggggtaagatggatgatcggagtgactgagattgacaagggctccgcttatggcaatagcgacagcaagcagaaattaaatgattag

SEQ ID NO: 202848 - DNA, 1137 bp, Artificial Sequence
  derived and/or modified sequence
atggacctcgcagggttgctgaaaagccagtttttgtgtcacctcgtattctgctacgtatttatagctagcggactgataatcaacacaattcaactctttactctgcttctgtggcccataaataagcagttgttccggaagattaactgtagactcagctactgtatatctagtcagttggttatgttattggagtggtggtccggcacagaatgcacaatatttacagatccacgtgcttacttaaagtacgggaaggagaacgcaatcgtagtgttgaatcataaattcgaaatagattttctgtgcggctggagtttgtcggagcgatttgggctgctcggtggctcaaaagtcctggctaagaaggaattggcgtacgtgccgatcataggctggatgtggtacttcacggagatggtgttctgctcccgaaaatgggaacaggaccgtaaaacggtcgccacttcactacagcatttaagagactatcccgagaaatacttcttcttgatccattgtgagggcactcgctttacagaaaagaagcatgaaatctcaatgcaggtggcacgggcaaagggactgcctagactgaaacatcacctgctgccacggacaaaggggtttgctatcaccgttcggagtcttagaaacgtggtgtcggctgtgtacgactgtaccctgaactttagaaacaacgagaatcctacccttctgggcgttttgaatggcaagaagtatcatgctgatttgtatgtaaggcgcatccccctggaggacattccagaggatgacgacgaatgcagtgcatggttacacaagctgtaccaagaaaaagacgcgtttcaagaggaatattataggacaggcacatttcccgagaccccaatggttccacccaggcgcccatggaccctggtgaattggctcttttgggcctcattggtcctgtacccattctttcagtttctcgttagcatgatcagatccggctccagcctgaccctggccagcttcattcttgtgttctttgtggcttctgtgggagtgaggtggatgattggagtaactgagattgataaaggctcagcatacggtaatagcgattcaaagcagaaacttaacgattag

SEQ ID NO: 202849 - protein, 445 aa, Artificial Sequence
  derived and/or modified sequence
MLQGKPLADTMRPDTLQDYFGQSKAVGQDTLLRSLLETNEIPSLILWGPPGCGKTTLAHIIASNSKKHSIRFVTLSATNAKTNDVRDVIKQAQNEKSFFKRKTILFIDEIHRFNKSQQDTFLPHVECGTITLIGATTENPSFQVNAALLSRCRVIVLEKLPVEAMVTILMRAINSLGIHVLDSSRPTDPLSHSSNSSSEPAMFIEDKAVDTLAYLSDGDARAGLNGLQLAVLARLSSRKMFCKKSGQSYSPSRVLITENDVKEGLQRSHILYDRAGEEHYNCISALHKSMRGSDQNASLYWLARMLEGGEDPLYVARRLVRFASEDIGLADPSALTQAVAAYQGCHFIGMPECEVLLAQCVVYFARAPKSIEVYSAYNNVKACLRNHQGPLPPVPLHLRNAPTRLMKDLGYGKGYKYNPMYSEPVDQEYLPEELRGVDFFKQRRC

SEQ ID NO: 202850 - protein, 665 aa, Artificial Sequence
  derived and/or modified sequence
MEVSGPEDDPFLSQLHQVQCPVCQQMMPAAHINSHLDRCLLLHPAGHAEPAAGSHRAGERAKGPSPPGAKRRRLSESSALKQPATPTAAESSEGEGEEGDDGGETESRESYDAPPTPSGARLIPDFPVARSSSPGRKGSGKRPAAAAAAGSASPRSWDEAEAQEEEEAVGDGDGDGDADADGEDDPGHWDADAAEAATAFGASGGGRPHPRALAAEEIRQMLQGKPLADTMRPDTLQDYFGQSKAVGQDTLLRSLLETNEIPSLILWGPPGCGKTTLAHIIASNSKKHSIRFVTLSATNAKTNDVRDVIKQAQNEKSFFKRKTILFIDEIHRFNKSQQDTFLPHVECGTITLIGATTENPSFQVNAALLSRCRVIVLEKLPVEAMVTILMRAINSLGIHVLDSSRPTDPLSHSSNSSSEPAMFIEDKAVDTLAYLSDGDARAGLNGLQLAVLARLSSRKMFCKKSGQSYSPSRVLITENDVKEGLQRSHILYDRAGEEHYNCISALHKSMRGSDQNASLYWLARMLEGGEDPLYVARRLVRFASEDIGLADPSALTQAVAAYQGCHFIGMPECEVLLAQCVVYFARAPKSIEVYSAYNNVKACLRNHQGPLPPVPLHLRNAPTRLMKDLGYGKGYKYNPMYSEPVDQEYLPEELRGVDFFKQRRC

SEQ ID NO: 202851 - DNA, 1338 bp, Artificial Sequence
  derived and/or modified sequence
atgctgcagggcaagcccctggccgacaccatgagacccgacaccctgcaggactacttcggccagagcaaggccgtgggccaggacaccctgctgagaagcctgctggagaccaacgagatccccagcctgatcctgtggggcccccccggctgcggcaagaccaccctggcccacatcatcgccagcaacagcaagaagcacagcatcagattcgtgaccctgagcgccaccaacgccaagaccaacgacgtgagagacgtgatcaagcaggcccagaacgagaagagcttcttcaagagaaagaccatcctgttcatcgacgagatccacagattcaacaagagccagcaggacaccttcctgccccacgtggagtgcggcaccatcaccctgatcggcgccaccaccgagaaccccagcttccaggtgaacgccgccctgctgagcagatgcagagtgatcgtgctggagaagctgcccgtggaggccatggtgaccatcctgatgagagccatcaacagcctgggcatccacgtgctggacagcagcagacccaccgaccccctgagccacagcagcaacagcagcagcgagcccgccatgttcatcgaggacaaggccgtggacaccctggcctacctgagcgacggcgacgccagagccggcctgaacggcctgcagctggccgtgctggccagactgagcagcagaaagatgttctgcaagaagagcggccagagctacagccccagcagagtgctgatcaccgagaacgacgtgaaggagggcctgcagagaagccacatcctgtacgacagagccggcgaggagcactacaactgcatcagcgccctgcacaagagcatgagaggcagcgaccagaacgccagcctgtactggctggccagaatgctggagggcggcgaggaccccctgtacgtggccagaagactggtgagattcgccagcgaggacatcggcctggccgaccccagcgccctgacccaggccgtggccgcctaccagggctgccacttcatcggcatgcccgagtgcgaggtgctgctggcccagtgcgtggtgtacttcgccagagcccccaagagcatcgaggtgtacagcgcctacaacaacgtgaaggcctgcctgagaaaccaccagggccccctgccccccgtgcccctgcacctgagaaacgcccccaccagactgatgaaggacctgggctacggcaagggctacaagtacaaccccatgtacagcgagcccgtggaccaggagtacctgcccgaggagctgagaggcgtggacttcttcaagcagagaagatgctag

SEQ ID NO: 202852 - DNA, 1998 bp, Artificial Sequence
  derived and/or modified sequence
atggaggtgagcggccccgaggacgaccccttcctgagccagctgcaccaggtgcagtgccccgtgtgccagcagatgatgcccgccgcccacatcaacagccacctggacagatgcctgctgctgcaccccgccggccacgccgagcccgccgccggcagccacagagccggcgagagagccaagggccccagcccccccggcgccaagagaagaagactgagcgagagcagcgccctgaagcagcccgccacccccaccgccgccgagagcagcgagggcgagggcgaggagggcgacgacggcggcgagaccgagagcagagagagctacgacgccccccccacccccagcggcgccagactgatccccgacttccccgtggccagaagcagcagccccggcagaaagggcagcggcaagagacccgccgccgccgccgccgccggcagcgccagccccagaagctgggacgaggccgaggcccaggaggaggaggaggccgtgggcgacggcgacggcgacggcgacgccgacgccgacggcgaggacgaccccggccactgggacgccgacgccgccgaggccgccaccgccttcggcgccagcggcggcggcagaccccaccccagagccctggccgccgaggagatcagacagatgctgcagggcaagcccctggccgacaccatgagacccgacaccctgcaggactacttcggccagagcaaggccgtgggccaggacaccctgctgagaagcctgctggagaccaacgagatccccagcctgatcctgtggggcccccccggctgcggcaagaccaccctggcccacatcatcgccagcaacagcaagaagcacagcatcagattcgtgaccctgagcgccaccaacgccaagaccaacgacgtgagagacgtgatcaagcaggcccagaacgagaagagcttcttcaagagaaagaccatcctgttcatcgacgagatccacagattcaacaagagccagcaggacaccttcctgccccacgtggagtgcggcaccatcaccctgatcggcgccaccaccgagaaccccagcttccaggtgaacgccgccctgctgagcagatgcagagtgatcgtgctggagaagctgcccgtggaggccatggtgaccatcctgatgagagccatcaacagcctgggcatccacgtgctggacagcagcagacccaccgaccccctgagccacagcagcaacagcagcagcgagcccgccatgttcatcgaggacaaggccgtggacaccctggcctacctgagcgacggcgacgccagagccggcctgaacggcctgcagctggccgtgctggccagactgagcagcagaaagatgttctgcaagaagagcggccagagctacagccccagcagagtgctgatcaccgagaacgacgtgaaggagggcctgcagagaagccacatcctgtacgacagagccggcgaggagcactacaactgcatcagcgccctgcacaagagcatgagaggcagcgaccagaacgccagcctgtactggctggccagaatgctggagggcggcgaggaccccctgtacgtggccagaagactggtgagattcgccagcgaggacatcggcctggccgaccccagcgccctgacccaggccgtggccgcctaccagggctgccacttcatcggcatgcccgagtgcgaggtgctgctggcccagtgcgtggtgtacttcgccagagcccccaagagcatcgaggtgtacagcgcctacaacaacgtgaaggcctgcctgagaaaccaccagggccccctgccccccgtgcccctgcacctgagaaacgcccccaccagactgatgaaggacctgggctacggcaagggctacaagtacaaccccatgtacagcgagcccgtggaccaggagtacctgcccgaggagctgagaggcgtggacttcttcaagcagagaagatgctag

SEQ ID NO: 202853 - DNA, 1338 bp, Artificial Sequence
  derived and/or modified sequence
atgcttcaaggcaagcctcttgctgacactatgcgcccagatactttgcaggactactttggccagtctaaggcagtggggcaggatacgctactgagatccctactggagaccaatgagataccaagtctcattctatggggcccccccgggtgcgggaagaccaccttagctcatattattgctagtaactctaagaagcatagcatacgctttgtcacgctgtcagcaactaacgcaaagacgaatgacgttagggatgtgatcaaacaggcccaaaatgagaagagtttcttcaagaggaagaccattctatttatcgacgagatccatagatttaataaaagccagcaggatacattcctgccccacgtggaatgcgggacaattactctaatcggagcgacgacagaaaatcccagctttcaggtgaacgcagcgttgctatccagatgtcgggtgattgtgttggaaaagttgccggtggaggcaatggtgaccattctcatgcgagccattaactcactgggcattcacgtcctggacagttcccgccctacggacccactcagtcactcctctaattcctcgtccgaaccagccatgttcatcgaggacaaagctgtagatactctggcctacttgagtgatggcgacgcgcgagcgggccttaacgggctgcagctggccgtgctcgccaggctaagcagccgtaagatgttttgtaagaaatcgggacagtcgtatagcccatcgagggttctgatcacggaaaacgacgtgaaagagggcctgcagagaagtcacatattatatgatagagcaggcgaggagcattataactgcatcagcgccttacacaaatcaatgcgcggatccgaccagaacgccagcctgtattggctcgcaagaatgctcgagggtggcgaagaccccctttacgtggcccgccgactagtaagattcgcttctgaggatatcggcttggcagacccttccgcattaacgcaagccgtggcagcgtatcagggatgccactttatcgggatgcccgaatgcgaagttcttcttgcacagtgcgtggtttacttcgccagagcccccaagtcgatcgaagtctactccgcttacaataatgtgaaggcgtgtctcagaaaccatcaggggcctctccctcccgtgcccctgcatctgcgcaatgcgcccacaagactcatgaaggacctgggctatggaaaagggtacaagtacaaccctatgtactccgagccagttgaccaggagtacttgcccgaggagttgcggggcgttgattttttcaagcagaggaggtgttag

SEQ ID NO: 202854 - DNA, 1998 bp, Artificial Sequence
  derived and/or modified sequence
atggaggtgtccggaccagaagatgatccattcctatcccagctgcatcaggtacaatgcccggtgtgtcagcagatgatgccagcagctcacatcaattcacacttggatcggtgtctgctactgcatccagcaggacacgccgaacctgccgctgggtcgcaccgcgccggggagagagccaaaggcccttcaccaccaggtgcaaagcgcagacgactgtctgagtctagcgctctgaaacagcctgccacccctactgctgcggaatcctcagagggagagggggaggaaggcgacgacgggggggagactgaaagtcgcgagagctacgatgccccacctaccccttcgggagctaggcttataccagatttccctgtagcaagaagctccagcccagggagaaagggcagtggcaaaagacccgccgccgccgcagccgccggatccgctagcccccgcagctgggacgaagcagaggcacaggaagaggaggaagcagtgggagatggggatggggacggagatgccgatgcggatggcgaagatgatcctgggcactgggacgcagacgcagctgaggcagctaccgcgtttggtgctagcgggggcggccgcccccacccaagggccttggccgctgaggagatacgccagatgctccagggcaagcctcttgccgatacgatgcgaccggacacccttcaagactattttggccagtccaaagcggtcggccaggacacattactgcggtcgctgcttgagacaaacgaaattcctagcctgatcttgtggggaccacccggatgtggcaaaaccaccctagcacatataatcgcatctaatagcaaaaagcatagcatccgcttcgttacactgagcgcgacaaacgcaaagacaaacgatgtcagagacgtcatcaagcaagcccaaaatgaaaagagtttctttaaacgtaaaacaatactgttcatagacgaaatccaccgctttaataaaagccagcaggatacatttctgccacatgtcgaatgcgggaccattacattgataggagcaaccaccgagaatccttcttttcaggtgaacgctgcactcctctcaagatgcagagtgattgtgctggagaagttaccagtcgaggccatggttaccattctgatgcgggctattaattcactgggcattcacgtgcttgattcatcaagacctacagatccactgtctcactctagcaactccagctcagaacccgctatgttcatcgaggacaaggccgtcgacaccctggcctacttgtctgacggagacgcccgggccggcctgaacggtctgcagctggctgtgctcgcacgattgtcttctcgaaagatgttctgtaaaaaatctggccagagttactcaccatctcgcgtattgataacagagaacgacgtgaaggaggggctgcagaggagccatatactgtatgatcgcgctggagaagaacactataactgcattagcgccttacataagagtatgcgcggctccgaccaaaacgcgtccctgtactggttggcaagaatgctggaaggaggcgaggacccactgtacgtcgcccggagacttgtccgttttgccagcgaggatattggcctagcagatcccagtgcactaactcaggctgttgctgcctaccaaggttgccatttcatcggtatgcccgagtgtgaagtgctgctagcgcagtgtgtggtgtatttcgctcgcgcgccaaaaagtatcgaagtgtattcagcatataacaacgtgaaggcttgtctgcggaaccatcagggtcctcttcctcccgtccccttgcacttgcggaacgctcctacaagactgatgaaggatttaggctacggaaagggatataaatataatccaatgtattcagaacctgtggaccaagaatatctcccagaggagctaagaggtgtggacttttttaagcaacgtcgttgctag

SEQ ID NO: 202855 - DNA, 1338 bp, Artificial Sequence
  derived and/or modified sequence
atgctgcagggcaagcccctggccgacaccatgaggccagacaccctgcaggactacttcggccagagcaaggctgtgggccaggacaccctgctgcggagcctgctggagaccaatgagatccccagcctcatcctgtggggccccccaggctgtgggaagaccaccctggcccacatcatcgccagcaacagcaagaagcacagcatccgctttgtgaccctgagcgccaccaatgccaagaccaatgatgtgagagatgtgatcaagcaggcccagaatgagaagagcttcttcaagaggaagaccatcctcttcattgatgagatccaccgcttcaacaagagccagcaggacaccttcctgccccacgtggagtgtggcaccatcaccctgattggagccaccacagagaaccccagcttccaggtgaatgctgccctgctgagccgctgccgggtgattgtgctggagaagctgcctgtggaggccatggtgaccatcctgatgagggccatcaacagcctgggcatccacgtgctggacagcagccggcccacagaccccctgagccacagcagcaacagcagcagcgagcccgccatgtttattgaggacaaggctgtggacaccctggcctacctgagtgatggagatgcccgggccggcctgaatggcctgcagctggccgtgctggcccggctgagcagcaggaagatgttctgcaagaagagcggccagagctacagccccagccgggtgctgatcacagaaaatgatgtgaaggagggcctgcagaggagccacatcctgtatgacagagctggggaggagcactacaactgcatcagcgccctgcacaagtccatgaggggcagtgaccagaatgccagcctgtactggctggccaggatgctggagggcggggaggaccccctgtatgtggcccggcggctggtgcgctttgcctctgaagatattggcctggccgaccccagcgccctgacccaggccgtggccgcctaccagggctgccacttcatcggcatgccagaatgtgaggtgctgctggcccagtgtgtggtgtactttgcccgggcccccaagagcattgaggtgtacagcgcctacaacaacgtgaaggcctgcctgaggaaccaccagggccccctgccccctgtgcccctgcacctgagaaatgcccccacccggctgatgaaggacctgggctacggcaagggctacaagtacaaccccatgtacagcgagcctgtggaccaggagtacctgcctgaggagctgcggggcgtggacttcttcaagcagaggcgctgctag

SEQ ID NO: 202856 - DNA, 1998 bp, Artificial Sequence
  derived and/or modified sequence
atggaggtgtctggcccagaagatgaccccttcctgagccagctgcaccaggtgcagtgccctgtgtgccagcagatgatgcctgctgcccacatcaacagccacctggaccgctgcctgctgctgcaccctgctggccacgccgagcctgctgctggcagccacagagctggggagcgggccaagggccccagccccccaggggccaagagaagaaggctgtctgagagcagcgccctgaagcagcctgccacccccacagctgctgagagcagcgagggggagggggaggagggagatgatggaggagaaacagagagccgggagagctatgatgccccacccacccccagcggggcccggctcatcccagacttccctgtggcccggagcagcagccctggcaggaaaggaagtggcaagaggcctgctgctgctgctgctgctggcagcgccagccccaggtcctgggatgaggccgaggcccaggaggaggaggaggccgtgggagatggagatggagatggagatgctgatgctgatggagaagatgaccccggccactgggatgctgatgctgctgaggccgccacagccttcggggccagcggcggcggccggccccacccccgggccctggccgctgaggagatccggcagatgctgcagggcaagcccctggccgacaccatgaggccagacaccctgcaggactacttcggccagagcaaggctgtgggccaggacaccctgctgcggagcctgctggagaccaatgagatccccagcctcatcctgtggggccccccaggctgtgggaagaccaccctggcccacatcatcgccagcaacagcaagaagcacagcatccgctttgtgaccctgagcgccaccaatgccaagaccaatgatgtgagagatgtgatcaagcaggcccagaatgagaagagcttcttcaagaggaagaccatcctcttcattgatgagatccaccgcttcaacaagagccagcaggacaccttcctgccccacgtggagtgtggcaccatcaccctgattggagccaccacagagaaccccagcttccaggtgaatgctgccctgctgagccgctgccgggtgattgtgctggagaagctgcctgtggaggccatggtgaccatcctgatgagggccatcaacagcctgggcatccacgtgctggacagcagccggcccacagaccccctgagccacagcagcaacagcagcagcgagcccgccatgtttattgaggacaaggctgtggacaccctggcctacctgagtgatggagatgcccgggccggcctgaatggcctgcagctggccgtgctggcccggctgagcagcaggaagatgttctgcaagaagagcggccagagctacagccccagccgggtgctgatcacagaaaatgatgtgaaggagggcctgcagaggagccacatcctgtatgacagagctggggaggagcactacaactgcatcagcgccctgcacaagtccatgaggggcagtgaccagaatgccagcctgtactggctggccaggatgctggagggcggggaggaccccctgtatgtggcccggcggctggtgcgctttgcctctgaagatattggcctggccgaccccagcgccctgacccaggccgtggccgcctaccagggctgccacttcatcggcatgccagaatgtgaggtgctgctggcccagtgtgtggtgtactttgcccgggcccccaagagcattgaggtgtacagcgcctacaacaacgtgaaggcctgcctgaggaaccaccagggccccctgccccctgtgcccctgcacctgagaaatgcccccacccggctgatgaaggacctgggctacggcaagggctacaagtacaaccccatgtacagcgagcctgtggaccaggagtacctgcctgaggagctgcggggcgtggacttcttcaagcagaggcgctgctag

SEQ ID NO: 202857 - DNA, 1338 bp, Artificial Sequence
  derived and/or modified sequence
atgctgcagggcaagcccctggccgacaccatgcggcccgacaccctgcaggactactttggccagtcaaaagcagttggccaagatacacttctccgctcgcttctggaaactaatgaaattccctccctaattttgtggggtccccctgggtgcgggaagacaactctcgcacatatcatcgccagcaactccaagaagcacagcattcgatttgtgactctgagtgccaccaacgcgaaaacaaatgatgtaagggatgttattaagcaagcccagaacgaaaaatctttttttaagcgcaagactatcctattcatagacgagatacatagattcaataaaagtcagcaggatacgttcctgccccatgtggagtgcggaaccatcacactgattggagctacaacagagaacccctcattccaggtgaatgctgcattactgtcccggtgcagagtgatagtcctggagaagcttcccgtggaggccatggtgacaatcctaatgagagccatcaatagcctggggatccacgtgttagactcttctcgccctaccgaccctctttcgcatagctccaacagcagctccgagcccgctatgtttatcgaggataaggccgtggataccctggcctacctgtctgacggcgacgcacgcgcagggctcaacggccttcagctggccgttttagctaggctgtcctctcgcaaaatgttttgcaaaaaatctggacaatcttactctccttccagggtgctcattactgagaacgacgtgaaagaggggctccaacgatcacacattctttacgatcgcgcgggggaagagcactataactgcatatctgctctgcacaaatccatgcgaggatccgatcagaatgcatctctgtactggctggctcgtatgctggagggcggggaagatccgctgtacgtggctagacgactggtacgatttgcctccgaggatatcggcctcgcggacccttccgccctcacacaggccgtggccgcgtatcagggctgccacttcattggcatgccagaatgcgaggtcctactggctcagtgtgttgtttactttgcgcgtgccccaaaatcgatcgaggtgtactcagcttacaataatgtgaaggcttgcctccgaaaccaccaggggccacttcccccggtaccattacatttgcgaaatgcccccacgcggctaatgaaggatttaggatatggaaagggctataagtacaacccgatgtattctgaacccgtcgaccaagaatacctccccgaggagttaaggggtgtggacttttttaaacaacgcagatgttag

SEQ ID NO: 202858 - DNA, 1998 bp, Artificial Sequence
  derived and/or modified sequence
atggaggtgagcggccccgaggacgaccccttcctgagccagctgcaccaggtgcagtgccccgtatgccagcaaatgatgcctgccgcccacataaattcacatcttgacaggtgcctcttacttcaccccgccgggcacgctgaacccgccgcagggagccaccgcgcgggcgaacgagcaaaagggccttctccccctggtgcaaagcgtcgccgcttatctgagagctctgccttgaaacagcctgctacacccacagcagctgagagcagtgagggcgaaggggaggagggcgacgacggtggagagaccgagtcccgtgaatcctatgatgcccctccgacccctagtggagcacggttgattccagactttccagtggctaggagctcatccccagggcggaagggaagcggcaagcggcccgcggctgcggcagctgctgggagcgcgagccccagatcttgggacgaagcagaagcccaggaggaggaggaagccgtgggagatggagacggcgacggcgacgccgacgccgacggtgaagatgaccctgggcattgggatgctgatgcagctgaagccgctacagctttcggagcgagcggcggtggaaggccccaccctcgcgccctggccgctgaggaaataagacagatgctccagggaaaacccctggcagacactatgaggcctgacacgcttcaagattacttcggacagagcaaggctgtgggtcaggacacgctgctacgatctctcttagagactaacgaaattccctcactcatcctatggggccctcctggatgtggtaagacaacactggcccacatcatcgccagcaacagtaaaaaacacagcatacgattcgtcaccctgagtgctacaaacgccaaaacgaatgatgtgagggacgtaattaagcaggcacagaacgaaaaaagcttcttcaaaaggaagaccatactattcatcgacgaaatccaccgcttcaataagtctcagcaggatacttttctgccacacgtggaatgtggaaccataacactgatcggggcaaccacggaaaaccctagtttccaggtgaatgccgccctgctgtcacggtgcagggtaatagttctcgagaagctgcccgtggaggcaatggtgacaatcctaatgagggctattaacagccttggaatacacgtcctagacagcagccggcccactgacccactcagtcactcaagcaactcttctagcgagccagcgatgttcattgaagataaagcagtcgatacgttagcctaccttagcgatggagacgctcgagccgggctaaacgggctgcagctggctgtgcttgcaagactcagctcacgtaagatgttctgcaagaaatcggggcagtcatatagtccttccagggtactgattactgagaatgacgttaaagaagggctgcaacgctcccacatcttgtacgacagagccggcgaggagcactacaactgcatctctgccttgcataagagtatgagaggaagcgatcagaatgccagtctgtattggctggcacgcatgctcgaagggggggaggatcctctttatgtggcacggcggttggtccggtttgcctccgaagacatcggcctcgccgatccctctgctctcacacaggctgtggcggcatatcaaggatgccactttattggcatgcccgagtgtgaagtgctcctcgctcagtgtgttgtctacttcgcccgtgcgcctaaatcaatcgaggtctactctgcctataacaacgtcaaagcttgtctacggaaccaccaaggcccactccctcccgtgcctctgcaccttagaaacgccccgacacgtctcatgaaggacttgggctacggtaagggctacaaatacaaccctatgtatagtgagcctgtggaccaggaatacttgcctgaagagctccgcggggtagatttcttcaagcaacgccgttgttag

SEQ ID NO: 202859 - DNA, 1338 bp, Artificial Sequence
  derived and/or modified sequence
atgctgcagggtaagccattggcagatacaatgagacctgacactctgcaggactacttcgggcagtctaaggctgtaggacaagacacccttctcaggtctctgctcgagacaaatgagattccttcactgattctttggggccctcctgggtgtgggaagactactctcgcacacattatcgctagtaactccaagaagcattctatccgctttgtgacattgagcgccaccaatgccaaaactaacgacgttagggacgtgataaagcaggctcagaacgaaaagtctttcttcaagcgcaaaaccatccttttcattgacgaaattcatcggttcaataagtcccaacaggatacgtttcttccacacgttgagtgtggcaccattacactgatcggggctaccaccgaaaacccttctttccaggttaacgcagccctgctctctcgctgccgtgtgatcgttctggaaaaactgccagtggaggccatggtgactattctgatgcgcgctataaacagtctcgggatccacgttctggatagctctcggcctactgacccgctcagccactcgagtaactctagctctgagcccgctatgtttatcgaggacaaagcagtggatacgctcgcttatctttccgatggggatgctcgagcaggcctcaacggactccagcttgcggtgctggccagactgagctccagaaaaatgttttgcaagaaaagtggtcagagttattctcctagccgcgttcttattaccgagaatgacgtaaaagagggactgcagcgaagtcatatcctgtatgacagggcaggtgaggaacactacaactgtattagcgctcttcacaaatctatgaggggttcagatcagaacgcaagtctttattggctggccagaatgcttgaggggggagaagatcccctttatgtggcacgaaggcttgtgcgattcgcctccgaggatatcgggctcgctgacccaagcgcgctgacacaagcagtagctgcctaccagggatgccactttatcggtatgccagagtgcgaggtacttctagcccagtgtgtggtgtactttgcacgcgctccgaagtctatcgaagtctactcggcttacaacaacgtgaaggcttgtttgcgcaatcaccaaggcccacttcctccggtgccactgcacctgagaaacgccccaactcgactgatgaaagacctgggatatggaaaggggtacaaatacaacccaatgtactccgaacctgttgatcaggaatatctgccggaggaacttaggggggtggatttctttaaacagagacggtgttag

SEQ ID NO: 202860 - DNA, 1998 bp, Artificial Sequence
  derived and/or modified sequence
atggaagtctctggcccagaggatgacccgtttctcagccagctacaccaggtacagtgcccagtgtgccagcagatgatgccagcagcacatattaactcgcacctcgaccgatgcctgcttctccatccggcaggacatgctgagcctgctgccggaagccatcgtgccggagaaagagcaaagggcccaagcccccctggagccaaacgcagaaggctgagcgagtcaagtgcactgaagcaaccggctacaccaaccgctgcagagagctcagagggggaaggggaagaaggtgatgatgggggagagacagaaagcagagaatcttacgatgcacccccaactcccagtggcgcacgactgatacccgacttcccagtcgcacgctcttcctctcccggtcggaagggcagcgggaagcgcccagccgctgccgctgccgctggcagtgcatcccctaggagctgggacgaagctgaggcgcaggaggaggaagaggccgttggagatggggatggtgatggggacgcggatgccgatggggaggacgaccctgggcactgggatgccgacgctgctgaggctgctaccgccttcggagcaagcggagggggtagaccccatcctagggcccttgccgctgaggaaatcagacaaatgttgcagggtaaacctctcgctgataccatgcgcccagataccctgcaggactactttgggcagtccaaggcggtcggacaggatactttgctcaggtcgctcttggagaccaacgaaatcccgagtttgatactctggggccctccagggtgcggaaaaacaaccttggctcatataatcgcatccaacagcaagaaacacagtatccgtttcgtcacactgagtgcaactaatgcaaaaactaatgatgtgagagacgtcattaagcaggctcaaaatgaaaagtccttcttcaagcgcaagactattttatttattgacgagatacatcggttcaataagtcacagcaggatacatttctgcctcatgtcgagtgtgggacaattactttaataggcgctacgacggaaaatccttctttccaagtgaacgcggcactactatcacgatgccgtgtgatagttctggaaaaacttcctgtggaggccatggtgaccatcctgatgagagctatcaattccctcggcatccacgtgctagattcatcacgcccaacagaccccctaagccacagctccaacagtagctccgagccagcaatgttcattgaagacaaagcagttgatactcttgcgtatctgtccgatggcgacgccagggccggtttaaacggcctccagctcgccgttctagccagattaagctcccggaaaatgttctgcaaaaagtccgggcaaagttactctccttccagagtccttattactgagaatgacgtcaaagaagggttgcagagatcacacattctgtacgacagagctggagaggaacattacaattgcataagcgccctccacaagtctatgcgaggctcagatcaaaacgctagcctctattggctggccagaatgctggagggtggcgaagaccctctttacgtggctcgcaggcttgttcggtttgctagtgaagacattggattggctgatccctccgccctgacacaggcggtagccgcataccagggttgtcatttcattgggatgcctgagtgtgaggtcctgttagcccaatgtgtcgtgtatttcgcgagagcccctaagagcatagaagtgtattcagcttacaacaatgtgaaagcttgcttgcgtaatcaccagggacccctacctcccgtcccattgcaccttcggaacgcccctactaggctcatgaaggacctgggatacggtaaggggtacaagtacaaccccatgtattccgagccagttgaccaagaatatcttcctgaggagctccgcggagtggacttctttaaacagagacgatgctag

SEQ ID NO: 202861 - DNA, 1557 bp, Artificial Sequence
  derived and/or modified sequence
caaatgatgtgcgagatgtcataaaacaagctcaaaatgaaaagagctttttcaaaaggaaaaccatcctttttattgatgagattcatcggttcaataaatctcagcaggacactttccttcctcacgtggaatgtgggacgatcactctgattggggcaaccactgaaaacccttccttccaggtcaacgctgctcttctgagccgctgtcgagtgattgttcttgagaagcttccagtagaggcaatggtgactattttaatgcgagcgatcaactccctgggaatccacgtcctagactctagccgtcccactgaccctctgagccacagcagcaacagcagctcagagcccgccatgttcatagaggataaagcagtagacaccctggcttacctcagtgacggtgacgcccgagctgggttgaacggactgcagctggcggtgctggctaggttaagctctaggaagatgttctgtaagaagagtgggcaatcctattctcccagtagagttctgatcacagagaatgacgtgaaggagggcctacagcgatcccacattttatatgaccgggcaggtgaggagcattacaactgcatctccgccctgcacaagtccatgcggggctcagaccagaacgcctccctctactggctggctcgcatgctcgagggaggagaggacccactctacgtggcacggaggcttgtcaggtttgccagcgaggacataggtctggcagacccgtctgcgttaacacaagcggttgctgcctaccaaggctgtcattttataggcatgcctgaatgtgaggtgcttctggcccagtgtgtggtctactttgccagagccccaaagtccattgaggtgtacagcgcctacaacaacgtcaaagcctgcctgaggaaccaccaggggccactgccccccgtgcccctgcacctgaggaacgcgcccactaggctgatgaaggatttgggctatggcaaaggctacaagtacaaccccatgtacagcgagcctgtggatcaggagtacctgcctgaagagttgaggggggtagatttcttcaagcagaggaggtgctgactcctcagggcacgacagcagaaggatgttgcttttttaagggagggccagaaagaaagttagtggattgcaaagttggttgcctggtggaagttagaacagaccaacattttgtgccagaaatttaagagttccataggtggaggcgcagttctttcgaataaatgtgtaactttgaaattgtgttcatttgcactcggtgcagcggttatgcttatgaaaatacctggcagctttgtgcaatgaattaatgttataaggaattatctattttgtcatagtatttaagtcataatgtcatttcagaattcagttctgtaggattttcttttctttaaaaaatgtatattctgggtagttttaattggtaaaaaaatgtaattgtgatttaatactgcatagtgttttgggtattttttttatatgcaaaggtcttacgagccaataaaactatttcaaagta

SEQ ID NO: 202862 - DNA, 2980 bp, Artificial Sequence
  derived and/or modified sequence
gcggccgccgccgcggcggggagcgcgtctccgcgcagctgggacgaggcggaggcgcaggaggaggaggaggccgtgggcgacggcgatggcgacggggacgcggacgcggacggcgaggacgacccggggcactgggacgcggacgctgccgaagccgccaccgccttcggggccagtggcgggggccgcccgcacccccgggcgctggctgccgaggagatccgacagatgctacagggcaagccgctggccgacacgatgcgtcctgacacgctgcaggattacttcgggcagagcaaggccgtgggccaggataccctgctgcgctcgctcctggagaccaacgaaatcccctcgcttatcctgtgggggccgccgggctgcggcaagaccactctggctcacatcatagccagcaacagcaagaaacatagcataaggtttgtgacattatctgcaacaaatgccaagacaaatgatgtgcgagatgtcataaaacaagctcaaaatgaaaagagctttttcaaaaggaaaaccatcctttttattgatgagattcatcggttcaataaatctcagcaggacactttccttcctcacgtggaatgtgggacgatcactctgattggggcaaccactgaaaacccttccttccaggtcaacgctgctcttctgagccgctgtcgagtgattgttcttgagaagcttccagtagaggcaatggtgactattttaatgcgagcgatcaactccctgggaatccacgtcctagactctagccgtcccactgaccctctgagccacagcagcaacagcagctcagagcccgccatgttcatagaggataaagcagtagacaccctggcttacctcagtgacggtgacgcccgagctgggttgaacggactgcagctggcggtgctggctaggttaagctctaggaagatgttctgtaagaagagtgggcaatcctattctcccagtagagttctgatcacagagaatgacgtgaaggagggcctacagcgatcccacattttatatgaccgggcaggtgaggagcattacaactgcatctccgccctgcacaagtccatgcggggctcagaccagaacgcctccctctactggctggctcgcatgctcgagggaggagaggacccactctacgtggcacggaggcttgtcaggtttgccagcgaggacataggtctggcagacccgtctgcgttaacacaagcggttgctgcctaccaaggctgtcattttataggcatgcctgaatgtgaggtgcttctggcccagtgtgtggtctactttgccagagccccaaagtccattgaggtgtacagcgcctacaacaacgtcaaagcctgcctgaggaaccaccaggggccactgccccccgtgcccctgcacctgaggaacgcgcccactaggctgatgaaggatttgggctatggcaaaggctacaagtacaaccccatgtacagcgagcctgtggatcaggagtacctgcctgaagagttgaggggggtagatttcttcaagcagaggaggtgctgactcctcagggcacgacagcagaaggatgttgcttttttaagggagggccagaaagaaagttagtggattgcaaagttggttgcctggtggaagttagaacagaccaacattttgtgccagaaatttaagagttccataggtggaggcgcagttctttcgaataaatgtgtaactttgaaattgtgttcatttgcactcggtgcagcggttatgcttatgaaaatacctggcagctttgtgcaatgaattaatgttataaggaattatctattttgtcatagtatttaagtcataatgtcatttcagaattcagttctgtaggattttcttttctttaaaaaatgtatattctgggtagttttaattggtaaaaaaatgtaattgtgatttaatactgcatagtgttttgggtattttttttatatgcaaaggtcttacgagccaataaaactatttcaaagtactcttcgattctgtcatggttttcctgcctggatgctaggtaccagcgttgtcaccattgcatttggtgggtggatactgggaaggagaaatcaccccagatgggaagagtggggagcttaagttaagaagtcagtgttatcttgttgaaagttaactctgatctctttaaaggaatacataaaggaattctttaaatggcttgtggaagactccagtagtcccatgcccattttttcccacttgtcctggtttcttcttgcagctccatatttctaaacagtcgtttttcttttactttatgtgtgtcctgaacacaaaatacgccactccttctgctcagttaagagttatttgtccctactgctacttcctctccctctccttagttgcatgtcgtgcatatgcccacaaggatggccccttcaggtagtcggttctcctcctgctgttgcgtgatccctcctggggtcctcctgccatgtctggaaggctgccggctgttggcctgggacgtcctctgcctttattctgagtgagatgcccattttctggatgctccatcccgccttactggtttattccgctatttcagtgcaacccatcctctagtagttttatcaggctggagggactgtatgttgcagaggcttggcccgactggcctccctccttctgtctggagtggttgcactgcagtgtgcagttgccatccccagaatctcccttcatcatcaccctggagctttcctctgcttctccctgcaccccatctgatgacaggactgactgctttctggcacaggtggcatgtaccctctagtagctttatggagcaggggtgtgtggaggaaaagtatttttagacctcaggagactcaaaatgcttttattgtaccttcagacgtgtctgagggtttggctagtaataaattgtaggtaagaaatt

SEQ ID NO: 202863 - DNA, 2670 bp, Artificial Sequence
  derived and/or modified sequence
gaggcgctgccagcggccggccgagggcgggcggacgcgggagctgcggacgtgaggcatgagcggcgccctcctccggcccgcgagcgtcctgctggttccccgagcgagggtctcgcggcgcggggcctagcggagggcatcgaaggcctccgcgtgcgcacgggttgctgcggccgcgccgggcgccggggagggcggcggccgccatggaggtgagcgggccggaagacgaccccttcctttcgcagctgcaccaggtgcagtgccccgtgtgccagcagatgatgcccgccgcgcacatcaactcgcacctggaccgctgtctgctgctccacccggcggggcacgcggagcccgcggccgggtcgcaccgcgccggggagcgggccaaggggccctcgccgcccggcgccaagaggcggcggctgtcggagagctcggcgctgaagcagccagccaccccgacggcagccgagagcagcgagggcgagggtgaggagggcgacgacggcggcgagaccgagagccgcgagagctacgacgcgccgcccacacccagcggcgcccgccttatccccgacttcccggtggcccgctccagcagccccgggaggaaggggtcggggaagaggccggcggccgccgccgcggcggggagcgcgtctccgcgcagctgggacgaggcggaggcgcaggaggaggaggaggccgtgggcgacggcgatggcgacggggacgcggacgcggacggcgaggacgacccggggcactgggacgcggacgctgccgaagccgccaccgccttcggggccagtggcgggggccgcccgcacccccgggcgctggctgccgaggagatccgacagatgctacagggcaagccgctggccgacacgatgcgtcctgacacgctgcaggattacttcgggcagagcaaggccgtgggccaggataccctgctgcgctcgctcctggagaccaacgaaatcccctcgcttatcctgtgggggccgccgggctgcggcaagaccactctggctcacatcatagccagcaacagcaagaaacatagcataaggtttgtgacattatctgcaacaaatgccaagacaaatgatgtgcgagatgtcataaaacaagctcaaaatgaaaagagctttttcaaaaggaaaaccatcctttttattgatgagattcatcggttcaataaatctcagcaggacactttccttcctcacgtggaatgtgggacgatcactctgattggggcaaccactgaaaacccttccttccaggtcaacgctgctcttctgagccgctgtcgagtgattgttcttgagaagcttccagtagaggcaatggtgactattttaatgcgagcgatcaactccctgggaatccacgtcctagactctagccgtcccactgaccctctgagccacagcagcaacagcagctcagagcccgccatgttcatagaggataaagcagtagacaccctggcttacctcagtgacggtgacgcccgagctgggttgaacggactgcagctggcggtgctggctaggttaagctctaggaagatgttctgtaagaagagtgggcaatcctattctcccagtagagttctgatcacagagaatgacgtgaaggagggcctacagcgatcccacattttatatgaccgggcaggtgaggagcattacaactgcatctccgccctgcacaagtccatgcggggctcagaccagaacgcctccctctactggctggctcgcatgctcgagggaggagaggacccactctacgtggcacggaggcttgtcaggtttgccagcgaggacataggtctggcagacccgtctgcgttaacacaagcggttgctgcctaccaaggctgtcattttataggcatgcctgaatgtgaggtgcttctggcccagtgtgtggtctactttgccagagccccaaagtccattgaggtgtacagcgcctacaacaacgtcaaagcctgcctgaggaaccaccaggggccactgccccccgtgcccctgcacctgaggaacgcgcccactaggctgatgaaggatttgggctatggcaaaggctacaagtacaaccccatgtacagcgagcctgtggatcaggagtacctgcctgaagagttgaggggggtagatttcttcaagcagaggaggtgctgactcctcagggcacgacagcagaaggatgttgcttttttaagggagggccagaaagaaagttagtggattgcaaagttggttgcctggtggaagttagaacagaccaacattttgtgccagaaatttaagagttccataggtggaggcgcagttctttcgaataaatgtgtaactttgaaattgtgttcatttgcactcggtgcagcggttatgcttatgaaaatacctggcagctttgtgcaatgaattaatgttataaggaattatctattttgtcatagtatttaagtcataatgtcatttcagaattcagttctgtaggattttcttttctttaaaaaatgtatattctgggtagttttaattggtaaaaaaatgtaattgtgatttaatactgcatagtgttttgggtattttttttatatgcaaaggtcttacgagccaataaaactatttcaaagta

SEQ ID NO: 202864 - protein, 414 aa, Artificial Sequence
  derived and/or modified sequence
MMWQCHLSAQDYRYYPVDGYSLLKRFPLHPLTGPRCPVQTVGQWLESIGLPQYENHLMANGFDNVQFMGSNVMEDQDLLEIGILNSGHRQRILQAIQLLPKMRPIGHDGYHPTSVAEWLDSIELGDYTKAFLINGYTSMDLLKKIWEVELINVLKINLIGHRKRILASLGDRLHDDPPQKPPRSITLRTGDWGEPSITLRPPNEATASTPVQYWQHHPEKLIFQSCDYKAFYLGSMLIKELRGTESTQDACAKMRANCQKSTEQMKKVPTIILSVSYKGVKFIDATNKNIIAEHEIRNISCAAQDPEDLSTFAYITKDLKSNHHYCHVFTAFDVNLAYEIILTLGQAFEVAYQLALQARKGGHSSTLPESFENKPSKPIPKPRVSIRKSVDLLHASHTGQEPSERHTEEALRKF

SEQ ID NO: 202865 - DNA, 1245 bp, Artificial Sequence
  derived and/or modified sequence
atgatgtggcagtgtcaccttagcgcccaggactatcgatattacccagttgatgggtatagcttgttgaaacggttccctctccaccccctgacgggcccccggtgtccagttcaaacggtgggtcagtggctggagtctattggcctgcctcaatacgagaatcacctgatggcaaatggcttcgacaacgtccagttcatgggatcaaacgttatggaagaccaggacctcctagaaataggtatcctgaactccggccataggcagcggatcttacaagccattcagctgcttcccaagatgcgcccgataggacacgacggttaccaccccacttctgttgcggaatggcttgactctattgagctcggagactacacaaaagcatttctcataaacggctatacctccatggatttgttaaaaaagatctgggaggtggagcttatcaacgtcttaaagataaatttaattgggcatcggaagcggatcctcgctagtctgggggataggcttcacgacgaccctcctcaaaagcctccacggagcattacactgagaacaggagactggggagagccctctatcaccttaagacctcccaatgaggcgacagcttccactccggtacagtactggcaacaccacccagaaaagctcatcttccagtcatgcgattataaggcattttatctgggatcaatgctaattaaagagctccggggaactgagtccactcaggatgcctgcgccaaaatgcgggctaattgccaaaagtccactgagcagatgaagaaggtgccaaccattatccttagcgtgtcgtataaaggggtgaaatttatcgatgcaaccaataagaatatcatcgccgagcacgaaatccgcaatatttcctgcgcagcccaagacccagaggatctcagcacctttgcctatattacgaaggatttgaaatctaaccatcactattgtcatgtgtttaccgcttttgacgtcaacctggcttacgaaattattctcactctggggcaagcattcgaagttgcataccagcttgctctgcaggctcggaagggaggccattcctcaacgctgcctgaatcttttgagaataaaccctctaagcctataccaaaaccgcgagtgtctattcgaaagtccgtggatctgttgcacgcaagccatacaggccaggagccaagcgagaggcacactgaggaagcgcttagaaagttttag

SEQ ID NO: 202866 - DNA, 1245 bp, Artificial Sequence
  derived and/or modified sequence
atgatgtggcagtgccacctgagcgcccaggactaccgctactaccctgtggatggctacagcctgctgaagcgcttccccctgcaccccctgaccggcccccgctgccctgtgcagacagtgggccagtggctggagagcatcggcctgccccagtatgagaaccacctgatggccaacggctttgacaacgtgcagttcatgggcagcaatgtgatggaggaccaggacctgctggagatcggcatcctgaacagcggccaccggcagaggatcctgcaggccatccagctgctgcccaagatgaggcccatcggccatgatggctaccaccccacctctgtggccgagtggctggacagcattgagctgggggactacaccaaggccttcctgatcaatggctacacctccatggacctgctgaagaagatctgggaggtggagctgatcaacgtgctgaagatcaacctgattggccacaggaagaggatcctggccagcctgggggaccggctgcatgatgatcctccccagaagcccccaagaagcatcaccctgaggactggagactggggcgagcccagcatcaccctgcggcccccaaatgaggccacagccagcacccctgtgcagtactggcagcaccaccctgagaagctgatcttccagagctgtgactacaaggccttctacctgggctccatgctgatcaaggagctgcggggcacagagagcacccaggatgcctgtgccaagatgagggccaactgccagaagagcacagagcagatgaagaaggtgcccaccatcatcctgtctgtgtcctacaagggcgtgaagttcattgatgccaccaacaagaacatcatcgccgagcacgagatccggaacatcagctgtgccgcccaggaccctgaggacctgagcacctttgcctacatcaccaaggacctgaagagcaaccaccactactgccacgtgttcaccgcctttgatgtgaacctggcctatgagatcatcctgaccctgggccaggcctttgaggtggcctaccagctggccctgcaggccaggaagggcggccacagcagcaccctgcctgagagctttgagaacaagcccagcaagcccatccccaagccccgggtgtccatcaggaagtctgtggacctgctgcacgccagccacacaggccaggagcccagcgagcggcacacagaggaggccctgaggaagttctag

SEQ ID NO: 202867 - DNA, 1245 bp, Artificial Sequence
  derived and/or modified sequence
atgatgtggcagtgccacctgagcgcccaggactaccggtactacccagtggacggttactctctgttaaagcgctttcctttacatccattaacaggccctagatgcccagtgcagacagtgggacagtggttagagtccattggtctaccacagtacgagaatcatctgatggcgaacggatttgacaacgtccagtttatggggagtaatgtcatggaggatcaggacttattagagatcggaattttgaactccggtcatagacagcgtatcttacaggcaatccaactgctaccgaaaatgcggcctatcggccatgatgggtatcacccaacgtctgtggcggagtggttggactctatcgagctgggagactacactaaagccttcctgataaacggttacacctcaatggatctgctgaagaagatctgggaggtggagctgatcaacgtgctgaaaatcaacctcatcggacatcgcaaacgcatcttggcttcactgggagaccgcctacacgacgatcctccacagaagccgccgcggagcataacacttcgtactggtgattggggggaaccctctattaccctcaggccgcctaacgaggccactgcatccactccagtccagtactggcagcatcacccagagaagctcatcttccagtcctgtgactacaaagcattttatctaggctcaatgctgattaaggaactcagggggactgagtcaacccaggacgcctgtgcaaagatgagggccaattgccagaagagtactgagcagatgaaaaaagtgccaaccattattcttagtgtgagctacaaaggcgtcaagttcatcgacgcaaccaacaagaacattatcgccgagcacgaaatcaggaacatatcgtgcgctgcgcaagaccctgaagacttatcaacctttgcttatattacaaaggacttgaaatcgaaccaccattactgtcacgtgtttacagccttcgacgtgaacctagcgtatgaaattatactcacgctcggtcaggcttttgaagtcgcctaccaattggctctgcaggcccgcaagggcgggcactcatccactctacccgagtctttcgagaacaaaccaagcaagcctatccctaaaccccgggtttccattcgcaagagcgtcgatctgcttcacgccagtcacaccggccaggagccctctgaacggcatacagaggaagcccttaggaaattttag

SEQ ID NO: 202868 - DNA, 2268 bp, Artificial Sequence
  derived and/or modified sequence
ctccaacaatcacatagaacgcagaccagcccaagctgacagcttgatatgccttcttctgctgcctggttttgggggctgtatgacgtactggtcggtagtaaagattaatatgtaagaaatgtggagctaggatcaagtcatactccacagcctgcctggcaaactatgttttacttctgactttgctctctcgctgagaacattaatctgtcaagctggcgggctcctttgatagcaactttcccaggggcatgatgtggcaatgccacctctcagcccaggactaccgctattaccccgtggacggctactccctgcttaaacgcttccctcttcatcctcttacaggacccagatgccctgtccaaacagtgggacaatggttggaaagcattgggctacctcagtacgagaaccacctgatggctaatggatttgacaatgtgcagtttatgggaagcaatgttatggaagatcaggatttgttggaaattggaatccttaattctgggcacagacaaagaattctacaggcaatccagctccttccaaagatgagacccattgggcatgatggctaccatcccacctctgtagctgagtggctggattccattgaactgggcgactacaccaaagcctttctaattaatggctacacttcgatggacctgttgaaaaaaatctgggaggttgaacttattaatgttttaaaaatcaatttgattggccacaggaaacgtattttggcatctctgggagacaggctgcacgacgatcccccacagaagccccctcggtccatcaccctcaggacaggagactggggagaaccttccattaccttgcgacctccgaatgaagccacagcctctaccccggtacagtactggcagcatcacccagaaaagcttatcttccagtcgtgtgattacaaagctttttatttaggttctatgctgataaaagagcttagggggacagaatcaacccaagatgcttgtgcaaaaatgcgggctaactgtcagaagtctacagagcaaatgaagaaggtccctactattattctttctgtctcatataaaggagtcaaatttattgatgcaacaaataagaacataattgctgagcatgaaattcgtaatatctcctgtgctgcccaggacccagaagacctctcaacatttgcctatatcacaaaagatttgaagtctaatcaccactactgtcatgtgtttactgcctttgatgtgaatttagcctatgaaatcatcctaaccctgggacaggcattcgaagtcgcttaccagctagcactacaagcaagaaaagggggacactcctccacacttccagaaagctttgaaaacaaaccctccaaacccatccccaagccccgcgttagcattcgcaagtccgtggatcttcttcatgccagccataccgggcaggaaccatcagagagacacactgaggaggcactcagaaaattttgatagaattgaatttacatatagctgataaagcctaaatagaaaggttgatgtatttagcttgaatccttcactttagtggtctaatcaacagataaatgacaagcaaagaatgaaacaatccaaaaatgtttttcaaaacaattttgtgaattttatttttacaaaaattttttaaattcatattttaaaatgtataccaaggcaaaaaaatcatataagctatatcataaatacaagagtttcaaaacatacaagagacatataatgtaaaaaaaaattatatatatgaagtccaatgtaatttataatacaaaaaaatacagcaagggaaaatgctttagaaatgctcatctgcaaactacaaaacaaaatcctcctcttgaccgactgcatgaactgccatgaaatttgcagctccatcatactaggtatctcttctttcttcatgttaccttgtctttcttcccatttttcttttaagacagggtcttgctatgtcacccaggctggactcaaactccagggctcaaggaatcctcctgtcttagcctcccaaggagctgggattacaggcacgtgccaccgcacctggctcctaatttctttttaagacaagggccattcaaggctttttaaaacctgatgtgtgttgttatactttataacagtcagtggcttttaattccaaaaggtaatactttatactctgcctacatgagatgagcccctaacagtgtgtacaaataaaattatgatttgggtattctaa

SEQ ID NO: 202869 - DNA, 1245 bp, Artificial Sequence
  derived and/or modified sequence
atgatgtggcagtgccacctctcggctcaggattaccggtactaccctgtcgatgggtactctctgctgaagaggtttccactgcacccccttactggaccaagatgtcccgttcagaccgtcggccagtggttggagtcgattggcttaccccaatacgagaatcacctgatggctaatggcttcgataatgtccagtttatgggatcaaacgtcatggaggaccaggacctgctcgaaattggcattctcaattctggtcaccggcaacgcattctgcaggccatccagttattacctaagatgcggcctattggccacgacggctaccacccaacaagcgtggcagagtggctggactcgatcgagctgggagactatacaaaggcctttctgattaatggctacacttcgatggacctactaaaaaagatctgggaagtagagttgattaatgtgctgaaaatcaacctgatcgggcatagaaagcgaattctggccagcctgggcgatagactacatgacgacccgcctcagaagcccccaagatccattacactgcgcacgggcgactggggagagcctagtataaccctgcgcccaccaaacgaagcaacagcgtcaacccctgtccagtattggcagcaccacccagagaagctcatcttccagtcctgtgactacaaggcgttttacttgggatcaatgctgattaaggagctgcggggtactgaatccacacaggacgcctgcgccaagatgcgcgcaaattgtcagaagtcaactgagcagatgaagaaagtgcctacgatcatcttgagcgtaagttataagggggtcaagttcatcgatgctacaaataagaacatcatcgccgagcacgaaattagaaacatcagttgcgcagctcaggatccagaggatctttcaacattcgcttacattactaaggacctgaagagtaatcaccactactgtcacgtctttactgcgttcgacgtgaacctggcttatgagatcatactgacactggggcaggccttcgaggtggcataccaattggcattacaagctcggaagggcggacattcctctaccctgccagagagctttgaaaacaaaccaagcaaacccatacctaagcccagggtctccatccgaaagtccgtggacctgctccacgccagtcatacaggacaggagccctccgaacggcacaccgaggaagccctccggaagttctag

SEQ ID NO: 202870 - DNA, 1245 bp, Artificial Sequence
  derived and/or modified sequence
atgatgtggcagtgccacctgagcgcccaggactacagatactaccccgtggacggctacagcctgctgaagagattccccctgcaccccctgaccggccccagatgccccgtgcagaccgtgggccagtggctggagagcatcggcctgccccagtacgagaaccacctgatggccaacggcttcgacaacgtgcagttcatgggcagcaacgtgatggaggaccaggacctgctggagatcggcatcctgaacagcggccacagacagagaatcctgcaggccatccagctgctgcccaagatgagacccatcggccacgacggctaccaccccaccagcgtggccgagtggctggacagcatcgagctgggcgactacaccaaggccttcctgatcaacggctacaccagcatggacctgctgaagaagatctgggaggtggagctgatcaacgtgctgaagatcaacctgatcggccacagaaagagaatcctggccagcctgggcgacagactgcacgacgaccccccccagaagccccccagaagcatcaccctgagaaccggcgactggggcgagcccagcatcaccctgagaccccccaacgaggccaccgccagcacccccgtgcagtactggcagcaccaccccgagaagctgatcttccagagctgcgactacaaggccttctacctgggcagcatgctgatcaaggagctgagaggcaccgagagcacccaggacgcctgcgccaagatgagagccaactgccagaagagcaccgagcagatgaagaaggtgcccaccatcatcctgagcgtgagctacaagggcgtgaagttcatcgacgccaccaacaagaacatcatcgccgagcacgagatcagaaacatcagctgcgccgcccaggaccccgaggacctgagcaccttcgcctacatcaccaaggacctgaagagcaaccaccactactgccacgtgttcaccgccttcgacgtgaacctggcctacgagatcatcctgaccctgggccaggccttcgaggtggcctaccagctggccctgcaggccagaaagggcggccacagcagcaccctgcccgagagcttcgagaacaagcccagcaagcccatccccaagcccagagtgagcatcagaaagagcgtggacctgctgcacgccagccacaccggccaggagcccagcgagagacacaccgaggaggccctgagaaagttctag

SEQ ID NO: 202871 - protein, 252 aa, Artificial Sequence
  derived and/or modified sequence
MESEMETQSARAEEGFTQVTRKGGRRAKKRQAEQLSAAGEGGDAGRMDTEEARPAKRPVFPPLCGDGLLSGKEETRKIPVPANRYTPLKENWMKIFTPIVEHLGLQIRFNLKSRNVEIRTCKETKDVSALTKAADFVKAFILGFQVEDALALIRLDDLFLESFEITDVKPLKGDHLSRAIGRIAGKGGKTKFTIENVTRTRIVLADVKVHILGSFQNIKMARTAICNLILGNPPSKVYGNIRAVASRSADRF

SEQ ID NO: 202872 - DNA, 759 bp, Artificial Sequence
  derived and/or modified sequence
atggagtcagagatggagacacagtcagctagagccgaggagggcttcactcaggtgactaggaaaggggggcgaagggccaagaagaggcaggctgaacagttgtccgctgccggtgagggaggggacgccggccgcatggatacggaagaagcccggccggccaagagaccagtattcccaccattgtgtggcgatggcctgctgtctggcaaggaagagacccgaaagattccggtgccagccaacaggtacacacctcttaaagaaaactggatgaaaatcttcacacccattgtcgagcatttgggcttgcagattcggttcaacctgaaatctagaaacgtggagatccgcacgtgtaaggagacaaaggatgtcagcgccctgacaaaagccgctgattttgtcaaggctttcatccttggttttcaggttgaagatgctctggccctcattaggctggatgacctctttcttgagtcatttgaaatcaccgatgtgaagccactgaagggcgatcacctcagccgagccattggcagaatagctggaaagggaggaaagacaaagtttacaatcgagaacgtcaccagaacacgcatcgtgctggcagatgtgaaggtgcatattctcgggtcattccagaacatcaagatggccagaactgccatctgtaatttgatccttgggaacccaccgtccaaggtttatggaaatatccgggcagtcgcatcaaggagcgccgatcggttttag

SEQ ID NO: 202873 - DNA, 2286 bp, Artificial Sequence
  derived and/or modified sequence
gcggagctgcaggggtggttggctgaggctggcttctgcgtggtgcagctgcgcacgtgtttcagccggcagcgctttaagatttccggggatggaatccgaaatggaaacgcagagcgccagggcagaggagggctttacccaggtcacccgcaagggtggccgacgggcgaagaaacgacaggctgaacagctgtccgcagcaggagagggcggggatgcgggccgcatggacacagaggaggccaggccggcgaagaggcccgtcttcccacccctctgtggggacgggctcctgagtgggaaagaagaaacaaggaaaattccagtcccagctaacagatacacaccattgaaagaaaactggatgaagatatttactcctattgtggaacatttgggacttcagatacgctttaacttgaaatcaaggaatgtagaaatcaggacttgtaaagaaaccaaggatgttagtgctctgacaaaagcagctgattttgtgaaagcttttattctcggctttcaggtggaggatgcacttgccctcatcaggttggatgacctcttcctagagtcttttgaaattacagatgttaaacccctaaagggagaccatctatccagggcaataggaagaatcgctggcaaaggaggaaaaaccaaattcaccatagagaatgtgacacggacaaggatagttttggctgatgtgaaagttcacatccttggctccttccaaaatatcaagatggcaagaactgccatttgcaacctaatcttgggaaatcctccttccaaggtttatggcaatattcgagctgtggctagcagatcagcagatcgattctgatttcaagtcagagactttttatcttgcctttggactctggtgaaaaatactttacagtggtcggtcacaagaaaccagctgaacaatttcagtcatttgaagcctccgtcccttcttccattctcagccagaagcataaacagaaaagaaagatttaagaggattcacactcaacaggttttaggataatttaaatatcaaaaattgattgttatacttaacacattaggtataatttatcatttatctgaaatcacatgtagcagattgcatagtctgtaatcctctcagagggaaacttcttgtttaaacagctctatatggatttatacttttatatttataaatttataacttcatacaaatttataaacatttctttataaattgtaatttaatagattatctcagaaaaacctctctgaatgatgacccttccttaatactgggtgatgtgtgaatatttgtttgttggcagacagggtctcactttgtcacccaggctagagtgcagtggtgcaatctcagctcactgcagcctctgcctcctgagttcaagtgatcctcctgcttcagcctccctagtagctgggactacaggtatgcaccaccatgcctggctaattttttgtattttttgtagagatggggtttcgccatgttgaccaggctggtcttgaactcctggcctcaagggatccgtccgcctcagcctcccaaagtgctgggattacaggcataagccactgcgcctggccttgatgtgtgaatatttgagaggtcataagcagtggttttggccataccgtattataccatatacatcagtaagagctcatcttggaacctgttttgcagtttcttgcagtttcaaaaattaaagacctacatcacagggttaatgtgaagaaagctttatttttcaaatgagtatttaatgaaagtatacataaccaatgttgggtatacagatgcttctcaacttatgatgggtttaggtccagataagcccactgtgagttgaaaataccaaaagtcaaacatcatagcttagcctaccttaaaagggctccgaacactacattagcctacagttgggcaaaatcgtctaatacaaagcctattttataataaagtatgttgaatatctcatgtaatttttgaagattacattgaaagtgaaaaacagaatggttgggtacttgaaatacagcttctactgaatgaataattctaaagttgaaaaataatagtaagaaccatcataagtctgtttcttctagtaaaggtgaaatgatgaaagaatgcttttttcccacccaaaaaactatgctctataaatgcagattagctagtttctgcctgtttaaatggtattattttatacattacaaaatggaaggaacttactttattaaacttaactttgatacttc

SEQ ID NO: 202874 - DNA, 759 bp, Artificial Sequence
  derived and/or modified sequence
atggagagcgagatggagacccagagcgcccgggcagaggagggcttcacccaggtgaccaggaagggcggcagaagagccaagaagaggcaggccgagcagctgtctgctgctggggagggcggagatgctggccgcatggacacagaggaggcccggcctgccaagaggcctgtgtttcctcccctgtgtggagatggcctgctgagcggcaaggaggagaccaggaagatccctgtgcctgccaaccgctacacccccctgaaggagaactggatgaagatcttcacccccatcgtggagcacctgggcctgcagatccgcttcaacctgaagagcagaaatgtggagatccgcacctgcaaggagaccaaggatgtgtctgccctgaccaaggctgctgactttgtgaaggccttcatcctgggcttccaggtggaggatgccctggccctgatccggctggatgacctcttcctggagagctttgagatcacagatgtgaagcccctgaagggggaccacctgagccgggccatcggcagaattgctgggaagggcggcaagaccaagttcaccattgaaaatgtgaccaggacccgcatcgtgctggctgatgtgaaggtgcacatcctgggcagcttccagaacatcaagatggccaggacagccatctgcaacctgatcctgggcaacccccccagcaaggtgtatggcaacatccgggctgtggccagccgctctgctgaccgcttctag

SEQ ID NO: 202875 - DNA, 759 bp, Artificial Sequence
  derived and/or modified sequence
atggagagcgagatggagacccagagcgcccgggccgaggagggctttacccaggtaactcgtaaagggggtcgccgagccaagaaacgacaggccgagcagctgtctgccgctggcgagggtggcgatgccggcaggatggatacagaagaagcccgccctgcgaagagaccagtgtttccacctctgtgtggggacggactgctcagtggcaaagaggagactagaaagatccccgtaccagctaatcgctacaccccactcaaggagaattggatgaagattttcacaccaatcgtcgaacacctcggattacagatacgctttaacctcaagtctaggaacgtggagataagaacctgcaaggaaacaaaagacgtcagtgctctgaccaaggccgcagacttcgtgaaggctttcatcctgggctttcaggtggaagatgctctagctctaatccggcttgatgacctgtttcttgaatcttttgaaatcacggacgtgaagccgctgaaaggtgatcacctgagccgcgcaattggacgcattgcgggaaaggggggaaaaacaaagttcaccattgagaatgtcacacggacaagaatcgtgctggctgacgtgaaagttcatattttggggtcctttcagaacataaagatggctcgaaccgccatctgtaacctgatcctggggaacccgccttccaaggtttatggaaatattagggccgtagccagcagatccgcagacaggttctag

SEQ ID NO: 202876 - DNA, 759 bp, Artificial Sequence
  derived and/or modified sequence
atggagtcagaaatggaaacacaaagtgccagagccgaagagggcttcacccaggtaacaagaaaaggaggtcgcagagccaagaaaagacaagcagaacagctgagcgctgccggtgagggaggggatgcgggaaggatggacaccgaggaagctagacctgcaaaacgtccagtcttccccccactgtgcggcgatggacttctatctggcaaagaagagaccaggaaaatccctgttcctgctaaccgatacaccccgctgaaagagaattggatgaaaatttttactcccatcgtagagcatctcggcctccaaatcaggttcaacctcaaatccaggaacgtggagatcaggacatgcaaagaaactaaagatgtgagcgccctgaccaaggccgctgacttcgtgaaagccttcatcttgggattccaggtcgaggatgcgctggctctgatcagactcgatgatctgttcctggagtcatttgaaatcacagacgttaaaccactgaagggggaccacttgtctcgcgcaatcgggcgaattgctggaaaagggggaaaaaccaagtttactattgaaaacgtcacgagaacccgcattgtgctggcagacgtgaaagtgcatatcctgggaagctttcagaatattaaaatggcgcgtactgccatttgcaacctgatcctgggcaatcccccatctaaagtgtacggcaatattagggcggtcgcttctaggtctgcggatagattctag

SEQ ID NO: 202877 - DNA, 759 bp, Artificial Sequence
  derived and/or modified sequence
atggagagcgagatggagacccagagcgccagagccgaggagggcttcacccaggtgaccagaaagggcggcagaagagccaagaagagacaggccgagcagctgagcgccgccggcgagggcggcgacgccggcagaatggacaccgaggaggccagacccgccaagagacccgtgttcccccccctgtgcggcgacggcctgctgagcggcaaggaggagaccagaaagatccccgtgcccgccaacagatacacccccctgaaggagaactggatgaagatcttcacccccatcgtggagcacctgggcctgcagatcagattcaacctgaagagcagaaacgtggagatcagaacctgcaaggagaccaaggacgtgagcgccctgaccaaggccgccgacttcgtgaaggccttcatcctgggcttccaggtggaggacgccctggccctgatcagactggacgacctgttcctggagagcttcgagatcaccgacgtgaagcccctgaagggcgaccacctgagcagagccatcggcagaatcgccggcaagggcggcaagaccaagttcaccatcgagaacgtgaccagaaccagaatcgtgctggccgacgtgaaggtgcacatcctgggcagcttccagaacatcaagatggccagaaccgccatctgcaacctgatcctgggcaacccccccagcaaggtgtacggcaacatcagagccgtggccagcagaagcgccgacagattctag

SEQ ID NO: 202878 - protein, 257 aa, Artificial Sequence
  derived and/or modified sequence
MPARCVAAHCGNTTKSGKSLFRFPKDRAVRLLWDRFVRGCRADWYGGNDRSVICSDHFAPACFDVSSVIQKNLRFSQRLRLVAGAVPTLHRVPAPAPKRGEEGDQAGRLDTRGELQAARHSEAAPGPVSCTRPRAGKQAAASQITCENELVQTQPHADNPSNTVTSVPTHCEEGPVHKSTQISLKRPRHRSVGIQAKVKAFGKRLCNATTQTEELWSRTSSLFDIYSSDSETDTDWDIKSEQSDLSYMAVQVKEETC

SEQ ID NO: 202879 - DNA, 774 bp, Artificial Sequence
  derived and/or modified sequence
atgcccgccagatgcgtggccgcccactgcggcaacaccaccaagagcggcaagagcctgttcagattccccaaggacagagccgtgagactgctgtgggacagattcgtgagaggctgcagagccgactggtacggcggcaacgacagaagcgtgatctgcagcgaccacttcgcccccgcctgcttcgacgtgagcagcgtgatccagaagaacctgagattcagccagagactgagactggtggccggcgccgtgcccaccctgcacagagtgcccgcccccgcccccaagagaggcgaggagggcgaccaggccggcagactggacaccagaggcgagctgcaggccgccagacacagcgaggccgcccccggccccgtgagctgcaccagacccagagccggcaagcaggccgccgccagccagatcacctgcgagaacgagctggtgcagacccagccccacgccgacaaccccagcaacaccgtgaccagcgtgcccacccactgcgaggagggccccgtgcacaagagcacccagatcagcctgaagagacccagacacagaagcgtgggcatccaggccaaggtgaaggccttcggcaagagactgtgcaacgccaccacccagaccgaggagctgtggagcagaaccagcagcctgttcgacatctacagcagcgacagcgagaccgacaccgactgggacatcaagagcgagcagagcgacctgagctacatggccgtgcaggtgaaggaggagacctgctag

SEQ ID NO: 202880 - DNA, 774 bp, Artificial Sequence
  derived and/or modified sequence
atgcctgccaggtgcgttgcagcccactgcggtaacaccacgaagtcggggaaatccctcttccgattccctaaagacagagcggtgcgtctcctttgggacaggttcgtgcgtggatgccgcgcagactggtacggagggaacgatcgttccgtcatctgttctgaccattttgctcctgcctgttttgatgtgtcaagcgtaattcagaaaaatctgcggttttctcaacggctaaggctcgtggctggggcagtcccaacactgcatcgcgtgccagcaccagctcccaaaaggggggaggagggtgatcaggccgggcggctcgacacaagaggggagttacaagcggctaggcacagtgaggccgcaccgggccccgtgagttgcacccggccacgggccggaaagcaggctgctgcatcccagatcacgtgtgagaatgaacttgttcaaacccaaccccatgctgacaatccctccaatacagtcaccagtgtcccgacacactgcgaagagggcccggtgcacaaatcaacacagatcagcctcaagcggccccgccacaggtctgtagggattcaggctaaggtcaaagcattcggcaagagactgtgtaatgcgaccacacagacggaggaattgtggagtcggacctccagtcttttcgacatatacagctccgattctgagacggatacagactgggacataaaatcggagcaatcggacctaagctacatggccgtgcaagtaaaggaggagacctgttag

SEQ ID NO: 202881 - DNA, 774 bp, Artificial Sequence
  derived and/or modified sequence
atgcctgcccgctgtgtggccgcccactgcggcaacaccaccaagagcggcaagagcctcttccgcttccccaaggacagagctgtgcggctgctgtgggacagatttgtgcggggctgcagagctgactggtatggaggaaatgacagaagtgtcatctgcagcgaccactttgccccagcctgctttgatgtgtcctctgtcatccagaagaacctgcgcttcagccagaggctgcggctggtggccggggctgtgcccaccctgcaccgggtgcctgccccagcccccaagagaggagaggagggggaccaggccggccgcctggacaccagaggagagctgcaggccgcccggcacagcgaggccgcccctggccctgtgtcctgcacccggcccagggctgggaagcaggccgccgccagccagatcacctgtgaaaatgagctggtgcagacccagccccatgctgacaaccccagcaacacagtgacctctgtgcccacccactgtgaggagggccctgtgcacaagagcacccagatcagcctgaagaggcccaggcacaggtctgtgggcatccaggccaaggtgaaggccttcggcaagaggctgtgcaatgccaccacccagacagaggagctgtggagcaggaccagcagcctgtttgacatctacagcagtgacagcgagacagacacagactgggacatcaagtctgagcagagcgacctgagctacatggctgtgcaggtgaaggaggagacctgctag

SEQ ID NO: 202882 - DNA, 774 bp, Artificial Sequence
  derived and/or modified sequence
atgcccgcccggtgcgtggccgcccactgcggcaacaccaccaagagcggaaaaagcctgtttcgcttccccaaggaccgcgccgttcgactgctctgggaccgatttgtgcgggggtgccgggctgactggtacggagggaatgacagatctgtaatctgtagcgaccattttgctccagcctgctttgacgtaagttccgtgattcagaagaacctgagattttcacaacgcttaaggctggttgccggagctgttccaaccctccacagagtgccggccccggctcccaaaagaggggaggaaggggaccaggcgggtcggctcgacactcgcggagaactgcaggctgctaggcacagtgaggctgccccagggcctgtgtcctgtaccaggcccagagccggcaagcaggccgccgccagtcagataacatgcgaaaatgagctggtgcaaacacaaccacatgccgacaatccttcaaacaccgtgacaagcgttccgacgcactgtgaggaaggacccgtgcataagtcaactcaaatcagcttgaagagacccagacaccgctccgtaggcattcaggccaaagtgaaagcttttgggaagcggctgtgcaatgctaccactcagaccgaagagctctggtctcgcacatcctcccttttcgatatatacagcagcgacagcgagacagataccgattgggacattaagtcagagcaatccgatctgtcctatatggcagttcaagtgaaggaggaaacctgttag

SEQ ID NO: 202883 - DNA, 774 bp, Artificial Sequence
  derived and/or modified sequence
atgccagccagatgcgttgcagctcactgcgggaacacaaccaaatcaggaaagtccttgtttcgatttcctaaggacagagcagtccgcctgttgtgggaccggttcgtgcgcggttgtagggccgactggtacggcggaaatgatcggagtgtgatctgtagcgatcactttgctcctgcttgttttgacgtgagctctgttatccagaagaacttgcgcttctctcaacggctacgcctcgtggcgggagctgtgccgacgctgcatcgggttcctgccccagccccaaaaagaggtgaagaaggtgatcaggccggacggcttgacactcgcggagagctgcaggccgctaggcattctgaagcagccccaggccctgtgtcatgcacaaggcccagagccggtaaacaggcagcggcaagccagataacatgtgagaacgagcttgtacagacgcagccacacgcggataatccttcaaacacggttacatctgtgcctacccactgcgaagagggacctgtgcacaagtctacgcagatctccttgaagcgaccccgacatcggtcagtaggcatccaggccaaagtgaaagccttcggaaaacgcctgtgtaacgccaccacccaaaccgaggagctgtggtcacgcacaagctctctgttcgacatttactcttcagactcagagacagacacagactgggacatcaagtctgaacagtctgacctctcttatatggccgttcaggtcaaggaggagacctgttag

SEQ ID NO: 202884 - DNA, 2399 bp, Artificial Sequence
  derived and/or modified sequence
accatggaaacgaccatttccggtctggacctctcccgaatcgatagagccacacagtcgttgcagcttctagttgtattcgtgagagcccagtgcgtcaccacttcctcgttctattttcccagcctcataaaaacagagcgggagtattgggaggaggataagctggggaagaggctggccacactggttgctataaccaccaccacttccggtccgttcctctttacggcccacctcagcgctgcccgcgcgaaatttgtatccctctgcttgtgtccactggctcctggggagcagcgcagggaggaggaggaggaagatatcaaagagccctcccattgggggccccagatcgccacttccggtgaccagaggtagggaaggaaacaatcccgacccggagtggacaggtgaggaggggaggacttgcctcgccgaggccgctgcgaggagcgtgcccaagggcgaaggtccagggaacccggctcccgcgcaccgaagacggccgccatgccggcccgttgtgtggccgcccactgcggcaacaccaccaagtctgggaagtcgctgttccgctttcccaaggaccgggccgtgcggctgctctgggaccgcttcgtgcggggttgccgcgccgactggtacggaggcaatgaccgctcggtcatctgctctgaccactttgccccagcctgttttgacgtctcttcggttatccagaagaacctgcgcttctcccagcgcctgaggctggtggcaggcgccgtgcccaccctgcaccgggtgcccgccccggcacctaagaggggagaggagggagaccaagcaggccgcctggacacgcgaggagagctccaggcagccaggcattctgaggctgccccaggtccagtctcctgtacacgcccccgagctgggaagcaggctgcagcttcacagattacgtgtgaaaatgaacttgtgcaaacccaaccccatgctgataatccatctaatactgtcacttcagtacctactcactgtgaagaaggcccagtgcataaaagtacacaaatttctttgaaaaggccccgtcaccgtagtgtgggtattcaagccaaagtgaaagcgtttggaaaaagactgtgtaatgcaactactcagacagaggaattgtggtctagaacttcctctctctttgacatttactccagtgattcagaaacagatacagactgggatatcaagagtgaacagagtgatttgtcttatatggctgtacaggtgaaagaagaaacatgttaaaaactcaacatcaaatgctctgatgtgctatagattttcaaatctttactcacataattatctctttgctattgtaaatctttcacttcaagataatttgacagttgagtatcagcataatttgtttagctctaaggcaaaagtttgcttgcttgccaacacaatgaagataatacctacccacaaacatccctattctctactttcacctttttttttcttttaatccttttggtagaaatcaggttacaaagcaaaaccacaatatcagcaacacttcctaatcaaaattaagcattgaatatttgtttaagcttagttcagaagcaacgctcctacaggacttgacatttgctagttagaatatccctactcttctaaataatttgaaagtatagagcagtaacacagtaacagtgagcacagccaagcctgacactactaaatgatttggtagtgaagccaggacatctacccttgactattttttatgttatttatttattagtttgtccatttgtaacatgtatagatctgtcctgtgagcatttctgatgaatctatggttcttacagaaatttttcaaaggaatcaatttagagatagagttttcatatacttacattaacttattaatgaaatctgtttgcatcagtgcttactgcgacacattaattagcttgattaatttagattagaatcattaacatcatgaaaaataaaagtactacatttctaacgtattcccattgcaggtgttaggtattttttctgtcaacacctctcttttgaattctacatttgagaaataagcatggaaatattagctgccccgtctgccattcaccaggaaaaatttctatggcaattttgtaccatgaagtaaactgttacaatagtttctgagaagcatactataactctgatcttccattgagaataacaaaaataaatatcaattttacacctcatatgtcttcttagttctgaatgattagaagaacttgcatgtatttttatcctagaaggtttaaataatacatcaaagttattttcttccaaatgtaattttatgtctgctttaaggaaaataaaataaaatattaatagga

SEQ ID NO: 202885 - protein, 370 aa, Artificial Sequence
  derived and/or modified sequence
MLPRRLLAAWLAGTRGGGLLALLANQCRFVTGLRVRRAQQIAQLYGRLYSESSRRVLLGRLWRRLHGRPGHASALMAALAGVFVWDEERIQEEELQRSINEMKRLEEMSNMFQSSGVQHHPPEPKAQTEGNEDSEGKEQRWEMVMDKKHFKLWRRPITGTHLYQYRVFGTYTDVTPRQFFNVQLDTEYRKKWDALVIKLEVIERDVVSGSEVLHWVTHFPYPMYSRDYVYVRRYSVDQENNMMVLVSRAVEHPSVPESPEFVRVRSYESQMVIRPHKSFDENGFDYLLTYSDNPQTVFPRYCVSWMVSSGMPDFLEKLHMATLKAKNMEIKVKDYISAKPLEMSSEAKATSQSSERKNEGSCGPARIEYA

SEQ ID NO: 202886 - DNA, 1113 bp, Artificial Sequence
  derived and/or modified sequence
atgctgcccagaagactgctggccgcctggctggccggcaccagaggcggcggcctgctggccctgctggccaaccagtgcagattcgtgaccggcctgagagtgagaagagcccagcagatcgcccagctgtacggcagactgtacagcgagagcagcagaagagtgctgctgggcagactgtggagaagactgcacggcagacccggccacgccagcgccctgatggccgccctggccggcgtgttcgtgtgggacgaggagagaatccaggaggaggagctgcagagaagcatcaacgagatgaagagactggaggagatgagcaacatgttccagagcagcggcgtgcagcaccacccccccgagcccaaggcccagaccgagggcaacgaggacagcgagggcaaggagcagagatgggagatggtgatggacaagaagcacttcaagctgtggagaagacccatcaccggcacccacctgtaccagtacagagtgttcggcacctacaccgacgtgacccccagacagttcttcaacgtgcagctggacaccgagtacagaaagaagtgggacgccctggtgatcaagctggaggtgatcgagagagacgtggtgagcggcagcgaggtgctgcactgggtgacccacttcccctaccccatgtacagcagagactacgtgtacgtgagaagatacagcgtggaccaggagaacaacatgatggtgctggtgagcagagccgtggagcaccccagcgtgcccgagagccccgagttcgtgagagtgagaagctacgagagccagatggtgatcagaccccacaagagcttcgacgagaacggcttcgactacctgctgacctacagcgacaacccccagaccgtgttccccagatactgcgtgagctggatggtgagcagcggcatgcccgacttcctggagaagctgcacatggccaccctgaaggccaagaacatggagatcaaggtgaaggactacatcagcgccaagcccctggagatgagcagcgaggccaaggccaccagccagagcagcgagagaaagaacgagggcagctgcggccccgccagaatcgagtacgcctag

SEQ ID NO: 202887 - DNA, 1113 bp, Artificial Sequence
  derived and/or modified sequence
atgctgcccagacggctgttggccgcttggctagccggaacaagaggcgggggacttctcgcactgcttgctaatcagtgcagatttgtgactggactccgagtacgcagagcccagcagatagcccagctatacggtcgcctgtactccgagtcaagcaggagggtgctcctgggaagactgtggcgccgccttcacgggcgacccgggcacgcgagcgccctgatggcagctctcgccggagtgttcgtatgggatgaggagcgtattcaagaggaggagttgcagaggagcataaatgaaatgaagcggctggaggagatgtctaatatgttccagtcatctggggtgcagcatcacccacccgagcctaaggcccaaactgaagggaacgaggattcggaagggaaagagcagcgttgggaaatggtcatggacaagaagcattttaagctatggcggcgacctatcaccggcacgcacctttaccagtaccgcgtgtttggcacttatacagacgtaaccccccgccaatttttcaatgtgcagctcgacaccgagtatcggaagaagtgggatgccctagtgattaagcttgaagtgatagagcgagacgtggtcagcggaagcgaagtcttacactgggtgacccatttcccataccccatgtattctcgtgactacgtatacgtcagacgttattccgtcgatcaagagaataacatgatggtgttggtgtcccgtgctgtggaacacccatccgttccggaaagtccggaattcgtgcgcgttagatcttacgaatcacagatggtcatcaggccacataaatccttcgacgagaacggtttcgattatctgctgacatactccgataacccacagaccgtgttccctagatattgcgttagctggatggtgagctccggtatgcccgactttctcgaaaagctgcacatggccacgctgaaggcaaagaacatggaaatcaaggtgaaggattacatcagtgctaaaccgttggagatgtcctcagaagcgaaagccacatctcagtcgtctgagcgaaaaaacgaaggaagttgtggtcccgctcgcatagaatacgcgtag

SEQ ID NO: 202888 - DNA, 1113 bp, Artificial Sequence
  derived and/or modified sequence
atgctgccccggcggctgctggccgcctggctggccggcacccggggcggcggcctgctggccctgctggccaaccagtgccgctttgtgacaggcctgcgggtgcggcgggcccagcagatcgcccagctgtatggccgcctgtacagcgagagcagccggcgggtgctgctgggccgcctgtggaggcggctgcacggccggcccggccacgccagcgccctgatggccgccctggccggcgtgtttgtgtgggatgaggagcgcatccaggaggaggagctgcagaggagcatcaatgagatgaagaggctggaggagatgagcaacatgttccagagcagtggagtgcagcaccaccccccagagcccaaggcccagacagagggcaatgaagacagcgagggcaaggagcagcgctgggagatggtgatggacaagaagcacttcaagctgtggaggcggcccatcaccggcacccacctgtaccagtacagagtgtttggcacctacacagatgtgaccccccggcagttcttcaacgtgcagctggacacagagtacaggaagaagtgggatgccctggtgatcaagctggaggtgattgaaagagatgtggtgtctggcagcgaggtgctgcactgggtgacccacttcccctaccccatgtacagccgggactatgtgtatgtgcggcgctacagcgtggaccaggagaacaacatgatggtgctggtgtccagagctgtggagcaccccagcgtgcctgagagccctgagtttgtgcgggtgcgctcctatgagagccagatggtgatccggccccacaagagctttgatgaaaatggatttgactacctgctgacctacagcgacaacccccagaccgtcttcccccgctactgtgtgtcctggatggtgagcagcggcatgccagacttcctggagaagctgcacatggccaccctgaaggccaagaacatggagatcaaggtgaaggactacatcagcgccaagcccctggagatgagcagcgaggccaaggccaccagccagagcagcgagaggaagaatgaaggcagctgtggccctgccagaattgaatatgcctag

SEQ ID NO: 202889 - DNA, 1113 bp, Artificial Sequence
  derived and/or modified sequence
atgctgccccggcggctgctggccgcctggctggccggcacccgggggggtggactcctagctctgttggcaaaccagtgtagattcgtgacagggctgagggtaaggcgggcccagcaaatagcccagctatatggacgactgtattctgagagctcccgaagagttcttctagggcgattgtggaggcgcttacacggaaggccgggccacgcgtctgccctcatggcagcccttgctggagtcttcgtatgggatgaggaacgtatccaggaggaagagctacagcgctctatcaatgaaatgaaaagactggaagaaatgagcaacatgttccagagctccggagtccagcatcacccaccagagcctaaggcacagaccgagggcaatgaggactctgaaggaaaggagcagcgttgggagatggtaatggacaaaaagcattttaaactgtggcgacgccctattaccggcacacatctctaccaatatcgggtctttgggacttacactgacgtgaccccgcggcagttttttaatgtccagctggacacagagtaccggaaaaaatgggacgctctggttatcaaacttgaagttatagagagagatgttgtaagcggatccgaggtcctacactgggtgacacacttcccatatcccatgtacagcagagactacgtgtatgtgaggagatatagcgtggaccaagagaacaatatgatggtgctggtgagcagagccgtagagcatccgtctgtccccgaaagtcccgaatttgtgcgggtgcgttcttacgagagccagatggtcatacgcccacataaatctttcgacgaaaacggtttcgactatttgctcacgtattcagataatccacagactgtgtttccaagatactgtgtgtcttggatggtgtcaagcggtatgccagatttccttgaaaagctgcacatggcaacactcaaggcaaagaatatggagataaaagtgaaggactacatcagtgccaaacccctcgaaatgagcagcgaggcgaaagctacaagccaatcctctgagagaaagaacgaaggaagctgcggcccagcacgaattgagtacgcttag

SEQ ID NO: 202890 - DNA, 1113 bp, Artificial Sequence
  derived and/or modified sequence
atgctgccacgcagactactcgctgcctggttggcaggcacacgcggaggcggtctgctcgcactgttagcaaaccaatgccgttttgtgaccggtttgagagtgcgcagggctcagcaaattgctcagctgtatggtcgcctttactcagaatcctctagacgcgtgttgctcgggcgactgtggcggaggttacatgggcgtccagggcacgcatcagctctgatggcagccctagccggtgttttcgtctgggatgaggaaaggattcaggaagaggagctccagagaagcatcaatgaaatgaagcgcctagaggaaatgtccaatatgttccagagcagcggggtgcaacaccatccgccagagcccaaagctcagactgaaggcaacgaggatagtgagggaaaagagcagcgatgggaaatggtcatggacaagaaacacttcaagctgtggagaagacctataacagggacccacctgtaccaatatagagtgttcggaacctacaccgatgtgacccctcggcagtttttcaatgtgcagttggataccgaatatagaaaaaaatgggacgcacttgttattaaactcgaagtaatagagcgggatgtagtgtccgggtctgaggtgctgcactgggttacgcattttccttatccaatgtatagccgtgattacgtgtatgtgagacgatacagcgtcgaccaagaaaacaacatgatggtactggtgtcacgcgctgtggagcacccatcagtgcctgagtcgcccgagttcgtgagagtgaggagctacgaaagccaaatggtaatcaggccccacaaatcatttgatgaaaacggttttgactacctgctgacctattcagataatccccagaccgttttccctaggtactgcgtgtcatggatggtgtcgagcgggatgccggacttcctggaaaagctgcacatggctactcttaaagctaaaaacatggaaattaaggtcaaagactacatctccgctaaacctctggagatgtcctcagaagcgaaggccacaagccagagtagcgagcggaagaatgagggctcctgcggacccgcaagaattgaatacgcgtag

SEQ ID NO: 202891 - DNA, 3368 bp, Artificial Sequence
  derived and/or modified sequence
gcggaaggcgcgggagcttgcgtgctgctgggcctgagctgtctgtctcgtttctgtccgcgcgccctgcatcccggccccgggcgcccgctggaggtcgccgaggagccacagggctgactggtctgctgcccgggcccaggagtgcctggtgtagcagtcgcggagccatcccggcgtctgctgccatgaccgactctcccctcagaggagactcttcctcagcggtggctgcagagacagatgagcggcggctcctggccgcgggaccgtgagacgggttcgtggccggccatttagggggacgctgcgaccaccgcctgcgcccctccggactggttccttgggccccggaagctcgcggcgggccctgcgggaggcggcatgctcccgcggaggctgctggccgcctggctggcggggacgcggggcgggggcctgctggcgcttctggccaatcagtgccgcttcgtcacgggcctgcgcgtgcggcgcgcgcagcagatcgcgcagctctacggccgcctctactccgagagctcacgccgcgttctcctcggccgcctctggcgccggctgcacggccgtcctggccatgcctctgccttgatggcggcgttagccggcgtcttcgtttgggacgaggagaggatccaggaggaggagttgcagagatctattaatgagatgaagcggttggaagaaatgtcaaatatgtttcagagctctggagtccagcaccaccctccagaaccaaaagcccaaacagaagggaatgaagattcagagggcaaagagcaacgttgggaaatggtgatggataagaaacactttaagctgtggcggcgcccaattacaggcacccacctttaccagtaccgagtttttggaacctacacagatgtgacacctcggcagttcttcaatgttcagctggacacagagtatagaaaaaaatgggatgccctggtaatcaagctggaggtgattgagagggatgtggttagtggttccgaggttcttcactgggtaacccattttccttatccaatgtactcacgggattatgtttatgttcggcggtatagtgtggatcaggaaaacaacatgatggtgttggtgtcgcgtgctgtggagcatccgagtgtgccagagtctccagaattcgtcagggtcagatcatatgaatcccaaatggttatccgtccccacaagtcatttgatgagaatggctttgactacttactaacatacagtgacaatccccaaacggtgtttcctcgctactgtgttagttggatggtttccagtggcatgccagatttcctggagaagctgcacatggccactctgaaagccaagaatatggagattaaagtaaaggactacatctcagctaagcctctggaaatgagtagtgaagccaaggccaccagccagtcctctgagcgaaagaacgagggcagctgtggccctgctcggattgagtatgcttgacaggctttgggataagaagggacaaggtgcttctagccctgtctcagtccgttatcactctgctgtagaagggggacatgccacatgtattagaaggcatctgctgtaacttccagtgcaagataattcaataactgatgtcccatttcattcagagcccttattgctcttatcaaaacagaagaaggctacatttgtgggagtgttgtcatattctcaggccaactgttttgaaattcggtatctcactgagctaatctggaacaaacctctcacctcaggccagaaggggatgacctccatttgcttctctgagtagtttcctctgctgacattccaaatcccaccatcgattgtgcagcgctttggatttccttcagttctccaggtccacctggaaagtatagttggccagttgagtctctcaaatgaggggctactgggagtgctcttggtaacaatcatgatgtgaatgggtgtgaacgatacttggctatgttaagtgccttgtccgcaccttgcttttatctctagagacatgaagttattattaattttttttttttttaagtagagatggagtttcactctgtttcccaggctggtcttgaactcctgggccatgcctggccagggacatgaatttgtacaaagaaatttccctccctgcctgcacaatatcacccattgactcaccttatccaaagcaagtttcctgtgaatcggccagttcttctatattcattggatcattgcctccttcctaaccttccccatttaccaagaacactgggagactaatccttttagatagtagctttttgatgctcaaaacatcacatttaaatttagtttaaaaattttttaacttttgtgtcaaataggagttgaggaattgagcaggattctaccctagtccgattgtatagaaaacaccattttgattcaggtattatttttcatatttcaggtttgacttgttcttttcagaaggctaaagtcagaggaatgggggctgggccactcccttggagctctcagatctacagacaagctgtgtgaatgcatagatgtaatcttgtctcaaatactaatacagtggagatttggtttatgttaccattaagttcctctaaaaagtttttcttcctctcttcagagccaaaataaaagtgaactacactgttcagataaggtcacaatctgatgctgtcagtttgaccgagctggttttgcttatggtcatgctgcaatttgttagaataatagggatcaagttttaaatcctcctccttcccttttttctggagtcttgagggccagagtttttgtttttgtttttgtttttgttttcctgcttgctactgttttgtggtgttgaaaagtggtttaaacctgagactaacttaaacacttccttgaccttcttgttgcctgttcatttttgtgccaaggaagtagctgccccagtgtatgtcttgccttctccgcgtcattgttggaagaggagagatgcatcgagcagtcccagctgcttttcatttattacttcttctttccaggacctgacagaagtcagggaagagtccctgggttatgtccaaacttagcacctgcaattgttgggatgtggatggatgtgtgcataagagagagagagaatatgtgtgtgtgtgtgtgcgtctgcgagcgcacacacatgcacaagtgcgaaggagttgcggttgctccatgttctgacttagggcaatttgattctgcacttggggtctgtctgtacagttactcatgtcattgtaatgatttcactcctaactgtgacatttttatcaaatgtgtgaataaatacataaagattggtacaaaaaaaa

SEQ ID NO: 202892 - protein, 242 aa, Artificial Sequence
  derived and/or modified sequence
MAAALWGFFPVLLLLLLSGDVQSSEVPGAAAEGSGGSGVGIGDRFKIEGRAVVPGVKPQDWISAARVLVDGEEHVGFLKTDGSFVVHDIPSGSYVVEVVSPAYRFDPVRVDITSKGKMRARYVNYIKTSEVVRLPYPLQMKSSGPPSYFIKRESWGWTDFLMNPMVMMMVLPLLIFVLLPKVVNTSDPDMRREMEQSMNMLNSNHELPDVSEFMTRLFSSKSSGKSSSGSSKTGKSGAGKRR

SEQ ID NO: 202893 - DNA, 1155 bp, Artificial Sequence
  derived and/or modified sequence
cagaaacgggcgcgcagtgatgacaacatcaagccgccagcggcggcggtggcggccgggagactgggagggcttccggggctgccggtctgagtgcagagctgctgtcatggcggccgctctgtggggcttctttcccgtcctgctgctgctgctgctatcgggggatgtccagagctcggaggtgcccggggctgctgctgagggatcgggagggagtggggtcggcataggagatcgcttcaagattgaggggcgtgcagttgttccaggggtgaagcctcaggactggatctcggcggcccgagtgctggtagacggagaagagcacgtcggtttccttaagacagatgggagttttgtggttcatgatataccttctggatcttatgtagtggaagttgtatctccagcttacagatttgatcccgttcgagtggatatcacttcgaaaggaaaaatgagagcaagatatgtgaattacatcaaaacatcagaggttgtcagactgccctatcctctccaaatgaaatcttcaggtccaccttcttactttattaaaagggaatcgtggggctggacagactttctaatgaacccaatggttatgatgatggttcttcctttattgatatttgtgcttctgcctaaagtggtcaacacaagtgatcctgacatgagacgggaaatggagcagtcaatgaatatgctgaattccaaccatgagttgcctgatgtttctgagttcatgacaagactcttctcttcaaaatcatctggcaaatctagcagcggcagcagtaaaacaggcaaaagtggggctggcaaaaggaggtagtcaggccgtccagagctggcatttgcacaaacacggcaacactgggtggcatccaagtcttggaaaaccgtgtgaagcaactactataaacttgagtcatcccgacgttgatctcttacaactgtgtatgttaactttttagcacatgttttgtacttggtacacgagaaaacccagctttcatcttttgtctgtatgaggtcaatattgatgtcactgaattaattacagtgtcctatagaaaatgccattaataaattatatgaactactatacattatgtatattaattaaaacatcttaatccagaaatcaaa

SEQ ID NO: 202894 - DNA, 729 bp, Artificial Sequence
  derived and/or modified sequence
atggccgccgccctgtggggcttcttccccgtgctgctgctgctgctgctgagcggcgacgtgcagagcagcgaggtgcccggcgccgccgccgagggcagcggcggcagcggcgtgggcatcggcgacagattcaagatcgagggcagagccgtggtgcccggcgtgaagccccaggactggatcagcgccgccagagtgctggtggacggcgaggagcacgtgggcttcctgaagaccgacggcagcttcgtggtgcacgacatccccagcggcagctacgtggtggaggtggtgagccccgcctacagattcgaccccgtgagagtggacatcaccagcaagggcaagatgagagccagatacgtgaactacatcaagaccagcgaggtggtgagactgccctaccccctgcagatgaagagcagcggcccccccagctacttcatcaagagagagagctggggctggaccgacttcctgatgaaccccatggtgatgatgatggtgctgcccctgctgatcttcgtgctgctgcccaaggtggtgaacaccagcgaccccgacatgagaagagagatggagcagagcatgaacatgctgaacagcaaccacgagctgcccgacgtgagcgagttcatgaccagactgttcagcagcaagagcagcggcaagagcagcagcggcagcagcaagaccggcaagagcggcgccggcaagagaagatag

SEQ ID NO: 202895 - DNA, 729 bp, Artificial Sequence
  derived and/or modified sequence
atggctgccgccctctggggctttttcccagtgcttcttctcctactcctgagcggggacgtccagagcagtgaggttccgggagctgcggctgagggaagcggagggagcggcgtggggattggtgatcggtttaaaatcgaggggcgcgctgtggtcccaggtgtaaaacctcaagactggatctccgcagcgagggtacttgtcgatggagaagagcacgtgggtttcctcaaaactgacggatcgttcgtagttcatgacatccccagtggatcatacgttgtggaagtggtgagccccgcctacaggtttgatcccgtgcgggttgacatcacatcaaaaggtaaaatgagggcacgatatgtaaattacatcaagacaagcgaggtagttcggctgccgtatccacttcagatgaagtccagcgggcctccaagctactttattaagcgagagtcttggggatggacggacttccttatgaacccaatggttatgatgatggtcctgccgttgttgatttttgtcctgttgcccaaggtggtgaatacttccgaccctgacatgaggcgggagatggagcagtctatgaatatgctgaactctaatcacgaactgcccgacgtgagcgagtttatgactagactcttcagctctaaatccagcgggaagagttcctctggcagcagcaaaacaggaaaatcaggggccggtaagagacggtag

SEQ ID NO: 202896 - DNA, 729 bp, Artificial Sequence
  derived and/or modified sequence
atggctgctgccctgtggggcttcttccctgtgctgctgctgctgctgctgtctggagatgtgcagagcagcgaggtgcctggagctgctgctgagggcagcggcggcagcggcgtgggcattggagaccgcttcaagattgagggccgggctgtggtgcctggggtgaagccccaggactggatctctgctgcccgggtgctggtggatggagaggagcacgtgggcttcctgaagacagatggcagctttgtggtgcatgacatccccagcggcagctatgtggtggaggtggtgtccccagcctacagatttgatcctgtgcgggtggacatcaccagcaagggcaagatgagggcccgctacgtgaactacatcaagaccagcgaggtggtgcggctgccctaccccctgcagatgaagagcagcggccccccatcctacttcatcaagcgggagagctggggctggacagacttcctgatgaaccccatggtgatgatgatggtgctgcccctgctgatctttgtgctgctgcccaaggtggtgaacaccagtgaccctgacatgagaagagagatggagcagagcatgaacatgctgaacagcaaccacgagctgcctgatgtgtctgagttcatgaccaggctcttcagcagcaagagcagcggcaagagcagcagcggcagcagcaagacaggcaagagcggggccggcaagagaagatag

SEQ ID NO: 202897 - DNA, 729 bp, Artificial Sequence
  derived and/or modified sequence
atggccgccgccctgtggggcttcttccccgtgctgctgctgctgctgttgagcggagacgttcagtccagcgaggtgcccggagctgcagcagagggaagcggaggaagcggcgtggggataggggatagatttaaaatcgaaggccgggccgtagttcccggcgtgaagccccaggactggatctcggctgctcgggtactcgtcgacggagaagagcatgtgggtttcttgaagactgatggcagcttcgtcgtccacgatattccaagcgggtcctacgttgtggaggttgtgtcccccgcgtaccgcttcgatcccgtaagggtcgatattacatctaaaggaaagatgcgggcgaggtatgtaaattacattaaaacctctgaagtggtgcggctgccctatccattgcaaatgaagtcgtctggtcccccttcctatttcataaaacgcgaaagctggggttggactgactttctcatgaaccccatggtaatgatgatggttctgccactactcatattcgtgctcctgccaaaggtggtgaacacatctgaccctgatatgagacgcgaaatggaacagagtatgaacatgctgaactctaatcacgaactgccagacgtgtcagaattcatgactaggctattttcctccaagagtagtggaaagtcttcaagcggatcttccaaaaccgggaagagcggcgcaggcaagcgccggtag

SEQ ID NO: 202898 - DNA, 729 bp, Artificial Sequence
  derived and/or modified sequence
atggctgctgccctttggggcttttttccggttcttctactgctgttactaagtggtgatgtgcagtcttctgaggttcctggagctgccgcagagggctcaggtgggtcaggcgtgggtatcggcgacaggttcaagatagaggggagggctgtcgtaccaggcgttaaaccacaggactggatctccgccgctcgcgtcctggtggacggcgaagaacacgtcggattcctgaagacagacgggtctttcgtggtgcatgacattccatccggaagctacgtggtggaagttgtgagtcccgcatataggtttgatcccgtgagagtggacattacctctaaaggcaagatgcgagctcgctatgtcaattatattaaaaccagcgaggtggtgcgtcttccttaccctctgcagatgaaatcctctggaccaccatcatatttcattaaaagggagagctggggatggacagacttcttgatgaaccctatggttatgatgatggttctcccccttcttatattcgttttgctccccaaggttgtgaataccagcgatcccgacatgcgccgagagatggaacaaagtatgaacatgctgaactctaatcatgagctgcctgatgttagcgagtttatgacaagactcttcagttctaagagttccggcaagagttcaagcggatcctccaagaccggcaaatccggtgcaggtaagcggaggtag

SEQ ID NO: 202899 - protein, 128 aa, Artificial Sequence
  derived and/or modified sequence
MARILLLFLPGLVAVCAVHGIFMDRLASKKLCADDECVYTISLASAQEDYNAPDCRFINVKKGQQIYVYSKLVKENGAGEFWAGSVYGDGQDEMGVVGYFPRNLVKEQRVYQEATKEVPTTDIDFFCE

SEQ ID NO: 202900 - DNA, 387 bp, Artificial Sequence
  derived and/or modified sequence
atggccaggatcctgctcctgtttctgcccggtttggtcgcggtatgcgccgtacacgggatattcatggatcggctcgcgtcgaaaaaactgtgcgcagacgatgagtgtgtgtacactatctcacttgcatcagctcaggaggactacaatgcccccgattgcagattcatcaatgtcaaaaaaggccagcagatttacgtatacagtaaacttgttaaagagaatggggctggcgagttctgggccggtagcgtgtacggggacggccaggacgaaatgggagtagtgggctatttccctcgcaatctggtaaaggagcaaagagtgtaccaggaagccaccaaagaagtgcccacaaccgatatcgattttttttgtgagtag

SEQ ID NO: 202901 - DNA, 387 bp, Artificial Sequence
  derived and/or modified sequence
atggcccgcatcctgctgctcttcctgcccggcctggtggccgtgtgtgctgtgcacggcatcttcatggaccggctggccagcaagaagctgtgtgctgatgatgaatgtgtgtacaccatcagcctggccagcgcccaggaggactacaatgccccagactgccgcttcatcaacgtgaagaagggccagcagatctacgtgtacagcaagctggtgaaggaaaatggagctggggagttctgggccggctctgtgtatggagatggccaggatgagatgggcgtggtgggctacttccccaggaacctggtgaaggagcagagggtgtaccaggaggccaccaaggaggtgcccaccacagacatcgacttcttctgtgagtag

SEQ ID NO: 202902 - DNA, 387 bp, Artificial Sequence
  derived and/or modified sequence
atggcccggatcctgctgctgttcctgcccggcctggtggccgtgtgtgccgttcacggaatttttatggatagattggcttccaaaaaactctgcgccgacgacgaatgtgtgtacaccattagcctggcatctgcccaggaagactataatgcaccagactgccgcttcatcaacgttaagaagggccagcaaatatacgtgtattctaaactagtcaaggagaacggggctggcgaattctgggctggatccgtgtacggcgatgggcaagacgaaatgggggttgtcggctattttccccgcaatctcgtgaaagagcagagggtgtatcaggaggcaacgaaagaagtcccgaccactgatatcgatttcttctgcgaatag

SEQ ID NO: 202903 - DNA, 1477 bp, Artificial Sequence
  derived and/or modified sequence
ccccgcttccagtcagagttcaagttaaaacagaaaaaaggaagatggcaagaatattgttacttttcctcccgggtcttgtggctgtatgtgctgtgcatggaatatttatggaccgtctagcttccaagaagctctgtgcagatgatgagtgtgtctatactatttctctggctagtgctcaagaagattataatgccccggactgtagattcattaacgttaaaaaagggcagcagatctatgtgtactcaaagctggtaaaagaaaatggagctggagaattttgggctggcagtgtttatggtgatggccaggacgagatgggagtcgtgggttatttccccaggaacttggtcaaggaacagcgtgtgtaccaggaagctaccaaggaagttcccaccacggatattgacttcttctgcgagtaataaattagttaaaactgcaaatagaaagaaaacaccaaaaataaagaaaagagcaaaagtggccaaaaaatgcatgtctgtaattttggactgacgttttaagaatttgttaccttacagaagagcaagggcttaggggttggaggtggcagataaaagaggattttcaactcaaatcttgtttcctgctggcctggtctgcccacgagctagagcggggaaatgttgagctcaaatgggtaaattgagaccagaaaattattttttcaacctagagaatctcctcttacagggggatgcatataacagatcatgtatgtgtagttatttctaagtagtaattcttcccagctctttgatttgccatatataaaataggtgggtcgtatgtcttccctttagacatgatgttttctactcatttgtctctctggccaattgaattattaataaaaggtctgtattatcaaagagtattctagtatttttgttacttttaatatttgatgccttttggaggtaaagctgttgggggaagaagagtttttggacccatagatgtttggatgatgtctctaatttgtcatttagaaaaatctcaaaaatgatttcagttgaataacttgccttctaaatgatcaatttacttctcccccaattttaaagaagtatgtgtatatttaataggggaaggtagtttatggaaatatttttaatggaatagttttcccttaatatgtatccttgctggatattattcaagctgcaagtcatcaaaagacccagaaaaaaaaaagtctgtaggttattttctctacttctatttcaactttgaatttcctcttcctgtgcaaattcctctagtcaagtgtgatatatcaagaaatctgaggaggatgcaggttttgtggtcctgatgggcccacaagtttttctatatttaactggaaatatgctttgattttgtgttattaatataattcttttgatgtagtcatgagtttttctttgtttgcatataattaaaatgcctctacttaatgtca

SEQ ID NO: 202904 - DNA, 387 bp, Artificial Sequence
  derived and/or modified sequence
atggccaggatactgctgttatttttgccgggtctggtggccgtgtgtgctgtgcatggtatttttatggaccgattagcctcaaagaagctttgtgcagatgacgagtgtgtatataccattagcctggcttcggcgcaggaggattacaacgcccctgattgcagattcatcaatgtgaaaaaaggtcagcagatctacgtttattcaaaactggtcaaagaaaacggcgcaggggagttctgggccggtagcgtctacggcgatggacaggatgagatgggagtagtgggctatttcccgagaaatctggtgaaagaacagagggtctatcaggaggccacaaaggaagtgccaacgactgatatcgattttttctgtgagtag

SEQ ID NO: 202905 - DNA, 387 bp, Artificial Sequence
  derived and/or modified sequence
atggccagaatcctgctgctgttcctgcccggcctggtggccgtgtgcgccgtgcacggcatcttcatggacagactggccagcaagaagctgtgcgccgacgacgagtgcgtgtacaccatcagcctggccagcgcccaggaggactacaacgcccccgactgcagattcatcaacgtgaagaagggccagcagatctacgtgtacagcaagctggtgaaggagaacggcgccggcgagttctgggccggcagcgtgtacggcgacggccaggacgagatgggcgtggtgggctacttccccagaaacctggtgaaggagcagagagtgtaccaggaggccaccaaggaggtgcccaccaccgacatcgacttcttctgcgagtag

SEQ ID NO: 202906 - protein, 235 aa, Artificial Sequence
  derived and/or modified sequence
MEEETHTDAKIRAENGTGSSPRGPGCSLRHFACEQNLLSRPDGSASFLQGDTSVLAGVYGPAEVKVSKEIFNKATLEVILRPKIGLPGVAEKSRERLIRNTCEAVVLGTLHPRTSITVVLQVVSDAGSLLACCLNAACMALVDAGVPMRALFCGVACALDSDGTLVLDPTSKQEKEARAVLTFALDSVERKLLMSSTKGLYSDTELQQCLAAAQAASQHVFRFYRESLQRRYSKS

SEQ ID NO: 202907 - DNA, 988 bp, Artificial Sequence
  derived and/or modified sequence
cagccgcacgtgggctcggcgcgatggaggaggagacgcatactgacgccaaaatccgtgctgaaaatggaacagggtccagccctcggggtcctggctgcagcctccggcactttgcctgcgaacagaacctgctgtcgcggccagatggctctgcttccttcctgcaaggtgacacctctgtcctggcgggtgtgtacgggccggccgaggtgaaggtcagcaaagagattttcaacaaggccacactcgaagtgatcctgaggccgaagattgggctgcctggtgttgcagagaagagccgggagcggctgatcaggaacacgtgcgaggcggtggtgctgggcacgttgcacccccgcacctccatcaccgtggtgctgcaggttgtcagcgatgccggctctctcctggcctgttgtctgaatgccgcctgcatggcattggtggatgcaggtgtgcccatgcgggctctcttctgtggggtcgcctgcgccctggactctgatgggaccctcgtgctggatcctacatccaagcaagaaaaggaggcccgggcagtcctgacctttgccctggacagcgtggaacggaagctgctgatgtccagcaccaaggggctctactcagacactgagctccagcagtgcctggctgcggcccaggccgcttcgcaacacgtcttccgtttctaccgggaatcgctgcagaggcgttactccaagagctgaggcaagctggggcaaggggccgctcccattgcctccacccactcaccccctacagcctgaagcaaaccagcagcccagccttgcctctctgacccatgggctccttgagcctgcagctctgtaaccacagggctcctgtggggaggccttggcctgtgacagcccccaggcctgggggcacagatccccccagcaaggataacattcaaaggagctcacatttatggaatggatgaatcaataaattaattcacttt

SEQ ID NO: 202908 - DNA, 708 bp, Artificial Sequence
  derived and/or modified sequence
atggaagaagagacccacacagacgcaaagatccgcgccgagaacggcacaggatcttctcctcgcggacctgggtgtagtttgcgccatttcgcgtgcgagcagaacctgttatcgcgtccagatgggtctgccagcttcttgcaaggggatacctccgttctcgccggtgtgtacggcccggccgaggtaaaggtgtcgaaagagatatttaacaaagcaacgttggaagttatactgagacccaagattggcctgccaggggtcgcagagaagtcacgcgaacgattgatccggaatacatgcgaggccgtggtgctgggaaccctgcaccctaggacaagcattacggtagtgctccaggtcgtctcagacgcagggagcttactagcatgctgtctaaatgctgcctgcatggccctcgtggacgccggggtcccaatgagggccctcttctgtggagtggcatgcgccctggacagtgatggtaccctggtgctcgaccccacttcaaagcaggaaaaagaggcgcgcgccgtcctgacctttgcgctcgattccgtggagcgcaagctgctgatgtccagcactaagggcctatactcagacactgagctccagcagtgcctggcagcggcacaagccgcaagtcagcacgtctttagattttatcgagagtcacttcagagacggtatagtaagagttag

SEQ ID NO: 202909 - DNA, 708 bp, Artificial Sequence
  derived and/or modified sequence
atggaggaggagacccacacagatgccaagatccgggcagaaaatggaacaggcagcagcccccggggccctggctgcagcctgcggcactttgcctgtgagcagaacctgctgagcaggccagatggcagcgccagcttcctgcagggcgacacctctgtgctggccggcgtgtatggccctgctgaggtgaaggtgtccaaggagatcttcaacaaggccaccctggaggtgatcctgcggcccaagattggcctgcccggggtggccgagaagagccgggagcggctcatccggaacacctgtgaggccgtggtgctgggcaccctgcaccccaggaccagcatcaccgtggtgctgcaggtggtgtctgatgctggcagcctgctggcctgctgcctgaatgctgcctgcatggccctggtggatgctggggtgcccatgagggccctcttctgtggggtggcctgtgccctggacagtgatggcaccctggtgctggaccccaccagcaagcaggagaaggaggcccgggctgtgctgacctttgccctggacagcgtggagaggaagctgctgatgagcagcaccaagggcctgtacagcgacacagagctgcagcagtgcctggccgccgcccaggccgccagccagcacgtgttccgcttctaccgggagagcctgcagaggcgctacagcaagagctag

SEQ ID NO: 202910 - DNA, 708 bp, Artificial Sequence
  derived and/or modified sequence
atggaggaggagacccacaccgacgccaagatccgggccgagaacggcacaggaagtagtccacgcggaccgggatgctcactcagacacttcgcctgcgaacagaaccttttgtctcggcccgatggcagtgcttcttttctgcagggggataccagtgtactggcaggggtgtatggccccgctgaggtgaaggtcagcaaagagatctttaataaggctacacttgaagtcatactgcggcctaaaattggcctgccaggagtggctgaaaagagcagagagcgcttaattaggaatacatgcgaggccgttgtgctcggaacattgcatcccaggacaagcattactgtcgtactccaggtagtgtccgacgcaggttcactactcgcttgctgcttgaacgcagcttgtatggcattggtggacgctggggttcctatgcgcgcactgttttgcggcgtagcctgtgcactcgattcagacggcaccttggtcctcgatcccacatctaagcaggagaaggaagccagggcagtactgacttttgcactcgactcggtagaaaggaaattgctaatgtcaagcaccaaaggcctctatagcgacacagagttacagcagtgcctggccgcagcacaggccgcgtctcagcacgtattccggttctatcgggaatccctccagcgacgatactcaaaatcttag

SEQ ID NO: 202911 - DNA, 708 bp, Artificial Sequence
  derived and/or modified sequence
atggaggaggagacccatactgacgccaaaatcagagccgagaacgggaccggatctagcccaagagggccaggctgctcacttcgacatttcgcctgtgaacagaatctcctcagtcgacccgatgggagcgcctcctttctgcaaggtgacacaagcgtcctggccggagtctacgggcctgcggaggtgaaggtctctaaggagattttcaacaaagccaccctggaagtcattctgcggccaaaaatcggtcttcccggagtagccgaaaaaagcagagagaggttaatccgtaacacttgtgaagccgtggtcttagggaccctacatccccgaacatctattaccgtggtgcttcaggtggtgagtgacgccggttccctgctggcctgctgtcttaatgctgcctgtatggccctcgtggatgccggagtgcctatgcgcgctctgttttgcggggttgcgtgcgcattggactctgatggcaccttggtgctcgaccctacctcaaaacaagagaaggaagctagagccgtgctgactttcgccctggactccgtcgagcgaaagctattgatgtcgtctactaaggggctctatagcgacacagagttgcagcagtgcttggcggctgcccaggctgcgagccaacatgtgtttcgattttaccgagaatcactccagaggcgatatagcaaaagctag

SEQ ID NO: 202912 - DNA, 708 bp, Artificial Sequence
  derived and/or modified sequence
atggaggaggagacccacaccgacgccaagatcagagccgagaacggcaccggcagcagccccagaggccccggctgcagcctgagacacttcgcctgcgagcagaacctgctgagcagacccgacggcagcgccagcttcctgcagggcgacaccagcgtgctggccggcgtgtacggccccgccgaggtgaaggtgagcaaggagatcttcaacaaggccaccctggaggtgatcctgagacccaagatcggcctgcccggcgtggccgagaagagcagagagagactgatcagaaacacctgcgaggccgtggtgctgggcaccctgcaccccagaaccagcatcaccgtggtgctgcaggtggtgagcgacgccggcagcctgctggcctgctgcctgaacgccgcctgcatggccctggtggacgccggcgtgcccatgagagccctgttctgcggcgtggcctgcgccctggacagcgacggcaccctggtgctggaccccaccagcaagcaggagaaggaggccagagccgtgctgaccttcgccctggacagcgtggagagaaagctgctgatgagcagcaccaagggcctgtacagcgacaccgagctgcagcagtgcctggccgccgcccaggccgccagccagcacgtgttcagattctacagagagagcctgcagagaagatacagcaagagctag

SEQ ID NO: 202913 - protein, 1026 aa, Artificial Sequence
  derived and/or modified sequence
MNLFNLDRFRFEKRNKIEEAPEATPQPSQPGPSSPISLSAEEENAEGEVSRANTPDSDITEKTEDSSVPETPDNERKASISYFKNQRGIQYIDLSSDSEDVVSPNCSNTVQEKTFNKDTVIIVSEPSEDEESQGLPTMARRNDDISELEDLSELEDLKDAKLQTLKELFPQRSDNDLLKLIESTSTMDGAIAAALLMFGDAGGGPRKRKLSSSSEPYEEDEFNDDQSIKKTRLDHGEESNESAESSSNWEKQESIVLKLQKEFPNFDKQELREVLKEHEWMYTEALESLKVFAEDQDMQYVSQSEVPNGKEVSSRSQNYPKNATKTKLKQKFSMKAQNGFNKKRKKNVFNPKRVVEDSEYDSGSDVGSSLDEDYSSGEEVMEDGYKGKILHFLQDASIGELTLIPQCSQKKAQKITELRPFNSWEALFTKMSKTNGLSEDLIWHCKTLIQERDVVIRLMNKCEDISNKLTKQVTMLTGNGGGWNIEQPSILNQSLSLKPYQKVGLNWLALVHKHGLNGILADEMGLGKTIQAIAFLAYLYQEGNNGPHLIVVPASTIDNWLREVNLWCPTLKVLCYYGSQEERKQIRFNIHSRYEDYNVIVTTYNCAISSSDDRSLFRRLKLNYAIFDEGHMLKNMGSIRYQHLMTINANNRLLLTGTPVQNNLLELMSLLNFVMPHMFSSSTSEIRRMFSSKTKSADEQSIYEKERIAHAKQIIKPFILRRVKEEVLKQLPPKKDRIELCAMSEKQEQLYLGLFNRLKKSINNLEKNTEMCNVMMQLRKMANHPLLHRQYYTAEKLKEMSQLMLKEPTHCEANPDLIFEDMEVMTDFELHVLCKQYRHINNFQLDMDLILDSGKFRVLGCILSELKQKGDRVVLFSQFTMMLDILEVLLKHHQHRYLRLDGKTQISERIHLIDEFNTDMDIFVFLLSTKAGGLGINLTSANVVILHDIDCNPYNDKQAEDRCHRVGQTKEVLVIKLISQGTIEESMLKINQQKLKLEQDMTTVDEGDEGSMPADIATLLKTSMGL

SEQ ID NO: 202914 - DNA, 3081 bp, Artificial Sequence
  derived and/or modified sequence
atgaacctgttcaacctggacagattcagattcgagaagagaaacaagatcgaggaggcccccgaggccaccccccagcccagccagcccggccccagcagccccatcagcctgagcgccgaggaggagaacgccgagggcgaggtgagcagagccaacacccccgacagcgacatcaccgagaagaccgaggacagcagcgtgcccgagacccccgacaacgagagaaaggccagcatcagctacttcaagaaccagagaggcatccagtacatcgacctgagcagcgacagcgaggacgtggtgagccccaactgcagcaacaccgtgcaggagaagaccttcaacaaggacaccgtgatcatcgtgagcgagcccagcgaggacgaggagagccagggcctgcccaccatggccagaagaaacgacgacatcagcgagctggaggacctgagcgagctggaggacctgaaggacgccaagctgcagaccctgaaggagctgttcccccagagaagcgacaacgacctgctgaagctgatcgagagcaccagcaccatggacggcgccatcgccgccgccctgctgatgttcggcgacgccggcggcggccccagaaagagaaagctgagcagcagcagcgagccctacgaggaggacgagttcaacgacgaccagagcatcaagaagaccagactggaccacggcgaggagagcaacgagagcgccgagagcagcagcaactgggagaagcaggagagcatcgtgctgaagctgcagaaggagttccccaacttcgacaagcaggagctgagagaggtgctgaaggagcacgagtggatgtacaccgaggccctggagagcctgaaggtgttcgccgaggaccaggacatgcagtacgtgagccagagcgaggtgcccaacggcaaggaggtgagcagcagaagccagaactaccccaagaacgccaccaagaccaagctgaagcagaagttcagcatgaaggcccagaacggcttcaacaagaagagaaagaagaacgtgttcaaccccaagagagtggtggaggacagcgagtacgacagcggcagcgacgtgggcagcagcctggacgaggactacagcagcggcgaggaggtgatggaggacggctacaagggcaagatcctgcacttcctgcaggacgccagcatcggcgagctgaccctgatcccccagtgcagccagaagaaggcccagaagatcaccgagctgagacccttcaacagctgggaggccctgttcaccaagatgagcaagaccaacggcctgagcgaggacctgatctggcactgcaagaccctgatccaggagagagacgtggtgatcagactgatgaacaagtgcgaggacatcagcaacaagctgaccaagcaggtgaccatgctgaccggcaacggcggcggctggaacatcgagcagcccagcatcctgaaccagagcctgagcctgaagccctaccagaaggtgggcctgaactggctggccctggtgcacaagcacggcctgaacggcatcctggccgacgagatgggcctgggcaagaccatccaggccatcgccttcctggcctacctgtaccaggagggcaacaacggcccccacctgatcgtggtgcccgccagcaccatcgacaactggctgagagaggtgaacctgtggtgccccaccctgaaggtgctgtgctactacggcagccaggaggagagaaagcagatcagattcaacatccacagcagatacgaggactacaacgtgatcgtgaccacctacaactgcgccatcagcagcagcgacgacagaagcctgttcagaagactgaagctgaactacgccatcttcgacgagggccacatgctgaagaacatgggcagcatcagataccagcacctgatgaccatcaacgccaacaacagactgctgctgaccggcacccccgtgcagaacaacctgctggagctgatgagcctgctgaacttcgtgatgccccacatgttcagcagcagcaccagcgagatcagaagaatgttcagcagcaagaccaagagcgccgacgagcagagcatctacgagaaggagagaatcgcccacgccaagcagatcatcaagcccttcatcctgagaagagtgaaggaggaggtgctgaagcagctgccccccaagaaggacagaatcgagctgtgcgccatgagcgagaagcaggagcagctgtacctgggcctgttcaacagactgaagaagagcatcaacaacctggagaagaacaccgagatgtgcaacgtgatgatgcagctgagaaagatggccaaccaccccctgctgcacagacagtactacaccgccgagaagctgaaggagatgagccagctgatgctgaaggagcccacccactgcgaggccaaccccgacctgatcttcgaggacatggaggtgatgaccgacttcgagctgcacgtgctgtgcaagcagtacagacacatcaacaacttccagctggacatggacctgatcctggacagcggcaagttcagagtgctgggctgcatcctgagcgagctgaagcagaagggcgacagagtggtgctgttcagccagttcaccatgatgctggacatcctggaggtgctgctgaagcaccaccagcacagatacctgagactggacggcaagacccagatcagcgagagaatccacctgatcgacgagttcaacaccgacatggacatcttcgtgttcctgctgagcaccaaggccggcggcctgggcatcaacctgaccagcgccaacgtggtgatcctgcacgacatcgactgcaacccctacaacgacaagcaggccgaggacagatgccacagagtgggccagaccaaggaggtgctggtgatcaagctgatcagccagggcaccatcgaggagagcatgctgaagatcaaccagcagaagctgaagctggagcaggacatgaccaccgtggacgagggcgacgagggcagcatgcccgccgacatcgccaccctgctgaagaccagcatgggcctgtag

SEQ ID NO: 202915 - DNA, 957 bp, Artificial Sequence
  derived and/or modified sequence
atgaacctgttcaacctggacagattcagattcgagaagagaaacaagatcgaggaggcccccgaggccaccccccagcccagccagcccggccccagcagccccatcagcctgagcgccgaggaggagaacgccgagggcgaggtgagcagagccaacacccccgacagcgacatcaccgagaagaccgaggacagcagcgtgcccgagacccccgacaacgagagaaaggccagcatcagctacttcaagaaccagagaggcatccagtacatcgacctgagcagcgacagcgaggacgtggtgagccccaactgcagcaacaccgtgcaggagaagaccttcaacaaggacaccgtgatcatcgtgagcgagcccagcgaggacgaggagagccagggcctgcccaccatggccagaagaaacgacgacatcagcgagctggaggacctgagcgagctggaggacctgaaggacgccaagctgcagaccctgaaggagctgttcccccagagaagcgacaacgacctgctgaagctgatcgagagcaccagcaccatggacggcgccatcgccgccgccctgctgatgttcggcgacgccggcggcggccccagaaagagaaagctgagcagcagcagcgagccctacgaggaggacgagttcaacgacgaccagagcatcaagaagaccagactggaccacggcgaggagagcaacgagagcgccgagagcagcagcaactgggagaagcaggagagcatcgtgctgaagctgcagaaggagttccccaacttcgacaagcaggagctgagagaggtgctgaaggagcacgagtggatgtacaccgaggccctggagagcctgaaggtgttcgccgaggaccaggacatgcagtacgtgagccagagcgaggtgcccaacggcaagaagaaggcccagaagaagaagaagtag

SEQ ID NO: 202916 - DNA, 3081 bp, Artificial Sequence
  derived and/or modified sequence
atgaacctgttcaaccttgatagatttcggttcgaaaaacgcaataagattgaagaggcccctgaggccacgcctcagcctagccaaccaggcccttcttcccctatttccctgtccgccgaggaggagaatgccgaaggcgaggtctctcgtgctaatactccagacagcgatataaccgagaagaccgaagacagctcggtgcccgaaactcccgataacgagaggaaagcatctatcagctactttaagaaccaaagagggatacagtatatcgatctgagtagcgatagtgaggacgtggtgagtcccaattgctcaaatacagtgcaagaaaagacttttaataaagacactgtgatcatagtatccgaaccctcagaggatgaagagtcgcagggcctccccactatggctcgtcggaatgatgacataagcgagctcgaggacctttcggagctcgaggaccttaaggatgcaaaactccagactcttaaagagttgtttccccagcgttctgacaacgacctgctgaaactcattgagagcacatcaacaatggacggagccatagccgcagccctgctgatgttcggggatgccggggggggccctaggaagcgcaagctttcttcttctagtgagccatacgaggaagatgagttcaacgatgaccagagcatcaagaagacaagactggatcatggggaggagtcaaatgagtccgccgaaagcagcagtaattgggaaaagcaggagtccattgtcctgaagcttcaaaaggagtttccaaactttgataagcaggaactcagggaggtgctcaaggaacatgaatggatgtataccgaggccctcgagtcccttaaggtttttgctgaggatcaggacatgcagtacgtgtcccaaagcgaggtgccgaatggcaaagaagtaagctcaagatcgcagaactatcccaaaaacgccactaaaactaaactcaaacagaaatttagtatgaaggctcagaacggctttaacaaaaaacggaaaaagaacgttttcaacccaaaaagggtggtcgaagattccgagtatgactccggttctgacgtgggatcaagtctggacgaagactactctagcggagaggaggtcatggaggatggttataaagggaagatactgcatttccttcaggatgccagtatcggagaactgacgttgataccgcagtgttctcagaagaaggcccagaaaataaccgagctccgccccttcaactcctgggaggcgctgttcactaagatgtccaagacaaatgggctgtctgaggatctaatctggcattgtaaaacactcatacaggaaagagacgtcgtaatacggctgatgaacaaatgcgaggatataagcaacaaactcacgaaacaggtcactatgctcacagggaacggcggcggatggaatatagagcagccttcgatactaaaccagagcctctcacttaagccctatcagaaggtagggctaaactggctggccctcgtccataaacacggcctaaatgggattctggctgacgagatgggtcttggcaaaacaatccaagccatcgccttcttggcttatttgtatcaggaaggcaataatggaccccatttgatcgttgtgcctgcaagcactattgacaattggctgcgggaagtgaacctgtggtgtccaacacttaaggtgctctgttattacggatctcaggaggagaggaagcaaatccgcttcaatatccatagccggtatgaagattacaatgtgattgtcacgacttataattgcgccataagcagtagcgatgaccgcagcctgtttcgcaggctaaagcttaattacgccatatttgacgaagggcacatgctgaagaatatggggagcatacggtaccagcatctgatgacaatcaacgcgaataaccggctacttctaacgggaaccccagtccagaacaatcttttagaactgatgtccttacttaacttcgttatgccacacatgtttagctccagtacatctgaaattcgaagaatgttcagttctaagaccaaatccgccgatgagcaaagcatttacgaaaaagagcggattgcccacgctaagcagataatcaagccatttatcttacgacgagttaaggaggaagtgttaaaacagctgccgcccaagaaggataggatcgagttatgcgctatgagcgagaaacaggaacagttgtatttaggcctgttcaatcgactgaagaagtcaatcaacaatcttgagaagaacacggagatgtgtaacgtgatgatgcaattgagaaagatggcgaatcacccactgcttcaccggcagtactacactgctgagaaactcaaggagatgtcccaactgatgctgaaggagcctacccattgcgaggctaatccggacctcatcttcgaagatatggaggtcatgacagattttgagctccacgttttatgcaaacagtacaggcacataaacaacttccagcttgatatggacctgatattagacagcggcaagtttcgggtgttgggatgtatcctgtctgaactcaagcagaagggcgacagggtggtgctgttctctcagtttactatgatgcttgatattctggaggtgctgctgaagcaccaccaacaccgatacttacgtcttgacggtaagacgcagattagtgaacgaatccatctgatagatgaatttaacacggacatggatatttttgtgttcctcctttccaccaaagctggcggactgggcattaacctgacctctgctaacgtggtcatattgcacgacattgactgcaacccatacaatgacaagcaggccgaagaccgttgccatcgggtgggccagacaaaggaagtgctggtgattaagctcataagtcaggggacaattgaggagagtatgctgaagattaaccaacagaagctgaagcttgagcaggacatgaccaccgtagacgaaggggatgaaggctctatgcccgccgacatcgctactttgctcaagacatcgatgggcctctag

SEQ ID NO: 202917 - DNA, 957 bp, Artificial Sequence
  derived and/or modified sequence
atgaatctgttcaacctagatagattccgctttgagaagcggaacaagatcgaggaggcgccggaggctacaccgcagccgagccaacccgggccgtccagtcccatctcactgagcgccgaagaagagaacgcggaaggggaagtctcacgggccaacactcctgacagcgacattacagaaaaaactgaggactctagtgtgcctgaaacccctgataatgagaggaaagcctcaatctcgtactttaagaaccagcggggcatccagtatatcgatttaagttctgacagcgaagatgtggttagtcccaactgctcgaacactgtgcaagagaaaacgtttaacaaggacactgttattattgtgagcgagcctagcgaagatgaggagtctcaaggactccccaccatggctagacgaaacgatgacatctccgaactggaggatctctccgaactggaggacctcaaagacgcaaagttgcagacactgaaggaactgttcccacagcggtccgacaatgacctcttaaaactgatcgagtccacttcaaccatggatggagcaatcgctgctgccctgctgatgtttggcgacgccggaggcgggcctcggaagagaaaactgtccagtagctcagagccctatgaggaggacgagttcaacgacgaccaatccattaagaagacacgactggatcacggggaggaaagtaacgagagtgccgagtcctccagcaactgggaaaaacaggagtccatagtcctaaaacttcagaaggagtttcctaacttcgataagcaggagttgcgggaagtcctgaaagagcacgagtggatgtacaccgaggccctggaatccctgaaagttttcgccgaagaccaggacatgcagtacgtttctcaatccgaagtgccaaatgggaaaaagaaagcccagaagaaaaagaagtag

SEQ ID NO: 202918 - DNA, 3081 bp, Artificial Sequence
  derived and/or modified sequence
atgaacctcttcaacctggaccgcttccgctttgagaagaggaacaagattgaggaggcccctgaggccaccccccagcccagccagcccggccccagcagccccatcagcctgtctgctgaggaggagaatgctgagggggaggtgtcccgggccaacaccccagacagcgacatcacagagaagacagaggacagctctgtgcctgagaccccagacaatgaaaggaaggccagcatctcctacttcaagaaccagaggggcatccagtacatcgacctgagcagtgacagtgaagatgtggtgagccccaactgcagcaacacagtgcaggagaagaccttcaacaaggacaccgtcatcatcgtgtctgagcccagtgaagatgaggagagccagggcctgcccaccatggccaggagaaatgatgacatcagcgagctggaggacctgtctgagctggaggacctgaaggatgccaagctgcagaccctgaaggagctgttcccccagaggagtgacaatgacctgctgaagctgattgagagcaccagcaccatggatggagccatcgctgctgccctgctgatgtttggagatgctgggggcggccccaggaagaggaagctgagcagcagcagcgagccctatgaagaagatgagttcaatgatgaccagagcatcaagaagacccggctggaccatggagaggagagcaatgaatctgctgagagcagcagcaactgggagaagcaggagagcatcgtgctgaagctgcagaaggagttccccaactttgacaagcaggagctgcgggaggtgctgaaggagcacgagtggatgtacacagaggccctggagagcctgaaggtgtttgctgaggaccaggacatgcagtatgtgtcccagagcgaggtgcccaacgggaaggaggtgagcagccgcagccagaactaccccaagaatgccaccaagaccaagctgaagcagaagttctccatgaaggcccagaatggcttcaacaagaagaggaagaagaatgtgttcaaccccaagagggtggtggaggacagtgaatatgacagcggcagtgatgtgggcagcagcctggatgaggactacagcagcggggaggaggtgatggaggatggctacaagggcaagatcctgcacttcctgcaggatgccagcatcggggagctgaccctcatcccccagtgcagccagaagaaggcccagaagatcacagagctgcggcccttcaacagctgggaggccctcttcaccaagatgagcaagaccaacggcctgtctgaagatctcatctggcactgcaagaccctcatccaggagagagatgtggtgatccggctgatgaacaagtgtgaggacatcagcaacaagctgaccaagcaggtgaccatgctgactggaaatggaggcggctggaacatcgagcagcccagcatcctgaaccagagcctgagcctgaagccctaccagaaggtgggcctgaactggctggccctggtgcacaagcacggcctgaatggcatcctggctgatgagatgggcctgggcaagaccatccaggccatcgccttcctggcctacctgtaccaggagggcaacaacggcccccacctgattgtggtgcctgccagcaccatcgacaactggctgcgggaggtgaacctgtggtgccccaccctgaaggtgctgtgctactacggcagccaggaggagaggaagcagatccgcttcaacatccacagccgctatgaggactacaacgtcatcgtgaccacctacaactgtgccatcagcagcagtgatgacaggagcctcttccggcggctgaagctgaactatgccatctttgatgagggccacatgctgaagaacatgggcagcatccgctaccagcacctgatgaccatcaatgccaacaaccggctgctgctgaccggcacccctgtgcagaacaacctgctggagctgatgagcctgctgaactttgtgatgccccacatgttcagcagcagcaccagcgagatccggaggatgttcagcagcaagaccaagtctgcagatgagcagagcatctatgagaaggagcgcatcgcccacgccaagcagatcatcaagcccttcatcctgcggcgggtgaaggaggaggtgctgaagcagctgccccccaagaaggaccgcatcgagctgtgtgccatgtctgagaagcaggagcagctgtacctgggcctcttcaaccggctgaagaagagcatcaacaacctggagaagaacacagagatgtgcaatgtgatgatgcagctgaggaagatggccaaccaccccctgctgcaccggcagtactacacagctgagaagctgaaggagatgagccagctgatgctgaaggagcccacccactgtgaggccaacccagacctgatctttgaggacatggaggtgatgacagactttgagctgcacgtgctgtgcaagcagtaccgccacatcaacaacttccagctggacatggacctgatcctggacagcggcaagttccgggtgctgggctgcatcctgtctgagctgaagcagaagggggacagagtggtgctcttcagccagttcaccatgatgctggacatcctggaggtgctgctgaagcaccaccagcaccgctacctgcggctggatggcaagacccagatcagcgagcgcatccacctgattgatgagttcaacacagacatggacatctttgtgttcctgctgagcaccaaggccggcggcctgggcatcaacctgaccagcgccaacgtggtgatcctgcatgacatcgactgcaacccctacaatgacaagcaggccgaggaccgctgccaccgggtgggccagaccaaggaggtgctggtgatcaagctgatcagccagggcaccatcgaggagagcatgctgaagatcaaccagcagaagctgaagctggagcaggacatgaccaccgtggatgaaggagatgagggctccatgcctgctgacatcgccaccctgctgaagacctccatgggcctgtag

SEQ ID NO: 202919 - DNA, 957 bp, Artificial Sequence
  derived and/or modified sequence
atgaacctcttcaacctggaccgcttccgctttgagaagaggaacaagattgaggaggcccctgaggccaccccccagcccagccagcccggccccagcagccccatcagcctgtctgctgaggaggagaatgctgagggggaggtgtcccgggccaacaccccagacagcgacatcacagagaagacagaggacagctctgtgcctgagaccccagacaatgaaaggaaggccagcatctcctacttcaagaaccagaggggcatccagtacatcgacctgagcagtgacagtgaagatgtggtgagccccaactgcagcaacacagtgcaggagaagaccttcaacaaggacaccgtcatcatcgtgtctgagcccagtgaagatgaggagagccagggcctgcccaccatggccaggagaaatgatgacatcagcgagctggaggacctgtctgagctggaggacctgaaggatgccaagctgcagaccctgaaggagctgttcccccagaggagtgacaatgacctgctgaagctgattgagagcaccagcaccatggatggagccatcgctgctgccctgctgatgtttggagatgctgggggcggccccaggaagaggaagctgagcagcagcagcgagccctatgaagaagatgagttcaatgatgaccagagcatcaagaagacccggctggaccatggagaggagagcaatgaatctgctgagagcagcagcaactgggagaagcaggagagcatcgtgctgaagctgcagaaggagttccccaactttgacaagcaggagctgcgggaggtgctgaaggagcacgagtggatgtacacagaggccctggagagcctgaaggtgtttgctgaggaccaggacatgcagtatgtgtcccagagcgaggtgcccaacgggaagaagaaggcccagaagaagaagaagtag

SEQ ID NO: 202920 - DNA, 3081 bp, Artificial Sequence
  derived and/or modified sequence
atgaacctgttcaacctggaccggttccggttcgagaagcggaacaagattgaagaagctccggaggccacacctcaacctagccagccagggccatcctcaccaatttcattatcagctgaggaggaaaatgctgagggagaggtttcgcgcgcaaacacccctgatagcgacataaccgaaaagacagaagatagcagtgtgcccgagacgccggataatgagcgcaaagcctccatttcttattttaagaaccaacgagggatacagtatattgacctttctagcgatagcgaggacgttgtgagtcccaattgttccaacaccgttcaagaaaaaacgttcaacaaggacacagtcattatcgtcagcgagccaagcgaggacgaagagtcacaaggcctgcccacaatggcgcggaggaatgacgacatctctgagctcgaggatctctccgaactggaagacctgaaggacgctaaactgcagaccttgaaagaactatttccgcagagatccgacaacgacctccttaaactaatcgaatccacatccacgatggatggcgccatcgcagccgctctcttgatgtttggagatgccggaggcggccctaggaagcggaagctgagctccagttcggagccttatgaagaagacgagtttaacgatgaccagtcaatcaaaaagaccagattggaccatggcgaagagagcaacgagagtgcagagtcaagttccaactgggagaagcaggagagtatcgttctcaagctacagaaagaatttccaaattttgataagcaggaactgagggaggtgctgaaggaacatgagtggatgtacaccgaggccttagagtcactgaaagtgtttgccgaagatcaggatatgcagtatgtctctcagagcgaagttccaaatggcaaggaggtgtcaagtcggtctcagaactacccgaagaatgccaccaagaccaagctgaaacagaagttctcaatgaaagctcagaacggtttcaacaaaaagagaaagaagaatgtgttcaatccgaagagagtggtggaagatagcgaatacgactcaggttccgatgtggggtccagcttggacgaagactattcatctggggaggaggtgatggaagatggatataagggcaagattttacacttcttgcaggacgctagcattggtgaactcactttaatccctcagtgctctcagaaaaaggcccaaaagataacggagttgaggccttttaatagttgggaggccctgtttacaaaaatgagcaagacaaatggcctctcggaggacctaatatggcactgcaaaacactgattcaggagcgcgacgtggtgattcgtttgatgaataaatgtgaggatattagcaataagctgacaaagcaggttaccatgctgacgggcaacgggggaggctggaacatcgagcagcccagtatcctcaatcagagcctgagcctgaagccgtatcagaaggtcgggttgaactggctagccctggtgcataagcacgggctgaacggcatcctggctgatgaaatgggactgggcaagactatccaggcaattgcctttctagcctacctgtatcaggagggaaataatgggccacacctgatagtcgtgcctgccagcacaatagacaattggctccgggaagtgaatctttggtgcccaacactgaaagtgttgtgttactacggcagccaggaggaacgcaaacagatccggtttaatattcactcacgctatgaggactacaacgttatcgttactacatacaattgcgccattagtagcagcgacgacaggagtctcttcaggaggctaaagttaaattacgccatattcgacgagggccatatgctgaagaacatgggttctattcgctaccagcacttaatgacgataaatgctaacaatcgattgctgctgaccggcactccagttcagaataacctgctggaactcatgtccctgctgaactttgtcatgccccacatgttctcatctagcacttcggagatccgtcgtatgtttagtagcaaaactaagagtgccgacgaacagtcgatatacgaaaaggagaggatcgctcacgcaaaacagattataaagccctttattctcagaagagtgaaggaagaggtcctcaaacagctgcctccgaagaaggataggatcgagctgtgtgccatgtccgagaagcaggagcaactgtatctcggcctgtttaatcggcttaaaaagtcaattaacaacctggaaaagaacacagaaatgtgtaacgtaatgatgcagctgcggaaaatggctaaccacccccttctgcatagacagtactataccgctgagaaactgaaggagatgtcacagcttatgttaaaagagccaacccattgtgaggctaatcccgaccttatcttcgaggatatggaggtgatgactgactttgagttgcacgtgctgtgcaaacaatacagacacatcaataacttccagttggatatggacttgattctggacagcgggaaattccgcgtcctcggctgcattctctctgagttgaaacagaaaggagatagagtagttctattctctcagttcaccatgatgctggacatcctggaagtgttgctgaagcatcatcaacaccggtacctgcgtctggacggaaagactcaaatctctgaacgtatccacctgatcgacgaattcaacacagatatggacattttcgtgttcctgctgtcaacgaaagctgggggcctcgggattaatcttacctccgcgaacgtcgttatcctgcacgacatcgactgcaacccctacaatgataagcaggcagaagacaggtgccatagggtgggccaaacgaaagaagtgctagtgatcaaacttatttcacaaggaaccattgaagaaagtatgctcaagataaatcaacagaagctgaagcttgaacaggacatgacaacagtagacgagggcgacgaggggtctatgcctgcagacatcgcaacgctcttgaagacaagcatgggtttgtag

SEQ ID NO: 202921 - DNA, 957 bp, Artificial Sequence
  derived and/or modified sequence
atgaacctgttcaacctggaccggttccggttcgagaagcggaacaagattgaggaagcacctgaggccacaccccaacccagtcagcccggccctagctcacctatttcactcagtgccgaagaggagaacgcggaaggggaggtcagccgcgcaaacactccagactcggatattacagagaaaacggaggactcctctgtgccggagactcccgataatgagcgcaaagcctccatctcctatttcaagaatcaacgaggcatccagtatatcgatctgagcagtgacagcgaagatgtggtttctcctaactgctcaaataccgtccaggaaaagacattcaataaggacaccgtgatcatcgttagcgaacccagtgaagacgaggagtctcagggcctgccgaccatggccagaaggaacgacgatatcagtgagctggaagatctgtccgagctcgaggacctgaaggacgccaagcttcagaccctgaaagagctgttcccacagcggagcgacaacgatctgcttaaactgatcgagagtacctccactatggacggagccatcgctgccgcattgttgatgttcggtgacgctggagggggcccgcggaaaagaaaactctcaagcagctccgagccatatgaggaggatgaatttaacgatgaccagagtattaagaaaactcggcttgatcatggagaggagtccaatgagagtgcagagtcaagcagcaattgggagaaacaggagtctattgtgctgaaactgcagaaagagttccccaatttcgacaaacaggagctgcgcgaggtgttgaaagaacacgagtggatgtatacagaagcattggagagcctcaaggtctttgctgaggaccaggatatgcagtacgtgtcgcagagcgaggtgccaaatgggaaaaagaaggctcaaaaaaagaagaagtag

SEQ ID NO: 202922 - DNA, 3081 bp, Artificial Sequence
  derived and/or modified sequence
atgaatctatttaacctggatcggtttcggttcgaaaagcggaacaagattgaagaagccccagaggccacaccacagcctagtcagcccggtcccagctctcctatttctctgtcagccgaagaagaaaacgctgaaggcgaggtgtccagagcaaacactccagactcagatatcacagagaagacagaggatagcagtgtgccagaaacccctgacaatgaacgcaaagcctcaatatcttacttcaaaaaccagcgaggcatccagtatatcgatctctcctcagactcggaagatgttgtgtccccaaactgttctaacactgtccaggagaagaccttcaataaagataccgtgattatagtttccgagcctagcgaggacgaagagtcccagggactgccaacaatggctcgaaggaatgacgacatctctgagcttgaagacctcagtgaattggaggatctcaaggatgccaagctgcaaacactcaaggaactgttcccacagaggagcgataatgaccttctcaagttgatagagtccacttcaaccatggatggcgctatcgccgcagctctcctgatgttcggagacgctggcggaggcccacgcaaacgcaagcttagttcctccagtgagccctatgaagaagacgagttcaacgacgatcaatcgataaagaaaacgcgcctcgaccacggtgaggaaagcaacgagagcgcggagagctctagtaactgggagaagcaagagagcatcgtacttaaactccaaaaggaatttcctaactttgataaacaggaactgcgcgaggttctaaaggagcacgagtggatgtacactgaggcattggaatccctgaaagtgttcgccgaggatcaagacatgcagtacgtctcccaaagtgaagtcccaaatggaaaggaagtgtcctctcgaagtcagaactatcccaagaacgcaacgaagacaaagttgaaacagaaattcagcatgaaggcccagaatgggtttaataaaaaacgcaagaagaacgtgtttaaccccaagcgggtggtggaggattccgagtatgactcgggttcagacgtcgggtcttccttggatgaggattacagcagcggggaggaagtaatggaagatggatataagggcaagattttgcatttcctgcaggacgccagcatcggtgagctcactctgattccgcagtgcagccaaaaaaaggcccagaagatcaccgagcttcgcccattcaattcctgggaagctttatttacaaagatgtccaagaccaacggtctttcggaagacctgatctggcattgcaaaactctgatacaggagcgtgatgtggtgatccggctgatgaataagtgcgaagatatctccaataagctcacgaagcaggtgaccatgttaactggtaacgggggaggttggaacattgaacaaccatctattctgaatcagtccctcagtctcaaaccttaccagaaggttggcctcaattggctggcccttgtccataaacatggtcttaacggaatcctcgccgacgaaatggggctcggcaaaactattcaggcaatcgcattccttgcctatctatatcaagagggcaataatgggccacaccttattgtggttcccgcttctaccatcgataactggctacgggaggtcaatctttggtgccctacgctgaaagttctgtgctattatggttctcaggaagaacgaaagcagatcagattcaatatacactctcgatacgaggattacaatgtgatagtcacaacatataattgtgcaatctcttcaagtgatgacagaagcctttttcggcgactgaaactgaactacgctatctttgacgaaggccacatgcttaagaatatgggcagcatcaggtatcaacatctgatgactataaacgccaataataggctgttactgactggaacacctgtccagaacaatcttcttgagttgatgtctctcttaaacttcgtgatgccccacatgttcagttctagtacatctgagatcaggagaatgttttcctctaagacaaagtcagcagacgagcagagtatctacgaaaaagaacggattgcacatgctaagcagatcattaagcctttcatcctgaggagggtcaaggaagaggttctcaaacagctgccccctaaaaaagatcggattgagctttgcgcgatgagcgaaaagcaggaacaactgtatctgggcttattcaataggctgaaaaaatccattaataacttagaaaagaatactgagatgtgcaatgtaatgatgcagctgcgcaagatggccaatcatcctctgctccaccggcaatattatactgccgagaaactgaaagagatgtcccaactcatgctgaaggagcctacacactgcgaggccaacccggatttaatttttgaggacatggaggtgatgacagatttcgaattgcacgtgctttgcaaacaatacaggcacattaacaattttcagctcgatatggacttaatcctggactctggcaagttccgggtcctgggatgtatcttgtccgaactgaagcagaaaggcgaccgcgtagtgctgttttcgcaatttaccatgatgttggacattctcgaagtgctcctgaaacaccatcaacatcggtacttacgcttggacgggaaaactcagatcagtgagagaatacatttgattgacgagttcaatacagatatggacatcttcgtcttcctcctgtctactaaagccggaggactgggaataaacctgacttcagccaacgtcgtcatcctgcatgacatagactgcaacccatataacgataaacaggccgaggacagatgtcaccgcgtagggcaaacaaaagaggtgctcgtgatcaaactaatctctcaaggaaccatagaggaatccatgctgaaaataaatcagcagaagctgaagttggaacaggatatgacgaccgtggatgagggtgatgaggggagcatgcccgctgatatagccacgctgctgaagacttctatggggctctag

SEQ ID NO: 202923 - DNA, 957 bp, Artificial Sequence
  derived and/or modified sequence
atgaacctgtttaacctagaccgctttcgatttgaaaagcggaacaagattgaggaagcaccagaggctacaccgcagccttctcagcctggaccctcttccccaatttccctgagtgcggaagaagaaaacgctgagggggaagtctctagagctaataccccagacagcgacattacagagaagactgaggacagctctgtgcctgaaactcctgacaatgagcgcaaggcctccatctcctacttcaagaatcagcgcggaatccagtacatagacttgtcctccgacagcgaagatgtggtctcacccaactgctccaacactgttcaggaaaagactttcaataaagacactgtcatcatcgtgtccgaaccttcagaggatgaggagtctcaaggtctgcctacgatggcacggaggaacgatgacataagcgaactagaagacctctccgaattggaggatctgaaagatgccaagcttcagactttaaaggagctcttccctcaaagatccgacaatgacctgctcaagctgatagagtccaccagcaccatggatggtgccattgctgccgctctgctcatgttcggagatgccggtgggggaccccgtaagaggaagctgtcatcatcctctgagccttacgaagaggacgagtttaacgatgaccagtctattaagaagacccgacttgatcatggcgaggaatccaacgagtctgccgagagttcttctaattgggagaaacaagagtcaatcgtactgaaactgcaaaaagaattcccaaatttcgacaaacaggaacttcgggaagttctaaaggagcatgaatggatgtacaccgaggctctcgagtccctgaaggtgtttgccgaggaccaggacatgcaatacgtcagccagtctgaggtgcccaatgggaagaagaaagcccagaagaagaaaaagtag

SEQ ID NO: 202924 - DNA, 4912 bp, Artificial Sequence
  derived and/or modified sequence
gggaacgtgcctgcgcgtgcttggatagttcatttaaagcccccatccctgcaaggtggtgctttctaccaatatgaatcttttcaacctggaccgttttcgctttgagaaaaggaataagattgaggaagcgcccgaagcaacccctcaaccttcccagcctggcccttcttcaccaatttctcttagtgctgaagaggagaatgctgaaggggaagttagcagggcaaacactcctgattcagatataactgaaaaaacagaagattctagtgttccagaaactccagataatgaaagaaaagcaagtatatcatatttcaaaaatcaaagaggaatacagtatattgatttgtcttctgatagtgaagatgtcgtttccccaaattgctccaatacagttcaagagaaaacattcaacaaagatacagtgattatagtttctgagccatctgaagatgaagagtcccaaggccttcctaccatggcacgtagaaatgatgatatttcagaactggaagacctttcggaattggaagaccttaaagatgctaaacttcagactttgaaggaactttttccacaaagaagtgacaatgatttacttaagttgattgaatcaacaagcactatggatggagcaattgctgctgccttgctgatgtttggtgatgcaggtggtgggcccaggaaaagaaaattatcttcttcttcagagccatatgaggaagatgaatttaatgatgatcaatctataaaaaagacaagactggatcatggagaggaatcaaatgagtctgcagaatctagcagtaattgggaaaagcaggaaagtattgtactgaaattgcaaaaggaatttcccaattttgataaacaggaacttagagaagtactcaaggaacatgaatggatgtacacagaagctttagaatctctaaaagtgtttgcagaagaccaagatatgcaatatgtatcacaaagtgaggttccaaatggaaaagaagtttcttcaagaagtcaaaattaccctaaaaatgcaactaaaacaaaactaaaacagaaattttcaatgaaagcacaaaatggctttaacaagaaacgtaaaaaaaatgtttttaatccaaagagagttgttgaagactctgaatatgattcaggttctgatgtcggtagttcactagatgaggactatagtagtggtgaagaagtgatggaggatggctataaaggtaaaattcttcacttccttcaagatgcttcaattggtgaacttactttgattcctcagtgttctcagaaaaaggctcagaagataacagaactccggccctttaatagttgggaggctctgttcacaaagatgtccaaaactaatggcttatcagaagatttgatatggcactgtaaaacactgatccaagaaagagatgtagttataaggcttatgaacaaatgtgaagacatttcaaataaattgaccaaacaagttaccatgcttactggaaatggaggtggatggaacatagaacaaccttccattctaaaccaaagtttgtcactcaagccctatcagaaggttggtttgaattggctggcattggtacataaacatggacttaatggcattttggcagatgaaatgggcctaggaaaaactattcaagccattgcatttctggcatacctctatcaggagggtaataatggtcctcatttgatcgttgttccagcttcaactatagataactggttaagggaagttaatttatggtgccctactttgaaggtcctctgttactatggttctcaagaagaacgtaaacaaattagatttaacattcatagtagatatgaagattacaatgtaattgtgaccacatataactgtgcgatcagcagttctgatgaccgtagtctgtttcgacggctgaaacttaattacgcaatttttgatgagggccatatgctgaagaatatgggctccattcgctaccagcaccttatgacaattaatgcaaataaccgtttgctgctcacaggcacacctgtacagaacaatctgttagaactcatgtcgctgttgaattttgttatgccacacatgtttagtagtagcaccagtgaaatacgaagaatgttttcctctaagacaaaatcagcagatgagcaaagcatatatgaaaaggagagaatagcacatgcaaaacaaattataaagccatttattctcagaagagtaaaagaagaggttctcaagcagttaccccccaagaaagatcgaattgagttgtgtgcaatgtcggagaagcaggagcaactctatttgggtcttttcaacagattgaaaaaatctatcaataacttggaaaaaaacacagaaatgtgcaatgtcatgatgcagttgaggaaaatggccaatcatcctttattacatcgccaatattacacagctgaaaaactcaaggaaatgtctcagcttatgctaaaggaacctacacattgtgaggctaaccctgacctgatctttgaagatatggaagttatgacagacttcgaactacatgtactttgtaaacagtaccgacacattaataactttcagttagacatggacttgattttagattctggaaaatttcgagttttaggatgcatcttgtctgaattgaaacagaagggtgatagagttgtgttatttagccaatttaccatgatgctggatatcttagaggttctattaaaacatcatcagcataggtacctcagattagatggaaagactcagatttctgaaaggattcatctaattgatgagtttaataccgatatggatatctttgtgtttctgctatcaacaaaagctggtggattaggaataaatctgacttcagcaaatgttgttatacttcacgatattgactgtaatccttataatgacaaacaagcagaagatagatgccatagagtaggccagactaaagaagtactagttataaaactaataagccaagggacgattgaagaatccatgctaaaaattaaccaacagaaattgaaactagaacaggatatgactacagtagatgaaggtgatgaagggagtatgccagcagatatagccacattactaaaaacatcaatgggcctgtgaaataagaactgtgaactctcaattgatgaggaaatatcaacttggtgcactcaaggacatttacattatgatgaccatggggtttatgaacatttataactttttataatttccatattacatttctcatagtatggacaactttttgccactaactgaattctccaaatactcacacgtgaaatttcaaaaaagaagccacaaatatgtagttctgaagatgttgaataatcattttacaaagcagttttctgaatggggattagttggtgattgtttgtaacaaatatgctaatgctttagaaatgtcagtatttttgtaattatttctacctccaaatatatatatattgtctttcactggataatgtgtgtagatttttacatgtgccttatttgacaatgcttatgtcttgtttttgcttgtctcatttgaagttcttttttattatgttaaagaatgcagctgtatagattatatagctttcattttattgctatttgaagcagatgttcaccaatgtcagcaagaactcaacctgaatttaaaggtggcattccatatactaacatcccccaggtcctctcaagtacttctgctgaaacaaatttatttggctaggcactaagttgttttccagtgaatagtaactaaagaagcccctaccttgctccatggattaattccttctgttcattttccaactgcactaattgtgcatattactctgcctaatcttgtgcatgttttcattgatttccctctcccggcttttgcttctcttgaaactgttgcccagtcacttctgctccaattctcttcctctctaaatagtagtttattactgccacatctccatgcatcagcaaaatgttggtgacatttttctagcctggcagaacagattacttaaagctatttcatttcaaagcagactgaatgtgacttcatctaaaggcagcattaggtactgcatggaaataggtcattaacttgaaactcttatcaaaatatattttaccagtttccagaatttccagtacaggaccgcctgaagagagagccattgttcaattccaattcagtgtgagtgacaaagtgaaatttagaagtgaagttgtctatttgatatttaactctttattaaatctttctttaaatttctgcctgtcagtctatattgctgtttttattatacatcagtttctttgtataacttgtgagttccatgtgttttgtttttattatgtaaatatcattataaataaacttatttataaatcaaagatttgttaatttttggaaatcatgcttttcaaagcatcctaacttgctaagatgctaggtagtacgaccctctggatttggaaggcaaataaaactcttacagtgattatttagatattaaagactgagaactcacggcttaaccccagtcttgatggtatattgaacagactgaatatattttaccattacagggctaaaaggagtcttcatgtgttaatactacctccttgtacatcactatacccaaatcagttattcaaattgttaggaattttaccttttaaaatctcataatggatatctcatgttttctgtattaatgtattttcaatgataggctgtttctttttttgttgttattgttgttgttgttatatccatacttttatctctaatgaaatgtagttgggttcttcctgtaatgcgctattatgtcttgggcttaataaaaatatttgtgatcataa

SEQ ID NO: 202925 - DNA, 1209 bp, Artificial Sequence
  derived and/or modified sequence
gcgtcaacttccgggcggatgcccgccagcacggcctccgccgctccccttctttggcccctttgtgtccccgcagtgtcgaggcgcgggccctggcaggtcctttctcgaggcagggggcacggtagcacagggagcttctctttgtgggcgggcgcgaggcccgctagggggttatactggggaacgtgcctgcgcgtgcttggatagttcatttaaagcccccatccctgcaaggtggtgctttctaccaatatgaatcttttcaacctggaccgttttcgctttgagaaaaggaataagattgaggaagcgcccgaagcaacccctcaaccttcccagcctggcccttcttcaccaatttctcttagtgctgaagaggagaatgctgaaggggaagttagcagggcaaacactcctgattcagatataactgaaaaaacagaagattctagtgttccagaaactccagataatgaaagaaaagcaagtatatcatatttcaaaaatcaaagaggaatacagtatattgatttgtcttctgatagtgaagatgtcgtttccccaaattgctccaatacagttcaagagaaaacattcaacaaagatacagtgattatagtttctgagccatctgaagatgaagagtcccaaggccttcctaccatggcacgtagaaatgatgatatttcagaactggaagacctttcggaattggaagaccttaaagatgctaaacttcagactttgaaggaactttttccacaaagaagtgacaatgatttacttaagttgattgaatcaacaagcactatggatggagcaattgctgctgccttgctgatgtttggtgatgcaggtggtgggcccaggaaaagaaaattatcttcttcttcagagccatatgaggaagatgaatttaatgatgatcaatctataaaaaagacaagactggatcatggagaggaatcaaatgagtctgcagaatctagcagtaattgggaaaagcaggaaagtattgtactgaaattgcaaaaggaatttcccaattttgataaacaggaacttagagaagtactcaaggaacatgaatggatgtacacagaagctttagaatctctaaaagtgtttgcagaagaccaagatatgcaatatgtatcacaaagtgaggttccaaatggaaaaaaaaaggctcagaagaagaagaaa

SEQ ID NO: 202926 - protein, 782 aa, Artificial Sequence
  derived and/or modified sequence
MAPSAWAICWLLGGLLLHGGSSGPSPGPSVPRLRLSYRDLLSANRSAIFLGPQGSLNLQAMYLDEYRDRLFLGGLDALYSLRLDQAWPDPREVLWPPQPGQREECVRKGRDPLTECANFVRVLQPHNRTHLLACGTGAFQPTCALITVGHRGEHVLHLEPGSVESGRGRCPHEPSRPFASTFIDGELYTGLTADFLGREAMIFRSGGPRPALRSDSDQSLLHDPRFVMAARIPENSDQDNDKVYFFFSETVPSPDGGSNHVTVSRVGRVCVNDAGGQRVLVNKWSTFLKARLVCSVPGPGGAETHFDQLEDVFLLWPKAGKSLEVYALFSTVSAVFQGFAVCVYHMADIWEVFNGPFAHRDGPQHQWGPYGGKVPFPRPGVCPSKMTAQPGRPFGSTKDYPDEVLQFARAHPLMFWPVRPRHGRPVLVKTHLAQQLHQIVVDRVEAEDGTYDVIFLGTDSGSVLKVIALQAGGSAEPEEVVLEELQVFKVPTPITEMEISVKRQMLYVGSRLGVAQLRLHQCETYGTACAECCLARDPYCAWDGASCTHYRPSLGKRRFRRQDIRHGNPALQCLGQSQEEEAVGLVAATMVYGTEHNSTFLECLPKSPQAAVRWLLQRPGDEGPDQVKTDERVLHTERGLLFRRLSRFDAGTYTCTTLEHGFSQTVVRLALVVIVASQLDNLFPPEPKPEEPPARGGLASTPPKAWYKDILQLIGFANLPRVDEYCERVWCRGTTECSGCFRSRSRGKQARGKSWAGLELGKKMKSRVHAEHNRTPREVEAT

SEQ ID NO: 202927 - DNA, 2349 bp, Artificial Sequence
  derived and/or modified sequence
atggctcccagtgcatgggcgatatgttggctgttgggcgggctacttttacacggaggctcatcaggccccagtcctgggccctctgtccccaggttacgactaagttacagggatctactatctgcgaatagaagcgccatttttctaggccctcaggggtccctgaatttgcaggctatgtatttggacgagtaccgggacagattattcttgggaggacttgatgctctgtattccttaagactcgaccaggcctggcccgatccacgagaagtattgtggccccctcagcccgggcaacgggaggagtgtgtccggaaagggcgcgatcctcttactgaatgtgccaattttgtccgggtgctccaaccacacaataggacccatctgctggcctgcggcacaggcgcctttcagcccacatgtgcattaatcacagttggacatcgaggggagcacgttctccatctggaacccggttctgttgaaagcgggaggggaagatgccctcatgagcctagccgaccgtttgcaagcacattcatagatggcgagttatacactggactaactgccgacttcctcggaagagaagccatgattttcagaagcgggggcccacgcccagctctgcgatcggactcagatcagagcttgctgcacgatcctagattcgtgatggctgcccggattccggagaattccgatcaggacaatgataaggtgtatttttttttctccgaaaccgtgccttctcctgacggggggtcaaaccacgtaaccgtatcaagagtcgggcgggtatgcgtcaacgatgcagggggtcagcgcgtactggtgaataagtggtctacgtttctgaaagcacgacttgtctgttccgtgcctggtcctggcggagctgaaactcacttcgatcagctggaggatgtttttctcttatggcccaaggccggcaaatctctcgaggtctatgctctattctccacagttagcgcggtgtttcagggcttcgctgtgtgcgtataccacatggccgacatttgggaagtgttcaacgggccttttgcccaccgggatgggccacagcatcagtggggtccatacggaggaaaagttccatttccgagaccaggagtatgcccatccaaaatgactgcccaaccaggcagacccttcggtagtactaaggattatcccgacgaggtacttcagtttgcgagggcccatcctctgatgttttggccagtgaggcctagacacgggagaccagttctggtaaagacccaccttgctcagcagcttcaccagatcgtcgttgatcgagtagaggccgaggacggcacctatgatgtcattttcttaggaactgactctggctcagtgctcaaggtaattgcactgcaggccggcgggagcgcggagccagaagaggtggttctggaagagctacaggtgtttaaggttcccacacccattacggagatggaaatctccgtcaagcggcagatgctttatgtgggctcacgtctgggcgtggcccaactgcggctccaccagtgcgaaacatatggaacggcttgtgccgaatgttgtctcgctcgggatccctactgtgcctgggatggcgctagctgcacccactacagacccagcctcggtaaacggcgattcagacggcaggacattcgccacggtaatccggcccttcagtgtttggggcagagccaggaggaagaggcggtaggactcgttgccgcaaccatggtctacggcacagaacacaattccacgtttctggaatgcttgcccaaatcaccccaggctgctgtccggtggcttctccagagaccgggagatgagggaccggaccaggttaagaccgatgagcgcgtgcttcacaccgagaggggattgctgtttaggcgcctcagccgattcgatgccggtacatatacatgcaccacactggagcacggtttcagtcagacggtcgtacgacttgctcttgtggtgatcgtggccagccaactggacaacctgttcccgcccgaaccaaagccagaggagccaccagccaggggaggcttggcctccacccctcctaaagcctggtacaaggatattctgcagcttatcgggtttgctaaccttccacgcgtggacgaatactgcgagcgggtttggtgccggggcaccacagagtgttcagggtgttttaggtcccgatctcgcggaaagcaggccagaggtaagtcctgggccgggctggagctgggtaaaaaaatgaaatcacgggtccatgccgagcacaatagaaccccacgcgaagttgaggcgacctag

SEQ ID NO: 202928 - DNA, 2349 bp, Artificial Sequence
  derived and/or modified sequence
atggcccccagcgcctgggccatctgctggctgctgggcggcctgctgctgcacggcggcagcagcggccccagccctggccccagcgtgccccggctgcggctgagctacagagacctgctgagcgccaacagaagtgccatcttcctgggcccccagggcagcctgaacctgcaggccatgtacctggatgagtacagagacaggctcttcctgggcggcctggatgccctgtacagcctgcggctggaccaggcctggccagacccccgggaggtgctgtggccaccccagcccggccagcgggaggagtgtgtgaggaagggccgggaccccctgacagaatgtgccaactttgtgcgggtgctgcagccccacaacagaacccacctgctggcctgtggcaccggggccttccagcccacctgtgccctgatcaccgtgggccacagaggagagcacgtgctgcacctggagcccggctctgtggagagcggccggggccgctgcccccatgagcccagccggccctttgccagcaccttcattgatggagagctgtacacaggcctgacagctgacttcctgggccgggaggccatgatcttccgcagcggcggccccaggcctgccctgcggagtgacagcgaccagagcctgctgcatgaccccaggtttgtgatggccgcccgcatccctgagaacagcgaccaggacaatgacaaggtgtacttcttcttcagcgagaccgtgcccagcccagatggcggcagcaaccacgtgacagtgtcccgggtgggccgggtgtgtgtgaatgatgctgggggccagagggtgctggtgaacaagtggagcaccttcctgaaggcccggctggtgtgcagcgtgcccggccctggaggagctgagacccactttgaccagctggaggatgtgttcctgctgtggcccaaggccggcaagagcctggaggtgtatgccctcttcagcacagtgtctgctgtgttccagggctttgctgtgtgtgtgtaccacatggctgacatctgggaggtgttcaacggcccctttgcccacagagatggcccccagcaccagtggggcccctacggcggcaaggtgcccttccccaggcctggggtgtgccccagcaagatgacagcccagcccggccggcccttcggcagcaccaaggactacccagatgaggtgctgcagtttgcccgggcccaccccctgatgttctggcctgtgcggcccaggcatggccggcctgtgctggtgaagacccacctggcccagcagctgcaccagatcgtggtggacagagtggaggctgaagatggcacctatgatgtgatcttcctgggcacagacagcggctctgtgctgaaggtgattgccctgcaggccggcggcagcgctgagcctgaggaggtggtgctggaggagctgcaggtgttcaaggtgcccacccccatcacagagatggagatctctgtgaagaggcagatgctgtatgtgggcagccggctgggcgtggcccagctgcggctgcaccagtgtgagacctatggaacagcctgtgccgagtgctgcctggcccgggacccctactgtgcctgggatggagccagctgcacccactaccggcccagcctgggcaagaggcgcttccggcggcaggacatccgccacggcaacccagccctgcagtgcctgggccagagccaggaggaggaggccgtgggcctggtggccgccaccatggtgtatggaacagagcacaacagcaccttcctggagtgcctgcccaagagcccccaggccgctgtgcgctggctgctgcagaggcctggagatgagggccctgaccaggtgaagacagatgagcgggtgctgcacacagagcggggcctgctcttccggcggctgagcagatttgatgctggcacctacacctgcaccaccctggagcacggcttcagccagacagtggtgcggctggccctggtggtgattgtggccagccagctggacaacctcttccccccagagcccaagccagaggagcccccagcccggggcggcctggccagcaccccacccaaggcctggtacaaggacatcctgcagctgattggatttgccaacctgccccgggtggatgagtactgtgagcgggtgtggtgccggggcaccacagagtgcagcggctgcttccgcagccgcagccggggcaagcaggcccggggcaagtcctgggccggcctggagctgggcaagaagatgaagagccgggtgcacgccgagcacaacagaacaccccgggaggtggaggccacctag

SEQ ID NO: 202929 - DNA, 2349 bp, Artificial Sequence
  derived and/or modified sequence
atggcccccagcgcctgggccatctgctggctgctgggcggcctgctcctgcatgggggaagctccggccccagtcctgggccatcagtgccccgcctgcggctgtcgtatcgggacctcctatctgccaacagatccgcaatctttctcggccctcagggcagcctcaatctgcaggctatgtacttagatgaatatcgggacaggctgtttttgggcgggctggatgcattgtatagcctgagattggatcaagcttggcctgaccccagggaggtcttgtggcccccccagcccgggcagcgggaggagtgcgtgcgcaaaggccgggacccactgacagagtgcgccaactttgtgagagtgctgcaacctcataatcgcacgcatctcttagcctgcggcacaggtgcctttcagccaacctgcgcgctcatcacagtgggacacaggggggagcacgtgctgcatcttgagccaggatccgtcgagagcggcagagggcggtgcccacatgagccaagtagaccattcgccagtacttttatcgatggagagttatatacaggtctgactgctgactttcttggaagagaggccatgatatttcgctcaggcgggccccgccccgccctgcgctcggactctgaccagtctctcctgcatgaccctcggttcgtgatggcagcaagaatacccgagaacagcgatcaagacaacgacaaagtttacttctttttctccgagaccgtcccttcgcctgacgggggatccaatcatgtgacggtcagcagggttggacgagtctgtgtgaacgacgccggtggtcagcgggtgttagtcaataagtggtccactttcctgaaggctcgcctggtctgttcagtgccagggcctggcggcgccgagacccacttcgaccagctggaggacgtgtttctgctctggcccaaagccggaaaatcacttgaggtgtacgctctcttctccaccgtgtcagcagttttccaggggtttgcggtctgcgtgtatcacatggccgatatctgggaagtgttcaacggtcctttcgctcaccgggacgggccccaacatcagtggggaccctacggaggcaaggtgccattccctaggcccggagtatgtccgtcaaaaatgacagcccaacccggcaggccatttggatcaactaaagattatcctgatgaggtgcttcaattcgctagagcacaccctctaatgttctggcctgtgagaccaaggcacggacgacccgtgctagtcaaaactcacctggcccagcagctccatcagatcgtggtagacagggtcgaggcagaggacggcacctacgacgtcatctttctgggtaccgacagcgggtcagtgcttaaggtgatcgcactgcaggccggaggatccgccgagcccgaagaagtggttctggaggaactgcaggttttcaaggtgccgacgcccatcaccgaaatggagatctccgtgaagcgacagatgttgtacgtggggtccaggcttggggtggcccagctgcggctgcatcagtgtgagacatatgggacagcctgtgctgagtgttgcctggcccgggacccgtactgcgcgtgggatggcgctagctgtacacactatcgaccatcccttggtaagaggcgattcagaaggcaagacatccggcacggaaacccagcactccagtgcctgggacagagccaggaagaggaagctgtgggccttgtagccgctacaatggtctatggaactgagcacaattcaacctttttggaatgtttgccgaaatctccccaagcagctgtgcgctggttgttacagcgtcccggcgatgaggggccagaccaggtgaagacagacgagcgcgtcctgcacacagagcgggggctgctgttccggcgcctttccaggttcgatgctggtacctatacatgtacaaccttagagcatggattttctcagactgttgttaggcttgcactggtggtgattgttgcttcacagctggataatttgttcccccctgagcctaaacctgaggagccaccagctaggggcggcctggccagcacgcccccaaaggcctggtacaaagacatactgcagctcattgggttcgccaacctacctcgggtggacgaatactgtgagcgcgtatggtgcaggggaaccactgaatgctctggttgttttcggtctcgatcaagagggaaacaggcccgcggcaaatcatgggctgggctagagcttggcaaaaaaatgaagagccgggttcacgccgaacacaaccgcacaccgagggaagtcgaggccacatag

SEQ ID NO: 202930 - DNA, 2349 bp, Artificial Sequence
  derived and/or modified sequence
atggcgccttctgcctgggcaatctgttggctgctgggagggcttctgctccatggagggagttcaggccctagcccgggaccttctgtgcccaggctccggctttcgtaccgagatctcctctccgccaaccgtagtgccatatttctagggcctcagggctctctgaatttacaagccatgtacctggacgaatacagggacagactgtttttaggaggcctagacgcactttattctctgaggttggaccaggcctggcctgaccctagggaggtcctgtggcctcctcaacccggacagagggaagaatgtgtacgaaaagggagggacccacttaccgagtgcgcgaatttcgtccgagtgctgcagcctcacaacaggactcacctcctggcttgcggtactggagcattccagcctacttgtgccctgataaccgttgggcataggggcgaacatgttctgcatctcgagcccggaagcgtagagtcaggcagggggcgatgtccgcatgagccaagtcgccctttcgccagtactttcattgacggtgagctatatacggggcttaccgcggacttcctagggagggaggcaatgatcttcagatccggagggcctcggccagcactccgatccgattcagatcagagcctactgcacgacccacgatttgtcatggccgctcgcatacccgagaatagcgatcaggacaatgataaggtgtacttcttcttcagcgaaactgtgccttctcctgatggtgggtcaaaccatgttaccgtcagccgcgttgggcgagtgtgcgtgaacgacgccggaggacagcgggtcctcgtcaacaaatggtctacatttctaaaggcgagacttgtgtgtagcgtcccaggccctggcggagccgagactcatttcgatcaactggaggacgtattcctcctgtggcccaaagccggaaaaagccttgaggtttatgccctgttttctaccgtgagtgcggtttttcagggtttcgcggtgtgcgtgtaccatatggcagatatctgggaagtctttaacggcccttttgcccaccgagacggcccacagcatcagtggggcccttatggcggtaaggtgcctttccctcggccaggcgtgtgccctagcaaaatgacagcccagccaggaagaccattcgggtccacaaaagattatcctgacgaggtgcttcagttcgcgagagcccaccccctgatgttttggcctgtgcggcctcgccatggtagacccgtcctggttaagacacaccttgcccagcagctgcaccagattgtggtcgatagggtagaggcggaagatgggacttacgatgttatttttctcggcactgactccgggagtgtgctgaaagtaattgcgctgcaagctgggggatctgcagagcctgaagaggttgtgctcgaagagcttcaggtctttaaggtccccaccccaatcacagagatggaaatctccgtcaaacgtcagatgctgtatgtcggaagtagactaggagtggcccagctgcgactgcatcagtgcgagacctatggcactgcgtgtgccgaatgctgtctcgctagggatccctactgtgcatgggacggagcttcctgtactcattatcggccttcacttggcaaaagacgcttccgacggcaggatattagacatggaaaccctgcactacagtgtttggggcagtcgcaagaagaggaagctgtgggtttggtggctgcaacgatggtgtacgggactgagcacaactccaccttcctggaatgtctcccgaagtctccccaggccgctgtgcgttggttacttcagcgtcccggagatgaaggccctgatcaagtaaagacagatgaacgggtgcttcataccgagagaggtctactctttagaagattaagtagattcgacgccggaacatacacgtgcacaacattggaacacggtttctcccaaactgtggtgcgcctggccctggtggtgattgtcgcctctcagcttgataatctgtttccgcctgagcccaagcctgaagaaccacccgcaagaggaggcctcgcatctaccccacccaaggcgtggtataaggacatcctccagctaataggcttcgctaatctaccccgtgtagacgagtactgtgaacgggtatggtgccggggtaccacagagtgcagtggctgttttcgatcacgctcaagaggcaagcaggctagagggaagtcatgggccggtcttgaactcgggaagaagatgaagagtagagtccacgccgagcacaaccgaaccccgagagaagtagaggccacatag

SEQ ID NO: 202931 - DNA, 2349 bp, Artificial Sequence
  derived and/or modified sequence
atggccccatccgcttgggctatctgctggttgctggggggactgctccttcacggtggaagctcaggaccctcccccggcccaagcgtcccacgactcagactgtcctaccgggatctcctgtccgccaaccggagtgctatattcctgggaccacagggcagcctaaacttacaggctatgtacttggacgagtaccgcgatagattattcctcgggggattggacgcattgtattccctcaggctggaccaggcttggcctgatcccagagaggttctttggcctcctcagcctgggcaacgcgaagagtgcgttcgcaaagggcgtgatcccctgacagagtgcgcaaattttgttagagtgcttcagcctcataatagaacccatttgctcgcatgtgggactggagccttccagccaacctgtgctctgatcacagtgggccaccgaggagaacacgtgctgcatctcgaacccgggagcgtggagtccggcagaggtcgatgtcctcacgagcctagtagaccatttgccagtacttttatcgacggcgaattgtacaccgggctcacagctgatttcctgggacgggaagccatgatattccgctccggggggcctcgcccagccttacgatccgatagcgatcagtcccttcttcatgaccctcgtttcgttatggctgcccggattcctgaaaattccgaccaggataatgataaagtgtatttctttttctccgagacagtgccttccccggatggcggatctaatcacgttaccgtgtcacgggtcggcagagtgtgtgtgaacgatgcaggagggcaacgcgttcttgtaaacaaatggtcaacattcctgaaagcaaggctggtctgttcagtgccgggacctggaggtgcagagactcactttgaccagttggaagacgttttcctcttgtggccaaaggccggcaagtcactggaggtgtacgccctcttttcaaccgtaagcgctgtgtttcagggcttcgccgtgtgcgtttaccacatggcagacatctgggaagtgtttaatggaccgttcgctcacagggacgggccccagcatcagtgggggccatatgggggcaaagtcccatttcctcggccgggcgtatgcccctctaaaatgacagcccaacccggccggccgtttggctctacaaaggattacccagatgaagttctgcaatttgcaagggcacatccgctcatgttttggccagtgaggcctcgccacggacggccagtccttgtaaagacccatctcgcccaacaactgcaccagattgtcgttgatagagtcgaggccgaggatggcacctatgacgtaatatttctaggaacagatagcggcagtgttttaaaagtcatcgcgctgcaggctggcgggagcgccgaacctgaagaggtggtcctggaagaactccaggtttttaaagtccccacacccatcacagaaatggagatttccgtgaaacggcagatgctttacgtcggaagccgtctgggtgtggcccagcttaggctgcaccagtgcgaaacctacggcaccgcgtgcgccgagtgctgccttgcccgcgacccttattgcgcatgggatggagccagttgcacccattatagaccttctctcggcaaaagacgctttagaaggcaggatattcgtcacggaaaccccgctctgcagtgtctgggtcaaagccaggaggaagaggcggtcggattggtcgctgcaacaatggtgtacggcaccgagcataattcaactttcttagagtgcctaccaaagtcaccacaagccgcagtgagatggctcctgcagagacctggcgatgagggaccagaccaggtgaaaaccgacgagcgcgtcctgcatacagagcggggactactgttcagacgcctgagtaggtttgatgccggaacatacacctgtaccactctcgagcacgggttcagccagaccgtagtgaggctggccctcgtggtaatcgtagcgtcccaattggataacttgtttcctccagaacccaaacctgaggaaccaccagctcgcggcggcctcgcaagtactcccccaaaggcctggtacaaggacattctgcagctcataggttttgccaacctgcccagagtagatgaatattgtgaaagggtatggtgcagaggaaccaccgagtgctcaggatgcttccgatcgcgaagccggggcaagcaggccagagggaagagctgggctgggctggagctcggtaaaaaaatgaagtcccgtgtgcacgctgagcataatcggactccaagggaagttgaagcgacatag

SEQ ID NO: 202932 - DNA, 2349 bp, Artificial Sequence
  derived and/or modified sequence
atggccccgtcagcttgggcaatctgctggttgttaggaggattactgctgcacgggggctcatcagggccaagccccggaccaagtgttccacgactgcgcctcagttatcgtgacctcttgagtgccaatcgatcagcgatctttctcggcccccagggctccctcaatcttcaggccatgtatcttgacgaatatcgcgaccgcctctttctcggaggcttggatgcgctgtactcccttcgcctagaccaagcttggccggatcctagagaggtgttgtggccacctcagcccggtcagagagaagaatgcgtacgaaagggtagagatcccttaacagaatgcgcaaatttcgttcgggtgttgcagcctcataacagaacccacttacttgcctgtggcactggcgcctttcagccaacatgcgctctgatcacggtcggacaccggggagaacacgtccttcatctggaaccaggctctgtagaatccggtcgcggccgctgcccacatgagccttctcgcccctttgcatcaaccttcattgatggggaattgtatacaggccttacggcagacttcctcggccgtgaagccatgattttcagatctggaggacctcggcctgctctacgtagtgacagcgatcaaagtctgctacacgatccccgctttgttatggccgccagaataccggaaaattctgaccaagataatgacaaagtgtatttcttttttagtgaaacggtgccgagccctgacggaggctcaaatcacgtaactgtttccagagtgggtagggtgtgtgtcaatgacgctggcggccaacgggtgttggtgaacaaatggtccaccttcctgaaagctagactcgtatgtagcgtcccaggacccggtggcgccgagactcattttgatcaattagaagacgtgtttctcctgtggcccaaggccggaaagagtcttgaagtctatgccttgttctcgaccgtcagtgccgtcttccagggcttcgcagtctgcgtctaccacatggcagacatttgggaagtttttaatgggcctttcgctcaccgcgatgggccgcagcatcaatgggggccctatggaggaaaagtgccctttcctagacctggcgtgtgtccaagcaagatgacagcccagcctggccgcccattcggttccacaaaggactatcccgacgaagtccttcagtttgctagggctcatccattaatgttctggcctgtgcgtccgcgtcatggaagaccagtgctggtcaaaacacatttggcccaacaattgcatcagattgtggtggatagagtcgaagctgaagacggtacctacgacgtgattttccttggaaccgacagtggatctgtgctcaaagtgattgctctccaggcgggcggctcagccgaacccgaggaagttgtgctagaggagctccaagttttcaaagtccccaccccaatcacagaaatggagatttccgtcaaacgacagatgctgtatgttggatcccgcctcggagtcgcccagcttcgcttacatcagtgcgaaacatatggcaccgcttgtgctgagtgttgtctggcgagagacccttactgtgcttgggacggagcgtcctgcacacattacagaccgagcctgggaaaaaggaggttcagaagacaggacattcgacatgggaatccagctctccagtgcctgggccaatcacaagaggaagaagctgtcggcctggttgccgccacgatggtttatgggacagaacataactctaccttcctcgagtgcttgccgaaatcaccacaggccgcagtaagatggctgcttcagagacccggggacgagggacccgaccaggtaaagacagatgagagagtgctccacactgaaagaggcctgctgtttcgccgcctgagccgcttcgatgctgggacctatacatgcacaactctcgagcacggattttcccaaaccgtcgtgcgcctcgcgctagttgtaatcgtggcctcacagttagataatttatttccccccgaacccaagccagaagagcctcctgctcggggtggcctggcaagcaccccccccaaagcatggtataaagacatacttcagctcattggattcgctaacctccctagagtggacgagtactgcgaaagggtgtggtgcagaggaacaaccgaatgttccgggtgttttagaagtcggagccgtggcaaacaagctaggggaaagagttgggcaggactcgagctggggaaaaagatgaagagccgtgttcacgcagaacataataggacccctcgcgaggttgaagcaacatag

SEQ ID NO: 202933 - DNA, 2349 bp, Artificial Sequence
  derived and/or modified sequence
atggcccccagcgcctgggccatctgctggctgctgggcggcctgctgctgcacggcggcagcagcggccccagccccggccccagcgtgcccagactgagactgagctacagagacctgctgagcgccaacagaagcgccatcttcctgggcccccagggcagcctgaacctgcaggccatgtacctggacgagtacagagacagactgttcctgggcggcctggacgccctgtacagcctgagactggaccaggcctggcccgaccccagagaggtgctgtggcccccccagcccggccagagagaggagtgcgtgagaaagggcagagaccccctgaccgagtgcgccaacttcgtgagagtgctgcagccccacaacagaacccacctgctggcctgcggcaccggcgccttccagcccacctgcgccctgatcaccgtgggccacagaggcgagcacgtgctgcacctggagcccggcagcgtggagagcggcagaggcagatgcccccacgagcccagcagacccttcgccagcaccttcatcgacggcgagctgtacaccggcctgaccgccgacttcctgggcagagaggccatgatcttcagaagcggcggccccagacccgccctgagaagcgacagcgaccagagcctgctgcacgaccccagattcgtgatggccgccagaatccccgagaacagcgaccaggacaacgacaaggtgtacttcttcttcagcgagaccgtgcccagccccgacggcggcagcaaccacgtgaccgtgagcagagtgggcagagtgtgcgtgaacgacgccggcggccagagagtgctggtgaacaagtggagcaccttcctgaaggccagactggtgtgcagcgtgcccggccccggcggcgccgagacccacttcgaccagctggaggacgtgttcctgctgtggcccaaggccggcaagagcctggaggtgtacgccctgttcagcaccgtgagcgccgtgttccagggcttcgccgtgtgcgtgtaccacatggccgacatctgggaggtgttcaacggccccttcgcccacagagacggcccccagcaccagtggggcccctacggcggcaaggtgcccttccccagacccggcgtgtgccccagcaagatgaccgcccagcccggcagacccttcggcagcaccaaggactaccccgacgaggtgctgcagttcgccagagcccaccccctgatgttctggcccgtgagacccagacacggcagacccgtgctggtgaagacccacctggcccagcagctgcaccagatcgtggtggacagagtggaggccgaggacggcacctacgacgtgatcttcctgggcaccgacagcggcagcgtgctgaaggtgatcgccctgcaggccggcggcagcgccgagcccgaggaggtggtgctggaggagctgcaggtgttcaaggtgcccacccccatcaccgagatggagatcagcgtgaagagacagatgctgtacgtgggcagcagactgggcgtggcccagctgagactgcaccagtgcgagacctacggcaccgcctgcgccgagtgctgcctggccagagacccctactgcgcctgggacggcgccagctgcacccactacagacccagcctgggcaagagaagattcagaagacaggacatcagacacggcaaccccgccctgcagtgcctgggccagagccaggaggaggaggccgtgggcctggtggccgccaccatggtgtacggcaccgagcacaacagcaccttcctggagtgcctgcccaagagcccccaggccgccgtgagatggctgctgcagagacccggcgacgagggccccgaccaggtgaagaccgacgagagagtgctgcacaccgagagaggcctgctgttcagaagactgagcagattcgacgccggcacctacacctgcaccaccctggagcacggcttcagccagaccgtggtgagactggccctggtggtgatcgtggccagccagctggacaacctgttcccccccgagcccaagcccgaggagccccccgccagaggcggcctggccagcaccccccccaaggcctggtacaaggacatcctgcagctgatcggcttcgccaacctgcccagagtggacgagtactgcgagagagtgtggtgcagaggcaccaccgagtgcagcggctgcttcagaagcagaagcagaggcaagcaggccagaggcaagagctgggccggcctggagctgggcaagaagatgaagagcagagtgcacgccgagcacaacagaacccccagagaggtggaggccacctag

SEQ ID NO: 202934 - DNA, 4899 bp, Artificial Sequence
  derived and/or modified sequence
atggccccctcggcctgggccatttgctggctgctagggggcctcctgctccatgggggtagctctggccccagccccggccccagtgtgccccgcctgcggctctcctaccgagacctcctgtctgccaaccgctctgccatctttctgggcccccagggctccctgaacctccaggccatgtacctagatgagtaccgagaccgcctctttctgggtggcctggacgccctctactctctgcggctggaccaggcatggccagatccccgggaggtcctgtggccaccgcagccaggacagagggaggagtgtgttcgaaagggaagagatcctttgacagagtgcgccaacttcgtgcgggtgctacagcctcacaaccggacccacctgctagcctgtggcactggggccttccagcccacctgtgccctcatcacagttggccaccgtggggagcatgtgctccacctggagcctggcagtgtggaaagtggccgggggcggtgccctcacgagcccagccgtccctttgccagcaccttcatagacggggagctgtacacgggtctcactgctgacttcctggggcgagaggccatgatcttccgaagtggaggtcctcggccagctctgcgttccgactctgaccagagtctcttgcacgacccccggtttgtgatggccgcccggatccctgagaactctgaccaggacaatgacaaggtgtacttcttcttctcggagacggtcccctcgcccgatggtggctcgaaccatgtcactgtcagccgcgtgggccgcgtctgcgtgaatgatgctgggggccagcgggtgctggtgaacaaatggagcactttcctcaaggccaggctggtctgctcggtgcccggccctggtggtgccgagacccactttgaccagctagaggatgtgttcctgctgtggcccaaggccgggaagagcctcgaggtgtacgcgctgttcagcaccgtcagtgccgtgttccagggcttcgccgtctgtgtgtaccacatggcagacatctgggaggttttcaacgggccctttgcccaccgagatgggcctcagcaccagtgggggccctatgggggcaaggtgcccttccctcgccctggcgtgtgccccagcaagatgaccgcacagccaggacggccttttggcagcaccaaggactacccagatgaggtgctgcagtttgcccgagcccaccccctcatgttctggcctgtgcggcctcgacatggccgccctgtccttgtcaagacccacctggcccagcagctacaccagatcgtggtggaccgcgtggaggcagaggatgggacctacgatgtcattttcctggggactgactcagggtctgtgctcaaagtcatcgctctccaggcagggggctcagctgaacctgaggaagtggttctggaggagctccaggtgtttaaggtgccaacacctatcaccgaaatggagatctctgtcaaaaggcaaatgctatacgtgggctctcggctgggtgtggcccagctgcggctgcaccaatgtgagacttacggcactgcctgtgcagagtgctgcctggcccgggacccatactgtgcctgggatggtgcctcctgtacccactaccgccccagccttggcaagcgccggttccgccggcaggacatccggcacggcaaccctgccctgcagtgcctgggccagagccaggaagaagaggcagtgggacttgtggcagccaccatggtctacggcacggagcacaatagcaccttcctggagtgcctgcccaagtctccccaggctgctgtgcgctggctcttgcagaggccaggggatgaggggcctgaccaggtgaagacggacgagcgagtcttgcacacggagcgggggctgctgttccgcaggcttagccgtttcgatgcgggcacctacacctgcaccactctggagcatggcttctcccagactgtggtccgcctggctctggtggtgattgtggcctcacagctggacaacctgttccctccggagccaaagccagaggagcccccagcccggggaggcctggcttccaccccacccaaggcctggtacaaggacatcctgcagctcattggcttcgccaacctgccccgggtggatgagtactgtgagcgcgtgtggtgcaggggcaccacggaatgctcaggctgcttccggagccggagccggggcaagcaggccaggggcaagagctgggcagggctggagctaggcaagaagatgaagagccgggtgcatgccgagcacaatcggacgccccgggaggtggaggccacgtagaagggggcagaggaggggtggtcaggatgggctggggggcccactagcagcccccagcatctcccacccacccagctagggcagaggggtcaggatgtctgtttgcctcttagagacaggtgtctctgcccccacaccgctactggggtctaatggaggggctgggttcttgaagcctgttccctgcccttctctgtgctcttagacccagctggagccagcaccctctggctgctggcagccccaagggatctgccatttgttctcagagatggcctggcttccgcaacacatttccgggtgtgcccagaggcaagagggttgggtggttctttcccagcctacagaacaatggccattctgagtgaccctcagagtgggtgtgtgggtgcgtctagggggtatcccggtagggggcctgcagggagccagagggtggaaatggcctctaagctagcaccccgtaagaagagcctacctgaccgacttggggagggaacacagaggtgttgggaaggtggagcaacaatgcacctcccctcctgtcgcgccgtgatatcttggtggctccctgccactgcccaccgcctcttctccatctgagaatcacggagaggtgtagataatctagaggcatagactgctagagcccccagggatctggggtggtcagggctcaggcttcactttgtaaaccaggtgggggcatctcacagcctgacttcccttccccaggccagggttgctgggatgcctgcccctcctgagaggaccccctccccattgtcaggctctccatgtccacgagcggggaggggtgggttctggggcattgttgtcccttgtgtctgtggactagagatagggtgggggagctggggaagggtgcaggcgggaagagtgggctgtctttcccagggtgatgcaagcatgccgcagccctggaggctgggaatgtggaggctctgtgagccctgcagccctcagaatcagggccagggatgcagaagattgagaggatatggagatggatagagggcaggagacccttaggatagattgtgggacccaggcaggaacaggtgtccacaagaactcaggatggcatcagttagctcagaagccacctggaagacccagtgtttccatctctggaatctctgttttatgctaaatggatttaggaagactgtttttcttttaagggggaaacaaggtagagaaaaggacgaagaagtgtaagtcccgctgattctcgggggtaaggctcggatggcaaggacgcgttctgcctgggcatgtaggggaggtgtttttgccatcaccagtttctcaggctggggagcacagaggggaggaggaggactaaatgaaaagttgttcccagcctgcacatgaacacattcatgacacacaaaactggctggaaggagataagagcactgggtttgagattccctccattaaaacaaccaagacaaagaaaggaggggaaaaaaagataaaaagcaagccagggttccctgccctattgaaactcaaacccagactgccttgggttttatctttcccttacccctggcacctccagagaactgggacctgaaatagtccctccgttctcccctttgaccatgtaataaatgaaccagaagcactgagattaacctatcaacgccctgagaagccttccagcctgcggtgctgtctgctgggaggtcagctggtcaaggcagaggaggagaggaggaaaggatgggggctgaagagcagaagggaggggagacagaggggattaaagaggggaggagagagtgcagagctccaggaaagggtatcagagctgcagccagctctgccctctaccctagggaggccagaaagacacaaacagccctccgggcctttacgctggactctggcttggcaggctccaggcagggtcctctgggaagttactctagaaaacgaagggaggaggagcacaagatcctcagcaacgaacacctgcacttagaaaaagtggacagcttctgccaaccacaccctacccatggtactgtatgctattaactcctggaaacgccccgtaaatgcgagttgtttttgtatttgtgtgttgagatgggccttgtggtttctctgtactcagagcacatttcttgtaattactattgttatttttattgtcatgactgcccctgagctctggtgagaaaagctgaatttacaaggaaagggatgaagttaatatttgcatcacataattatatcattactgtgtatctgtgtattgtactaaatggactgatgctgcgcacatgagctgaaaatgaagagccctcccatccattccatgagaaagaaggtcaccctgagtgacttctgtttcatgatttcccaaacaggttttagagctggaaaaggacttaaagaaagagactgggtggtgctttctagaaaggaggaagatgggtatcaggggaaggaaggagttagagggctttgtacaaagccgagattgctcattaaatgaggaacatcctggcc

SEQ ID NO: 202935 - RNA, 2349 nt, Artificial Sequence
  derived and/or modified sequence
auggccccauccgcuugggcuaucugcugguugcuggggggacugcuccuucacgguggaagcucaggacccucccccggcccaagcgucccacgacucagacuguccuaccgggaucuccuguccgccaaccggagugcuauauuccugggaccacagggcagccuaaacuuacaggcuauguacuuggacgaguaccgcgauagauuauuccucgggggauuggacgcauuguauucccucaggcuggaccaggcuuggccugaucccagagagguucuuuggccuccucagccugggcaacgcgaagagugcguucgcaaagggcgugauccccugacagagugcgcaaauuuuguuagagugcuucagccucauaauagaacccauuugcucgcaugugggacuggagccuuccagccaaccugugcucugaucacagugggccaccgaggagaacacgugcugcaucucgaacccgggagcguggaguccggcagaggucgauguccucacgagccuaguagaccauuugccaguacuuuuaucgacggcgaauuguacaccgggcucacagcugauuuccugggacgggaagccaugauauuccgcuccggggggccucgcccagccuuacgauccgauagcgaucagucccuucuucaugacccucguuucguuauggcugcccggauuccugaaaauuccgaccaggauaaugauaaaguguauuucuuuuucuccgagacagugccuuccccggauggcggaucuaaucacguuaccgugucacgggucggcagagugugugugaacgaugcaggagggcaacgcguucuuguaaacaaauggucaacauuccugaaagcaaggcuggucuguucagugccgggaccuggaggugcagagacucacuuugaccaguuggaagacguuuuccucuuguggccaaaggccggcaagucacuggagguguacgcccucuuuucaaccguaagcgcuguguuucagggcuucgccgugugcguuuaccacauggcagacaucugggaaguguuuaauggaccguucgcucacagggacgggccccagcaucagugggggccauaugggggcaaagucccauuuccucggccgggcguaugccccucuaaaaugacagcccaacccggccggccguuuggcucuacaaaggauuacccagaugaaguucugcaauuugcaagggcacauccgcucauguuuuggccagugaggccucgccacggacggccaguccuuguaaagacccaucucgcccaacaacugcaccagauugucguugauagagucgaggccgaggauggcaccuaugacguaauauuucuaggaacagauagcggcaguguuuuaaaagucaucgcgcugcaggcuggcgggagcgccgaaccugaagaggugguccuggaagaacuccagguuuuuaaaguccccacacccaucacagaaauggagauuuccgugaaacggcagaugcuuuacgucggaagccgucuggguguggcccagcuuaggcugcaccagugcgaaaccuacggcaccgcgugcgccgagugcugccuugcccgcgacccuuauugcgcaugggauggagccaguugcacccauuauagaccuucucucggcaaaagacgcuuuagaaggcaggauauucgucacggaaaccccgcucugcagugucugggucaaagccaggaggaagaggcggucggauuggucgcugcaacaaugguguacggcaccgagcauaauucaacuuucuuagagugccuaccaaagucaccacaagccgcagugagauggcuccugcagagaccuggcgaugagggaccagaccaggugaaaaccgacgagcgcguccugcauacagagcggggacuacuguucagacgccugaguagguuugaugccggaacauacaccuguaccacucucgagcacggguucagccagaccguagugaggcuggcccucgugguaaucguagcgucccaauuggauaacuuguuuccuccagaacccaaaccugaggaaccaccagcucgcggcggccucgcaaguacucccccaaaggccugguacaaggacauucugcagcucauagguuuugccaaccugcccagaguagaugaauauugugaaaggguauggugcagaggaaccaccgagugcucaggaugcuuccgaucgcgaagccggggcaagcaggccagagggaagagcugggcugggcuggagcucgguaaaaaaaugaagucccgugugcacgcugagcauaaucggacuccaagggaaguugaagcgacauag

SEQ ID NO: 202936 - RNA, 2349 nt, Artificial Sequence
  derived and/or modified sequence
auggccccgucagcuugggcaaucugcugguuguuaggaggauuacugcugcacgggggcucaucagggccaagccccggaccaaguguuccacgacugcgccucaguuaucgugaccucuugagugccaaucgaucagcgaucuuucucggcccccagggcucccucaaucuucaggccauguaucuugacgaauaucgcgaccgccucuuucucggaggcuuggaugcgcuguacucccuucgccuagaccaagcuuggccggauccuagagagguguuguggccaccucagcccggucagagagaagaaugcguacgaaaggguagagaucccuuaacagaaugcgcaaauuucguucggguguugcagccucauaacagaacccacuuacuugccuguggcacuggcgccuuucagccaacaugcgcucugaucacggucggacaccggggagaacacguccuucaucuggaaccaggcucuguagaauccggucgcggccgcugcccacaugagccuucucgccccuuugcaucaaccuucauugauggggaauuguauacaggccuuacggcagacuuccucggccgugaagccaugauuuucagaucuggaggaccucggccugcucuacguagugacagcgaucaaagucugcuacacgauccccgcuuuguuauggccgccagaauaccggaaaauucugaccaagauaaugacaaaguguauuucuuuuuuagugaaacggugccgagcccugacggaggcucaaaucacguaacuguuuccagaguggguagggugugugucaaugacgcuggcggccaacggguguuggugaacaaaugguccaccuuccugaaagcuagacucguauguagcgucccaggacccgguggcgccgagacucauuuugaucaauuagaagacguguuucuccuguggcccaaggccggaaagagucuugaagucuaugccuuguucucgaccgucagugccgucuuccagggcuucgcagucugcgucuaccacauggcagacauuugggaaguuuuuaaugggccuuucgcucaccgcgaugggccgcagcaucaaugggggcccuauggaggaaaagugcccuuuccuagaccuggcguguguccaagcaagaugacagcccagccuggccgcccauucgguuccacaaaggacuaucccgacgaaguccuucaguuugcuagggcucauccauuaauguucuggccugugcguccgcgucauggaagaccagugcuggucaaaacacauuuggcccaacaauugcaucagauugugguggauagagucgaagcugaagacgguaccuacgacgugauuuuccuuggaaccgacaguggaucugugcucaaagugauugcucuccaggcgggcggcucagccgaacccgaggaaguugugcuagaggagcuccaaguuuucaaaguccccaccccaaucacagaaauggagauuuccgucaaacgacagaugcuguauguuggaucccgccucggagucgcccagcuucgcuuacaucagugcgaaacauauggcaccgcuugugcugaguguugucuggcgagagacccuuacugugcuugggacggagcguccugcacacauuacagaccgagccugggaaaaaggagguucagaagacaggacauucgacaugggaauccagcucuccagugccugggccaaucacaagaggaagaagcugucggccugguugccgccacgaugguuuaugggacagaacauaacucuaccuuccucgagugcuugccgaaaucaccacaggccgcaguaagauggcugcuucagagacccggggacgagggacccgaccagguaaagacagaugagagagugcuccacacugaaagaggccugcuguuucgccgccugagccgcuucgaugcugggaccuauacaugcacaacucucgagcacggauuuucccaaaccgucgugcgccucgcgcuaguuguaaucguggccucacaguuagauaauuuauuuccccccgaacccaagccagaagagccuccugcucgggguggccuggcaagcaccccccccaaagcaugguauaaagacauacuucagcucauuggauucgcuaaccucccuagaguggacgaguacugcgaaaggguguggugcagaggaacaaccgaauguuccggguguuuuagaagucggagccguggcaaacaagcuaggggaaagaguugggcaggacucgagcuggggaaaaagaugaagagccguguucacgcagaacauaauaggaccccucgcgagguugaagcaacauag

SEQ ID NO: 202937 - protein, 225 aa, Artificial Sequence
  derived and/or modified sequence
MAEDKETKHGGHKNGRKGGLSGTSFFTWFMVIALLGVWTSVAVVWFDLVDYEEVLAKAKDFRYNLSEVLQGKLGIYDADGDGDFDVDDAKVLLEGPSGVAKRKTKAKVKELTKEELKKEKEKPESRKESKNEERKKGKKEDVRKDKKIADADLSRKESPKGKKDREKEKVDLEKSAKTKENRKKSTNMKDVSSKMASRDKDDRKESRSSTRYAHLTKGNTQKRNG

SEQ ID NO: 202938 - DNA, 678 bp, Artificial Sequence
  derived and/or modified sequence
atggccgaggacaaagagaccaagcatggtggacacaagaacggacggaagggtggtctgtccgggacttcattttttacttggttcatggtcattgcactgctgggtgtttggacatccgtagctgttgtgtggttcgaccttgtggactacgaggaagtcttggctaaggcaaaggacttcaggtataacctctcggaggttctccagggtaaattaggcatttacgatgcagatggcgatggcgatttcgacgtggatgatgccaaagtactgcttgaaggtccaagcggggttgccaaacgcaagacgaaggcaaaagttaaggaactgactaaagaagagctgaaaaaagagaaggaaaagcccgaatctagaaaagaatctaagaacgaagagagaaaaaagggtaaaaaggaggacgtccgcaaggacaagaaaatcgcggatgccgacctgtctaggaaggaatctcccaaaggcaagaaagaccgcgaaaaagagaaagtggacttagagaagagtgccaagacgaaagagaacaggaagaagtctacaaatatgaaagatgtctcttctaagatggctagccgtgataaggacgaccgtaaagaaagccgatcatctacacggtacgcccacctgaccaaggggaatacacagaaacgtaacggatag

SEQ ID NO: 202939 - DNA, 678 bp, Artificial Sequence
  derived and/or modified sequence
atggccgaggacaaggagaccaagcatggaggccacaagaatggaagaaaaggaggcctgagcggcaccagcttcttcacctggttcatggtgattgccctgctgggcgtgtggacctctgtggccgtggtgtggtttgacctggtggactatgaggaggtgctggccaaggccaaggacttccgctacaacctgtctgaggtgctgcagggcaagctgggcatctatgatgctgatggagatggagactttgatgtggatgatgccaaggtgctgctggagggccccagcggcgtggccaagaggaagaccaaggccaaggtgaaggagctgaccaaggaggagctgaagaaggagaaggagaagccagagagcaggaaggagagcaagaatgaggagaggaagaagggcaagaaggaggatgtgaggaaggacaagaagattgctgatgctgacctgagcaggaaggagagccccaagggcaagaaggaccgggagaaggagaaggtggacctggagaagagcgccaagaccaaggagaacaggaagaagagcaccaacatgaaggatgtgagcagcaagatggccagccgggacaaggatgacaggaaggagagccgcagcagcaccaggtatgcccacctgaccaagggcaacacccagaagagaaatggatag

SEQ ID NO: 202940 - DNA, 678 bp, Artificial Sequence
  derived and/or modified sequence
atggccgaggacaaggagaccaagcacggcggccacaagaacggccgtaagggcggcctgtcaggcactagcttctttacatggtttatggtcatcgcgctactgggcgtgtggacctctgtggccgtggtttggttcgatctggttgattatgaagaggtgctggctaaagccaaggacttcagatacaacctgtccgaggtgcttcagggcaaattaggaatttatgacgctgatggtgacggcgatttcgatgtagacgatgctaaggtgctccttgaggggccgtccggcgtggcaaaaagaaagactaaagccaaggtgaaggagctgacaaaggaagagctgaagaaagagaaagagaagcctgagagccgcaaggagtcaaagaacgaggaacgcaagaaggggaaaaaggaggatgtccggaaggataaaaaaatagcggatgctgatctgagcagaaaagagagtccgaagggcaaaaaggaccgggaaaaggagaaagtcgacctggagaagagtgcgaaaacaaaggagaaccggaagaagtcaacgaacatgaaggatgtatccagcaagatggcttctcgggacaaagatgataggaaggaatctcgtagcagtacccgctacgcccacttaactaaaggtaacacacagaaacggaacggctag

SEQ ID NO: 202941 - DNA, 678 bp, Artificial Sequence
  derived and/or modified sequence
atggctgaagacaaggagactaaacatggcggtcataagaatgggaggaaagggggtttatctggaacctccttctttacatggttcatggtcatcgccctcttgggagtatggacttcagtggctgtggtgtggtttgacctcgtggattacgaagaagtactagcgaaggccaaagattttcgctataatttgagtgaggtcctccaggggaaactcggtatctatgacgccgacggagatggtgactttgatgtggatgacgctaaagtcctgttggagggaccaagtggagtcgcaaaaaggaagacgaaggccaaagttaaagaactgactaaagaagagctgaagaaagagaaggaaaagcccgagtcccgaaaagaaagcaagaatgaggagcgtaagaaggggaagaaggaggatgtgcgcaaggacaaaaaaattgcagatgctgaccttagcagaaaggagtcccccaaaggaaagaaggaccgtgagaaagagaaagtggaccttgagaaaagtgccaaaacaaaagagaatcggaagaagtctacaaatatgaaagacgtgtccagtaagatggcctctagagacaaagatgataggaaagaaagcagaagcagtacgagatacgcacatctcacaaagggaaacacccagaaaaggaacggttag

SEQ ID NO: 202942 - DNA, 1290 bp, Artificial Sequence
  derived and/or modified sequence
ctaaaacctgccagcagtacttttgagtttttttttttgttttgttttactttagcatttattattcatggattgaagaaatcaaaatggctgaagataaagagacaaagcatggaggacacaagaatgggaggaaaggcggactctcaggaacttcattcttcacgtggtttatggtgattgcattgctgggcgtctggacatctgtagctgtcgtttggtttgatcttgttgactatgaggaagttctagccaaagcaaaggacttccgttataacttatcagaggtgcttcaaggaaaactaggaatctatgatgctgatggtgatggagattttgatgtggatgatgccaaagttttattagaaggacccagtggggtagccaagagaaaaactaaggctaaagttaaagaactcactaaagaagagctcaagaaggagaaagagaaacctgagtcaaggaaggaaagtaagaatgaagagagaaaaaaggggaagaaagaggatgtccgaaaggataagaaaattgctgatgcagacctatccaggaaggagtctcctaagggtaaaaaggacagagaaaaagagaaagtggacctagaaaaaagtgctaaaaccaaggaaaataggaaaaaatcaacaaatatgaaggatgtttctagtaaaatggcatcccgagacaaagatgacagaaaggaaagtagaagttctaccagatatgcacacttaacaaagggaaatacccagaaaagaaacggctaaagctctggcatcatcatcccagaacatggtcatgttccagattgcagtttgttacaaaaaagcatggaaaatgtaatattgctctgattggtgagggtgtgtaaattagccattgaatgtatcattggtgcttagcaagtaaattacctgaaatttaaatataccgtctcatacttctaaatgtaaaaacattttaaaaatgtcatagaatatgatgtaataacttctatttattgatcatgtattcagataaatgtatatgtatcatgaatttttatggattaatatattgaatactttcattgacgttaaataagaatattaagattttaaatgttatttctgtgcataatgccttgtaactttttcaagtatgctaaatactcagggagatggatttgctcgttgttttcttccctccttccccttcctgcttccctgtttttctctttcgtggacacctccccaggctcatgtgccaccaccttccctcctctccagccctcccagccctcccgcagccttt

SEQ ID NO: 202943 - DNA, 678 bp, Artificial Sequence
  derived and/or modified sequence
atggccgaggacaaggagaccaagcacggcggccacaagaacggcagaaagggcggcctgagcggcaccagcttcttcacctggttcatggtgatcgccctgctgggcgtgtggaccagcgtggccgtggtgtggttcgacctggtggactacgaggaggtgctggccaaggccaaggacttcagatacaacctgagcgaggtgctgcagggcaagctgggcatctacgacgccgacggcgacggcgacttcgacgtggacgacgccaaggtgctgctggagggccccagcggcgtggccaagagaaagaccaaggccaaggtgaaggagctgaccaaggaggagctgaagaaggagaaggagaagcccgagagcagaaaggagagcaagaacgaggagagaaagaagggcaagaaggaggacgtgagaaaggacaagaagatcgccgacgccgacctgagcagaaaggagagccccaagggcaagaaggacagagagaaggagaaggtggacctggagaagagcgccaagaccaaggagaacagaaagaagagcaccaacatgaaggacgtgagcagcaagatggccagcagagacaaggacgacagaaaggagagcagaagcagcaccagatacgcccacctgaccaagggcaacacccagaagagaaacggctag

SEQ ID NO: 202944 - protein, 495 aa, Artificial Sequence
  derived and/or modified sequence
MDSLAESRWPPGLAVMKTIDDLLRCGICFEYFNIAMIIPQCSHNYCSLCIRKFLSYKTQCPTCCVTVTEPDLKNNRILDELVKSLNFARNHLLQFALESPAKSPASSSSKNLAVKVYTPVASRQSLKQGSRLMDNFLIREMSGSTSELLIKENKSKFSPQKEASPAAKTKETRSVEEIAPDPSEAKRPEPPSTSTLKQVTKVDCPVCGVNIPESHINKHLDSCLSREEKKESLRSSVHKRKPLPKTVYNLLSDRDLKKKLKEHGLSIQGNKQQLIKRHQEFVHMYNAQCDALHPKSAAEIVREIENIEKTRMRLEASKLNESVMVFTKDQTEKEIDEIHSKYRKKHKSEFQLLVDQARKGYKKIAGMSQKTVTITKEDESTEKLSSVCMGQEDNMTSVTNHFSQSKLDSPEELEPDREEDSSSCIDIQEVLSSSESDSCNSSSSDIIRDLLEEEEAWEASHKNDLQDTEISPRQNRRTRAAESAEIEPRNKRNRN

SEQ ID NO: 202945 - protein, 92 aa, Artificial Sequence
  derived and/or modified sequence
MDSLAESRWPPGLAVMKTIDDLLRCGICFEYFNIAMIIPQCSHNYCSLCIRKFLSYKTQCPTCCVTVTEPDLKNNRILDELVKSLNFARNHL

SEQ ID NO: 202946 - DNA, 1488 bp, Artificial Sequence
  derived and/or modified sequence
atggacagcctggccgagagcagatggccccccggcctggccgtgatgaagaccatcgacgacctgctgagatgcggcatctgcttcgagtacttcaacatcgccatgatcatcccccagtgcagccacaactactgcagcctgtgcatcagaaagttcctgagctacaagacccagtgccccacctgctgcgtgaccgtgaccgagcccgacctgaagaacaacagaatcctggacgagctggtgaagagcctgaacttcgccagaaaccacctgctgcagttcgccctggagagccccgccaagagccccgccagcagcagcagcaagaacctggccgtgaaggtgtacacccccgtggccagcagacagagcctgaagcagggcagcagactgatggacaacttcctgatcagagagatgagcggcagcaccagcgagctgctgatcaaggagaacaagagcaagttcagcccccagaaggaggccagccccgccgccaagaccaaggagaccagaagcgtggaggagatcgcccccgaccccagcgaggccaagagacccgagccccccagcaccagcaccctgaagcaggtgaccaaggtggactgccccgtgtgcggcgtgaacatccccgagagccacatcaacaagcacctggacagctgcctgagcagagaggagaagaaggagagcctgagaagcagcgtgcacaagagaaagcccctgcccaagaccgtgtacaacctgctgagcgacagagacctgaagaagaagctgaaggagcacggcctgagcatccagggcaacaagcagcagctgatcaagagacaccaggagttcgtgcacatgtacaacgcccagtgcgacgccctgcaccccaagagcgccgccgagatcgtgagagagatcgagaacatcgagaagaccagaatgagactggaggccagcaagctgaacgagagcgtgatggtgttcaccaaggaccagaccgagaaggagatcgacgagatccacagcaagtacagaaagaagcacaagagcgagttccagctgctggtggaccaggccagaaagggctacaagaagatcgccggcatgagccagaagaccgtgaccatcaccaaggaggacgagagcaccgagaagctgagcagcgtgtgcatgggccaggaggacaacatgaccagcgtgaccaaccacttcagccagagcaagctggacagccccgaggagctggagcccgacagagaggaggacagcagcagctgcatcgacatccaggaggtgctgagcagcagcgagagcgacagctgcaacagcagcagcagcgacatcatcagagacctgctggaggaggaggaggcctgggaggccagccacaagaacgacctgcaggacaccgagatcagccccagacagaacagaagaaccagagccgccgagagcgccgagatcgagcccagaaacaagagaaacagaaactag

SEQ ID NO: 202947 - DNA, 279 bp, Artificial Sequence
  derived and/or modified sequence
atggacagcctggccgagagcagatggccccccggcctggccgtgatgaagaccatcgacgacctgctgagatgcggcatctgcttcgagtacttcaacatcgccatgatcatcccccagtgcagccacaactactgcagcctgtgcatcagaaagttcctgagctacaagacccagtgccccacctgctgcgtgaccgtgaccgagcccgacctgaagaacaacagaatcctggacgagctggtgaagagcctgaacttcgccagaaaccacctgtag

SEQ ID NO: 202948 - DNA, 1488 bp, Artificial Sequence
  derived and/or modified sequence
atggacagtctggctgagtcgaggtggccgcccggtctagccgtgatgaaaaccattgacgatctgctcagatgcggcatctgttttgaatacttcaatattgcaatgatcattccacagtgttctcacaactactgttcactgtgtataaggaagtttctgagctacaagacacagtgccccacctgctgcgtcactgtcactgagccagatttgaaaaacaacaggatattagacgagctggtgaagagcctgaattttgctaggaaccacctgctacagtttgcacttgagagtccagcaaaatctccagccagtagctcttccaaaaatcttgccgtcaaagtttacactcccgtggctagccgccaaagcctcaagcagggctcccgcttgatggataatttccttattcgcgaaatgtcaggctcgacatccgagctcctgatcaaggaaaacaagtctaagtttagtcctcagaaagaagcgtcccctgccgctaaaacaaaggagacccgatctgtggaggagatcgctcctgatcctagcgaagccaagaggcccgagccaccatctacaagtactctgaaacaggtgacaaaagtcgattgcccagtctgtggtgttaacattccagagagccatatcaacaaacatctcgactcatgcctgagtcgggaggaaaaaaaggaaagcctgcgtagttcagtacataagagaaaaccactccctaaaacagtctataacttgctgagtgatcgggacctgaaaaagaaactcaaggagcatgggctaagcattcaggggaacaagcagcagctcatcaagcgtcaccaggagtttgttcatatgtacaatgcccaatgtgacgctctgcatccaaaatccgcagctgaaattgtccgagagattgaaaacatcgagaaaacccggatgaggctggaggcttcaaaactcaacgagtctgtgatggtcttcacgaaagaccagacggaaaaggagattgacgagatccattctaagtaccgaaaaaagcacaaatctgaattccagctgctggttgatcaggccaggaaagggtacaaaaagatcgctgggatgtcccagaagacagtcacaatcaccaaggaagacgagagcacagagaagttgagcagtgtgtgcatgggtcaggaagataatatgacatccgtcactaaccacttctctcagagcaagctagatagtccagaagagctggagccggacagagaggaagatagctcctcttgtatcgacatccaggaggtgctgtcttcaagcgaaagcgattcttgcaatagttctagttcagacatcatccgggacctgctggaagaggaggaggcttgggaggcttcccacaagaacgaccttcaggacaccgaaatttccccaaggcagaatagacgcactcgcgccgcagaatcagccgagatcgagccaagaaacaaacgaaataggaattag

SEQ ID NO: 202949 - DNA, 279 bp, Artificial Sequence
  derived and/or modified sequence
atggatagcctcgcagagagccgttggcctcccgggctggccgtaatgaagacaatcgacgacctcctcaggtgcggaatatgcttcgagtactttaatattgccatgattataccacagtgttctcacaactactgcagcctgtgtatccgaaaattccttagttacaagactcagtgccccacctgttgcgtgactgtgacggagccagatctgaagaataaccgcatactggatgaactcgtcaagtccctcaattttgcaagaaaccatctttag

SEQ ID NO: 202950 - DNA, 1488 bp, Artificial Sequence
  derived and/or modified sequence
atggacagcctggccgagagccgctggcccccaggcctggccgtgatgaagaccattgatgacctgctgcgctgtggcatctgctttgagtacttcaacatcgccatgatcatcccccagtgcagccacaactactgcagcctgtgcatcaggaagttcctgagctacaagacccagtgccccacctgctgcgtgacagtgacagagccagacctgaagaacaaccgcatcctggatgagctggtgaagagcctgaactttgccaggaaccacctgctgcagtttgccctggagagccctgccaagagccctgccagcagcagcagcaagaacctggccgtgaaggtgtacacccctgtggccagccggcagagcctgaagcagggcagccggctgatggacaacttcctgatccgggagatgagcggcagcaccagcgagctgctgatcaaggagaacaagagcaagttcagcccccagaaggaggccagccctgctgccaagaccaaggagaccaggtctgtggaggagatcgccccagaccccagcgaggccaagaggcctgagccccccagcaccagcaccctgaagcaggtgaccaaggtggactgccctgtgtgtggggtgaacatccctgagagccacatcaacaagcacctggacagctgcctgagccgggaggagaagaaggagagcctgcggagctctgtgcacaagaggaagcccctgcccaagacagtgtacaacctgctgagtgaccgggacctgaagaagaagctgaaggagcacggcctgagcatccagggcaacaagcagcagctgatcaagaggcaccaggagtttgtgcacatgtacaatgcccagtgtgatgccctgcaccccaagtctgctgctgagatcgtgcgggagattgaaaatattgagaagaccaggatgaggctggaggccagcaagctgaatgaatctgtgatggtgttcaccaaggaccagacagagaaggagattgatgagatccacagcaagtacaggaagaagcacaagtctgagttccagctgctggtggaccaggccaggaagggctacaagaagattgctggcatgagccagaagacagtgaccatcaccaaggaggatgagagcacagagaagctgagctctgtgtgcatgggccaggaggacaacatgacctctgtgaccaaccacttcagccagagcaagctggacagccctgaggagctggagccagaccgggaggaggacagcagcagctgcatcgacatccaggaggtgctgagcagcagcgagagtgacagctgcaacagcagcagcagtgacatcatccgggacctgctggaggaggaggaggcctgggaggccagccacaagaatgacctgcaggacacagagatcagcccccggcagaacagaaggaccagggctgctgagagcgctgagattgagcccaggaacaagaggaacagaaattag

SEQ ID NO: 202951 - DNA, 279 bp, Artificial Sequence
  derived and/or modified sequence
atggacagcctggccgagagccgctggcccccaggcctggccgtgatgaagaccattgatgacctgctgcgctgtggcatctgctttgagtacttcaacatcgccatgatcatcccccagtgcagccacaactactgcagcctgtgcatcaggaagttcctgagctacaagacccagtgccccacctgctgcgtgacagtgacagagccagacctgaagaacaaccgcatcctggatgagctggtgaagagcctgaactttgccaggaaccacctgtag

SEQ ID NO: 202952 - DNA, 1488 bp, Artificial Sequence
  derived and/or modified sequence
atggacagcctggccgagagccggtggccccccggcctggccgtgatgaaaactatcgatgacctgttgcgatgtggcatctgtttcgagtacttcaacatcgccatgattatcccccagtgtagccacaactactgctccctctgcatcagaaagtttctctcgtacaagacacaatgccccacctgttgcgtcacagtcaccgagcccgatctgaagaataatcgcatcttagacgaacttgtcaagagtctcaatttcgccagaaaccaccttctgcagttcgccctggaaagtccggctaagagcccagctagtagcagttccaaaaatctcgcggtgaaagtctacacacccgtggcttcaaggcagtcactcaaacaggggtccagattgatggacaatttcttaattcgcgaaatgagcggttctaccagcgagcttctgatcaaagagaacaagtccaagttttcaccacagaaagaagcttctccggctgctaaaaccaaggagacccggtctgtggaggaaattgcacccgacccatcagaagcaaaaagacctgaacccccttctaccagcaccctgaagcaggtgaccaaagtggattgtccagtgtgcggcgttaacattcccgaaagccatatcaataaacatctagacagctgcttgtcaagggaggaaaagaaggaatcccttagatcatcagttcacaagcgcaaacccttaccaaaaaccgtgtataatcttctgagtgaccgtgacctcaaaaaaaaactgaaagagcacgggctctctatccagggcaataaacagcaactgattaagcggcaccaagaattcgtccacatgtataatgctcaatgtgacgcgctccatcccaagtccgccgcagagattgtccgggagatcgagaatattgagaagacccgtatgaggttggaagcaagcaagttgaacgagtccgttatggtgtttacaaaagatcagacagagaaggagatcgacgagatccactccaaatatcggaagaaacacaaatccgagttccagctgctcgtggatcaagctcgaaaagggtataaaaagattgcggggatgtcacagaagaccgtgactatcaccaaggaggacgagtcaacagaaaagctgagtagcgtgtgcatgggccaggaggacaacatgacttctgttaccaatcacttcagccagagcaagctggatagtccagaggaactcgaacctgaccgagaagaagactcgtcaagctgtatagacatccaggaggttctttcttctagtgagagcgactcatgcaactcttcctcctccgacattatccgggatctgctggaagaggaagaggcatgggaggcctctcataagaacgatttgcaggacacggaaatatccccccggcagaatagaaggacgagggcagcggagagcgcggaaattgaacctcgcaacaaaagaaatcggaactag

SEQ ID NO: 202953 - DNA, 279 bp, Artificial Sequence
  derived and/or modified sequence
atggacagcctggccgagagccggtggccccccggcctggccgtgatgaaaactattgacgacttactgcgatgcggcatttgctttgaatatttcaatatcgccatgataatcccacaatgcagtcataactactgctctctttgtattcgcaagtttctctcctacaagacacaatgccctacttgctgtgtgacggttactgagccagacctcaaaaacaaccgcattctcgatgagctggtgaaaagcttgaacttcgccaggaaccacctatag

SEQ ID NO: 202954 - DNA, 1488 bp, Artificial Sequence
  derived and/or modified sequence
atggactccctcgctgaatcacgctggcctcccggactggcggttatgaagactatcgacgacttgctccgatgcggaatctgctttgagtacttcaatattgcaatgatcatcccgcagtgttcgcacaattattgctcattgtgcatccggaaatttctatcatataaaacccagtgcccgacttgctgcgtcactgtgacagagcctgatttgaaaaataacagaatccttgatgaactcgtgaagagtctgaattttgctcggaaccacctcctacagtttgctctcgagagccccgctaaatccccagcgagttcttctagcaaaaacctggccgtgaaagtgtacactccagtggcatcaagacagtcactgaagcagggatcaagactgatggataatttccttatccgtgaaatgtccggttccacatccgagctcttaatcaaggaaaacaagagcaagttcagcccccagaaagaggcctctcctgccgctaagaccaaggaaacgcgcagtgtggaagaaattgcaccggacccatctgaggccaagcggccagaacccccaagcacaagcacccttaagcaggtaaccaaggttgactgccccgtttgtggtgttaacattcccgagtcacacattaacaagcacctggactcatgcctgagccgcgaggaaaaaaaagagtccctgcgctcctccgttcacaaacgtaagcccctcccaaagaccgtgtataacctcctgtcggaccgcgacttaaagaagaagctgaaggaacatggcttgtctatccaggggaacaagcagcagctaataaagcggcaccaggaattcgtgcatatgtacaacgcacagtgcgatgcactacaccctaaatccgccgcagagatagtccgcgaaatcgagaacattgagaagacaagaatgagattggaggcatctaaacttaatgagtctgtgatggtatttaccaaggaccaaacagaaaaggaaatagatgaaattcatagtaagtacaggaaaaagcataaaagtgagttccagttgttggtcgaccaagcccgaaaaggctataaaaaaatcgctggcatgtcacagaagaccgtaaccatcaccaaggaagatgaatctactgaaaaattgagttccgtatgcatgggccaggaagataatatgacatccgtgaccaaccacttcagtcagtccaagttagactcccctgaggagttggagcctgatcgcgaagaggattccagctcctgtatcgacatccaagaagtgctctcctcctctgagagcgactcatgcaattcgtccagttccgacattattcgggatctgctagaggaggaagaggcctgggaagcctctcataagaatgacctccaggacaccgaaatcagcccgagacagaaccgacgcacgcgagctgccgaaagtgcagagatcgagccaaggaacaagcgcaatcgcaactag

SEQ ID NO: 202955 - DNA, 279 bp, Artificial Sequence
  derived and/or modified sequence
atggactcccttgctgaatctagatggccacccggattggctgtgatgaagacaatcgacgaccttctgagatgcggcatctgtttcgagtactttaacattgcaatgattatacctcagtgttcccacaactattgtagcttatgcataaggaagtttctctcatataaaacgcagtgcccgacctgttgtgtgactgtaaccgagcccgatcttaagaataatcgcatcctggatgagctggtgaaatcattaaacttcgcgaggaaccatttgtag

SEQ ID NO: 202956 - DNA, 5886 bp, Artificial Sequence
  derived and/or modified sequence
cccgcctctggcgcgtcgcgggctgctgacgtaatgcggtagcgcggggaatttcgagtggtgttggagcgccggaggctagtgggtggctgacccccagcatcctcgggagcgaccatggactccctggccgagtctcggtggcctccgggcctggcagtcatgaagacaatagatgatttgctgcggtgtggaatttgcttcgagtatttcaacattgcaatgataatacctcagtgttcacataactactgctctctctgtataagaaaatttctgtcctataaaactcagtgtccaacttgctgtgtgactgtcacagagccggatctgaaaaataaccgcatattagatgaactggtaaaaagcttgaattttgcacggaatcatctgctgcagtttgctttagagtcaccagccaaatctcctgcttcttcctcttcaaagaatcttgctgtcaaagtatatactcctgtagcctccagacagtctttaaagcaggggagcaggttaatggataatttcttgatcagagaaatgagtggttctacatcagagttgttgataaaagaaaataaaagcaaattcagccctcaaaaagaggcgagccctgctgcaaagaccaaagagacacgttctgtagaagagatcgctccagatccctcagaggctaagcgtcctgagccaccctcgacatccactttgaaacaagttactaaagtggattgtcctgtttgcggggttaacattccagaaagtcacattaataagcatttagacagctgtttatcacgcgaagagaagaaggaaagcctcagaagttctgttcacaaaaggaagccgctgcccaaaactgtatataatttgctctctgatcgtgatttaaagaaaaagctaaaagagcatggattatctattcaaggaaataaacaacagctcattaaaaggcaccaagaatttgtacacatgtacaatgcccaatgcgatgctttgcatcctaaatcagctgctgaaatagttcgagaaatcgaaaatatagagaagactaggatgcgtcttgaagctagtaaactcaatgaaagtgtaatggtttttacaaaggaccaaacagaaaaggaaatagatgaaatccacagtaaatatcgtaaaaaacataagagtgaatttcagcttctggtggatcaggctagaaaaggatacaagaaaattgctggaatgtcacaaaaaacagtaacaataacaaaagaagatgaatctacagaaaagctatcttctgtatgcatgggacaggaagataatatgacctcagtaacaaaccacttttctcaatcaaagctggactccccagaggaattggaacctgacagagaagaggattcttctagctgtattgatattcaagaagttctttcttcatcagaatcagattcatgcaatagttccagttcagacatcataagagatcttttagaagaagaggaagcctgggaagcatcacataaaaacgatcttcaagacacagaaataagtccaagacagaatcgccgcacaagagccgctgaaagtgctgagattgaaccaagaaacaagcgtaataggaattaatgtgggcttttgctgacttttcaaatgcattgattagaataccgtacttttggttgccacagatagattttctatttataaatgcccaaggaaagatgctaaattctaaatattacggttagctgatattcattcttttctgcttttccagaggggaaaaatgttacaaaatatccttacttggtcagttgcctcctgcctctaaaacatctctctctaaaaatactgacatttcacacaggtaccagctttgcagaggaggtagactctttggcactttggcacagggatttggtttggtttggtttggtttgataattaaatttcagaatgtccttaggccattctccttctcttccatggagaatccagcctcacaaaaggattctttcaacttctttattgcaagaaacagttgagttaaatgtttgtttttggaaaggcgggatgtcagttcacatccttggtgtgtgtaagtaccgatgcacgccaccaccatgcctgtgttacagcagctccatgatggttgttgcccgaggttaatgtagttgtttgttagacctgtgtcttacacatttctcagagtaggatattagtattataatttaaagctacgacagtcacaaagtcacaataacttagaaacattgcgcatattcttctgaaatagcacttaaaaatgattagtgtcagtattttttcacttgggtcaatcaaatctgtaacactgaatccaagctattaaacaaaaagtatgcaatgaatgaattttgtaaatgaatagagagtatcagtttacaataatgttcttaaaacagtatcctctggatagttgagtatgggttagaaatcattgaaatggattggtcagaaattgctatctgtgtaaaatgtctaccagtagccagatgcttccagagttcttaatgcctctctggcatttcagagccagcatcccccaactcccacccctctgccatcacccaacccaaacacatcagctttcaaatgagatgatagtaaatgcggcaatgttaagacaagaaatttatgatttgccagattcaacatttatgacctccccttccaaagactgtctccgttgaccttgtctttttggtatgccttggggtttctgataatgtgtggagtctcattatggctgagagtttagtgttttcacagtgaagtgcagacatttgatttctttatgagttccctgtgttagaaatggctatagaaaaatttgtcataataatttcatttgcatgaaatcctgaggggtgcattaaggaaactaaaagcaccacttaccaaatctatcggcagaactgatgtgaggtaagtgagcatgtcaaacaaaataggagctcacatggatatatttatgtcactgagttgtcagaaattatgtcaaaatgaaaactgtttgtttcatgacaaattatatagtctataaattaaactggaagtaattattactttaattgcagcaaaaggagtttgtgagggagcggtgagacccaagattgggaaagtaggcacatgagttcattcagcaaatatttggttatctatgtctgtcactgtgctgacactgggaatacaaaggtggccaaagatcatctagaacaatggttcccagtggggtgggcagaaagattttgccccccaggagacagctggcaatgtgtggagacacttttggaggtggagggtggtgaggggtactaccagtatcaatgggtggaggccagggatgaggctaaacacccaaccctcatggattagtttgccagggctgccgtcacaagatactgcagacggggaagcttacacaacagaaatgtgtattctcagaattctggaggctggaagtccaagatcagtagggtttcttcttcggcctctctccttggcttccactcatggtgtccttgcatggtcttttctctgtgtgcacatgactgtgcaggactggtgtcccgatttcttgtagggacagcagtcattggatcagggcccatgcgtatggcctcattttacttcagttacctcttttttagatagagggccctatctctaaatactgtcacattctgagataccggcagttaagacttccaacatatttagtggtaggggttaaggggcacgctttagactacaacactccacagtaaagaattatccagtctaacatgtcagttgtgccaagactgagaaacctgtaatgtaaaggaactcccaagtctacctgaaaagtaaggtctaaagagcatttattgagcactatctgttagcacttagcatatgtttaatattcatacattgaaagaaatgtatgttcatatccatctgacaaagattaaggaacttagagtaagtaatagatccaaaattgaaactgataaacttctggttctaaaattcaccttttagtgaaaatacagtttctcaccaaacttacagtaattcagagttattaactctttctacctcctcactcccctcaaagttataacatctcccatcaacatcagctcagaatggcagtgatgcttatggtttgtgggggtgcaggtgagctgctggatgcactttagatggcctagtatgccaggccgtcctttcatcctctactctcgtctttctttttcgacctcatgttgaggattactggtctagttgaaaaaagaattcatacacataagaccatgtatataatagagggaggtatgcctttaaaaacaaaattacatggtaaagactgatgtgtcaacagggatagacaacatagagaaggctagaactgtttctggaaaaaaacccaaaaacaatggatttcaaacttcttagcatccgataaaagaaagtagcaattattcaaatgagaaacacttctgtctgttatgtacatattatgaaagtatgaacataagagggaaaaccacaaccattacattttttaccatttcagtaatttttttttggtttttagtctgtttttagacatccttaagaacaactatctgaggctgtaaacaagtatttacattaacacccatgatactgactttatactccctacctgcattgagaccttaaagggggcatttctccattccttctgtgtatttctgggtatccccaggttcagatattcagaatacagatacaagtccatgcttgcatatgttgctgctccccccgacagacttctaccagcatctgccctcctcaccgctgctctgtcacgtgcactgcggctggccctgctggaaagtcctaccttgcctaggacgccatccccgatatagccccaagatgcaaacctgccaagtgctagggcagccctgccttcctgtccatttcagtctcttggccttgctgtgttccaagtggaaatgggagtgtgctttcctggtttgctagtgtactatcacccggaccacagcgtcctgtgcaaaaatttgcttcctctctcttcccctttcactctttctcttttctcttccccacccccttttttttctctttccccttacctttctttcctttccactcttcctgtccttccttccttcaactattaggactatatgtcaagtaatgtgcaaaacaaagacagttcctgccctgatggagcttgtagatcagaagggaagatgagcattaagtaattatatagattaatgtacaactgtgatgagtgcaacaaaagagaggttcatggcactatcaaacatgcaatggacggattttgtttttgcctataaactcttgccatagaaagcttgaaaatcagtccagggggacagcattaatcaccatgttctttccttatccctgtcttccccaaaattcatgtgttgaaacttaacaagaggtgggaactttaggatgtgattaagtcgtgagggcacagctcttatagatggggtcacggtccttctaaaagggcttgagggagtggttttgtttccttccatcccttccgccacatgaggacacagtcttcgttccctctggaggactcagcaacaacacaccatcttggaagcagagagcagtcctcaccagacacggaatctgccagtgccttgatcttggacttaccagcctccatacctgtgagaaataaatttctattgtctataagttacccagactgtggtattttcttctggcagcacaaatggacacccagaaactgatgcatgcatcttctgactcctttgattccaaaatacaaaatattagaataaagttatggaagtc

SEQ ID NO: 202957 - DNA, 581 bp, Artificial Sequence
  derived and/or modified sequence
taaaaacttctgttcagagcaaggacggatagtcactgcgattagggtgggcgacccggaggggggtcatgagcctggaccttgacagatctggtgaggtaagtgcggcagaagcctggcgcatgcgcagtacaagcccttaagcggcgccccgcccacatactactacaacttccggcaggctccgcgcccgcctctggcgcgtcgcgggctgctgacgtaatgcggtagcgcggggaatttcgagtggtgttggagcgccggaggctagtgggtggctgacccccagcatcctcgggagcgaccatggactccctggccgagtctcggtggcctccgggcctggcagtcatgaagacaatagatgatttgctgcggtgtggaatttgcttcgagtatttcaacattgcaatgataatacctcagtgttcacataactactgctctctctgtataagaaaatttctgtcctataaaactcagtgtccaacttgctgtgtgactgtcacagagccggatctgaaaaataaccgcatattagatgaactggtaaaaagcttgaattttgcacggaatcatct

SEQ ID NO: 202958 - protein, 725 aa, Artificial Sequence
  derived and/or modified sequence
MAAASAVSVLLVAAERNRWHRLPSLLLPPRTWVWRQRTMKYTTATGRNITKVLIANRGEIACRVMRTAKKLGVQTVAVYSEADRNSMHVDMADEAYSIGPAPSQQSYLSMEKIIQVAKTSAAQAIHPGCGFLSENMEFAELCKQEGIIFIGPPPSAIRDMGIKSTSKSIMAAAGVPVVEGYHGEDQSDQCLKEHARRIGYPVMIKAVRGGGGKGMRIVRSEQEFQEQLESARREAKKSFNDDAMLIEKFVDTPRHVEVQVFGDHHGNAVYLFERDCSVQRRHQKIIEEAPAPGIKSEVRKKLGEAAVRAAKAVNYVGAGTVEFIMDSKHNFCFMEMNTRLQVEHPVTEMITGTDLVEWQLRIAAGEKIPLSQEEITLQGHAFEARIYAEDPSNNFMPVAGPLVHLSTPRADPSTRIETGVRQGDEVSVHYDPMIAKLVVWAADRQAALTKLRYSLRQYNIVGLHTNIDFLLNLSGHPEFEAGNVHTDFIPQHHKQLLLSRKAAAKESLCQAALGLILKEKAMTDTFTLQAHDQFSPFSSSSGRRLNISYTRNMTLKDGKNNVAIAVTYNHDGSYSMQIEDKTFQVLGNLYSEGDCTYLKCSVNGVASKAKLIILENTIYLFSKEGSIEIDIPVPKYLSSVSSQETQGGPLAPMTGTIEKVFVKAGDKVKAGDSLMVMIAMKMEHTIKSPKDGTVKKVFYREGAQANRHTPLVEFEEEESDKRESE

SEQ ID NO: 202959 - protein, 575 aa, Artificial Sequence
  derived and/or modified sequence
MEKIIQVAKTSAAQHIQSIMAAAGVPVVEGYHGEDQSDQCLKEHARRIGYPVMIKAVRGGGGKGMRIVRSEQEFQEQLESARREAKKSFNDDAMLIEKFVDTPRHVEVQVFGDHHGNAVYLFERDCSVQRRHQKIIEEAPAPGIKSEVRKKLGEAAVRAAKAVNYVGAGTVEFIMDSKHNFCFMEMNTRLQVEHPVTEMITGTDLVEWQLRIAAGEKIPLSQEEITLQGHAFEARIYAEDPSNNFMPVAGPLVHLSTPRADPSTRIETGVRQGDEVSVHYDPMIAKLVVWAADRQAALTKLRYSLRQYNIVGLHTNIDFLLNLSGHPEFEAGNVHTDFIPQHHKQLLLSRKAAAKESLCQAALGLILKEKAMTDTFTLQAHDQFSPFSSSSGRRLNISYTRNMTLKDGKNNVAIAVTYNHDGSYSMQIEDKTFQVLGNLYSEGDCTYLKCSVNGVASKAKLIILENTIYLFSKEGSIEIDIPVPKYLSSVSSQETQGGPLAPMTGTIEKVFVKAGDKVKAGDSLMVMIAMKMEHTIKSPKDGTVKKVFYREGAQANRHTPLVEFEEEESDKRESE

SEQ ID NO: 202960 - protein, 474 aa, Artificial Sequence
  derived and/or modified sequence
MAAASAVSVLLVAAERNRWHRLPSLLLPPRTWVWRQRTMKYTTATDEAYSIGPAPSQQSYLSMEKIIQVAKTSAAQAIHPGCGFLSENMEFAELCKQEGIIFIGPPPSAIRDMGIKSTSKSIMAAAGVPVVEGYHGEDQSDQCLKEHARRIGYPVMIKAVRGGGGKGMRIVRSEQEFQEQLESARREAKKSFNDDAMLIEKFVDTPRHVEVQVFGDHHGNAVYLFERDCSVQRRHQKIIEEAPAPGIKSEVRKKLGEAAVRAAKAVNYVGAGTVEFIMDSKHNFCFMEMNTRLQVEHPVTEMITGTDLVEWQLRIAAGEKIPLSQEEITLQGHAFEARIYAEDPSNNFMPVAGPLVHLSTPRADPSTRIETGVRQGDEVSVHYDPMIAKLVVWAADRQAALTKLRYSLRQYNIVGLHTNLTSYSTCLATQSLKLGTCTLISSLNTTNSCCSVGRLQPKSLYARQPWVSSSRRKP

SEQ ID NO: 202961 - protein, 200 aa, Artificial Sequence
  derived and/or modified sequence
MEKIIQVAKTSAAQAIHPGCGFLSENMEFAELCKQEGIIFIGPPPSAIRDMGIKSTSKSIMAAAGVPVVEGYHGEDQSDQCLKEHARRIGYPVMIKAVRGGGGKGMRIVRSEQEFQEQLESARREAKKSFNDDAMLIEKFVDTPRHVEVQVFGDHHGNAVYLFERDCSVQRRHQKIIEEAPAPGIKSEVRKKGRSCSQSC

SEQ ID NO: 202962 - DNA, 2178 bp, Artificial Sequence
  derived and/or modified sequence
atggccgcggcctcagcagtgtctgtcctacttgtggctgctgaaaggaaccggtggcataggcttccaagtctgcttctacctccgaggacgtgggtatggcgccaaaggacgatgaaatacacgaccgccaccggcaggaacataacaaaggtgctgatagcaaaccgcggcgaaatcgcttgccgggtcatgcgcacagccaaaaagctcggggtgcagaccgtggctgtctattccgaggcagatcgcaattcaatgcatgttgacatggccgacgaggcgtattcgataggccctgctcccagccagcagagctacctatcaatggagaagatcatccaagtggctaagactagtgcagcccaggctatccaccccggctgtggctttctgtccgagaatatggaatttgcggagctgtgcaagcaggaaggcattatattcatcgggccgcctcctagtgctattcgggatatgggcattaagagcacctctaagagcattatggcagcagctggagttccggttgtcgagggatatcacggcgaggaccagtcggatcaatgtctgaaagaacacgcccggcgcatcgggtatcccgtcatgatcaaggcagtgagaggaggtggtgggaaaggcatgagaatcgtaaggtccgagcaggaatttcaggagcagctcgagagtgcccgaagggaggctaagaagagcttcaatgatgacgcaatgcttatcgagaaattcgtggacaccccgagacacgtggaggttcaggtgttcggcgatcaccacggaaacgccgtgtatttgttcgagcgcgattgctctgttcagaggaggcaccagaaaatcatcgaggaggcccccgctcccgggatcaaatctgaggtccgaaagaaactaggagaagctgcagtgcgcgctgctaaggccgtgaactacgttggtgcaggcactgtggagtttataatggacagcaaacacaatttctgcttcatggagatgaatactaggctccaggttgagcacccagtcaccgagatgattacagggacggaccttgtggaatggcaactgcgcatcgctgcgggcgagaagattcccctctctcaggaggagatcacgctccaaggtcacgctttcgaagcacgcatttacgccgaagacccatcaaataattttatgcccgtggccggcccacttgtgcacctgtccacgccacgtgctgacccatcgaccaggatagagactggggtgcgccagggagatgaagtcagcgttcactatgaccctatgattgctaagctcgtggtgtgggctgcagatagacaggcggccctgaccaagctgcggtacagcttgagacagtacaacattgtcggacttcacacgaatatcgattttttgttgaacctgtccggccatcccgagttcgaggctggcaacgtacacaccgacttcattcctcaacaccataaacagctgctgctgtcccgaaaagccgctgctaaagaatcgctttgccaggccgccctgggcctgatcttgaaggagaaagccatgaccgacaccttcacgctacaagctcatgatcagttcagtccattttcctcttcaagcggccgcagattgaacatctcatacacccgaaacatgactttaaaggacggaaagaacaatgtggctatcgctgtaacttacaatcacgatggctcatattccatgcaaatcgaggataagacctttcaggttctgggcaacctgtattccgagggtgattgtacctatttaaagtgtagtgtgaatggggtggcttctaaagccaagctcatcatcctcgagaacacaatctatttgttctccaaagagggctccatcgaaatcgacatacccgtgcctaagtatcttagctctgtgtcctcccaagagacacaaggtggtcctcttgcccctatgactggaaccatcgaaaaagtgttcgtaaaggctggcgataaggtaaaggctggcgattcactgatggtgatgattgctatgaaaatggagcacacaataaaaagtccaaaggacggcaccgtgaaaaaagtcttttaccgcgagggagcgcaggccaatcgtcataccccacttgtagagttcgaggaggaagagagcgacaagcgtgagagcgagtag

SEQ ID NO: 202963 - DNA, 2178 bp, Artificial Sequence
  derived and/or modified sequence
atggctgctgccagcgctgtgtctgtgctgctggtggccgctgagaggaaccgctggcaccggctgcccagcctgctgctgccccccaggacctgggtgtggaggcagaggaccatgaagtacaccacagccactggaagaaacatcaccaaggtgctgattgccaacagaggagagatcgcctgccgggtgatgaggacagccaagaagctgggcgtgcagacagtggccgtgtacagcgaggccgacaggaacagcatgcacgtggacatggctgatgaggcctacagcatcggccctgcccccagccagcagagctacctgtccatggagaagatcatccaggtggccaagaccagcgctgcccaggccatccaccctggctgcggcttcctgtctgagaacatggagtttgctgagctgtgcaagcaggagggcatcatcttcatcggccccccaccttctgccatccgggacatgggcatcaagagcaccagcaagagcatcatggctgctgctggggtgcctgtggtggagggctaccacggggaggaccagagcgaccagtgcctgaaggagcacgcccggcgcatcggctaccctgtgatgatcaaggctgtgcggggcggcggcggcaagggcatgagaattgtgcgctctgagcaggagttccaggagcagctggagagcgcccggcgggaggccaagaagagcttcaatgatgatgccatgctgattgagaagtttgtggacacccccaggcatgtggaggtgcaggtgtttggagaccaccacggcaatgctgtgtacctgtttgagcgggactgcagcgtgcagaggaggcaccagaagatcatcgaggaggccccagcccctggcatcaagtctgaggtgaggaagaagctgggggaggccgctgtgcgggccgccaaggctgtgaactacgtgggcgccggcaccgtggagttcatcatggacagcaagcacaacttctgcttcatggagatgaacacccggctgcaggtggagcaccctgtgacagagatgatcactggaacagacctggtggagtggcagctgagaattgctgctggggagaagatccccctgagccaggaggagatcaccctgcagggccacgcctttgaggcccgcatctatgcagaggaccccagcaacaacttcatgcctgtggccggccccctggtgcacctgagcacccccagggctgaccccagcacccgcatcgagaccggggtgcggcagggagatgaggtgtctgtgcactatgaccccatgattgccaagctggtggtgtgggccgctgaccggcaggccgccctgaccaagctgcgctacagcctgcggcagtacaacatcgtgggcctgcacaccaacatcgacttcctgctgaacctgagcggccaccctgagtttgaagctggaaatgtgcacacagacttcatcccccagcaccacaagcagctgctgctgagcaggaaggctgctgccaaggagagcctgtgccaggccgccctgggcctcatcctgaaggagaaggccatgacagacaccttcaccctgcaggcccatgaccagttcagccccttcagcagcagcagtggaagaaggctgaacatctcctacaccaggaacatgaccctgaaggatggcaagaacaacgtggccatcgctgtgacctacaaccatgatggcagctacagcatgcagatcgaggacaagaccttccaggtgctgggcaacctgtacagcgagggggactgcacctacctgaagtgcagcgtgaatggagtggccagcaaggccaagctgatcatcctggagaacaccatctacctgttcagcaaggagggcagcattgaaattgacatccctgtgcccaagtacctgagctctgtgagcagccaggagacccagggcggccccctggcccccatgacaggcaccatcgagaaggtgtttgtgaaggccggggacaaggtgaaggccggggacagcctgatggtgatgattgccatgaagatggagcacaccatcaagagccccaaggatggcaccgtgaagaaggtgttctaccgggagggcgcccaggccaacagacacacccccctggtggagtttgaggaggaggagagtgacaagcgggagagcgagtag

SEQ ID NO: 202964 - DNA, 2545 bp, Artificial Sequence
  derived and/or modified sequence
acattcttggatcagcccaaaggtaggctcaggctccgacggtggccggcgggggtcacgaggcttcgtagtggaggaacgggtttggcgtgtgggacgcagctgcctctgtactggggagtcacggagtggccgggctccagggacatggcggcggcctctgcggtgtcggtgctgctggtggcggcggagaggaaccggtggcatcgtctcccgagcctgctcctgccgccgaggacatgggtgtggaggcaaagaaccatgaagtacacaacagccacaggaagaaacattaccaaggtcctcattgcaaacagaggagaaattgcctgcagggtgatgcgcacagccaaaaaactgggtgtacagactgtggcggtttatagtgaggctgacagaaattccatgcatgtagatatggcagatgaagcatattccatcggccccgctccctcccagcagagctacctatctatggagaaaatcattcaagtggccaagacctctgctgcacaggctatccatccaggatgcggttttctctcagaaaacatggaatttgctgaactttgtaagcaagaaggaattatttttataggccctcctccatctgcaattagagacatgggtataaagagcacatccaaatccataatggctgctgctggagtacctgttgtggagggttatcatggtgaggaccaatcagaccagtgcctgaaggaacacgccaggagaattggctatcctgtcatgattaaagccgtccggggtggaggaggaaaaggaatgaggattgttagatcagaacaagaatttcaagaacagttagagtcagcacggagagaagctaagaagtctttcaatgatgatgctatgctgatcgagaagtttgtagacacaccgaggcatgtagaagtccaggtgtttggtgatcaccatggcaatgctgtgtacttgtttgaaagagactgtagtgtgcagaggcgacatcagaagatcattgaggaggccccagcgcctggtattaaatctgaagtaagaaaaaagctgggagaagctgcagtcagagctgctaaagctgtaaattatgttggagcagggactgtggagtttattatggactcaaaacataatttctgtttcatggagatgaatacaaggctgcaagtggaacatcctgttactgagatgatcacaggaactgacttggtggagtggcagcttagaattgcagcaggagagaagattcctttgagccaggaagaaataactctgcagggccatgccttcgaagctagaatatatgcagaagatcctagcaataacttcatgcctgtggcaggcccattagtgcacctctctactcctcgagcagacccttccaccaggattgaaactggagtacggcaaggagacgaagtttccgtgcattatgaccccatgattgcgaagctggtcgtgtgggcagcagatcgccaggcggcattgacaaaactgaggtacagccttcgtcagtacaatattgttggactgcacaccaacattgacttcttactcaacctgtctggccacccagagtttgaagctgggaacgtgcacactgatttcatccctcaacaccacaaacagttgttgctcagtcggaaggctgcagccaaagagtctttatgccaggcagccctgggtctcatcctcaaggagaaagccatgaccgacactttcactcttcaggcacatgatcaattctctccattttcgtctagcagtggaagaagactgaatatctcgtataccagaaacatgactcttaaagatggtaaaaacaatgtagccatagctgtaacgtataaccatgatgggtcttatagcatgcagattgaagataaaactttccaagtccttggtaatctttacagcgagggagactgcacttacctgaaatgttctgttaatggagttgctagtaaagcgaagctgattatcctggaaaacactatttacctattttccaaggaaggaagtattgagattgacattccagtccccaaatacttatcttctgtgagctcacaagaaactcagggcggccccttagctcctatgactggaaccattgaaaaggtgtttgtcaaagctggagacaaagtgaaagcgggagattccctcatggttatgatcgccatgaagatggagcataccataaagtctccaaaggatggcacagtaaagaaagtgttctacagagaaggtgctcaggccaacagacacactcctttagtcgagtttgaggaggaagaatcagacaaaagggaatcggaataaactccagcaaggaaatggccagttaagtagtgtcttctctctccaccaaaaagaggaagtgcctccagcttttctgggggtctcataaagagcagttttactaaatgattgtatgcttatgctgaacacctttcatattggagaatcatgcatttgggtcactaattatctcaaaatatttcatactaataaagttgaattattttttattggaagccaa

SEQ ID NO: 202965 - DNA, 1905 bp, Artificial Sequence
  derived and/or modified sequence
gacggtggccggcgggggtcacgaggcttcgtagtggaggaacgggtttggcgtgtgggacgcagctgcctctgtactggggagtcacggagtggccgggctccagggacatggcggcggcctctgcggtgtcggtgctgctggtggcggcggagaggaaccggtggcatcgtctcccgagcctgctcctgccgccgaggacatgggtgtggaggcaaagaaccatgaagtacacaacagccacagatgaagcatattccatcggccccgctccctcccagcagagctacctatctatggagaaaatcattcaagtggccaagacctctgctgcacaggctatccatccaggatgcggttttctctcagaaaacatggaatttgctgaactttgtaagcaagaaggaattatttttataggccctcctccatctgcaattagagacatgggtataaagagcacatccaaatccataatggctgctgctggagtacctgttgtggagggttatcatggtgaggaccaatcagaccagtgcctgaaggaacacgccaggagaattggctatcctgtcatgattaaagccgtccggggtggaggaggaaaaggaatgaggattgttagatcagaacaagaatttcaagaacagttagagtcagcacggagagaagctaagaagtctttcaatgatgatgctatgctgatcgagaagtttgtagacacaccgaggcatgtagaagtccaggtgtttggtgatcaccatggcaatgctgtgtacttgtttgaaagagactgtagtgtgcagaggcgacatcagaagatcattgaggaggccccagcgcctggtattaaatctgaagtaagaaaaaagctgggagaagctgcagtcagagctgctaaagctgtaaattatgttggagcagggactgtggagtttattatggactcaaaacataatttctgtttcatggagatgaatacaaggctgcaagtggaacatcctgttactgagatgatcacaggaactgacttggtggagtggcagcttagaattgcagcaggagagaagattcctttgagccaggaagaaataactctgcagggccatgccttcgaagctagaatatatgcagaagatcctagcaataacttcatgcctgtggcaggcccattagtgcacctctctactcctcgagcagacccttccaccaggattgaaactggagtacggcaaggagacgaagtttccgtgcattatgaccccatgattgcgaagctggtcgtgtgggcagcagatcgccaggcggcattgacaaaactgaggtacagccttcgtcagtacaatattgttggactgcacaccaacttgacttcttactcaacctgtctggccacccagagtttgaagctgggaacgtgcacactgatttcatccctcaacaccacaaacagttgttgctcagtcggaaggctgcagccaaagagtctttatgccaggcagccctgggtctcatcctcaaggagaaagccatgaccgacactttcactcttcaggcacatgatcaattctctccattttcgtctagcagtggaagaagactgaatatctcgtataccagaaacatgactcttaaagatggtaaaaacaatgtagccatagctgtaacgtataaccatgatgggtcttatagcatgcagattgaagataaaactttccaagtccttggtaatctttacagcgagggagactgcacttacctgaaatgttctgttaatggagttgctagtaaagcgaagctgattatcctggaaaacactatttacctattttccaaggaaggaagtattgagattgacattccagtccccaaatacttatcttctgtgagctcacaagaaactca

SEQ ID NO: 202966 - DNA, 2178 bp, Artificial Sequence
  derived and/or modified sequence
atggccgccgccagcgccgtgagcgtgctgctggtggccgccgagcgcaataggtggcacagattgccttccctcctgcttcctccaagaacgtgggtgtggagacagaggactatgaaatatacgactgctactggccggaacattactaaagtgctgatagcaaaccgtggcgagatcgcttgcagggtgatgcgcacggcaaagaaactaggggtccagaccgttgccgtctacagcgaggccgaccgtaactcgatgcacgtggacatggccgacgaagcctattccatcggtccagccccatctcaacagtcatacttgtccatggagaagattatccaggtcgctaaaactagcgccgctcaggcgatccacccaggatgcggctttctctctgaaaacatggaattcgctgagctctgtaagcaggaaggaattattttcataggtccccccccaagtgccattcgcgacatgggaattaaatcaaccagcaaaagtattatggccgcggctggagtgccagtcgtggaggggtaccatggtgaagatcagtcagatcaatgcctgaaagaacatgcgaggcgcatcgggtaccccgtaatgatcaaagccgtcagaggcggcgggggtaaaggaatgagaatcgtcagatccgaacaagaatttcaggaacagctcgagtccgcaagacgggaggcgaaaaagagttttaacgacgatgcaatgctgatcgagaagttcgttgatacccccagacatgtggaggtgcaggtatttggagatcatcacggcaatgccgtttatctatttgagagagattgcagtgtccagcgcagacaccagaaaattatagaagaggcccccgctccaggtatcaagtctgaagtgaggaagaagctgggagaggcagctgttcgggcggccaaggcagtcaattacgtgggcgctgggacagtggagttcatcatggattccaaacacaatttttgtttcatggaaatgaacactagactccaagtggaacatccagtgacggagatgatcacgggcaccgatctggttgagtggcagttgaggattgctgctggtgagaagatccccctcagtcaggaagagatcaccctacaaggccacgctttcgaggcacgcatatacgccgaggaccccagcaacaatttcatgcctgtagccggacctctcgttcacttaagcacacccagagccgacccaagcacgcgtatcgaaactggtgtgcggcaaggcgacgaagtgtccgtccactacgatcctatgatcgccaagctggtggtctgggctgccgaccgccaagccgctctgacaaaactgcgctattctctcagacagtataatatagtcgggctccacacaaatatcgactttcttcttaacctgtctggtcaccctgaattcgaggcgggtaacgtacacaccgattttatcccacagcaccacaaacagttactcctgagtaggaaagcggccgcgaaggagagcttgtgccaggcggcccttggcctcatattaaaagaaaaagccatgaccgataccttcacactgcaagcgcatgatcagtttagccccttctcctcatcatctgggagacggctgaacataagctacacccggaatatgaccctgaaagacggaaaaaacaacgtcgcgatcgccgttacctataatcatgatgggagctactccatgcagattgaggataagaccttccaggtgcttgggaacctctatagcgagggcgactgcacctatttaaagtgctcagttaacggcgtagcttctaaggcgaaactcataatactggaaaatactatttacctcttctcaaaagagggctctattgaaattgatatccccgttcctaagtatctgtcgagtgtcagctcccaggagacacagggaggacctctcgcccctatgactgggacaatcgaaaaggtcttcgttaaagccggagataaggtgaaggcgggagattcactcatggtgatgattgccatgaaaatggaacacaccattaagtcacccaaggatgggactgtgaaaaaagtattctatcgggagggcgcacaagccaatagacatactcccctagtcgagttcgaggaggaagagagcgacaagcgtgagtctgagtag

SEQ ID NO: 202967 - DNA, 2178 bp, Artificial Sequence
  derived and/or modified sequence
atggccgcagcatctgcagtttctgtgcttttggtggccgctgagagaaatcggtggcatcgactaccgtccttgctcctgccgccacgcacctgggtatggcgacaacgaactatgaagtacaccacagcaactgggagaaacatcaccaaggtgctgattgcaaaccgcggtgaaattgcttgccgcgtaatgcgcaccgccaaaaagttgggggtgcagacagtcgctgtatacagcgaggcagatcggaactctatgcatgtcgacatggccgacgaggcctattccatcggccctgcgcctagtcaacagtcctacctgtccatggaaaagatcattcaagtggccaaaacatctgcagcccaggccatacacccaggttgcgggttcctctctgagaacatggagtttgcagagttgtgtaagcaggaagggattatcttcatcggcccaccaccaagcgccattagggacatgggcattaaatcaacatccaagtccatcatggctgcagctggagtgccagtggttgaaggctaccatggcgaggaccagtcagatcagtgcttaaaagagcacgctcgcagaatagggtatccagtgatgatcaaggccgtgcggggtggagggggtaaaggcatgcgaattgttcggtccgaacaggagttccaggagcaattggaatcagcaagaagggaggccaagaaatcattcaatgacgacgccatgctgattgaaaagttcgtggatactcctcggcacgtggaagttcaagttttcggcgaccatcatggaaacgccgtgtacctcttcgagcgtgattgctctgtacagcggaggcatcagaagataatagaggaagcgccagcgcctggcattaaaagcgaagtgaggaaaaaactgggcgaggctgccgtgcgtgcggctaaggctgtcaattacgtgggcgctggcacagtggaatttatcatggattctaaacacaacttctgcttcatggagatgaatacccgtttacaggtggaacaccctgttaccgaaatgattacaggcacagacttagttgaatggcagttacgtatcgctgctggcgaaaaaatccccttgtcccaggaggagatcacacttcaaggacatgcctttgaggcaagaatttatgccgaagatccctccaacaattttatgcccgtggctgggccacttgtgcaccttagtacacccagagccgacccgtcgacaagaattgagacaggagtgcgccagggtgatgaagtgtccgttcattacgatccaatgatcgcaaaactcgttgtttgggctgcagacagacaggctgccctgaccaagctgcgctactcactgcgccagtataacatagtgggactgcacaccaatattgactttctcttgaacctgtccggccatccagagttcgaagccggtaacgtccatacagacttcatccctcagcatcataaacagttgctcctgtcaaggaaagccgcagcaaaggagagcctttgccaggccgctctagggcttattcttaaggagaaagcaatgaccgacacattcactttgcaggcccatgaccaattttccccgttctcaagtagctcaggcagacgcctgaacataagttacaccaggaacatgacgctgaaggatggaaaaaataacgtggccatagctgtgacatacaaccacgacgggtcctacagtatgcagattgaggacaagactttccaggttcttggcaacctgtatagtgaaggcgactgcacatatcttaaatgtagcgttaatggagtggcaagcaaagcaaagctgatcattctggaaaatacaatatatctgttttcaaaggaaggctccattgagattgatatcccagtcccgaaatatctctcctcagtttcaagccaggaaacccaaggaggcccacttgctcccatgacaggcacgatcgagaaggtcttcgtcaaagcaggagacaaggtcaaagccggagattcactgatggttatgatcgcaatgaagatggagcatacgatcaagtccccaaaagacggcacagtgaaaaaagttttctaccgcgagggggctcaggccaatagacatacgcctctcgtcgaattcgaagaggaggagtccgataagagggagtcagagtag

SEQ ID NO: 202968 - DNA, 2178 bp, Artificial Sequence
  derived and/or modified sequence
atggccgccgccagcgccgtgagcgtgctgctggtggccgccgagagaaacagatggcacagactgcccagcctgctgctgccccccagaacctgggtgtggagacagagaaccatgaagtacaccaccgccaccggcagaaacatcaccaaggtgctgatcgccaacagaggcgagatcgcctgcagagtgatgagaaccgccaagaagctgggcgtgcagaccgtggccgtgtacagcgaggccgacagaaacagcatgcacgtggacatggccgacgaggcctacagcatcggccccgcccccagccagcagagctacctgagcatggagaagatcatccaggtggccaagaccagcgccgcccaggccatccaccccggctgcggcttcctgagcgagaacatggagttcgccgagctgtgcaagcaggagggcatcatcttcatcggccccccccccagcgccatcagagacatgggcatcaagagcaccagcaagagcatcatggccgccgccggcgtgcccgtggtggagggctaccacggcgaggaccagagcgaccagtgcctgaaggagcacgccagaagaatcggctaccccgtgatgatcaaggccgtgagaggcggcggcggcaagggcatgagaatcgtgagaagcgagcaggagttccaggagcagctggagagcgccagaagagaggccaagaagagcttcaacgacgacgccatgctgatcgagaagttcgtggacacccccagacacgtggaggtgcaggtgttcggcgaccaccacggcaacgccgtgtacctgttcgagagagactgcagcgtgcagagaagacaccagaagatcatcgaggaggcccccgcccccggcatcaagagcgaggtgagaaagaagctgggcgaggccgccgtgagagccgccaaggccgtgaactacgtgggcgccggcaccgtggagttcatcatggacagcaagcacaacttctgcttcatggagatgaacaccagactgcaggtggagcaccccgtgaccgagatgatcaccggcaccgacctggtggagtggcagctgagaatcgccgccggcgagaagatccccctgagccaggaggagatcaccctgcagggccacgccttcgaggccagaatctacgccgaggaccccagcaacaacttcatgcccgtggccggccccctggtgcacctgagcacccccagagccgaccccagcaccagaatcgagaccggcgtgagacagggcgacgaggtgagcgtgcactacgaccccatgatcgccaagctggtggtgtgggccgccgacagacaggccgccctgaccaagctgagatacagcctgagacagtacaacatcgtgggcctgcacaccaacatcgacttcctgctgaacctgagcggccaccccgagttcgaggccggcaacgtgcacaccgacttcatcccccagcaccacaagcagctgctgctgagcagaaaggccgccgccaaggagagcctgtgccaggccgccctgggcctgatcctgaaggagaaggccatgaccgacaccttcaccctgcaggcccacgaccagttcagccccttcagcagcagcagcggcagaagactgaacatcagctacaccagaaacatgaccctgaaggacggcaagaacaacgtggccatcgccgtgacctacaaccacgacggcagctacagcatgcagatcgaggacaagaccttccaggtgctgggcaacctgtacagcgagggcgactgcacctacctgaagtgcagcgtgaacggcgtggccagcaaggccaagctgatcatcctggagaacaccatctacctgttcagcaaggagggcagcatcgagatcgacatccccgtgcccaagtacctgagcagcgtgagcagccaggagacccagggcggccccctggcccccatgaccggcaccatcgagaaggtgttcgtgaaggccggcgacaaggtgaaggccggcgacagcctgatggtgatgatcgccatgaagatggagcacaccatcaagagccccaaggacggcaccgtgaagaaggtgttctacagagagggcgcccaggccaacagacacacccccctggtggagttcgaggaggaggagagcgacaagagagagagcgagtag

SEQ ID NO: 202969 - protein, 415 aa, Artificial Sequence
  derived and/or modified sequence
MSGMEKLQNASWIYQQKLEDPFQKHLNSTEEYLAFLCGPRRSHFFLPVSVVYVPIFVVGVIGNVLVCLVILQHQAMKTPTNYYLFSLAVSDLLVLLLGMPLEVYEMWRNYPFLFGPVGCYFKTALFETVCFASILSITTVSVERYVAILHPFRAKLQSTRRRALRILGIVWGFSVLFSLPNTSIHGIKFHYFPNGSLVPGSATCTVIKPMWIYNFIIQVTSFLFYLLPMTVISVLYYLMALRLKKDKSLEADEGNANIQRPCRKSVNKMLFVLVLVFAICWAPFHIDRLFFSFVEEWSESLAAVFNLVHVVSGVFFYLSSAVNPIIYNLLSRRFQAAFQNVISSFHKQWHSQHDPQLPPAQRNIFLTECHFVELTEDIGPQFPCQSSMHNSHLPAALSSEQMSRTNYQSFHFNKT

SEQ ID NO: 202970 - DNA, 1248 bp, Artificial Sequence
  derived and/or modified sequence
atgtctggtatggagaagttgcagaacgcttcttggatctaccagcaaaagctcgaagaccctttccagaaacacctgaacagtaccgaagagtatctagcattcctctgcggtccgagacggtcccacttctttctgccagtcagcgtagtctatgtgcccattttcgttgtaggggttattgggaatgttttggtctgtttagtcatcctccagcaccaagccatgaaaacccctactaattactacctgttcagcctggctgtaagcgatcttctagtgctgcttctcggcatgcctcttgaggtgtacgaaatgtggagaaattatcctttcctgtttggccctgtgggatgttatttcaagactgccctgttcgagacagtatgttttgcaagtatcctttcaattaccactgtgtccgttgaaagatatgtagcgatactccacccattcagagccaagctgcagagcacccggcggcgcgcactaaggatcttgggtatcgtgtggggatttagtgttcttttttccctcccaaacacatcaatccacggcatcaagttccactattttcccaacggttccctcgtgcccggctcagccacgtgcactgtgataaagcccatgtggatatacaacttcataatccaggtgacctcttttttattctacctgcttcccatgacggttatatccgtcctctattatcttatggcgctcaggctcaagaaggacaagtctctggaagccgatgagggcaacgcaaatattcagcgtccatgccgcaagagcgtcaacaagatgctgtttgtgctcgttctggtgttcgcgatctgttgggcccctttccatatagaccgtctcttcttcagcttcgtagaagagtggagcgaatcactggccgctgtcttcaacctggtgcacgtcgtctccggagtcttcttttatctatctagcgccgttaaccccatcatctacaacctgctgtctcggcggtttcaggctgcctttcagaacgtgatctccagttttcacaaacaatggcacagccagcacgacccacagctgccccctgcacagcggaatatctttctcacagaatgtcatttcgtggaactgaccgaagacatcggacctcagtttccgtgtcaatcttctatgcacaactcgcatttgccagccgctctctccagtgaacagatgtctcgtacaaactatcagagttttcactttaataaaacttag

SEQ ID NO: 202971 - DNA, 1248 bp, Artificial Sequence
  derived and/or modified sequence
atgagcggcatggagaagctgcagaatgcctcctggatctaccagcagaagctggaggaccccttccagaagcacctgaacagcacagaggagtacctggccttcctgtgtggcccccggcgcagccacttcttcctgcctgtgtctgtggtgtatgtgcccatctttgtggtgggcgtgattggaaatgtgctggtgtgcctggtgatcctgcagcaccaggccatgaagacccccaccaactactacctgttcagcctggccgtgtctgacctgctggtgctgctgctgggcatgcccctggaggtgtatgagatgtggaggaactaccccttcctgtttggacctgtgggctgctacttcaagacagccctgtttgagaccgtgtgctttgccagcatcctgagcatcaccaccgtgtctgtggagagatatgtggccatcctgcaccccttccgggccaagctgcagagcaccaggagaagagccctgcgcatcctgggcatcgtgtggggcttctctgtgctcttcagcctgcccaacaccagcatccacggcatcaagttccactacttccccaacggcagcctggtgcccggcagcgccacctgcaccgtcatcaagcccatgtggatctacaacttcatcatccaggtgaccagcttcctgttctacctgctgcccatgaccgtcatctctgtgctgtactacctgatggccctgcggctgaagaaggacaagagcctggaggctgatgagggcaatgccaacatccagaggccctgcaggaagtctgtgaacaagatgctgtttgtgctggtgctggtgtttgccatctgctgggcccccttccacatcgacaggctcttcttctcctttgtggaggagtggagcgagagcctggccgctgtgttcaacctggtgcacgtggtgtctggagtcttcttctacctgagcagcgctgtgaaccccatcatctacaacctgctgagccgccgcttccaggccgccttccagaatgtcatcagcagcttccacaagcagtggcacagccagcacgacccccagctgcccccagcccagaggaacatcttcctgacagagtgccactttgtggagctgacagaggacatcggcccccagttcccctgccagagctccatgcacaacagccacctgcctgctgccctgagcagcgagcagatgagcaggaccaactaccagagcttccacttcaacaagacctag

SEQ ID NO: 202972 - DNA, 1248 bp, Artificial Sequence
  derived and/or modified sequence
atgagcggcatggagaagctgcagaacgccagctggatctaccagcaaaaattagaagatcccttccagaaacatttgaattctactgaggaatacctggcctttctgtgtggaccacgacggagtcatttcttcctcccggtttccgtcgtctacgtgccaatcttcgttgtgggtgtgataggcaatgttctggtatgtctcgtaatcctgcagcatcaagcaatgaagacccctacgaattactaccttttcagcttagcagtctcagatttacttgtattgctcttgggcatgcctctggaagtttatgaaatgtggagaaactatccattcttgtttggcccagttggttgctacttcaaaacagccctgttcgaaacagtatgctttgctagcatcctgtctatcaccactgttagcgtcgaaaggtatgtggcaattttgcatccttttcgggccaagctgcaatccacaagacgtcgagcgctaagaatcctgggtatcgtatggggcttttctgtgttgtttagcttgcctaataccagcatacacggcattaaattccactactttcctaatggctccctcgtgcccggctcagcaacctgcacagttatcaagcctatgtggatctataacttcattattcaggtgacgagctttcttttttaccttctgcccatgacagtgatttctgtgctctactatctgatggccctacgcctgaaaaaggataaatccctcgaagcagacgaggggaacgccaatatccaacggccctgcaggaaatcagtcaacaagatgctttttgtcttagtattagtatttgccatctgttgggcaccattccacatcgacaggctgtttttttctttcgtggaagagtggtctgagagcctggccgctgtgtttaatctggtgcacgtagtttccggcgttttcttttacctttcttccgcagtgaatcccatcatttataacctcctgagtcgcagattccaggctgccttccagaacgtcatctcaagttttcataaacaatggcatagtcagcacgatcctcagctgcctcccgcacagaggaacatctttcttacagagtgtcactttgtcgaactaacagaggatattggaccgcagttcccatgccagagttctatgcataattcacatttgccagcagctttgtcatcagagcagatgtcccggaccaactaccagtctttccactttaataagacatag

SEQ ID NO: 202973 - DNA, 2073 bp, Artificial Sequence
  derived and/or modified sequence
aacctggagggtgaaacactcactctctcccagccttccttacgaagcctgtgactttcgtgactgctttctcttttttgttttccttttttcttttttttttttttttcctggctcagcttgaaacagagcctcgtaccaggggaggctcaggccttggattttaatgtcagggatggaaaaacttcagaatgcttcctggatctaccagcagaaactagaagatccattccagaaacacctgaacagcaccgaggagtatctggccttcctctgcggacctcggcgcagccacttcttcctccccgtgtctgtggtgtatgtgccaatttttgtggtgggggtcattggcaatgtcctggtgtgcctggtgattctgcagcaccaggctatgaagacgcccaccaactactacctcttcagcctggcggtctctgacctcctggtcctgctccttggaatgcccctggaggtctatgagatgtggcgcaactaccctttcttgttcgggcccgtgggctgctacttcaagacggccctctttgagaccgtgtgcttcgcctccatcctcagcatcaccaccgtcagcgtggagcgctacgtggccatcctacacccgttccgcgccaaactgcagagcacccggcgccgggccctcaggatcctcggcatcgtctggggcttctccgtgctcttctccctgcccaacaccagcatccatggcatcaagttccactacttccccaatgggtccctggtcccaggttcggccacctgtacggtcatcaagcccatgtggatctacaatttcatcatccaggtcacctccttcctattctacctcctccccatgactgtcatcagtgtcctctactacctcatggcactcagactaaagaaagacaaatctcttgaggcagatgaagggaatgcaaatattcaaagaccctgcagaaaatcagtcaacaagatgctgtttgtcttggtcttagtgtttgctatctgttgggccccgttccacattgaccgactcttcttcagctttgtggaggagtggagtgaatccctggctgctgtgttcaacctcgtccatgtggtgtcaggtgtcttcttctacctgagctcagctgtcaaccccattatctataacctactgtctcgccgcttccaggcagcattccagaatgtgatctcttctttccacaaacagtggcactcccagcatgacccacagttgccacctgcccagcggaacatcttcctgacagaatgccactttgtggagctgaccgaagatataggtccccaattcccatgtcagtcatccatgcacaactctcacctcccagcagccctctctagtgaacagatgtcaagaacaaactatcaaagcttccactttaacaaaacctgaattctttcagagctgactctcctctatgcctcaaaacttcagagaggaacatcccataatgtatgccttctcatatgatattagagaggtagaatggctcttacaactcatgtacccattgctagtttttttttttttaataaacgtgaaaactgagagttagatctggtttcaaaacccaagactgcctgatttttagttatctttccactatcctaactgcctcatgccccttcactagttcatgccaagaacgtgactggaaaggcatggcacctataccttgattaatttccattaatggaaatggttcgtcctgagtcatctacgttccgagtcaggctgtcactcctactaccaatggccactgtgagccacagaaggaagacatgtacgtgctgttctactttatatgatgtgagaagccaacatcagtgtcccttggcagcagtctacaggcataacttgttttattgtgctgaattttattgtgcttctcaaatattgcacttttaaaaaaattgaaagtttgtggcaatgctgttgagcaaatctgctggcatctttcttcccaaaggcatgtgctcacttcatgtctctgtatcaattgtcataattttcgcaataaacttgattattattatatgtgcttatggtga

SEQ ID NO: 202974 - DNA, 1248 bp, Artificial Sequence
  derived and/or modified sequence
atgtccggcatggaaaaactccagaatgcgtcttggatctatcagcagaaacttgaggatcctttccagaagcacctgaattccaccgaagaatacctggctttcctgtgcggaccaaggagatctcatttctttctgcccgtatccgtcgtgtatgtccccattttcgtagtcggggtgatcggaaatgtgctcgtgtgcctcgttattctgcagcatcaagcgatgaaaactcctaccaactattacctgttctctctggctgtgtccgaccttttagtgctgctcctgggtatgcccctggaagtgtacgagatgtggaggaattatcccttcttatttgggccagtgggatgctattttaaaaccgccctgttcgagacagtctgcttcgcctccattctgtccatcactacagtctctgtcgagcgatatgtcgccatactgcatccttttagagccaagctacagagcacgagacgcagggccctccggatccttggtattgtgtgggggttttccgttctgtttagcctgccaaacacatccattcacgggatcaaatttcattacttcccaaacggcagcctggtgccaggaagtgcaacctgtaccgtgattaaaccgatgtggatctacaactttatcatccaagtcacctcattcctgttctacttgctgcccatgactgtgataagcgtgttgtactatcttatggccctgcgacttaaaaaagacaagtctctcgaggcagatgagggaaacgccaatattcagaggccttgccgcaagtcagtcaacaaaatgctattcgtgcttgtgctcgtgttcgccatctgctgggccccatttcacatagatagactcttcttttcctttgtagaggagtggagcgagtccctggccgcagtgttcaatctggtgcatgtggtcagcggagtttttttttacttaagcagtgcagttaacccaataatttacaatctgctctcccgaaggttccaggccgcttttcagaacgtgatttcatcattccataagcagtggcactctcaacacgacccccagttgccccctgctcaaagaaacatcttcctgacagagtgtcattttgtggaactcaccgaagacattggaccccagttcccctgccaaagctccatgcataactcacatttacctgcggcactgtcctccgaacagatgtccaggactaactaccagtcattccatttcaataaaacatag

SEQ ID NO: 202975 - DNA, 1248 bp, Artificial Sequence
  derived and/or modified sequence
atgagcggcatggagaagctgcagaacgccagctggatctaccagcagaagctggaggaccccttccagaagcacctgaacagcaccgaggagtacctggccttcctgtgcggccccagaagaagccacttcttcctgcccgtgagcgtggtgtacgtgcccatcttcgtggtgggcgtgatcggcaacgtgctggtgtgcctggtgatcctgcagcaccaggccatgaagacccccaccaactactacctgttcagcctggccgtgagcgacctgctggtgctgctgctgggcatgcccctggaggtgtacgagatgtggagaaactaccccttcctgttcggccccgtgggctgctacttcaagaccgccctgttcgagaccgtgtgcttcgccagcatcctgagcatcaccaccgtgagcgtggagagatacgtggccatcctgcaccccttcagagccaagctgcagagcaccagaagaagagccctgagaatcctgggcatcgtgtggggcttcagcgtgctgttcagcctgcccaacaccagcatccacggcatcaagttccactacttccccaacggcagcctggtgcccggcagcgccacctgcaccgtgatcaagcccatgtggatctacaacttcatcatccaggtgaccagcttcctgttctacctgctgcccatgaccgtgatcagcgtgctgtactacctgatggccctgagactgaagaaggacaagagcctggaggccgacgagggcaacgccaacatccagagaccctgcagaaagagcgtgaacaagatgctgttcgtgctggtgctggtgttcgccatctgctgggcccccttccacatcgacagactgttcttcagcttcgtggaggagtggagcgagagcctggccgccgtgttcaacctggtgcacgtggtgagcggcgtgttcttctacctgagcagcgccgtgaaccccatcatctacaacctgctgagcagaagattccaggccgccttccagaacgtgatcagcagcttccacaagcagtggcacagccagcacgacccccagctgccccccgcccagagaaacatcttcctgaccgagtgccacttcgtggagctgaccgaggacatcggcccccagttcccctgccagagcagcatgcacaacagccacctgcccgccgccctgagcagcgagcagatgagcagaaccaactaccagagcttccacttcaacaagacctag

SEQ ID NO: 202976 - protein, 222 aa, Artificial Sequence
  derived and/or modified sequence
MEIPPTNYPASRAALVAQNYINYQQGTPHRVFEVQKVKQASMEDIPGRGHKYHLKFAVEEIIQKQVKVNCTAEVLYPSTGQETAPEVNFTFEGETGKNPDEEDNTFYQRLKSMKEPLEAQNIPDNFGNVSPEMTLVLHLAWVACGYIIWQNSTEDTWYKMVKIQTVKQVQRNDDFIELDYTILLHNIASQEIIPWQMQVLWHPQYGTKVKHNSRLPKEVQLE

SEQ ID NO: 202977 - DNA, 669 bp, Artificial Sequence
  derived and/or modified sequence
atggagattcctccgaccaattatccggcctccagagcagctttagtagcacaaaactacattaattaccaacagggcactccccacagagttttcgaagtgcagaaagttaagcaagcttctatggaggacatccccgggagagggcataagtatcacttgaagtttgctgttgaggagattatccagaaacaggtcaaagtgaactgtactgctgaagttctgtatccctccaccggtcaggaaacggctccagaggtgaatttcacattcgagggcgagaccgggaaaaatcctgatgaggaagataatacattctatcagcgactgaagtcgatgaaggagcccttggaggctcaaaatatccccgataatttcggcaacgtatcccccgaaatgacgctggtgctgcacctggcctgggtcgcatgtggctacatcatctggcaaaatagtacagaagatacatggtataaaatggttaaaatccagaccgtcaagcaagtgcagcgaaatgatgatttcatcgagctggactacactattctactgcacaatatcgccagtcaagagatcataccctggcaaatgcaggtgctttggcacccacagtacggtaccaaggtgaagcataatagtcggcttccgaaagaagtgcaacttgagtag

SEQ ID NO: 202978 - DNA, 1116 bp, Artificial Sequence
  derived and/or modified sequence
agaagcagtcagcccagggctctcggatgcagggagcctgggcccaaacagcagcttccggagtcggaaggagctgaggaagaagactgactgaaggagcttgcgacttttccgcctcggcaaccggacccagcagcaagcaggacgggcggcgctctgctactggtcccgttaagccagagtagcccaagccctgaagtcactgctcatccggaatggaaatcccgccgaccaactacccagcctccagggcggccttggtggcacagaactacatcaactaccagcaggggaccccgcacagggtgtttgaggtgcagaaggtcaaacaagccagcatggaggatattccaggaagaggacataagtatcaccttaaatttgctgttgaagaaattatacaaaaacaagttaaggtgaactgcacagctgaagtactttacccttcaacgggacaagaaactgcaccagaagtcaacttcacatttgaaggagaaactggaaagaatccagatgaagaagacaacacattttatcaaagacttaagtccatgaaggaaccgctagaagcacaaaatattccagacaattttggaaatgtatctccagaaatgacgctcgttctacatttagcctgggttgcctgtggttatataatatggcaaaattctactgaagacacatggtataaaatggtaaaaattcaaactgtcaagcaagtgcaaagaaatgatgactttattgaattagactacaccattctacttcataatatagcatctcaggagattattccctggcaaatgcaagttctctggcatccacaatacggcactaaagtaaaacataatagccgtctgccaaaggaagtacaactggaataaacaaaaaccctaacactggaagtgtaaacatgtctattgatgtgtatgccaatttcactggcatctagcttatgaggccaaataatcccaaagtgtcactttatataaatgtcttgattacagtatagaactttatagagtccataatacaaagtatcactacataaaaatgtctttaaaacagtaatagtggtatgtatatccaaaataaaaagcttcaatttcagcctca

SEQ ID NO: 202979 - DNA, 669 bp, Artificial Sequence
  derived and/or modified sequence
atggagatcccccccaccaactacccagccagcagagctgccctggtggcccagaactacatcaactaccagcagggcaccccccaccgggtgtttgaggtgcagaaggtgaagcaggcctccatggaggacatccctggccggggccacaagtaccacctgaagtttgctgtggaggagatcatccagaagcaggtgaaggtgaactgcacagctgaggtgctgtaccccagcacaggccaggagacagcccctgaggtgaacttcacctttgaaggagaaacaggcaagaacccagatgaggaggacaacaccttctaccagaggctgaagtccatgaaggagcccctggaggcccagaacatcccagacaactttggaaatgtgtccccagagatgaccctggtgctgcacctggcctgggtggcctgtggctacatcatctggcagaacagcacagaggacacctggtacaagatggtgaagatccagacagtgaagcaggtgcagagaaatgatgacttcatcgagctggactacaccatcctgctgcacaacatcgccagccaggagatcatcccctggcagatgcaggtgctgtggcacccccagtatggcaccaaggtgaagcacaacagccggctgcccaaggaggtgcagctggagtag

SEQ ID NO: 202980 - DNA, 669 bp, Artificial Sequence
  derived and/or modified sequence
atggagatcccccccaccaactaccccgccagccgggccgccctggtagcacagaactacattaattatcagcaaggtacaccccatcgggtgttcgaggttcagaaagtaaaacaagcttcaatggaagatatacccggacgcgggcataagtatcatctgaagtttgctgttgaggagataattcagaaacaggtgaaggtcaattgcacggctgaagttctttatccgtctacaggtcaagaaacggcaccggaagtgaactttacttttgagggggagacaggcaaaaaccctgatgaggaggacaatacattttaccagcgtctgaaatcaatgaaggagcctctcgaggcccagaacatcccagataattttggcaacgtgtcaccagagatgactctggtcttgcatcttgcgtgggtggcgtgtggttacataatctggcagaattccacggaggatacctggtacaagatggtgaagatccagaccgtgaaacaggtgcaaagaaatgacgactttatcgagctcgattataccatcctgctgcacaacatagcctcacaggaaattatcccatggcagatgcaggtgctctggcaccctcaatacggtaccaaagtgaagcataattctagacttccaaaggaagtgcaactggaatag

SEQ ID NO: 202981 - DNA, 669 bp, Artificial Sequence
  derived and/or modified sequence
atggagatcccccctaccaactatcccgcttctagggccgcactggttgcccagaactatatcaactatcagcaggggacacctcaccgggtgttcgaggtgcagaaggtgaaacaagcctcgatggaagatattcccggaagaggccataaataccacctgaaatttgcagttgaggaaattatacagaaacaagttaaagtgaactgtacagcagaagtgctgtacccatccacaggtcaggagacagcacccgaggtcaatttcacctttgagggcgagacaggtaaaaaccccgatgaagaggacaataccttttatcagcggctgaagtctatgaaggaacctctggaagcccagaatattccagacaactttggaaatgtgagccccgagatgacgctcgtgctccatctcgcctgggtggcatgtggatatatcatctggcagaacagcactgaggacacatggtataaaatggttaaaattcaaaccgtgaaacaagtgcaacgcaacgacgatttcattgagttggattatacaattctactgcacaatattgccagtcaggaaatcattccctggcagatgcaggtgttgtggcatccgcagtacggaacaaaggtcaaacataatagtagacttcccaaggaggtgcagcttgagtag

SEQ ID NO: 202982 - DNA, 669 bp, Artificial Sequence
  derived and/or modified sequence
atggagatcccccccaccaactaccccgccagcagagccgccctggtggcccagaactacatcaactaccagcagggcaccccccacagagtgttcgaggtgcagaaggtgaagcaggccagcatggaggacatccccggcagaggccacaagtaccacctgaagttcgccgtggaggagatcatccagaagcaggtgaaggtgaactgcaccgccgaggtgctgtaccccagcaccggccaggagaccgcccccgaggtgaacttcaccttcgagggcgagaccggcaagaaccccgacgaggaggacaacaccttctaccagagactgaagagcatgaaggagcccctggaggcccagaacatccccgacaacttcggcaacgtgagccccgagatgaccctggtgctgcacctggcctgggtggcctgcggctacatcatctggcagaacagcaccgaggacacctggtacaagatggtgaagatccagaccgtgaagcaggtgcagagaaacgacgacttcatcgagctggactacaccatcctgctgcacaacatcgccagccaggagatcatcccctggcagatgcaggtgctgtggcacccccagtacggcaccaaggtgaagcacaacagcagactgcccaaggaggtgcagctggagtag

SEQ ID NO: 202983 - protein, 617 aa, Artificial Sequence
  derived and/or modified sequence
MDLKTAVFNAARDGKLRLLTKLLASKSKEEVSSLISEKTNGATPLLMAARYGHLDMVEFLLEQCSASIEVGGSVNFDGETIEGAPPLWAASAAGHLKVVQSLLNHGASVNNTTLTNSTPLRAACFDGHLEIVKYLVEHKADLEVSNRHGHTCLMISCYKGHKEIAQYLLEKGADVNRKSVKGNTALHDCAESGSLDIMKMLLMYCAKMEKDGYGMTPLLSASVTGHTNIVDFLTHHAQTSKTERINALELLGATFVDKKRDLLGALKYWKKAMNMRYSDRTNIISKPVPQTLIMAYDYAKEVNSAEELEGLIADPDEMRMQALLIRERILGPSHPDTSYYIRYRGAVYADSGNFKRCINLWKYALDMQQSNLDPLSPMTASSLLSFAELFSFMLQDRAKGLLGTTVTFDDLMGILCKSVLEIERAIKQTQCPADPLQLNKALSIILHLICLLEKVPCTLEQDHFKKQTIYRFLKLHPRGKNNFSPLHLAVDKNTTCVGRYPVCKFPSLQVTAILIECGADVNVRDSDDNSPLHIAALNNHPDIMNLLIKSGAHFDATNLHKQTASDLLDEKEIAKNLIQPINHTTLQCLAARVIVNHRIYYKGHIPEKLETFVSLHR

SEQ ID NO: 202984 - DNA, 1854 bp, Artificial Sequence
  derived and/or modified sequence
atggacctgaagaccgccgtgttcaacgccgccagagacggcaagctgagactgctgaccaagctgctggccagcaagagcaaggaggaggtgagcagcctgatcagcgagaagaccaacggcgccacccccctgctgatggccgccagatacggccacctggacatggtggagttcctgctggagcagtgcagcgccagcatcgaggtgggcggcagcgtgaacttcgacggcgagaccatcgagggcgccccccccctgtgggccgccagcgccgccggccacctgaaggtggtgcagagcctgctgaaccacggcgccagcgtgaacaacaccaccctgaccaacagcacccccctgagagccgcctgcttcgacggccacctggagatcgtgaagtacctggtggagcacaaggccgacctggaggtgagcaacagacacggccacacctgcctgatgatcagctgctacaagggccacaaggagatcgcccagtacctgctggagaagggcgccgacgtgaacagaaagagcgtgaagggcaacaccgccctgcacgactgcgccgagagcggcagcctggacatcatgaagatgctgctgatgtactgcgccaagatggagaaggacggctacggcatgacccccctgctgagcgccagcgtgaccggccacaccaacatcgtggacttcctgacccaccacgcccagaccagcaagaccgagagaatcaacgccctggagctgctgggcgccaccttcgtggacaagaagagagacctgctgggcgccctgaagtactggaagaaggccatgaacatgagatacagcgacagaaccaacatcatcagcaagcccgtgccccagaccctgatcatggcctacgactacgccaaggaggtgaacagcgccgaggagctggagggcctgatcgccgaccccgacgagatgagaatgcaggccctgctgatcagagagagaatcctgggccccagccaccccgacaccagctactacatcagatacagaggcgccgtgtacgccgacagcggcaacttcaagagatgcatcaacctgtggaagtacgccctggacatgcagcagagcaacctggaccccctgagccccatgaccgccagcagcctgctgagcttcgccgagctgttcagcttcatgctgcaggacagagccaagggcctgctgggcaccaccgtgaccttcgacgacctgatgggcatcctgtgcaagagcgtgctggagatcgagagagccatcaagcagacccagtgccccgccgaccccctgcagctgaacaaggccctgagcatcatcctgcacctgatctgcctgctggagaaggtgccctgcaccctggagcaggaccacttcaagaagcagaccatctacagattcctgaagctgcaccccagaggcaagaacaacttcagccccctgcacctggccgtggacaagaacaccacctgcgtgggcagataccccgtgtgcaagttccccagcctgcaggtgaccgccatcctgatcgagtgcggcgccgacgtgaacgtgagagacagcgacgacaacagccccctgcacatcgccgccctgaacaaccaccccgacatcatgaacctgctgatcaagagcggcgcccacttcgacgccaccaacctgcacaagcagaccgccagcgacctgctggacgagaaggagatcgccaagaacctgatccagcccatcaaccacaccaccctgcagtgcctggccgccagagtgatcgtgaaccacagaatctactacaagggccacatccccgagaagctggagaccttcgtgagcctgcacagatag

SEQ ID NO: 202985 - DNA, 1854 bp, Artificial Sequence
  derived and/or modified sequence
atggatctgaaaacagcagtgttcaatgcagcacgggatgggaaactgcgcctgctcacgaaattactggcctccaagtccaaggaggaggtgtcttctttgataagtgagaaaaccaatggcgctactccactgctaatggccgctcggtatggccacttggatatggtcgaatttctcctagagcagtgtagcgctagcatcgaggttggggggtccgtgaacttcgacggggaaaccatcgagggggcccctcccctgtgggccgcatctgccgcaggccacctgaaggtcgtacaatctttactcaaccatggcgcatccgtgaacaataccaccttgaccaactcaacgcccctccgcgccgcttgtttcgacggccacctcgagattgtgaaatatctcgtggagcataaagccgacctggaagtgagcaatcgtcacgggcacacatgtctaatgatcagctgttacaaggggcacaaagagatcgcccagtatctgctcgagaaaggtgcggatgtgaatcggaagtccgttaagggaaacaccgcactgcacgactgcgctgaatcagggtcactggatattatgaagatgttgctgatgtactgcgccaaaatggagaaagacggctacggcatgaccccgctgctgagtgcttctgtgactggccatactaatatcgttgacttccttacgcaccacgcgcagaccagcaaaaccgaaaggattaacgcccttgagctgctgggcgcaacgtttgtcgacaaaaagagagacctccttggagccctgaagtattggaagaaagctatgaatatgcggtacagcgatcggaccaatatcatcagtaagccagtcccacaaacactcattatggcttacgattatgcgaaagaggttaactctgcagaggagctggagggcctgatcgcagatccggatgagatgagaatgcaggccctgctcattagagaacggatactgggaccaagccatccggacaccagctattacatacgctaccggggagccgtctacgccgactccggtaattttaagaggtgtatcaatctttggaaatacgcccttgacatgcaacagagcaacctggacccattgtcacccatgactgccagctcacttttgtcttttgcagaacttttttcatttatgctccaggaccgggctaaaggtctcctgggaactacagttactttcgacgatctaatgggcattctttgtaagtccgtactggagattgaaagggctataaaacagacccaatgtcctgccgatcctcttcaacttaacaaggcgctgtccattatactgcatctcatttgtctgttggagaaggtgccatgtaccctggagcaagaccacttcaagaagcaaaccatctatcgttttctgaaattacacccgcgaggcaaaaacaacttttctccacttcatttggccgtagacaagaacactacctgtgtgggtagatatccggtctgcaaattccctagtctgcaagtaactgccattctgatcgagtgcggggctgacgttaacgtgcgtgatagcgacgacaacagtcccttacacatcgcggccttgaacaatcaccccgatatcatgaaccttttgatcaaaagtggtgctcacttcgatgccacgaacctacacaagcagaccgcctccgatttgctcgacgaaaaggagattgccaaaaacctgatccagccaatcaaccacacaacgttacagtgcctcgcagcacgcgtgattgtgaatcaccgcatctactacaagggccacattcccgagaagctggaaactttcgtgagccttcaccggtag

SEQ ID NO: 202986 - DNA, 5813 bp, Artificial Sequence
  derived and/or modified sequence
ccgccccgcgcctaggctgttgctggccgcggccgccgccctcccccggcccaatggcgtggcggcacagtcagtgatgtgacgctcaggcttgtccggcccccggctcgcagcccattacaccatccgtcgcagcagtcgctgcagccgctgcagtccgagccgactaagggcgggaggcagctcgggtggcggggcgtggcgaacagcgcggccggattcattcctttggggcgcggagcatggaggagctgtgcggccgcaggcggagcagggcggcccgggcggcggtggggacaacggtttccctttgaaggggacggacaaagcccgagtgaccagcggcggcggggaggactagtccccgggcagtttggtgccctggttgtcagatgttggaaagcagtaggacggaacatactcttcgtggttgtgtatccgttctggggtgcagcaattaacattggactttggttcctgtgactcttgcctgtgtcgatagagttaaactggagctctgctttgaaagataaataaagcacagcctctcaactggacataaatggatctaaagacagcagtatttaacgcagctcgggatggcaaactccggcttctcaccaaattgttggcaagcaaatccaaagaggaggtttcctccttgatctctgaaaaaacaaatggggccacgccactcttgatggccgccaggtatgggcaccttgacatggtggaattcctcctagagcaatgcagtgcctccatagaagttgggggctccgtcaattttgatggcgaaaccattgagggggctccccctttatgggccgcttctgcagcaggacatctgaaggtggtccagtccttgttaaatcatggagcatctgtcaacaacacgactttaaccaattcaactcctcttcgagctgcgtgtttcgatggccatttggaaatagtgaagtaccttgtagaacacaaagctgatttggaagtgtcaaaccgacatgggcatacgtgcttgatgatttcatgttacaaaggacataaagagattgctcagtatttacttgaaaagggggcagatgttaatagaaaaagtgtcaaaggtaatactgcattgcatgattgtgcagaatctggaagtttggacatcatgaagatgcttcttatgtattgtgccaagatggaaaaggatggttatggaatgactccccttctctcagcaagtgtgactggtcacacaaatattgtggattttctgacacaccatgcacagaccagcaagacagaacgtattaatgctctagagcttctgggagctacatttgtagacaaaaaaagagatctgcttggggctttgaaatactggaaaaaggcaatgaacatgaggtacagtgataggactaatattattagtaaaccagtgccacagacactaataatggcttatgattatgccaaggaagtgaacagtgcagaagagctagaaggtcttattgctgatcctgatgagatgagaatgcaggcactattaatcagagaacgtattcttggtccttctcatcctgatacctcttactatattagatatagaggcgctgtctatgcagactctggaaatttcaaacgatgcatcaacctatggaagtatgctttggatatgcagcagagcaatttggatcctttaagcccaatgaccgccagcagcttattatcttttgcagaactattctcctttatgctacaggatagggctaaaggcctgctgggtactactgttacatttgatgatcttatgggcatactttgcaaaagcgtccttgaaatagagcgagctatcaaacaaactcagtgtccagctgacccattacagttaaataaggccctttctattattttgcacttaatttgcttgttagagaaagttccttgtactctagaacaagaccatttcaaaaagcagactatatacaggtttcttaagctgcatccaaggggaaagaataacttcagccctcttcatctggctgtggacaagaatactacatgtgtagggcggtaccctgtttgtaaatttccatctctacaagttactgcaatactgatagaatgtggtgctgatgtgaacgtcagagactcggatgacaacagtcccctgcatatcgctgctcttaacaaccatccagacatcatgaatctccttattaaatcaggtgcacattttgatgccacaaacttgcacaaacaaactgctagtgacttgctggatgagaaggaaatagctaaaaatttaatccagcctataaatcataccacattgcagtgtcttgctgctcgtgtcatagtgaatcatagaatatattataaagggcatatcccagaaaagctagagacttttgtttcccttcatagatgataacttgactgtattttagcactgttaaagcacgaattggtaacagttgtttcataaatgagcactgttgtgataacaccagcattcatttagcttgattgatatcattgtgctctcattggctaaagcattataagcatcaaatttacaacattggtttcccaatatttaatataaatataccatataatatattgtttgtgaattattgagaaatgtaacattcaaatttctaaaattgtctgccaaaggcttattcattctggttttgtttgctgttgggtgtttggggcagagttaaccatttctccatggtgtctttatactttactggtttgtgaattttatacaattgaaagtctttttttcttgcttctttcttctcttctcaagtttcccccctgtttctactttattgtttgtcctaaccatttctactacagttttttccttatggacccatactaggttgtacaaaccttaaggactcgttaccatttgcagttaccataagtgctttatcttctctatgcacaggcttaaacttgactgttgtatgttagcatattttctatgcagcagttggtcaacttcaactcaaaacactgttttcttatgtttgttacaaacttaattttttgaaagtactctgtagcatgacaatttttagagctgcaggttagctattatagctcaagcttttttgtttgtttttttcttcactttcttcacatctgaggtttctttctctaatccactgaaattattgtgtgctaaatttgggaaacagatctattctaactcattaacccagttgaaatttaggtctgtcatcttaatatatcatgcagtaaaaggaagaatctttttaaagtgacccacctttcatgctgctccagcattgtcctgcttgtgctgatggtgtgattaggtgtagagaatttgcttaaatttaacttcaaagttcatcacacagcttaatgagtcacattgaaatactcagtaattgaactgcaaatcacttttagttacaaaaagagctaaagcatgtcagtggcatgatgcttgccaagccagatctaggcatctaggataattaaggtattttagtatgcaatttactgccataatatcaaaggtcagtaacagtgttctttctttcttcaagcttatgtatacctttaaagataacttgcatgaattactttgattactttggtctcaattatttgtcaccccagttaaacatgaaaggttgcagtgcttcctgttcccttactggaagttagctttttcttttctctttcttcctttctttctctcactctttctttctctttctctttctctctctctctctctctcactcactcactcacagatttgctaatgccacagaaagggctcttttaacttaagataagtgaaaagtactaaaaaagattcaggtaattatcattcagcactttattgtaattcagaataaaatttatgatggcatatttgccctgcaaatgtcttaatgaagttgttctcaataaaaagctccttattgatttgagaaaaactcagtttacctgtgagttcaatgagctggatcactcacttggatttttgtgttgacattttattctgagggttgatgttacactatttaaggagtcatcaatgcaaacagtcacattaggtatgtcatcatctttagtcagtaaaaaccttgtaatgaggagtagtaaataaacaagagaacattagactttttggttaaataattgagatttaatttttaaaagatattcttactcatttgctaggttgtaaatttgatttcaccattaagaaaaggtaaattggatataaatgaacgatctccaactttttgatgaagaggttttactatctctcactgtgggaaaatttgatgaaatatttgaactgtcacatatattaagaatactttatgatttagaccaatattctagaaatatcaaatgtcagtatcttgaaatcatctgcctctaactttgtggtataagaattatatatgaataagctattatttttataaaggaaaactttgccattatagtaaattacattagttgatctcgataatttgaggataacagatgacaattgaatttttaattgatttagtatttcctcctcctctttgggggctgggtgggagggcttacatgctcttatagtgaggcacatctcactgttttgcagcagaatttgaattgtgcaactcctgtgtaaagtaaggatttctttaaatagcatttttgcaccagtaaaaatagataacttagaactcagtcttgataactgaaatgacttatttcacttagaatacatttctcccttctctgccatctccacaaatgccattgggaggttttgaaaaaccagttaatttaatagctcaaaattgtccctgattttattttcttttagggaaaattgtttcataaatgtgacactgataaagcctttgtcagaaagtattctcacaattatgagatggattataataaaatacttaaatttgtgttattttttgaaccacagatgagtaaatttaataatgaaccaattacactcttgagtctaactaaactgtacactgtagcacggtgttattgactggagttaatgtgtaagttattaacatttctatgaaaatgcccttttggggcctcctgaattttagatgttccactgttttgatcatttctataaaagaaatggtcattttacttagatgccagtctactttataaagacaaatggattatagacttaaaaatagtcatttttcttattcataaatctgacaggcataaacccaaatcaaagataatttggtgcccattatgaatttgaagttaagtgatagctcacttgtaaagtgactaccttaatgtgtatagagaccccagtctactattatttgggaaaattgtttaggttatatgggaaaagtagctctttaaaaatcatattgcccaacagaaaccttaggctgaatttacaggtatgataatttttgtaattaattttcttagaattgtgcaggctggatgagataatgacatactcttttacactgtaacagcagcattattgcctagaactttaaccattttagagttagatactaaggaaacaaactaattggtcatcatcattttctttttttctttttcttttttttttttttgcccttatgtgtcactaaacaactagtttctctcccttttgtcagttcccattgtgtattttttcaaaagaagtactgtattcggatgccagctaataaattgtcacacaatggaaaatcatatgccacaacattcattgtaaggtttaataaaattaaatttgcacc

SEQ ID NO: 202987 - DNA, 1854 bp, Artificial Sequence
  derived and/or modified sequence
atggacctgaagacagctgtgttcaatgctgccagagatggcaagctgcggctgctgaccaagctgctggccagcaagagcaaggaggaggtgagcagcctcatcagcgagaagaccaacggggccacccccctgctgatggccgcccgctatggccacctggacatggtggagttcctgctggagcagtgcagcgccagcattgaggtgggcggctctgtgaactttgatggagagaccattgaaggagccccacccctgtgggccgccagcgctgctggccacctgaaggtggtgcagagcctgctgaaccacggggcctctgtgaacaacaccaccctgaccaacagcacccccctgcgggccgcctgctttgatggccacctggagatcgtgaagtacctggtggagcacaaggctgacctggaggtgagcaacagacatggccacacctgcctgatgatcagctgctacaagggccacaaggagatcgcccagtacctgctggagaagggagcagatgtgaacaggaagtctgtgaagggcaacacagccctgcatgactgtgccgagagcggcagcctggacatcatgaagatgctgctgatgtactgtgccaagatggagaaggatggctacggcatgacccccctgctgagcgcctctgtgacaggccacaccaacatcgtggacttcctgacccaccacgcccagaccagcaagacagagcgcatcaatgccctggagctgctgggcgccacctttgtggacaagaagagggacctgctgggcgccctgaagtactggaagaaggccatgaacatgagatacagcgacaggaccaacatcatcagcaagcctgtgccccagaccctcatcatggcctatgactatgccaaggaggtgaacagcgctgaggagctggagggcctgattgctgaccctgatgagatgaggatgcaggccctgctgatccgggagcgcatcctgggccccagccacccagacaccagctactacatccgctacagaggagctgtgtatgctgacagcggcaacttcaagcgctgcatcaacctgtggaagtatgccctggacatgcagcagagcaacctggaccccctgagccccatgacagccagcagcctgctgagctttgctgagctgttctccttcatgctgcaggaccgggccaagggcctgctgggcaccaccgtgacctttgatgacctgatgggcatcctgtgcaagtctgtgctggagattgaaagagccatcaagcagacccagtgcccagctgaccccctgcagctgaacaaggccctgagcatcatcctgcacctgatctgcctgctggagaaggtgccctgcaccctggagcaggaccacttcaagaagcagaccatctaccgcttcctgaagctgcacccccggggcaagaacaacttcagccccctgcacctggccgtggacaagaacaccacctgtgtgggccgctaccctgtgtgcaagttccccagcctgcaggtgacagccatcctgattgaatgtggggctgatgtgaatgtgcgggacagtgatgacaacagccccctgcacatcgccgccctgaacaaccacccagacatcatgaacctgctgatcaagagcggggcccactttgatgccaccaacctgcacaagcagacagccagtgacctgctggatgagaaggagatcgccaagaacctgatccagcccatcaaccacaccaccctgcagtgcctggccgcccgggtcatcgtgaaccaccgcatctactacaagggccacatccctgagaagctggagacctttgtgtccctgcacaggtag

SEQ ID NO: 202988 - DNA, 1854 bp, Artificial Sequence
  derived and/or modified sequence
atggacctgaagaccgccgtgttcaacgccgcccgggacggcaagctgaggcttctgacaaagctcctggcttcaaaaagtaaagaagaggtgagctcattgattagcgaaaagaccaacggtgctactcccttgctgatggcagctagatacggtcacctcgacatggtggagtttctcctggagcagtgttcagcttccatcgaagtgggtggctccgtgaattttgacggagagactattgagggcgcaccgccactgtgggctgctagcgctgccggacacctaaaggtggtgcaatcactccttaaccatggcgcatccgtgaacaacactacactcaccaattctacaccacttcgcgcagcatgtttcgatggtcatctcgaaatcgtaaagtatcttgtcgagcacaaagcagaccttgaggtgtcaaatcgacacgggcacacctgccttatgatctcttgctataagggacataaagaaatcgcccagtacctgctggagaagggcgcagatgtcaatagaaagtccgtaaaagggaatacagccctgcacgactgcgccgagagtggttctttagacataatgaagatgcttctaatgtactgtgccaaaatggaaaaagatggctatgggatgacacccctgctcagcgccagcgttactggacacaccaacatcgtggattttttgacccaccacgcccagacaagcaagacagaaaggatcaatgcacttgaattactcggggccacatttgtagacaagaagcgagacctcctgggggctttaaaatactggaaaaaagcgatgaacatgagatactcagacaggacaaacattatcagcaaaccggtgccacagaccctgatcatggcctacgattacgccaaagaggtgaatagcgccgaggaacttgagggcctcatagccgaccccgacgaaatgaggatgcaggccttgctgatcagggaacgtatccttggtccaagccatcccgatacaagctattatattcggtatcgcggcgccgtgtatgccgattctggcaactttaaaaggtgcataaacctgtggaaatacgctctggacatgcagcagtcaaacctagaccctctgagtcccatgacggcaagttccctgctaagtttcgcagaattgttcagctttatgctccaggaccgagccaaaggactgctggggactactgtaaccttcgacgacctgatgggcatactctgcaagtctgtcttggagattgagcgagccataaagcaaactcagtgtccggccgacccactgcagctcaataaagccctcagtattattttgcatctgatttgcttgctcgagaaggtcccttgtacactggagcaagatcattttaaaaaacaaacaatttaccgtttcctcaaactgcaccccaggggaaaaaataacttctctcccctgcatctcgccgtggataaaaacacgacatgcgtgggtaggtaccctgtatgcaagttcccgagcctgcaggtgaccgcaattttaatcgaatgcggcgccgatgtgaacgtgcgagatagcgacgataattccccattgcacatcgccgctttaaataatcatcccgacatcatgaacctactcattaagtccggagctcacttcgatgctacgaatttgcacaagcagaccgctagcgatctactggatgaaaaagagattgccaagaaccttattcaaccaattaaccacacaacccttcagtgcctggccgcccgtgtaatagtgaaccatagaatttattacaagggccacatccctgaaaagcttgaaacctttgtatctctgcaccgttag

SEQ ID NO: 202989 - DNA, 1854 bp, Artificial Sequence
  derived and/or modified sequence
atggacctgaagaccgcagtgttcaacgccgctagggacggcaagctgaggctcctcaccaagctcctcgcctcgaagtctaaagaagaggtttcctcactgattagcgagaagacaaatggagcgactccactgctgatggcggctagatacggccacctggatatggtagaatttttgctggagcagtgttccgccagcatcgaagttggaggcagcgttaatttcgacggtgagactatcgagggcgctccaccgctctgggctgcctctgcggcagggcatctaaaagtcgttcagtctctactcaaccatggagcgtctgtcaataacacaaccttaaccaattcgactcccctgagagccgcatgcttcgatggccatctggaaatcgtgaagtacctcgtggaacataaggccgacctggaggttagcaatcgacacggacatacgtgtttgatgatatcttgctacaaggggcacaaagagattgcacagtatctgctggagaagggcgctgacgtcaataggaagtccgtgaagggtaatacggctctgcatgattgtgccgagagtggctctctagatatcatgaagatgctgctgatgtactgtgctaagatggagaaggacggctacggcatgacgcctctcctctctgcaagtgtgaccggccacacgaacatcgtcgattttctcacacatcacgcacaaacaagcaaaacggagaggattaatgcgctagaacttttgggggctactttcgtggacaaaaagagggaccttctgggggctctgaagtactggaagaaggctatgaacatgaggtattccgaccggaccaacataatcagcaagccagtcccgcagacactgatcatggcatacgactatgcaaaggaagtaaacagcgccgaggagcttgagggcttaattgctgatcccgacgaaatgcgcatgcaggctctgctcattagagagaggatccttggccctagtcatcctgacacttcctattatatccggtacaggggagctgtgtacgcagactctggtaactttaaacgctgcataaacttatggaaatacgctctggacatgcagcagtccaatctggaccccctgtctcccatgacagcgtccagccttctctccttcgctgaacttttttcctttatgctgcaggatcgcgctaagggattgctaggaaccactgtgactttcgatgatctgatggggatcctttgtaagtctgtcctggagatcgaaagggccatcaaacagacgcagtgcccagcggaccctcttcagttgaacaaggcgctgtctattatcttgcacctcatctgtctgcttgaaaaggtgccctgcactctggagcaggaccattttaaaaagcagaccatatataggttcctgaagttacatcccagaggaaagaacaacttcagtcctctacaccttgcagtggacaagaacaccacctgtgtgggacggtacccggtgtgcaagtttccttctctgcaggttacagcaatcctgatcgagtgcggggctgacgtgaacgttagggattcagatgacaacagcccacttcacattgctgccctgaacaaccatcccgacattatgaacttgctgatcaagtcgggagctcacttcgacgcaacaaatttacacaaacaaacagcctcagacttgttggatgagaaagagatcgccaagaatctgattcagcccatcaaccacacaacactgcagtgtcttgcggctagggtgattgtgaatcatagaatatactataaaggccacatcccagaaaagctcgaaacctttgtgtcactccaccgttag

SEQ ID NO: 202990 - protein, 59 aa, Artificial Sequence
  derived and/or modified sequence
MRQLKGKPKKETSKDKKERKQAMQEARQQITTVVLPTLAVVVLLIVVFVYVATRPTITE

SEQ ID NO: 202991 - protein, 47 aa, Artificial Sequence
  derived and/or modified sequence
MRQLKGKPKKETSKDKKERKQAMQEARQQITTVVLPTLAVVVLLIVV

SEQ ID NO: 202992 - protein, 52 aa, Artificial Sequence
  derived and/or modified sequence
MRQLKGKPKKETSKDKKERKQAMQEARQQITTVVLPTLAVVVLLIVVFVYVA

SEQ ID NO: 202993 - DNA, 180 bp, Artificial Sequence
  derived and/or modified sequence
atgaggcagctgaagggcaagcccaagaaggagaccagcaaggacaagaaggagaggaagcaggccatgcaggaggcccggcagcagatcaccaccgtggtgctgcccaccctggccgtggtggtgctgctgattgtggtgtttgtgtatgtggccacccggcccaccatcacagaatag

SEQ ID NO: 202994 - DNA, 159 bp, Artificial Sequence
  derived and/or modified sequence
atgaggcagctgaagggcaagcccaagaaggagaccagcaaggacaagaaggagaggaagcaggccatgcaggaggcccggcagcagatcaccaccgtggtgctgcccaccctggccgtggtggtgctgctgattgtggtgtttgtgtatgtggcctag

SEQ ID NO: 202995 - DNA, 180 bp, Artificial Sequence
  derived and/or modified sequence
atgagacagctgaagggcaagcccaagaaggagaccagcaaggacaagaaggagagaaagcaggccatgcaggaggccagacagcagatcaccaccgtggtgctgcccaccctggccgtggtggtgctgctgatcgtggtgttcgtgtacgtggccaccagacccaccatcaccgagtag

SEQ ID NO: 202996 - DNA, 159 bp, Artificial Sequence
  derived and/or modified sequence
atgagacagctgaagggcaagcccaagaaggagaccagcaaggacaagaaggagagaaagcaggccatgcaggaggccagacagcagatcaccaccgtggtgctgcccaccctggccgtggtggtgctgctgatcgtggtgttcgtgtacgtggcctag

SEQ ID NO: 202997 - protein, 486 aa, Artificial Sequence
  derived and/or modified sequence
MYIKMATLANGQADNASLSTNGLGSSPGSAGHMNGLSHSPGNPSTIPMKDHDAIKLFIGQIPRNLDEKDLKPLFEEFGKIYELTVLKDRFTGMHKGCAFLTYCERESALKAQSALHEQKTLPGMNRPIQVKPADSESRGGSSCLRQPPSQDRKLFVGMLNKQQSEDDVRRLFEAFGNIEECTILRGPDGNSKGCAFVKYSSHAEAQAAINALHGSQTMPGASSSLVVKFADTDKERTMRRMQQMAGQMGMFNPMAIPFGAYGAYAQALMQQQAALMASVAQGGYLNPMAAFAAAQMQQMAALNMNGLAAAPMTPTSGGSTPPGITAPAVPSIPSPIGVNGFTGLPPQANGQPAAEAVFANGIHPYPAQSPTAADPLQQAYAGVQQYAGPAAYPAAYGQISQAFPQPPPMIPQQQREGPEGCNLFIYHLPQEFGDAELMQMFLPFGFVSFDNPASAQTAIQAMNGFQIGMKRLKVQLKRPKDANRPY

SEQ ID NO: 202998 - DNA, 1461 bp, Artificial Sequence
  derived and/or modified sequence
atgtatatcaagatggcgaccctggccaatggacaagctgataatgctagcctgtcgaccaatggactcggttctagtcctggctctgctggccacatgaatggcctctcccattctcccggaaatccctctactattcctatgaaggaccacgatgccatcaaactttttattgggcagatcccacgaaacttagatgagaaagaccttaaaccactcttcgaagaattcgggaagatctacgagctcaccgttttgaaagaccggttcacggggatgcacaaggggtgcgcttttctgacttattgtgaaagagaaagcgcactcaaagcccaatccgctctccatgaacagaagacattaccagggatgaaccgccctattcaggtcaagcctgccgactctgagtcgcgtggcggtagtagctgtttgaggcagccaccctcacaggatagaaaactatttgtcgggatgcttaacaaacagcagagcgaagacgacgttcggagactgtttgaggcatttggaaatatagaagagtgcactatactgaggggtccagacggcaactctaaggggtgtgcatttgtgaaatatagcagtcacgcagaggcacaagctgccatcaacgcactgcacggttcccagaccatgcctggggcaagttcaagcctcgtagttaaattcgctgacacggacaaggaaaggaccatgcggagaatgcagcagatggccggccagatggggatgttcaatcccatggccatcccgttcggtgcatatggtgcctatgctcaggctctaatgcaacagcaggccgcgcttatggcctccgtagctcaggggggttacctgaaccccatggccgccttcgccgctgcacaaatgcagcagatggccgccctcaatatgaacggactggccgccgccccaatgaccccgacttctggtgggagtacccctccagggattaccgctccagctgtgccatcaattccatctccaatcggggtgaacggctttaccgggctacctccacaggccaatggacaaccagccgccgaggccgtctttgccaacggcattcacccctaccctgctcagagtcctactgctgccgatcctttgcaacaagcttatgctggggtccagcagtacgctgggcctgctgcctacccagccgcctatgggcagatctcacaggctttcccacagccaccaccaatgataccccaacaacagagggagggacctgagggctgcaacctgttcatctatcacctccctcaggagttcggggatgcagaactgatgcagatgtttcttccatttggatttgtatcattcgataaccctgcctccgcccagactgctatccaggccatgaatggatttcagattggaatgaaaaggctaaaggttcaactgaagaggccaaaggacgcgaataggccatattag

SEQ ID NO: 202999 - DNA, 1461 bp, Artificial Sequence
  derived and/or modified sequence
atgtacatcaagatggccaccctggccaacggccaggccgacaatgccagcctgagcaccaacggcctgggcagcagccctggcagcgctggccacatgaatggcctgagccacagccctggcaaccccagcaccatccccatgaaggaccatgatgccatcaagctgttcatcggccagatccccaggaacctggatgagaaggacctgaagcccctgtttgaggagtttgggaagatctatgagctgactgtgctgaaggaccgcttcaccggcatgcacaagggctgtgccttcctgacctactgtgagcgggagagcgccctgaaggcccagagcgccctgcacgagcagaagaccctgcccggcatgaaccggcccatccaggtgaagccagctgacagcgagagcagaggaggcagcagctgcctgcggcagccccccagccaggacaggaagctgtttgtgggcatgctgaacaagcagcagagtgaagatgatgtgagaagactctttgaggcctttggaaacatcgaggagtgcaccatcctgcggggcccagatggcaacagcaagggctgtgcctttgtgaagtacagcagccatgctgaggcccaggccgccatcaatgccctgcacggcagccagaccatgcctggggccagcagcagcctggtggtgaagtttgctgacacagacaaggagaggaccatgaggaggatgcagcagatggccggccagatgggcatgttcaaccccatggccatcccctttggagcctatggagcctatgcccaggccctgatgcagcagcaggccgccctgatggcctctgtggcccagggcggctacctgaaccccatggccgcctttgctgctgcccagatgcagcagatggccgccctgaacatgaatggcctggccgccgcccccatgacccccaccagcggcggcagcaccccacctggcatcacagccccagctgtgcccagcatccccagccccatcggcgtgaatggcttcaccggcctgcccccccaggccaacggccagcctgctgctgaggccgtgtttgccaacggcatccacccctacccagcccagagccccacagctgctgaccccctgcagcaggcctatgccggcgtgcagcagtatgccggccctgctgcctacccagctgcctacggccagatcagccaggccttcccccagcccccacccatgatcccccagcagcagcgggagggccctgagggctgcaacctcttcatctaccacctgccccaggagtttggagatgctgagctgatgcagatgttcctgcccttcggctttgtgtcctttgacaacccagccagcgcccagacagccatccaggccatgaatggcttccagatcggcatgaagaggctgaaggtgcagctgaagaggcccaaggatgccaaccggccctactag

SEQ ID NO: 203000 - DNA, 1461 bp, Artificial Sequence
  derived and/or modified sequence
atgtacatcaagatggccaccctggccaacggccaggccgacaacgcgagcctttcaaccaatggcctgggctccagccctggttctgctggtcatatgaatggcttatcccacagcccgggcaatccgtccacaatccccatgaaagaccatgacgcgattaagttattcatagggcagattccgcgcaacctcgatgagaaggatctcaaacctctgtttgaggaatttggtaaaatctacgagctgacagtcttaaaggaccgtttcacaggaatgcacaaagggtgcgcattcctcacttattgcgagagagagtcagccctaaaagcacaatccgcattacacgagcagaagacgctgccgggaatgaataggcccatccaggttaaacccgcggactccgagtcacgcggagggtcgagttgcttgcgccagcccccctcccaggatcgaaaattgtttgtgggaatgctcaataagcaacagtccgaggacgacgtccggcgcctctttgaggcttttggaaacattgaggaatgcaccatactacgaggccctgatgggaattcaaagggttgcgccttcgtcaaatacagctcccacgctgaggctcaggctgctattaacgctctgcacggcagtcagacgatgcctggtgccagtagcagcctggttgtaaagtttgccgatacggacaaggaaaggactatgaggaggatgcaacagatggctggccagatgggaatgtttaatccaatggcaattcccttcggggcctatggcgcatacgcccaggccctgatgcaacagcaggcggcattaatggccagtgtcgcccagggagggtacctgaaccccatggctgcttttgccgcggcccagatgcagcaaatggctgcacttaatatgaacggtctagctgctgcgccaatgactcccacctctggcgggagcaccccccccggcatcactgctcctgccgtccccagcattccttcgcccatcggtgtgaacggatttactggactccccccgcaggccaatggacagcccgctgcggaggccgttttcgcaaatggaatccacccgtatccagcacagagtcctacggctgctgacccactgcagcaggcttatgccggagttcagcagtatgcaggcccagccgcttaccccgccgcttacggtcagatttcacaggcctttccccagcccccacccatgatcccccagcagcaacgagagggaccagagggctgcaacttgtttatctaccatttgccccaggaatttggggacgcagagctgatgcagatgttcctgccattcggattcgtatccttcgataaccccgcctcagctcagacagcgattcaggctatgaatggcttccagattggaatgaaacgacttaaagttcagctgaagcgacctaaagacgccaatagaccctattag

SEQ ID NO: 203001 - DNA, 1461 bp, Artificial Sequence
  derived and/or modified sequence
atgtacattaaaatggcaacactggccaatgggcaagcggataatgcttctctcagcaccaatgggttggggagttccccaggctccgccggacatatgaacgggctgagccattccccagggaatccttccactatacccatgaaagaccacgatgccattaaactattcatcgggcagatccccagaaatcttgatgaaaaggatctgaaacctctctttgaggaatttggaaaaatctacgaactcacagtcttgaaagaccgctttacaggtatgcacaaaggctgtgcgttcctcacgtattgtgaaagagagagcgccttgaaagcgcagtcggcgctgcatgagcagaaaacactgccgggtatgaatagacctatccaggtgaagccagccgacagcgagagcaggggagggtccagctgcctgcggcagcctccttcgcaggaccgcaaactgttcgtgggcatgctgaacaagcagcagtccgaagatgatgttaggagactatttgaagcattcgggaatatagaagaatgtaccatcctgcgtggccctgacgggaattccaagggttgcgcctttgtgaaatacagctctcacgcagaggctcaggccgcaattaacgctctgcacgggagccagaccatgcctggagcttcttcttccctggtagtgaagttcgccgataccgacaaggagcgcacgatgcggaggatgcagcagatggcagggcagatgggtatgtttaaccctatggcaatcccctttggcgcttatggggcttacgcgcaggcactgatgcagcagcaggctgccctaatggcctcagtcgcgcaaggcggttatctgaaccctatggccgctttcgcggcagctcaaatgcaacaaatggccgctctgaatatgaatggtttggcagcagctcccatgacacccactagcggcggaagcactccaccaggaattactgccccagccgttcccagtattccctctccaatcggggtcaatgggttcacgggcttgccaccccaggcaaatggccagcctgcggctgaagctgtattcgcgaacggcatccatccataccctgcgcagagccccacagctgccgatcctttgcaacaggcgtacgccggtgttcagcagtatgccggtcccgcagcgtaccccgctgcctacggccagatcagccaggcatttccacaaccccctcctatgatcccgcaacagcaacgcgagggccctgaaggatgcaatttgtttatttaccacctgcctcaggaattcggggatgcggaattgatgcagatgttcctcccatttggcttcgtgagtttcgacaaccccgcaagtgcgcagacagccattcaggcaatgaacgggtttcaaattggaatgaaacgtctcaaagtacaactgaagcggcctaaggacgcaaataggccatattag

SEQ ID NO: 203002 - DNA, 4052 bp, Artificial Sequence
  derived and/or modified sequence
gtccagcctgtttaaacggaaaggacagagatcctgtctgttcaatgtaaaaaaaaaaaaaaaaaaaaaaaaaagaaaaaaagaaaaaaaaaatcagatcagaccgagagagagaggagagagggagagagagagggagagagagagggagagagagaggagagggagggagggagagagagaggggggagagcagagagagagcgcgagcgcgagcgagcgagagaagaggagaaagagagagagcagagagcgagcggagagcgaggtgtagagaaaccgagggggagagaacccgagtgtgtgtatgcgtgtgcgtgtgtgagcgcgagcgagcgagagagaggagcgagagagtgtgagcgagaaagaataaaaggaaagaagattttctctatgtatataaagatggccacgttagcaaacggacaggctgacaacgcaagcctcagtaccaacgggctcggcagcagcccgggcagtgccgggcacatgaacggattaagccacagcccggggaacccgtcgaccattcccatgaaggaccacgatgccatcaagctgttcattgggcagatcccccgcaacctggatgagaaggacctcaagcccctcttcgaggagtttggcaaaatctacgagcttacggttctgaaggacaggttcacaggcatgcacaaaggctgcgccttcctcacctactgcgagcgtgagtcagcgctgaaggcccagagcgcgctgcacgagcagaagactctgcccgggatgaaccggccgatccaggtgaagcctgcggacagcgagagccgaggaggtagtagctgcctgcgccagcccccttcacaagatagaaaactcttcgtgggcatgctcaacaagcaacagtccgaggacgacgtgcgccgccttttcgaggcctttgggaacatcgaggagtgcaccatcctgcgcgggcccgacggcaacagcaaggggtgcgcctttgtgaagtactcctcccacgccgaggcgcaggccgccatcaacgcgctacacggcagccagaccatgccgggagcctcgtccagtctggtggtcaagttcgccgacaccgacaaggagcgcacgatgcggcgaatgcagcagatggctggccagatgggcatgttcaaccccatggccatccctttcggggcctacggcgcctacgctcaggcactgatgcagcagcaagcggccctgatggcatcagtcgcgcagggcggctacctgaaccccatggctgccttcgctgccgcccagatgcagcagatggcggccctcaacatgaatggcctggcggccgcacctatgaccccaacctcaggtggcagcacccctccgggcatcactgcaccagccgtgcctagcatcccatcccccattggggtgaatggcttcaccggcctccccccacaggccaatgggcaacctgctgcggaagctgtgttcgccaatggcatccacccctacccagcacagagccccaccgccgcggaccccctgcagcaggcctacgccggagtgcagcagtatgcaggtccagctgcctaccctgctgcctatggtcagataagccaggcctttcctcagccgcctccaatgatcccccagcagcagagagaagggcccgagggctgtaacctgttcatctaccatctgccccaggagtttggggacgctgagctgatgcagatgttcctccctttcggcttcgtgagcttcgacaacccggccagcgcgcagaccgccatccaggccatgaacggcttccagatcggcatgaagaggctcaaggtgcagctgaagcggcccaaagacgccaatcgcccgtactgagcgccggcgggagcgtcccccgggggagaccaggactcgcacagggcaggatgctgaacgggctacattaaaaaacaaacctctctctatatatatttataaatgagaactgttggatgacacctttgacatatcagccaatatcaatcaagctgaagactccagacactgtctgtgtgactgtaacatttcttcaaggaaagtatagcgtctatggagttcagagggcacgtgtttgggggaaaatatatatgacatgaagaagaagatgaagaaaaatgagaaaaaaacacacaaaaggcaactttaaaacaaaatatcacgagcagacggggaggctgaagggctgggagctgggaggagacgctgcttaccgatcccggggcttttccagcccacgggcgcctgacgcaggctggggcaagtggtgcgtggggcctggtccccaaggggcggctgagaggccgccactgagcatctctatctgtcattcctttagctatttagggaccaaaggaccaaactttttattgcagatgtgtagctctatgtcaaatagagggggaatggaggaccccctccttcctgcctcatggctgttcttgaaacagcttagagcgattctatgaaaaaatgtaataaaaaattaaaaaaaaaacaaaaaacaaaaaaaacaacaaaaaaaggaaaaataacgcttcaatgcttttaaaacagcaagataatagttctttgatactttgagaggcgctttgatgaccctcatccaagtctatgacactttcctatggttttctgtattctatgtctggatggagctgttaaaagatgaacaaattggtggatatttggggaaagcaacacaaatcttaaaactcacccgtgaagtgtgagaaaacaaggaggggaacaaatgggacttaccaagcaaggtcattgttgtgaaaagtctgtaaatgcttctaactcttccccctcttaaaatcataatagttgtacagaattttaaaaaggaaaagtttaaaatacctatataatagaagaaaaattagaggaaagcaaaaaataaaaaaaaaaaataaaaaaggaaaaaaaaaacctatagaagttagcattactgctaaaatcccagatgttgtaggactgtacttttgtagagtttagacagagcatcaatcccttctccccgcgagtgcagtcggatgccgttgtccccaagggccaggccgaactcgccccacacctgcgggcgcctggctgccgacgccggtggaggccacgccgtcggtcgggaacggtcgcgtcgcccgggtcgccgccgccgccgccgccgtcatcctcgcctctcgcttccctctgggagctgcgcgcgcttcactcaccttccgcttcactcgccttccacgcttgctccagagactttccgggcaagggagaactgggaactttcatcttaaaacaactagacaacacacacacacacaaaaccttaaaaaagagagagaaaaataaacaatctttgaagaatttctgaaactgtttacaaggaattttgaaaaacagggatgtttaaatgatgccggctctgtttttctgtaaataaatttgcatattttgtaggacttttaattgtaatgatagagaaaaaaacaaggaaaactatttaatgaaagcacgatatttatctttggtaaatgactttagagcagttaaagacattgcttaaaaaactcagaatcagaaaaaacactgaattatttaagaacacatatattttaaagtataacatatttattataatttatttgcacccttgggaagattgctttggcattctgccttgattccttctcattgatgtccaggtcatctggaggccgggggttctcagacctaccagtttccctttagaagaacaaatttccagttcctctagggcctcctgcctttcctttctttctgtcaattttgttgttgttgttgtttttcattttctttttttctcttgactcctccttttaggatgtccagatgtaaaaaaaaaaaaaaaaaaaagaaaaaaagaaaaaaaaaagaaaacagctgcagttcagtacaactgctcttttcacactcaactccctaaaactccttgtaaccttctgtaactattggatgacgctttctccagcttagccctaaataaagcacagttt

SEQ ID NO: 203003 - DNA, 1461 bp, Artificial Sequence
  derived and/or modified sequence
atgtacatcaagatggccaccctggccaacggccaggccgacaacgccagcctgagcaccaacggcctgggcagcagccccggcagcgccggccacatgaacggcctgagccacagccccggcaaccccagcaccatccccatgaaggaccacgacgccatcaagctgttcatcggccagatccccagaaacctggacgagaaggacctgaagcccctgttcgaggagttcggcaagatctacgagctgaccgtgctgaaggacagattcaccggcatgcacaagggctgcgccttcctgacctactgcgagagagagagcgccctgaaggcccagagcgccctgcacgagcagaagaccctgcccggcatgaacagacccatccaggtgaagcccgccgacagcgagagcagaggcggcagcagctgcctgagacagccccccagccaggacagaaagctgttcgtgggcatgctgaacaagcagcagagcgaggacgacgtgagaagactgttcgaggccttcggcaacatcgaggagtgcaccatcctgagaggccccgacggcaacagcaagggctgcgccttcgtgaagtacagcagccacgccgaggcccaggccgccatcaacgccctgcacggcagccagaccatgcccggcgccagcagcagcctggtggtgaagttcgccgacaccgacaaggagagaaccatgagaagaatgcagcagatggccggccagatgggcatgttcaaccccatggccatccccttcggcgcctacggcgcctacgcccaggccctgatgcagcagcaggccgccctgatggccagcgtggcccagggcggctacctgaaccccatggccgccttcgccgccgcccagatgcagcagatggccgccctgaacatgaacggcctggccgccgcccccatgacccccaccagcggcggcagcaccccccccggcatcaccgcccccgccgtgcccagcatccccagccccatcggcgtgaacggcttcaccggcctgcccccccaggccaacggccagcccgccgccgaggccgtgttcgccaacggcatccacccctaccccgcccagagccccaccgccgccgaccccctgcagcaggcctacgccggcgtgcagcagtacgccggccccgccgcctaccccgccgcctacggccagatcagccaggccttcccccagcccccccccatgatcccccagcagcagagagagggccccgagggctgcaacctgttcatctaccacctgccccaggagttcggcgacgccgagctgatgcagatgttcctgcccttcggcttcgtgagcttcgacaaccccgccagcgcccagaccgccatccaggccatgaacggcttccagatcggcatgaagagactgaaggtgcagctgaagagacccaaggacgccaacagaccctactag

SEQ ID NO: 203004 - protein, 237 aa, Artificial Sequence
  derived and/or modified sequence
MMVMVVVITCLLSHYKLSARSFISRHSQGRRREDALSSEGCLWPSESTVSGNGIPEPQVYAPPRPTDRLAVPPFAQRERFHRFQPTYPYLQHEIDLPPTISLSDGEEPPPYQGPCTLQLRDPEQQLELNRESVRAPPNRTIFDSDLMDSARLGGPCPPSSNSGISATCYGSGGRMEGPPPTYSEVIGHYPGSSFQHQQSSGPPSLLEGTRLHHTHIAPLESAAIWSKEKDKQKGHPL

SEQ ID NO: 203005 - protein, 287 aa, Artificial Sequence
  derived and/or modified sequence
MHRLMGVNSTAAAAAGQPNVSCTCNCKRSLFQSMEITELEFVQIIIIVVVMMVMVVVITCLLSHYKLSARSFISRHSQGRRREDALSSEGCLWPSESTVSGNGIPEPQVYAPPRPTDRLAVPPFAQRERFHRFQPTYPYLQHEIDLPPTISLSDGEEPPPYQGPCTLQLRDPEQQLELNRESVRAPPNRTIFDSDLMDSARLGGPCPPSSNSGISATCYGSGGRMEGPPPTYSEVIGHYPGSSFQHQQSSGPPSLLEGTRLHHTHIAPLESAAIWSKEKDKQKGHPL

SEQ ID NO: 203006 - protein, 227 aa, Artificial Sequence
  derived and/or modified sequence
MHRLMGVNSTAAAAAGQPNVSCTCNCKRSLFQSMEISCHGFPVCKSHQHQEWKSLCWSLRSPGGASSITGFGSMKVTNPAMNLPECQWLRIQKAELEFVQIIIIVVVMMVMVVVITCLLSHYKLSARSFISRHSQGRRREDALSSEGCLWPSESTVSGNGIPEPQVYAPPRPTDRLAVPPFAQRERFHRFQPTYPYLQHEIDLPPTISLSDGEEPPPYQGPCTLQLR

SEQ ID NO: 203007 - DNA, 864 bp, Artificial Sequence
  derived and/or modified sequence
atgcaccgcctgatgggggtcaacagcacagcagctgcagccgctgggcaaccaaatgtctcctgtacctgcaattgtaaaaggtcgctttttcagagtatggagatcactgagttagaatttgtgcaaatcatcatcattgtggtggtaatgatggtcatggttgtcgttatcacctgccttctcagtcattacaagttgagcgctcggtcctttattagccggcactcccagggacgcaggcgcgaggacgctctcagttcagaaggctgcctgtggccttcagagtctaccgtaagcgggaacggcatacccgagccccaagtgtatgctcctcctaggccgaccgatcggctggcggtcccaccattcgctcagcgcgagcgcttccacagatttcagcctacctacccttacctgcaacacgaaattgatttgccaccaacgatctccctaagcgacggcgaggagccccctccttatcagggcccgtgcaccttgcaacttagggacccggagcagcagctggagctaaatcgagagtctgtaagagctcccccaaacaggaccatctttgacagtgatctcatggattccgccaggttgggcgggccctgcccaccatcatccaacagcgggatatcagccacctgctatggctcaggcgggcgaatggaaggccccccacctacgtactcagaggtcattggccactaccccggctccagttttcagcaccagcagtcttccggacctcccagcctgttggaggggactagactccatcacacccacattgcccctctagaatcagctgccatctggagtaaggaaaaggataagcagaaggggcaccccctatag

SEQ ID NO: 203008 - DNA, 684 bp, Artificial Sequence
  derived and/or modified sequence
atgcacaggctcatgggggtgaactctactgccgctgccgctgcgggccaacccaacgtgtcatgtacctgcaattgcaagcgcagccttttccagagcatggagatctcctgccacggtttcccagtgtgcaaaagccatcagcaccaggagtggaagagtttatgttggagcttgaggtcccctggcggggcctcttccatcaccgggttcgggagtatgaaagtgacgaatcccgctatgaacctcccagagtgccagtggctgcgtatccagaaggctgagctcgaattcgttcaaattatcatcattgtcgtcgtaatgatggttatggtcgtggttatcacgtgtctgctctctcactacaaactttcggccaggagttttatttcgaggcactctcaagggcgcagacgggaggacgccctgagtagcgaggggtgcctctggccttctgagagcacagtctcaggcaacggcattcctgaacctcaggtgtatgcaccacccaggcccacagataggcttgcagtgcccccatttgcacagcgggagaggtttcacaggttccagcctacatatccctatctgcaacacgaaatagacctgccccctactattagcctcagtgatggcgaggagcctcctccgtaccagggtccatgtactctgcagctgaggtag

SEQ ID NO: 203009 - DNA, 864 bp, Artificial Sequence
  derived and/or modified sequence
atgcaccggctgatgggcgtgaacagcacagctgctgctgctgctggccagcccaacgtgtcctgcacctgcaactgcaagaggagcctcttccagagcatggagatcacagagctggagtttgtgcagatcatcatcatcgtggtggtgatgatggtgatggtggtggtgatcacctgcctgctgagccactacaagctgagcgcccgctccttcatcagccgccacagccagggcagaagaagagaagatgccctgagcagcgagggctgcctgtggcccagcgagagcacagtgtctggaaatggcatccctgagccccaggtgtatgccccaccccggcccacagaccggctggccgtgcccccatttgcccagcgggagcgcttccaccgcttccagcccacctacccctacctgcagcacgagattgacctgccccccaccatcagcctgagtgatggagaggagcccccaccctaccagggcccctgcaccctgcagctgcgggaccctgagcagcagctggagctgaaccgggagagcgtgcgggccccacccaacagaaccatctttgacagcgacctgatggattctgcccggctgggcggcccctgcccccccagcagcaacagcggcatcagcgccacctgctacggcagcggcggccgcatggagggccccccacccacctacagcgaggtgattggccactacccaggcagcagcttccagcaccagcagagcagcggcccccccagcctgctggagggcacccggctgcaccacacccacatcgcccccctggagagcgctgccatctggagcaaggagaaggacaagcagaagggccaccccctgtag

SEQ ID NO: 203010 - DNA, 684 bp, Artificial Sequence
  derived and/or modified sequence
atgcaccggctgatgggcgtgaacagcacagctgctgctgctgctggccagcccaacgtgtcctgcacctgcaactgcaagaggagcctcttccagagcatggagatcagctgccacggcttccctgtgtgcaagagccaccagcaccaggagtggaagagcctgtgctggagcctgcggagccctgggggcgccagcagcatcactggatttggctccatgaaggtgaccaacccagccatgaacctgcctgagtgccagtggctgcgcatccagaaggccgagctggagtttgtgcagatcatcatcatcgtggtggtgatgatggtgatggtggtggtgatcacctgcctgctgagccactacaagctgagcgcccggagcttcatcagccgccacagccagggcagaagaagagaagatgccctgagcagcgagggctgcctgtggcccagcgagagcacagtgtctggaaatggcatccctgagccccaggtgtatgccccaccccggcccacagaccggctggccgtgcccccatttgcccagcgggagcgcttccaccgcttccagcccacctacccctacctgcagcatgaaattgacctgccccccaccatcagcctgagtgatggagaggagcccccaccctaccagggcccctgcaccctgcagctgaggtag

SEQ ID NO: 203011 - DNA, 864 bp, Artificial Sequence
  derived and/or modified sequence
atgcaccggctgatgggcgtgaacagcaccgccgccgccgccgccggccagcctaacgtctcgtgcacttgcaattgcaagcgcagcctcttccagtcaatggaaatcaccgagttggagtttgtgcagataatcatcattgttgttgttatgatggtgatggtggttgtcattacgtgtttgctgagccactataagctgtccgcaagatctttcatctcaaggcactcccaggggcgccggagggaagatgccctgagctccgaaggctgcctgtggcccagcgagagcactgtgagcgggaatggcatccccgaacctcaggtatacgcgccaccccgcccgactgatcgacttgcggtgcctcccttcgcacagcgcgagcggtttcataggttccaacccacatatccgtaccttcagcacgagattgatctcccacctaccatttccctcagcgatggagaggagccacctccgtaccagggcccctgtacgcttcaactgcgagatcccgagcagcaactcgaactcaatagggagagtgtgagagcccctccaaacaggacgatcttcgactcagaccttatggattccgctcgacttggcggaccatgtccaccctcaagcaatagcggcataagcgctacttgttacggcagcggaggacgaatggaaggcccaccccctacctattcagaagttatcggccactaccccggtagttcatttcagcaccaacaaagtagtggcccaccaagtctactcgagggcacacgactgcaccatacccacatcgcgcctttggaaagcgcagccatttggtccaaagaaaaggataaacagaaaggccacccgctgtag

SEQ ID NO: 203012 - DNA, 684 bp, Artificial Sequence
  derived and/or modified sequence
atgcaccggctgatgggcgtgaacagcaccgccgccgccgccgccggccagcctaatgtgagctgtacatgcaattgtaaacgatccctgtttcagtccatggagattagctgtcatggtttcccagtttgtaagtctcaccaacatcaggaatggaagtccctgtgttggagtctcaggagtccaggcggtgcaagtagtattaccgggttcgggtcaatgaaagtaaccaatcctgccatgaacctcccggaatgtcagtggcttcgcattcagaaagctgaactcgagtttgtccaaataattatcatcgtggtggtgatgatggtaatggtggtcgtgatcacttgcctcctgtctcattataagctgtctgctcgctccttcatcagcagacacagtcagggtagacgacgagaagacgccctcagtagtgaagggtgcctgtggcccagtgagtcaacagtatcgggcaacgggattcccgagcctcaagtgtacgctcccccaaggcctacagatagactggctgtaccccccttcgcacagcgggaacgctttcatcgatttcagcccacttacccgtacctgcagcacgagattgatctgccacctaccattagcttgagtgacggggaagaacctcctccatatcagggtccctgtaccttgcagctgcgatag

SEQ ID NO: 203013 - DNA, 864 bp, Artificial Sequence
  derived and/or modified sequence
atgcaccgcttaatgggcgtgaatagcaccgccgcagcagccgctgggcagccaaatgttagctgcacctgtaattgtaagagatctttgttccagtcaatggagattactgagcttgaattcgtccagatcatcatcatcgtggttgttatgatggttatggttgtggtgataacatgccttttgtcccactacaaactgtccgccaggtccttcatttcccggcactcccaggggaggaggcgtgaggatgccctgagtagcgaaggatgtctgtggccctccgagagtacagtctcaggcaatggcatccctgagcctcaggtttacgccccaccaaggcccaccgaccgcctggctgtgcctccttttgcgcagcgggagagatttcacagattccaacctacctacccctatctccaacacgaaattgacctgcctcccaccatctccctgtctgatggagaggaaccgccaccataccaaggcccttgtacactacagctgcgggaccctgaacaacagctggaactgaaccgggaatctgtacgggcaccaccaaatcgaaccatcttcgacagtgacctcatggacagtgctcgactgggtggcccatgcccaccatcttccaattccggtatatctgcaacatgctatggtagtgggggtcggatggaggggcctccccctacctactcagaagtcatcggccactatcccggaagttctttccagcaccagcagtcatccggcccaccttccctcctggaggggacaaggctgcatcacacccatattgcgccactggagtctgcagccatttggagcaaagagaaagataaacaaaaagggcaccccctgtag

SEQ ID NO: 203014 - DNA, 684 bp, Artificial Sequence
  derived and/or modified sequence
atgcaccgcctgatgggcgtaaactctacggcagccgctgcggctggacagcctaatgtcagctgcacttgcaactgcaaacgctctcttttccagtccatggaaatcagttgtcatgggtttccggtgtgtaaaagtcaccagcatcaggagtggaagagcctgtgttggtctctgcgtagccccggaggcgcatcatctatcactgggttcgggagtatgaaggtgaccaacccggcaatgaatttacctgagtgccagtggctgcggatccagaaggccgaactcgaattcgtccagattatcatcatcgtggtcgtcatgatggtgatggtggtagtgataacatgtctattgtcccattacaaactgagtgcccgtagctttattagccgccactcccagggccgaagaagggaagacgcgctcagcagcgaggggtgcctgtggccctccgaatctactgtatcagggaacggaatcccagagcctcaggtgtatgccccacctcggcctaccgatcgcctagccgttccaccgttcgcccagcgtgaaagattccacagattccaacctacgtacccttatctccagcacgaaatcgacttgcccccaacaatcagtctgtctgatggcgaggaacccccaccatatcaaggcccatgcacgctgcaactcagatag

SEQ ID NO: 203015 - DNA, 4845 bp, Artificial Sequence
  derived and/or modified sequence
ggaaagctagcggcagaggctcagccccggcggcagcgcgcgccccgctgccagcccattttccggacgccacccgcgggcactgccgacgcccccggggctgccgaggggaggccgggggggcgcagcggagcgcggtcccgcgcactgagccccgcggcgccccgggaacttggcggcgacccgagcccggcgagccggggcgcgcctcccccgccgcgcgcctcctgcatgcggggccccagctccgggcgccggccggagccccccccggccgcccccgagccccccgcgccccgcgccgcgccgccgcgccgtccatgcaccgcttgatgggggtcaacagcaccgccgccgccgccgccgggcagcccaatgtctcctgcacgtgcaactgcaaacgctctttgttccagagcatggagatcacggagctggagtttgttcagatcatcatcatcgtggtggtgatgatggtgatggtggtggtgatcacgtgcctgctgagccactacaagctgtctgcacggtccttcatcagccggcacagccaggggcggaggagagaagatgccctgtcctcagaaggatgcctgtggccctcggagagcacagtgtcaggcaacggaatcccagagccgcaggtctacgccccgcctcggcccaccgaccgcctggccgtgccgcccttcgcccagcgggagcgcttccaccgcttccagcccacctatccgtacctgcagcacgagatcgacctgccacccaccatctcgctgtcagacggggaggagcccccaccctaccagggcccctgcaccctccagcttcgggaccccgagcagcagctggaactgaaccgggagtcggtgcgcgcacccccaaacagaaccatcttcgacagtgacctgatggatagtgccaggctgggcggcccctgcccccccagcagtaactcgggcatcagcgccacgtgctacggcagcggcgggcgcatggaggggccgccgcccacctacagcgaggtcatcggccactacccggggtcctccttccagcaccagcagagcagtgggccgccctccttgctggaggggacccggctccaccacacacacatcgcgcccctagagagcgcagccatctggagcaaagagaaggataaacagaaaggacaccctctctagggtccccaggggggccgggctggggctgcgtaggtgaaaaggcagaacactccgcgcttcttagaagaggagtgagaggaaggcggggggcgcagcaacgcatcgtgtggccctcccctcccacctccctgtgtataaatatttacatgtgatgtctggtctgaatgcacaagctaagagagcttgcaaaaaaaaaaagaaaaaagaaaaaaaaaaaccacgtttctttgttgagctgtgtcttgaaggcaaaagaaaaaaaatttctacagtagtctttcttgtttctagttgagctgcgtgcgtgaatgcttattttcttttgtttatgataatttcacttaactttaaagacatatttgcacaaaacctttgtttaaagatctgcaatattatatatataaatatatataagataagagaaactgtatgtgcgagggcaggagtatttttgtattagaagaggcctattaaaaaaaaaagttgttttctgaactagaagaggaaaaaaatggcaatttttgagtgccaagtcagaaagtgtgtattaccttgtaaagaaaaaaattacaaagcaggggtttagagttatttatataaatgttgagattttgcactattttttaatataaatatgtcagtgcttgcttgatggaaacttctcttgtgtctgttgagactttaagggagaaatgtcggaatttcagagtcgcctgacggcagagggtgagcccccgtggagtctgcagagaggccttggccaggagcggcgggctttcccgaggggccactgtccctgcagagtggatgcttctgcctagtgacaggttatcaccacgttatatattccctaccgaaggagacaccttttcccccctgacccagaacagcctttaaatcacaagcaaaataggaaagttaaccacggaggcaccgagttccaggtagtggttttgcctttcccaaaaatgaaaataaactgttaccgaaggaattagtttttcctcttcttttttccaactgtgaaggtccccgtggggtggagcatggtgcccctcacaagccgcagcggctggtgcccgggctaccagggacatgccagagggctcgatgacttgtctctgcagggcgctttggtggttgttcagctggctaaaggttcaccggtgaaggcaggtgcggtaactgccgcactggaccctaggaagccccaggtattcgcaatctgacctcctcctgtctgtttcccttcacggatcaattctcacttaagaggccaataaacaacccaacatgaaaaggtgacaagcctgggtttctcccaggataggtgaaagggttaaaatgagtaaagcagttgagcaaacaccaacccgagcttcgggcgcagaattcttcaccttctcttcccctttccatctcctttccccgcggaaacaacgcttcccttctggtgtgtctgttgatctgtgttttcatttacatctctcttagactccgctcttgttctccaggttttcaccagatagatttggggttggcgggacctgctggtgacgtgcaggtgaaggacaggaaggggcatgtgagcgtaaatagaggtgaccagaggagagcatgaggggtggggctttgggacccaccggggccagtggctggagcttgacgtctttcctccccatgggggtgggagggcccccagctggaagagcagactcccagctgctaccccctcccttcccatgggagtggctttccattttgggcagaatgctgactagtagactaacataaaagatataaaaggcaataactattgtttgtgagcaacttttttataacttccaaaacaaaaacctgagcacagttttgaagttctagccactcgagctcatgcatgtgaaacgtgtgctttacgaaggtggcagctgacagacgtgggctctgcatgccgccagcctagtagaaagttctcgttcattggcaacagcagaacctgcctctccgtgaagtcgtcagcctaaaatttgtttctctcttgaagaggattctttgaaaaggtcctgcagagaaatcagtacaggttatcccgaaaggtacaaggacgcacttgtaaagatgattaaaacgtatctttcctttatgtgacgcgtctctagtgccttactgaagaagcagtgacactcccgtcgctcggtgaggacgttcccggacagtgcctcactcacctgggactggtatcccctcccagggtccaccaagggctcctgcttttcagacaccccatcatcctcgcgcgtcctcaccctgtctctaccagggaggtgcctagcttggtgaggttactcctgctcctccaacctttttttgccaaggtttgtacacgactcccatctaggctgaaaacctagaagtggaccttgtgtgtgtgcatggtgtcagcccaaagccaggctgagacagtcctcatatcctcttgagccaaactgtttgggtctcgttgcttcatggtatggtctggatttgtgggaatggctttgcgtgagaaaggggaggagagtggttgctgccctcagccggcttgaggacagagcctgtccctctcatgacaactcagtgttgaagcccagtgtcctcagcttcatgtccagtggatggcagaagttcatggggtagtggcctctcaaaggctgggcgcatcccaagacagccagcaggttgtctctggaaacgaccagagttaagctctcggcttctctgctgagggtgcaccctttcctctagatggtagttgtcacgttatctttgaaaactcttggactgctcctgaggaggccctcttttccagtaggaagttagatgggggttctcagaagtggctgattggaaggggacaagcttcgtttcaggggtctgccgttccatcctggttcagagaaggccgagcgtggctttctctagccttgtcactgtctccctgcctgtcaatcaccacctttcctccagaggaggaaaattatctcccctgcaaagcccggttctacacagatttcacaaattgtgctaagaaccgtccgtgttctcagaaagcccagtgtttttgcaaagaatgaaaagggaccccatatgtagcaaaaatcagggctgggggagagccgggttcattccctgtcctcattggtcgtccctatgaattgtacgtttcagagaaattttttttcctatgtgcaacacgaagcttccagaaccataaaatatcccgtcgataaggaaagaaaatgtcgttgttgttgtttttctggaaactgcttgaaatcttgctgtactatagagctcagaaggacacagcccgtcctcccctgcctgcctgattccatggctgttgtgctgattccaatgctttcacgttggttcctggcgtgggaactgctctcctttgcagccccatttcccaagctctgttcaagttaaacttatgtaagctttccgtggcatgcggggcgcgcacccacgtccccgctgcgtaagactctgtatttggatgccaatccacaggcctgaagaaactgcttgttgtgtatcagtaatcattagtggcaatgatgacattctgaaaagctgcaatacttatacaataaattttacaattctttggaatgag

SEQ ID NO: 203016 - DNA, 859 bp, Artificial Sequence
  derived and/or modified sequence
gcgcactgagccccgcggcgccccgggaacttggcggcgacccgagcccggcgagccggggcgcgcctcccccgccgcgcgcctcctgcatgcggggccccagctccgggcgccggccggagccccccccggccgcccccgagccccccgcgccccgcgccgcgccgccgcgccgtccatgcaccgcttgatgggggtcaacagcaccgccgccgccgccgccgggcagcccaatgtctcctgcacgtgcaactgcaaacgctctttgttccagagcatggagatcagttgtcatggattcccagtatgcaagtcgcatcagcatcaggagtggaagagtctctgctggtccttaaggtctccaggaggggccagttccatcactggctttgggagcatgaaagtgacaaatccagccatgaatttgcctgagtgtcagtggttaagaatacaaaaagcggagctggagtttgttcagatcatcatcatcgtggtggtgatgatggtgatggtggtggtgatcacgtgcctgctgagccactacaagctgtctgcacggtccttcatcagccggcacagccaggggcggaggagagaagatgccctgtcctcagaaggatgcctgtggccctcggagagcacagtgtcaggcaacggaatcccagagccgcaggtctacgccccgcctcggcccaccgaccgcctggccgtgccgcccttcgcccagcgggagcgcttccaccgcttccagcccacctatccgtacctgcagcacgagatcgacctgccacccaccatctcgctgtcagacggggaggagcccccaccctaccagggcccctgcaccctccagcttcgg

SEQ ID NO: 203017 - DNA, 864 bp, Artificial Sequence
  derived and/or modified sequence
atgcacagactgatgggcgtgaacagcaccgccgccgccgccgccggccagcccaacgtgagctgcacctgcaactgcaagagaagcctgttccagagcatggagatcaccgagctggagttcgtgcagatcatcatcatcgtggtggtgatgatggtgatggtggtggtgatcacctgcctgctgagccactacaagctgagcgccagaagcttcatcagcagacacagccagggcagaagaagagaggacgccctgagcagcgagggctgcctgtggcccagcgagagcaccgtgagcggcaacggcatccccgagccccaggtgtacgccccccccagacccaccgacagactggccgtgccccccttcgcccagagagagagattccacagattccagcccacctacccctacctgcagcacgagatcgacctgccccccaccatcagcctgagcgacggcgaggagccccccccctaccagggcccctgcaccctgcagctgagagaccccgagcagcagctggagctgaacagagagagcgtgagagccccccccaacagaaccatcttcgacagcgacctgatggacagcgccagactgggcggcccctgcccccccagcagcaacagcggcatcagcgccacctgctacggcagcggcggcagaatggagggccccccccccacctacagcgaggtgatcggccactaccccggcagcagcttccagcaccagcagagcagcggcccccccagcctgctggagggcaccagactgcaccacacccacatcgcccccctggagagcgccgccatctggagcaaggagaaggacaagcagaagggccaccccctgtag

SEQ ID NO: 203018 - DNA, 684 bp, Artificial Sequence
  derived and/or modified sequence
atgcacagactgatgggcgtgaacagcaccgccgccgccgccgccggccagcccaacgtgagctgcacctgcaactgcaagagaagcctgttccagagcatggagatcagctgccacggcttccccgtgtgcaagagccaccagcaccaggagtggaagagcctgtgctggagcctgagaagccccggcggcgccagcagcatcaccggcttcggcagcatgaaggtgaccaaccccgccatgaacctgcccgagtgccagtggctgagaatccagaaggccgagctggagttcgtgcagatcatcatcatcgtggtggtgatgatggtgatggtggtggtgatcacctgcctgctgagccactacaagctgagcgccagaagcttcatcagcagacacagccagggcagaagaagagaggacgccctgagcagcgagggctgcctgtggcccagcgagagcaccgtgagcggcaacggcatccccgagccccaggtgtacgccccccccagacccaccgacagactggccgtgccccccttcgcccagagagagagattccacagattccagcccacctacccctacctgcagcacgagatcgacctgccccccaccatcagcctgagcgacggcgaggagccccccccctaccagggcccctgcaccctgcagctgagatag

SEQ ID NO: 203019 - protein, 636 aa, Artificial Sequence
  derived and/or modified sequence
MAAEEEAAAGGKVLREENQCIAPVVSSRVSPGTRPTAMGSFSSHMTEFPRKRKGSDSDPSQSGIMTEKVVEKLSQNPLTYLLSTRIEISASSGSRVEDGEHQVKMKAFREAHSQTEKRRRDKMNNLIEELSAMIPQCNPMARKLDKLTVLRMAVQHLRSLKGLTNSYVGSNYRPSFLQDNELRHLILKTAEGFLFVVGCERGKILFVSKSVSKILNYDQASLTGQSLFDFLHPKDVAKVKEQLSSFDISPREKLIDAKTGLQVHSNLHAGRTRVYSGSRRSFFCRIKSCKISVKEEHGCLPNSKKKEHRKFYTIHCTGYLRSWPPNIVGMEEERNSKKDNSNFTCLVAIGRLQPYIVPQNSGEINVKPTEFITRFAVNGKFVYVDQRATAILGYLPQELLGTSCYEYFHQDDHNNLTDKHKAVLQSKEKILTDSYKFRAKDGSFVTLKSQWFSFTNPWTKELEYIVSVNTLVLGHSEPGEASFLPCSSQSSEESSRQSCMSVPGMSTGTVLGAGSIGTDIANEILDLQRLQSSSYLDDSSPTGLMKDTHTVNCRSMSNKELFPPSPSEMGELEATRQNQSTVAVHSHEPLLSDGAQLDFDALCDNDDTAMAAFMNYLEAEGGLGDPGDFSDIQWTL

SEQ ID NO: 203020 - DNA, 1930 bp, Artificial Sequence
  derived and/or modified sequence
gaccaagtggctcctgcgatggcggcggaagaggaggctgcggcgggaggtaaagtgttgagagaggagaaccagtgcattgctcctgtggtttccagccgcgtgagtccagggacaagaccaacagctatggggtctttcagctcacacatgacagagtttccacgaaaacgcaaaggaagtgattcagacccatcccagtcaggaatcatgacagaaaaagtggtggaaaagctttctcagaatccccttacctatcttctttcaacaaggatagaaatatcagcctccagtggcagcagagtggaagatggtgaacaccaagttaaaatgaaggccttcagagaagctcatagccaaactgaaaagcggaggagagataaaatgaataacctgattgaagaactgtctgcaatgatccctcagtgcaaccccatggcgcgtaaactggacaaacttacagttttaagaatggctgttcaacacttgagatctttaaaaggcttgacaaattcttatgtgggaagtaattatagaccatcatttcttcaggataatgagctcagacatttaatccttaagactgcagaaggcttcttatttgtggttggatgtgaaagaggaaaaattctcttcgtttctaagtcagtctccaaaatacttaattatgatcaggctagtttgactggacaaagcttatttgacttcttacatccaaaagatgttgccaaagtaaaggaacaactttcttcttttgatatttcaccaagagaaaagctaatagatgccaaaactggtttgcaagttcacagtaatctccacgctggaaggacacgtgtgtattctggctcaagacgatcttttttctgtcggataaagagttgtaaaatctctgtcaaagaagagcatggatgcttacccaactcaaagaagaaagagcacagaaaattctatactatccattgcactggttacttgagaagctggcctccaaatattgttggaatggaagaagaaaggaacagtaagaaagacaacagtaattttacctgccttgtggccattggaagattacagccatatattgttccacagaacagtggagagattaatgtgaaaccaactgaatttataacccggtttgcagtgaatggaaaatttgtctatgtagatcaaagggcaacagcgattttaggatatctgcctcaggaacttttgggaacttcttgttatgaatattttcatcaagatgaccacaataatttgactgacaagcacaaagcagttctacagagtaaggagaaaatacttacagattcctacaaattcagagcaaaagatggctcttttgtaactttaaaaagccaatggtttagtttcacaaatccttggacaaaagaactggaatatattgtatctgtcaacactttagttttgggacatagtgagcctggagaagcatcatttttaccttgtagctctcaatcatcagaagaatcctctagacagtcctgtatgagtgtacctggaatgtctactggaacagtacttggtgctggtagtattggaacagatattgcaaatgaaattctggatttacagaggttacagtcttcttcataccttgatgattcgagtccaacaggtttaatgaaagatactcatactgtaaactgcaggagtatgtcaaataaggagttgtttccaccaagtccttctgaaatgggggagctagaggctaccaggcaaaaccagagtactgttgctgtccacagccatgagccactcctcagtgatggtgcacagttggatttcgatgccctatgtgacaatgatgacacagccatggctgcatttatgaattacttagaagcagaggggggcctgggagaccctggggacttcagtgacatccagtggaccctctagc

SEQ ID NO: 203021 - DNA, 1911 bp, Artificial Sequence
  derived and/or modified sequence
atggccgctgaggaggaggcagccgctggcggtaaggtactccgtgaagagaaccagtgtatcgctcctgtggttagctccagagtatcccctggaaccaggcccactgcaatgggttcattcagctcacacatgaccgagtttcctcgtaagcgaaagggctctgactccgatcctagtcaatcaggaatcatgaccgaaaaagtggttgaaaagcttagccagaacccactcacatatctcctctccacccgtattgaaatcagtgcctcatctggatctcgtgtggaggacggagaacaccaggtgaaaatgaaggcatttcgcgaggcccacagtcagacggaaaagcgacgacgggacaaaatgaataacctcattgaagaactttctgccatgatccctcaatgcaaccctatggcccgaaaactagataaactcacagtcctgcgcatggctgttcagcacctcagatctctgaaaggtctgaccaattcttacgtaggtagtaattaccgaccgtctttcctacaggacaatgagctccgccatcttatacttaagacagccgagggttttctgttcgtggtgggttgcgaacgagggaaaattctgttcgtgagtaagtccgtatccaaaatcttaaactacgaccaagcaagcctgactggacagagtctctttgattttctgcaccctaaggatgtggcaaaggtgaaagaacagctttccagcttcgacatcagcccaagagagaagctcatagatgccaagactggactgcaggtgcactccaatctccatgcagggcgcactcgagtttattccggctctcgtagatcattcttctgtaggatcaaaagctgcaagatttcagttaaagaggagcatggttgcctccccaattctaagaaaaaggaacacaggaaattctacaccattcactgtaccgggtatctccgctcatggccacctaacatcgtgggcatggaggaggaacgaaattccaagaaggacaactctaatttcacttgcctggtggctataggcagattacagccttacatagtgccccagaacagcggcgaaattaacgtgaagccaactgaattcatcactcggttcgccgtgaacggcaagtttgtctacgttgaccagcgagccactgccatcctgggatacctcccgcaagagttgctcggcacctcttgttatgaatacttccatcaggacgaccataataacttaaccgacaaacacaaggcagtcctacagtctaaggaaaagatattgaccgactcatacaaatttagggccaaagacgggagctttgtgaccctcaagtcacagtggtttagttttactaatccctggacgaaggagctggaatacatcgtcagcgtgaacaccttggtgctcggacacagcgagcccggagaggcatcttttctgccatgtagttcacagtcgtcagaagagtcgagcagacagagctgcatgtccgtgcccggcatgagcactggcactgtgctcggagcaggctctatcggaaccgacattgctaatgagattctcgaccttcagcggctccagtcgtcctcttatctcgacgactcatctccaaccggcttgatgaaagatacgcataccgtgaattgccggagcatgagcaacaaggaactgttccccccatctccatctgagatgggggagctagaggccacacgccagaatcagagcacagtagccgttcatagtcacgagccactgctgtccgacggcgcccaactggactttgacgccctgtgcgacaacgacgacacagctatggctgcctttatgaactatctggaagccgagggcggcctcggagaccccggggacttcagcgatatccaatggaccctctag

SEQ ID NO: 203022 - DNA, 1911 bp, Artificial Sequence
  derived and/or modified sequence
atggctgctgaggaggaggccgctgctgggggcaaggtgctgcgggaggagaaccagtgcatcgcccctgtggtgagcagccgggtgtccccaggcacccggcccacagccatgggcagcttcagcagccacatgacagagttccccaggaagaggaaaggaagtgacagcgaccccagccagagcggcatcatgacagagaaggtggtggagaagctgagccagaaccccctgacctacctgctgagcacccgcatcgagatcagcgccagcagcggcagccgggtggaggatggagagcaccaggtgaagatgaaggccttccgggaggcccacagccagacagagaagagaagaagagacaagatgaacaacctgattgaggagctgagcgccatgatcccccagtgcaaccccatggccaggaagctggacaagctgactgtgctgaggatggctgtgcagcacctgcggagcctgaagggcctgaccaacagctatgtgggcagcaactaccggcccagcttcctgcaggacaatgagctgcggcacctgatcctgaagacagctgagggcttcctgtttgtggtgggctgtgagcggggcaagatcctgtttgtgtccaagtctgtgtccaagatcctgaactatgaccaggccagcctgaccggccagagcctgtttgacttcctgcaccccaaggatgtggccaaggtgaaggagcagctgagcagctttgacatcagcccccgggagaagctgattgatgccaagacaggcctgcaggtgcacagcaacctgcatgctggccgcaccagggtgtacagcggcagcagaagaagcttcttctgccgcatcaagagctgcaagatctctgtgaaggaggagcacggctgcctgcccaacagcaagaagaaggagcacaggaagttctacaccatccactgcaccggctacctgcgctcctggccacccaacatcgtgggcatggaggaggagaggaacagcaagaaggacaacagcaacttcacctgcctggtggccatcggccgcctgcagccctacatcgtgccccagaacagcggggagatcaacgtgaagcccacagagttcatcaccaggtttgctgtgaatggcaagtttgtgtatgtggaccagagggccacagccatcctgggctacctgccccaggagctgctgggcaccagctgctatgagtacttccaccaggatgaccacaacaacctgacagacaagcacaaggctgtgctgcagagcaaggagaagatcctgacagacagctacaagttccgggccaaggatggcagctttgtgaccctgaagagccagtggttctccttcaccaacccctggaccaaggagctggagtacatcgtgtctgtgaacaccctggtgctgggccacagcgagcccggggaggccagcttcctgccctgcagcagccagagcagcgaggagagcagccggcagagctgcatgtctgtgcccggcatgagcactggaacagtgctgggcgccggcagcatcggcacagacatcgccaatgagatcctggacctgcagaggctgcagagcagcagctacctggatgacagcagccccaccggcctgatgaaggacacccacacagtgaactgccgctccatgagcaacaaggagctgtttcctcccagccccagcgagatgggagagctggaggccacccggcagaaccagagcacagtggccgtgcacagccatgagcccctgctgagtgatggagcccagctggactttgatgccctgtgtgacaatgatgacacagccatggccgccttcatgaactacctggaggccgagggcggcctgggggaccccggggacttcagtgacatccagtggaccctgtag

SEQ ID NO: 203023 - DNA, 1911 bp, Artificial Sequence
  derived and/or modified sequence
atggccgccgaggaggaggccgccgccggcggcaaggtgctgcgggaagaaaatcagtgcatagcccccgtcgtgtctagtcgtgtctcaccagggacccgccctaccgcaatgggttccttctcctcgcacatgactgaattcccccggaagcgaaagggttccgactcagatccatcgcagagcgggattatgactgagaaggttgttgaaaaactttcacagaatccgctgacctacctgttgagcactcggatagaaatctccgccagttccggcagccgtgttgaggatggggagcaccaggtgaagatgaaggctttccgggaagctcattctcagacagaaaaacggagaagagacaaaatgaataatctgatcgaagagttgtccgcaatgatccctcagtgtaaccccatggctcggaaattggacaagttgacggtactacgcatggctgtccagcatctgcggtcactgaagggtttgaccaactcctacgttgggtctaactacaggccttcctttcttcaagacaatgaactcaggcatctcatccttaaaacggccgagggcttccttttcgttgtggggtgtgagcgcggcaaaatactctttgttagtaagtcggtaagcaagatccttaactacgatcaggcttctctgactggccagagcttgttcgactttcttcatcctaaggatgtcgctaaggtgaaagaacagctgtcgtctttcgacatatctcccagggaaaagctgatcgatgctaagacgggccttcaggttcactcgaacttgcatgccggtagaactcgggtgtattcaggaagccgccgctcgtttttttgtcggattaagagttgcaaaatttccgtgaaggaggagcacggctgtcttccgaattctaaaaaaaaggagcacaggaagttttacaccatccactgtaccggttacctacgaagctggcctcctaacatcgttggcatggaagaggagaggaattctaagaaagacaattccaactttacctgcctcgtcgctattgggagactgcagccttacatagtgccccaaaattcaggtgagatcaatgttaagccaaccgaatttattaccagattcgccgttaacggcaagtttgtgtacgtggatcagagagccaccgcgattttgggctacctaccccaagagttgttgggaacttcttgttatgagtatttccaccaggacgaccataacaacctaacagacaagcataaagcagtccttcagagtaaggaaaaaatcctgacagattcatacaagttccgggcaaaagacggctcgtttgtcacactgaaaagtcagtggttctcctttactaacccatggactaaggaactggagtacatcgtgtcagttaacaccttagtcttaggccacagtgagcccggggaagcaagctttttgccctgttccagtcagagcagcgaggagagttctaggcaatcctgtatgagtgttcctgggatgtcaacaggtaccgtcctcggagcgggcagcatcggcacggacatcgcaaacgaaatcctggacttgcagaggcttcagagtagctcatacttggatgacagctcaccaacgggcttgatgaaggatacgcacacagtgaactgtcgatcaatgtcgaacaaagagctgttccccccaagcccctcggaaatgggagagctggaagctacaagacagaatcaaagtaccgtagctgtgcactcgcacgagcccctcctctccgatggagcccagttagattttgacgccctgtgtgataatgacgacaccgctatggctgcttttatgaactacttggaagcagagggcggactcggagaccccggagacttctcagacatccagtggactctttag

SEQ ID NO: 203024 - DNA, 2291 bp, Artificial Sequence
  derived and/or modified sequence
gaccaagtggctcctgcgatggcggcggaagaggaggctgcggcgggaggtaaagtgttgagagaggagaaccagtgcattgctcctgtggtttccagccgcgtgagtccagggacaagaccaacagctatggggtctttcagctcacacatgacagagtttccacgaaaacgcaaaggaagtgattcagacccatcccagtcaggaatcatgacagaaaaagtggtggaaaagctttctcagaatccccttacctatcttctttcaacaaggatagaaatatcagcctccagtggcagcagagtggaagatggtgaacaccaagttaaaatgaaggccttcagagaagctcatagccaaactgaaaagcggaggagagataaaatgaataacctgattgaagaactgtctgcaatgatccctcagtgcaaccccatggcgcgtaaactggacaaacttacagttttaagaatggctgttcaacacttgagatctttaaaaggcttgacaaattcttatgtgggaagtaattatagaccatcatttcttcaggataatgagctcagacatttaatccttaagactgcagaaggcttcttatttgtggttggatgtgaaagaggaaaaattctcttcgtttctaagtcagtctccaaaatacttaattatgatcaggctagtttgactggacaaagcttatttgacttcttacatccaaaagatgttgccaaagtaaaggaacaactttcttcttttgatatttcaccaagagaaaagctaatagatgccaaaactggtttgcaagttcacagtaatctccacgctggaaggacacgtgtgtattctggctcaagacgatcttttttctgtcggataaagagttgtaaaatctctgtcaaagaagagcatggatgcttacccaactcaaagaagaaagagcacagaaaattctatactatccattgcactggttacttgagaagctggcctccaaatattgttggaatggaagaagaaaggaacagtaagaaagacaacagtaattttacctgccttgtggccattggaagattacagccatatattgttccacagaacagtggagagattaatgtgaaaccaactgaatttataacccggtttgcagtgaatggaaaatttgtctatgtagatcaaagggcaacagcgattttaggatatctgcctcaggaacttttgggaacttcttgttatgaatattttcatcaagatgaccacaataatttgactgacaagcacaaagcagttctacagagtaaggagaaaatacttacagattcctacaaattcagagcaaaagatggctcttttgtaactttaaaaagccaatggtttagtttcacaaatccttggacaaaagaactggaatatattgtatctgtcaacactttagttttgggacatagtgagcctggagaagcatcatttttaccttgtagctctcaatcatcagaagaatcctctagacagtcctgtatgagtgtacctggaatgtctactggaacagtacttggtgctggtagtattggaacagatattgcaaatgaaattctggatttacagaggttacagtcttcttcataccttgatgattcgagtccaacaggtttaatgaaagatactcatactgtaaactgcaggagtatgtcaaataaggagttgtttccaccaagtccttctgaaatgggggagctagaggctaccaggcaaaaccagagtactgttgctgtccacagccatgagccactcctcagtgatggtgcacagttggatttcgatgccctatgtgacaatgatgacacagccatggctgcatttatgaattacttagaagcagaggggggcctgggagaccctggggacttcagtgacatccagtggaccctctagcctttgatttttaactccaaaaatgagaaacattttaaagcatttcatttacgaaaaactgtctcaactattcttaagtactgtattgatattgtttgtatcttttattaatgttctaccactttttatagatttgcatcttcctgtcacagggatgtggggaaatacgttttcctcccaagagaaccaagtttattatagactcctttattcagtgaaatggcttataatccactagttgccatatttttgctaaaatatttctaaccaagaatactacttacatattgttttggctttgttttatttttgatgcagttttttttagttgaggtaatgtaatatattgatgttttcctttg

SEQ ID NO: 203025 - DNA, 1911 bp, Artificial Sequence
  derived and/or modified sequence
atggccgctgaggaagaagcagctgccggtggcaaggtgctgagggaagagaatcagtgcatagcacccgtggtcagttcgcgggtgtcgccagggactcgcccaaccgccatgggttctttctcaagccacatgactgaatttcctcgcaagaggaaaggctctgattctgaccccagccagtctgggatcatgacagagaaagttgtggagaaactgagccagaatcctctaacctacctcttaagcaccaggattgaaatttcagcgagctccgggtcacgcgtcgaggatggagaacaccaggtaaagatgaaggcattcagagaggcccactcccaaactgaaaagaggcggagggacaagatgaataatttgatcgaggagctgtccgctatgatccctcaatgcaaccctatggctcggaaactggataagctgacagtgctacggatggcagtgcagcacctgcgatctctcaagggcttaactaattcatatgtggggagcaactaccgcccaagctttctgcaagacaacgagttgcggcacctcatcctcaagacggctgagggatttcttttcgtggtcggctgtgaacgtggcaaaatactcttcgtatcaaagagcgtttcaaagatcttgaattacgaccaggcctccctgaccgggcagtcactctttgatttcctccaccctaaggacgtggctaaggtcaaggaacagttgagttcctttgacatcagcccacgggaaaagctgatagatgccaagaccggattgcaagtgcattctaacctacacgctggacgcacgagggtctactctggcagtcgacgttccttcttttgtcggattaagtcctgcaaaatttcagtaaaggaggaacacgggtgtctgccgaatagtaaaaagaaggagcacaggaagttctacaccatccattgcaccggatatctgcgatcatggcctcccaacatagtgggcatggaagaagagagaaacagcaagaaggacaattctaactttacctgcctcgtggccatcggtaggcttcagccctacattgtgccgcagaactccggtgagatcaacgtcaagccgacggaattcatcaccaggttcgctgtgaacggcaagttcgtttacgtggaccagagggctaccgcaatcctcggatacctccctcaggagctgctcgggacctcctgctacgagtactttcatcaagatgaccacaacaacttgaccgacaaacacaaggcagtgctccaatctaaggagaagatcctgaccgattcatacaaatttagggcaaaagatggctcttttgtcaccctaaaaagccagtggttttcctttacaaacccatggacaaaagagttggaatacatcgtatctgttaatactctcgtcctgggacattccgaacccggagaggcgtcctttctcccctgcagctctcagtcaagcgaagagagcagcagacagtcctgtatgagtgtgccaggcatgtccacaggcactgttttaggcgctggaagcattgggacagatatcgccaatgagattctagatctgcagcgattacaatcaagctcatacctggacgacagctctcccaccggcctcatgaaggacacccacacggtgaattgcaggtccatgagcaacaaggagctcttccctccctcacctagtgaaatgggagagcttgaagctacgcgtcaaaatcagtccactgtggctgtgcattctcatgaaccccttctcagtgatggcgcacagctggacttcgatgcgctgtgcgacaacgacgatacagccatggcggcatttatgaattacctggaggccgaggggggtctgggggacccaggagacttctcggacatccagtggaccctatag

SEQ ID NO: 203026 - DNA, 1911 bp, Artificial Sequence
  derived and/or modified sequence
atggccgccgaggaggaggccgccgccggcggcaaggtgctgagagaggagaaccagtgcatcgcccccgtggtgagcagcagagtgagccccggcaccagacccaccgccatgggcagcttcagcagccacatgaccgagttccccagaaagagaaagggcagcgacagcgaccccagccagagcggcatcatgaccgagaaggtggtggagaagctgagccagaaccccctgacctacctgctgagcaccagaatcgagatcagcgccagcagcggcagcagagtggaggacggcgagcaccaggtgaagatgaaggccttcagagaggcccacagccagaccgagaagagaagaagagacaagatgaacaacctgatcgaggagctgagcgccatgatcccccagtgcaaccccatggccagaaagctggacaagctgaccgtgctgagaatggccgtgcagcacctgagaagcctgaagggcctgaccaacagctacgtgggcagcaactacagacccagcttcctgcaggacaacgagctgagacacctgatcctgaagaccgccgagggcttcctgttcgtggtgggctgcgagagaggcaagatcctgttcgtgagcaagagcgtgagcaagatcctgaactacgaccaggccagcctgaccggccagagcctgttcgacttcctgcaccccaaggacgtggccaaggtgaaggagcagctgagcagcttcgacatcagccccagagagaagctgatcgacgccaagaccggcctgcaggtgcacagcaacctgcacgccggcagaaccagagtgtacagcggcagcagaagaagcttcttctgcagaatcaagagctgcaagatcagcgtgaaggaggagcacggctgcctgcccaacagcaagaagaaggagcacagaaagttctacaccatccactgcaccggctacctgagaagctggccccccaacatcgtgggcatggaggaggagagaaacagcaagaaggacaacagcaacttcacctgcctggtggccatcggcagactgcagccctacatcgtgccccagaacagcggcgagatcaacgtgaagcccaccgagttcatcaccagattcgccgtgaacggcaagttcgtgtacgtggaccagagagccaccgccatcctgggctacctgccccaggagctgctgggcaccagctgctacgagtacttccaccaggacgaccacaacaacctgaccgacaagcacaaggccgtgctgcagagcaaggagaagatcctgaccgacagctacaagttcagagccaaggacggcagcttcgtgaccctgaagagccagtggttcagcttcaccaacccctggaccaaggagctggagtacatcgtgagcgtgaacaccctggtgctgggccacagcgagcccggcgaggccagcttcctgccctgcagcagccagagcagcgaggagagcagcagacagagctgcatgagcgtgcccggcatgagcaccggcaccgtgctgggcgccggcagcatcggcaccgacatcgccaacgagatcctggacctgcagagactgcagagcagcagctacctggacgacagcagccccaccggcctgatgaaggacacccacaccgtgaactgcagaagcatgagcaacaaggagctgttcccccccagccccagcgagatgggcgagctggaggccaccagacagaaccagagcaccgtggccgtgcacagccacgagcccctgctgagcgacggcgcccagctggacttcgacgccctgtgcgacaacgacgacaccgccatggccgccttcatgaactacctggaggccgagggcggcctgggcgaccccggcgacttcagcgacatccagtggaccctgtag

SEQ ID NO: 203027 - protein, 775 aa, Artificial Sequence
  derived and/or modified sequence
MAPVGGGGRPVGGPARGRLLLAAPVLLVLLWALGARGQGSPQQGTIVGMRLASCNKSCGTNPDGIIFVSEGSTVNLRLYGYSLGNISSNLISFTEVDDAETLHKSTSCLELTKDLVVQQLVNVSRGNTSGVLVVLTKFLRRSESMKLYALCTRAQPDGPWLKWTDKDSLLFMVEEPGRFLPLWLHILLITVLLVLSGIFSGLNLGLMALDPMELRIVQNCGTEKERRYARKIEPIRRKGNYLLCSLLLGNVLVNTSLTILLDNLIGSGLMAVASSTIGIVIFGEILPQALCSRHGLAVGANTILLTKFFMLLTFPLSFPISKLLDFFLGQEIRTVYNREKLMEMLKVTEPYNDLVKEELNMIQGALELRTKTVEDIMTQLQDCFMIRSDAILDFNTMSEIMESGYTRIPVFEDEQSNIVDILYVKDLAFVDPDDCTPLKTITRFYNHPVHFVFHDTKLDAMLEEFKKGKSHLAIVQKVNNEGEGDPFYEVLGLVTLEDVIEEIIKSEILDESDMYTDNRSRKRVSEKNKRDFSAFKDADNELKVKISPQLLLAAHRFLATEVSQFSPSLISEKILLRLLKYPDVIQELKFDEHNKYYARHYLYTRNKPADYFILILQGKVEVEAGKENMKFETGAFSYYGTMALTSVPSDRSPAHPTPLSRSASLSYPDRTDVSTAATLAGSSNQFGSSVLGQYISDFSVRALVDLQYIKITRQQYQNGLLASRMENSPQFPIDGCTTHMENLAEKSELPVVDETTTLLNERNSLLHKASHENAI

SEQ ID NO: 203028 - DNA, 2328 bp, Artificial Sequence
  derived and/or modified sequence
atggcacccgtgggcggcggtggcagaccggtggggggacccgcgaggggtcgcctgctgttagccgctcccgttctgctcgttctgttatgggcacttggagcaagaggacagggcagccctcagcagggcacaatcgtcggcatgcgtttggccagctgcaataaaagttgcggcaccaatccggacggaataatctttgtttccgaagggagcaccgttaacctgcggctttacggctactctttgggcaacatttctagtaatctgatatcctttaccgaggtcgatgacgcagagaccctgcataagagcacctcctgtctggagctcaccaaagacctcgtggtacagcagctggtaaatgtgagtagaggaaatacgtcaggtgttttagtggtcctgaccaagttccttcggaggagcgagagcatgaagctgtatgcgctgtgcacccgtgctcagcccgacggcccttggctgaagtggacagacaaagatagcctcctatttatggtagaagaacctggaaggtttttgccgctttggctgcacattctcctgattacagtgctcctggtcttgagcggaatttttagcggccttaacctcgggctgatggcgttggaccctatggagctacgtatagtccagaattgcggaaccgagaaggagcgaagatacgccaggaaaatcgagccaatcaggagaaaagggaactatctgctgtgcagtctgctgcttggtaacgtactggtaaatacatccctgactatactgcttgacaacctcatcggatcaggcttaatggccgtggcctcctcaactatcggaatcgtaatttttggagaaatcttgccacaggccctgtgttctagacacgggcttgcggtgggtgccaatacgatcttgctcaccaaattcttcatgctgctgactttccctctgtccttccccataagcaagcttctcgacttctttctgggccaggaaatcaggacagtctacaatagagagaagttgatggagatgcttaaggtgacagaaccatataatgacttggtaaaggaagaactgaacatgattcagggggctttagaactccgaactaaaactgtcgaggacatcatgactcagctgcaggactgtttcatgatccgctctgatgcgatactggatttcaatacaatgagcgagataatggagagcgggtatactcgcattcccgtgttcgaggatgaacaaagcaatattgttgacattctttacgtgaaggacctagcttttgtggacccagacgactgcacacctctgaagactatcacaaggttctacaaccacccagtgcatttcgtgttccatgatactaagttggacgctatgctggaggaatttaagaagggaaaaagtcatctcgcaattgttcagaaggtcaacaatgagggagagggagacccgttctacgaagtgctaggcttggttaccctcgaggatgttatagaagaaattattaagtcagaaatcctggatgaaagtgacatgtacactgataaccgttccagaaagagggtctccgaaaagaacaaacgagattttagcgcattcaaagacgccgacaacgagctgaaagtgaaaatctcgccccagttactcctcgccgcccatcggtttcttgctacagaggtcagccagttttcaccctctttaatcagcgaaaagatcctgctccggttgttgaagtaccccgacgtgatacaggagctaaaattcgatgaacataataagtattacgctcgccactatttgtatacacggaataagcccgctgattattttatcctgatcctccagggcaaagtggaagtggaggcgggcaaggagaatatgaaatttgagacgggggcgttctcatactatggcacaatggcccttactagcgtcccttcagacagatcccctgcacaccctacacctttatcaagatccgcctctctctcataccccgataggactgatgtgagcacggctgcaactctcgccggctcttccaatcagtttggctcttcagtgctggggcagtacatctccgatttttcagtccgcgcactggtggatctgcagtacatcaaaatcacccgccagcagtatcaaaatggactgctggcatcgaggatggagaattccccccaattccctattgatggctgtacgactcacatggaaaatcttgccgaaaagtccgagctgcccgtcgtcgatgaaaccacgacacttctgaatgagcgtaacagccttcttcataaagcatcacacgagaatgcaatatag

SEQ ID NO: 203029 - DNA, 2328 bp, Artificial Sequence
  derived and/or modified sequence
atggcccctgtgggcggcggcggccggcctgtgggcggccctgcccggggccgcctgctgctggccgcccctgtgctgctggtgctgctgtgggccctgggcgcccggggccagggcagcccccagcagggcaccatcgtgggcatgaggctggccagctgcaacaagagctgtggcaccaacccagatggcatcatctttgtgtctgagggcagcacagtgaacctgcggctgtatggctacagcctgggcaacatcagcagcaacctgatctccttcacagaggtggatgatgctgagaccctgcacaagagcaccagctgcctggagctgaccaaggacctggtggtgcagcagctggtgaatgtgtcccggggcaacaccagcggcgtgctggtggtgctgaccaagttcctgcggcgctctgagagcatgaagctgtatgccctgtgcacccgggcccagccagatggcccctggctgaagtggacagacaaggacagcctgctcttcatggtggaggagcccggccgcttcctgcccctgtggctgcacatcctgctgatcaccgtgctgctggtgctgagcggcatcttcagcggcctgaacctgggcctgatggccctggaccccatggagctgcgcatcgtgcagaactgtggcacagagaaggagcggcgctatgccaggaagattgagcccatccggaggaagggcaactacctgctgtgcagcctgctgctgggcaatgtgctggtgaacaccagcctgaccatcctgctggacaacctgattggcagcggcctgatggctgtggccagcagcaccatcggcatcgtcatctttggagagatcctgccccaggccctgtgcagccgccacggcctggccgtgggcgccaacaccatcctgctgaccaagttcttcatgctgctgaccttccccctgtccttccccatcagcaagctgctggacttcttcctgggccaggagatcagaacagtgtacaaccgggagaagctgatggagatgctgaaggtgacagagccctacaatgacctggtgaaggaggagctgaacatgatccagggcgccctggagctgcggaccaagacagtggaggacatcatgacccagctgcaggactgcttcatgatccgcagtgatgccatcctggacttcaacaccatgtctgagatcatggagagcggctacacccgcatccctgtgtttgaagatgagcagagcaacatcgtggacatcctgtatgtgaaggacctggcctttgtggaccctgatgactgcacccccctgaagaccatcacccgcttctacaaccaccctgtgcactttgtgttccatgacaccaagctggatgccatgctggaggagttcaagaagggcaagagccacctggccatcgtgcagaaggtgaacaatgaaggagagggggaccccttctatgaggtgctgggcctggtgaccctggaggatgtgattgaggagatcatcaagtctgagatcctggatgaaagtgacatgtacacagacaacagaagcaggaagagggtgtctgagaagaacaagagggacttcagcgccttcaaggatgctgacaatgagctgaaggtgaagatcagcccccagctgctgctggccgcccaccgcttcctggccacagaggtgtcccagttcagccccagcctcatcagcgagaagatcctgctgcggctgctgaagtacccagatgtgatccaggagctgaagtttgatgagcacaacaagtactatgcccggcactacctgtacaccaggaacaagccagctgactacttcatcctgatcctgcagggcaaggtggaggtggaggccggcaaggagaacatgaagtttgaaacaggagccttctcctactacggcaccatggccctgacctctgtgcccagcgacaggagccctgcccaccccacccccctgagccgcagcgccagcctgagctacccagacagaacagatgtgtccacagctgccaccctggccggcagcagcaaccagtttggcagctctgtgctgggccagtacatcagtgacttctctgtgcgggccctggtggacctgcagtacatcaagatcacccggcagcagtaccagaatggcctgctggccagcaggatggagaacagcccccagttccccattgatggctgcaccacccacatggagaacctggccgagaagtctgagctgcctgtggtggatgagaccaccaccctgctgaatgaaagaaacagcctgctgcacaaggccagccatgaaaatgccatctag

SEQ ID NO: 203030 - DNA, 2328 bp, Artificial Sequence
  derived and/or modified sequence
atggcccccgtgggcggcggcggccggcccgtgggcggccccgcccgcggtcgcctactcctggctgcaccggtgctgctggtcctattgtgggcactgggggcacgcggccagggatctccacaacaagggacgatcgtaggcatgaggctagcctcctgtaataaaagctgcggcaccaacccagacgggattatttttgtttcggagggttctaccgttaatttgaggctgtatgggtattcactggggaatataagctcaaacctgattagtttcaccgaagtcgacgacgccgagacactccacaaatctactagctgcctggaactaaccaaagacctggtggtacaacaattggtgaacgtaagtaggggtaatacatccggggtgctcgtcgttctgacaaaatttctgcgaagatcggagtctatgaaactgtatgccttgtgcactcgagcgcagccagatgggccatggctaaagtggacagataaggatagtctgctttttatggtggaggagccggggcgcttcctgcccctgtggctccacattctcctcattaccgtcctgcttgtgctctcggggattttcagtggtctgaatttagggctgatggcattagaccctatggagttgcgaattgtgcagaattgcggcacggagaaggaacgacgatatgctcgcaagatcgagcctatacggagaaagggtaactatctgctttgttccttgctcctgggcaacgtccttgtcaatacaagcctcacaattctgctggataacctgatcggcagtgggctcatggcggtggcctcttcaaccatcgggattgtcatctttggggaaattctgccccaagcgttgtgctcccgccacggtctggccgtaggcgccaacaccatcttactcacaaagtttttcatgcttctaacattccctcttagttttcctataagcaagctgctggacttctttttagggcaagaaatccgcaccgtgtacaatcgcgagaagctcatggagatgctgaaggtgaccgaaccctacaatgacctcgtaaaagaagagcttaacatgattcaaggcgcccttgaactgcggactaagaccgtggaggacattatgacacagcttcaggactgtttcatgatacgctccgatgccatcctggactttaatactatgagtgagatcatggaaagtgggtacacccggatccccgtcttcgaggatgaacagtctaatatagtggacatcctgtatgttaaagatctcgcatttgttgacccagatgattgtacgccactgaaaacaattactaggttctacaatcacccagtacatttcgtcttccatgacacaaaactcgacgctatgctggaagaattcaaaaaaggcaagagccatctggccatcgtccagaaagtgaacaatgagggcgagggcgacccattctacgaagtgctgggccttgtgacccttgaagacgtaatcgaagagatcatcaagtctgagatcttagatgaatccgacatgtatactgataaccgctccaggaaaagggttagtgaaaagaataaacgggatttttccgccttcaaagacgctgataacgagctgaaggtgaagatcagtcctcagttgcttcttgcggcccaccgctttctagctaccgaggtgtcccagttttcaccatcactgattagcgagaagatcctcctccggctgctgaaataccccgacgtaatccaagaactgaagtttgatgaacataacaagtactatgcccggcactacttgtatacaaggaataaaccagccgactactttattctcatcctacaggggaaagtggaagtcgaagccgggaaggagaacatgaagtttgaaacaggggcctttagctattatgggaccatggccctgaccagcgttcccagcgaccgtagcccagcccaccctacacccctcagccgtagtgcttccttaagttatcctgatagaactgacgtgtctactgcggcgacccttgctgggtcctctaatcagtttgggtcctccgttctcggacagtatataagcgatttcagcgtaagggccctggttgacttgcagtacatcaagatcactcggcagcagtatcagaacgggctcctcgcatcccgaatggaaaactctcctcagtttcctattgacggatgcacaacccatatggagaaccttgccgagaagagtgaattgccagtcgtggacgaaacaaccaccctcttgaacgagagaaactcactgctgcacaaagcctcccacgagaatgccatctag

SEQ ID NO: 203031 - DNA, 2328 bp, Artificial Sequence
  derived and/or modified sequence
atggctcccgtaggcggaggcggaagaccagtgggaggccctgctcgcggtagattgctgttggccgcaccagttctcctcgtgttactttgggccctaggggctagggggcaaggatcacctcagcagggcactattgtgggaatgcgtctcgccagctgcaataaaagctgcgggaccaacccagatgggatcatattcgtctctgagggctctacagtgaatctgcgcctctacggctactcacttgggaacatctcttctaatttgattagctttactgaagtcgatgacgccgagaccctgcataaaagcacgtcctgcctcgagcttaccaaagatctggttgtccaacaactcgtgaatgtctcccgcggtaacactagcggtgttctggtggtgttgacaaaatttctgcggaggtctgaatctatgaaactgtacgctctctgtacgagggctcagccagacgggccatggcttaagtggacagataaggatagcttattatttatggtcgaagagcctggtcggttcttacctctctggctgcatatcttgctgattaccgtcttactggttctctcaggcatattttctggcctaaatttaggcctgatggcgctggatcccatggagctgagaatcgtccaaaactgtggaacagaaaaggagagacgatacgccaggaaaattgagccaatccgccgtaagggcaattacctgctgtgctccctgctgctaggaaacgtcttggtgaacacgagtctgactatattacttgacaacttgatcggcagcggcttgatggcggttgcttcatctaccatcggaatcgtcatcttcggagaaattctgccgcaggccttgtgtagccggcacggtttggccgttggagccaatacaatcctcctgactaagttcttcatgttgctcacctttccactgtcttttcccatctcgaaacttctcgactttttcctggggcaagagatacggactgtctacaatagagagaaactgatggaaatgttaaaggtgaccgagccgtacaacgatctggttaaggaggagctgaacatgatacagggggctttggaactgagaaccaagaccgtagaggacataatgacacagctgcaggattgtttcatgataaggagcgacgcaatcctggattttaacaccatgtcggaaatcatggagagcggctatacccgaatcccggtctttgaggacgagcagagcaacattgtcgatatattatatgtcaaggacctggcctttgttgaccccgacgattgcacacctctcaaaacaattactagattttacaaccaccctgtccatttcgtatttcacgacacaaaactggatgcaatgctcgaggagtttaagaagggtaaatctcaccttgctatcgtccaaaaggtcaacaacgagggggagggggacccattctacgaggtgctggggctggtaacattggaggacgtcatcgaagagatcattaaaagcgaaattctcgatgaaagcgacatgtatactgacaatcgtagcaggaaacgggtgtctgagaagaacaaacgtgacttcagcgctttcaaggatgcagacaatgagcttaaagtgaaaatttcccctcaactccttctcgccgctcaccgctttctcgcaactgaggtcagccaattcagcccctccctgatctccgaaaagatcctgctgcgcttgttaaaatacccggacgtcatccaagagctgaagtttgacgaacacaataaatactatgctcgccactacctatacaccagaaataaaccagccgattactttatcctcatactccagggcaaagtggaagtggaggccggaaaagaaaacatgaaattcgaaacaggtgcatttagctattatggcaccatggctcttacaagtgttccctctgaccgctctcctgcacaccctacacctctgagccggtcagcctctctttcttaccctgataggaccgacgtgtctaccgctgccaccctcgcgggaagcagcaatcagttcggcagtagtgtcctgggccagtacattagcgattttagtgtgagggctctcgtggacctccagtacatcaagattacacgtcagcagtatcagaacgggttgctagcctctcgaatggagaatagcccccagttcccaatcgacgggtgtactacacatatggaaaacttagctgagaaatctgaattgccagtggtggatgagaccaccaccttacttaacgagcggaacagtctgctccacaaagccagtcacgagaacgctatctag

SEQ ID NO: 203032 - DNA, 4800 bp, Artificial Sequence
  derived and/or modified sequence
agttggctcggcggcagcggagcggccggagctgcggtgcggaccggggccgcgcggcgtggcgcggggagcggcggcggcggcagagccagagcaacatggcgccggtgggcgggggcgggcgcccggtcggcggaccggcccgcgggcgcctcctcctggcggcgccggtgctgctggtgctgctgtgggcgctgggggcccggggccagggcagcccccagcagggcacgatcgtgggcatgaggctggcgagctgcaacaagtcgtgtgggacgaacccggatggcatcatcttcgtgtccgagggcagcaccgtgaacctgaggctgtacggctacagcctgggcaacatctccagcaacctgatctccttcaccgaggtggacgatgccgagaccctccacaagtccaccagctgcctcgagctcaccaaggacctggtcgtccagcagctggtcaacgtgagccgcgggaacacgtccggcgtgctggtggtgctcaccaagttcctccggaggagcgagagcatgaagctgtatgcactgtgcacccgggcccagcccgacgggccctggctgaagtggacggacaaggactcactgctcttcatggtggaggagcctgggaggttcctgcctctctggctgcacattctcctaattacggtgctgctggtgctgtcgggcatattttctggcctcaacctcgggcttatggccctggaccccatggagctgcgcatcgtgcagaactgtggcaccgagaaggagaggcgctatgcccgcaagattgagcccatccggcgcaagggcaactaccttctctgctcgttgctcctagggaacgtgctggtcaacacctccctcacaatccttctagacaacctcatcgggtccggcctcatggcggtggcctcctccaccattggcattgtcatctttggggagatcctacctcaggccctgtgctcccgacatgggctggctgtgggtgccaacaccatccttctcaccaaattctttatgctactcaccttccccctcagttttcccattagcaagctcctggacttttttctgggccaggagattcgcactgtttacaaccgggagaagctgatggagatgttgaaggtgacggagccctataatgacctcgtgaaagaggagctcaatatgatccagggtgccctggaactacggaccaaaactgtagaggatatcatgacccagctccaggactgcttcatgatccgcagcgatgccatcctggacttcaacaccatgtcggagataatggaaagcggctatactcgcatcccggtgttcgaagacgagcagtccaatattgtagatattctctacgtcaaagacttggcctttgtggaccccgatgactgcacccccctcaagactatcactcgcttctataaccacccggtgcactttgtcttccatgacaccaagttggatgccatgctggaggagttcaagaaggggaagtcccacctggccatcgtgcagaaggtaaacaacgagggtgagggtgaccccttctacgaggtcctgggcctggtcaccctggaggacgtgatcgaggagatcatcaagtcggagatcctggacgagtccgacatgtacactgacaaccgaagccggaagcgggtgtctgagaagaacaagcgtgacttctctgccttcaaggatgcggacaatgagctcaaagtgaaaatctccccgcagctcctcctggccgctcatcgcttcctagccacagaggtctctcagtttagcccctccctgatatcagagaagatcctgctgcggctactcaagtacccagatgtcattcaggaactcaagtttgacgagcacaataagtactacgcccgccattacctgtacacccgaaataagccggccgactacttcatcctcatcctgcaggggaaggtggaggtggaggcagggaaggagaacatgaagtttgagacgggcgccttctcctactatgggactatggccctgacctcggtcccctccgaccgttccccagcacaccccaccccactcagccgctcagcctccctcagttacccagaccgcacagacgtctcaactgcagcaaccttggcaggcagcagcaaccagtttggcagctctgtcctgggccagtacatctctgacttcagcgtccgggcactcgtggacttgcagtacatcaagatcactcggcagcagtaccagaacgggctgctggcttctcgcatggagaacagccctcagtttcccatagacgggtgcaccacccacatggagaacttggccgagaagtctgagctgcctgtggtggacgagaccacaactcttctcaacgagcgtaactccttgctgcacaaagcctcccacgagaatgccatctgacaggagggcccggggccccctgcccaccctgcgggggcctccccagtgggcccacatgaagagagggaacctgttagtccagaaaggatacggatagatagcctgtctgactgaacagccagatggcccccagcctatgggggatctggcctctgccagggacctctgagtagctctgaggtggcactgtccagccctggatagggggggcagtgggccagctaccgtaagcaaaggctgttttttactgagagaatttctaaagtaggctcatcacttttttttaaatatcattttgggaagggaagacagggttaaggaactttatttaaaaaaaaaatatttttttcctaaaaactataaaagaggaagggtttcttgtcccgggaagcaacggacataatctgttcccagccatggccttccagcttgtgtccctgattcagggagctctcccttcctcctcctcctcctcctccggaggtgggatcccagagcctgccagtggaggcttatctgttgggaggaagacagctcttcacagaagcaaagaacaaaatggcatggagatcagctgcctgagcacctgcgctgtagcttatctgacaacgctgaggccacgagctcctgggtagctgtgatcagggacatgataatctgagctatgcagaggagcacatctgttgtcaactgctgtacccagaaatctagaactctgccgacagcctctcctggtgagtcgggactcagctgaggacacatccccaccctgcctcccatctggccctttggacaactggccctttgtgacagggctgactcaagtgttaggcagggtctcaggcctttgattgctcacccctgctccccaggccctgccctcacttttaccaaaggttctccctcggcgggagggcatctgtgttggaggtgatttgtctgggttcttccttttggttccagaaggaactgtcagtcatcagcatctgcgttgttagcagtcagtaccacccccgccccacaatgacagtcaaggctgacttgttgactgaagcctttttcccagaccccttatttcgaatccccaagcttcagtccctcttgggggtggagacaagaggacatgtgggaagccacggaagcaggttctttatgtcctctcctctgtggctggcaaggctcacctggccttatccacccacttatggaacctcaggagaggagggctcctcctaaaggcatgcagcttgcagcccctctttctcacacgtgtgatcctagcgtgagaggtcatcctgcccttgctgaagttagtagtactgtactaagagctctgccctcatgtgaattcctgccctggcgcctcttccctggggctgaatcaggccctgctgcaaaactccaggcttcccagggttggggaggctgtgggaccaaggtccatgttggtccttccactgggtgcagcaggagctgggtcccgagagcctggcaggtgaaactctgcaggccttccgcctgattattatttattcactcctttcctcaccccaagtgccctgctctccaggtgcctagagtatcctaactcttaggaccagggattgtcttgcaccaagtatgcctacccctggccagtctgaggtctcctagccatagaactgactcctggaagcctggagagaaggtggtgacacccatgggttctcaactgtaaggaaaaaagacaccagacttttgttccctagtgggggaaagcccttagtcttgtacaggagcagcttgctcccaagtccttttggaagctggcagagctatattcctgacagccctgactgccaggtagagcaaaagacattggtgggggtatgtgaagcaaaaggggcaggtgcacacacctccacagtgacctctgtgcacacggttaccaccaactggctggccctcctcctcttccctggcccattgatcatcccttctcacagagggtcatcattatttccaaatattgtttgtctgatgacttcctcttcccagtgcaatttttcccttcctatttcaacctctggttcctgggatgagccataccctggaactggcccacccactgtgtcttccacgtaagggagacctttgcaaagggcatccaaatgggtaggcaggtgacagccgccgtatttattttgcataatattttaatttgtatatttttgtgatttattttggcgttatgagtttgactctcggggagttttgttgttatgactcttgtgtcttttgtcacaaaacaatgatatttgctaaacgatatatggaatttatttttgattggtaataaaaaatcaaatatgtataaatcctggtgaatctacaa

SEQ ID NO: 203033 - DNA, 2328 bp, Artificial Sequence
  derived and/or modified sequence
atggcccccgtgggcggcggcggcagacccgtgggcggccccgccagaggcagactgctgctggccgcccccgtgctgctggtgctgctgtgggccctgggcgccagaggccagggcagcccccagcagggcaccatcgtgggcatgagactggccagctgcaacaagagctgcggcaccaaccccgacggcatcatcttcgtgagcgagggcagcaccgtgaacctgagactgtacggctacagcctgggcaacatcagcagcaacctgatcagcttcaccgaggtggacgacgccgagaccctgcacaagagcaccagctgcctggagctgaccaaggacctggtggtgcagcagctggtgaacgtgagcagaggcaacaccagcggcgtgctggtggtgctgaccaagttcctgagaagaagcgagagcatgaagctgtacgccctgtgcaccagagcccagcccgacggcccctggctgaagtggaccgacaaggacagcctgctgttcatggtggaggagcccggcagattcctgcccctgtggctgcacatcctgctgatcaccgtgctgctggtgctgagcggcatcttcagcggcctgaacctgggcctgatggccctggaccccatggagctgagaatcgtgcagaactgcggcaccgagaaggagagaagatacgccagaaagatcgagcccatcagaagaaagggcaactacctgctgtgcagcctgctgctgggcaacgtgctggtgaacaccagcctgaccatcctgctggacaacctgatcggcagcggcctgatggccgtggccagcagcaccatcggcatcgtgatcttcggcgagatcctgccccaggccctgtgcagcagacacggcctggccgtgggcgccaacaccatcctgctgaccaagttcttcatgctgctgaccttccccctgagcttccccatcagcaagctgctggacttcttcctgggccaggagatcagaaccgtgtacaacagagagaagctgatggagatgctgaaggtgaccgagccctacaacgacctggtgaaggaggagctgaacatgatccagggcgccctggagctgagaaccaagaccgtggaggacatcatgacccagctgcaggactgcttcatgatcagaagcgacgccatcctggacttcaacaccatgagcgagatcatggagagcggctacaccagaatccccgtgttcgaggacgagcagagcaacatcgtggacatcctgtacgtgaaggacctggccttcgtggaccccgacgactgcacccccctgaagaccatcaccagattctacaaccaccccgtgcacttcgtgttccacgacaccaagctggacgccatgctggaggagttcaagaagggcaagagccacctggccatcgtgcagaaggtgaacaacgagggcgagggcgaccccttctacgaggtgctgggcctggtgaccctggaggacgtgatcgaggagatcatcaagagcgagatcctggacgagagcgacatgtacaccgacaacagaagcagaaagagagtgagcgagaagaacaagagagacttcagcgccttcaaggacgccgacaacgagctgaaggtgaagatcagcccccagctgctgctggccgcccacagattcctggccaccgaggtgagccagttcagccccagcctgatcagcgagaagatcctgctgagactgctgaagtaccccgacgtgatccaggagctgaagttcgacgagcacaacaagtactacgccagacactacctgtacaccagaaacaagcccgccgactacttcatcctgatcctgcagggcaaggtggaggtggaggccggcaaggagaacatgaagttcgagaccggcgccttcagctactacggcaccatggccctgaccagcgtgcccagcgacagaagccccgcccaccccacccccctgagcagaagcgccagcctgagctaccccgacagaaccgacgtgagcaccgccgccaccctggccggcagcagcaaccagttcggcagcagcgtgctgggccagtacatcagcgacttcagcgtgagagccctggtggacctgcagtacatcaagatcaccagacagcagtaccagaacggcctgctggccagcagaatggagaacagcccccagttccccatcgacggctgcaccacccacatggagaacctggccgagaagagcgagctgcccgtggtggacgagaccaccaccctgctgaacgagagaaacagcctgctgcacaaggccagccacgagaacgccatctag

SEQ ID NO: 203034 - protein, 184 aa, Artificial Sequence
  derived and/or modified sequence
MGNGMNKILPGLYIGNFKDARDAEQLSKNKVTHILSVHDSARPMLEGVKYLCIPAADSPSQNLTRHFKESIKFIHECRLRGESCLVHCLAGVSRSVTLVIAYIMTVTDFGWEDALHTVRAGRSCANPNVGFQRQLQEFEKHEVHQYRQWLKEEYGESPLQDAEEAKNILAAPGILKFWAFLRRL

SEQ ID NO: 203035 - DNA, 555 bp, Artificial Sequence
  derived and/or modified sequence
atgggcaacggcatgaacaagatcctgcccggcctgtacatcggcaacttcaaggacgccagagacgccgagcagctgagcaagaacaaggtgacccacatcctgagcgtgcacgacagcgccagacccatgctggagggcgtgaagtacctgtgcatccccgccgccgacagccccagccagaacctgaccagacacttcaaggagagcatcaagttcatccacgagtgcagactgagaggcgagagctgcctggtgcactgcctggccggcgtgagcagaagcgtgaccctggtgatcgcctacatcatgaccgtgaccgacttcggctgggaggacgccctgcacaccgtgagagccggcagaagctgcgccaaccccaacgtgggcttccagagacagctgcaggagttcgagaagcacgaggtgcaccagtacagacagtggctgaaggaggagtacggcgagagccccctgcaggacgccgaggaggccaagaacatcctggccgcccccggcatcctgaagttctgggccttcctgagaagactgtag

SEQ ID NO: 203036 - DNA, 1485 bp, Artificial Sequence
  derived and/or modified sequence
gagcccgagcctagtgcctcccacgcccggcggccgcgagccggggtccgcgagggcggagtggggcgcggcagccaggaacccgactacgaatcccagggtgcgggcgggcggagcgaggagggacgctgggcctgcccggtgcgcacgggggcggggaccggcaaggcgggaccatttcccggcataggctccggtgcccctgcccggctcccgccgggaagttctaggccgccgcacagaaagccctgccctccacgccgggtctctggagcgccctgggttgcccggccggtccctgccgctgacttgttgacactgcgagcactcagtccctcccgcgcgcctcctccccgcccgccccgccgctcctcctccctgtaacatgccatagtgcgcctgcgaccacacggccggggcgctagcgttcgccttcagccaccatggggaatgggatgaacaagatcctgcccggcctgtacatcggcaacttcaaagatgccagagacgcggaacaattgagcaagaacaaggtgacacatattctgtctgtccacgatagtgccaggcctatgttggagggagttaaatacctgtgcatcccagcagcggattcaccatctcaaaacctgacaagacatttcaaagaaagtattaaattcattcacgagtgccggctccgcggtgagagctgccttgtacactgcctggccggggtctccaggagcgtgacactggtgatcgcatacatcatgaccgtcactgactttggctgggaggatgccctgcacaccgtgcgtgctgggagatcctgtgccaaccccaacgtgggcttccagagacagctccaggagtttgagaagcatgaggtccatcagtatcggcagtggctgaaggaagaatatggagagagccctttgcaggatgcagaagaagccaaaaacattctggccgctccgggaattctgaagttctgggcctttctcagaagactgtaatgtacctgaagtttctgaaatattgcaaacccacagagtttaggctggtgctgccaaaaagaaaagcaacatagagtttaagtatccagtagtgatttgtaaacttgtttttcatttgaagctgaatatatacgtagtcatgtttatgttgagaactaaggatattctttagcaagagaaaatattttccccttatccccactgctgtggaggtttctgtacctcgcttggatgcctgtaaggatcccgggagccttgccgcactgccttgtgggtggcttggcgctcgtgattgcttcctgtgaacgcctcccaaggacgagcccagtgtagttgtgtggcgtgaactctgcccgtgtgttctcaaattccccagcttgggaaatagcccttggtgtgggttttatctctggtttgtgttctccgtggtggaattgaccgaaagctctatgttttcgttaataaagggcaacttagccaagtttaa

SEQ ID NO: 203037 - DNA, 555 bp, Artificial Sequence
  derived and/or modified sequence
atgggcaacggtatgaacaaaattctgccaggcttgtacattgggaactttaaagacgctagggacgcagagcagcttagcaaaaacaaggtaacccatattctgtcggttcacgacagcgcaaggccaatgctggagggggtgaagtatctgtgcatccctgccgccgactcgccatcacagaaccttactagacattttaaagaatccattaagttcattcacgagtgccggctgcgaggtgaatcttgcctcgtgcactgcctggccggggtgagcagaagtgtcacgctagtgattgcatatattatgacagtcacagatttcggatgggaggatgccttgcacacagtcagggccggccggtcctgcgccaacccaaatgtcgggtttcaaagacagctgcaggagttcgagaaacacgaagtccaccagtaccggcagtggctgaaggaggagtatggggaaagccctctccaggatgcagaggaggccaaaaatattctggctgctcctggaatcctgaagttctgggcttttctgcgacgactgtag

SEQ ID NO: 203038 - DNA, 555 bp, Artificial Sequence
  derived and/or modified sequence
atgggaaatggcatgaacaagatcctgcccggcctgtacatcggcaacttcaaggatgccagagatgctgagcagctgagcaagaacaaggtgacccacatcctgtctgtgcatgacagcgcccggcccatgctggagggcgtgaagtacctgtgcatcccagctgctgacagccccagccagaacctgaccaggcacttcaaggagagcatcaagttcatccacgagtgccgcctgcggggggagagctgcctggtgcactgcctggccggcgtgagccgctctgtgaccctggtgattgcctacatcatgacagtgacagactttggctgggaggatgccctgcacacagtgcgggccggccgcagctgtgccaaccccaacgtgggcttccagaggcagctgcaggagtttgagaagcatgaggtgcaccagtaccggcagtggctgaaggaggagtatggagagagccccctgcaggatgctgaggaggccaagaacatcctggccgcccctggcatcctgaagttctgggccttcctgcggcggctgtag

SEQ ID NO: 203039 - DNA, 555 bp, Artificial Sequence
  derived and/or modified sequence
atgggcaacggcatgaacaagatcctgcccggcctgtacatcggcaatttcaaagacgcaagagatgcagaacagttaagcaagaataaagtgactcatatattaagcgtccatgactcagcacgccccatgctggaaggagtgaagtatttgtgtatcccagctgccgattctccttcgcagaatctgacacgccatttcaaagagtctattaaattcatccatgagtgtagactgcggggcgagagctgtttagtgcattgtctggctggggtgagtcggagcgtcaccctggtcattgcgtacattatgaccgttactgacttcggttgggaagacgcccttcacacggtcagggctgggaggtcttgtgcgaaccccaatgttggcttccagagacaattacaggaattcgagaagcacgaagttcatcagtataggcaatggctaaaagaggagtacggcgagtcccccctacaggatgcagaagaagccaaaaatattttagctgcaccaggtatcctgaagttctgggcatttctccgtcgcctctag

SEQ ID NO: 203040 - DNA, 555 bp, Artificial Sequence
  derived and/or modified sequence
atgggcaacggcatgaacaaaatcctcccgggactgtatattggaaatttcaaggatgcccgagacgccgagcagctgtcgaagaacaaggtgacccacattctctctgttcacgacagtgccaggcctatgctggaaggtgtcaaatacctgtgtatacctgcagccgattctccctcacagaatttgaccaggcattttaaagaaagcattaagtttattcatgagtgcaggcttcggggagagagttgcctggtacactgtctggcaggagtgtcaaggtccgtcactctagtgatagcctatatcatgactgtgaccgactttggttgggaggatgctctgcatacagtgcgggcagggagatcatgcgcaaacccaaatgtcggtttccagaggcagctgcaggagttcgaaaagcacgaggttcaccagtacaggcagtggctgaaggaggagtacggggagtcccctcttcaggatgctgaggaggcgaaaaatatacttgctgctccgggtatattgaaattctgggcattcctccggagactgtag

SEQ ID NO: 203041 - protein, 79 aa, Artificial Sequence
  derived and/or modified sequence
MHPDLSPHLHTEECNVLINLLKECHKNHNILKFFGYCNDVDRELRKCLKNEYVENRTKSREHGIAMRKKLFNPPEESEK

SEQ ID NO: 203042 - DNA, 947 bp, Artificial Sequence
  derived and/or modified sequence
cgaaggtcgccgagccccccacgccgctcttcttagaagtgtgcaaccttgcaccagtagtggacttacacataggctccgttaggacctggcttatgtgctcggcttgtggcttagacgctgccgtgccccagtggactcactgtgcctccccccacgacggacggaaatgggcccctccaggacaggcggcgcatgcgccttggggcccgcgggcggcgggggcgaggagccgggagcacggtggagcggtggagggcgtcactgggtttcggcgtctggcaagcggttcagctgtctgctccctagcagccggccttcgggtcgggcgtctccgccggctactgccgcttcagttctcccggtgtggccacgagtcgggttgcactgctgtgatccatcctcatctcctaaagatgcatcctgacttatctccacacttgcacactgaagaatgcaacgtcttgattaacttgcttaaggaatgtcacaaaaatcacaacattctgaaattttttggttattgtaatgatgttgatcgggagttgagaaaatgcctgaagaatgagtacgtagaaaacaggaccaagagcagggagcatggcattgcaatgcgaaagaaactttttaatcctccagaggaatccgaaaaataaattgtattttcactcgatgccttggctgagagaagacctaaagactctgggttgatacctgaaagaatcctgtcttatttggtctccataatcctttgaatggaaagtgacctgtgagagattgaaccatggagaaatatgaaaaccctggattctgagtatttgttgggcagggcgtttagtactgtctcccctttaccagcaaacctgacttcaccatgtttattccctttgcctacaaccagttaatatctgagtaacttatctccttcaataaaataatttaaataa

SEQ ID NO: 203043 - DNA, 240 bp, Artificial Sequence
  derived and/or modified sequence
atgcatcctgatctctccccacacctacatacggaggagtgtaatgtgcttataaatctgctcaaagaatgccataagaatcacaatattctcaagtttttcgggtattgcaacgatgtcgatcgggaactgcggaagtgcctgaaaaatgaatacgtcgagaataggaccaaatctagagagcacgggattgctatgcgtaaaaagctcttcaacccgccagaggagtccgaaaagtag

SEQ ID NO: 203044 - DNA, 240 bp, Artificial Sequence
  derived and/or modified sequence
atgcacccagacctgagcccccacctgcacacagaagaatgtaatgtgctgatcaacctgctgaaggagtgccacaagaaccacaacatcctgaagttcttcggctactgcaatgatgtggaccgggagctgaggaagtgcctgaagaatgaatatgtggagaacagaaccaagagccgggagcacggcatcgccatgaggaagaagctgttcaaccccccagaggagagcgagaagtag

SEQ ID NO: 203045 - DNA, 240 bp, Artificial Sequence
  derived and/or modified sequence
atgcaccccgacctgagcccccacctgcacaccgaggagtgcaacgttttgattaatttgctgaaagaatgccacaagaaccacaatattctgaagttttttggttactgtaatgatgtagatagggagttgcggaagtgcctcaagaacgaatacgtggaaaacaggactaaatccagagagcacggaatagccatgcgaaagaaactgtttaatccaccggaggaaagtgaaaaatag

SEQ ID NO: 203046 - DNA, 240 bp, Artificial Sequence
  derived and/or modified sequence
atgcacccggacttaagcccgcacctgcacaccgaagaatgtaatgtactcattaatctgttgaaggaatgccataagaaccacaatatcctgaaatttttcgggtactgcaacgacgtggacagggaactgcgcaagtgtctgaaaaacgagtacgtggagaatcgcactaaaagtcgcgaacatggcatcgccatgcggaagaaattatttaaccccccagaggaaagcgagaagtag

SEQ ID NO: 203047 - DNA, 240 bp, Artificial Sequence
  derived and/or modified sequence
atgcaccccgacctgagcccccacctgcacaccgaggagtgcaacgtgctgatcaacctgctgaaggagtgccacaagaaccacaacatcctgaagttcttcggctactgcaacgacgtggacagagagctgagaaagtgcctgaagaacgagtacgtggagaacagaaccaagagcagagagcacggcatcgccatgagaaagaagctgttcaacccccccgaggagagcgagaagtag

SEQ ID NO: 203048 - protein, 360 aa, Artificial Sequence
  derived and/or modified sequence
MAPLGTTVLLWSLLRSSPGVERVCFRARIQPWHGGLLQPLPCSFEMGLPRRRFSSEAAESGSPETKKPTFMDEEVQSILTKMTGLNLQKTFKPAIQELKPPTYKLMTQAQLEEATRQAVEAAKVRLKMPPVLEERVPINDVLAEDKILEGTETTKYVFTDISYSIPHRERFIVVREPSGTLRKASWEERDRMIQVYFPKEGRKILTPIIFKEENLRTMYSQDRHVDVLNLCFAQFEPDSTEYIKVHHKTYEDIDKRGKYDLLRSTRYFGGMVWYFVNNKKIDGLLIDQIQRDLIDDATNLVQLYHVLHPDGQSAQGAKDQAAEGINLIKVFAKTEAQKGAYIELTLQTYQEALSRHSAAS

SEQ ID NO: 203049 - DNA, 1083 bp, Artificial Sequence
  derived and/or modified sequence
atggccccgttaggcacaacagtcctgctgtggtctctgctgcgctcttcaccaggggtggaacgagtctgttttcgtgccaggattcagccatggcacggcggtctgctacagccccttccatgctcatttgaaatgggactacctagaaggcggtttagctccgaagctgccgaatcaggcagcccagaaacaaaaaagcctaccttcatggatgaggaggtgcaaagcatcctgacaaagatgacaggcctgaacctgcagaaaaccttcaagcctgctatccaggaactgaagccccccacctataaactgatgactcaggctcaactggaggaagccactcgtcaggctgtagaagctgctaaggtgcggctgaaaatgccccctgtgctcgaggagcgggtgcctattaacgacgtgttggcagaggataagatcctggaaggcacagaaactaccaagtatgtttttacagatatttcttactctatcccacatagggaaaggttcatcgttgtccgcgagccgtccggcacccttcggaaggcatcatgggaggaaagagaccgtatgattcaggtgtacttcccaaaggagggcagaaagatcctgaccccgatcattttcaaggaggagaatctaaggaccatgtactctcaggacaggcacgtggacgtgttgaatctgtgttttgcccagtttgagccggattctactgagtacatcaaagtgcaccacaagacttacgaggacattgataaaagggggaagtacgacttattaaggtcgacaaggtactttggaggaatggtgtggtattttgtgaataataagaaaattgacggcctgttaatagaccagatacaacgagatctgattgatgacgccacgaatctggtgcagctgtaccatgtcctccatcccgatggccagtcggcccaaggtgccaaggaccaggccgcggagggcatcaacttgatcaaagtgtttgcgaagaccgaggcccagaagggcgcatatatcgagctgaccttgcagacctatcaagaagctctgtctcggcactctgcagcctcctag

SEQ ID NO: 203050 - DNA, 1083 bp, Artificial Sequence
  derived and/or modified sequence
atggctccgctcggtactacagtcctcttatggagcctgctacggagtagccctggcgttgaaagggtgtgctttagggcaagaatacagccttggcatggtggactgctccaaccactcccttgctcctttgagatggggttaccacgtcggagattctcctccgaggcagccgagagtgggtctcccgagaccaagaaacctacgttcatggatgaagaagtacaatccatcctgaccaaaatgaccggacttaatttgcaaaagactttcaagcctgcaatccaggaattgaaacccccaacttacaagttgatgacacaggcacagctagaagaagctacacggcaggcagttgaggccgccaaagtgaggcttaaaatgccccccgtcctagaggagcgagtacctatcaacgacgtgctggcagaagataaaatcctcgagggcaccgagacaacgaagtacgtttttacggatatctcttactcaattcctcatcgcgaacgattcatcgtagtgagagagccgtctgggactctgcggaaagcgtcttgggaggagcgagacagaatgatccaggtctactttcccaaggaaggacggaagattctaacaccaatcatcttcaaggaagagaacctacgaaccatgtactcccaggacagacacgttgatgtgcttaatttgtgctttgcccagtttgagcctgattcaactgagtacatcaaggtgcaccacaaaacctatgaagacatcgataaacggggcaagtatgatttgctgcggtcaactcggtatttcggtggaatggtgtggtatttcgtgaacaataagaagatcgacggcttgctgatcgaccaaatccagagagatcttatcgatgacgcgactaacctcgtgcagttgtaccacgtgctccatcccgacgggcagagcgctcagggcgccaaagaccaagccgccgagggcataaacctgatcaaagtcttcgctaagacagaagcccagaaaggggcctacattgaactaactctgcaaacttaccaggaggctttgtcaagacactcagcagcgagctag

SEQ ID NO: 203051 - DNA, 1083 bp, Artificial Sequence
  derived and/or modified sequence
atggcccccctgggcaccaccgtgctgctgtggagcctgctgcggagcagccctggggtggagcgggtgtgcttccgggcccgcatccagccctggcatggaggcctgctgcagcccctgccctgcagctttgagatgggcctgccccggcggcgcttcagcagcgaggccgctgagagcggcagccctgagaccaagaagcccaccttcatggatgaggaggtgcagagcatcctgaccaagatgacaggcctgaacctgcagaagaccttcaagccagccatccaggagctgaagccacccacctacaagctgatgacccaggcccagctggaggaggccacccggcaggccgtggaggccgccaaggtgcggctgaagatgcctcctgtgctggaggagcgggtgcccatcaatgatgtgctggccgaggacaagatcctggagggcacagagaccaccaagtatgtgttcacagacatctcctacagcatcccccaccgggagcgcttcatcgtggtgcgggagcccagcggcaccctgaggaaggcctcctgggaggagcgggacaggatgatccaggtgtacttccccaaggagggcaggaagatcctgacccccatcatcttcaaggaggagaacctgcggaccatgtacagccaggacagacatgtggatgtgctgaacctgtgctttgcccagtttgagccagacagcacagagtacatcaaggtgcaccacaagacctatgaagatattgacaagaggggcaagtatgacctgctgcggagcacccgctactttggaggcatggtgtggtactttgtgaacaacaagaagattgatggcctgctgattgaccagatccagagggacctgattgatgatgccaccaacctggtgcagctgtaccacgtgctgcacccagatggccagagcgcccagggcgccaaggaccaggccgctgagggcatcaacctgatcaaggtgtttgccaagacagaggcccagaagggggcctacatcgagctgaccctgcagacctaccaggaggccctgagccgccacagcgctgccagctag

SEQ ID NO: 203052 - DNA, 1120 bp, Artificial Sequence
  derived and/or modified sequence
tgataatcatggcgcccctcggaacaactgtattgctgtggagcctcttgaggagttctccgggcgtggaacgggtctgtttccgggctcgaatccagccctggcacggtggcctgctccaaccgctaccttgctctttcgagatggggctgccacgccgccggttcagctccgaggccgcagaatctggtagcccagagaccaagaaacctacatttatggatgaggaagttcaaagcatactcacgaaaatgacaggcttgaacttgcagaagacttttaagccagctatacaagaactgaagccaccaacctataagctaatgactcaggcacagttggaagaggctacaagacaggcagttgaggcagctaaagtacgattaaaaatgccaccagttctggaagagcgagtaccaataaatgatgtgttagctgaagataagattttggaaggaacagaaacaaccaaatatgtgtttactgatatatcatatagcataccacaccgggagcgttttattgtcgtcagagaaccaagtggcacactacgcaaagcctcttgggaagaacgggaccgaatgatacaagtttatttcccaaaagaaggtcgtaaaattttgacaccaataattttcaaggaagaaaatcttaggactatgtatagccaggacaggcatgttgatgtcctcaatctctgctttgcccagtttgagccagattccacagagtatatcaaggttcatcacaagacctatgaagatatagataaacgtggaaaatatgaccttttacgttcaacaagatactttggtggaatggtgtggtattttgtaaataataaaaagattgatggtttgctgattgaccagattcagagagatttaatcgatgatgcaaccaacttggtccagctgtatcacgtgctccatccagatggccagtcggctcaaggggccaaggatcaggctgctgagggaataaatttaatcaaggtctttgcaaaaacagaagcacagaagggagcctatatagaactaacactgcagacttatcaagaagcactcagtcgccattctgcagcttcctaaaaatattttaaaaatacatttattttact

SEQ ID NO: 203053 - DNA, 1547 bp, Artificial Sequence
  derived and/or modified sequence
cctcttcctgggcggcgatctctgggacagatgcgcagaagacttcctgctcaacgacgacgtcctccctgagagcgcccaggaaaacgtccacttccagcccagcagacgagtcgtcctgcgctcctgagcgttcgtcgacagagctcaggaggacctctgggatcaggatgagggtgtgtccatcgagagacactcgcaggatcgacgttggcgggagctccagcaccaggtcgacgtcgtccaggggcacacgcagggcacagcccgcggccaggaccactatggagcactttgagtatatcatcccactgtctcctggagggcaagattcagccttaagggggttcccttgtatgtgagtgctgcaagaactgggtgtgactcggaatccctcccaaccacttccggcgcaagtggcttctgataatcatggcgcccctcggaacaactgtattgctgtggagcctcttgaggagttctccgggcgtggaacgggtctgtttccgggctcgaatccagccctggcacggtggcctgctccaaccgctaccttgctctttcgagatggggctgccacgccgccggttcagctccgaggccgcagaatctggtagcccagagaccaagaaacctacatttatggatgaggaagttcaaagcatactcacgaaaatgacaggcttgaacttgcagaagacttttaagccagctatacaagaactgaagccaccaacctataagctaatgactcaggcacagttggaagaggctacaagacaggcagttgaggcagctaaagtacgattaaaaatgccaccagttctggaagagcgagtaccaataaatgatgtgttagctgaagataagattttggaaggaacagaaacaaccaaatatgtgtttactgatatatcatatagcataccacaccgggagcgttttattgtcgtcagagaaccaagtggcacactacgcaaagcctcttgggaagaacgggaccgaatgatacaagtttatttcccaaaagaaggtcgtaaaattttgacaccaataattttcaaggaagaaaatcttaggactatgtatagccaggacaggcatgttgatgtcctcaatctctgctttgcccagtttgagccagattccacagagtatatcaaggttcatcacaagacctatgaagatatagataaacgtggaaaatatgaccttttacgttcaacaagatactttggtggaatggtgtggtattttgtaaataataaaaagattgatggtttgctgattgaccagattcagagagatttaatcgatgatgcaaccaacttggtccagctgtatcacgtgctccatccagatggccagtcggctcaaggggccaaggatcaggctgctgagggaataaatttaatcaaggtctttgcaaaaacagaagcacagaagggagcctatatagaactaacactgcagacttatcaagaagcactcagtcgccattctgcagcttcctaaaaatattttaaaaatacatttattttactaaa

SEQ ID NO: 203054 - DNA, 1083 bp, Artificial Sequence
  derived and/or modified sequence
atggcccccctgggcaccaccgtgctgctgtggagcctgctgcggtccagtcccggagtagagcgggtgtgctttcgagcccggattcagccttggcatggaggtctgttgcagcctctgccatgtagctttgagatgggcctgcctagacgacgcttcagttccgaggctgcggagtccggcagcccagagaccaagaagcctactttcatggacgaggaggtgcagagcattctgaccaagatgaccggcctgaacctgcaaaagacctttaaacccgccattcaggaacttaagccccccacttataagctcatgacccaggcccaacttgaagaggcaacaaggcaggcagtggaagcagctaaagtgaggttgaaaatgcccccagtcctcgaagaacgggtacctatcaatgacgtgcttgcagaagataaaatactcgaaggtactgagactactaagtatgtctttaccgatatatcgtatagtatccctcaccgagaacgttttatcgttgtccgggagccgagcggcacactacgtaaggccagctgggaagagcgggacaggatgatccaggtgtactttcccaaggaggggaggaaaatactaacccccatcatttttaaggaggaaaacctacgaaccatgtactcacaggaccgtcatgttgatgttttgaatctgtgttttgcacagttcgaacctgacagtaccgaatacatcaaagtgcatcacaagacctatgaggatatagacaaacgtggcaagtatgacctgctcagatccacgagatattttggtggaatggtatggtatttcgtgaacaacaaaaagattgacggactactcattgatcaaattcaacgggacctcatagacgacgcgacaaatcttgttcagctgtaccacgtgctgcaccctgacggccaatccgcgcaaggcgctaaggaccaggcagctgaaggcatcaatttgataaaagtgtttgccaagacagaggctcagaagggggcctatatagaattgaccctccaaacataccaggaggccctgtcccgacactccgccgcttcgtag

SEQ ID NO: 203055 - DNA, 1083 bp, Artificial Sequence
  derived and/or modified sequence
atggcccccctgggcaccaccgtgctgctgtggagcctgctgcggagctctcccggggtcgaaagagtatgctttcgcgccaggatccagccatggcacggaggcctgttgcagcccctgccgtgttctttcgagatggggttacctaggagacgattctcgtccgaggcagccgagagtggcagtccggagactaagaagcccacattcatggacgaagaggtccagagcattctgactaagatgacagggctgaacctccaaaagacattcaaaccggctatccaggagctaaaacctccaacatacaaactgatgacccaggcacagctcgaggaagcaacacgtcaggcagtggaggccgctaaagttcgactgaagatgcctccggttctggaggaacgagtaccaattaacgacgtgctggctgaagacaaaattctggagggaaccgagaccacgaagtatgtctttaccgacataagttactccattccccatcgagaaaggttcatcgttgtacgagaacctagcgggacgcttcgaaaagcctcttgggaggaacgggacaggatgatccaggtgtactttcccaaagaagggcggaaaattctcacgcccattatttttaaggaggaaaatttgcgtaccatgtactcacaggaccgacacgtggacgtgctgaacttgtgcttcgcccagttcgagcccgacagcactgagtacatcaaggtacaccacaaaacatacgaagatatcgacaagcgtggcaaatacgatctgcttaggagtacacgatactttggagggatggtctggtactttgtgaacaataaaaagatcgatggcctgttgatagatcaaattcagagagacctgattgatgacgcaacaaatctggttcagctttatcacgtgctgcacccagatggtcagtctgcgcaaggagccaaagatcaagctgctgaggggattaatctgattaaggtattcgccaagaccgaggctcaaaaaggcgcatatatcgagctgacactgcaaacctatcaggaagcactgtcgcggcacagcgctgcctcatag

SEQ ID NO: 203056 - DNA, 1083 bp, Artificial Sequence
  derived and/or modified sequence
atggccccattgggcacaaccgtgttgttgtggtccctgctgcgctcaagcccaggcgttgagcgagtgtgtttccgagcacgcatccaaccgtggcatggaggactcctgcagcccctgccgtgctcgtttgaaatggggctaccccgtcggagattttctagcgaggccgcagaatcaggaagtcccgaaacaaagaagcctacctttatggatgaagaagtgcaatcgattttgactaaaatgaccgggctcaacctccagaagacattcaaaccggcaattcaggaactcaaaccccctacctacaaactgatgactcaagcacagctggaggaagccaccaggcaggcggtcgaggcagcaaaggtgcgactgaaaatgccgcctgtcctggaggaaagggtcccgatcaacgatgtcctggctgaagacaagatcctcgaggggactgaaactaccaagtatgtttttacagacatttcttatagcatccctcacagggagcgctttatcgtggtcagggagcctagcggcaccttacggaaggcttcatgggaagagagagataggatgattcaggtctatttccccaaggaaggcagaaaaatcttgaccccgatcatattcaaagaagaaaacctccgcaccatgtattctcaggaccgccacgtagatgtgttaaatctgtgcttcgctcagttcgaacctgactccacggaatacatcaaggtccaccataaaacttacgaagatatcgataaaagaggcaagtatgatttgctgagaagcacccgttattttggcggtatggtgtggtatttcgtaaataacaaaaagatcgacggtctactgatcgatcagattcagcgtgaccttattgacgacgccaccaatctcgtgcagctgtatcacgtcctgcatccggatggacaatccgcccagggtgctaaagaccaggctgccgaggggatcaatctgattaaggtcttcgccaagacagaagctcaaaagggcgcatacattgagttgaccctgcagacgtatcaagaggccctcagtcgccactcggccgcaagttag

SEQ ID NO: 203057 - DNA, 1083 bp, Artificial Sequence
  derived and/or modified sequence
atggccccactgggcacaacagtcttgctttggtcactgctaagatcgtccccaggtgtggagagggtgtgcttccgggcaagaatccaaccctggcatggcggactcctgcagcctctcccatgcagctttgagatggggttacctcgcagaagattttcaagcgaggccgctgagagtggctctccggagactaaaaaaccaactttcatggatgaggaagtccagtcgatcctgacaaagatgacaggccttaatctacagaagacatttaaaccagccatccaagaattgaagcctcccacatataagctaatgactcaggcgcagttagaggaagcaactagacaggctgtggaggctgccaaagtgagactgaaaatgcccccagtgctggaagaaagggtgccgatcaacgacgtgcttgcagaggacaagatacttgaaggtacagaaactacaaagtacgtattcaccgacattagctacagcataccacaccgcgaaaggttcatcgtggtgcgcgaaccatctgggactctccggaaggcatcatgggaagaacgggaccggatgattcaggtgtattttcccaaggaaggtcgcaaaattctgactcctatcatattcaaagaagagaatttgcgcacgatgtactcccaggaccgccatgtcgacgtacttaacttgtgcttcgcccagttcgaacccgactctactgaatacattaaggtgcatcacaagacctatgaagacatcgacaagcgcggtaaatacgatttgcttagaagtacaaggtacttcggcggaatggtctggtattttgtgaataacaaaaaaatcgatggtcttctgatcgaccagattcaaagagacctcatagacgatgccaccaacttagtgcagctgtatcacgtcctgcatcccgacggccaaagcgcacaaggggctaaggaccaggccgctgaagggatcaacctgattaaggtttttgctaaaaccgaggcacagaagggagcatacatagaactgacactgcaaacttaccaggaggctctaagtcgtcactccgccgcaagttag

SEQ ID NO: 203058 - DNA, 1083 bp, Artificial Sequence
  derived and/or modified sequence
atggcccccctgggcaccaccgtgctgctgtggagcctgctgagaagcagccccggcgtggagagagtgtgcttcagagccagaatccagccctggcacggcggcctgctgcagcccctgccctgcagcttcgagatgggcctgcccagaagaagattcagcagcgaggccgccgagagcggcagccccgagaccaagaagcccaccttcatggacgaggaggtgcagagcatcctgaccaagatgaccggcctgaacctgcagaagaccttcaagcccgccatccaggagctgaagccccccacctacaagctgatgacccaggcccagctggaggaggccaccagacaggccgtggaggccgccaaggtgagactgaagatgccccccgtgctggaggagagagtgcccatcaacgacgtgctggccgaggacaagatcctggagggcaccgagaccaccaagtacgtgttcaccgacatcagctacagcatcccccacagagagagattcatcgtggtgagagagcccagcggcaccctgagaaaggccagctgggaggagagagacagaatgatccaggtgtacttccccaaggagggcagaaagatcctgacccccatcatcttcaaggaggagaacctgagaaccatgtacagccaggacagacacgtggacgtgctgaacctgtgcttcgcccagttcgagcccgacagcaccgagtacatcaaggtgcaccacaagacctacgaggacatcgacaagagaggcaagtacgacctgctgagaagcaccagatacttcggcggcatggtgtggtacttcgtgaacaacaagaagatcgacggcctgctgatcgaccagatccagagagacctgatcgacgacgccaccaacctggtgcagctgtaccacgtgctgcaccccgacggccagagcgcccagggcgccaaggaccaggccgccgagggcatcaacctgatcaaggtgttcgccaagaccgaggcccagaagggcgcctacatcgagctgaccctgcagacctaccaggaggccctgagcagacacagcgccgccagctag

SEQ ID NO: 203059 - protein, 226 aa, Artificial Sequence
  derived and/or modified sequence
MSWVQAASLIQGPGDKGDVFDEEADESLLAQREWQSNMQRRVKEGYRDGIDAGKAVTLQQGFNQGYKKGAEVILNYGRLRGTLSALLSWCHLHNNNSTLINKINNLLDAVGQCEEYVLKHLKSITPPSHVVDLLDSIEDMDLCHVVPAEKKIDEAKDERLCENNAEFNKNCSKSHSGIDCSYVECCRTQEHAHSENPSPTWILEQTASLVKQLGLSVDVLQHLKQL

SEQ ID NO: 203060 - DNA, 899 bp, Artificial Sequence
  derived and/or modified sequence
gttggcgcttccggtggcctgcgaccccgtaattgcctcggtgatgtcgtgggttcaagcagcctccttgatccagggccctggagacaaaggggacgtgtttgacgaagaagcagacgagtcgctcctggcgcagcgggaatggcagagtaacatgcaaagacgagtcaaagaaggttatagagatggaatagatgctggcaaagcagttactcttcaacagggcttcaatcaaggttataagaaaggtgcagaagtcattttaaactatggacgactccgaggaacattgagtgctttgctctcctggtgtcaccttcataataataattcaactttgatcaataaaataaacaatcttctggatgcagttggccagtgtgaagagtatgtgctcaaacatctgaaatcaatcactccaccgtcccatgttgtagatttattggactccattgaggatatggacctttgtcatgtagttccagctgagaaaaagattgatgaagctaaagatgaaagactctgtgaaaataatgctgagtttaacaaaaactgtagcaagagccatagtgggatagattgttcatatgtagaatgttgtagaacacaggagcatgcacattcagaaaacccaagccccacatggattttggaacagacagccagtttagttaaacagctgggcctatcagtagatgtattacaacacctcaaacaactataaaattaccttcccttttctaatgaaaataatgttcagaacatttggtttcctaacaatcgaaatttgtactggtttctgcatcaaacacctcaactgtagggttaccctttatggaagtttgaaattaacactattgtcttcaaaattaacactattaaatgtaatataagccttt

SEQ ID NO: 203061 - DNA, 681 bp, Artificial Sequence
  derived and/or modified sequence
atgtcgtgggtgcaggctgccagtttgattcaggggcccggcgataagggtgacgtgtttgacgaagaagccgatgagagtctgctggcccagagagagtggcaaagcaacatgcagcgaagggtgaaagagggctatagggatggtattgacgccggtaaggccgtaacactacagcagggcttcaatcagggatacaagaaaggggcagaggttattctcaactatggtcgcctcaggggaacattatcggcacttttgtcctggtgccacctgcataacaacaattcaaccttaattaataagataaacaaccttttagatgcggtcggacaatgcgaagaatatgtcctgaaacacctcaagtctataaccccaccaagtcacgtggtggatctcttagactccatagaagatatggacctttgtcacgttgttcctgcagaaaagaaaattgatgaagcgaaggacgaacgtctatgcgagaataacgccgagtttaacaaaaattgctctaaatctcattcggggattgactgttcttacgttgagtgctgcaggactcaggagcatgcacactctgagaacccgagtcctacatggatcttggaacagacagctagcctggtcaagcagctgggcctcagcgtcgacgtgctacagcatctgaagcaactgtag

SEQ ID NO: 203062 - DNA, 681 bp, Artificial Sequence
  derived and/or modified sequence
atgtcctgggtgcaggccgccagcctcatccagggccctggggacaagggagatgtgtttgatgaggaggctgatgagagcctgctggcccagcgggagtggcagagcaacatgcagaggagagtgaaggagggctacagagatggcattgatgctgggaaggctgtgaccctgcagcagggcttcaaccagggctacaagaagggagctgaggtgatcctgaactacggccgcctgcggggcaccctgagcgccctgctgtcctggtgccacctgcacaacaacaacagcaccctcatcaacaagatcaacaacctgctggatgctgtgggccagtgtgaggagtatgtgctgaagcacctgaagagcatcaccccacccagccacgtggtggacctgctggacagcattgaggacatggacctgtgccacgtggtgcctgctgagaagaagattgatgaggccaaggatgagcggctgtgtgagaacaatgctgagttcaacaagaactgcagcaagagccacagcggcatcgactgcagctatgtggagtgctgcaggacccaggagcacgcccacagcgagaaccccagccccacctggatcctggagcagacagccagcctggtgaagcagctgggcctgtctgtggatgtgctgcagcacctgaagcagctgtag

SEQ ID NO: 203063 - DNA, 681 bp, Artificial Sequence
  derived and/or modified sequence
atgagctgggtgcaggccgccagcctgatccagggccccggcgacaagggggacgtgtttgatgaagaggcagacgagagcctgttagcccaaagagaatggcagagcaacatgcaacgcagagtcaaggagggctatcgggacggtatcgatgctggaaaggctgtgacccttcaacaaggatttaaccagggctataagaagggagctgaagtaatcttgaactacgggcggctcagaggaaccctgagtgcgctgctctcttggtgccatctgcacaacaacaactcgacactcatcaataaaatcaataacctgttggatgcagtgggtcagtgcgaagagtatgtacttaagcatctcaaatctataacccctccttctcacgtcgtggaccttctggacagtatcgaggacatggacctgtgccatgtcgtgccagccgaaaagaaaattgatgaggcaaaggacgagcgcctttgtgagaacaatgccgaatttaataagaactgctcaaaatctcattccggcattgattgctcctatgtggaatgttgtcgcacacaggagcatgcccattccgaaaacccttcccccacttggattttggaacagacagcctccctggtgaagcagctggggctcagcgtggatgtcctgcaacatttaaagcaactgtag

SEQ ID NO: 203064 - DNA, 681 bp, Artificial Sequence
  derived and/or modified sequence
atgtcctgggttcaggccgcttcgcttattcagggcccaggcgataagggcgacgtgttcgacgaagaggcagacgaatcactgctggctcaaagggaatggcagtcaaacatgcagcggagggtgaaggagggatatagggacggaatagacgccggaaaggccgtcacactccagcagggcttcaatcagggatacaaaaaaggggctgaagtgattctgaactacggcaggctgcgcggaacattaagtgcattgctttcttggtgtcacctgcacaataacaattccacgctgatcaacaagattaacaatcttctcgatgcagtcggtcagtgtgaggaatacgtcctgaagcatctaaagagtatcacccctccgagtcacgttgtggacctcctggactccatcgaagacatggatttgtgccacgtggttcccgctgagaagaaaatcgacgaggccaaggatgagcgactgtgcgaaaacaatgctgagtttaataaaaattgttctaagtctcacagcggaatcgattgcagttatgttgaatgctgtagaactcaggagcatgctcactccgagaacccgtcccctacttggattctggagcagaccgctagccttgtgaaacagctgggactcagtgtcgatgttctgcagcaccttaaacagctgtag

SEQ ID NO: 203065 - DNA, 681 bp, Artificial Sequence
  derived and/or modified sequence
atgagctgggtgcaggccgccagcctgatccagggccccggcgacaagggcgacgtgttcgacgaggaggccgacgagagcctgctggcccagagagagtggcagagcaacatgcagagaagagtgaaggagggctacagagacggcatcgacgccggcaaggccgtgaccctgcagcagggcttcaaccagggctacaagaagggcgccgaggtgatcctgaactacggcagactgagaggcaccctgagcgccctgctgagctggtgccacctgcacaacaacaacagcaccctgatcaacaagatcaacaacctgctggacgccgtgggccagtgcgaggagtacgtgctgaagcacctgaagagcatcaccccccccagccacgtggtggacctgctggacagcatcgaggacatggacctgtgccacgtggtgcccgccgagaagaagatcgacgaggccaaggacgagagactgtgcgagaacaacgccgagttcaacaagaactgcagcaagagccacagcggcatcgactgcagctacgtggagtgctgcagaacccaggagcacgcccacagcgagaaccccagccccacctggatcctggagcagaccgccagcctggtgaagcagctgggcctgagcgtggacgtgctgcagcacctgaagcagctgtag

SEQ ID NO: 203066 - protein, 1322 aa, Artificial Sequence
  derived and/or modified sequence
MPVVWPTLLDLSRDECKRILRKLELEAYAGVISALRAQGDLTKEKKDLLGELSKVLSISTERHRAEVRRAVNDERLTTIAHNMSGPNSSSEWSIEGRRLVPLMPRLVPQTAFTVTANAVANAAIQHNASLPVPAETGSKEVVCYSYTSTTSTPTSTPVPSGSIATVKSPRPASPASNVVVLPSGSTVYVKSVSCSDEDEKPRKRRRTNSSSSSPVVLKEVPKAVVPVSKTITVPVSGSPKMSNIMQSIANSLPPHMSPVKITFTKPSTQTTNTTTQKVIIVTTSPSSTFVPNILSKSHNYAAVTKLVPTSVIASTTQKPPVVITASQSSLVSNSSSGSSSSTPSPIPNTVAVTAVVSSTPSVVMSTVAQGVSTSAIKMASTRLPSPKSLVSAPTQILAQFPKQHQQSPKQQLYQVQQQTQQQVAQPSPVSHQQQPQQSPLPPGIKPTIQIKQESGVKIITQQVQPSKILPKPVTATLPTSSNSPIMVVSSNGAIMTTKLVTTPTGTQATYTRPTVSPSIGRMAATPGAATYVKTTSGSIITVVPKSLATLGGKIISSNIVSGTTTKITTIPMTSKPNVIVVQKTTGKGTTIQGLPGKNVVTTLLNAGGEKTIQTVPTGAKPAILTATRPITKMIVTQPKGIGSTVQPAAKIIPTKIVYGQQGKTQVLIKPKPVTFQATVVSEQTRQLVTETLQQASRVAEAGNSSIQEGKEEPQNYTDSSSSSTESSQSSQDSQPVVHVIASRRQDWSEHEIAMETSPTIIYQDVSSESQSATSTIKALLELQQTTVKEKLESKPRQPTIDLSQMAVPIQMTQEKRHSPESPSIAVVESELVAEYITTERTDEGTEVAFPLLVSHRSQPQQPSQPQRTLLQHVAQSQTATQTSVVVKSIPASSPGAITHIMQQALSSHTAFTKHSEELGTEEGEVEEMDTLDPQTGLFYRSALTQSQSAKQQKLSQPPLEQTQLQVKTLQCFQTKQKQTIHLQADQLQHKLPQMPQLSIRHQKLTPLQQEQAQPKPDVQHTQHPMVAKDRQLPTLMAQPPQTVVQVLAVKTTQQLPKLQQAPNQPKIYVQPQTPQSQMSLPASSEKQTASQVEQPIITQGSSVTKITFEGRQPPTVTKITGGSSVPKLTSPVTSISPIQASEKTAVSDILKMSLMEAQIDTNVEHMIVDPPKKALATSMLTGEAGSLPSTHMVVAGMANSTPQQQKCRESCSSPSTVGSSLTTRKIDPPAVPATGQFMRIQNVGQKKAEESPAEIIIQAIPQYAIPCHSSSNVVVEPSGLLELNNFTSQQLDDEETAMEQDIDSSTEDGTEPSPSQSSAERS

SEQ ID NO: 203067 - protein, 1155 aa, Artificial Sequence
  derived and/or modified sequence
MPVVWPTLLDLSRDECKRILRKLELEAYAGVISALRAQGDLTKEKKDLLGELSKVLSISTERHRAEVRRAVNDERLTTIAHNMSGPNSSSEWSIEGRRLVPLMPRLVPQTAFTVTANAVANAAIQHNASLPVPAETGSKEVVCYSYTSTTSTPTSTPVPSGSIATVKSPRPASPASNVVVLPSGSTVYVKSVSCSDEDEKPRKRRRTNSSSSSPVVLKEVPKAVVPVSKTITVPVSGSPKMSNIMQSIANSLPPHMSPVKITFTKPSTQTTNTTTQKVIIVTTSPSSTFVPNILSKSHNYAAVTKLVPTSVIASTTQKPPVVITASQSSLVSNSSSGSSSSTPSPIPNTVAVTAVVSSTPSVVMSTVAQGVSTSAIKMASTRLPSPKSLVSAPTQILAQFPKQHQQSPKQQLYQVQQQTQQQVAQPSPVSHQQQPQQSPLPPGIKPTIQIKQESGVKIITQQVQPSKILPKPVTATLPTSSNSPIMVVSSNGAIMTTKLVTTPTGTQATYTRPTVSPSIGRMAATPGAATYVKTTSGSIITVVPKSLATLGGKIISSNIVSGTTTKITTIPMTSKPNVIVVQKTTGKGTTIQGLPGKNVVTTLLNAGGEKTIQTVPTGAKPAILTATRPITKMIVTQPKGIGSTVQPAAKIIPTKIVYGQQGKTQVLIKPKPVTFQATVVSEQTRQLVTETLQQASRVAEAGNSSIQEGKEEPQNYTDSSSSSTESSQSSQDSQPVVHVIASRRQDWSEHEIAMETSPTIIYQDVSSESQSATSTIKALLELQQTTVKEKLESKPRQPTIDLSQMAVPIQMTQEKRHSPESPSIAVVESELVAEYITTERTDEGTEVAFPLLVSHRSQPQQPSQPQRTLLQHVAQSQTATQTSVVVKSIPASSPGAITHIMQQALSSHTAFTKHSEELGTEEGEVEEMDTLDPQTGLFYRSALTQSQSAKQQKLSQPPLEQTQLQVKTLQCFQTKQKQTIHLQADQLQHKLPQMPQLSIRHQKLTPLQQEQAQPKPDVQHTQHPMVAKDRQLPTLMAQPPQTVVQVLAVKTTQQLPKLQQAPNQPKIYVQPQTPQSQMSLPASSEKQTASQAIPQYAIPCHSSSNVVVEPSGLLELNNFTSQQLDDEETAMEQDIDSSTEDGTEPSPSQSSAERS

SEQ ID NO: 203068 - DNA, 3969 bp, Artificial Sequence
  derived and/or modified sequence
atgccagtggtctggccaactctgctcgacctgtcgcgagacgagtgtaaacgaatattgcgcaaactggaactcgaggcatatgccggggtcattagcgctctgcgcgcccagggagacctaacaaaagagaaaaaggatttgcttggcgaacttagtaaggtgcttagcatctcaaccgaacggcatcgcgctgaagtgaggagagccgtcaacgacgagcgtctaacaactatagcccacaatatgtctggaccgaactcctcctcagaatggagtattgagggtagaagattagtacccttgatgccccgacttgtgccccagactgcttttaccgtcacggctaatgccgttgccaatgctgcaatacagcataatgcttcactcccagtgcctgccgaaacagggtctaaggaggtagtttgttactcctatacctccaccacttccactccaacttccactccagttccttcaggatctatcgccactgtgaaatctcctcgtccagcctcgcctgcaagcaatgtggtagtattgccgtctggttccacagtgtatgtgaaatcagtgtcctgctcagacgaggacgagaagcctaggaagcggcgacgaacaaacagcagctcctcctctcctgtggtgttaaaagaggtgccgaaagcagtggtccctgtgtccaaaacgattaccgtgccagtttctggatctcctaaaatgtctaatattatgcagagcattgccaattctttgcccccccacatgtcccccgttaagattacatttacgaaaccttccactcaaactactaacacaacaacacagaaggtcatcattgtcacgacatccccgagtagtaccttcgtacctaacatcctttcaaagtctcacaactatgctgccgtgaccaaactggtccccacttctgtgatcgcaagcactacccagaagccgcctgtggttattaccgcctctcaatctagtcttgtgagtaacagcagtagtggctcgtctagttctacaccgagcccgatacccaatacggtagccgtgacagcggtcgtttccagcacaccatctgtggttatgtccactgtcgcgcagggtgtgtcgacaagtgccatcaagatggcctcaacaagattaccttctcccaagagtttggtgagcgcaccgacacagatccttgcacagtttcctaagcagcaccaacagtcccctaagcaacagctgtaccaggtccagcagcagacacagcaacaggtagctcaaccgagccctgtttcgcaccagcagcagcctcaacagtccccgctgcctcctggcataaagcccacaatacaaatcaaacaggaaagtggtgtgaagattattacccagcaagtacaaccttccaagattctcccaaaaccagtgacagccacactccccacctcttcaaattctcctattatggtggtcagctccaatggcgccattatgactaccaaactggtaacgacacccaccggaactcaggccacctacacacggccgacagtttcaccctccatcggacgaatggctgctaccccaggcgcagcaacatacgtcaaaactaccagcggatcgataatcacagtcgttcccaaatccctcgcaactttgggcggcaaaattatcagctcaaacattgtctctgggaccacaacaaaaatcactactattccaatgacttcgaagcctaacgttatagttgtgcaaaagacgactggcaagggaactacaattcagggcctgcccggcaaaaatgtagtaacaacattactgaacgccggcggggaaaagacaattcaaacagtgcctacaggggccaagccagccattcttaccgccacacggcctatcacgaagatgattgtgacccaacccaaaggcatcgggtctaccgtacagcccgccgcgaaaatcatccccactaaaattgtgtacggccaacagggtaaaactcaggtcttaattaagccgaaacccgtcaccttccaggctacagtcgttagtgagcagactagacagctggtcaccgagacactgcagcaagcctcccgggtggcagaggcgggcaactcctccatccaagagggaaaggaggagccacagaactataccgatagctcctcatctagcaccgagagttctcagagctcacaggacagccagcctgtggtccatgtcatagcctcccgcagacaagattggagcgagcatgagatcgccatggaaacctctcctaccattatttatcaggatgtttcttccgagtctcagagtgcaacttcgacaattaaagctctcctcgagcttcagcagaccacagttaaggagaagctggagtccaaaccacgccagcccaccatcgatttatcccagatggccgttccaattcagatgacgcaggaaaaacggcactctcccgagtccccgtctatcgcagtggtagaaagtgaacttgttgctgaatacatcactacggagagaaccgatgagggtaccgaggtcgccttcccactgctcgttagtcatagatcccagccacagcagccatcgcagccccagagaaccttgctgcagcacgttgcccaatcccagaccgcaacccagacctccgttgtggtcaagtctattcctgcctcatctcctggcgccatcactcacattatgcagcaggctctgtcaagccatacagcttttaccaagcacagcgaagaactaggcaccgaagagggagaggtcgaagagatggatacgctagatcctcagaccgggttgttctatagatccgctctgacacagtcccagagtgccaagcaacagaaactgtctcagccaccccttgagcagacgcagttacaggttaagactttgcaatgttttcaaaccaaacagaagcagacaatccacctgcaggcagaccaactgcaacacaagttgccgcagatgccccagttgtctattcggcaccagaagctgacgccccttcagcaggagcaggcccagccaaaacccgacgtccagcatactcagcaccctatggttgctaaggatcgacagctgccaacactaatggcacagccaccacagacggtcgtacaggtcctggccgtgaaaacgactcagcagctgcccaagctccagcaggcccccaatcaacctaagatctacgtccagccccagaccccccagagccagatgagcctgcctgcttcctcggagaaacagaccgcaagccaggtcgagcaacccatcattacgcagggtagtagcgtgaccaagatcacgtttgaaggcagacagccgcctactgttactaagatcactggaggtagctccgtacccaaactgaccagtcccgtgacatctatttcccccatccaagcctccgagaagactgcagtctcggacatattgaagatgtccttaatggaagcacagatcgacaccaacgtagaacatatgattgttgacccacccaaaaaagccttggcaacatcgatgctgacaggcgaagccggatccttaccaagtactcatatggtggtcgccgggatggcaaacagcaccccccagcagcaaaagtgtagagagtcatgcagcagcccgagcaccgtagggtcgagtctgaccacaaggaaaatcgatccacccgccgtacctgccaccggacagtttatgcggattcaaaacgtcggacagaaaaaagctgaagaaagcccagccgaaattattatccaagccatcccccagtacgctattccctgccattcaagctccaatgtagtcgtcgagcccagcggtctgctggagctgaacaattttacatctcagcagcttgatgacgaagagaccgccatggaacaggatattgactctagcacagaggacggtaccgaaccctcacctagccagtccagcgccgagaggagttag

SEQ ID NO: 203069 - DNA, 3468 bp, Artificial Sequence
  derived and/or modified sequence
atgccagttgtctggccaactcttctcgatctttccagggacgagtgtaaacgcatcctccgtaagttggagctagaggcttatgcaggcgtcatttctgctttacgggcccagggcgacctgacgaaggaaaagaaggacctgttgggtgaattgtcgaaggttctgtccatctcgactgaaagacaccgcgcggaggtacgacgcgcagtgaacgacgagcgactcacgaccattgcccacaacatgtcagggcccaactcttcaagcgaatggtctattgaagggaggcgcctggtgccgctgatgcctagattggttccccagaccgcctttacagtcacagctaatgccgtggcaaatgccgccatccagcacaacgccagtctgcctgtcccggccgaaacaggctccaaggaggtcgtttgctattcttatacatcaacaacctcaactccgaccagcacgcctgtaccatccggaagcattgctactgtgaaatctccaaggcctgcatcccccgcctccaatgtcgtagtcctcccttccgggtccaccgtgtatgtcaaatccgtgtcctgcagcgacgaggacgagaaaccgcgcaagcgacgcaggaccaacagctccagcagctcccccgttgtgctaaaagaagtgcctaaggcagtggtccctgtcagcaaaaccatcactgtgccagtatccggctcccctaagatgagcaacatcatgcagagcatagctaatagcctaccaccgcacatgtcccccgtgaaaatcacatttactaaacccagtactcagacgaccaataccacaactcagaaagttattatagtgactacttcaccaagctccacgttcgtcccaaacatcttgtccaagagtcacaactatgccgcggtgaccaaattagtccccaccagtgttattgccagcaccacccagaagccacctgtggttataaccgcctcccagtcttcactggttagcaattccagctctgggtccagcagtagtacaccgtcgcctatccctaacaccgtggctgtgacagccgtagtctccagcactccttctgtcgtcatgagtaccgtggcacaaggggtgagcacctctgcgatcaagatggctagtacccggctcccctcaccaaaaagtttagtgagtgcacccacccagatcctggcacagttcccgaagcagcatcagcagtcccctaagcagcagctctatcaggtacaacaacaaactcaacagcaagtggctcagccctccccagttagtcatcagcagcagccacagcagtcccccctgccccctggcatcaagcctaccattcagattaagcaagagtcaggagtaaaaatcatcacccagcaggtccagccctccaaaatcctaccgaagcctgtcacggccacccttccaacttcatcgaacagccccataatggtggtgtcttctaacggtgcaatcatgactaccaagctcgtaaccaccccaaccggcactcaggcaacatacacacgccccaccgtgagtccttccatcggtcgaatggctgccacgcccggtgcagcaacctacgtcaaaactacttcagggagcattattactgtcgttccgaaatcccttgctacactggggggaaagattatctcctccaacatcgtctccggtactaccacaaagatcaccactatccctatgacctccaaacctaatgtaattgtggttcaaaagactacgggcaaaggaacaacaatccaggggcttccaggaaagaacgttgttacaactctgttaaacgcagggggggagaaaacaatacagacggtgcctaccggtgctaagcccgccattctgacggccaccagaccaattaccaaaatgattgtaacacagcctaaggggatcgggagtacggtccagccagcggccaagatcattccgactaaaattgtctatggccagcagggcaagacgcaggtcttgatcaaacccaaaccggtcacttttcaggctacagtcgtatccgagcaaactagacagctcgtgaccgaaacacttcagcaggctagtcgggttgccgaggcgggaaacagcagtatccaagagggaaaggaggaaccccagaattacacagattcaagcagctcatctacagagtcgagccagagctcccaggactcacagcctgtagtacacgtgatcgcatccagaagacaggattggagcgagcatgagatcgctatggagacctcacccactattatataccaggatgtgtcaagcgagagccagtcagcaactagtactattaaggcgttgctggagttacaacagacaacggtgaaagagaagctcgagagcaaaccccgtcagcccaccattgacctgtcacagatggccgttcccattcagatgactcaggaaaaacggcactcacccgagagtccatccatcgccgtggtcgagtcggagctggttgcagaatatataacaactgagcgcaccgacgaggggactgaggtcgcgttccccctcctggtttctcaccgatcccagccacagcaacccagccagccacagcgcacgttgcttcagcatgtggcccagtcccagaccgcaacccagactagcgtggttgtgaagtcaattcccgcaagttctcctggtgccatcacacacatcatgcagcaggccctcagcagtcatactgccttcacaaagcatagtgaggagctagggaccgaagaaggggaggtggaggaaatggacaccctggacccacaaactgggttgttctataggtcagccctgactcagagccagagcgctaaacaacagaagctctcccaacctcccctggagcagacgcagcttcaagtgaagaccttgcaatgctttcagactaagcagaagcaaacaattcacttgcaagccgaccagcttcaacataagctgccacaaatgccccagctgtcaatccggcatcaaaagcttacaccgctacagcaggagcaggcccagcccaaaccagatgttcagcacacccaacaccctatggtcgcaaaggatcggcaattgccaactctaatggcccaacccccacagacagtggttcaggtgttggccgtaaaaacgacccagcaattgcctaagctgcagcaggctccaaatcagccaaagatttacgttcaaccccaaacaccacagtcccaaatgtcactccccgccagtagcgagaagcagacagcctcccaggctattccacagtatgcgatcccgtgccattcttcatccaacgtggttgtcgagccgagcgggcttctggagttgaataattttacatctcagcagctcgacgatgaagaaactgctatggagcaagatatagacagctccacagaggatgggacagaaccgtccccaagccagtcttccgctgagagaagttag

SEQ ID NO: 203070 - DNA, 3969 bp, Artificial Sequence
  derived and/or modified sequence
atgcctgtggtgtggcctactcttttagatctgtcccgcgatgagtgcaagagaatcctgagaaagctggaactcgaggcttacgccggggtgatctctgctctcagggctcagggcgacttaacaaaagagaaaaaagatctgctcggcgaattatcaaaggttctgagcatttccaccgagcggcacagagctgaggttcggagggccgtaaatgacgagcgactgacaacaatagctcataacatgagcgggcccaattcatccagcgagtggtcaatcgaaggtagacgcctcgtcccgctgatgccacgtctcgtgcctcagacagctttcaccgttactgccaacgcggtggcaaacgccgcaatccaacacaatgcctcgctgcccgtgccggcagagaccggtagcaaggaggtcgtgtgttactcttacacttcaaccacctcaaccccaacttctaccccggtgccttctggatccatcgctacagtgaaatccccacgtccagcatccccagcctcaaacgtggtcgtcctaccttccgggtcaactgtgtacgttaagtccgtgagttgttcagacgaagacgagaaacccaggaaacgacgaaggaccaatagctcctcctcttcacctgttgtgctcaaagaagtacctaaagcggtggtccctgtcagcaagaccattacagttcctgtctctggttctcccaaaatgagtaatattatgcaaagcatcgccaacagcctgcctccccatatgtcccccgtcaaaataacctttacaaagccatctacacagactacaaacactaccacccagaaggtcataattgtcaccacctccccttcttcgacgttcgtgccaaacatcttgagtaaatctcacaactatgctgcagtcactaaactggtccccacctcagtcattgccagcacaacgcagaagcccccggtggtgattacggcctcgcagtcgtcgttagtgagtaactctagctccggttcatcttcatcaaccccatcacccatcccaaatactgtggcggtcaccgccgtggtatcatcaactccatccgtggtcatgagtacagtggcccagggggtgagcacctccgcaatcaagatggcatctacgcgtctgccctcgcccaagagcttagtcagtgcccccacacagattttagcgcagttccctaagcagcaccagcagagcccaaagcagcagctgtatcaggtacagcaacaaacacaacaacaggttgcacagccctctccagtgtcccaccagcagcagccccagcaaagcccactgcctcccggcattaaaccaaccatacaaatcaagcaagaatcaggcgtcaaaatcatcacccaacaggtacagccttccaagattttgcctaaacctgtgacggccaccttgcctacttcttccaactccccaattatggtagtcagcagtaacggagccatcatgacgactaagctcgtgacgacgccaactggaacacaagccacttacactaggccaactgtcagcccctctatcggccgtatggctgcaacgcctggtgcggcaacatatgtgaaaacaacgagcggttcaataatcacagtcgtgcccaaatcactcgctacactgggcggcaaaatcatctcgtccaacatagtttcagggactaccactaagattacgacaatccccatgacctcaaaaccgaatgtgatagtggtccaaaagactacgggcaagggcaccacgatccagggcctgcctgggaaaaacgtggtaaccacactgctaaacgccggcggagaaaaaactatccagacggttcctaccggcgcaaagccagctatactaacagctacacgcccgattacaaagatgatcgtgacccagcctaagggtattgggtctactgtgcaaccggcggctaaaatcatccctaccaaaatagtctacgggcaacagggcaagactcaggtactcatcaagcccaagccggtgacttttcaagccactgttgtgagtgagcagactagacagctggtgaccgaaacactccagcaggcctcaagggtggctgaggctgggaacagtagtattcaggaaggtaaggaagagccccagaattatactgattcttctagcagctcgacggaatcctcgcaaagctctcaggattcacagccagtcgtgcatgtgattgccagtcggcgccaggattggtcggaacatgaaatcgcaatggaaacctctcctactattatctaccaggacgtgtcatctgaaagtcagagcgcaactagcaccatcaaggcactgctcgaactgcaacagaccactgtgaaagagaagctcgaatcgaagccacggcaaccaaccatagatcttagccagatggccgttcccatacagatgacccaagagaaaaggcactcccctgagtctccctcaatcgcagtagtcgaaagcgagttggtcgccgagtacataactactgagagaaccgatgagggtactgaagttgctttcccccttctggtgagccatagatctcagccgcagcaacctagtcagcctcagcgaactttactccagcacgtggcacagtcacagacggctactcagacaagcgtagtcgttaaatcaatccctgccagtagccccggtgcaatcacgcacatcatgcagcaggcgctttctagccacacagctttcacaaaacacagtgaagagctgggcaccgaagagggagaggtcgaggagatggatactctggaccctcagactggactgttctaccgctcagcccttacccagagccagagtgccaagcagcagaagctcagccagccacctttggagcagacacagctccaggtgaaaaccttgcagtgcttccaaactaaacagaaacagacaatacacctgcaggcggatcagctccaacataagctaccacagatgccacaactgtctatcagacatcagaagctcaccccgttgcagcaggagcaggctcagccaaagcctgacgtgcaacatacgcaacaccccatggttgcgaaggatcggcaactgccaacgctcatggcacagccaccacagaccgttgtccaggtccttgcagtgaagactacgcagcagctgccaaagctacagcaggcccctaaccaaccgaaaatctacgtgcagccccagacaccacagtcgcagatgtctttgcccgctagtagtgaaaaacagactgcttcccaagtggagcaaccaatcattactcagggctcctccgtgaccaagatcacattcgagggccgacaacctcctaccgtaaccaaaatcacgggtggatcttctgttcccaaattaacttcgcctgtgaccagcatctctcctattcaggccagtgaaaagacagccgtatcggatattttgaaaatgtccctcatggaggcccagatagacaccaacgtggagcatatgatagtggatccccctaagaaagctctggccacttcaatgcttactggcgaggctggatcactgccatcaacacacatggttgtagcgggcatggctaatagcacacctcagcagcaaaaatgtagagagagttgctctagcccaagcaccgtggggagcagcttgaccactagaaagatagacccacctgccgttccagctaccgggcagttcatgagaatccagaacgttggacagaaaaaagctgaggagtccccagccgaaatcattatacaagccataccccagtatgccattccttgccactcaagttcaaatgtcgtggttgaaccctccggtttgctggaactaaacaactttacctcccaacaacttgacgatgaggagactgccatggaacaggacatcgacagctctaccgaggacgggaccgagccctctcctagccaaagctctgcagaacggtcctag

SEQ ID NO: 203071 - DNA, 3969 bp, Artificial Sequence
  derived and/or modified sequence
atgcctgtggtgtggcccaccctgctggacctgagcagagatgagtgcaagaggatcctgaggaagctggagctggaggcctatgctggggtcatcagcgccctgcgggcccagggcgacctgaccaaggagaagaaggacctgctgggggagctgagcaaggtgctgagcatcagcacagagcggcacagagctgaggtgcggcgggctgtgaatgatgagcggctgaccaccatcgcccacaacatgagcggccccaacagcagcagcgagtggagcattgagggccgccgcctggtgcccctgatgccccggctggtgccccagacagccttcaccgtgacagccaatgctgtggccaatgctgccatccagcacaatgccagcctgcctgtgcctgctgagaccggcagcaaggaggtggtgtgctacagctacaccagcaccaccagcacccccaccagcacccctgtgcccagcggcagcatcgccaccgtgaagagccccaggcctgccagccctgccagcaatgtggtggtgctgcccagcggcagcacagtgtatgtgaagtctgtgtcctgcagtgatgaagatgagaagcccaggaagagaagaaggaccaacagcagcagcagcagccctgtggtgctgaaggaggtgcccaaggctgtggtgcctgtgtccaagaccatcaccgtgcctgtgtctggcagccccaagatgagcaacatcatgcagagcatcgccaacagcctgcccccccacatgagccctgtgaagatcaccttcaccaagcccagcacccagaccaccaacaccaccacccagaaggtgatcatcgtgaccaccagccccagcagcacctttgtgcccaacatcctgagcaagagccacaactatgctgctgtgaccaagctggtgcccaccagcgtcatcgccagcaccacccagaagccccctgtggtgatcacagccagccagagcagcctggtgagcaacagcagcagcggcagcagcagcagcacccccagccccatccccaacacagtggccgtgacagctgtggtgagcagcaccccatctgtggtgatgagcacagtggcccagggcgtgtccaccagcgccatcaagatggccagcacccggctgcccagccccaagagcctggtgtctgcccccacccagatcctggcccagttccccaagcagcaccagcagagccccaagcagcagctgtaccaggtgcagcagcagacccagcagcaggtggcccagcccagccctgtgagccaccagcagcagccccagcagagccccctgcccccaggcatcaagcccaccatccagatcaagcaggagagcggcgtgaagatcatcacccagcaggtgcagcccagcaagatcctgcccaagcctgtgacagccaccctgcccaccagcagcaacagccccatcatggtggtgagcagcaatggagccatcatgaccaccaagctggtgaccacccccaccggcacccaggccacctacacccggcccaccgtgagccccagcattggaaggatggccgccacccctggggccgccacctacgtgaagaccaccagcggcagcatcatcaccgtggtgcccaagagcctggccaccctgggcggcaagatcatcagcagcaacatcgtgtctggcaccaccaccaagatcaccaccatccccatgaccagcaagcccaacgtgattgtggtgcagaagaccaccgggaagggcaccaccatccagggcctgcccgggaagaatgtggtgaccaccctgctgaatgctggaggagagaagaccatccagacagtgcccactggagccaagccagccatcctgacagccacccggcccatcaccaagatgattgtgacccagcccaagggcatcggcagcacagtgcagcctgctgccaagatcatccccaccaagatcgtgtatggccagcagggcaagacccaggtgctgatcaagcccaagcctgtgaccttccaggccaccgtggtgtctgagcagacccggcagctggtgacagagaccctgcagcaggccagccgggtggccgaggccggcaacagcagcatccaggagggcaaggaggagccccagaactacacagacagcagcagcagcagcacagagagcagccagagcagccaggacagccagcctgtggtgcacgtgattgccagccggcggcaggactggagcgagcacgagatcgccatggagaccagccccaccatcatctaccaggatgtgtcctctgagagccagagcgccaccagcaccatcaaggccctgctggagctgcagcagaccaccgtgaaggagaagctggagagcaagccccggcagcccaccatcgacctgagccagatggctgtgcccatccagatgacccaggagaagaggcacagccctgagagccccagcattgctgtggtggagagcgagctggtggccgagtacatcaccacagagaggacagatgagggcacagaggtggccttccccctgctggtgagccacaggagccagccccagcagcccagccagccccagaggaccctgctgcagcacgtggcccagagccagacagccacccagacctctgtggtggtgaagagcatcccagccagcagccctggggccatcacccacatcatgcagcaggccctgagcagccacacagccttcaccaagcacagcgaggagctgggcacagaggagggggaggtggaggagatggacaccctggacccccagacaggcctcttctacagaagtgccctgacccagagccagagcgccaagcagcagaagctgagccagccccccctggagcagacccagctgcaggtgaagaccctgcagtgcttccagaccaagcagaagcagaccatccacctgcaggccgaccagctgcagcacaagctgccccagatgccccagctgagcatccgccaccagaagctgacccccctgcagcaggagcaggcccagcccaagccagatgtgcagcacacccagcaccccatggtggccaaggaccggcagctgcccaccctgatggcccagcccccccagacagtggtgcaggtgctggccgtgaagaccacccagcagctgcccaagctgcagcaggcccccaaccagcccaagatctacgtgcagccccagaccccccagagccagatgagcctgcctgccagcagcgagaagcagacagccagccaggtggagcagcccatcatcacccagggcagctctgtgaccaagatcacctttgagggccggcagcccccaacagtgaccaagatcaccggcggcagctctgtgcccaagctgaccagccctgtgaccagcatcagccccatccaggccagcgagaagacagctgtgtctgacatcctgaagatgagcctgatggaggcccagattgacaccaacgtggagcacatgattgtggacccccccaagaaggccctggccacctccatgctgactggagaggccggcagcctgcccagcacccacatggtggtggccggcatggccaacagcaccccccagcagcagaagtgccgggagagctgcagcagccccagcacagtgggcagcagcctgaccaccaggaagattgaccccccagctgtgcctgccaccggccagttcatgaggatccagaatgtgggccagaagaaggccgaggagagccctgctgagatcatcatccaggccatcccccagtatgccatcccctgccacagcagcagcaatgtggtggtggagcccagcggcctgctggagctgaacaacttcaccagccagcagctggatgatgaggagacagccatggagcaggacatcgacagcagcacagaagatggaacagagcccagccccagccagagcagcgctgagaggagctag

SEQ ID NO: 203072 - DNA, 3468 bp, Artificial Sequence
  derived and/or modified sequence
atgcctgtggtgtggcccaccctgctggacctgagcagagatgagtgcaagaggatcctgaggaagctggagctggaggcctatgctggggtcatcagcgccctgcgggcccagggcgacctgaccaaggagaagaaggacctgctgggggagctgagcaaggtgctgagcatcagcacagagcggcacagagctgaggtgcggcgggctgtgaatgatgagcggctgaccaccatcgcccacaacatgagcggccccaacagcagcagcgagtggagcattgagggccgccgcctggtgcccctgatgccccggctggtgccccagacagccttcaccgtgacagccaatgctgtggccaatgctgccatccagcacaatgccagcctgcctgtgcctgctgagaccggcagcaaggaggtggtgtgctacagctacaccagcaccaccagcacccccaccagcacccctgtgcccagcggcagcatcgccaccgtgaagagccccaggcctgccagccctgccagcaatgtggtggtgctgcccagcggcagcacagtgtatgtgaagtctgtgtcctgcagtgatgaagatgagaagcccaggaagagaagaaggaccaacagcagcagcagcagccctgtggtgctgaaggaggtgcccaaggctgtggtgcctgtgtccaagaccatcaccgtgcctgtgtctggcagccccaagatgagcaacatcatgcagagcatcgccaacagcctgcccccccacatgagccctgtgaagatcaccttcaccaagcccagcacccagaccaccaacaccaccacccagaaggtgatcatcgtgaccaccagccccagcagcacctttgtgcccaacatcctgagcaagagccacaactatgctgctgtgaccaagctggtgcccaccagcgtcatcgccagcaccacccagaagccccctgtggtgatcacagccagccagagcagcctggtgagcaacagcagcagcggcagcagcagcagcacccccagccccatccccaacacagtggccgtgacagctgtggtgagcagcaccccatctgtggtgatgagcacagtggcccagggcgtgtccaccagcgccatcaagatggccagcacccggctgcccagccccaagagcctggtgtctgcccccacccagatcctggcccagttccccaagcagcaccagcagagccccaagcagcagctgtaccaggtgcagcagcagacccagcagcaggtggcccagcccagccctgtgagccaccagcagcagccccagcagagccccctgcccccaggcatcaagcccaccatccagatcaagcaggagagcggcgtgaagatcatcacccagcaggtgcagcccagcaagatcctgcccaagcctgtgacagccaccctgcccaccagcagcaacagccccatcatggtggtgagcagcaatggagccatcatgaccaccaagctggtgaccacccccaccggcacccaggccacctacacccggcccaccgtgagccccagcattggaaggatggccgccacccctggggccgccacctacgtgaagaccaccagcggcagcatcatcaccgtggtgcccaagagcctggccaccctgggcggcaagatcatcagcagcaacatcgtgtctggcaccaccaccaagatcaccaccatccccatgaccagcaagcccaacgtgattgtggtgcagaagaccaccgggaagggcaccaccatccagggcctgcccgggaagaatgtggtgaccaccctgctgaatgctggaggagagaagaccatccagacagtgcccactggagccaagccagccatcctgacagccacccggcccatcaccaagatgattgtgacccagcccaagggcatcggcagcacagtgcagcctgctgccaagatcatccccaccaagatcgtgtatggccagcagggcaagacccaggtgctgatcaagcccaagcctgtgaccttccaggccaccgtggtgtctgagcagacccggcagctggtgacagagaccctgcagcaggccagccgggtggccgaggccggcaacagcagcatccaggagggcaaggaggagccccagaactacacagacagcagcagcagcagcacagagagcagccagagcagccaggacagccagcctgtggtgcacgtgattgccagccggcggcaggactggagcgagcacgagatcgccatggagaccagccccaccatcatctaccaggatgtgtcctctgagagccagagcgccaccagcaccatcaaggccctgctggagctgcagcagaccaccgtgaaggagaagctggagagcaagccccggcagcccaccatcgacctgagccagatggctgtgcccatccagatgacccaggagaagaggcacagccctgagagccccagcattgctgtggtggagagcgagctggtggccgagtacatcaccacagagaggacagatgagggcacagaggtggccttccccctgctggtgagccacaggagccagccccagcagcccagccagccccagaggaccctgctgcagcacgtggcccagagccagacagccacccagacctctgtggtggtgaagagcatcccagccagcagccctggggccatcacccacatcatgcagcaggccctgagcagccacacagccttcaccaagcacagcgaggagctgggcacagaggagggggaggtggaggagatggacaccctggacccccagacaggcctcttctacagaagtgccctgacccagagccagagcgccaagcagcagaagctgagccagccccccctggagcagacccagctgcaggtgaagaccctgcagtgcttccagaccaagcagaagcagaccatccacctgcaggccgaccagctgcagcacaagctgccccagatgccccagctgagcatccgccaccagaagctgacccccctgcagcaggagcaggcccagcccaagccagatgtgcagcacacccagcaccccatggtggccaaggaccggcagctgcccaccctgatggcccagcccccccagacagtggtgcaggtgctggccgtgaagaccacccagcagctgcccaagctgcagcaggcccccaaccagcccaagatctacgtgcagccccagaccccccagagccagatgagcctgcctgccagcagcgagaagcagacagccagccaggccatcccccagtatgccatcccctgccacagcagcagcaatgtggtggtggagcccagcggcctgctggagctgaacaacttcaccagccagcagctggatgatgaggagacagccatggagcaggacatcgacagcagcacagaagatggaacagagcccagccccagccagagcagcgctgagaggagctag

SEQ ID NO: 203073 - DNA, 3969 bp, Artificial Sequence
  derived and/or modified sequence
atgcccgtggtgtggcccaccctgctggacctgagccgggacgagtgtaaaaggatcttacgaaagttggagctggaagcctatgccggagttattagtgcattgcgtgcccagggcgacctcacaaaggagaaaaaggatctgctgggcgaactcagcaaggtactctctatcagcaccgagcgccatcgcgccgaggtcagacgtgcagttaacgacgagagactcaccacgatcgcacataacatgtctggtcccaacagctccagtgagtggtcgattgaaggacgacggctagtgcctttaatgcctaggcttgtgccccaaaccgccttcaccgtgaccgccaacgctgtggccaatgccgcaatccagcataatgctagtttacccgttcccgccgaaaccggctcaaaagaggtcgtttgttatagttacacgagcacgacgtcaacgccaacctcaacgccggtaccctccgggtctattgctactgtgaagtctccacggccagcctcaccagcctcaaatgtggttgtcctgccttcaggttctacagtttacgtcaagtccgtaagttgctcagacgaagacgaaaagcctcgtaaacgaagacgcacgaacagcagttcaagtagtccagttgtattgaaagaggtccctaaggcagtcgttcctgttagtaaaaccatcaccgtgccagtgtctggcagccctaaaatgagcaatattatgcagtcaatcgccaatagtctaccacctcacatgtcaccagttaagatcacattcacaaagcccagcacccagaccaccaacacgactactcaaaaagtgattatagtaacaacctcaccctcttccactttcgtgccgaatattctaagtaaatcccacaattacgctgcagtgaccaagctggtgccgacaagcgtaatcgcctctacaacacagaaaccccccgtggttatcaccgctagccagtcctctttggtgtcaaattcctctagtggaagctcttcttctacaccaagccccattcctaatacggtggcagttactgctgtggtctctagcactcccagcgtggtaatgagcacagtggcccagggcgttagtacttccgcgatcaaaatggcctcaactcggctgccgtcgccgaaaagcctggtctcagcaccaactcagatcctggcccagttcccaaagcaacaccagcaaagccccaagcagcaactgtaccaggtccaacagcagactcaacaacaggtagcgcaacccagccccgtcagccaccagcaacaacctcaacagagtcccctccctcctggaattaaacccaccatacagatcaagcaggaaagcggggtgaaaattattacccagcaggtgcagccaagcaagatcttaccaaaacccgttacagccaccctgcccacttccagcaacagccccattatggtcgtgagctccaatggggcgattatgacaactaagctggtgacgacccctacagggacccaggctacctatactagacctaccgtctctccttctatcggccgtatggcagctactcctggcgccgccacctatgtcaagactacttccggcagcatcatcacagtggtgccaaagtctctggcaaccttaggcgggaagattataagcagtaatattgtatcgggaacgactacaaaaattaccactatcccaatgacttccaagcctaacgtcattgtcgtgcagaaaactaccgggaaaggcacaaccatccaaggtcttcccggcaagaatgtggtcacaacgctcctaaacgcgggaggcgaaaagactattcaaacagtgcctaccggagcaaaacctgcgatcctgacggcaactagacctatcacaaaaatgatcgtaacacagccgaagggcatcggatctactgtccagcccgccgctaaaattataccaaccaaaatcgtgtacggccagcaggggaagacccaggtgttgattaaaccaaagccggtcacttttcaagccacagtggtgtctgagcaaaccaggcagcttgtcaccgaaaccctacagcaggccagcagggtggctgaggccgggaacagcagtattcaggaagggaaagaagagccacagaactacaccgactcttccagttccagtacagagtcctctcagagtagccaggactctcagccggttgtgcatgttattgcgtcaaggaggcaggactggtccgagcacgaaatcgccatggagaccagtcccacaattatttatcaggacgtgtcctctgagtctcaatcggcgacaagcacaataaaggctctgctcgagctgcagcagaccactgtcaaggaaaaactcgagtccaagcctcgtcaaccaaccatcgatttgtcccagatggcggtcccaatccagatgacccaggaaaagagacatagtccagagtccccttcaattgccgtggtcgaaagcgagctcgtggccgaatacatcactactgagcgtacagacgagggcacagaggtagcttttccacttcttgtgtcccatcgatcgcagcctcagcagccatcccagccacagcgaacacttttacaacatgttgctcagagccagacggctacacagacgtcggttgtggtgaagagtattcctgctagtagcccgggcgccatcacccatatcatgcagcaggccttaagctcccataccgcgtttaccaagcattctgaggaacttggcacagaggagggagaagtagaagagatggacaccctggatccgcagaccgggctcttctacaggagcgccttgacccagagccagagtgcgaaacagcagaagctcagtcagcctcccttggaacagacccagctgcaggtcaaaaccctccagtgctttcagactaagcagaagcagacaattcatctccaggctgaccagcttcaacataaactgccgcagatgcctcagctttctatacggcatcaaaagctcactcccttacagcaggagcaggctcagcccaaacctgacgtgcaacatacccagcatccgatggtggcaaaggatcgccaactgccaaccctgatggcacagccaccccagactgtggttcaggtgctcgccgtgaaaacaacacaacagctgccaaaattgcagcaggccccaaatcagcccaagatttatgtacagccgcagaccccccagtctcagatgtctctgcctgcttcttcggaaaagcaaaccgcttcccaggtggagcagcctattatcacccaagggagttctgtaacaaagatcacttttgagggacgacaaccgccgacagtgacaaagataaccggaggcagttccgtccccaagttgacctcacctgtgacgagcatttcaccaattcaggccagtgaaaagactgccgtgtcggacatcctcaagatgtccttgatggaggcccagattgatactaatgtggagcatatgatcgttgacccacctaaaaaggccctcgctacatccatgctgacaggggaggctggctcgcttccttcaacccacatggtggtggccggcatggccaatagcacgccgcaacagcaaaaatgccgggaatcatgctccagcccatcaaccgtcggctcatcacttactacgaggaagatagatcctcctgcggttcccgctacaggacagtttatgcgcattcagaacgtgggacagaaaaaggcagaagagagtccggcagaaattattatacaagcgataccacagtatgctattccatgtcactcgtcttctaacgttgtggtggaaccaagcggcttgctggaactcaacaattttacatcccaacagctcgatgatgaagaaacggcaatggaacaagacatagactctagtactgaagatggcactgaaccaagtccaagccagtcaagcgccgaacggagttag

SEQ ID NO: 203074 - DNA, 3468 bp, Artificial Sequence
  derived and/or modified sequence
atgcccgtggtgtggcccaccctgctggacctgagccgggacgagtgcaagcggattctgaggaagctggaactggaagcctatgccggggttatatcagctttacgtgcccagggcgatctcaccaaagagaagaaggacctattgggcgagctgtctaaggtgttgtccatatccactgaacgccaccgcgccgaggttcgacgcgccgtgaacgatgagcgtctgaccacaatcgcccacaacatgagcggacctaacagctcctcagagtggagcattgagggtaggcgcctggtgccattaatgccacggcttgtcccacagaccgcgttcactgttactgcgaacgcggtggctaatgcagccatacagcacaacgcttctttgccagtgccagccgaaacggggagcaaggaggtcgtgtgctattcctatacaagtaccacatcaacgccaacgtctaccccagtccctagtggaagtatcgccacagtgaaaagccccagacccgcgagcccggcatcaaacgtcgtagtgctgccttcaggctccacagtttatgtcaagagtgtatcctgctccgacgaagacgagaaaccccgcaagcgaaggaggacgaacagctcctcgagttctccagtggtattgaaagaggtgcccaaagcagtagtgccagtctccaagacaatcaccgtgccagtttctggttcgcctaaaatgagcaacatcatgcaatcgatcgcaaatagcctgcctccacacatgtcgcccgttaaaattacgtttaccaaaccatccacacaaacaacaaacactacaactcagaaggttattatcgtgaccacttctccaagctcgacttttgtaccaaatattttgtctaagagtcataattacgcagctgtaactaagctggttcctacttccgtaatcgcctctaccactcaaaagcctcccgttgtcatcacagcctcccagagttcactagtgtccaactcttcttctggttctagctctagcacccccagcccaattccaaacaccgtggccgttaccgccgtcgtgagctcaacaccgagtgtggtcatgtcaaccgtggcccagggcgtttctacttctgcaattaagatggcatccacacggctcccttcacctaagtccctcgtctcagcacccactcagatcctggcccaatttccgaagcaacaccagcagagcccaaagcagcagctgtatcaggtccagcaacagacacaacagcaggttgcccaaccaagtcccgtgtcacatcagcagcagccacagcagtctcctctgcctcctggcattaagcctacgatacagataaaacaagaaagcggggtcaaaattataacacagcaggtccagccctccaagatcctgcccaaacccgttaccgccacactccccactagtagcaacagcccaataatggtggtgagtagtaatggcgcaatcatgactaccaaacttgtcaccaccccaaccggtacacaggctacatacacaaggcccaccgtgtcaccaagcatcggcaggatggctgctacccctggcgctgccacttacgttaaaactaccagcgggagcataatcactgtggtgccaaaatcacttgctacgttgggaggtaagatcatctcctcaaatatcgtgagcggaactacgactaagatcactaccattcccatgacttccaaacccaacgtcatcgtcgttcagaagaccactggcaaggggaccaccattcagggtctaccaggcaaaaatgtggttaccaccttgcttaacgcaggcggtgagaaaacgattcagacagtccctaccggcgccaagcccgccatcctgacagccactagacccatcacgaaaatgatcgttacccagcctaaaggaattggctccactgtccaaccggccgcaaagattatcccaaccaagattgtgtatgggcagcagggaaagacccaggtcctgattaagcctaaacctgtgaccttccaagccacggtggtgagcgaacagacacgtcagttggtaactgagacccttcaacaagcttccagagtagccgaggcaggtaacagctctatacaagaaggaaaagaggaacctcaaaattataccgatagtagttcctccagcaccgagagttcccagtcatctcaggactcccagcctgtggttcatgtgatcgcatcgcgcaggcaggactggtcagagcatgaaatcgcaatggagacatcacccacaatcatttaccaagatgtatcttccgaatctcagagtgctaccagcacaattaaggccctgctagagcttcaacaaaccacagtgaaagaaaagttggaaagcaagcctcggcaaccaaccattgacctgtctcagatggctgtgcctattcagatgacccaggagaagcgacacagtccagagagccccagcattgcagtggtcgagtcagagctggttgccgaatacatcactacagagcgcacagatgagggcacggaagtggcattcccattactcgtgtcacatcggtcccaacctcaacaaccttctcagcctcagcgtaccctcctccagcatgttgcccagagccagaccgccacccagaccagtgtggtcgtgaagagtattccagcatctagccctggcgcaatcactcatattatgcagcaggcactgtccagtcatactgcgtttacgaaacactccgaggagcttggtacagaagaaggcgaggtggaggagatggacacacttgacccccagaccggtctgttctatcgttcggcactaacccaatcccagagtgcgaaacaacagaagctgtctcagccaccactggaacaaacccagttacaagtcaagactctgcagtgcttccaaaccaagcagaaacagacaattcacctgcaagccgatcagcttcaacacaaattaccacagatgccgcagctgagcatacgccaccagaagctcaccccattacagcaagagcaggcccagcccaaacccgatgtccaacatactcaacatcccatggtggctaaggaccgacagctgccaaccctgatggcacaacccccccagaccgtggtccaggttctcgctgtgaagaccacccagcagctccctaaactacagcaagcccctaaccagcccaagatttatgtccagcctcaaaccccacaaagccagatgagcttaccagcctcgtcggaaaagcagaccgcgagtcaggccataccacagtacgctatcccttgtcatagtagttcaaacgtcgtagtcgagccgtccggactcctggaactgaataactttacaagccaacagctggacgatgaagaaacagctatggagcaagatatcgactcatctacggaggacgggaccgagcccagcccaagtcagtcatccgccgagcggtcctag

SEQ ID NO: 203075 - DNA, 3969 bp, Artificial Sequence
  derived and/or modified sequence
atgcccgtggtgtggcccaccctgctggacctgagccgggacgagtgcaaacggatcctccggaaactcgaactggaggcctatgccggagttatttctgccttacgcgcacagggcgacttgaccaaagaaaaaaaggacctcctgggagaactctcaaaggtcctcagtattagcacagaacggcacagggccgaggtgcgaagggctgtcaatgatgagagattgaccaccatcgcccataatatgagtgggcctaacagcagctccgagtggtccatagagggccgcagactggtgccacttatgccccggctggtgcctcagacggccttcactgttactgctaatgctgtcgctaacgccgccattcagcataacgctagcctccctgtgcccgcggagacaggcagtaaagaggtcgtgtgttattcatacacaagcactaccagtactcctacatccacacctgttccctccggaagcattgctacagtaaaaagtcctcgtcccgctagcccagccagtaatgtggtggtcctcccctctggctcaaccgtctatgtcaaatccgtgagctgctcagacgaagatgagaagccccgtaaacggcggaggacgaatagtagcagcagctcccccgtggtgctaaaggaggttccgaaggccgtcgttcctgtctctaaaacaataaccgtgccggtgagcggttcccccaagatgagtaacattatgcaaagcatcgcaaatagcttgcctcctcacatgtcccctgtgaaaatcactttcaccaaacctagcacccagactaccaacaccaccactcagaaggtaatcattgtcacaacatctcccagcagcaccttcgtgcctaatattctgtcaaaaagccacaactacgctgctgtgaccaagttggtgcccactagtgtgatcgcgagcacaacacagaagcccccagttgtgattaccgcttcacaatcatcacttgtatctaattcgagcagcggtagttcctctagcacacctagtcctatacctaacacagtggccgtaactgcagtcgtcagtagcaccccatccgtggtcatgtctacagtggcccagggggtcagtacatccgcgattaagatggcctcaacccggttaccgagcccaaagagcctggtgagtgcaccaacccaaatcctggctcagtttcctaaacagcaccaacagagtcccaagcagcaactgtaccaggttcagcagcagactcagcagcaggttgcccagccgtcccctgtgtcccaccagcagcagcctcagcaatctccgctgccgcctggcatcaagcccacgatccagatcaagcaggaatctggcgtgaagatcatcactcagcaggtgcagccttccaagattctgccaaagccagtcaccgccaccctgcctactagctccaattcacccattatggtggtgtcttctaatggcgccatcatgaccactaaactggtcacaaccccaacaggtacacaggcgacatacacaagacccaccgtcagccccagcataggtcggatggccgctactcctggggccgcaacctacgtcaagacaacatctggttccattatcaccgtggtgcccaagtctcttgccaccctcggtggcaaaatcattagcagcaatattgtgtctggtaccactactaaaattacaacaattcctatgacttccaagcccaatgtgattgtggtacaaaaaacaactggcaagggtacaacgatccagggcctccccggcaagaacgtggtaaccaccctccttaacgctgggggcgaaaagactatccagaccgtgcccaccggagccaaacccgcaatcctcaccgccacacgacctattaccaagatgattgtgacgcagccaaaggggatcggttccactgttcagccagcggccaagatcataccgaccaagatagtctacggccagcaggggaagacacaagttttaatcaaacccaagccggtgacttttcaggccacagtggtgtccgaacagaccaggcagttagttacggagactctgcagcaggctagccgcgtcgcagaggcaggaaatagctctattcaggaagggaaagaagagcctcagaactacactgactctagcagcagcagcactgagtcctcacaaagctctcaggatagccagcccgtggtccacgtgatcgcctcgcgacggcaggattggagtgaacatgaaatcgctatggagacttctcctaccataatatatcaggatgtgagctcggaatctcagtctgccacatccacaatcaaggctcttctggagctgcagcagacaaccgtcaaagagaaactcgagtctaagccgcgacagccaactatcgacctgtcgcaaatggccgtgcccattcagatgacccaggagaagcgtcattctcctgaaagtccttcaattgctgttgtcgagagtgaacttgtagccgagtacattaccacagaacgcaccgacgaaggcacagaggtcgctttcccattgctcgtgagccacaggagccagcctcagcagccttcccagccccagagaactctgctgcagcacgtcgcacagagccagacggctacacaaactagcgtcgtggtaaagagcattcccgcatcaagtcccggcgccattactcacataatgcagcaggccctaagtagccatactgcctttaccaaacacagtgaggagctgggcaccgaagagggtgaagtagaagaaatggacaccctcgacccacaaacgggcctcttctatcgttcagcgcttacccagagtcagtcagcaaagcaacagaagctcagtcagccccccttagaacagacccaactgcaggtgaaaacccttcaatgttttcagacgaaacagaagcaaaccattcatctgcaggcagatcagctgcagcataaactgccacaaatgccccaattgtccatacggcaccagaaactgacgccactgcaacaggagcaggcccagcccaagcccgacgtacagcacacgcagcatccaatggtcgccaaagaccgccaactgcccacacttatggcacagccccctcaaacagtggttcaggtgctcgcggtcaagactacgcagcagctgccaaaactccagcaagccccaaatcagcccaaaatctacgtgcaacctcagacaccacaaagtcagatgtcgctgccagcatcgtctgagaaacagacagcctcgcaagtggagcagccaattattacacaggggagtagcgtcaccaaaatcactttcgagggtaggcaaccaccaaccgtgaccaagattaccgggggatcctcggtgccaaaattaacttctcccgtcacgtctatatcacctattcaggcttccgaaaagacggccgtgagcgatatactaaagatgtcattaatggaagcccagattgatacgaacgttgagcatatgatagtggatcctccgaagaaggctctggccacctcgatgttgacaggcgaagcaggatctctgccgtcgacccatatggttgttgctggaatggctaatagcactccccagcagcagaagtgcagagagtcctgttcaagccccagcacggtgggctcctctttgacgactcgcaaaattgacccccccgccgtacccgcaactgggcagttcatgcggatacagaatgtggggcagaaaaaggccgaggaaagccctgccgagataatcatacaggctatcccacagtatgcaattccttgccacagctccagcaatgtcgtggtcgaacccagtggtttgctggaactcaacaactttacttctcagcagctggacgacgaggaaactgcgatggagcaagacatcgatagctcaactgaagacgggacagagccatccccttctcaatcttcggccgaaagaagttag

SEQ ID NO: 203076 - DNA, 3969 bp, Artificial Sequence
  derived and/or modified sequence
atgcctgtagtatggcctacattgctggacctgagcagagacgagtgtaaaaggatcctccggaagctggagcttgaagcttacgcaggggtcatttcggctctgcgcgcacaaggcgatttgacaaaagagaaaaaagatctgttaggcgagctctcgaaggtgttaagtatctctacagagagacatagggccgaagtgaggagagcagtgaacgacgaaaggttgaccaccattgctcacaatatgagcggtccaaacagtagcagtgaatggtccattgaaggcagacgattggtgcctttgatgcctcgcctggtccctcagactgctttcaccgtcaccgcaaacgctgtggctaatgcagccatacagcacaacgcaagccttcccgtcccagccgagactggatcgaaggaagttgtctgttactcctatacaagtacaacatctactcccacgtctacccctgtgccgtctggctctatcgctacggttaaaagccctcgcccagcttcacccgctagcaatgttgtggtcctaccctccggttcaacggtttatgtcaagtcagtctcctgcagcgacgaggatgagaagccacgcaaaagaaggagaacaaattcctcttcctctagtccagttgtactcaaggaggtgcccaaagctgtggtccctgtcagtaaaaccattactgtgcccgtgagtggtagccctaagatgtctaacataatgcagtccatcgccaattccctgccacctcatatgagccccgtgaaaattacttttaccaaaccatcaactcagacaacaaacacaacaacacagaaagtgataattgtgactacgtccccttcatctactttcgtgcctaacatcctgtccaagagtcacaattatgcggctgtgacaaaactggtccccacctcagtgattgcctctaccacacagaaaccccctgtcgttattaccgcctctcaaagcagcctagtgtctaattcttcatccgggagcagttcaagcactccatctccgattcctaacacagtggccgtgaccgctgtcgtgtcttctacaccaagcgtggtcatgtcaactgtcgcacagggggtctctacctccgccatcaagatggcatccacccgcctcccatctcctaaatctctggtgtctgcaccaacccaaattcttgctcaattcccgaaacagcaccagcagtcaccaaaacagcagttgtaccaggttcaacaacagacccaacaacaggtggctcaaccctctcccgtgtctcatcagcaacagcctcagcagtcccctttacccccagggatcaagcctacaatacagatcaaacaggaatcaggtgtaaagattattacccaacaagtgcagccgtctaaaattttaccaaagcctgtaaccgccactctgccaacatcatcaaattctccaattatggttgtgagctcaaacggtgccattatgacgaccaaactcgtaaccactccaactgggacacaggccacgtataccagaccaactgtgagcccctctatcggaaggatggcagcgacccccggagcagccacgtacgtgaaaaccacatcagggagcattataactgtggtgcctaaaagccttgcgacgctcggtggcaagataatttcaagcaacatcgtttccggcactactacgaagataacgacgattccaatgacttctaagcccaacgttatcgtggtgcagaagacaacagggaaaggaaccactatccagggcctccctggaaagaatgtagtcaccactctgctgaatgcaggcggagagaagacaattcagaccgtcccgacaggggcaaaacctgcgatcctgacagctacaaggcctatcacaaagatgatcgtgacacagcctaaggggatcggtagtactgtgcaaccggctgccaagattattcctacgaagatcgtgtatgggcagcagggaaaaacacaggtgctgattaagcctaaacccgtgaccttccaagctacggtcgtgtctgagcagactcgccaactggtaacggagacattgcagcaggcctcccgagtggccgaagcgggtaactcttcaatccaagagggcaaagaggagccgcaaaattacactgactcatcatcctcttcgactgagagctcccagtccagtcaggatagtcagcctgtggttcacgtgatagcgagccggagacaggattggagtgagcacgagatcgcgatggaaactagccccacgatcatttatcaggacgtaagtagtgagtcgcaaagtgccacatcaactattaaggcgttactggagctccagcaaacaacggttaaagagaagctggagtcgaaacctcggcagcctactatcgatctgtcccagatggccgtacctatacagatgacacaggagaagcgacactctcctgaatcccctagtattgcggttgtggaaagcgagctggtcgccgagtatattacaaccgaacggacagatgagggcaccgaagtcgccttcccactgctggttagtcacaggtctcagccacaacagccttcccagccccagcggaccttgttgcagcatgtggcacagtcgcagactgctacacagacatccgtggtggtgaaaagcattcccgcttcgagtcctggggctattacccacatcatgcagcaggcactgtcttctcacacggcatttaccaagcattcagaggagctgggcacggaagaaggtgaagtcgaggagatggatactctggatccccagacaggcctgttctacaggtcagctctcacccaaagtcagagtgctaaacagcagaaattgagccaaccccctctcgagcagacgcaactacaagtgaagacactgcagtgtttccagaccaagcaaaagcaaacgattcacctgcaggccgatcagctgcaacacaagctcccgcaaatgcctcaactgtcaattaggcaccagaaactaacccccctccaacaggagcaggctcagcccaaaccagacgtgcagcacacgcagcacccaatggttgctaaggatagacagctcccaacattgatggcccagccacctcagaccgtcgtgcaggtccttgcagtaaagaccacacagcaattgcccaagctgcagcaggcaccaaatcagcccaagatctatgttcagccacagactccacagagccaaatgtccctccccgcaagctcagagaagcagacagcgagccaggtcgaacagcctattattacacagggtagctcagttactaagatcacattcgaggggagacagcctccaactgtaaccaagattacgggaggatcatctgtacccaagttgacatctcctgtgacctctatttctcctattcaggcttccgaaaagacagctgtaagcgatatcttgaagatgtctctgatggaggcccagatagacacaaatgtggagcatatgatagtggacccgcctaaaaaggccttagctactagcatgctaaccggggaagcgggaagcttgccgtctacacacatggtagtggcgggaatggcaaacagcactccgcagcagcaaaaatgcagggagagctgctcatcaccctctacagttggtagctccctgacaacacgcaaaattgatcccccagcagttcccgctaccggacagttcatgaggatccagaacgtcggacagaagaaggccgaagagtcgcctgccgaaatcattatccaagcgattcctcaatatgctattccctgccattccagttccaatgtagtcgtcgaaccatctgggcttctggagctgaacaattttacctctcagcagttggacgatgaggagactgctatggagcaggacattgattcctcgaccgaggacggcacagaaccctcgccaagccaatcctccgccgagcggagttag

SEQ ID NO: 203077 - DNA, 3468 bp, Artificial Sequence
  derived and/or modified sequence
atgccggtggtgtggcctacgttactggacttgtctagggatgagtgcaaacgtattctgcgcaagctggaacttgaggcctacgcaggagttatctccgcgttacgcgctcagggagacctgacaaaggagaagaaggacctactgggtgaactctctaaagtgctgtctataagcactgagcgacatcgtgcggaagtacgcagggcggtgaacgacgagcggcttactaccatcgcacacaatatgagcggaccgaatagcagctcagagtggagcattgagggaaggcgcctggtacctctgatgcccagactcgtgccgcaaaccgcatttactgttaccgccaatgccgtcgcaaacgccgcaattcaacacaatgcttctctgccagtcccagcagaaaccggaagtaaggaggtggtctgttattcgtacactagcaccacctcaactcctacttccacccccgttccctctgggtcaatagcaacagtgaaaagtcccagaccagctagtcccgcttccaatgttgtcgttctgccatccgggtccacagtgtacgtgaagagtgtgagttgtagtgacgaggacgaaaagccccgaaagcggagacgcacaaactcgtcttcatctagcccagtggtgttaaaagaagtgcctaaggccgtcgtgcccgtgtccaaaaccattacggtgccggtctcaggtagccctaagatgagtaatatcatgcagagtattgcgaattccctgccaccccatatgagcccggtgaagattactttcactaagccctccacccagaccacaaacaccacaacccaaaaggtgataattgtgaccacaagccctagctcaacgtttgtaccaaacattctctcaaagtcccacaactacgctgccgtgacaaaactggtgcctacgagtgtgattgccagtaccacacaaaaacccccagtggtgataacggcatcacagtcctccctggtgtcgaatagctctagtggtagctcttcatccaccccgagtccaatccctaacaccgtcgctgtgaccgctgtagtgtcctcaacacccagtgtggtcatgtccacggtggcgcagggtgtatctacttctgccataaagatggctagcacacgactgccttcgcccaagagcctcgtgtctgctcctacacagattctggctcagttcccaaagcagcatcaacaaagccctaagcagcagctttaccaagttcagcagcagacacagcagcaggtggcccaacctagccctgtaagccaccagcagcagccacagcagagccctctcccacctggcataaagccgactattcagatcaaacaggaaagtggggtgaagatcattactcagcaggtacagccttccaagatactacccaagccagtgaccgctacactcccaacctcatcaaactccccaattatggtggtgagctctaatggcgcaattatgacgactaaactggtcactacgcctacaggcactcaggctacctacactcggccaactgtttccccttctattggcaggatggctgctactccaggagcagccacatatgtcaagactacatcgggatcgatcatcactgtcgtgcctaagtccctggccaccctgggcggaaagataatctcttccaacattgtttccggcaccaccaccaagattacaacaatacctatgacgagtaaacctaacgtgatcgtggttcagaaaactactggcaaggggaccacaatccagggcctgcccggtaagaatgtggtgacgaccctgctaaacgcgggtggtgagaagaccatacagactgtgccgacaggcgcaaagccagctatactgacagccacccggcctataactaagatgatcgtgactcaacctaaaggcatcggcagcaccgtgcagcccgcagctaaaattatcccgacaaagattgtgtacggccagcaggggaaaacgcaggtgctaatcaagcctaagcctgttacctttcaggccaccgtcgtgtccgaacaaactcgtcagctggtcactgaaacgttacaacaggcatctagggttgcggaggccggtaattcttctattcaggagggaaaggaagaaccccagaactacaccgattctagctcatcttcaactgagtcatctcagagttctcaggatagtcaacccgtagtgcatgtcatcgcctcacgtcgccaggactggagtgagcacgagatcgccatggagacatccccaactatcatatatcaagacgtgagcagcgagagtcaaagtgctacttcaacgattaaagctctcctcgaactccagcagactactgtcaaagaaaagcttgagagcaaacccaggcagcctacaatagatctgtcccagatggccgtgccaattcagatgacccaagaaaaacgccactcgcccgagagtccaagtattgccgtagtggaatccgaactcgttgccgagtacatcaccaccgagagaactgacgagggaacagaggtggcatttcctctgttagtgtcacaccgatcccagcctcagcagccgtcccaacctcagcgcaccctgctgcagcatgtggcccaatcacagaccgccacccagacctcggtagtcgtcaaatccatcccggcttcctcccctggagcgattacccacataatgcaacaagccttgtcatcccacaccgcttttaccaaacattcagaagagcttggaacagaggagggggaagttgaagaaatggacaccctagacccacagacaggcctcttttatagatcggccctaactcagtcacagtccgcaaaacagcagaagttgtctcaaccaccattggagcagactcagctgcaggtgaagactctccagtgcttccaaaccaagcaaaaacagaccatacatcttcaagcggatcagctgcagcacaagctcccgcagatgcctcaactgagcattcgccatcagaagctgacacccctccagcaggaacaggcacaacctaaaccagacgtccaacatactcaacacccaatggtcgctaaagatcggcaactacccacgcttatggcccaacctcctcaaactgtggtccaagtgctggcagtgaaaaccacccagcagctccccaaactgcaacaggctcccaaccagccaaaaatctacgtgcagccccagacacctcaatcacaaatgtctctgcctgcaagttctgaaaaacagacagcgtcccaggccattccgcagtacgccatcccatgccattcttcctctaatgtcgtcgtcgagccttctgggcttctggaactgaacaacttcacttcccagcaactcgacgacgaggaaactgccatggaacaggatattgacagcagtactgaggacgggactgagccgtctccctctcagtccagcgccgaacgcagttag

SEQ ID NO: 203078 - DNA, 3969 bp, Artificial Sequence
  derived and/or modified sequence
atgcccgtggtatggcctactctgctggatctttcaagagacgagtgcaagagaatcctgcgaaagctggagctcgaagcatacgcgggagttatctctgccttgagggcccagggcgacttaaccaaggagaagaaggacttattgggcgaactgtccaaagtactctcaatctccactgagagacaccgggcagaggtccgcagagcagttaatgatgagagactaaccacgattgcccacaatatgtcagggcctaactcctcatccgaatggtccatcgaaggaaggaggctcgtgcctcttatgccccgacttgtccctcagactgccttcaccgttacagccaacgctgtggctaacgccgctattcagcacaatgcttcactgcccgtcccggctgagaccggctccaaggaggtagtctgttattcttatacctccacaacttccacccccacatctacccctgtgccctctgggtcaattgcaactgtcaagagccctcggccagcttccccagcctccaacgtcgtagtgttgccttctggatcgactgtctatgtaaagagtgtatcctgctcagatgaagacgagaagcctcgcaaaagaaggcgcactaactcttccagttctagtcccgtcgtgctcaaggaagtgcccaaagccgtcgtgcccgtctcaaagacgatcacagtgccagtctcggggtctcccaagatgtcgaacattatgcagtcaatcgcaaacagcctgcccccacatatgtcacctgtgaaaattacgttcacaaagccttctacccagactacaaatacgacaacacagaaagtgatcattgtcacgacctctccaagcagcacgttcgtgcccaatatcctgtctaagagccacaactatgccgctgtcactaagctggtgccaacttcggtgattgcatccacaacacagaagccgcctgtggtcataacagcctcacagtcaagtttagtgtccaacagttcgagtgggtcctctagctcgactccttccccaattcctaatacagttgccgttactgccgtggtgtcctcgacaccctccgttgttatgtccacggttgctcagggtgtctctactagcgccatcaagatggctagcacacggctcccatcaccaaaatctctggtgagtgcacctacccagatactggcacaattccctaaacagcaccaacagtcccccaagcagcagctctaccaagtacagcagcagacccagcaacaggttgcccagcccagcccagtgagccaccagcagcagccacaacaatctccgttaccgcctgggattaagccaacgatccagatcaaacaagagtcaggggttaagatcattactcaacaggtacagccttctaaaatcctccctaaacctgtcactgccactctgcccaccagctctaacagccctatcatggtggtgagctctaatggggcaattatgacaactaaactcgtgacaacacccaccggcacacaggcaacttatacacgcccaactgtcagcccctccatcggacggatggcagccactcccggtgccgcaacctacgtcaagacaacaagcggatcaattattaccgtagtgcctaagagtctagccacccttggaggcaaaattattagcagcaacattgtatcgggaaccaccaccaagattacaaccatccctatgactagcaagccaaatgttatcgtggtgcagaaaaccacagggaaagggaccactattcagggtctccccggaaaaaatgtggtcacaactttgttgaacgctggaggagaaaagacaatacagactgtacctaccggagcaaagcccgctatcctcaccgctacccgcccaattaccaaaatgattgtgacccagccaaagggaattggcagcaccgtacagcccgctgctaaaattattcccacgaagatagtctacgggcagcagggaaaaactcaagtcctgattaaacctaaaccggtgacttttcaggccactgtggtttccgaacagacaagacaactggtgacggagacgctgcagcaagcctctcgggtggctgaggcaggaaatagttcaatccaggaggggaaagaagagcctcagaattataccgacagcagctcctcatccaccgagagcagccagtcatcgcaggatagccagcccgtggttcacgttatcgctagtcgtagacaggattggagcgaacacgagattgccatggagacatctccaacaattatttatcaggatgtcagcagcgaaagccaatctgccacctctactatcaaggctctactggagcttcagcagacgaccgtgaaggaaaagctggaatcgaagccaaggcagccaactattgacctcagccaaatggcagtacccattcaaatgacccaggagaaacggcactcccccgagtctccgtctatagcagttgtcgaatctgagctcgtagccgaatacatcaccaccgaaaggactgacgaaggcactgaggtcgctttcccccttctggtgtcgcaccgcagtcaacctcagcagccctcacaacctcagaggacactgcttcagcacgttgcacagtctcagacggctactcaaacttccgttgttgtgaagtccataccggcatcttctccaggcgctatcacacacatcatgcaacaggccctgtctagtcatactgcgttcaccaaacacagcgaggaactaggtaccgaagaaggtgaggtggaagaaatggacaccctcgacccacagaccggcttattctatcgcagcgccctgacacagtcgcaaagtgctaaacagcaaaagctgtcacagcctccccttgaacagactcagctgcaggtaaagaccttacagtgtttccagaccaagcaaaagcagacaatccacctgcaggcagatcagctgcagcacaaattgccccaaatgccccaactctctattcggcaccagaagctaacccctctccaacaggagcaagctcaaccaaagcctgacgtccagcatactcagcatcctatggtggccaaagatagacagttgcctaccctgatggcacagcccccacaaactgtcgtacaagtgctggctgttaagactacccaacagctgcccaaactgcagcaggcacctaatcagccaaagatttatgtgcagccgcaaactcctcagtcccagatgtcactacctgctagtagcgagaagcagacagcctcacaggtggaacagcctatcataacgcagggtagctcagtgacgaagatcacgttcgagggtcggcagcctcctacagtgaccaaaattacaggcggatcatcagtgccgaaactgacttcccctgtgacctcaatctctccgatccaggctagcgagaagacggccgtgagtgatatactaaagatgagcctgatggaggcccaaatagacactaacgttgagcacatgattgtggacccacctaaaaaggcactggccactagtatgttaacaggagaggccggttcgttgccaagcacacacatggtggtggccggaatggccaatagtaccccacagcagcaaaagtgccgcgagagttgctccagcccttctaccgtggggtcaagcctgaccactaggaagatcgatcctcccgctgtccctgcgaccggacagtttatgaggatccaaaacgttggacaaaaaaaagctgaggagagcccggctgaaatcattatacaagccattccacagtacgctattccgtgccacagctcgagcaatgtggtggtggagccttccggattattggagctaaacaacttcactagtcagcagctggatgatgaagagacagctatggaacaagatattgacagcagcacagaagacggtacagaacctagcccctctcagagttccgcagaacggagttag

SEQ ID NO: 203079 - DNA, 5508 bp, Artificial Sequence
  derived and/or modified sequence
gtcgccatcttgccccttcagaggcaccgcaaacaaacccaattcctggtgtcccctagtcttggcggaggagccttttagatgagccccgaaaggccgggcagggaggacaagctctttggggctaccaaacagaagcagcaatgcctgttgtgtggccaacccttctggatctcagcagggatgaatgcaaaagaattcttcgaaaattggaattggaggcatatgctggagttatcagtgcacttcgggcacagggggatctcaccaaggaaaagaaagatcttcttggagaactatcaaaagttcttagcatctcaacagaacgccaccgtgctgaagttcggagagcagtaaacgatgaacggttaacaacaattgcacataatatgtctggacctaatagctcttcagaatggtccattgaaggtcgtcgattggtaccactgatgccccggctcgttccccaaaccgcctttactgtaacagctaatgctgttgctaatgcagctatccagcataatgcatctcttccagtgcctgcagaaacaggaagcaaggaagtggtttgctattcctacacaagtaccacgtcaaccccaacctctacccctgttccaagtggcagcatagcaacggttaagtctccaagacctgccagtcctgcctccaatgtagttgtcttgccaagtggaagtactgtttatgtcaaaagtgtaagctgttcagatgaagatgaaaaacccagaaaacgaaggcgaacaaactcttccagctcctctcctgttgttctaaaggaagttccaaaggccgttgttccagtctcaaagacgatcactgtgcctgtgagtggtagtcccaagatgagcaacatcatgcagagcattgccaactccttaccaccccacatgtctcctgtaaaaataaccttcactaaaccatcaacacagacaacaaacacaacaacacagaaggttattatagtcaccacatcaccaagctcaaccttcgtgcccaacattctctccaaatcccataactatgcagcagtcactaagcttgtaccaacgtcagtcattgcttctacaacccagaagccaccagttgttataactgcttcacagtcctctctggtcagtaatagcagcagtggcagcagcagttctacaccatcacctattcctaatacagttgcagtaacagctgtggtgtcctctacaccatctgtggtcatgtcaacagtagcacaaggtgtatctacatcagcaatcaaaatggcatcaaccagacttccttcccccaaaagcttagtgagtgccccaactcagattcttgcacagttccctaaacaacatcaacagtctcctaagcagcagttatatcaagtgcaacagcagacacagcaacaagtggcccagccttctccagtatctcatcagcaacagcctcagcagtctcctttgccacctggtattaaacctaccatccaaatcaaacaggagtcaggtgttaaaatcatcacacaacaggttcaaccaagtaaaatcttacccaaaccagtgacagcaactctacccaccagtagcaattcccctattatggtggttagcagtaatggtgcaattatgacaactaaactggtaaccactcctactggcacacaagcaacctatacccggccaacagtgagcccatccattggtcggatggctgcaacccctggagctgcaacctatgtgaaaactacgagtggtagcatcattacagtagtacccaaatcattagctaccttggggggcaagataattagcagtaatatagtttctggaacgactaccaaaatcactacaatcccaatgacttccaagcccaacgtgattgttgtacaaaagactacaggaaaaggaacgaccattcaaggcctcccgggcaaaaatgttgtcacaacgttgctaaatgctggaggagaaaagactattcagacagtgccaacaggagcaaagccagctatccttactgctacaagacccatcaccaaaatgattgtaacgcagccaaaaggaataggttctacagttcaaccagcagctaaaatcatcccaacaaaaattgtttatgggcagcaagggaaaacgcaggttcttattaaacccaaaccagtgacttttcaagcgacagttgttagtgaacaaacaagacagctagtaacagaaacattacagcaagcatccagggtagcagaggctggtaattcatctattcaggaaggaaaagaagaaccacagaattatacagatagtagttcctcttctacagagtcctcccagagttcccaagattcccagcctgtagttcatgtaattgcttcccggcgtcaggattggtcagaacatgagattgcaatggagactagccctaccataatttatcaggatgtatccagtgaatcacaatcagctacttcaacaatcaaagctctgttagaactccaacagacaacagtaaaggaaaaattggaatctaaaccaagacaacccactattgacctgagtcaaatggcagtgcctattcagatgacccaggaaaagagacattctcctgagagtccatcaattgctgtggtagagtcagaactagtagctgaatacatcactactgaacgcactgatgaggggacagaggttgcttttccccttctagtcagccatcgctcccagccccaacagccttcccagccccagcggaccctgctccagcatgtggctcagtcacagaccgcaacacagacttcggtggtggtgaagtccatcccagcatcttcccctggagcaatcacccacattatgcagcaggcattaagcagtcacactgcttttaccaaacacagcgaggaacttggaactgaggagggcgaggttgaagagatggacactttagaccctcagacaggtctgttttaccgatctgccctgactcagtcacagtcagctaaacagcagaaacttagccagcccccgctggaacagactcagctgcaagtgaaaactctgcagtgcttccagactaaacagaagcagaccatccacctgcaggcagaccagctccagcacaaactcccgcaaatgccccagctttccatcaggcatcaaaaactcacccctctccagcaagaacaagcacagcccaagccagatgtacagcacacacagcatcccatggtggccaaagacaggcagcttcctaccttaatggcacagcccccgcaaactgtagtacaggtgcttgcagtgaaaaccacgcagcagctccctaaactgcagcaggctccgaaccaaccaaaaatctacgtgcaaccccaaaccccccagagccaaatgtcgctcccagcttcttcagagaaacagacggcaagccaggtggagcagccaattataacccaaggatcctctgttacaaagataacttttgaggggcgccagcctcccacagttacaaagataactggtggcagttctgtgcctaagctgacatcaccagttacaagcatatctcccattcaggcctctgagaagacagcagtgtctgacattttgaaaatgtctttgatggaagctcagattgatacaaatgtagaacatatgatagtggatcccccaaagaaggctcttgccactagcatgctcactggtgaagcaggatcattaccctccacccacatggtggtggcagggatggcgaattccactccccagcaacagaaatgtagagagtcctgttcgagtccatccactgttggctcttccctaacgacaaggaaaattgatccaccagcagtgcctgcgacaggccagttcatgcgtattcagaatgtaggccaaaagaaagctgaagagagtccagcagaaattatcatccaggctattcctcagtatgctattccttgtcactccagctccaatgtggtggtggagcccagtgggcttcttgagctaaacaacttcactagtcaacagctggatgatgaggagacagcaatggagcaggacatagacagtagcacggaggatggaactgaacccagcccttctcagagctctgctgaacggtcctagtgtttggacacaatagtgcactttaaaacctgcttggttaccaagtgtccagggaaacccttgtattttgatgactaaaaagagcactttgcccgtacttaggctgtggaccctaaaacagcagtgtttcaacaagatgttgctgcaggagcagctttttaaaacaagataaaactcacaggggaatgtacttttttaaaaaaaaatgaaaaagaaaaaaaaagctgcacatttacagtgacttaagacctggtcttctttctctgttggatcatggccggtgaaacagttttgtcttgcagtggaaagagacttcctgtgaatgtttctcaactggtttctactgagcaaaataccatctaaaaggagaatgtgaatagttgtattttgaaatgatgtgtcaggaaaagttttttaaaaacttgtatgtttttgcaaatccctggaagtgttgaattggttaaaattttacattttctcagttcataattagtttataaacacctagaataatactggcattaaagaatccttgttggatggtagaaatcagatccctaaccagtgggaggtactttttgggtggcttgtgcattcttatcagttgtgtgctaatttattgtattgttcctttgtgctctaagcagcacacttgccttctatttatttaagtgtaaacatttcaaagcaggccgtactccttctgacaaatttcttgtaaaccaggattgcctacgctttccactgtcgtcgtctccccactttccctcttcctttaagaaaacttactaaaaaatgtttcattgcgaagcagaggaaaagaaacgttttcagacctaaaggaaatgtttggtcatgttaagaaaacaaattattcattcatatgatgctttcttaacgttgaaattgcacattcacattggactgagactttgaaaataacttttacatacttttgtttaagcccctttgaaatgtataaaaagttcatttacagttctaaatgtaatgtttttaagccttctatctttttaggacacagtttgtttaagcaatatgttttggtcttgtgatcactgtctgtcacaagtagagtgaaaggggtaagggggtgggagggtaagagttttgacaagttgtggcaaaggaaactatacttttcatttttaaaaatgtaaatagaaaagtttttaacggttttatatagatttcactataaataagcattttaagactgacaaatgttgaactgtacatacatttatcagcataactgcccagtttttttggtgctgaagtactgtaagtagaattcatcaacggtctcctaatttttgcatctacatctggggggaaaaagctgtgatactatagttaataaattcccactagagtg

SEQ ID NO: 203080 - DNA, 5007 bp, Artificial Sequence
  derived and/or modified sequence
gtcgccatcttgccccttcagaggcaccgcaaacaaacccaattcctggtgtcccctagtcttggcggaggagccttttagatgagccccgaaaggccgggcagggaggacaagctctttggggctaccaaacagaagcagcaatgcctgttgtgtggccaacccttctggatctcagcagggatgaatgcaaaagaattcttcgaaaattggaattggaggcatatgctggagttatcagtgcacttcgggcacagggggatctcaccaaggaaaagaaagatcttcttggagaactatcaaaagttcttagcatctcaacagaacgccaccgtgctgaagttcggagagcagtaaacgatgaacggttaacaacaattgcacataatatgtctggacctaatagctcttcagaatggtccattgaaggtcgtcgattggtaccactgatgccccggctcgttccccaaaccgcctttactgtaacagctaatgctgttgctaatgcagctatccagcataatgcatctcttccagtgcctgcagaaacaggaagcaaggaagtggtttgctattcctacacaagtaccacgtcaaccccaacctctacccctgttccaagtggcagcatagcaacggttaagtctccaagacctgccagtcctgcctccaatgtagttgtcttgccaagtggaagtactgtttatgtcaaaagtgtaagctgttcagatgaagatgaaaaacccagaaaacgaaggcgaacaaactcttccagctcctctcctgttgttctaaaggaagttccaaaggccgttgttccagtctcaaagacgatcactgtgcctgtgagtggtagtcccaagatgagcaacatcatgcagagcattgccaactccttaccaccccacatgtctcctgtaaaaataaccttcactaaaccatcaacacagacaacaaacacaacaacacagaaggttattatagtcaccacatcaccaagctcaaccttcgtgcccaacattctctccaaatcccataactatgcagcagtcactaagcttgtaccaacgtcagtcattgcttctacaacccagaagccaccagttgttataactgcttcacagtcctctctggtcagtaatagcagcagtggcagcagcagttctacaccatcacctattcctaatacagttgcagtaacagctgtggtgtcctctacaccatctgtggtcatgtcaacagtagcacaaggtgtatctacatcagcaatcaaaatggcatcaaccagacttccttcccccaaaagcttagtgagtgccccaactcagattcttgcacagttccctaaacaacatcaacagtctcctaagcagcagttatatcaagtgcaacagcagacacagcaacaagtggcccagccttctccagtatctcatcagcaacagcctcagcagtctcctttgccacctggtattaaacctaccatccaaatcaaacaggagtcaggtgttaaaatcatcacacaacaggttcaaccaagtaaaatcttacccaaaccagtgacagcaactctacccaccagtagcaattcccctattatggtggttagcagtaatggtgcaattatgacaactaaactggtaaccactcctactggcacacaagcaacctatacccggccaacagtgagcccatccattggtcggatggctgcaacccctggagctgcaacctatgtgaaaactacgagtggtagcatcattacagtagtacccaaatcattagctaccttggggggcaagataattagcagtaatatagtttctggaacgactaccaaaatcactacaatcccaatgacttccaagcccaacgtgattgttgtacaaaagactacaggaaaaggaacgaccattcaaggcctcccgggcaaaaatgttgtcacaacgttgctaaatgctggaggagaaaagactattcagacagtgccaacaggagcaaagccagctatccttactgctacaagacccatcaccaaaatgattgtaacgcagccaaaaggaataggttctacagttcaaccagcagctaaaatcatcccaacaaaaattgtttatgggcagcaagggaaaacgcaggttcttattaaacccaaaccagtgacttttcaagcgacagttgttagtgaacaaacaagacagctagtaacagaaacattacagcaagcatccagggtagcagaggctggtaattcatctattcaggaaggaaaagaagaaccacagaattatacagatagtagttcctcttctacagagtcctcccagagttcccaagattcccagcctgtagttcatgtaattgcttcccggcgtcaggattggtcagaacatgagattgcaatggagactagccctaccataatttatcaggatgtatccagtgaatcacaatcagctacttcaacaatcaaagctctgttagaactccaacagacaacagtaaaggaaaaattggaatctaaaccaagacaacccactattgacctgagtcaaatggcagtgcctattcagatgacccaggaaaagagacattctcctgagagtccatcaattgctgtggtagagtcagaactagtagctgaatacatcactactgaacgcactgatgaggggacagaggttgcttttccccttctagtcagccatcgctcccagccccaacagccttcccagccccagcggaccctgctccagcatgtggctcagtcacagaccgcaacacagacttcggtggtggtgaagtccatcccagcatcttcccctggagcaatcacccacattatgcagcaggcattaagcagtcacactgcttttaccaaacacagcgaggaacttggaactgaggagggcgaggttgaagagatggacactttagaccctcagacaggtctgttttaccgatctgccctgactcagtcacagtcagctaaacagcagaaacttagccagcccccgctggaacagactcagctgcaagtgaaaactctgcagtgcttccagactaaacagaagcagaccatccacctgcaggcagaccagctccagcacaaactcccgcaaatgccccagctttccatcaggcatcaaaaactcacccctctccagcaagaacaagcacagcccaagccagatgtacagcacacacagcatcccatggtggccaaagacaggcagcttcctaccttaatggcacagcccccgcaaactgtagtacaggtgcttgcagtgaaaaccacgcagcagctccctaaactgcagcaggctccgaaccaaccaaaaatctacgtgcaaccccaaaccccccagagccaaatgtcgctcccagcttcttcagagaaacagacggcaagccaggctattcctcagtatgctattccttgtcactccagctccaatgtggtggtggagcccagtgggcttcttgagctaaacaacttcactagtcaacagctggatgatgaggagacagcaatggagcaggacatagacagtagcacggaggatggaactgaacccagcccttctcagagctctgctgaacggtcctagtgtttggacacaatagtgcactttaaaacctgcttggttaccaagtgtccagggaaacccttgtattttgatgactaaaaagagcactttgcccgtacttaggctgtggaccctaaaacagcagtgtttcaacaagatgttgctgcaggagcagctttttaaaacaagataaaactcacaggggaatgtacttttttaaaaaaaaatgaaaaagaaaaaaaaagctgcacatttacagtgacttaagacctggtcttctttctctgttggatcatggccggtgaaacagttttgtcttgcagtggaaagagacttcctgtgaatgtttctcaactggtttctactgagcaaaataccatctaaaaggagaatgtgaatagttgtattttgaaatgatgtgtcaggaaaagttttttaaaaacttgtatgtttttgcaaatccctggaagtgttgaattggttaaaattttacattttctcagttcataattagtttataaacacctagaataatactggcattaaagaatccttgttggatggtagaaatcagatccctaaccagtgggaggtactttttgggtggcttgtgcattcttatcagttgtgtgctaatttattgtattgttcctttgtgctctaagcagcacacttgccttctatttatttaagtgtaaacatttcaaagcaggccgtactccttctgacaaatttcttgtaaaccaggattgcctacgctttccactgtcgtcgtctccccactttccctcttcctttaagaaaacttactaaaaaatgtttcattgcgaagcagaggaaaagaaacgttttcagacctaaaggaaatgtttggtcatgttaagaaaacaaattattcattcatatgatgctttcttaacgttgaaattgcacattcacattggactgagactttgaaaataacttttacatacttttgtttaagcccctttgaaatgtataaaaagttcatttacagttctaaatgtaatgtttttaagccttctatctttttaggacacagtttgtttaagcaatatgttttggtcttgtgatcactgtctgtcacaagtagagtgaaaggggtaagggggtgggagggtaagagttttgacaagttgtggcaaaggaaactatacttttcatttttaaaaatgtaaatagaaaagtttttaacggttttatatagatttcactataaataagcattttaagactgacaaatgttgaactgtacatacatttatcagcataactgcccagtttttttggtgctgaagtactgtaagtagaattcatcaacggtctcctaatttttgcatctacatctggggggaaaaagctgtgatactatagttaataaattcccactagagtg

SEQ ID NO: 203081 - DNA, 6848 bp, Artificial Sequence
  derived and/or modified sequence
atgcctgttgtgtggccaacccttctggatctcagcagggatgaatgcaaaagaattcttcgaaaattggaattggaggcatatgctggagttatcagtgcacttcgggcacagggggatctcaccaaggaaaagaaagatcttcttggagaactatcaaaagttcttagcatctcaacagaacgccaccgtgctgaagttcggagagcagtaaacgatgaacggttaacaacaattgcacataatatgtctggacctaatagctcttcagaatggtccattgaaggtcgtcgattggtaccactgatgccccggctcgttccccaaaccgcctttactgtaacagctaatgctgttgctaatgcagctatccagcataatgcatctcttccagtgcctgcagaaacaggaagcaaggaagtggtttgctattcctacacaagtaccacgtcaaccccaacctctacccctgttccaagtggcagcatagcaacggttaagtctccaagacctgccagtcctgcctccaatgtagttgtcttgccaagtggaagtactgtttatgtcaaaagtgtaagctgttcagatgaagatgaaaaacccagaaaacgaaggcgaacaaactcttccagctcctctcctgttgttctaaaggaagttccaaaggccgttgttccagtctcaaagacgatcactgtgcctgtgagtggtagtcccaagatgagcaacatcatgcagagcattgccaactccttaccaccccacatgtctcctgtaaaaataaccttcactaaaccatcaacacagacaacaaacacaacaacacagaaggttattatagtcaccacatcaccaagctcaaccttcgtgcccaacattctctccaaatcccataactatgcagcagtcactaagcttgtaccaacgtcagtcattgcttctacaacccagaagccaccagttgttataactgcttcacagtcctctctggtcagtaatagcagcagtggcagcagcagttctacaccatcacctattcctaatacagttgcagtaacagctgtggtgtcctctacaccatctgtggtcatgtcaacagtagcacaaggtgtatctacatcagcaatcaaaatggcatcaaccagacttccttcccccaaaagcttagtgagtgccccaactcagattcttgcacagttccctaaacaacatcaacagtctcctaagcagcagttatatcaagtgcaacagcagacacagcaacaagtggcccagccttctccagtatctcatcagcaacagcctcagcagtctcctttgccacctggtattaaacctaccatccaaatcaaacaggagtcaggtgttaaaatcatcacacaacaggttcaaccaagtaaaatcttacccaaaccagtgacagcaactctacccaccagtagcaattcccctattatggtggttagcagtaatggtgcaattatgacaactaaactggtaaccactcctactggcacacaagcaacctatacccggccaacagtgagcccatccattggtcggatggctgcaacccctggagctgcaacctatgtgaaaactacgagtggtagcatcattacagtagtacccaaatcattagctaccttggggggcaagataattagcagtaatatagtttctggaacgactaccaaaatcactacaatcccaatgacttccaagcccaacgtgattgttgtacaaaagactacaggaaaaggaacgaccattcaaggcctcccgggcaaaaatgttgtcacaacgttgctaaatgctggaggagaaaagactattcagacagtgccaacaggagcaaagccagctatccttactgctacaagacccatcaccaaaatgattgtaacgcagccaaaaggaataggttctacagttcaaccagcagctaaaatcatcccaacaaaaattgtttatgggcagcaagggaaaacgcaggttcttattaaacccaaaccagtgacttttcaagcgacagttgttagtgaacaaacaagacagctagtaacagaaacattacagcaagcatccagggtagcagaggctggtaattcatctattcaggaaggaaaagaagaaccacagaattatacagatagtagttcctcttctacagagtcctcccagagttcccaagattcccagcctgtagttcatgtaattgcttcccggcgtcaggattggtcagaacatgagattgcaatggagactagccctaccataatttatcaggatgtatccagtgaatcacaatcagctacttcaacaatcaaagctctgttagaactccaacagacaacagtaaaggaaaaattggaatctaaaccaagacaacccactattgacctgagtcaaatggcagtgcctattcagatgacccaggaaaagagacattctcctgagagtccatcaattgctgtggtagagtcagaactagtagctgaatacatcactactgaacgcactgatgaggggacagaggttgcttttccccttctagtcagccatcgctcccagccccaacagccttcccagccccagcggaccctgctccagcatgtggctcagtcacagaccgcaacacagacttcggtggtggtgaagtccatcccagcatcttcccctggagcaatcacccacattatgcagcaggcattaagcagtcacactgcttttaccaaacacagcgaggaacttggaactgaggagggcgaggttgaagagatggacactttagaccctcagacaggtctgttttaccgatctgccctgactcagtcacagtcagctaaacagcagaaacttagccagcccccgctggaacagactcagctgcaagtgaaaactctgcagtgcttccagactaaacagaagcagaccatccacctgcaggcagaccagctccagcacaaactcccgcaaatgccccagctttccatcaggcatcaaaaactcacccctctccagcaagaacaagcacagcccaagccagatgtacagcacacacagcatcccatggtggccaaagacaggcagcttcctaccttaatggcacagcccccgcaaactgtagtacaggtgcttgcagtgaaaaccacgcagcagctccctaaactgcagcaggctccgaaccaaccaaaaatctacgtgcaaccccaaaccccccagagccaaatgtcgctcccagcttcttcagagaaacagacggcaagccaggtggagcagccaattataacccaaggatcctctgttacaaagataacttttgaggggcgccagcctcccacagttacaaagataactggtggcagttctgtgcctaagctgacatcaccagttacaagcatatctcccattcaggcctctgagaagacagcagtgtctgacattttgaaaatgtctttgatggaagctcagattgatacaaatgtagaacatatgatagtggatcccccaaagaaggctcttgccactagcatgctcactggtgaagcaggatcattaccctccacccacatggtggtggcagggatggcgaattccactccccagcaacagaaatgtagagagtcctgttcgagtccatccactgttggctcttccctaacgacaaggaaaattgatccaccagcagtgcctgcgacaggccagttcatgcgtattcagaatgtaggccaaaagaaagctgaagagagtccagcagaaattatcatccaggctattcctcagtatgctattccttgtcactccagctccaatgtggtggtggagcccagtgggcttcttgagctaaacaacttcactagtcaacagctggatgatgaggagacagcaatggagcaggacatagacagtagcacggaggatggaactgaacccagcccttctcagagctctgctgaacggtcctagtgtttggacacaatagtgcactttaaaacctgcttggttaccaagtgtccagggaaacccttgtattttgatgactaaaaagagcactttgcccgtacttaggctgtggaccctaaaacagcagtgtttcaacaagatgttgctgcaggagcagctttttaaaacaagataaaactcacaggggaatgtacttttttaaaaaaaaatgaaaaagaaaaaaaaagctgcacatttacagtgacttaagacctggtcttctttctctgttggatcatggccggtgaaacagttttgtcttgcagtggaaagagacttcctgtgaatgtttctcaactggtttctactgagcaaaataccatctaaaaggagaatgtgaatagttgtattttgaaatgatgtgtcaggaaaagttttttaaaaacttgtatgtttttgcaaatccctggaagtgttgaattggttaaaattttacattttctcagttcataattagtttataaacacctagaataatactggcattaaagaatccttgttggatggtagaaatcagatccctaaccagtgggaggtactttttgggtggcttgtgcattcttatcagttgtgtgctaatttattgtattgttcctttgtgctctaagcagcacacttgccttctatttatttaagtgtaaacatttcaaagcaggccgtactccttctgacaaatttcttgtaaaccaggattgcctacgctttccactgtcgtcgtctccccactttccctcttcctttaagaaaacttactaaaaaatgtttcattgcgaagcagaggaaaagaaacgttttcagacctaaaggaaatgtttggtcatgttaagaaaacaaattattcattcatatgatgctttcttaacgttgaaattgcacattcacattggactgagactttgaaaataacttttacatacttttgtttaagcccctttgaaatgtataaaaagttcatttacagttctaaatgtaatgtttttaagccttctatctttttaggacacagtttgtttaagcaatatgttttggtcttgtgatcactgtctgtcacaagtagagtgaaaggggtaagggggtgggagggtaagagttttgacaagttgtggcaaaggaaactatacttttcatttttaaaaatgtaaatagaaaagtttttaacggttttatatagatttcactataaataagcattttaagactgacaaatgttgaactgtacatacatttatcagcataactgcccagtttttttggtgctgaagtactgtaagtagaattcatcaacggtctcctaatttttgcatctacatctggggggaaaaagctgtgatactatagttaataaattcccactagagtgacactgaagatttaaacacaagcattcataagatgcgctgatctctggtggttgtcactagttctgctaggtgataatgatttacccatagatggagctgttggatattattttattgtacaaattcatgtttaaaaaactttgtgactgtttctagttaagtaattttttaacctttcttgggtcatagacttctttggtaaactatgaactctcaccaaaaagatacacatgcaacatgttaaatacatgttagactttgcatacaattttaggggctcatgggcctctaagcctatccatgtattccaggttaagccctctgttatgatcaatccattacttacagattaagtttttataaaataaagtatcttttaaatattcatggatcaagtaacaagagcaaacttgaataaagttatgttctacatattttggcagcatagcatacctgtgtcccttgagaatttagccttcatatgtttctgcaattggaatggcaaataaaagtgctatcatctacatttttttaaagaattacaaatattaagaaattatcaagtgaaatttaaaatttttcttttaaaggtgttaattccaaatagagcatgcattcatttatttattcaacaaatattaattgagcatcttctgtatgacaagtagtattctgtgcactggggataccatagtgaacaaacaggaaatcctatccttatgaagtttataaacagggcttcctgctcatgaaatggatacaaggaatgaagacaggagaaaataagaacaatacttaggtttttttataaagtggatagatgatgatgccatatatggattttcagacatccctttactgaaagtcttagcattatatctattagtattccacatttaagtacataatttaaaagtaatttaaagtcatctctttgaaggatattaacaaattacaatgcaaatgctacagaatttttagaatcctaacaactattaggcagtgataagaaaaatccatttggcttaaagtaaactttaataagtgcctagtattgcagatgcagtttatggtgaacttagaggattaaaaaccaaagggggcttcattgagatattcacatgccataaactctcccatttaaagtataccgtttaatggttttagtatatccacagagttgggcaagccattaccacaatcaatttgagaacattttcattaatcacaaaagaaatcctgaaatgaaaccaccaccaccatcgctccagccctgggtggccactcctctactttctgcctcttatggatgtgccataagaaatgtggacatttcatataaatgagattatataatatgtggtcttttgtgacttctttcacttagcgtattttcaaggttcatccgtgttgtagaatgtgtcagtactacatttctttttatggccattccattgtgtgaaatatatcacattttgttta

SEQ ID NO: 203082 - DNA, 3969 bp, Artificial Sequence
  derived and/or modified sequence
atgcccgtggtgtggcccaccctgctggacctgagcagagacgagtgcaagagaatcctgagaaagctggagctggaggcctacgccggcgtgatcagcgccctgagagcccagggcgacctgaccaaggagaagaaggacctgctgggcgagctgagcaaggtgctgagcatcagcaccgagagacacagagccgaggtgagaagagccgtgaacgacgagagactgaccaccatcgcccacaacatgagcggccccaacagcagcagcgagtggagcatcgagggcagaagactggtgcccctgatgcccagactggtgccccagaccgccttcaccgtgaccgccaacgccgtggccaacgccgccatccagcacaacgccagcctgcccgtgcccgccgagaccggcagcaaggaggtggtgtgctacagctacaccagcaccaccagcacccccaccagcacccccgtgcccagcggcagcatcgccaccgtgaagagccccagacccgccagccccgccagcaacgtggtggtgctgcccagcggcagcaccgtgtacgtgaagagcgtgagctgcagcgacgaggacgagaagcccagaaagagaagaagaaccaacagcagcagcagcagccccgtggtgctgaaggaggtgcccaaggccgtggtgcccgtgagcaagaccatcaccgtgcccgtgagcggcagccccaagatgagcaacatcatgcagagcatcgccaacagcctgcccccccacatgagccccgtgaagatcaccttcaccaagcccagcacccagaccaccaacaccaccacccagaaggtgatcatcgtgaccaccagccccagcagcaccttcgtgcccaacatcctgagcaagagccacaactacgccgccgtgaccaagctggtgcccaccagcgtgatcgccagcaccacccagaagccccccgtggtgatcaccgccagccagagcagcctggtgagcaacagcagcagcggcagcagcagcagcacccccagccccatccccaacaccgtggccgtgaccgccgtggtgagcagcacccccagcgtggtgatgagcaccgtggcccagggcgtgagcaccagcgccatcaagatggccagcaccagactgcccagccccaagagcctggtgagcgcccccacccagatcctggcccagttccccaagcagcaccagcagagccccaagcagcagctgtaccaggtgcagcagcagacccagcagcaggtggcccagcccagccccgtgagccaccagcagcagccccagcagagccccctgccccccggcatcaagcccaccatccagatcaagcaggagagcggcgtgaagatcatcacccagcaggtgcagcccagcaagatcctgcccaagcccgtgaccgccaccctgcccaccagcagcaacagccccatcatggtggtgagcagcaacggcgccatcatgaccaccaagctggtgaccacccccaccggcacccaggccacctacaccagacccaccgtgagccccagcatcggcagaatggccgccacccccggcgccgccacctacgtgaagaccaccagcggcagcatcatcaccgtggtgcccaagagcctggccaccctgggcggcaagatcatcagcagcaacatcgtgagcggcaccaccaccaagatcaccaccatccccatgaccagcaagcccaacgtgatcgtggtgcagaagaccaccggcaagggcaccaccatccagggcctgcccggcaagaacgtggtgaccaccctgctgaacgccggcggcgagaagaccatccagaccgtgcccaccggcgccaagcccgccatcctgaccgccaccagacccatcaccaagatgatcgtgacccagcccaagggcatcggcagcaccgtgcagcccgccgccaagatcatccccaccaagatcgtgtacggccagcagggcaagacccaggtgctgatcaagcccaagcccgtgaccttccaggccaccgtggtgagcgagcagaccagacagctggtgaccgagaccctgcagcaggccagcagagtggccgaggccggcaacagcagcatccaggagggcaaggaggagccccagaactacaccgacagcagcagcagcagcaccgagagcagccagagcagccaggacagccagcccgtggtgcacgtgatcgccagcagaagacaggactggagcgagcacgagatcgccatggagaccagccccaccatcatctaccaggacgtgagcagcgagagccagagcgccaccagcaccatcaaggccctgctggagctgcagcagaccaccgtgaaggagaagctggagagcaagcccagacagcccaccatcgacctgagccagatggccgtgcccatccagatgacccaggagaagagacacagccccgagagccccagcatcgccgtggtggagagcgagctggtggccgagtacatcaccaccgagagaaccgacgagggcaccgaggtggccttccccctgctggtgagccacagaagccagccccagcagcccagccagccccagagaaccctgctgcagcacgtggcccagagccagaccgccacccagaccagcgtggtggtgaagagcatccccgccagcagccccggcgccatcacccacatcatgcagcaggccctgagcagccacaccgccttcaccaagcacagcgaggagctgggcaccgaggagggcgaggtggaggagatggacaccctggacccccagaccggcctgttctacagaagcgccctgacccagagccagagcgccaagcagcagaagctgagccagccccccctggagcagacccagctgcaggtgaagaccctgcagtgcttccagaccaagcagaagcagaccatccacctgcaggccgaccagctgcagcacaagctgccccagatgccccagctgagcatcagacaccagaagctgacccccctgcagcaggagcaggcccagcccaagcccgacgtgcagcacacccagcaccccatggtggccaaggacagacagctgcccaccctgatggcccagcccccccagaccgtggtgcaggtgctggccgtgaagaccacccagcagctgcccaagctgcagcaggcccccaaccagcccaagatctacgtgcagccccagaccccccagagccagatgagcctgcccgccagcagcgagaagcagaccgccagccaggtggagcagcccatcatcacccagggcagcagcgtgaccaagatcaccttcgagggcagacagccccccaccgtgaccaagatcaccggcggcagcagcgtgcccaagctgaccagccccgtgaccagcatcagccccatccaggccagcgagaagaccgccgtgagcgacatcctgaagatgagcctgatggaggcccagatcgacaccaacgtggagcacatgatcgtggacccccccaagaaggccctggccaccagcatgctgaccggcgaggccggcagcctgcccagcacccacatggtggtggccggcatggccaacagcaccccccagcagcagaagtgcagagagagctgcagcagccccagcaccgtgggcagcagcctgaccaccagaaagatcgacccccccgccgtgcccgccaccggccagttcatgagaatccagaacgtgggccagaagaaggccgaggagagccccgccgagatcatcatccaggccatcccccagtacgccatcccctgccacagcagcagcaacgtggtggtggagcccagcggcctgctggagctgaacaacttcaccagccagcagctggacgacgaggagaccgccatggagcaggacatcgacagcagcaccgaggacggcaccgagcccagccccagccagagcagcgccgagagaagctag

SEQ ID NO: 203083 - DNA, 3468 bp, Artificial Sequence
  derived and/or modified sequence
atgcccgtggtgtggcccaccctgctggacctgagcagagacgagtgcaagagaatcctgagaaagctggagctggaggcctacgccggcgtgatcagcgccctgagagcccagggcgacctgaccaaggagaagaaggacctgctgggcgagctgagcaaggtgctgagcatcagcaccgagagacacagagccgaggtgagaagagccgtgaacgacgagagactgaccaccatcgcccacaacatgagcggccccaacagcagcagcgagtggagcatcgagggcagaagactggtgcccctgatgcccagactggtgccccagaccgccttcaccgtgaccgccaacgccgtggccaacgccgccatccagcacaacgccagcctgcccgtgcccgccgagaccggcagcaaggaggtggtgtgctacagctacaccagcaccaccagcacccccaccagcacccccgtgcccagcggcagcatcgccaccgtgaagagccccagacccgccagccccgccagcaacgtggtggtgctgcccagcggcagcaccgtgtacgtgaagagcgtgagctgcagcgacgaggacgagaagcccagaaagagaagaagaaccaacagcagcagcagcagccccgtggtgctgaaggaggtgcccaaggccgtggtgcccgtgagcaagaccatcaccgtgcccgtgagcggcagccccaagatgagcaacatcatgcagagcatcgccaacagcctgcccccccacatgagccccgtgaagatcaccttcaccaagcccagcacccagaccaccaacaccaccacccagaaggtgatcatcgtgaccaccagccccagcagcaccttcgtgcccaacatcctgagcaagagccacaactacgccgccgtgaccaagctggtgcccaccagcgtgatcgccagcaccacccagaagccccccgtggtgatcaccgccagccagagcagcctggtgagcaacagcagcagcggcagcagcagcagcacccccagccccatccccaacaccgtggccgtgaccgccgtggtgagcagcacccccagcgtggtgatgagcaccgtggcccagggcgtgagcaccagcgccatcaagatggccagcaccagactgcccagccccaagagcctggtgagcgcccccacccagatcctggcccagttccccaagcagcaccagcagagccccaagcagcagctgtaccaggtgcagcagcagacccagcagcaggtggcccagcccagccccgtgagccaccagcagcagccccagcagagccccctgccccccggcatcaagcccaccatccagatcaagcaggagagcggcgtgaagatcatcacccagcaggtgcagcccagcaagatcctgcccaagcccgtgaccgccaccctgcccaccagcagcaacagccccatcatggtggtgagcagcaacggcgccatcatgaccaccaagctggtgaccacccccaccggcacccaggccacctacaccagacccaccgtgagccccagcatcggcagaatggccgccacccccggcgccgccacctacgtgaagaccaccagcggcagcatcatcaccgtggtgcccaagagcctggccaccctgggcggcaagatcatcagcagcaacatcgtgagcggcaccaccaccaagatcaccaccatccccatgaccagcaagcccaacgtgatcgtggtgcagaagaccaccggcaagggcaccaccatccagggcctgcccggcaagaacgtggtgaccaccctgctgaacgccggcggcgagaagaccatccagaccgtgcccaccggcgccaagcccgccatcctgaccgccaccagacccatcaccaagatgatcgtgacccagcccaagggcatcggcagcaccgtgcagcccgccgccaagatcatccccaccaagatcgtgtacggccagcagggcaagacccaggtgctgatcaagcccaagcccgtgaccttccaggccaccgtggtgagcgagcagaccagacagctggtgaccgagaccctgcagcaggccagcagagtggccgaggccggcaacagcagcatccaggagggcaaggaggagccccagaactacaccgacagcagcagcagcagcaccgagagcagccagagcagccaggacagccagcccgtggtgcacgtgatcgccagcagaagacaggactggagcgagcacgagatcgccatggagaccagccccaccatcatctaccaggacgtgagcagcgagagccagagcgccaccagcaccatcaaggccctgctggagctgcagcagaccaccgtgaaggagaagctggagagcaagcccagacagcccaccatcgacctgagccagatggccgtgcccatccagatgacccaggagaagagacacagccccgagagccccagcatcgccgtggtggagagcgagctggtggccgagtacatcaccaccgagagaaccgacgagggcaccgaggtggccttccccctgctggtgagccacagaagccagccccagcagcccagccagccccagagaaccctgctgcagcacgtggcccagagccagaccgccacccagaccagcgtggtggtgaagagcatccccgccagcagccccggcgccatcacccacatcatgcagcaggccctgagcagccacaccgccttcaccaagcacagcgaggagctgggcaccgaggagggcgaggtggaggagatggacaccctggacccccagaccggcctgttctacagaagcgccctgacccagagccagagcgccaagcagcagaagctgagccagccccccctggagcagacccagctgcaggtgaagaccctgcagtgcttccagaccaagcagaagcagaccatccacctgcaggccgaccagctgcagcacaagctgccccagatgccccagctgagcatcagacaccagaagctgacccccctgcagcaggagcaggcccagcccaagcccgacgtgcagcacacccagcaccccatggtggccaaggacagacagctgcccaccctgatggcccagcccccccagaccgtggtgcaggtgctggccgtgaagaccacccagcagctgcccaagctgcagcaggcccccaaccagcccaagatctacgtgcagccccagaccccccagagccagatgagcctgcccgccagcagcgagaagcagaccgccagccaggccatcccccagtacgccatcccctgccacagcagcagcaacgtggtggtggagcccagcggcctgctggagctgaacaacttcaccagccagcagctggacgacgaggagaccgccatggagcaggacatcgacagcagcaccgaggacggcaccgagcccagccccagccagagcagcgccgagagaagctag

SEQ ID NO: 203084 - protein, 855 aa, Artificial Sequence
  derived and/or modified sequence
MVVMARLSRPERPDLVFEEEDLPYEEEIMRNQFSVKCWLRYIEFKQGAPKPRLNQLYERALKLLPCSYKLWYRYLKARRAQVKHRCVTDPAYEDVNNCHERAFVFMHKMPRLWLDYCQFLMDQGRVTHTRRTFDRALRALPITQHSRIWPLYLRFLRSHPLPETAVRGYRRFLKLSPESAEEYIEYLKSSDRLDEAAQRLATVVNDERFVSKAGKSNYQLWHELCDLISQNPDKVQSLNVDAIIRGGLTRFTDQLGKLWCSLADYYIRSGHFEKARDVYEEAIRTVMTVRDFTQVFDSYAQFEESMIAAKMETASELGREEEDDVDLELRLARFEQLISRRPLLLNSVLLRQNPHHVHEWHKRVALHQGRPREIINTYTEAVQTVDPFKATGKPHTLWVAFAKFYEDNGQLDDARVILEKATKVNFKQVDDLASVWCQCGELELRHENYDEALRLLRKATALPARRAEYFDGSEPVQNRVYKSLKVWSMLADLEESLGTFQSTKAVYDRILDLRIATPQIVINYAMFLEEHKYFEESFKAYERGISLFKWPNVSDIWSTYLTKFIARYGGRKLERARDLFEQALDGCPPKYAKTLYLLYAQLEEEWGLARHAMAVYERATRAVEPAQQYDMFNIYIKRAAEIYGVTHTRGIYQKAIEVLSDEHAREMCLRFADMECKLGEIDRARAIYSFCSQICDPRTTGAFWQTWKDFEVRHGNEDTIKEMLRIRRSVQATYNTQVNFMASQMLKVSGSATGTVSDLAPGQSGMDDMKLLEQRAEQLAAEAERDQPLRAQSKILFVRSDASREELAELAQQVNPEEIQLGEDEDEDEMDLEPNEVRLEQQSVPAAVFGSLKED

SEQ ID NO: 203085 - protein, 852 aa, Artificial Sequence [sequence omitted]

SEQ ID NO: 203086 - DNA, 2568 bp, Artificial Sequence
  derived and/or modified sequence
atggtggtgatggccagactgagcagacccgagagacccgacctggtgttcgaggaggaggacctgccctacgaggaggagatcatgagaaaccagttcagcgtgaagtgctggctgagatacatcgagttcaagcagggcgcccccaagcccagactgaaccagctgtacgagagagccctgaagctgctgccctgcagctacaagctgtggtacagatacctgaaggccagaagagcccaggtgaagcacagatgcgtgaccgaccccgcctacgaggacgtgaacaactgccacgagagagccttcgtgttcatgcacaagatgcccagactgtggctggactactgccagttcctgatggaccagggcagagtgacccacaccagaagaaccttcgacagagccctgagagccctgcccatcacccagcacagcagaatctggcccctgtacctgagattcctgagaagccaccccctgcccgagaccgccgtgagaggctacagaagattcctgaagctgagccccgagagcgccgaggagtacatcgagtacctgaagagcagcgacagactggacgaggccgcccagagactggccaccgtggtgaacgacgagagattcgtgagcaaggccggcaagagcaactaccagctgtggcacgagctgtgcgacctgatcagccagaaccccgacaaggtgcagagcctgaacgtggacgccatcatcagaggcggcctgaccagattcaccgaccagctgggcaagctgtggtgcagcctggccgactactacatcagaagcggccacttcgagaaggccagagacgtgtacgaggaggccatcagaaccgtgatgaccgtgagagacttcacccaggtgttcgacagctacgcccagttcgaggagagcatgatcgccgccaagatggagaccgccagcgagctgggcagagaggaggaggacgacgtggacctggagctgagactggccagattcgagcagctgatcagcagaagacccctgctgctgaacagcgtgctgctgagacagaacccccaccacgtgcacgagtggcacaagagagtggccctgcaccagggcagacccagagagatcatcaacacctacaccgaggccgtgcagaccgtggaccccttcaaggccaccggcaagccccacaccctgtgggtggccttcgccaagttctacgaggacaacggccagctggacgacgccagagtgatcctggagaaggccaccaaggtgaacttcaagcaggtggacgacctggccagcgtgtggtgccagtgcggcgagctggagctgagacacgagaactacgacgaggccctgagactgctgagaaaggccaccgccctgcccgccagaagagccgagtacttcgacggcagcgagcccgtgcagaacagagtgtacaagagcctgaaggtgtggagcatgctggccgacctggaggagagcctgggcaccttccagagcaccaaggccgtgtacgacagaatcctggacctgagaatcgccaccccccagatcgtgatcaactacgccatgttcctggaggagcacaagtacttcgaggagagcttcaaggcctacgagagaggcatcagcctgttcaagtggcccaacgtgagcgacatctggagcacctacctgaccaagttcatcgccagatacggcggcagaaagctggagagagccagagacctgttcgagcaggccctggacggctgcccccccaagtacgccaagaccctgtacctgctgtacgcccagctggaggaggagtggggcctggccagacacgccatggccgtgtacgagagagccaccagagccgtggagcccgcccagcagtacgacatgttcaacatctacatcaagagagccgccgagatctacggcgtgacccacaccagaggcatctaccagaaggccatcgaggtgctgagcgacgagcacgccagagagatgtgcctgagattcgccgacatggagtgcaagctgggcgagatcgacagagccagagccatctacagcttctgcagccagatctgcgaccccagaaccaccggcgccttctggcagacctggaaggacttcgaggtgagacacggcaacgaggacaccatcaaggagatgctgagaatcagaagaagcgtgcaggccacctacaacacccaggtgaacttcatggccagccagatgctgaaggtgagcggcagcgccaccggcaccgtgagcgacctggcccccggccagagcggcatggacgacatgaagctgctggagcagagagccgagcagctggccgccgaggccgagagagaccagcccctgagagcccagagcaagatcctgttcgtgagaagcgacgccagcagagaggagctggccgagctggcccagcaggtgaaccccgaggagatccagctgggcgaggacgaggacgaggacgagatggacctggagcccaacgaggtgagactggagcagcagagcgtgcccgccgccgtgttcggcagcctgaaggaggactag

SEQ ID NO: 203087 - DNA, 2559 bp, Artificial Sequence
  derived and/or modified sequence
atggccagactgagcagacccgagagacccgacctggtgttcgaggaggaggacctgccctacgaggaggagatcatgagaaaccagttcagcgtgaagtgctggctgagatacatcgagttcaagcagggcgcccccaagcccagactgaaccagctgtacgagagagccctgaagctgctgccctgcagctacaagctgtggtacagatacctgaaggccagaagagcccaggtgaagcacagatgcgtgaccgaccccgcctacgaggacgtgaacaactgccacgagagagccttcgtgttcatgcacaagatgcccagactgtggctggactactgccagttcctgatggaccagggcagagtgacccacaccagaagaaccttcgacagagccctgagagccctgcccatcacccagcacagcagaatctggcccctgtacctgagattcctgagaagccaccccctgcccgagaccgccgtgagaggctacagaagattcctgaagctgagccccgagagcgccgaggagtacatcgagtacctgaagagcagcgacagactggacgaggccgcccagagactggccaccgtggtgaacgacgagagattcgtgagcaaggccggcaagagcaactaccagctgtggcacgagctgtgcgacctgatcagccagaaccccgacaaggtgcagagcctgaacgtggacgccatcatcagaggcggcctgaccagattcaccgaccagctgggcaagctgtggtgcagcctggccgactactacatcagaagcggccacttcgagaaggccagagacgtgtacgaggaggccatcagaaccgtgatgaccgtgagagacttcacccaggtgttcgacagctacgcccagttcgaggagagcatgatcgccgccaagatggagaccgccagcgagctgggcagagaggaggaggacgacgtggacctggagctgagactggccagattcgagcagctgatcagcagaagacccctgctgctgaacagcgtgctgctgagacagaacccccaccacgtgcacgagtggcacaagagagtggccctgcaccagggcagacccagagagatcatcaacacctacaccgaggccgtgcagaccgtggaccccttcaaggccaccggcaagccccacaccctgtgggtggccttcgccaagttctacgaggacaacggccagctggacgacgccagagtgatcctggagaaggccaccaaggtgaacttcaagcaggtggacgacctggccagcgtgtggtgccagtgcggcgagctggagctgagacacgagaactacgacgaggccctgagactgctgagaaaggccaccgccctgcccgccagaagagccgagtacttcgacggcagcgagcccgtgcagaacagagtgtacaagagcctgaaggtgtggagcatgctggccgacctggaggagagcctgggcaccttccagagcaccaaggccgtgtacgacagaatcctggacctgagaatcgccaccccccagatcgtgatcaactacgccatgttcctggaggagcacaagtacttcgaggagagcttcaaggcctacgagagaggcatcagcctgttcaagtggcccaacgtgagcgacatctggagcacctacctgaccaagttcatcgccagatacggcggcagaaagctggagagagccagagacctgttcgagcaggccctggacggctgcccccccaagtacgccaagaccctgtacctgctgtacgcccagctggaggaggagtggggcctggccagacacgccatggccgtgtacgagagagccaccagagccgtggagcccgcccagcagtacgacatgttcaacatctacatcaagagagccgccgagatctacggcgtgacccacaccagaggcatctaccagaaggccatcgaggtgctgagcgacgagcacgccagagagatgtgcctgagattcgccgacatggagtgcaagctgggcgagatcgacagagccagagccatctacagcttctgcagccagatctgcgaccccagaaccaccggcgccttctggcagacctggaaggacttcgaggtgagacacggcaacgaggacaccatcaaggagatgctgagaatcagaagaagcgtgcaggccacctacaacacccaggtgaacttcatggccagccagatgctgaaggtgagcggcagcgccaccggcaccgtgagcgacctggcccccggccagagcggcatggacgacatgaagctgctggagcagagagccgagcagctggccgccgaggccgagagagaccagcccctgagagcccagagcaagatcctgttcgtgagaagcgacgccagcagagaggagctggccgagctggcccagcaggtgaaccccgaggagatccagctgggcgaggacgaggacgaggacgagatggacctggagcccaacgaggtgagactggagcagcagagcgtgcccgccgccgtgttcggcagcctgaaggaggactag

SEQ ID NO: 203088 - DNA, 2568 bp, Artificial Sequence
  derived and/or modified sequence
atggtagtgatggctcggctctcacggcctgagagaccagatctggtctttgaagaagaggaccttccctacgaagaagaaattatgcggaaccaattttcggtcaagtgctggctcaggtacattgagttcaaacagggggcgcccaaaccccgactgaatcaactgtatgaacgggctctaaaattacttccatgcagctataaattgtggtatcgttatctcaaagcaagaagagcccaagtgaaacacagatgcgtgacagatcctgcctatgaggatgtgaataattgtcatgagcgagcctttgtatttatgcacaaaatgccacgtctgtggctagactattgccagttcctaatggatcagggccgcgtgacccacacccggagaacttttgatcgcgccttgcgagccttgcctattacccagcactcccgtatctggcccttgtacctcagatttctgcgctctcatcccctcccggagactgctgtgcgaggataccgccgttttctgaaattgagcccggaaagtgcggaggagtacatcgagtatctcaaatccagcgaccggctcgatgaagccgcacaacgcctggccaccgtggttaatgacgagagatttgtctccaaggcagggaaatctaattatcaactgtggcacgaactgtgcgacctgatcagccagaaccctgacaaggtgcagtccctaaatgtcgatgctatcattcgggggggcctgactagatttactgatcaactggggaaattatggtgcagcctggcggactactacatacgctccggacacttcgaaaaggcccgtgacgtgtacgaagaggcaattaggacagtcatgactgttagagacttcactcaggtgttcgatagctatgcacagtttgaagagtctatgatcgccgccaaaatggagactgcgtctgagctgggcagggaggaggaggatgatgtggatttggagctcaggctggcccggttcgagcagctgatatcacggagaccccttttactaaactctgtactcctccggcaaaatccccaccatgttcatgagtggcataagcgtgtggcccttcatcaagggcgacctcgcgagatcatcaacacctataccgaggctgtgcagaccgtggatcccttcaaggctacagggaaaccccacactctctgggtggcattcgctaagttttatgaggacaacgggcagctcgatgatgccagagtgatccttgaaaaggccaccaaagttaactttaagcaagtcgacgatctcgcgtccgtttggtgccaatgcggtgaattagagctgcgccatgagaattacgatgaggctctgcgtttgctccgcaaggcaaccgcattgccagcacgtagggctgaatattttgatgggtctgagccagtgcagaatcgcgtgtacaagtccctgaaggtgtggagtatgttggcagaccttgaagaatcgctgggcacctttcaaagcactaaggccgtatatgatagaatcctggatctcagaatagctaccccacagatagtgatcaattatgccatgttcctggaagagcacaaatatttcgaggaaagctttaaggcctatgaacgtggcatctcgctgttcaagtggcccaacgtgtcagatatctggtccacctatctgactaagtttatagcccgttatggggggagaaagctcgagcgtgcgcgggacttgttcgagcaagccctggatggctgcccaccgaaatacgctaagacactctatctgctctatgcacagctggaagaagaatgggggttggctcgacatgccatggcagtgtacgaaagagccacccgggcggtggaaccagcacagcagtatgacatgtttaacatatacataaagcgggctgctgagatctacggggtgacacatacaaggggcatttaccaaaaggcgattgaagttctgtccgatgagcatgctagagaaatgtgtctgcgctttgccgatatggaatgtaagcttggcgagatcgacagggcgcgagccatttactcgttctgtagccagatttgcgatccccggactaccggagccttctggcaaacctggaaggatttcgaggtccgccacggcaacgaagataccatcaaagagatgcttcggatacgtagatccgtccaggccacatataatacccaggttaattttatggcttcacaaatgcttaaggtgtccggtagcgctaccggaacagtgtcagatcttgctcctggacaatctggaatggacgacatgaagctactggagcaacgggctgaacagctggccgctgaggctgagcgggatcagcctctcagagcacagtctaagatcttgtttgtccggagcgatgcatctagggaagaactagctgagctcgcacaacaggttaacccagaagagatccagctgggagaggacgaagatgaggacgagatggatcttgaaccaaatgaagttaggttggaacagcagtctgtgcccgccgcagttttcggcagtctgaaagaggactag

SEQ ID NO: 203089 - DNA, 2559 bp, Artificial Sequence
  derived and/or modified sequence
atggccaggctttcgcggccagaacgcccggacttggtcttcgaagaagaagacctaccctacgaagaggaaatcatgcgaaatcagttctcagtgaagtgttggctccgttatatagaatttaaacagggtgcccctaaacctcgcttaaaccaactgtatgagcgagccctcaaacttctgccatgttcctacaagctatggtataggtacctgaaagccaggcgcgctcaagtgaagcacagatgtgtgacagatcctgcttacgaggacgtgaataattgtcatgagcgcgcgttcgtatttatgcacaaaatgcctcgactgtggctcgactactgccagttcttgatggatcagggtcgtgtcacgcatacccggcggaccttcgatagagcacttcgggccctaccgatcacccaacatagtaggatttggccactgtatctgaggtttttgcgctcacaccccctcccggaaaccgcagtacgaggataccgcagatttctgaagttgtctcccgagagcgccgaggaatacatcgaatatttgaagagttccgatagactagacgaagccgcccagagactggccacggttgtaaatgacgagcgcttcgtgtcaaaagctgggaagagtaactaccagttgtggcatgaactttgtgatttgatctctcagaaccccgataaggtccagagcctgaacgtcgacgctatcattagaggcggactgacaagatttacggatcagctgggcaagctgtggtgctcactggcggactattacatacgaagcggccacttcgagaaagcccgggacgtttacgaggaggccattcggacagttatgacagtgcgtgattttacacaggtgttcgactcctacgcccagtttgaggaatctatgatcgctgctaaaatggagaccgcgtccgagctggggcgcgaggaggaggacgacgttgacctcgagctgcggttggcgagatttgaacaattgatctcaaggcgcccactgttgctgaattccgtgctgttgcggcaaaatccccaccacgtacatgagtggcacaagagggtagctctgcaccaaggccgtcccagggaaattatcaatacgtacaccgaagccgtgcagacagtggacccgtttaaggctactggcaaaccacacacactgtgggtggcctttgctaagttctatgaagataatgggcaacttgatgatgcgcgggtcatactcgagaaggccacaaaagtaaattttaaacaggtggatgacctggcatccgtgtggtgccagtgcggtgagctggagttgcgacacgaaaattacgacgaggccctacggctgctgaggaaggccaccgcgctgccagccagacgtgcagaatatttcgatgggagtgaaccggtccagaatcgcgtctacaagagtctgaaagtctggagtatgctggccgacctggaagagtcattaggaacatttcagtcgacaaaagctgtctacgaccgaatcctcgacctccggatcgctaccccacagattgtgattaactacgcgatgtttctggaggaacacaaatactttgaggaatctttcaaggcatatgagcggggtatctccctatttaaatggcccaatgtgtcagatatatggtcaacttacctgacgaagtttattgcgcggtatggaggcagaaaactcgaacgggccagggatctcttcgagcaggccctcgacggttgtcccccaaaatacgcgaagacgctttacctgctatatgcccaactcgaagaggaatggggcctagcacgacatgcaatggctgtctacgagagagcaacccgggctgtagaaccagcccagcaatacgatatgtttaacatctacataaagagagcagcagaaatctacggggtgacacatacacgaggcatttaccagaaagccatcgaggtgcttagtgacgaacacgctagggaaatgtgtttaaggtttgccgatatggaatgtaaactgggggaaatcgatcgcgcccgcgccatttactccttctgcagccagatatgtgacccaagaactactggcgccttctggcaaacttggaaagatttcgaggtgagacacggcaacgaggacactattaaggaaatgttaagaatccggagaagcgtacaggctacatacaacacccaagtgaacttcatggcttcacaaatgttgaaagtgtcgggttcagcaacagggaccgtgtccgacctagcgccagggcaaagcgggatggacgatatgaagctgctggagcaacgtgccgagcagctagctgcagaagccgagagggaccaacctctccgtgcccagtctaaaatcctttttgtgcgatccgacgcctccagggaagagcttgccgaactggcccaacaagtgaacccggaggagattcagctgggggaggatgaggacgaagacgagatggatctggagcccaacgaggtcagattggagcagcagtcggttccagccgccgtgttcggttccttgaaggaggactag

SEQ ID NO: 203090 - DNA, 2568 bp, Artificial Sequence
  derived and/or modified sequence
atggtggtgatggcccggctgagcaggcctgagaggccagacctggtgtttgaggaggaggacctgccctatgaggaggagatcatgaggaaccagttctctgtgaagtgctggctgcgctacatcgagttcaagcagggcgcccccaagccccggctgaaccagctgtatgagcgggccctgaagctgctgccctgcagctacaagctgtggtaccgctacctgaaggcccggcgggcccaggtgaagcaccgctgtgtgacagatcctgcctatgaagatgtgaacaactgccacgagcgggcctttgtgttcatgcacaagatgccccggctgtggctggactactgccagttcctgatggaccagggccgggtgacccacaccaggaggacctttgaccgggccctgcgggccctgcccatcacccagcacagccgcatctggcccctgtacctgcgcttcctgcggagccaccccctgcctgagacagctgtgcggggctaccgccgcttcctgaagctgagccctgagagcgctgaggagtacatcgagtacctgaagagcagtgaccggctggatgaggccgcccagaggctggccaccgtggtgaatgatgaaagatttgtgtccaaggccggcaagagcaactaccagctgtggcatgagctgtgtgacctgatcagccagaacccagacaaggtgcagagcctgaatgtggatgccatcatccggggcggcctgacccgcttcacagaccagctgggcaagctgtggtgcagcctggccgactactacatccgcagcggccactttgagaaggccagagatgtgtatgaggaggccatcagaacagtgatgacagtgcgggacttcacccaggtgtttgacagctatgcccagtttgaggagagcatgattgctgccaagatggagacagccagcgagctgggccgggaggaggaggatgatgtggacctggagctgcggctggccaggtttgagcagctgatcagccggcggcccctgctgctgaacagcgtgctgctgcggcagaacccccaccacgtgcatgagtggcacaagagggtggccctgcaccagggccggccccgggagatcatcaacacctacacagaagctgtgcagacagtggaccccttcaaggccaccgggaagccccacaccctgtgggtggcctttgccaagttctatgaggacaatggccagctggatgatgcccgggtcatcctggagaaggccaccaaggtgaacttcaagcaggtggatgacctggcctctgtgtggtgccagtgtggggagctggagctgcggcatgaaaattatgatgaggccctgcggctgctgaggaaggccacagccctgcctgccaggagagctgagtactttgatggcagcgagcctgtgcagaacagagtgtacaagagcctgaaggtgtggagcatgctggccgacctggaggagagcctgggcaccttccagagcaccaaggctgtgtatgaccgcatcctggacctgagaattgccaccccccagatcgtcatcaactatgccatgttcctggaggagcacaagtactttgaggagagcttcaaggcctatgagcggggcatcagcctcttcaagtggcccaacgtgtctgacatctggagcacctacctgaccaagttcatcgcccgctatggaggcaggaagctggagcgggcccgggacctgtttgagcaggccctggatggctgcccccccaagtatgccaagaccctgtacctgctgtatgcccagctggaggaggagtggggcctggcccggcatgccatggctgtgtatgaaagagccaccagggctgtggagcccgcccagcagtatgacatgttcaacatctacatcaagagagctgctgagatctatggagtgacccacacccggggcatctaccagaaggccatcgaggtgctgagtgatgaacatgcccgggagatgtgcctgcgctttgctgacatggagtgcaagctgggggagattgaccgggcccgggccatctacagcttctgcagccagatctgtgaccccaggaccaccggggccttctggcagacctggaaggactttgaggtgcgccacggcaatgaagacaccatcaaggagatgctgcgcatcagaagatctgtgcaggccacctacaacacccaggtgaacttcatggccagccagatgctgaaggtgtctggcagcgccactggaacagtgtctgacctggcccctggccagagcggcatggatgacatgaagctgctggagcagagagctgagcagctggccgctgaggccgagcgggaccagcccctgcgggcccagagcaagatcctgtttgtgcggagtgatgccagccgggaggagctggccgagctggcccagcaggtgaaccctgaggagatccagctgggagaagatgaagatgaagatgagatggacctggagcccaatgaggtgcggctggagcagcagagcgtgcctgctgctgtgtttggcagcctgaaggaggactag

SEQ ID NO: 203091 - DNA, 2559 bp, Artificial Sequence
  derived and/or modified sequence
atggcccggctgagcaggcctgagaggccagacctggtgtttgaggaggaggacctgccctatgaggaggagatcatgaggaaccagttctctgtgaagtgctggctgcgctacatcgagttcaagcagggcgcccccaagccccggctgaaccagctgtatgaaagagccctgaagctgctgccctgcagctacaagctgtggtaccgctacctgaaggcccggcgggcccaggtgaagcaccgctgtgtgacagatcctgcctatgaagatgtgaacaactgccacgagcgggcctttgtgttcatgcacaagatgccccggctgtggctggactactgccagttcctgatggaccagggccgggtgacccacaccaggaggacctttgaccgggccctgcgggccctgcccatcacccagcacagccgcatctggcccctgtacctgcgcttcctgcggagccaccccctgcctgagacagctgtgcggggctaccgccgcttcctgaagctgagccctgagagcgctgaggagtacatcgagtacctgaagagcagtgaccggctggatgaagctgcccagaggctggccaccgtggtgaatgatgaaagatttgtgtccaaggccggcaagagcaactaccagctgtggcatgagctgtgtgacctgatcagccagaacccagacaaggtgcagagcctgaatgtggatgccatcatccggggcggcctgacccgcttcacagaccagctgggcaagctgtggtgcagcctggccgactactacatccgcagcggccactttgagaaggccagagatgtgtatgaggaggccatcagaacagtgatgacagtgcgggacttcacccaggtgtttgacagctatgcccagtttgaggagagcatgattgctgccaagatggagacagccagcgagctgggccgggaggaggaggatgatgtggacctggagctgcggctggccaggtttgagcagctgatcagcagaagacccctgctgctgaacagcgtgctgctgcggcagaacccccaccacgtgcatgagtggcacaagagggtggccctgcaccagggccggccccgggagatcatcaacacctacacagaggccgtgcagacagtggaccccttcaaggccaccgggaagccccacaccctgtgggtggcctttgccaagttctatgaagataatggccagctggatgatgcccgggtcatcctggagaaggccaccaaggtgaacttcaagcaggtggatgacctggcctctgtgtggtgccagtgtggggagctggagctgcggcatgagaactatgatgaggccctgcggctgctgaggaaggccacagccctgcctgcccggcgggcagagtactttgatggcagcgagcctgtgcagaacagagtgtacaagagcctgaaggtgtggagcatgctggccgacctggaggagagcctgggcaccttccagagcaccaaggctgtgtatgaccgcatcctggacctgcgcatcgccaccccccagatcgtcatcaactatgccatgttcctggaggagcacaagtactttgaggagagcttcaaggcctatgaaagaggcatcagcctcttcaagtggcccaacgtgtctgacatctggagcacctacctgaccaagttcatcgcccgctatggaggcaggaagctggagcgggcccgggacctgtttgagcaggccctggatggctgcccccccaagtatgccaagaccctgtacctgctgtatgcccagctggaggaggagtggggcctggcccggcatgccatggctgtgtatgagcgggccaccagggctgtggagcccgcccagcagtatgacatgttcaacatctacatcaagagagctgctgagatctacggcgtgacccacacccggggcatctaccagaaggccatcgaggtgctgagtgatgagcacgcccgggagatgtgcctgcgctttgctgacatggagtgcaagctgggggagattgaccgggcccgggccatctacagcttctgcagccagatctgtgaccccaggaccactggagccttctggcagacctggaaggactttgaggtgagacatggaaatgaagacaccatcaaggagatgctgcgcatccgccgctctgtgcaggccacctacaacacccaggtgaacttcatggccagccagatgctgaaggtgtctggcagcgccaccggcaccgtgtctgacctggcccctggccagagcggcatggatgacatgaagctgctggagcagagagctgagcagctggccgctgaggccgagcgggaccagcccctgcgggcccagagcaagatcctgtttgtgcggagtgatgccagccgggaggagctggccgagctggcccagcaggtgaaccctgaggagatccagctgggggaggatgaagatgaagatgagatggacctggagcccaatgaggtgcggctggagcagcagagcgtgcctgctgctgtgtttggcagcctgaaggaggactag

SEQ ID NO: 203092 - DNA, 2568 bp, Artificial Sequence
  derived and/or modified sequence
atggtggtgatggcccggctgagccggcccgagcggcccgacctggtgtttgaggaggaggatctaccctatgaggaagaaatcatgaggaaccagtttagcgttaaatgctggctgaggtacatcgagttcaagcagggagctcccaaacctcggctgaatcagctttatgagcgggctctcaaactacttccatgcagctataagctctggtatcgatacttgaaggcgcgcagagctcaggtcaagcatagatgtgtcaccgacccggcatatgaggacgtcaacaactgccatgagcgcgcatttgtgtttatgcacaagatgccacggctgtggctcgattactgtcaattcttgatggatcagggacgcgtaacacacacgcgcaggacttttgacagagcactgagagccctgcctattacacagcactcaagaatctggccactgtatttgcggtttttaagaagccacccgctaccggaaacggctgttagaggatacagaaggttcctcaagctgtcccctgaatcggcagaggagtacattgagtacctgaagagcagcgatcgcctggatgaagccgcccagagacttgcaaccgtggtaaatgatgagagattcgtgagcaaagccggcaaaagtaattaccaactatggcacgaactttgtgacctgatctctcagaacccagataaggtacaatcattgaatgtagatgccattatccggggtgggctgacaaggtttaccgaccagctcggcaaactctggtgttcccttgctgactattacatccgcagcggacactttgaaaaggccagagatgtctatgaggaggcgatccgcacggttatgacagtgagagatttcacccaagtgttcgactcatacgcccaatttgaggaatccatgatcgccgcaaaaatggaaaccgccagcgaattaggaagagaggaagaggatgatgtggatctggagctaaggttggctcgcttcgagcagctgatatccaggcgacccctgcttctgaactcagtccttcttcggcaaaatcctcaccatgtgcacgagtggcacaagcgagtggcgttgcatcaaggacgcccgagggagattatcaacacatacaccgaagcagtgcaaacagtcgatccattcaaggccacaggaaagccgcatacattgtgggtagctttcgcaaagttctacgaagacaacggccaactggacgacgctcgcgtgattctcgagaaagctaccaaggtgaacttcaaacaggtggacgatctggcatctgtttggtgtcagtgcggggagcttgagttgagacacgagaattacgatgaagccctgagattgttaagaaaggccactgcacttcctgccagaagagctgagtatttcgacggctcagaaccggttcagaatcgggtgtacaagtccctgaaggtttggtctatgctggcggacctcgaagagtccctaggcacgttccagagtacaaaggcagtctacgaccgcattctggatcttaggattgcaacgccacagatcgttatcaactacgcaatgttcttggaggagcacaaatattttgaagagtcttttaaggcctacgaacgcggtatttcactgtttaaatggcctaacgtgtccgatatctggtccacatatctgactaaattcattgccaggtacggcggtcgcaaactggagcgcgctagggatctgtttgagcaggctcttgatggatgccctcccaagtatgccaagactttgtatctgctctatgctcagctcgaggaggaatggggcctggccagacacgcgatggctgtgtacgaaagagccacacgagctgtggagccagctcagcaatacgacatgttcaatatttacattaaaagagcagccgaaatctatggagtcacacacacccgggggatatatcagaaagctattgaagttctgtcagacgaacacgcccgcgagatgtgccttcggttcgccgatatggagtgcaagctcggagagatagacagggcgagagccatttattccttttgctcccagatttgcgacccccgaacaacaggcgcattttggcagacgtggaaggatttcgaagtccgccacggcaacgaggacaccattaaggaaatgctgcggatcaggcgttccgtccaggcgacatacaacactcaagtaaactttatggcctctcagatgcttaaggttagcgggtcagctacaggcacagtaagcgacttggctcctggacagtctgggatggatgacatgaaactgttagagcagagagctgagcagctggctgctgaagccgaaagagaccagcccctgagagcgcaatccaagatccttttcgtgagatctgacgccagcagggaagagctcgccgaactcgctcagcaggttaatcctgaagagattcaactgggtgaagatgaagacgaagatgagatggacctcgagccgaacgaagtgcgcctggaacagcagagcgttcccgcagccgtgttcgggtcactgaaggaggattag

SEQ ID NO: 203093 - DNA, 2559 bp, Artificial Sequence
  derived and/or modified sequence
atggcccggctgagccggcccgagcggcccgacctggtgttcgaggaagaagacctcccttacgaggaagagattatgaggaatcagttttctgttaaatgttggttgcgatacatcgagtttaagcagggcgctccaaagccccgcttaaaccagttatatgagagggctttgaagctgctaccttgctcctacaagctgtggtacaggtatctcaaagctagacgcgctcaggtaaaacaccgttgcgttacagaccctgcatatgaggacgtcaataattgtcacgagcgcgcctttgtgtttatgcacaagatgccccgcctttggcttgactactgccagtttctgatggaccaagggagagttactcacacgagacgaacattcgaccgtgcactgcgagctctgcctattacccagcacagtcgcatctggccattatacctgcgctttctcaggtcacacccattacccgagaccgccgtcagaggctaccgacgtttcctgaagttgagtcctgaaagtgctgaagagtacatagaatatctgaagagctccgacaggctggacgaagctgcccaacggctggccaccgtggtgaacgatgagcggttcgtctccaaggccggcaaatcaaactaccagctgtggcatgaattgtgcgatttgatatcccaaaaccctgacaaggtacagagcctaaacgtcgacgctataattcgagggggactgactagatttactgatcagctgggaaagctgtggtgctctttggccgactattacattcgcagcgggcactttgagaaagctcgggacgtgtacgaggaggccatcaggaccgtcatgacggtgcgagactttacccaggtgttcgacagctacgcccagttcgaggagtcaatgatcgctgcgaaaatggaaactgccagtgagttggggagagaggaagaagacgacgtggatctcgagctgaggctagcccgctttgaacagctcatctctcggcgtccattgctcctaaacagtgtgctactaaggcaaaatcctcatcatgtgcatgagtggcataaaagggttgcgctgcaccaggggagaccacgcgagatcattaatacatacacagaagcagtacagactgtggatccttttaaggcaactgggaaaccacacaccctgtgggtcgcttttgctaagttctatgaggacaatggtcagttagacgatgctagagtcattctagaaaaggcgaccaaggtgaattttaaacaggtggatgatctagccagtgtttggtgccaatgcggggagctggagctgaggcatgagaattacgatgaggctctgaggctgctgcggaaggccaccgcactacccgcccgacgtgccgagtacttcgatggaagcgagcccgttcagaaccgggtctacaagagcttgaaggtgtggtctatgctcgcggacttggaagaatccttgggcacgttccagagcactaaggcagtgtacgaccggatcttagatttgcggatcgccactcctcagattgtgatcaattatgctatgttcttggaggaacataagtattttgaagaatcattcaaggcatacgaaaggggtattagtctgttcaaatggccaaacgtctcggatatatggtccacttacttgacaaagtttatcgcccgctacggtggaagaaagctggaaagggcccgggacctgtttgaacaggcccttgacgggtgcccacctaaatatgctaaaactctgtacctgctgtacgcacagcttgaagaggaatggggcctagctcgtcacgcaatggcggtgtatgagagagccaccagggccgtggaacctgcacagcagtacgacatgttcaatatctacataaagcgggccgctgaaatctatggcgtgacacacaccaggggaatctatcagaaggctattgaggtgttgagcgacgaacatgcccgcgaaatgtgtctgcggttcgcagatatggagtgtaagctgggtgaaattgacagagccagagcgatctactccttctgcagccagatatgtgaccctagaactaccggggcattctggcagacttggaaagactttgaggttagacacggcaacgaagacacaattaaagagatgctgcgtattcggaggagcgtccaggccacgtacaacacacaagtcaacttcatggcatcacaaatgctgaaagtcagcggctccgcaactgggacagtatctgacttggccccaggccagtccgggatggatgatatgaagctgctggaacaacgggccgaacagcttgcagcagaagccgagagggaccagccgctgagagcccaaagcaaaatactattcgtgaggagtgatgcctcgcgcgaggagctcgccgagctcgcccagcaggtgaacccggaggagattcaactgggcgaagatgaggatgaggatgaaatggacttagagcccaatgaagtgcggttggagcagcaaagtgtgcccgctgcagtcttcggttcactgaaggaagactag

SEQ ID NO: 203094 - DNA, 2568 bp, Artificial Sequence
  derived and/or modified sequence
atggtggtcatggctcgcttatctcgccctgagaggccagacttggtcttcgaggaagaggacctcccctacgaggaggagataatgaggaaccaattcagtgtgaagtgctggttgcgatacattgaatttaaacagggggcacctaagccacgactgaaccagctgtacgagagggccctgaagctgctgccttgcagctataagctatggtataggtatttgaaagcacgacgggctcaagtgaaacaccgatgtgtcacagaccccgcttacgaagacgtaaacaattgccatgaacgggcatttgtgttcatgcataagatgcccaggctttggctggattactgtcagttcctaatggaccagggtcgggtcacccacacaagaagaacattcgacagggccctcagagcactgcctattactcagcattcacgcatttggcccctgtacttacggtttctgcgttcccaccccctgccggaaaccgccgtgaggggctataggcgcttcttgaaactgagccctgaatcagcagaggagtacatagagtatctgaaatctagcgacagactcgacgaggctgcccagcggttggctacagttgtgaatgacgagcgctttgtgtcaaaggccggaaaatctaactatcagctatggcacgagttatgcgatctgattagccagaacccggacaaggtgcagtcattgaacgtggacgctattatcagaggaggactgaccaggttcaccgatcaattagggaagctgtggtgtagtctcgcagactactacatccgtagcgggcacttcgagaaagccagagatgtgtacgaggaggcgatccggactgttatgacagtacgggactttactcaggtttttgactcttacgcccagttcgaagaatctatgatagccgcaaagatggagactgcttcggagctgggtagagaggaggaggatgacgtggacttagagttaagactggcacggtttgaacagcttatctctagacggcctcttctgctgaacagtgtgctcttgcgccagaacccacatcatgtgcatgagtggcacaagcgtgttgctctgcatcagggcagaccacgtgagattattaatacctacactgaggccgtacagaccgtcgacccctttaaagctaccggcaaaccgcataccttgtgggtggctttcgccaaattttatgaggacaacgggcagttggatgacgccagggtgattctggagaaagccacaaaagttaatttcaaacaggttgatgatcttgcctccgtgtggtgccaatgcggcgaactggagctcagacatgagaattacgacgaagccctgcgcctgttgcggaaggccacggcgctgccagcaagaagggccgagtacttcgatggcagcgaaccggtgcagaaccgcgtctacaaatcactcaaggtatggtccatgctcgctgacttagaagaaagcctgggtacatttcagtctacaaaggcagtttatgatcggattctggatttgcgcatcgcgacaccccagatcgttatcaattacgctatgtttcttgaagagcacaagtatttcgaggaaagctttaaggcttatgaacgcggtatcagtctgtttaagtggcctaatgttagcgacatttggtctacttacctcacgaaatttatagctcgctacggaggtcggaagttggagcgcgcacgggacctgtttgaacaagcccttgatggttgtccccctaagtatgccaaaacactgtacctcctttacgctcagctggaggaggagtggggcctagcccgacacgccatggccgtctacgagcgcgcaacccgtgcagtggagcctgcccaacagtacgacatgtttaacatttatattaagagggctgcggaaatatatggcgtgacccatacacgtgggatctatcagaaagctattgaagttttatccgacgagcacgctagagagatgtgcctaagatttgccgacatggagtgtaaactcggtgagattgatagagctagagccatttatagcttctgtagccagatctgtgatcccaggaccacgggtgccttttggcaaacttggaaggatttcgaggtgcgccatggaaatgaggataccataaaagaaatgcttcgcattcggagatcagttcaagctacatataacactcaggtaaatttcatggcaagccagatgctgaaagtaagcggatcagccacgggcaccgtaagcgaccttgcacctggccagtccggcatggatgacatgaagcttttggaacagagggccgagcagctggctgcggaggccgaacgcgaccagcctctgcgggctcagagcaagattctgtttgtgcgcagcgacgctagtagggaggaactggccgagctggcgcagcaggttaatcctgaggagatccagctgggcgaggacgaagacgaagatgagatggacctggaacctaacgaggtgcgtttagagcaacagagcgttcccgctgcagtcttcggcagcctgaaggaggactag

SEQ ID NO: 203095 - DNA, 2559 bp, Artificial Sequence
  derived and/or modified sequence
atggcgaggcttagtagacccgagcgtcctgaccttgtgtttgaggaggaggacctgccctacgaggaggagataatgagaaaccaattcagcgttaagtgttggttgcgctatatagagttcaagcagggagcacctaagccgaggttaaaccagttatatgaacgggcactcaaactgctgccctgctcgtataagctctggtaccggtacctgaaggcaaggagagctcaagtaaagcacaggtgtgtcacggatccggcttacgaggatgtgaataactgtcacgagagggcgtttgtgtttatgcataaaatgcccagactgtggcttgactattgtcaattcctgatggatcagggcagagtcacccacactaggagaacttttgatagggcattgcgggcactgcccataacccagcattcccgtatctggccactatatcttagattcctgcgctctcacccactccccgagacggctgttagagggtatagacgcttcctcaaactgagcccagaatctgccgaagagtatatagaatacctgaaatctagtgaccggttggatgaggcagcacagaggctggccacggttgtcaatgacgaaaggttcgtatccaaggccggaaaaagtaactatcagctgtggcacgagctgtgtgatctaatctctcagaatccagacaaggttcaatctctgaatgtcgatgcgattatcagagggggactcacccgatttaccgaccaattagggaaactgtggtgttccctggcggactattacattcgatctggacatttcgagaaggccagggacgtatatgaagaggcaatcagaacagtcatgacggttcgggatttcacacaggtgttcgactcgtacgctcagtttgaagaatctatgatcgccgctaagatggagaccgcatcggagttgggtcgtgaagaagaggacgatgtcgatctggagctcagactcgctagatttgagcaattgatctcacgcaggcccttgttgttgaattctgtcttgctgcggcaaaatccacatcatgtgcacgaatggcataaaagagttgctttacaccaggggcgtcccagagagattattaatacatacaccgaagctgtgcagactgtggatcctttcaaggcaactgggaagccacatactttgtgggtggccttcgccaaattttacgaagataacgggcagctagatgacgcgagagtgattttagaaaaagctacaaaggttaacttcaagcaggtggatgacttggcatcagtgtggtgccagtgtggagagctcgaactgcgtcacgagaattacgatgaggctctacgcctgcttcggaaggcaacagctctgcccgctagaagggccgaatacttcgacggtagtgagcctgtgcagaaccgggtctacaagtctctgaaggtatggtcgatgctggccgacctggaggaatcactgggcacttttcagagtaccaaagccgtttacgaccgaatcctggacctgagaatagcgaccccccagatagtgattaattatgccatgttcctggaagaacacaaatacttcgaggagtcatttaaggcgtacgagaggggcatttcgctgttcaaatggcccaatgtgtctgacatctggagcacgtatttaaccaagtttatcgctcggtatgggggtcgcaagctcgagcgcgcacgggatctgttcgaacaagcgctggacggttgcccacctaaatacgctaagacactgtatctgttgtatgcccagctggaagaggaatggggcctggcgcgtcacgccatggctgtgtacgagagggcaacgcgggcagttgaaccagcgcaacaatacgatatgttcaacatatacattaaaagagcagccgagatttacggggtcacgcacacaagaggtatctaccagaaagccattgaggtgctgagtgacgaacatgctagggaaatgtgtctgaggtttgctgacatggagtgtaagttaggggaaattgatcgcgcacgggctatttacagcttctgttcacagatctgtgacccccgtaccaccggcgcattctggcaaacctggaaggacttcgaggtccgtcatgggaacgaagacacaatcaaggaaatgctgcgcatccgccgaagtgtacaggcgacttacaatacacaagtaaattttatggcaagtcagatgctgaaggtgtcaggttccgccacaggtactgtgagcgacctagcacctgggcagtccggaatggacgatatgaagcttcttgagcagagagccgagcagctcgccgcagaggccgagagggatcagccactgagagcacagtcaaaaattctgttcgttcgcagcgatgctagccgggaggaactagccgaactggcacagcaagtgaaccccgaagaaatccagctcggcgaagatgaagatgaggacgagatggacctggagcccaatgaggtgaggctggagcaacagtccgttccggcagcagtgtttggcagcctgaaagaggactag

SEQ ID NO: 203096 - DNA, 2654 bp, Artificial Sequence
  derived and/or modified sequence
tctcctgtacctgggcatccagaaaaatggtggtgatggcgcgactctcgcggcccgagcggccggaccttgtcttcgaggaagaggacctcccctatgaggaggaaatcatgcggaaccaattctctgtcaaatgctggcttcgctacatcgagttcaaacagggcgccccgaagcccaggctcaatcagctatacgagcgggcactcaagctgctgccctgcagctacaaactctggtaccgatacctgaaggcgcgtcgggcacaggtgaagcatcgctgtgtgaccgaccctgcctatgaagatgtcaacaactgtcatgagagggcctttgtgttcatgcacaagatgcctcgtctgtggctagattactgccagttcctcatggaccaggggcgcgtcacacacacccgccgcaccttcgaccgtgccctccgggcactgcccatcacgcagcactctcgaatttggcccctgtatctgcgcttcctgcgctcacacccactgcctgagacagctgtgcgaggctatcggcgcttcctcaagctgagtcctgagagtgcagaggagtacattgagtacctcaagtcaagtgaccggctggatgaggccgcccagcgcctggccaccgtggtgaacgacgagcgtttcgtgtctaaggccggcaagtccaactaccagctgtggcacgagctgtgcgacctcatctcccagaatccggacaaggtacagtccctcaatgtggacgccatcatccgcgggggcctcacccgcttcaccgaccagctgggcaagctctggtgttctctcgccgactactacatccgcagcggccatttcgagaaggctcgggacgtgtacgaggaggccatccggacagtgatgaccgtgcgggacttcacacaggtgtttgacagctacgcccagttcgaggagagcatgatcgctgcaaagatggagaccgcctcggagctggggcgcgaggaggaggatgatgtggacctggagctgcgcctggcccgcttcgagcagctcatcagccggcggcccctgctcctcaacagcgtcttgctgcgccaaaacccacaccacgtgcacgagtggcacaagcgtgtcgccctgcaccagggccgcccccgggagatcatcaacacctacacagaggctgtgcagacggtggaccccttcaaggccacaggcaagccccacactctgtgggtggcgtttgccaagttttatgaggacaacggacagctggacgatgcccgtgtcatcctggagaaggccaccaaggtgaacttcaagcaggtggatgacctggcaagcgtgtggtgtcagtgcggagagctggagctccgacacgagaactacgatgaggccttgcggctgctgcgaaaggccacggcgctgcctgcccgccgggccgagtactttgatggttcagagcccgtgcagaaccgcgtgtacaagtcactgaaggtctggtccatgctcgccgacctggaggagagcctcggcaccttccagtccaccaaggccgtgtacgaccgcatcctggacctgcgtatcgcaacaccccagatcgtcatcaactatgccatgttcctggaggagcacaagtacttcgaggagagcttcaaggcgtacgagcgcggcatctcgctgttcaagtggcccaacgtgtccgacatctggagcacctacctgaccaaattcattgcccgctatgggggccgcaagctggagcgggcacgggacctgtttgaacaggctctggacggctgccccccaaaatatgccaagaccttgtacctgctgtacgcacagctggaggaggagtggggcctggcccggcatgccatggccgtgtacgagcgtgccaccagggccgtggagcccgcccagcagtatgacatgttcaacatctacatcaagcgggcggccgagatctatggggtcacccacacccgcggcatctaccagaaggccattgaggtgctgtcggacgagcacgcgcgtgagatgtgcctgcggtttgcagacatggagtgcaagctcggggagattgaccgcgcccgggccatctacagcttctgctcccagatctgtgacccccggacgaccggcgcgttctggcagacgtggaaggactttgaggtccggcatggcaatgaggacaccatcaaggaaatgctgcgtatccggcgcagcgtgcaggccacgtacaacacgcaggtcaacttcatggcctcgcagatgctcaaggtctcgggcagtgccacgggcaccgtgtctgacctggcccctgggcagagtggcatggacgacatgaagctgctggaacagcgggcagagcagctggcggctgaggcggagcgtgaccagcccttgcgcgcccagagcaagatcctgttcgtgaggagtgacgcctcccgggaggagctggcagagctggcacagcaggtcaaccccgaggagatccagctgggcgaggacgaggacgaggacgagatggacctggagcccaacgaggttcggctggagcagcagagcgtgccagccgcagtgtttgggagcctgaaggaagactgacccgtccctcccccatcccccctccccaccccctccccaatacagctacgtttgtacatc

SEQ ID NO: 203097 - DNA, 2661 bp, Artificial Sequence
  derived and/or modified sequence
agcgcgcgactctctcctgtacctgggcatccagaaaaatggtggtgatggcgcgactctcgcggcccgagcggccggaccttgtcttcgaggaagaggacctcccctatgaggaggaaatcatgcggaaccaattctctgtcaaatgctggcttcgctacatcgagttcaaacagggcgccccgaagcccaggctcaatcagctatacgagcgggcactcaagctgctgccctgcagctacaaactctggtaccgatacctgaaggcgcgtcgggcacaggtgaagcatcgctgtgtgaccgaccctgcctatgaagatgtcaacaactgtcatgagagggcctttgtgttcatgcacaagatgcctcgtctgtggctagattactgccagttcctcatggaccaggggcgcgtcacacacacccgccgcaccttcgaccgtgccctccgggcactgcccatcacgcagcactctcgaatttggcccctgtatctgcgcttcctgcgctcacacccactgcctgagacagctgtgcgaggctatcggcgcttcctcaagctgagtcctgagagtgcagaggagtacattgagtacctcaagtcaagtgaccggctggatgaggccgcccagcgcctggccaccgtggtgaacgacgagcgtttcgtgtctaaggccggcaagtccaactaccagctgtggcacgagctgtgcgacctcatctcccagaatccggacaaggtacagtccctcaatgtggacgccatcatccgcgggggcctcacccgcttcaccgaccagctgggcaagctctggtgttctctcgccgactactacatccgcagcggccatttcgagaaggctcgggacgtgtacgaggaggccatccggacagtgatgaccgtgcgggacttcacacaggtgtttgacagctacgcccagttcgaggagagcatgatcgctgcaaagatggagaccgcctcggagctggggcgcgaggaggaggatgatgtggacctggagctgcgcctggcccgcttcgagcagctcatcagccggcggcccctgctcctcaacagcgtcttgctgcgccaaaacccacaccacgtgcacgagtggcacaagcgtgtcgccctgcaccagggccgcccccgggagatcatcaacacctacacagaggctgtgcagacggtggaccccttcaaggccacaggcaagccccacactctgtgggtggcgtttgccaagttttatgaggacaacggacagctggacgatgcccgtgtcatcctggagaaggccaccaaggtgaacttcaagcaggtggatgacctggcaagcgtgtggtgtcagtgcggagagctggagctccgacacgagaactacgatgaggccttgcggctgctgcgaaaggccacggcgctgcctgcccgccgggccgagtactttgatggttcagagcccgtgcagaaccgcgtgtacaagtcactgaaggtctggtccatgctcgccgacctggaggagagcctcggcaccttccagtccaccaaggccgtgtacgaccgcatcctggacctgcgtatcgcaacaccccagatcgtcatcaactatgccatgttcctggaggagcacaagtacttcgaggagagcttcaaggcgtacgagcgcggcatctcgctgttcaagtggcccaacgtgtccgacatctggagcacctacctgaccaaattcattgcccgctatgggggccgcaagctggagcgggcacgggacctgtttgaacaggctctggacggctgccccccaaaatatgccaagaccttgtacctgctgtacgcacagctggaggaggagtggggcctggcccggcatgccatggccgtgtacgagcgtgccaccagggccgtggagcccgcccagcagtatgacatgttcaacatctacatcaagcgggcggccgagatctatggggtcacccacacccgcggcatctaccagaaggccattgaggtgctgtcggacgagcacgcgcgtgagatgtgcctgcggtttgcagacatggagtgcaagctcggggagattgaccgcgcccgggccatctacagcttctgctcccagatctgtgacccccggacgaccggcgcgttctggcagacgtggaaggactttgaggtccggcatggcaatgaggacaccatcaaggaaatgctgcgtatccggcgcagcgtgcaggccacgtacaacacgcaggtcaacttcatggcctcgcagatgctcaaggtctcgggcagtgccacgggcaccgtgtctgacctggcccctgggcagagtggcatggacgacatgaagctgctggaacagcgggcagagcagctggcggctgaggcggagcgtgaccagcccttgcgcgcccagagcaagatcctgttcgtgaggagtgacgcctcccgggaggagctggcagagctggcacagcaggtcaaccccgaggagatccagctgggcgaggacgaggacgaggacgagatggacctggagcccaacgaggttcggctggagcagcagagcgtgccagccgcagtgtttgggagcctgaaggaagactgacccgtccctcccccatcccccctccccaccccctccccaatacagctacgtttgt

SEQ ID NO: 203098 - protein, 433 aa, Artificial Sequence
  derived and/or modified sequence
MRAEGLGGLERFCSPGKGRGLRALQPFQVGDLLFSCPAYAYVLTVNERGNHCEYCFTRKEGLSKCGRCKQAFYCNVECQKEDWPMHKLECSPMVVFGENWNPSETVRLTARILAKQKIHPERTPSEKLLAVKEFESHLDKLDNEKKDLIQSDIAALHHFYSKHLGFPDNDSLVVLFAQVNCNGFTIEDEELSHLGSAIFPDVALMNHSCCPNVIVTYKGTLAEVRAVQEIKPGEEVFTSYIDLLYPTEDRNDRLRDSYFFTCECQECTTKDKDKAKVEIRKLSDPPKAEAIRDMVRYARNVIEEFRRAKHYKSPSELLEICELSQEKMSSVFEDSNVYMLHMMYQAMGVCLYMQDWEGALQYGQKIIKPYSKHYPLYSLNVASMWLKLGRLYMGLEHKAAGEKALKKAIAIMEVAHGKDHPYISEIKQEIESH

SEQ ID NO: 203099 - protein, 272 aa, Artificial Sequence
  derived and/or modified sequence
MRAEGLGGLERFCSPGKGRGLRALQPFQVGDLLFSCPAYAYVLTVNERGNHCEYCFTRKEGLSKCGRCKQAFYCNVECQKEDWPMHKLECSPMVVFGENWNPSETVRLTARILAKQKIHPERTPSEKLLAVKEFESHLDKLDNEKKDLIQSDIAALHHFYSKHLGFPDNDSLVVLFAQVNCNGFTIEDEELSHLGSAIFPDVALMNHSCCPNVIVTYKGTLAEVRAVQEIKPGEEVFTSYIDLLYPTEDRNDRLRDSYFFTCECQECTTKDK

SEQ ID NO: 203100 - DNA, 1302 bp, Artificial Sequence
  derived and/or modified sequence
atgagggcagagggccttgggggccttgagcgtttctgcagcccaggaaagggccgtggactgagggcgctccagccttttcaggtcggggacctgctgttctcttgtccagcatacgcctacgtgcttacagtcaacgagcgggggaatcactgtgaatattgctttacacggaaagaaggcttatctaaatgtgggcgatgtaaacaagccttttactgcaacgtcgagtgtcagaaggaagactggcccatgcataagctggagtgcagtccgatggtggtgtttggggagaattggaaccctagcgagaccgttcggctcactgctaggattctggcaaagcagaagatccacccagagagaaccccttctgaaaagctcctggccgtaaaagaatttgaatcccatctggacaaactggacaacgaaaagaaggatctgatccagtccgacatagccgctcttcaccatttctattcaaaacacctgggattcccggacaacgattcgctggtggtgttgtttgctcaggtgaattgcaacggatttaccatcgaggacgaggagctgtcacatctgggctccgctatcttccctgatgtagcccttatgaaccactcctgctgtccgaatgtgatcgtgacttataaaggtacgctcgccgaagtgcgtgctgtacaggaaattaaacctggagaggaagttttcaccagctacatcgaccttttgtatcctacagaggatcgcaatgatagactgcgcgactcttatttctttacctgtgagtgtcaagaatgcacgactaaagataaggacaaggccaaagtggagattcgcaaactgagcgacccgcctaaggccgaggccatccgagacatggtgcgctatgctcgcaatgtgatcgaagaatttcgacgtgccaagcactataaaagtccctccgaattgctggagatttgtgaactgtcccaggagaagatgagttcggtttttgaagattcgaacgtctacatgcttcacatgatgtatcaggccatgggagtctgtctgtatatgcaggactgggaaggggccctccaatacggccagaaaatcattaaaccgtactcgaaacattaccctttgtactccctcaacgtcgcgtctatgtggctgaagttgggcaggctgtacatgggccttgagcacaaagctgctggggaaaaggcactcaagaaagccatcgcgattatggaggtggcccacggaaaggaccatccatacattagcgaaattaagcaagagatcgagagccattag

SEQ ID NO: 203101 - DNA, 819 bp, Artificial Sequence
  derived and/or modified sequence
atgagggccgaagggctggggggcctggaaaggttttgtagccctgggaaggggcggggcctgcgcgctctgcagccctttcaagttggggatctgctgttctcctgtcctgcttacgcctatgttctgacagttaacgagcgcgggaatcactgtgagtactgcttcacccgcaaggaaggtctctctaagtgcggcagatgtaagcaggccttttactgtaacgtagaatgtcaaaaggaagattggccgatgcacaagcttgaatgtagcccaatggtcgtatttggagaaaactggaatccctcggaaacagtgagactgacagcccgtattctcgctaagcaaaaaattcatcccgaacgcacacctagtgaaaaactcctggcggttaaggagtttgagtctcatctggacaaactggacaacgagaaaaaggacctcattcaatctgatatcgcagccctgcaccatttctatagcaagcatctggggttccccgacaatgactcccttgttgtgctattcgctcaggtgaactgcaacggatttacaatagaagatgaagagctgtctcatctggggtccgcaattttccctgatgtggcacttatgaaccactcatgctgtcccaacgtcatcgtaacatataagggaacgttggccgaagtccgcgcggtgcaagagatcaaacccggtgaagaagtgttcacttcctacatagacctactgtaccctaccgaggataggaatgataggctcagagattcctatttttttacgtgtgaatgtcaggaatgtacaaccaaggacaaatag

SEQ ID NO: 203102 - DNA, 1302 bp, Artificial Sequence
  derived and/or modified sequence
atgagagctgagggcctgggcggcctggagcgcttctgcagccctgggaagggccggggcctgcgggccctgcagcccttccaggtgggggacctgctcttcagctgcccagcctatgcctacgtgctgactgtgaatgaaagaggcaaccactgtgagtactgcttcaccaggaaggagggcctgagcaaatgtggccgctgcaagcaggccttctactgcaatgtggagtgccagaaggaggactggcccatgcacaagctggagtgcagccccatggtggtgtttggagagaactggaaccccagcgagaccgtgcggctgacagcccgcatcctggccaagcagaagatccaccctgagaggaccccatctgagaagctgctggccgtgaaggagtttgagagccacctggacaagctggacaatgagaagaaggacctgatccagagcgacattgctgccctgcaccacttctacagcaagcacctgggcttcccagacaatgacagcctggtggtgctgtttgcccaggtgaactgcaatggcttcaccattgaagatgaggagctgagccacctgggcagcgccatcttcccagatgtggccctgatgaaccacagctgctgccccaacgtcatcgtgacctacaagggcaccctggccgaggtgcgggctgtgcaggagatcaagccaggagaggaggtgttcaccagctacatcgacctgctgtaccccacagaggacagaaatgaccggctgcgggacagctacttcttcacctgtgagtgccaggagtgcaccaccaaggacaaggacaaggccaaggtggagatcaggaagctgagtgacccccccaaggccgaggccatccgggacatggtgcgctatgccagaaatgtcatcgaggagttccggcgggccaagcactacaagagccccagcgagctgctggagatctgtgagctgagccaggagaagatgagctctgtgtttgaggacagcaatgtgtacatgctgcacatgatgtaccaggccatgggcgtgtgcctgtacatgcaggactgggagggcgccctgcagtatggccagaagatcatcaagccctacagcaagcactaccccctgtacagcctgaatgtggcctccatgtggctgaagctgggccgcctgtacatgggcctggagcacaaggccgccggggagaaggccctgaagaaggccatcgccatcatggaggtggcccacggcaaggaccacccctacatcagcgagatcaagcaggagattgagagccactag

SEQ ID NO: 203103 - DNA, 819 bp, Artificial Sequence
  derived and/or modified sequence
atgagagctgagggcctgggcggcctggagcgcttctgcagccctgggaagggccggggcctgcgggccctgcagcccttccaggtgggggacctgctcttcagctgcccagcctatgcctacgtgctgactgtgaatgaaagaggcaaccactgtgagtactgcttcaccaggaaggagggcctgagcaaatgtggccgctgcaagcaggccttctactgcaatgtggagtgccagaaggaggactggcccatgcacaagctggagtgcagccccatggtggtgtttggagagaactggaaccccagcgagaccgtgcggctgacagcccgcatcctggccaagcagaagatccaccctgagaggaccccatctgagaagctgctggccgtgaaggagtttgagagccacctggacaagctggacaatgagaagaaggacctgatccagagcgacattgctgccctgcaccacttctacagcaagcacctgggcttcccagacaatgacagcctggtggtgctgtttgcccaggtgaactgcaatggcttcaccattgaagatgaggagctgagccacctgggcagcgccatcttcccagatgtggccctgatgaaccacagctgctgccccaacgtcatcgtgacctacaagggcaccctggccgaggtgcgggctgtgcaggagatcaagccaggagaggaggtgttcaccagctacatcgacctgctgtaccccacagaggacagaaatgaccggctgcgggacagctacttcttcacctgtgagtgccaggagtgcaccaccaaggacaagtag

SEQ ID NO: 203104 - DNA, 1302 bp, Artificial Sequence
  derived and/or modified sequence
atgcgggccgagggcctgggcggcctggagcggttctgcagccccggcaagggtagaggtttgagggctctgcagccgttccaggtcggggatttactgttttcttgtccggcatacgcttatgttctgacagtcaacgaacgcggcaatcactgcgagtactgcttcaccaggaaagagggtttgtcaaagtgtggcagatgtaagcaggctttttattgcaacgtcgaatgccagaaggaagattggcccatgcataagcttgaatgcagcccaatggtggtgtttggggagaattggaatccctctgaaacagtgcgccttacagctcgcatactagccaaacaaaagatccatcctgaaagaaccccctctgaaaagctgttggctgtcaaagaatttgagagtcacctggataagctggacaatgaaaaaaaggacctgatccaaagcgacatcgcggctcttcatcacttttactcaaaacacctcggattcccagacaatgattctttggtggttctgttcgcccaagtgaactgcaacggatttaccatcgaagatgaggagctgagccacttagggtctgcgatttttcccgacgtagccctgatgaatcactcctgttgccccaacgtgatcgtgacatacaaggggaccctcgccgaagtgagagcagttcaggagatcaagccgggcgaggaggtgtttacttcttacatcgaccttctgtacccaacagaagacagaaacgatcggctgcgggacagctacttctttacatgtgagtgtcaggaatgcaccacaaaagataaggataaggccaaggtcgagataagaaagctttctgacccccccaaagcagaggccatcagggatatggtgcgctacgctaggaacgtcatcgaagagttccggcgggccaagcactataaatccccttcagagttactggagatatgtgagttgtcacaggagaagatgtcatccgtgttcgaggactctaacgtctatatgctccatatgatgtatcaggcaatgggggtctgtctgtacatgcaagactgggaaggtgcgttgcagtacgggcagaaaattatcaaaccatacagtaagcactaccccctgtattcactaaatgtggcctctatgtggctgaaactgggacgcctgtacatgggccttgaacacaaggctgctggggaaaaagctctgaaaaaggccatagctattatggaagtggcccatggcaaggatcacccgtacattagtgagattaaacaagaaatcgagtcgcactag

SEQ ID NO: 203105 - DNA, 819 bp, Artificial Sequence
  derived and/or modified sequence
atgcgggccgagggcctgggcggcctggagcggttctgcagccccggcaaaggcaggggactgagagcgctacagccctttcaggtcggcgatctcttgttctcgtgccctgcctatgcatatgtgttaacagttaatgaaaggggtaaccactgtgaatactgttttactcgcaaagaagggctctcaaagtgtggcaggtgtaaacaggcattttattgcaacgtcgaatgccagaaggaggattggccaatgcacaaacttgaatgcagtccgatggttgttttcggcgaaaattggaacccctcagagactgtcaggttgactgctcgcatcctggccaagcagaaaattcaccccgagcgtactcccagcgaaaaactgctcgcggtgaaggaattcgagtcccacctggataagcttgataacgagaaaaaggatctgatccaatctgatattgccgctctccatcacttctacagcaaacacctaggattcccagataacgactccttggttgttttgtttgctcaggtgaactgtaacggcttcactatagaggatgaagagttgtctcaccttgggtcagccatcttccccgatgtggcgctgatgaaccacagttgttgtcccaacgtgatagtcacctataagggcactctggccgaggttagagccgtgcaggagatcaagccgggtgaggaagtgtttacctcttacatagatctcctatatcctacggaggataggaacgaccgactgcgggattcttactttttcacgtgtgaatgccaggaatgtactactaaggacaagtag

SEQ ID NO: 203106 - DNA, 1302 bp, Artificial Sequence
  derived and/or modified sequence
atgagggccgaagggctgggcggactcgagcgcttttgtagccctggaaagggaaggggcctgagagctttgcagccattccaggtgggcgatctcctgttcagttgcccggcttatgcctacgttctgaccgtaaacgagagaggtaaccactgcgagtattgttttacacgcaaggaaggactgagtaagtgcggccgatgtaaacaggctttttattgcaatgtggagtgtcagaaggaggattggcctatgcacaaactggagtgttcccctatggtggtgttcggagaaaattggaatccttctgagacagtgcggctcaccgctcggatcctagccaaacagaaaatacatccagagcgcactccgtcagagaaactcctggcagttaaagagtttgaaagccatctcgataagctggacaatgagaagaaagatctgattcaatctgatattgccgctctgcaccacttttactccaaacatttgggcttcccagataacgactcactcgtggtcctgtttgcccaggtcaattgcaatggattcaccatcgaggacgaggagctgagccatcttgggagtgccatctttcccgacgtggccctgatgaatcattcatgctgccctaatgtgatcgtgacatataagggcacccttgccgaagtgagagccgtacaggagatcaaacccggagaagaggttttcacatcttatattgatctcctgtacccaaccgaggatagaaatgacagactgagggacagctacttttttacctgtgaatgccaggaatgtacaacaaaggacaaggacaaggcaaaagtggaaatccgaaagctgagcgatccccctaaggcagaagcaatccgggacatggtcagatatgcccgaaacgtcatcgaagagttccgacgagcaaaacattacaagtcaccctctgagttactagaaatttgcgagctgtcccaagaaaagatgtcatcagttttcgaagacagcaatgtgtatatgttacatatgatgtaccaggcgatgggtgtttgcttgtacatgcaggactgggagggggcactgcagtatggccaaaaaattattaagccctattccaaacattatccactctactccctgaacgtagcgtcaatgtggctgaaattaggtcggctgtatatggggctcgagcacaaggccgcaggtgagaaggccctgaagaaggctatcgcgatcatggaagtggctcacggaaaggaccatccttacatcagcgagatcaaacaggaaattgaatcacattag

SEQ ID NO: 203107 - DNA, 819 bp, Artificial Sequence
  derived and/or modified sequence
atgagagccgaagggctcggagggctggagagattctgcagcccgggtaaaggcagagggctaagggccctccaaccattccaggtgggggacttgttgttcagttgccccgcatatgcctatgtgctgacagtgaatgagaggggcaatcactgcgagtactgtttcactaggaaggagggtctgagcaaatgcggacgttgtaagcaggccttttattgtaacgtggaatgtcagaaggaggactggcctatgcacaagctcgagtgctcccctatggtggtctttggtgaaaactggaatccctcggagaccgtgagactgaccgccaggatcttggccaaacagaagatccatcccgaacgaacccccagcgagaaactgctggctgtgaaagagttcgagtcacatctggataagttggataacgagaaaaaagacctgatccagagtgacattgccgctttacatcacttttactcaaaacacctgggatttccggataacgactcccttgtggtgctttttgcccaggtcaactgtaacggttttactattgaagatgaggagttatcccatctcggctccgccatattccccgacgtagctttaatgaatcattcttgctgcccaaacgtgattgtcacctataaaggaactttggccgaggtgagggccgtgcaggaaatcaagcccggagaagaggtttttacttcatatatcgatctgctgtaccctacagaggataggaacgatagactgagggatagctatttctttacatgtgaatgccaggagtgcaccacaaaggataagtag

SEQ ID NO: 203108 - DNA, 1671 bp, Artificial Sequence
  derived and/or modified sequence
gcggccgcgccccgccgccaccatgagggccgagggcctcggcggcctggagcgcttctgcagcccgggcaaaggccgggggctgcgggctctgcagcccttccaggtgggggacttgctgttctcctgcccggcctatgcctacgtgctcacggtcaacgagcggggcaaccactgcgagtactgcttcaccaggaaagaaggattgtccaaatgtggaagatgcaagcaggcattttactgcaatgtggagtgtcagaaagaagattggcccatgcacaagctggaatgttctcccatggttgtttttggggaaaactggaatccctcggagactgtaagactaacagcaaggattctggccaaacagaaaatccacccagagagaacaccttcggaaaaattgttagctgtgaaggagtttgaatcacatctggataagttagacaatgagaagaaggatttgattcagagtgacatagctgctctccatcacttttactccaagcatctcggattccctgacaatgatagcctcgtagtactctttgcacaggttaactgtaatggcttcacaattgaagatgaagaactttctcatttgggatcagcgatatttcctgatgttgcattgatgaatcatagctgttgccccaatgtcattgtgacctacaaagggaccctggcagaagtcagagctgtacaggaaatcaagccgggagaggaggtttttaccagctatattgatctcctgtacccaacggaagatagaaatgaccggttaagagattcttatttctttacctgtgagtgccaggagtgtaccaccaaggacaaggataaggccaaggtggaaatccggaagctcagcgatcccccaaaggcagaagccatccgagacatggtcagatatgcacgcaacgtcattgaagagttccggagggccaagcactataaatcccctagtgagctgctggagatctgcgagctcagccaggagaagatgagctctgtgtttgaggacagtaacgtgtacatgttgcacatgatgtaccaggccatgggtgtctgcttgtacatgcaggactgggaaggagccctgcaatatggacagaaaatcattaagccctacagtaagcactatcctttgtactccctcaacgtggcctccatgtggttgaagctagggagactctacatgggcctggaacacaaagccgcaggggagaaagccctgaagaaggccattgcaatcatggaagtagctcacggcaaagatcatccatatatttctgagatcaaacaggaaattgaaagccactgaaactatgcagcatttcagttttcatttaaacacttagttcagaaaccttaaaggatttgaatatttcaaattgcacacgtcactccagcatctctgtaaaataattggaatgaaaatacttcttgcacttaaacactgcacatgccgtactttgaggttagtctgaatcttgaactttaataccaaattaattttgaatgcttttgtttcctaagagataatggcatggtttcatatgttatactttggacagacagagttttaaaaatggaattattttttctttcatgcctcttgtaatgttctgaacaaacttgaatgatgaaagtattaaagagatatcagta

SEQ ID NO: 203109 - DNA, 1078 bp, Artificial Sequence
  derived and/or modified sequence
gcggccgcgccccgccgccaccatgagggccgagggcctcggcggcctggagcgcttctgcagcccgggcaaaggccgggggctgcgggctctgcagcccttccaggtgggggacttgctgttctcctgcccggcctatgcctacgtgctcacggtcaacgagcggggcaaccactgcgagtactgcttcaccaggaaagaaggattgtccaaatgtggaagatgcaagcaggcattttactgcaatgtggagtgtcagaaagaagattggcccatgcacaagctggaatgttctcccatggttgtttttggggaaaactggaatccctcggagactgtaagactaacagcaaggattctggccaaacagaaaatccacccagagagaacaccttcggaaaaattgttagctgtgaaggagtttgaatcacatctggataagttagacaatgagaagaaggatttgattcagagtgacatagctgctctccatcacttttactccaagcatctcggattccctgacaatgatagcctcgtagtactctttgcacaggttaactgtaatggcttcacaattgaagatgaagaactttctcatttgggatcagcgatatttcctgatgttgcattgatgaatcatagctgttgccccaatgtcattgtgacctacaaagggaccctggcagaagtcagagctgtacaggaaatcaagccgggagaggaggtttttaccagctatattgatctcctgtacccaacggaagatagaaatgaccggttaagagattcttatttctttacctgtgagtgccaggagtgtaccaccaaggacaagtaagcactatcctttgtactccctcaacgtggcctccatgtggttgaagctagggagactctacatgggcctggaacacaaagccgcaggggagaaagccctgaagaaggccattgcaatcatggaagtagctcacggcaaagatcatccatatatttctgagatcaaacaggaaattgaaagccactgaaactatgcagcatttcagttttcatttaaacacttagttcagaaacctta

SEQ ID NO: 203110 - DNA, 1302 bp, Artificial Sequence
  derived and/or modified sequence
atgagagccgagggcctgggcggcctggagagattctgcagccccggcaagggcagaggcctgagagccctgcagcccttccaggtgggcgacctgctgttcagctgccccgcctacgcctacgtgctgaccgtgaacgagagaggcaaccactgcgagtactgcttcaccagaaaggagggcctgagcaagtgcggcagatgcaagcaggccttctactgcaacgtggagtgccagaaggaggactggcccatgcacaagctggagtgcagccccatggtggtgttcggcgagaactggaaccccagcgagaccgtgagactgaccgccagaatcctggccaagcagaagatccaccccgagagaacccccagcgagaagctgctggccgtgaaggagttcgagagccacctggacaagctggacaacgagaagaaggacctgatccagagcgacatcgccgccctgcaccacttctacagcaagcacctgggcttccccgacaacgacagcctggtggtgctgttcgcccaggtgaactgcaacggcttcaccatcgaggacgaggagctgagccacctgggcagcgccatcttccccgacgtggccctgatgaaccacagctgctgccccaacgtgatcgtgacctacaagggcaccctggccgaggtgagagccgtgcaggagatcaagcccggcgaggaggtgttcaccagctacatcgacctgctgtaccccaccgaggacagaaacgacagactgagagacagctacttcttcacctgcgagtgccaggagtgcaccaccaaggacaaggacaaggccaaggtggagatcagaaagctgagcgacccccccaaggccgaggccatcagagacatggtgagatacgccagaaacgtgatcgaggagttcagaagagccaagcactacaagagccccagcgagctgctggagatctgcgagctgagccaggagaagatgagcagcgtgttcgaggacagcaacgtgtacatgctgcacatgatgtaccaggccatgggcgtgtgcctgtacatgcaggactgggagggcgccctgcagtacggccagaagatcatcaagccctacagcaagcactaccccctgtacagcctgaacgtggccagcatgtggctgaagctgggcagactgtacatgggcctggagcacaaggccgccggcgagaaggccctgaagaaggccatcgccatcatggaggtggcccacggcaaggaccacccctacatcagcgagatcaagcaggagatcgagagccactag

SEQ ID NO: 203111 - DNA, 819 bp, Artificial Sequence
  derived and/or modified sequence
atgagagccgagggcctgggcggcctggagagattctgcagccccggcaagggcagaggcctgagagccctgcagcccttccaggtgggcgacctgctgttcagctgccccgcctacgcctacgtgctgaccgtgaacgagagaggcaaccactgcgagtactgcttcaccagaaaggagggcctgagcaagtgcggcagatgcaagcaggccttctactgcaacgtggagtgccagaaggaggactggcccatgcacaagctggagtgcagccccatggtggtgttcggcgagaactggaaccccagcgagaccgtgagactgaccgccagaatcctggccaagcagaagatccaccccgagagaacccccagcgagaagctgctggccgtgaaggagttcgagagccacctggacaagctggacaacgagaagaaggacctgatccagagcgacatcgccgccctgcaccacttctacagcaagcacctgggcttccccgacaacgacagcctggtggtgctgttcgcccaggtgaactgcaacggcttcaccatcgaggacgaggagctgagccacctgggcagcgccatcttccccgacgtggccctgatgaaccacagctgctgccccaacgtgatcgtgacctacaagggcaccctggccgaggtgagagccgtgcaggagatcaagcccggcgaggaggtgttcaccagctacatcgacctgctgtaccccaccgaggacagaaacgacagactgagagacagctacttcttcacctgcgagtgccaggagtgcaccaccaaggacaagtag

SEQ ID NO: 203112 - protein, 225 aa, Artificial Sequence
  derived and/or modified sequence
MAGSSEEAPDYGRGVVIMDDWPGYDLNLFTYPQHYYGDLEYVLIPHGIIVDRIERLAKDIMKDIGYSDIMVLCVLKGGYKFCADLVEHLKNISRNSDRFVSMKVDFIRLKSYRNDQSMGEMQIIGGDDLSTLAGKNVLIVEDVVGTGRTMKALLSNIEKYKPNMIKVASLLVKRTSRSDGFRPDYAGFEIPNLFVVGYALDYNEYFRDLNHICVINEHGKEKYRV

SEQ ID NO: 203113 - DNA, 678 bp, Artificial Sequence
  derived and/or modified sequence
atggcgggatcttcggaggaggccccagattacgggagaggcgtggtgatcatggatgactggcctggctacgacctaaacctgttcacctatccacagcactactatggggacctagagtatgttctgatcccacacggaattattgtggataggatagagagactggcaaaagatatcatgaaggatataggatactctgatatcatggtgttgtgcgtgctaaagggaggttacaaattttgcgccgacctggtagagcaccttaagaacatctcgaggaacagtgaccgcttcgtgtccatgaaggtggactttatcaggctcaaatcctacagaaacgaccagagtatgggagagatgcagattattggcggcgacgatctgagcacactggcgggtaagaatgtactcatcgtcgaggatgttgttggtacaggacgcacaatgaaggcactcctcagcaacattgagaagtataagccgaacatgataaaagtcgcatctttacttgtgaaaaggacttcacggagtgacgggtttcggcccgattacgccggctttgaaattccgaaccttttcgttgtcgggtatgcactcgattataacgagtacttccgggatctcaaccacatatgtgtcatcaacgagcacggtaaggaaaaataccgggtttag

SEQ ID NO: 203114 - DNA, 678 bp, Artificial Sequence
  derived and/or modified sequence
atggccggcagcagcgaggaggccccagactatggccggggcgtggtgatcatggatgactggccaggctatgacctgaacctcttcacctacccccagcactactacggggacctggagtatgtgctgatcccccacggcatcatcgtggacagaattgagcggctggccaaggacatcatgaaggacatcggctacagcgacatcatggtgctgtgtgtgctgaagggcggctacaagttctgtgccgacctggtggagcacctgaagaacatcagcaggaacagcgacagatttgtgtccatgaaggtggacttcatccggctgaagagctacagaaatgaccagagcatgggagagatgcagatcattggaggagatgacctgagcaccctggccggcaagaatgtgctgattgtggaggatgtggtgggcaccggccgcaccatgaaggccctgctgagcaacatcgagaagtacaagcccaacatgatcaaggtggccagcctgctggtgaagaggaccagcagaagtgatggcttccggccagactatgccggctttgagatccccaacctgtttgtggtgggctacgccctggactacaatgagtacttccgggacctgaaccacatctgtgtgatcaatgagcacggcaaggagaagtacagagtgtag

SEQ ID NO: 203115 - DNA, 678 bp, Artificial Sequence
  derived and/or modified sequence
atggccggcagcagcgaggaggcccccgactacggccggggcgtggtaattatggatgactggcccggctacgatctaaatttgtttacctatcctcagcattactacggcgatctcgaatacgtgttaatacctcacggaatcatcgtggataggattgagcgcttggcgaaagacatcatgaaagatataggctatagcgatataatggttctttgcgttctgaaaggcggttataaattttgtgctgaccttgtggaacatctgaagaacattagccgaaatagcgaccgtttcgtcagtatgaaggttgattttatcagactgaagtcctacaggaatgaccagtctatgggcgagatgcagattattggcggggacgacctgtctacacttgccgggaagaatgtcctgatcgtggaggacgtcgtcggcacgggccggactatgaaggcgttgttatctaacattgagaagtataagccaaacatgatcaaagtggcgtctctccttgtgaaaagaacgtcccgatcggacggctttagaccagactatgccggatttgaaatcccaaatttattcgtggtcggctatgctctggactataacgagtacttcagggatctgaaccatatctgcgtaatcaatgaacacgggaaggaaaagtaccgggtgtag

SEQ ID NO: 203116 - DNA, 1926 bp, Artificial Sequence
  derived and/or modified sequence
cttcccttcccgcgttccccgggagaaacatggccgggagcagcgaggaggcgccagactacgggcgaggcgtcgtgattatggatgattggccagggtatgacttgaatttattcacgtacccacagcactattatggagacttggagtatgtcctcatccctcatggtatcattgtggacagaattgagcggctggccaaggatattatgaaagacataggatatagtgacatcatggtcctgtgtgtgcttaaaggaggttacaaattctgtgctgatctcgtagaacaccttaagaacatcagccgaaattcagatcgatttgtctcaatgaaggttgatttcatcagactaaaaagttacaggaatgaccagtccatgggtgagatgcagataatcggaggcgatgatctttcaacgctggctggaaagaatgttctcattgttgaggatgttgtcggaactgggaggaccatgaaagcactactcagcaatatagagaaatacaagcccaacatgattaaggtagccagtttgttggtgaagagaacatccagaagtgacggctttagacctgactatgctggatttgagattccaaacttatttgtggtgggatatgccttagattacaatgaatacttcagagatctgaatcacatatgcgtcatcaatgagcacggtaaagaaaaatatcgagtctaaagacatgaattctcaccactaaagtcccagatagcatcatatttacgcctgtacttgggaagccagctgtcaagtttgtccccccaggcatcttcactcagcaggatataaaagaaaaaaatgttcaaatgagagagctttcttttctgaggttaatataaagagtatcaaaggttcctaaggaaaagaaagcagtgcttttatttgacttgttccaaattaaacactccgccttgtgactcagcaatgctatctaccttcacactcctgagctccgccttcctttgttttgatacagtcattatatttgattagtattcccaggaatacccccacctagttactcaaatatttttcacttaactttttatactcttattttggtaataagcttacaatattaagaagctggggacttttttttaactgaagacttgagtcccctataccgggaatgcagctattaatagattcccatattttaaaaggagggaaaggacaatttaatataaatttctgtttgtgcatttctgacaggccattattatctgctttgacaaagcctttctgaaacgcagtgtacaatgaatcttaatgatgttatgaaacgagctttgctcggggctcttgattggagcttccggtatgtgatgacggtatgtcatgtatgcatggatgtactcaactgtgtttaatactctgaattttaattagaaaaaaatacaatagcagcaaggccctggtttctaagctgtatccttttattcatgtgggacatgagcaaatggcagaattaggggcgagtgctttcaatgctcgaaactaagcaagtataaatttttcctcttatttgcatgaaaggacaagacactgttatgccctgtcctaaatgtgaagacagaggttgaattttttaaaaaatatctttaaaagactgatcacaaaatccaaggtgctacaggaaacaagcacactcaagaaagtttttttctgaataacatttttttccaatttctccgttttataagacatttcctaatttatggggattttaattgaaaataaacttgagtcccaatagagctgtttttttctcacttcctacaaaatgcaaatgcaaaataaataactaagcagcttttgtttggttctgaaccgtatgtggcgtattgttattaggttctagcttcctttaaactaataaagaataagaaaactt

SEQ ID NO: 203117 - DNA, 678 bp, Artificial Sequence
  derived and/or modified sequence
atggcagggtccagcgaagaggcccctgactacgggcgaggggtggtcatcatggatgactggccgggttacgatttaaatctctttacttacccccagcattactatggtgacctcgagtacgtactcatacctcatgggataattgtcgacaggatcgagaggctcgccaaagatatcatgaaagatataggctacagcgacattatggtgctgtgcgtactgaagggaggctataaattttgtgccgatctcgtggagcacctgaagaacatttcaaggaacagtgaccgttttgtaagcatgaaggtggacttcattagacttaaaagttaccgcaatgaccagtcgatgggagagatgcaaatcatcggcggagacgatctgagcacgctagccggaaagaatgtgctcattgtggaggacgttgttggcaccgggcgtacaatgaaggcattgctgtcaaacatcgagaaatataagccaaatatgataaaggttgcttctctgctggtaaagcgaacgtcccgctcagacggctttcgaccagactatgctggttttgagattccaaatctgttcgtggttggctacgccctcgattacaacgagtactttagggatctgaaccatatctgcgtcatcaacgagcacggcaaggagaagtaccgggtatag

SEQ ID NO: 203118 - DNA, 678 bp, Artificial Sequence
  derived and/or modified sequence
atggccggcagcagcgaggaggcccccgactacggcagaggcgtggtgatcatggacgactggcccggctacgacctgaacctgttcacctacccccagcactactacggcgacctggagtacgtgctgatcccccacggcatcatcgtggacagaatcgagagactggccaaggacatcatgaaggacatcggctacagcgacatcatggtgctgtgcgtgctgaagggcggctacaagttctgcgccgacctggtggagcacctgaagaacatcagcagaaacagcgacagattcgtgagcatgaaggtggacttcatcagactgaagagctacagaaacgaccagagcatgggcgagatgcagatcatcggcggcgacgacctgagcaccctggccggcaagaacgtgctgatcgtggaggacgtggtgggcaccggcagaaccatgaaggccctgctgagcaacatcgagaagtacaagcccaacatgatcaaggtggccagcctgctggtgaagagaaccagcagaagcgacggcttcagacccgactacgccggcttcgagatccccaacctgttcgtggtgggctacgccctggactacaacgagtacttcagagacctgaaccacatctgcgtgatcaacgagcacggcaaggagaagtacagagtgtag

SEQ ID NO: 203119 - protein, 228 aa, Artificial Sequence
  derived and/or modified sequence
MIRLGGWCARRLCSAAVPAGRRGAAGGLGLAGGRALRVLVDMDGVLADFEGGFLRKFRARFPDQPFIALEDRRGFWVSEQYGRLRPGLSEKAISIWESKNFFFELEPLPGAVEAVKEMASLQNTDVFICTSPIKMFKYCPYEKYAWVEKYFGPDFLEQIVLTRDKTVVSADLLIDDRPDITGAEPTPSWEHVLFTACHNQHLQLQPPRRRLHSWADDWKAILDSKRPC

SEQ ID NO: 203120 - DNA, 687 bp, Artificial Sequence
  derived and/or modified sequence
atgattcggttgggcggatggtgtgctaggcggctgtgtagcgccgctgttcccgccggacgtaggggtgcagcgggaggactgggtctcgccgggggccgagccctgagggtactcgtggacatggacggtgtgctagctgactttgaaggtggctttctcagaaagttccgggctagattcccagaccagccattcatcgcgctggaggatcgacggggcttttgggtgagcgagcagtatgggcgcttgagacccggacttagcgagaaggcaatttctatctgggaatcaaagaatttcttctttgagctggagcctctgcctggtgcagttgaggcagtgaaggagatggcttctttacagaataccgacgtgttcatatgtacatctccaattaagatgttcaagtactgtccgtacgaaaaatacgcttgggtcgagaaatatttcggaccggattttctcgaacagattgttttaacacgggacaagacagttgtgagtgcagacttactgattgatgatagacctgacataactggagccgaacccacccctagttgggagcatgtgctgttcactgcctgccataaccagcatctgcagctgcagcccccaagaagaagactgcatagctgggcggacgactggaaagctatcctggactctaaacgcccctgctag

SEQ ID NO: 203121 - DNA, 687 bp, Artificial Sequence
  derived and/or modified sequence
atgatccggctgggcggctggtgtgcccggcggctgtgcagcgctgctgtgcctgctggaagaagaggagctgctgggggcctgggcctggccggcggccgggccctgcgggtgctggtggacatggatggagtgctggccgactttgaaggaggcttcctgaggaagttccgggcccgcttcccagaccagcccttcatcgccctggaggaccggcggggcttctgggtgtctgagcagtatggccgcctgcggcccggcctgtctgagaaggccatcagcatctgggagagcaagaacttcttctttgagctggagcccctgcctggagctgtggaggccgtgaaggagatggccagcctgcagaacacagatgtgttcatctgcaccagccccatcaagatgttcaagtactgcccctatgagaagtatgcctgggtggagaagtactttggaccagacttcctggagcagatcgtgctgacccgggacaagacagtggtgtctgctgacctgctgattgatgacagaccagacatcactggagctgagcccacccccagctgggagcacgtgctcttcaccgcctgccacaaccagcacctgcagctgcagcccccccggcggcggctgcacagctgggcagatgactggaaggccatcctggacagcaagaggccctgctag

SEQ ID NO: 203122 - DNA, 687 bp, Artificial Sequence
  derived and/or modified sequence
atgatccggctgggcggctggtgcgcccggcggctgtgcagcgccgccgtgccggccggtcgccgaggggcagcgggaggtctcggtctggcaggaggtagagcgctccgggttttggtggatatggatggggtgctcgctgacttcgaaggaggtttcctcaggaagtttagggcccggttcccagatcagccttttatcgcgcttgaggacagacgaggcttctgggtttcagagcagtacgggagacttagaccgggactcagcgagaaagccataagcatctgggaatctaagaatttctttttcgagcttgagccccttccaggtgccgtggaggccgtgaaagagatggcttcactgcaaaacacagatgtattcatatgtacctcaccgataaaaatgtttaagtattgcccctacgagaagtacgcgtgggtagaaaagtattttgggccagattttctggaacagatcgttctgacccgcgataagactgtcgtgagtgcagacctccttattgatgaccggcccgatatcacgggcgcggagcccacccccagctgggaacacgtgctgtttacagcatgtcacaatcagcatctgcagcttcagcccccacggagacgtctgcactcatgggctgacgattggaaggccattctggactctaagagaccatgctag

SEQ ID NO: 203123 - DNA, 687 bp, Artificial Sequence
  derived and/or modified sequence
atgatacggctgggagggtggtgcgcaaggcggttatgctccgccgctgtgccagccggacggagaggggctgcgggaggtttaggacttgctggaggtcgagcacttcgggtgctagtcgatatggacggcgtcctcgctgacttcgaaggaggttttctccgcaaattcagagcaagattccccgatcaacctttcatagcactggaggaccggcgtggcttttgggtgtccgagcagtacggcaggctgcggccagggttgtctgagaaagctatcagcatttgggagtcaaaaaattttttctttgaactggaaccactgccaggggctgttgaggcggtaaaggagatggctagcctgcagaatacagacgtgtttatatgcacatcccctataaagatgtttaaatactgtccatatgagaaatatgcctgggtcgagaaatactttggtccagatttcttagaacaaatcgtgctgacgcgtgacaagaccgtcgtgtctgcagacttgctcatagacgaccggcctgacattacaggggcagagccaacaccttcctgggagcacgtgctatttaccgcatgccacaatcagcacctgcagctgcaacccccaaggcggaggctgcacagctgggctgacgactggaaggctatactggatagcaaacgcccttgctag

SEQ ID NO: 203124 - DNA, 1586 bp, Artificial Sequence
  derived and/or modified sequence
cggcctcgctctggggccggtacttgcgcgcccgcaccccgcgctccccgccccgctccccgtcccgcgctccacgcgcgccccagcgttgggggcttctcctccgcggcgggaatgtctggccggctccggcagcacggcgcggcccaggtccccgcgcccacgacgggccagcgcgctgggccatgatccggctgggcggctggtgtgcgcggcggctctgcagcgcggcggttcccgcggggcggcgcggggcggcgggcgggctgggcctggcgggaggccgcgccctacgggtgctggtggacatggacggcgtgctggctgacttcgagggcggattcctcaggaagttccgcgcgcgctttcccgaccagcccttcatcgcgctggaggaccggcgcggcttctgggtgtcggagcagtacggccgcctgcggccagggctgagcgagaaggccatcagcatttgggagtcaaagaatttcttttttgaacttgagcctctgccaggggccgtggaagctgtcaaggagatggccagcctacaaaacactgacgtcttcatctgcacaagccccatcaagatgttcaagtactgtccctatgagaagtatgcctgggtggagaagtactttggccctgactttctggagcagattgtgctgaccagagacaagaccgtggtctctgctgaccttctcatagacgaccggccggacatcacaggggccgagccaacccccagctgggagcatgtcctcttcaccgcctgccacaaccagcacctgcagctgcagcccccccgccgcaggctgcactcgtgggcggacgactggaaggccattctggacagcaagcggccctgctgagctggactgtgcttcgggctcctctgtggggctctgacctcagggctcccagctcggggcctgtggggccagtatgctggtctgggagtccctcctagactcctgggccccatgacctcctgctgcatgtcccttcccttccccagccctgccaggccttaacctgatcacggggcagggctgggccctctgggcgcttggacatagacacgtggtcccaggccgttcagcctgacctcaggcagcaggcaccaagctgccagaagcccaggggctcaggacagggaggagttgaggccactgttcagggggctggtggccgtctccactccctaggcaagttctctgaggcagaagggggttccctgttcccagagtctgcagccatcagcaaggaggaccaggaacccggcgactgaggtgcttccaggtggggacaagcccctcttggtctcagccacagcaccccttattccagctgccctgcccaacctgctcaccccacatgaccttctgtgtattcagcaaacactcactaggtgacagcggccaccaggctctgtgctgggggacgatactggccctggcctcgaccagcttagaggtttctcacacctctgttcccagggccccgctcagggcccagcagagagtccgtaggcttgaacatgtgttgagtgcatgaaaaataaatgctgttcatgtgtgtagctc

SEQ ID NO: 203125 - DNA, 1615 bp, Artificial Sequence
  derived and/or modified sequence
gcgcgtgttcctttagggaccgcgcgcgccgcggcctcgctctggggccggtacttgcgcgcccgcaccccgcgctccccgccccgctccccgtcccgcgctccacgcgcgccccagcgttgggggcttctcctccgcggcgggaatgtctggccggctccggcagcacggcgcggcccaggtccccgcgcccacgacgggccagcgcgctgggccatgatccggctgggcggctggtgtgcgcggcggctctgcagcgcggcggttcccgcggggcggcgcggggcggcgggcgggctgggcctggcgggaggccgcgccctacgggtgctggtggacatggacggcgtgctggctgacttcgagggcggattcctcaggaagttccgcgcgcgctttcccgaccagcccttcatcgcgctggaggaccggcgcggcttctgggtgtcggagcagtacggccgcctgcggccagggctgagcgagaaggccatcagcatttgggagtcaaagaatttcttttttgaacttgagcctctgccaggggccgtggaagctgtcaaggagatggccagcctacaaaacactgacgtcttcatctgcacaagccccatcaagatgttcaagtactgtccctatgagaagtatgcctgggtggagaagtactttggccctgactttctggagcagattgtgctgaccagagacaagaccgtggtctctgctgaccttctcatagacgaccggccggacatcacaggcaaccaacccccagctgggagcatgtcctcttcaccgcctgccacaaccagcacctgcagctgcagcccccccgccgcaggctgcactcgtgggcggacgactggaaggccattctggacagcaagcggccctgctgagctggactgtgcttcgggctcctctgtggggctctgacctcagggctcccagctcggggcctgtggggccagtatgctggtctgggagtccctcctagactcctgggccccatgacctcctgctgcatgtcccttcccttccccagccctgccaggccttaacctgatcacggggcagggctgggccctctgggcgcttggacatagacacgtggtcccaggccgttcagcctgacctcaggcagcaggcaccaagctgccagaagcccaggggctcaggacagggaggagttgaggccactgttcagggggctggtggccgtctccactccctaggcaagttctctgaggcagaagggggttccctgttcccagagtctgcagccatcagcaaggaggaccaggaacccggcgactgaggtgcttccaggtggggacaagcccctcttggtctcagccacagcaccccttattccagctgccctgcccaacctgctcaccccacatgaccttctgtgtattcagcaaacactcactaggtgacagcggccaccaggctctgtgctgggggacgatactggccctggcctcgaccagcttagaggtttctcacacctctgttcccagggccccgctcagggcccagcagagagtccgtaggcttgaacatgtgttgagtgcatgaaaaataaatgctgttcatgtgtgtagctcaa

SEQ ID NO: 203126 - DNA, 687 bp, Artificial Sequence
  derived and/or modified sequence
atgatcagactgggcggctggtgcgccagaagactgtgcagcgccgccgtgcccgccggcagaagaggcgccgccggcggcctgggcctggccggcggcagagccctgagagtgctggtggacatggacggcgtgctggccgacttcgagggcggcttcctgagaaagttcagagccagattccccgaccagcccttcatcgccctggaggacagaagaggcttctgggtgagcgagcagtacggcagactgagacccggcctgagcgagaaggccatcagcatctgggagagcaagaacttcttcttcgagctggagcccctgcccggcgccgtggaggccgtgaaggagatggccagcctgcagaacaccgacgtgttcatctgcaccagccccatcaagatgttcaagtactgcccctacgagaagtacgcctgggtggagaagtacttcggccccgacttcctggagcagatcgtgctgaccagagacaagaccgtggtgagcgccgacctgctgatcgacgacagacccgacatcaccggcgccgagcccacccccagctgggagcacgtgctgttcaccgcctgccacaaccagcacctgcagctgcagccccccagaagaagactgcacagctgggccgacgactggaaggccatcctggacagcaagagaccctgctag

SEQ ID NO: 203127 - protein, 276 aa, Artificial Sequence
  derived and/or modified sequence
MTSFRLALIQLQISSIKSDNVTRACSFIREAATQGAKIVSLPECFNSPYGAKYFPEYAEKIPGESTQKLSEVAKECSIYLIGGSIPEEDAGKLYNTCAVFGPDGTLLAKYRKIHLFDIDVPGKITFQESKTLSPGDSFSTFDTPYCRVGLGICYDMRFAELAQIYAQRGCQLLVYPGAFNLTTGPAHWELLQRSRAVDNQVYVATASPARDDKASYVAWGHSTVVNPWGEVLAKAGTEEAIVYSDIDLKKLAEIRQQIPVFRQKRSDLYAVEMKKP

SEQ ID NO: 203128 - protein, 266 aa, Artificial Sequence
  derived and/or modified sequence
  misc_feature (1)..(1): Xaa can be any naturally occurring amino acid
XPRAAARVRAAGEALERRRRWLGRLSPSAPRPRRARPSLRRASAWVRDRVAGRPGALPGFQASGVAGEAQKAPGHPAAPAPAASCLTEADGRVFLHAFRLALIQLQISSIKSDNVTRACSFIREAATQGAKIVSLPECFNSPYGAKYFPEYAEKIPGESTQKLSEVAKECSIYLIGGSIPEEDAGKLYNTCAVFGPDGTLLAKYRKIHLFDIDVPGKITFQESKTLSPGDSFSTFDTPYCRVGLGICYDMRFAELAQIYAQRGEAV

SEQ ID NO: 203129 - DNA, 831 bp, Artificial Sequence
  derived and/or modified sequence
atgaccagcttcagactggccctgatccagctgcagatcagcagcatcaagagcgacaacgtgaccagagcctgcagcttcatcagagaggccgccacccagggcgccaagatcgtgagcctgcccgagtgcttcaacagcccctacggcgccaagtacttccccgagtacgccgagaagatccccggcgagagcacccagaagctgagcgaggtggccaaggagtgcagcatctacctgatcggcggcagcatccccgaggaggacgccggcaagctgtacaacacctgcgccgtgttcggccccgacggcaccctgctggccaagtacagaaagatccacctgttcgacatcgacgtgcccggcaagatcaccttccaggagagcaagaccctgagccccggcgacagcttcagcaccttcgacaccccctactgcagagtgggcctgggcatctgctacgacatgagattcgccgagctggcccagatctacgcccagagaggctgccagctgctggtgtaccccggcgccttcaacctgaccaccggccccgcccactgggagctgctgcagagaagcagagccgtggacaaccaggtgtacgtggccaccgccagccccgccagagacgacaaggccagctacgtggcctggggccacagcaccgtggtgaacccctggggcgaggtgctggccaaggccggcaccgaggaggccatcgtgtacagcgacatcgacctgaagaagctggccgagatcagacagcagatccccgtgttcagacagaagagaagcgacctgtacgccgtggagatgaagaagccctag

SEQ ID NO: 203130 - DNA, 801 bp, Artificial Sequence
  derived and/or modified sequence
tgacccagagccgccgccagagtgagagccgccggcgaggccctggagagaagaagaagatggctgggcagactgagccccagcgcccccagacccagaagagccagacccagcctgagaagagccagcgcctgggtgagagacagagtggccggcagacccggcgccctgcccggcttccaggccagcggcgtggccggcgaggcccagaaggcccccggccaccccgccgcccccgcccccgccgccagctgcctgaccgaggccgacggcagagtgttcctgcacgccttcagactggccctgatccagctgcagatcagcagcatcaagagcgacaacgtgaccagagcctgcagcttcatcagagaggccgccacccagggcgccaagatcgtgagcctgcccgagtgcttcaacagcccctacggcgccaagtacttccccgagtacgccgagaagatccccggcgagagcacccagaagctgagcgaggtggccaaggagtgcagcatctacctgatcggcggcagcatccccgaggaggacgccggcaagctgtacaacacctgcgccgtgttcggccccgacggcaccctgctggccaagtacagaaagatccacctgttcgacatcgacgtgcccggcaagatcaccttccaggagagcaagaccctgagccccggcgacagcttcagcaccttcgacaccccctactgcagagtgggcctgggcatctgctacgacatgagattcgccgagctggcccagatctacgcccagagaggcgaggccgtgtag

SEQ ID NO: 203131 - DNA, 831 bp, Artificial Sequence
  derived and/or modified sequence
atgacctcttttcgattggccctgatccagcttcaaatatctagcatcaagagcgacaatgtgaccagggcctgctcttttattagggaagcggctactcaaggcgcaaaaatcgtcagcttgcctgaatgtttcaatagtccctacggcgcgaagtacttcccagaatacgctgaaaaaattccgggtgagtccacacagaagcttagtgaagtcgcgaaggaatgctccatctatttgattggggggagtatcccggaggaagacgcaggtaaactctacaacacgtgcgctgtgttcgggccggatggtaccctgttagcaaagtatcgtaaaatccacctcttcgacatagatgtcccaggaaagatcactttccaggagtctaagaccctcagccccggagatagcttcagcactttcgacacgccctactgcagggtggggctcggtatttgctacgacatgcggtttgccgaactcgcccagatctatgcccaaagggggtgtcagctgctggtctaccccggggcattcaatcttactaccggcccagcccactgggagttactacagaggtcccgggccgtcgataatcaggtgtatgtcgcaactgcatcacctgccagggacgacaaagcctcttacgtagcttggggtcattccacagtcgtgaatccttggggcgaagtcttagccaaagccggtacagaggaggctatagtttactcggacattgacctgaagaagttggccgagatccgacagcaaatacccgtattccggcagaaacggtccgacctatacgcagtggaaatgaaaaagccgtag

SEQ ID NO: 203132 - DNA, 801 bp, Artificial Sequence
  derived and/or modified sequence
tagcctcgtgccgccgcgagagttagagctgcaggcgaggccctggagaggaggcgccgatggctcggacggctctccccttctgcaccaagaccccgcagagctcgcccctctcttagacgcgcttctgcctgggtacgtgacagggtagccgggcgccctggagctttacctgggtttcaggcctccggcgttgccggagaggcacagaaagccccaggccatcctgccgctcctgcccctgccgcctcatgcctcacggaagctgacgggcgcgtcttcttacatgctttccgcttggcactcatccagctccaaatttcatctataaaaagtgacaacgtgacaagagcttgtagctttatcagggaagccgcaactcagggagccaaaatcgtgtccctgccggaatgctttaactctccctatggagccaagtacttcccagaatatgcagagaagatccccggagagtccacccagaagttgagtgaagttgcgaaggagtgctcaatctatctgataggcggctccatccccgaagaagacgctggtaaactttacaatacatgcgccgtgtttggacctgacggtactctccttgccaagtatagaaaaatacatctcttcgatatagacgtgcctggcaagatcacctttcaagagagcaaaacgctgagtcctggagattccttctctacttttgacaccccctattgtcgagtcggactcggcatttgttatgacatgaggtttgcagagcttgctcagatatatgctcaaagaggcgaagcggtgtag

SEQ ID NO: 203133 - DNA, 831 bp, Artificial Sequence
  derived and/or modified sequence
atgaccagcttccggctggccctgatccagctgcagatcagcagcatcaagagtgacaacgtgacccgggcctgcagcttcatccgggaggccgccacccagggcgccaagatcgtgtccctgcctgagtgcttcaacagcccctatggagccaagtacttcccagaatatgcagagaagatccctggagagagcacccagaagctgtctgaggtggccaaggaatgttccatctacctgattggaggcagcatccctgaggaggatgctgggaagctgtacaacacctgtgctgtgtttggaccagatggcaccctgctggccaagtacaggaagatccacctgtttgatattgatgtgcctgggaagatcaccttccaggagagcaagaccctgagccctggggacagcttcagcacctttgacaccccctactgccgggtgggcctgggcatctgctatgacatgagatttgctgagctggcccagatctatgcccagaggggctgccagctgctggtgtacccaggggccttcaacctgaccactggacctgcccactgggagctgctgcagaggagcagagctgtggacaaccaggtgtatgtggccacagccagccctgccagagatgacaaggccagctatgtggcctggggccacagcacagtggtgaacccctggggcgaggtgctggccaaggccggcacagaggaggccatcgtgtacagcgacatcgacctgaagaagctggccgagatccggcagcagatccctgtgttccggcagaagagaagtgacctgtatgctgtggagatgaagaagccctag

SEQ ID NO: 203134 - DNA, 801 bp, Artificial Sequence
  derived and/or modified sequence
tgacccagggctgctgcccgggtgcgggctgctggggaggccctggagaggagaagacgctggctgggccgcctgagccccagcgccccccggccccggcgggcccggcccagcctgcggcgggccagcgcctgggtgcgggacagagtggccggccggcctggggccctgcccggcttccaggccagcggcgtggccggggaggcccagaaggcccctggccaccctgctgccccagccccagctgccagctgcctgacagaagcagatggccgggtcttcctgcacgccttccggctggccctgatccagctgcagatcagcagcatcaagagtgacaacgtgacccgggcctgcagcttcatccgggaggccgccacccagggcgccaagatcgtgtccctgcctgagtgcttcaacagcccctatggagccaagtacttcccagaatatgcagagaagatccctggagagagcacccagaagctgtctgaggtggccaaggaatgttccatctacctgattggaggcagcatccctgaggaggatgctgggaagctgtacaacacctgtgctgtgtttggaccagatggcaccctgctggccaagtacaggaagatccacctgtttgatattgatgtgcctgggaagatcaccttccaggagagcaagaccctgagccctggggacagcttcagcacctttgacaccccctactgccgggtgggcctgggcatctgctatgacatgagatttgctgagctggcccagatctatgcccagagaggagaggccgtgtag

SEQ ID NO: 203135 - DNA, 1259 bp, Artificial Sequence
  derived and/or modified sequence
gacgcggtccccgccccaccgtagcgacgccgcggtccgccggatctccagcgctcagtccgcgccgcaggtggtgcttgtctgcagagtcatgacctctttccgcttggccctcatccagcttcagatttcttccatcaaatcagataacgtcactcgcgcttgtagcttcatccgggaggcagcaacgcaaggagccaaaatagtttctttgccggaatgctttaattctccatatggagcgaaatattttcctgaatatgcagagaaaattcctggtgaatccacacagaagctttctgaagtagcaaaggaatgcagcatatatctcattggaggctctatccctgaagaggatgctgggaaattatataacacctgtgctgtgtttgggcctgatggaactttactagcaaagtatagaaagatccatctgtttgacattgatgttcctggaaaaattacatttcaagaatctaaaacattgagtccgggtgatagtttctccacatttgatactccttactgcagagtgggtctgggcatctgctacgacatgcggtttgcagagcttgcacaaatctacgcacagagaggctgccagctgttggtatatccaggagcttttaatctgaccactggaccagcccattgggagttacttcagcgaagccgggctgttgataatcaggtgtatgtggccacagcctctcctgcccgggatgacaaagcctcctatgttgcctggggacacagcaccgtggtgaacccttggggggaggttctagccaaagctggcacagaagaagcaatcgtgtattcagacatagacctgaagaagctggctgaaatacgccagcaaatccccgtttttagacagaagcgatcagacctctatgctgtggagatgaaaaagccctaaagtttatgtttctaatgtgtcacagaataggacgatatgattctacaacataatcaactccctattaaattctttaatgaagattttttttttaattcggccttgtccttcctaggttctctattgagatgagaaagcctcattatgctgacattttccacgccacattaaatagttaaaaaggatgcagcctggagccagagagcagaaagctgggctggttctgaagcttcttccatacttaagttgcctccaagcagtttgtgaaagtatcagatcttggtatcctggtgattgattcacctaatataaatatatttgtgtcatgaacctctta

SEQ ID NO: 203136 - DNA, 831 bp, Artificial Sequence
  derived and/or modified sequence
atgaccagcttccggctggccctgatccagctgcagatcagcagcatcaagagtgataacgtaacgcgcgcatgctccttcataagggaggcagccacacagggagcaaaaatagtctctttacctgagtgttttaattcaccttatggcgccaaatacttccccgaatatgcagaaaaaatacccggagagtctacccagaaactctctgaggttgctaaagaatgctcaatatatctgattggaggtagcattcctgaagaggacgccggcaaactttacaatacttgcgcggtcttcggacccgatggaaccctgctggctaagtacagaaaaatacacttgtttgacattgacgtacccgggaagataactttccaggagtcaaaaacactatccccgggagattccttcagcactttcgacaccccttattgccgcgtcggcctcgggatctgctatgatatgcgttttgccgagctcgcccaaatctatgctcaacgaggatgccagctgctagtttatccaggagccttcaacctgaccacagggccagctcactgggaactgctccagcgcagcagggctgtggacaaccaggtgtatgtcgcaacagcaagtccggcacgggatgacaaggctagctacgttgcatgggggcacagcaccgttgtgaatccgtggggggaggtgctggcaaaggccgggacagaagaggccatagtttattctgacattgacctgaagaagctggctgagatacgccagcagatccctgttttccggcaaaagcgaagcgatctgtacgctgtcgagatgaaaaaaccttag

SEQ ID NO: 203137 - DNA, 801 bp, Artificial Sequence
  derived and/or modified sequence
tgaccccgggccgccgcccgggtgcgggccgccggcgaggccctggagaggagacgacggtggctcggccgcctctccccctctgccccgaggccccgtagagctaggccctcccttcgtcgcgcctccgcatgggtgcgggaccgggtcgccggccggcccggtgccctgcctggattccaagcctcaggagtggccggcgaggctcagaaagcgcccgggcatcctgcagcgccagctccagcagccagttgtctcaccgaggccgatggccgagtgttccttcatgcctttaggttggctctcatacaattgcaaatttcttcaatcaagtcagacaatgtgacaagggcttgttcattcatccgtgaagcagccactcagggcgccaaaatcgtgtcgttacctgagtgttttaattccccgtacggtgcgaaatactttcccgagtacgccgaaaagattccgggggagtcaactcaaaagctgtctgaggttgccaaggagtgttctatctacctgatcgggggaagcataccagaggaggacgctggtaaactgtacaatacatgcgcggttttcggccctgacggaaccctgctcgcaaagtaccggaagattcacctctttgacatcgacgtgcctggcaagatcacctttcaggagagtaagaccttgtctccgggagactcatttagcactttcgacacgccctattgccgagtgggactgggcatatgctatgatatgcggttcgccgagcttgcacagatttatgctcagagaggtgaggctgtgtag

SEQ ID NO: 203138 - DNA, 831 bp, Artificial Sequence
  derived and/or modified sequence
atgacatcctttcggctggcactgatccagctacagatatcttccatcaaatctgataacgtgacacgtgcgtgttcttttatccgtgaggccgctacgcagggggcaaaaattgtgtccttgcccgaatgtttcaattcaccttacggagctaaatactttccagaatatgccgaaaagattcctggtgagagcacacagaagctgtcagaagtggcaaaggagtgttccatttatctgatagggggatcaatccccgaagaagacgccggtaagctgtacaatacttgtgcagtttttggacccgatggtaccttgctggccaaataccggaaaattcacctgttcgacatcgacgtcccaggcaagataacattccaggaatctaagacgctgagccccggtgattccttttctaccttcgacaccccttattgtagggtcggcttgggtatctgctacgatatgcgtttcgcagagttggctcagatatatgcccaacgcggatgccagcttcttgtgtatcccggtgcatttaatctcaccacaggtcccgcacattgggagttgttgcagcgaagccgagccgtcgacaatcaggtgtacgttgcaactgcaagtccggctcgcgacgataaagctagctatgtcgcatggggccactctactgtagtgaatccctggggagaggtgctcgccaaagctgggacggaggaggccattgtttatagcgacatagacctgaaaaaattggcagagatacgccagcagatccccgtgtttcggcagaagagaagtgatctttatgctgtggaaatgaagaaaccgtag

SEQ ID NO: 203139 - DNA, 801 bp, Artificial Sequence
  derived and/or modified sequence
taaccccgtgcagctgctcgggtgagagctgctggagaagctctggagagacgcaggcgctggctaggcaggctgagcccctctgcacctcgtcccaggcgagccagaccctcactgcggagggcatcggcctgggtgagagatcgtgtggctgggagacccggtgcgttgcccggttttcaggcttccggtgttgccggagaagcccaaaaagcgcctggccacccagccgctcctgcccctgctgccagctgccttactgaggccgatggtcgggtgtttctgcatgccttcaggctggcgttgatccagttgcaaatatctagtatcaagagtgataacgtgacccgggcatgctccttcattagagaggcagcgacccaaggggcaaagatcgtgtccttgcccgaatgttttaatagcccctacggggcaaaatattttcctgagtatgctgagaagataccaggcgagtcaacccagaaattatccgaggtggccaaggaatgcagcatctatttgattggtggatcaatccccgaggaagatgctggtaaactttataatacctgtgcagtattcggacccgatgggacacttcttgcgaaatatcgcaaaatacacttgttcgacatagacgtacccggaaaaattaccttccaggaaagtaagactctgtcgccgggtgattcattttcaacctttgataccccttactgcagggtcggccttggaatctgctatgatatgcgctttgctgagctggctcagatatacgcgcagagaggtgaggccgtttag

SEQ ID NO: 203140 - DNA, 795 bp, Artificial Sequence
  derived and/or modified sequence
gccgcgcgctgcagctcgagttcgggccgcgggggaggctttggagcggcgccggcggtggctcggccggctcagcccctccgccccgcgtccccgccgtgcgcggccttccctgaggcgggcgtccgcgtgggtccgggatcgcgtggccgggcggccgggcgcactcccgggattccaggcttccggggtggcgggcgaggcccagaaagcaccaggccacccggccgcgccggcacccgccgcgtcctgcttgacagaggctgatggacgtgtatttctccacgctttccgcttggccctcatccagcttcagatttcttccatcaaatcagataacgtcactcgcgcttgtagcttcatccgggaggcagcaacgcaaggagccaaaatagtttctttgccggaatgctttaattctccatatggagcgaaatattttcctgaatatgcagagaaaattcctggtgaatccacacagaagctttctgaagtagcaaaggaatgcagcatatatctcattggaggctctatccctgaagaggatgctgggaaattatataacacctgtgctgtgtttgggcctgatggaactttactagcaaagtatagaaagatccatctgtttgacattgatgttcctggaaaaattacatttcaagaatctaaaacattgagtccgggtgatagtttctccacatttgatactccttactgcagagtgggtctgggcatctgctacgacatgcggtttgcagagcttgcacaaatctacgcacagagaggtgaggcagt

SEQ ID NO: 203141 - protein, 397 aa, Artificial Sequence
  derived and/or modified sequence
MEIVGCRAEDNSCPFRPPAMLFHGISGGHIQGIMEEMERRSKTEARLAKGAQLNGRDAGMPPLSPEKPALCAGCGGKISDRYYLLAVDKQWHLRCLKCCECKLALESELTCFAKDGSIYCKEDYYRRFSVQRCARCHLGISASEMVMRARDSVYHLSCFTCSTCNKTLTTGDHFGMKDSLVYCRAHFETLLQGEYPPQLSYTELAAKSGGLALPYFNGTGTVQKGRPRKRKSPALGVDIVNYNSGCNENEADHLDRDQQPYPPSQKTKRMRTSFKHHQLRTMKSYFAINHNPDAKDLKQLAQKTGLTKRVLQVWFQNARAKFRRNLLRQENGGVDKADGTSLPAPPSADSGALTPPGTATTLTDLTNPTITVVTSVTSNMDSHESGSPSQTTLTNLF

SEQ ID NO: 203142 - DNA, 1194 bp, Artificial Sequence
  derived and/or modified sequence
atggagattgtgggctgtcgagccgaagataacagttgtccttttcgcccacctgcaatgttgtttcacggaatctcgggtgggcatatccaaggcataatggaggaaatggagcggcgctctaagacagaggccagattggccaagggtgctcagctaaatggaagggacgccggaatgccccctctcagccctgagaaacccgccctgtgcgccggttgtggcggaaaaatctcggataggtactatctcctggccgtggataaacagtggcacttgagatgcttaaagtgttgtgagtgcaaactcgccctcgaatccgagctgacatgtttcgccaaggacggctcaatttattgcaaggaggattattaccggcggtttagtgtccagagatgcgcaaggtgtcatttgggcattagcgcctctgagatggtcatgcgagcaagggattcagtgtaccacctaagctgcttcacctgcagtacatgtaataaaacgttaactaccggggatcacttcggtatgaaggatagtctagtttattgccgcgcacacttcgaaactctgttacagggcgaatacccacctcagctcagttacacggaattagcggcaaagtcaggagggctggccttgccgtatttcaatgggaccggaaccgtccaaaaaggccgacctaggaagcgaaaatcaccggccctgggcgttgatattgtaaactacaactccggctgcaacgagaacgaagctgaccatttggacagggatcagcagccataccctccttcccagaagacaaaaaggatgcggacctcatttaagcatcaccaattacgcacaatgaaaagttattttgctatcaatcacaatccagacgctaaagatctgaagcagttggcacaaaaaacgggactaacaaaaagagtccttcaggtgtggttccagaacgctagggccaaattcaggagaaacctcctccggcaggagaatggtggcgtggacaaggcagacggcacgtctttaccagctcctccttccgccgatagcggggctcttaccccccctggtactgccactacacttactgatcttacgaatccaaccattactgtggtgacatccgtgacctctaacatggattcccatgagtctgggtcgccttctcaaaccactcttacgaacctgttttag

SEQ ID NO: 203143 - DNA, 1194 bp, Artificial Sequence
  derived and/or modified sequence
atggagatcgtgggctgcagagctgaggacaacagctgccccttccggcccccagccatgctgttccacggcatcagcggcggccacatccagggcatcatggaggagatggagaggaggagcaagacagaggcccggctggccaagggggcccagctgaatggaagagatgctggcatgccacccctgagccctgagaagccagccctgtgtgccggctgcggcggcaagatcagtgaccgctactacctgctggccgtggacaagcagtggcacctgcgctgcctgaagtgctgtgagtgcaagctggccctggagagcgagctgacctgctttgccaaggatggcagcatctactgcaaggaggactactaccgccgcttctctgtgcagagatgtgcccgctgccacctgggcatcagcgccagcgagatggtgatgagggcccgggacagcgtgtaccacctgagctgcttcacctgcagcacctgcaacaagaccctgaccaccggggaccacttcggcatgaaggacagcctggtgtactgccgggcccactttgagaccctgctgcagggcgagtacccaccccagctgagctacacagagctggccgccaagagcggcggcctggccctgccctacttcaatggaactggaacagtgcagaagggccggcccaggaagaggaagagccctgccctgggcgtggacatcgtgaactacaacagcggctgcaatgaaaatgaagctgaccacctggaccgggaccagcagccctacccacccagccagaagaccaagaggatgaggaccagcttcaagcaccaccagctgcggaccatgaagagctactttgccatcaaccacaacccagatgccaaggacctgaagcagctggcccagaagacaggcctgaccaagagggtgctgcaggtgtggttccagaatgcccgggccaagttcagaagaaacctgctgcggcaggagaatggaggagtggacaaggcagatggcaccagcctgcctgcccctccttctgctgacagcggggccctgaccccacctggaacagccaccaccctgacagacctgaccaaccccaccatcaccgtggtgacctctgtgaccagcaacatggacagccatgaaagtggcagccccagccagaccaccctgaccaacctcttctag

SEQ ID NO: 203144 - DNA, 2503 bp, Artificial Sequence
  derived and/or modified sequence
ggaacttgcaagcagccagggaacgctgaaaatagcacgtctttttctttctttgtgttcaaaactattttctttcttcaccagattttgttttcctccccccgctgcagttgtttcccattagtaactcgatctctcagagcagtaagattcgccttctacgcctctttttccctccgcccgaattgtttgttttctgcacatctccttcagggagccgctgaggcttccccccaactcttcccagttctttttgcttcccctcggccccccaagcagaccgatttccactccatctgtttcttctcctcctttctctccctctttccctccatcctcgagcgtctctgcgctcctacagggcagccctctctggtcccttgcctccttcactcggatgagctgaaagccccgggcgtgtgtatatggaaatagtggggtgccgagcagaagacaactcgtgtcctttccgccccccagccatgctctttcacgggatctccggaggccacatccaaggcatcatggaggagatggagcgcagatccaagactgaggcccgtctggccaaaggcgcccagctcaacggccgcgacgcgggcatgcccccgctcagcccggagaagcccgccctgtgcgccggctgcgggggcaagatctcggacaggtactatctgctggctgtggacaaacagtggcatctgagatgcctgaagtgctgtgaatgtaagctggccctcgagtccgagctcacctgctttgccaaggacggtagcatttactgcaaggaggattactacagaaggttctctgtgcagagatgtgcccgctgccaccttggcatttccgcctcggagatggtcatgcgcgcccgagactctgtctaccacctgagctgcttcacctgctccacttgcaacaagactctgaccacgggcgaccatttcggcatgaaggacagcctggtgtactgccgcgcccacttcgagaccctcttgcaaggagagtatccaccgcagctgagctacacggagctggcggccaagagcggcggcctggccctgccttacttcaacggtacgggcaccgtgcagaaagggcggccccggaagcggaagagcccagcgctgggagtggacatcgtcaattacaactcaggttgtaatgagaatgaggcagaccacttggaccgggaccagcagccttatccaccctcgcagaagaccaagcgcatgcgaacctctttcaagcatcaccagctccggaccatgaaatcctactttgccatcaaccacaacccggatgccaaggacctcaagcagcttgcccagaaaacaggtctgaccaaaagagttttgcaggtttggttccaaaacgcacgagccaaattcagaaggaaccttttgcggcaggagaatgggggtgttgataaagctgacggcacgtcgcttccggccccgccctcagcagacagcggagctctcactccacccggcactgcgaccactttaacagacctgaccaatcccactatcactgtagtgacatccgtgacctctaacatggacagccacgaatccggaagcccctcacaaactaccttaacaaaccttttctaacattggttttttttttttagtttttaaattcttcctcttctttttattattattctaattattattattttattatttacaagactttttttttcttctaacccacaagatatttggggaataaaaataacagcttggtgtgtagcatctgcagccacttggcaaatgagtttacagtattgtctcctttaagtgaatatattttgtctacaaagtgtatttggatttaaaaaaattaattaggtctttcagttggtaaggagagtttttgaataattctaataagtgcctcttaaaattgtatgttacttatttccagaatctcgaagaaaaaagaaaaaagagtggtattattatgggcaaataatcatattcccacttaaatgattaggttaataaagaaccagataattaattagttactttttaaatcttgcaattgtatgtgtgattatggagttttgaaaacgttacattttttaaatcttaaaactgaaaacttgtttttagtatttctatttcttacctgaactgttaattcaagtgaggaatatgatgaaataaaagcattaactacagacattttaaatagtaatgattaattaggtgagaaatctattacaggaatgtgacttttccttctcttaggggtgtacaactctaaaaactttttacttggttatttgtttttcaacatttgaaaaatacttaagctccctatgtatccatgaaaattccgcattgattttgacattccatacttttaacctcctaaagctaaaaacaatagctcggaaaccattctttctagttactttttttcccagggaaaatggaaataagcaaaatataatgttttaagaagtaaaaaaatcaatataatt

SEQ ID NO: 203145 - DNA, 1194 bp, Artificial Sequence
  derived and/or modified sequence
atggagatcgtgggctgccgggccgaggacaacagctgccccttcagacctccagcaatgctctttcacgggatcagtggtggccatattcagggtattatggaagagatggaaaggcggtccaaaacggaagcccggctggccaagggagcccagctcaacggccgtgacgccgggatgccaccgttgtcacccgagaaacccgcactttgcgctggctgcggcggcaagatctcagaccggtattacctgctagcagtggataaacaatggcatctgcggtgcttaaaatgctgtgagtgcaagttggcactggagagcgagttaacatgttttgccaaagatggtagtatttactgcaaagaggattactacagacgcttctccgtgcaacgctgcgcccgttgtcatctgggcattagcgcctcagaaatggtgatgagagccagggatagcgtataccatctgtcatgttttacttgctcaacttgtaataagacgctgaccactggcgaccacttcgggatgaaggattcattagtttactgtcgggcccacttcgagacactgcttcagggggaatacccgccacaactgtcctatacagaattggcagctaaaagcggaggactggcgctgccttattttaacggcaccggaaccgtgcaaaaaggccgtccacgcaaacggaaaagccccgccctgggagtcgacatcgtgaactacaactctggctgtaacgaaaacgaagcagatcatctggatcgggaccagcagccttaccctccatcccagaagaccaagagaatgcggacttcctttaagcaccaccagctgagaaccatgaagtcttattttgctatcaaccacaatccagatgccaaagacctcaaacaactcgcccagaagactggactgactaagagagtgctacaggtgtggtttcagaacgcgcgcgcaaagtttcggagaaaccttttaaggcaggagaacggaggtgttgacaaggcagatggcaccagcttaccagcaccaccaagtgctgactccggcgcattgactcctcctgggactgccacaacactcacagatcttaccaaccccacaataaccgtggtaacctcggtgacgtccaatatggactcccacgaatccggtagcccttcccagaccactttaactaacctgttttag

SEQ ID NO: 203146 - DNA, 1194 bp, Artificial Sequence
  derived and/or modified sequence
atggagatcgtgggatgtcgggctgaggacaattcatgcccattccgcccaccagccatgctgttccatggcatttccggagggcacattcagggcatcatggaagaaatggagaggcgaagcaagacagaagccagactggcaaagggggctcagctgaatgggagggacgctggtatgccccctctgtccccagaaaagcccgcactctgcgcaggctgcggtgggaaaatctcagatcggtattatctgttggccgtcgacaaacaatggcacctgagatgtctgaaatgctgcgagtgcaagctcgccctggagtcggagctgacctgcttcgcaaaggatggctcaatttactgtaaagaggactactatcgacggttctctgtacaacggtgcgctcggtgtcatttaggaatcagtgcctccgagatggtaatgcgagctcgggacagtgtctaccacctctcatgctttacctgcagtacgtgtaataagaccttaaccaccggtgatcactttggtatgaaagactctctggtgtactgtcgcgcacattttgagacccttctgcaaggggaatacccaccacagcttagctacactgagcttgctgccaaatcagggggactcgcgctgccatatttcaatggtaccggaacagttcagaagggcaggccgaggaagcgaaagagccctgccttgggcgtagatatagtcaattacaactccggatgtaacgagaacgaggcggatcaccttgacagagaccagcaaccatatccaccgtctcagaaaacgaagcgaatgcgtaccagcttcaaacatcaccagctccgaaccatgaagtcatattttgccatcaatcacaatcctgatgccaaggacctgaagcagcttgcccaaaagaccggcttgactaagcgcgttctccaggtttggttccagaacgcaagggctaagttcagacgcaatcttctcagacaagaaaacgggggtgtggacaaggcggatggtaccagcctccctgccccaccctccgctgattccggggctttgaccccacctggaaccgcaactacattaaccgacctgacaaatcccacaattacagtcgtaacatctgtaacttcaaatatggattctcacgagtctggtagcccttctcaaaccacacttacaaacctgttctag

SEQ ID NO: 203147 - DNA, 1194 bp, Artificial Sequence
  derived and/or modified sequence
atggagatcgtgggctgcagagccgaggacaacagctgccccttcagaccccccgccatgctgttccacggcatcagcggcggccacatccagggcatcatggaggagatggagagaagaagcaagaccgaggccagactggccaagggcgcccagctgaacggcagagacgccggcatgccccccctgagccccgagaagcccgccctgtgcgccggctgcggcggcaagatcagcgacagatactacctgctggccgtggacaagcagtggcacctgagatgcctgaagtgctgcgagtgcaagctggccctggagagcgagctgacctgcttcgccaaggacggcagcatctactgcaaggaggactactacagaagattcagcgtgcagagatgcgccagatgccacctgggcatcagcgccagcgagatggtgatgagagccagagacagcgtgtaccacctgagctgcttcacctgcagcacctgcaacaagaccctgaccaccggcgaccacttcggcatgaaggacagcctggtgtactgcagagcccacttcgagaccctgctgcagggcgagtaccccccccagctgagctacaccgagctggccgccaagagcggcggcctggccctgccctacttcaacggcaccggcaccgtgcagaagggcagacccagaaagagaaagagccccgccctgggcgtggacatcgtgaactacaacagcggctgcaacgagaacgaggccgaccacctggacagagaccagcagccctacccccccagccagaagaccaagagaatgagaaccagcttcaagcaccaccagctgagaaccatgaagagctacttcgccatcaaccacaaccccgacgccaaggacctgaagcagctggcccagaagaccggcctgaccaagagagtgctgcaggtgtggttccagaacgccagagccaagttcagaagaaacctgctgagacaggagaacggcggcgtggacaaggccgacggcaccagcctgcccgccccccccagcgccgacagcggcgccctgaccccccccggcaccgccaccaccctgaccgacctgaccaaccccaccatcaccgtggtgaccagcgtgaccagcaacatggacagccacgagagcggcagccccagccagaccaccctgaccaacctgttctag

SEQ ID NO: 203148 - protein, 712 aa, Artificial Sequence
  derived and/or modified sequence
MQPGSAPPPGRMDPSAPQPRAETSGKDIWHPGERCLAPSPDNGKLCEASIKSITVDENGKSFAVVLYADFQERKIPLKQLQEVKFVKDCPRNLIFDDEDLEKPYFPNRKFPSSSVAFKLSDNGDSIPYTINRYLRDYQREGTRFLYGHYIHGGGCILGDDMGLGKTVQVISFLAAVLHKKGTREDIENNMPEFLLRSMKKEPLSSTAKKMFLIVAPLSVLYNWKDELDTWGYFRVTVLHGNRKDNELIRVKQRKCEIALTTYETLRLCLDELNSLEWSAVIVDEAHRIKNPKARVTEVMKALKCNVRIGLTGTILQNNMKELWCVMDWAVPGLLGSGTYFKKQFSDPVEHGQRHTATKRELATGRKAMQRLAKKMSGWFLRRTKTLIKDQLPKKEDRMVYCSLTDFQKAVYQTVLETEDVTLILQSSEPCTCRSGQKRRNCCYKTNSHGETVKTLYLSYLTVLQKVANHVALLQAASTSKQQETLIKRICDQVFSRFPDFVQKSKDAAFETLSDPKYSGKMKVLQQLLNHCRKNRDKVLLFSFSTKLLDVLQQYCMASGLDYRRLDGSTKSEERLKIVKEFNSTQDVNICLVSTMAGGLGLNFVGANVVVLFDPTWNPANDLQAIDRAYRIGQCRDVKVLRLISLGTVEEIMYLRQIYKQQLHCVVVGSENAKRYFEAVQGSKEHQGELFGIHNLFKFRSQGSCLTKDILEV

SEQ ID NO: 203149 - DNA, 1596 bp, Artificial Sequence
  derived and/or modified sequence
atgaacaagaccaaccaggtgtacgccgccaacgaggaccacaacagccagttcatcgacgactacagcagcagcgacgagagcctgagcgtgagccacttcagcttcagcaagcagagccacagacccagaaccatcagagacagaaccagcttcagcagcaagctgcccagccacaacaagaagaacagcaccttcatccccagaaagcccatgaagtgcagcaacgagaaggtggtgaaccaggagcagagctacgagagcatggacaagttcctggacggcgtgcaggaggtggcctacatccacagcaaccagaacgtgatcggcagcagcaaggccgagaaccacatgagcagatgggccgcccacgacgtgttcgagctgaagcagttcagccagctgcccgccaacatcgccgtgtgcagcagcaagacctacaaggagaaggtggacgccgacaccctgccccacaccaagaagggccagcagcccagcgagggcagcatcagcctgcccctgtacatcagcaaccccgtgaaccagaagaagaagaaggtgtaccacaccaaccagaccaccttcatcatcggcgagacccccaagggcatcagaagaaagcagttcgaggagatggccagctacttcaacagcagcagcgtgaacgagttcgccaagcacatcaccaacgccaccagcgaggagagacagaagatgctgagagacttctacgccagccagtaccccgaggtgaaggagttcttcgtggacagcgtgagccagttcaacaacagcagcttcgagaagggcgagcagagaaccagaaagaagagcgacaagagagagagcctgatcaagcccagactgagcgacagcgagaccctgagcttcaaggacagcaccaacaagatcagccaggtgtgcagcctgaagacctacaagagaaagagcgtgaagttccagaaccacatcagctacagagaggaggtgttcttcaacgacgccgagaccaagaagagccccgtgagcagcacccaggagatcgacagcggcaagaacagccaggccagcgaggacaccgtgaccagcagaagcctgaacagcgagagcgagaccagagagagaagactggagaacaccatgaaggaccagcaggacctgaccagaaccggcatcagcagaaaggagcccctgctgaagctggagaacaagaagatcgagaaccccgtgctggagaacaccagcgtgatcagcctgctgggcgacaccagcatcctggacgacctgttcaagagccacggcaacagccccacccagctgcccaagaaggtgctgagcggccccatggagaaggccaagcagagacccaaggacttctgggacatcctgaacgagcagaacgacgagagcctgagcaagctgaccgacctggccgtgatcgagaccctgtgcgagaaggcccccctggccgcccccttcaagagaagagaggagcccgccaccagcctgtggaagagcaacgagaagttcctgtggaagaagttcagccccagcgacaccgacgagaacgccaccaacacccagagcaccacctag

SEQ ID NO: 203150 - DNA, 1596 bp, Artificial Sequence
  derived and/or modified sequence
atgaataaaacgaaccaggtctacgcggcaaatgaggatcataattcacagtttatcgatgactacagttcctctgacgagtctctgagcgtgtctcatttttcttttagcaagcaatcacaccgccctcggacaattagagatcgaacaagcttctcgagtaagttgccttctcataacaagaaaaactctacattcatccctcgcaaaccgatgaagtgctccaatgagaaggtggtgaaccaggaacagtcatacgagagcatggacaagtttcttgacggcgtgcaagaagttgcctacatacacagcaaccaaaacgtgatcggttcctccaaagctgaaaatcatatgagccgatgggctgctcacgatgtgtttgagctgaagcagtttagtcagctgcccgccaatattgctgtttgtagctccaagacatacaaggagaaggtggacgccgacacactaccacacactaagaagggccaacagccctctgaggggtcaatttctctgccactttacatttcgaatcccgtgaatcaaaagaagaaaaaagtatatcataccaaccagacaactttcatcatcggtgagacacccaaaggcatccgcagaaagcagttcgaggaaatggccagttactttaactcctcctccgtgaacgaatttgccaaacacattaccaacgcgacatccgaggagagacagaaaatgcttagggatttctacgcgtcgcaatatcccgaggtaaaagagtttttcgtggacagcgtgtctcagttcaacaacagttcgttcgagaagggagagcagaggacccgcaagaaatctgacaagagggagtccctcattaagcccagattatcagattcagaaaccctgagcttcaaggactctacgaataagatctcacaggtatgctctcttaagacgtataagcggaagagcgtgaagttccagaatcacatttcctacagagaggaggtctttttcaatgacgcagagacgaagaaatcccccgtaagctccacgcaagagattgactccggtaagaatagccaggcttccgaagataccgtaaccagccgctcactgaacagtgagtccgaaactagagaacggcggctcgaaaacacaatgaaggaccagcaggatttgacacgcactggaatctctcggaaggaacccctgctaaagctggagaataaaaaaattgaaaatcccgtacttgagaacacctcagtgatctccctgctgggcgacaccagcatcctagacgacctgttcaagagccacggaaattctcctactcagctcccaaaaaaagtgttgtcagggcctatggagaaggccaaacagcgacccaaagacttttgggacatcctcaatgagcagaatgatgagagcctaagtaaactgaccgatctggctgtgattgagactctttgcgaaaaagccccgctggccgccccctttaagaggcgagaggaaccggctacttccttgtggaagagcaacgagaaatttctgtggaaaaaattctccccctcagacacagacgagaatgccacgaatacccaatcaaccacttag

SEQ ID NO: 203151 - DNA, 1596 bp, Artificial Sequence
  derived and/or modified sequence
atgaacaagaccaaccaggtgtatgctgccaatgaagaccacaacagccagttcattgatgactacagcagcagtgatgagagcctgtctgtgagccacttctccttcagcaagcagagccaccggcccaggaccatccgggacaggaccagcttcagcagcaagctgcccagccacaacaagaagaacagcaccttcatccccaggaagcccatgaagtgcagcaatgagaaggtggtgaaccaggagcagagctatgagagcatggacaagttcctggatggagtgcaggaggtggcctacatccacagcaaccagaatgtgattggcagcagcaaggccgagaaccacatgagccgctgggccgcccatgatgtgtttgagctgaagcagttcagccagctgcctgccaacattgctgtgtgcagcagcaagacctacaaggagaaggtggatgctgacaccctgccccacaccaagaagggccagcagcccagcgagggcagcatcagcctgcccctgtacatcagcaaccctgtgaaccagaagaagaagaaggtgtaccacaccaaccagaccaccttcatcattggagagacccccaagggcatccggaggaagcagtttgaggagatggccagctacttcaacagcagctctgtgaatgaatttgccaagcacatcaccaatgccaccagcgaggagcggcagaagatgctgcgggacttctacgccagccagtacccagaggtgaaggagttctttgtggacagcgtgtcccagttcaacaacagcagctttgagaagggggagcagaggaccaggaagaagagtgacaagcgggagagcctcatcaagccccggctgagtgacagcgagaccctgtccttcaaggacagcaccaacaagatcagccaggtgtgcagcctgaagacctacaagaggaagtctgtgaagttccagaaccacatctcctaccgggaggaggtgttcttcaatgatgctgagaccaagaagagccctgtgagcagcacccaggagattgacagcggcaagaacagccaggccagcgaggacacagtgaccagccgcagcctgaacagcgagagcgagacccgggagcggcggctggagaacaccatgaaggaccagcaggacctgaccaggacaggcatcagcaggaaggagcccctgctgaagctggagaacaagaagattgaaaatcctgtgctggagaacaccagcgtcatcagcctgctgggggacaccagcatcctggatgacctcttcaagagccacggcaacagccccacccagctgcccaagaaggtgctgagcggccccatggagaaggccaagcagaggcccaaggacttctgggacatcctgaatgagcagaatgatgagagcctgagcaagctgacagacctggccgtcatcgagaccctgtgtgagaaggcccccctggccgcccccttcaagagaagagaggagcccgccaccagcctgtggaagagcaatgagaagttcctgtggaagaagttcagccccagcgacacagatgaaaatgccaccaacacccagagcaccacctag

SEQ ID NO: 203152 - DNA, 1596 bp, Artificial Sequence
  derived and/or modified sequence
atgaacaagaccaaccaggtgtacgccgccaacgaggaccacaactcccaattcatcgacgattacagtagctccgacgagtccctaagcgtatcccattttagcttttcaaagcaatcacaccggccacgcacaattcgagaccgcacctcctttagctctaagttaccttcccacaacaaaaaaaacagcactttcattccgcggaagccaatgaaatgctctaatgaaaaggtcgtaaaccaagaacagtcctatgaatctatggacaaatttctagatggggtccaggaagtcgcctatatacacagcaaccagaacgtaatcggaagctcaaaggctgagaatcatatgagtaggtgggcagcccacgatgtgttcgaactgaagcagttttcccagctgcccgcgaacattgccgtgtgttcgagtaagacctacaaggagaaagtggacgccgacacattgccacacactaagaaaggacagcagccctccgaagggtcaatttcacttccgctctacatctccaatcccgtgaatcaaaaaaagaagaaagtataccatactaaccagactacatttattataggagagacaccaaaggggatccggaggaaacagttcgaggagatggccagctatttcaattcttcttctgtgaatgagttcgcaaaacacatcaccaacgcaaccagcgaagagcggcagaagatgctgcgggacttttacgcctcccagtacccagaagttaaggaattctttgttgactcagtgtcacagtttaacaattctagtttcgaaaagggagaacagcgcacccggaaaaagagcgacaagcgcgagagccttatcaagcctaggctgtcagacagcgagacattatcattcaaggattctactaacaagatcagtcaggtgtgctctctgaagacatataaacgcaaatctgtaaaatttcaaaaccacatcagctatcgcgaagaggtgtttttcaacgatgccgaaactaaaaaatccccagtttcctctacccaagaaatcgactccggcaaaaattcacaggccagtgaggacacagtgaccagccggtcacttaactctgagtccgaaacccgcgaacgcaggctcgagaacaccatgaaagaccagcaggacctcacccggaccggaataagcaggaaagaacccttgctgaagctggaaaataagaagattgagaatcccgtactggaaaacacaagcgtgatcagccttctgggggatacctcgatcctggacgacctgttcaaatcccacggtaatagccctactcagctacccaagaaggttctgtctggcccaatggagaaggccaaacaacgaccaaaggacttttgggacattctgaacgagcaaaacgatgagtctctttcaaaactgaccgatctagcagttatcgaaacactgtgcgagaaggctccactcgcagcaccatttaaaagacgggaagagccagcgacaagcctgtggaaatccaacgaaaagtttctttggaagaaatttagccccagcgataccgacgagaatgctaccaacactcagtctactacctag

SEQ ID NO: 203153 - DNA, 2109 bp, Artificial Sequence
  derived and/or modified sequence
cagaaattagataacatcctaaatccaaaagaaaagcatattttttataaaagtgagaagattttagaacagaatatttcttccaagtctgacgagaaaaaaattaaaaatacagataaacattgcattttacagaatgtcacagaatcagaagatagtgatgtcatctgtcctacacaatacacaactgagagattccccgacaatagtataaggtttaagccacccttggaaggatctgaggattctgaaacagaacacactgtaaaaacaagaaataatgataatagtcgaaacactgatgacaaaagaaatggaataatttcaaaaaagttaagtcctgagaacacaaccctgaaatctattttgaaaagaaaaggcaccagtgatatcagtgatgaatctgatgacattgaaatttcttccaagtcaagagtaagaaagagagctagttcattgaggtttaagagaataaaagaaaccaaaaaagaacttcacaattctcccaaaacaatgaacaaaacaaaccaagtgtatgcagcaaatgaggatcataactctcagtttattgatgattattcatcctcagatgagagtttatccgtcagccacttcagtttctctaaacagagccacagaccaagaactataagagacagaactagtttttcttcaaaattgcctagccataataagaaaaatagcacttttattccaagaaaaccaatgaaatgttcaaatgagaaagttgttaatcaagagcagtcgtatgaatcaatggataaatttttagatggcgttcaggaagtggcttatattcactcaaaccagaatgtaattggatcgagcaaagctgaaaatcacatgagccgatgggcagcacatgacgtatttgagttgaagcagttttctcagctgcctgctaacatagctgtttgcagttctaagacatataaagaaaaagtggatgcagatacattgccacacacaaagaaaggccagcaaccgagtgaaggcagcatttcacttcctctttacatttcaaatcctgtaaaccagaagaagaaaaaagtctaccatacaaaccagaccaccttcataattggagaaacaccaaaaggaatccgcagaaaacaatttgaagaaatggcctcttattttaactcgtcttctgtaaacgaatttgctaaacatataaccaatgccacatcagaagaacgacagaaaatgctaagagacttttatgcttctcaatatccagaggtaaaagaattttttgtggattctgtgtcacaattcaacaattcttcctttgagaaaggagagcagcgcacccggaagaaatctgataaaagagaatctcttataaaaccaaggctgtcagattctgaaaccttgtcatttaaagattctaccaacaaaatttctcaagtttgcagcctaaaaacatataaaagaaaatcagttaagtttcagaatcatatttcctatagagaagaggtgttttttaatgatgcagaaactaagaaatcacctgttagttctactcaagagattgacagtgggaaaaacagccaggcatccgaagatactgtgacatcccgttctctgaacagtgagtctgaaacacgtgagagaaggttagaaaataccatgaaagaccaacaggacctcacaagaacgggcatttcaagaaaagaaccccttctcaaattggaaaacaaaaagatagaaaatccagtgctggaaaatacttctgtgataagcttacttggtgatacctctattcttgatgacctttttaaaagtcatgggaacagtcccacacaactgccaaagaaagttctttcagggcccatggaaaaagcaaaacagagaccaaaagatttctgggacatcttgaatgagcagaatgatgagagtcttagtaaactcacagacttggcagtaatagagactctgtgtgaaaaagcacctctagcagcaccctttaaaaggagagaagagccagcaacttctctttggaaatcaaatgagaaatttttatggaagaaatttagcccaagtgatacagatgaaaacgcaaccaatacacagagtaccacataa

SEQ ID NO: 203154 - DNA, 1596 bp, Artificial Sequence
  derived and/or modified sequence
atgaataaaaccaatcaagtctacgccgctaatgaagaccacaacagccagttcattgatgattactcatcgtcagacgagtccctgtctgtgagtcatttttcattctcaaaacaaagtcacaggcccaggacaatccgcgatcggacgagtttttccagcaaattgccatcccacaacaagaagaattccaccttcattccaagaaaacccatgaagtgtagtaacgaaaaagtggtcaatcaggagcagtcatatgaaagtatggataaatttctggacggcgttcaggaagtggcctacatccattccaaccagaatgtcatcggaagctccaaggctgaaaatcacatgagccgatgggcagcccacgacgtcttcgaattaaagcagtttagccagttacctgcaaacatagctgtctgttctagtaaaacatacaaggaaaaagtcgacgctgataccctgcctcatacaaaaaaaggtcaacagccgtcagagggtagcatctctcttccattgtacatttctaaccccgtcaaccagaagaagaagaaggtttatcacacaaatcagacaacgtttattatcggcgaaacacccaaggggatccgcaggaagcaattcgaagagatggcctcctacttcaactcttcaagcgtgaacgaattcgccaaacacattacaaacgccacttctgaagaacgacagaagatgctccgggacttctacgccagccagtatccggaggtgaaagagttctttgttgactcggtcagccagttcaacaacagttctttcgagaaaggcgagcaacgcacgaggaagaaatcagacaaacgtgaatcacttattaaacctcgactgtcggactccgagactctctcctttaaggacagcacgaataagatctcccaagtgtgctcccttaaaacttacaagcggaagagcgtcaagttccaaaatcatatatcgtatcgggaagaggtctttttcaacgacgccgaaacaaagaaatccccagtgtcgtccactcaggaaattgattccgggaagaactctcaggcaagtgaagacacagtgacttctagatccctgaatagcgagagcgagacacgtgagcgccgactggagaataccatgaaggatcagcaggacctgacccgcacgggaatatcacgaaaggagcccctgctgaagttagagaacaagaaaatagaaaatcctgtgttagagaacacttcggttattagtcttctgggcgataccagtatcctggatgacctgttcaagtcacacggaaattcacctacccaactccctaagaaggtgttgtcaggacctatggaaaaagctaagcagagacctaaagatttttgggacatactaaatgagcagaatgatgagagcctgtctaaactgaccgatctggccgtcattgagaccctgtgtgaaaaagcaccgttggcggctcccttcaagcgccgagaggaacccgctacatcattatggaagtccaacgagaagtttttgtggaaaaaattttcgccctctgacactgatgagaatgctactaatacccagagcacaacctag

SEQ ID NO: 203155 - protein, 592 aa, Artificial Sequence
  derived and/or modified sequence
MEKARPLWANSLQFVFACISYAVGLGNVWRFPYLCQMYGGGSFLVPYIIMLIVEGMPLLYLELAVGQRMRQGSIGAWRTISPYLSGVGVASVVVSFFLSMYYNVINAWAFWYLFHSFQDPLPWSVCPLNGNHTGYDEECEKASSTQYFWYRKTLNISPSLQENGGVQWEPALCLLLAWLVVYLCILRGTESTGKVVYFTASLPYCVLIIYLIRGLTLHGATNGLMYMFTPKIEQLANPKAWINAATQIFFSLGLGFGSLIAFASYNEPSNNCQKHAIIVSLINSFTSIFASIVTFSIYGFKATFNYENCLKKVSLLLTNTFDLEDGFLTASNLEQVKGYLASAYPSKYSEMFPQIKNCSLESELDTAVQGTGLAFIVYTEAIKNMEVSQLWSVLYFFMLLMLGIGSMLGNTAAILTPLTDSKIISSHLPKEAISGLVCLVNCAIGMVFTMEAGNYWFDIFNDYAATLSLLLIVLVETIAVCYVYGLRRFESDLKAMTGRAVSWYWKVMWAGVSPLLIVSLFVFYLSDYILTGTLKYQAWDASQGQLVTKDYPAYALAVIGLLVASSTMCIPLAALGTFVQRRLKRGDADPVA

SEQ ID NO: 203156 - DNA, 1779 bp, Artificial Sequence
  derived and/or modified sequence
atggagaaggccagacccctgtgggccaacagcctgcagttcgtgttcgcctgcatcagctacgccgtgggcctgggcaacgtgtggagattcccctacctgtgccagatgtacggcggcggcagcttcctggtgccctacatcatcatgctgatcgtggagggcatgcccctgctgtacctggagctggccgtgggccagagaatgagacagggcagcatcggcgcctggagaaccatcagcccctacctgagcggcgtgggcgtggccagcgtggtggtgagcttcttcctgagcatgtactacaacgtgatcaacgcctgggccttctggtacctgttccacagcttccaggaccccctgccctggagcgtgtgccccctgaacggcaaccacaccggctacgacgaggagtgcgagaaggccagcagcacccagtacttctggtacagaaagaccctgaacatcagccccagcctgcaggagaacggcggcgtgcagtgggagcccgccctgtgcctgctgctggcctggctggtggtgtacctgtgcatcctgagaggcaccgagagcaccggcaaggtggtgtacttcaccgccagcctgccctactgcgtgctgatcatctacctgatcagaggcctgaccctgcacggcgccaccaacggcctgatgtacatgttcacccccaagatcgagcagctggccaaccccaaggcctggatcaacgccgccacccagatcttcttcagcctgggcctgggcttcggcagcctgatcgccttcgccagctacaacgagcccagcaacaactgccagaagcacgccatcatcgtgagcctgatcaacagcttcaccagcatcttcgccagcatcgtgaccttcagcatctacggcttcaaggccaccttcaactacgagaactgcctgaagaaggtgagcctgctgctgaccaacaccttcgacctggaggacggcttcctgaccgccagcaacctggagcaggtgaagggctacctggccagcgcctaccccagcaagtacagcgagatgttcccccagatcaagaactgcagcctggagagcgagctggacaccgccgtgcagggcaccggcctggccttcatcgtgtacaccgaggccatcaagaacatggaggtgagccagctgtggagcgtgctgtacttcttcatgctgctgatgctgggcatcggcagcatgctgggcaacaccgccgccatcctgacccccctgaccgacagcaagatcatcagcagccacctgcccaaggaggccatcagcggcctggtgtgcctggtgaactgcgccatcggcatggtgttcaccatggaggccggcaactactggttcgacatcttcaacgactacgccgccaccctgagcctgctgctgatcgtgctggtggagaccatcgccgtgtgctacgtgtacggcctgagaagattcgagagcgacctgaaggccatgaccggcagagccgtgagctggtactggaaggtgatgtgggccggcgtgagccccctgctgatcgtgagcctgttcgtgttctacctgagcgactacatcctgaccggcaccctgaagtaccaggcctgggacgccagccagggccagctggtgaccaaggactaccccgcctacgccctggccgtgatcggcctgctggtggccagcagcaccatgtgcatccccctggccgccctgggcaccttcgtgcagagaagactgaagagaggcgacgccgaccccgtggcctag

SEQ ID NO: 203157 - DNA, 1779 bp, Artificial Sequence
  derived and/or modified sequence
atggaaaaagcccgccctctgtgggcaaattcattacaattcgtcttcgcatgcatttcttacgccgtaggcctgggaaatgtgtggcgttttccatacttgtgccaaatgtatggcggtggtagcttcctcgtgccctatatcatcatgttaatcgtggaaggaatgccccttctttacttggagctcgcggttgggcaacggatgaggcagggtagcattggcgcttggcgaacaatcagcccctacctgtcaggcgtgggagtggcctcggtggtcgtgagtttctttctgtccatgtactataatgtcatcaatgcttgggcattctggtacctattccattcatttcaggaccctctgccttggtccgtatgcccactgaatggaaatcacacaggttacgatgaggagtgcgaaaaagcttcttccactcaatacttttggtatagaaagaccctgaatataagtccgtctctacaagaaaacgggggtgtccagtgggaaccagcattgtgcctactcctggcttggctggttgtgtacttgtgtattcttcggggtaccgaatccacgggaaaggttgtctatttcacagcttctctcccgtactgcgtgcttatcatttacctgattagggggctgaccttacacggtgcgacaaatggcctgatgtacatgtttacaccaaagatcgagcagctggctaatcccaaggcctggatcaacgccgccacacagatcttcttcagcctggggctgggcttcggatcccttatcgcatttgctagctataatgagccatccaataattgtcagaaacacgctattattgtatcactcatcaattctttcactagcattttcgcctcgatagtgactttctcgatctatgggttcaaagcaacatttaactacgagaactgcctgaagaaggtgagtctgctcctcactaatacctttgatctggaagacgggtttttgacggcctctaacctcgaacaggtgaaaggctacctggcttccgcttacccaagtaagtattctgagatgttccctcaaatcaagaactgttctctagagtctgagttggacactgccgttcaggggactggattggcatttatcgtatatacggaagctatcaagaatatggaggtgtcccaactgtggagtgtcctgtattttttcatgcttctgatgctcggaatcggttctatgctcggcaatactgccgcaattcttacacccctcactgacagtaaaataatctcaagtcacctgccgaaggaggccatctccgggcttgtctgccttgtgaactgcgccatcggtatggtgttcactatggaggccggaaactactggttcgacattttcaatgactatgctgcaacactctcgctgctgctgatagtgctcgttgaaaccatcgcggtctgctacgtttacggcctgaggcgattcgaatcagacttaaaggcaatgaccgggagggccgtgtcctggtactggaaggtcatgtgggcaggtgttagtcccctgctcattgtctctctgttcgtcttttatctttctgattatattctgacaggcactctgaagtaccaggcttgggatgccagccagggtcaactggtgaccaaagactaccccgcctatgccctggcagtaattggactacttgtcgcctcttcaacaatgtgtatccccttggctgccttgggcactttcgtccagagaagattgaaaaggggcgatgccgacccagtcgcttag

SEQ ID NO: 203158 - DNA, 1779 bp, Artificial Sequence
  derived and/or modified sequence
atggagaaggcccggcccctgtgggccaacagcctgcagtttgtgtttgcctgcatctcctatgctgtgggcctgggcaatgtgtggaggttcccctacctgtgccagatgtatggaggcggcagcttcctggtgccctacatcatcatgctgattgtggagggcatgcccctgctgtacctggagctggccgtgggccagaggatgaggcagggcagcatcggggcctggaggaccatcagcccctacctgtctggagtgggcgtggcctctgtggtggtgtccttcttcctgtccatgtactacaacgtcatcaatgcctgggccttctggtacctgttccacagcttccaggaccccctgccctggagcgtgtgccccctgaatggaaaccacacaggctatgatgaggagtgtgagaaggccagcagcacccagtacttctggtacaggaagaccctgaacatcagccccagcctgcaggagaatggaggagtgcagtgggagcccgccctgtgcctgctgctggcctggctggtggtgtacctgtgcatcctgcggggcacagagagcacaggcaaggtggtgtacttcaccgccagcctgccctactgtgtgctgatcatctacctgatccggggcctgaccctgcacggggccaccaacggcctgatgtacatgttcacccccaagattgagcagctggccaaccccaaggcctggatcaatgctgccacccagatcttcttcagcctgggcctgggcttcggcagcctcatcgcctttgccagctacaatgagcccagcaacaactgccagaagcacgccatcatcgtgtccctcatcaacagcttcaccagcatctttgccagcatcgtgaccttcagcatctacggcttcaaggccaccttcaactatgagaactgcctgaagaaggtgtccctgctgctgaccaacacctttgacctggaggatggcttcctgacagccagcaacctggagcaggtgaagggctacctggccagcgcctaccccagcaagtacagcgagatgttcccccagatcaagaactgcagcctggagagcgagctggacacagctgtgcagggcaccggcctggccttcatcgtgtacacagaggccatcaagaacatggaggtgtcccagctgtggagcgtgctgtacttcttcatgctgctgatgctgggcatcggctccatgctgggcaacacagctgccatcctgacccccctgacagacagcaagatcatcagcagccacctgcccaaggaggccatcagcggcctggtgtgcctggtgaactgtgccatcggcatggtgttcaccatggaggccggcaactactggtttgacatcttcaatgactatgctgccaccctgagcctgctgctgattgtgctggtggagaccatcgctgtgtgctacgtgtatggcctgcggagatttgaaagtgacctgaaggccatgacaggccgggctgtgtcctggtactggaaggtgatgtgggccggcgtgagccccctgctgattgtgtccctgtttgtgttctacctgagtgactacatcctgaccggcaccctgaagtaccaggcctgggatgccagccagggccagctggtgaccaaggactacccagcctatgccctggccgtgattggcctgctggtggccagcagcaccatgtgcatccccctggccgccctgggcacctttgtgcagaggcggctgaagagaggagatgctgaccctgtggcctag

SEQ ID NO: 203159 - DNA, 1779 bp, Artificial Sequence
  derived and/or modified sequence
atggagaaggcccggcccctgtgggccaacagcctgcagttcgtgtttgcctgcatttcctatgcagtcggtctgggaaacgtctggagatttccctacttatgccaaatgtatggcggcggaagttttttagtgccctatatcatcatgctgatcgtggaaggcatgccattgctgtatctggaactggccgtaggccagaggatgcggcaaggaagtataggagcctggaggactatctcaccgtacttaagcggtgttggagtggccagtgtggtggtgtcctttttccttagcatgtactataatgtaatcaatgcatgggcattttggtatttgttccatagctttcaggatccattgccatggtccgtctgtccgctgaacggcaaccacactggatatgatgaggagtgcgagaaggcatcgtctacccagtatttctggtatagaaaaacacttaatatctcaccgtccctccaggaaaacgggggcgtccaatgggagccagctctctgtctcttgttggcctggctagtcgtgtacctctgtatcctgcgtgggaccgagtccaccggaaaagtggtgtacttcacagcctctctcccatattgtgtgctcatcatctatctgattcgggggctcacacttcatggagctacaaatggtttaatgtacatgtttactcctaaaatcgaacagctcgccaatcctaaggcgtggattaacgctgccacacaaatattcttctctctcgggctcggcttcggctccctgatcgcatttgccagttataacgagccaagcaacaactgtcagaaacatgccatcattgtgtcgttaattaacagctttacctccatcttcgcctctatagtcactttttccatctacggatttaaggccacatttaactacgaaaactgtctgaaaaaggtctctctgctgctaacaaacacatttgacctggaagatggctttctaaccgcctctaatctggagcaggtaaaggggtatcttgcctcagcctacccgtctaaatatagcgagatgtttccccagatcaagaactgttcactggaatccgaactggacaccgcggttcagggcactggacttgccttcattgtatacactgaggctatcaagaacatggaggtttcccagctatggagcgtgctgtacttttttatgttgctgatgctggggatagggtccatgctgggaaatacggcagccattttgaccccacttactgactcaaaaatcatctctagccatctcccaaaagaagctatatctggactggtgtgtctcgtgaactgcgcaatcggaatggtcttcacaatggaagctgggaattattggttcgatatctttaacgattacgctgctaccctgtctctgctactgattgtgctcgtcgaaactatagcggtctgttacgtttatgggttgcgccggtttgagtccgacctcaaagccatgactgggagagcagtcagctggtattggaaagtgatgtgggccggagtctccccactgttgattgtgtccctttttgttttctacctgtccgattacattctgacaggtaccctgaaataccaggcatgggatgcatcccagggacagctcgtcacgaaggactacccagcatatgctttggccgtgataggtctgcttgtggcgagtagcacaatgtgcatccctctggctgccctggggacattcgtccaacgacggctaaagcggggcgatgccgatccggtggcctag

SEQ ID NO: 203160 - DNA, 1779 bp, Artificial Sequence
  derived and/or modified sequence
atggaaaaggctaggcccctctgggccaattccctgcagtttgtatttgcatgtatatcttacgctgtcggcctaggtaacgtgtggcgctttccttacttgtgccagatgtacgggggaggctcattcctggtcccttatataattatgctgatcgttgaaggcatgcccctgctgtacctcgaactagcagtgggccagaggatgaggcaggggtctatcggagcatggagaaccattagtccctatctatccggagtgggtgtggcctcagtcgtggtgtctttcttcctgtctatgtactacaatgtcatcaacgcctgggctttctggtatttgtttcatagttttcaagatccgttgccttggagcgtatgccccctgaatggaaatcatactggctatgacgaggagtgcgagaaggcttcctcaacccagtacttctggtataggaagactttaaacataagtccgtcgctgcaggaaaacggcggtgtgcagtgggaaccagctctttgtctgctacttgcatggctcgtggtgtacctttgtatcttgagaggcactgagagcacgggcaaagttgtctatttcacggcctctctgccatactgtgtcttgatcatataccttattcgtggacttaccctgcatggagcaacgaacggtctgatgtatatgtttaccccaaagattgagcagttagcaaaccccaaagcttggattaacgctgcaacccagatttttttcagtctggggctgggtttcggctcactaatcgctttcgcttcttacaatgaaccaagtaacaattgtcaaaagcacgccatcatcgttagcctgatcaacagttttacttccatctttgcctccatcgtgacattttcaatctacggctttaaagcaacctttaactatgagaattgcctgaaaaaagtgagcctgttactcaccaacacattcgacctcgaagacggcttcctgacagcctcaaaccttgaacaggtgaagggatacctggcttcagcgtatcccagtaaatacagtgaaatgtttccacaaattaaaaattgttccctggaaagtgaattggacacggcggtacaggggacggggttggcatttatcgtgtatacggaggctataaagaatatggaagtcagccagctctggagcgttctctacttctttatgttacttatgttggggatcggaagcatgctcggaaacactgccgcaatactgacacctctaacggactccaagatcattagcagtcatctccccaaagaagctattagcggcctggtgtgcttggtcaactgcgcaattgggatggtattcacaatggaagccggtaactactggttcgatattttcaacgactatgccgcaacactttcgctgctgctaatcgtgttagttgagactattgctgtctgttacgtctacggtctcagacgatttgagagtgaccttaaagccatgacaggaagagctgtcagttggtattggaaggtgatgtgggctggggtgtctcccctcttaatagtgtctctgttcgtattttatctctctgattatattctcacggggacactgaagtaccaggcctgggatgctagccaagggcagctggtcacaaaagactaccccgcttacgcacttgctgtgatcgggcttctcgtcgcaagcagtactatgtgcatacctctcgctgcactcggaacctttgtacagagacgcctcaagagaggtgacgccgatcctgtggcctag

SEQ ID NO: 203161 - DNA, 5423 bp, Artificial Sequence
  derived and/or modified sequence
gaggcgcggggccacccccaagccgagccggggtgggacggcgcgcctggcgaccgcgcactgagactgccgtgccggacccccgagccggagccgagcgcgccgaggccggggccatggagaaagcgcggccgctgtgggccaactcgctacagttcgtgttcgcctgcatctcgtacgccgtgggcctgggcaacgtgtggcgattcccgtacctgtgccagatgtacggcggaggtagtttcctggtcccctacatcatcatgcttatcgtggagggaatgccgctcttgtacctggaactggctgtggggcagcgcatgcggcagggcagcatcggcgcctggaggaccatcagcccgtacctcagtggtgtcggggtcgccagcgtggtggtctctttcttcctctccatgtactacaacgtcatcaacgcctgggccttctggtacctcttccactccttccaggatcccctgccgtggtctgtctgcccactgaatggtaaccacacgggctacgatgaggagtgtgagaaggcgtcctccacacagtacttctggtacaggaaaaccctcaatatctcgccgtccctccaggagaacgggggtgtgcagtgggagccggcgctgtgcctcctcctggcctggctggtggtgtacctgtgcatcctgcgtggcaccgagtccactggcaaggtggtgtatttcacggcgtcactgccctattgcgtgctcatcatctacctcatcaggggcctcacgctccacggagccaccaatggcctcatgtacatgttcactcccaagatagagcagctggccaaccccaaggcctggatcaatgcagccacccagatcttcttctcacttggcctgggcttcggcagcctgatcgccttcgccagctacaatgagccatccaacaactgccagaagcacgccatcatcgtgtccctcatcaacagcttcacctccatatttgccagcattgtcaccttctccatctatggcttcaaggccaccttcaattatgaaaactgcttgaagaaggtgagtctgctgctgaccaacacttttgaccttgaagatggctttttgacagccagcaacctggagcaggtgaagggctacctcgcatctgcctacccaagcaaatacagcgagatgttcccgcaaatcaaaaactgcagcttggaatcggagctagacacggccgtccagggcactggcctggcattcatcgtctacacagaggccattaaaaacatggaggtgtcccagctgtggtcggtgctctacttcttcatgctgctgatgctgggcattgggagcatgctggggaacacagcggccatcctcacccctctgacagacagcaagatcatctccagccacctgcccaaggaggccatctcaggtctggtgtgccttgtcaactgtgccattggcatggtgttcacgatggaggctgggaactactggtttgacatattcaacgactacgcggccacactgtccctgctgctcatcgtgctggtggagacgattgccgtgtgctacgtgtacgggctgaggagatttgaaagtgaccttaaggccatgaccggccgagctgtgagctggtactggaaggtgatgtgggctggcgtaagcccactgctgattgtcagcctctttgtcttctacctgagcgactacatcctcacggggaccctgaagtatcaagcctgggacgcctcccagggccagctcgtgaccaaagattacccggcctatgcactggctgtcatcgggctgcttgtggcctcctccaccatgtgcatccccctggcggccctggggacttttgttcagcgtcgcctcaagaggggagacgcagaccccgtggcctgagatgtgggcttcccagccgctcacggttttacagatactatttacaggcggaaactcctcggctgctttttcaaatgcttaagccaggagtgctcagcccatcaacttcctgagtgtctaaagaagatgaggaaggtgtgcaggaagaaaactcccttgggagaacgcacaccctcccgtggtggctgttcctccctgtcacctgcctcctcatcatggaagggggtgggctatgaaagccggtctcaaagataactgcatccttcattccaggaaagccctagaattagggcacattgcaaactgaaatatgactataattcttatgggaccaaatttaagcaatttttgtttttggctgaagagacaccaaaatattagaggacaaatatttttagatccatttaaggagttttgaagtgcctaagatgacctatttgtcagtggtgcaaaattaattctcttcttttttgagttgtagtgaatatgcaatttctgtgttccccttccaccctttaaatcttaggatgacaagttataaagaaagaagatctttgtctgggacccccaaagggatcctttctctaaggtctctgacggtgggtccaggaccagacctctctacaaaaaattgccccaactacagtttgcaaccccaaaccacattagaagtctgtgcagacatccctccgtggtgtgtgtcttggtgcattggaaaaggagtcaggagccactgtgaggtgagaatgaaagtggatctcagctgggcacggtggctcacgcctgtaatcctagcaccttgggggtcaaggtgggtggatcacttgaggtcaggagtttgaggccagcctggccaacatggcgaaaccccatttctactaaaaatacaaaaaaattagctgggagtggtggcataggcctgtaattccagctactctggctgctgaggcacaagaatcatttgaacctaggaggtggcggttgctgtgagccaagatcatgccactccactccagtctgggcgacagagcaagactctgactcaaaaaaaaaaaaaaaaaaaagtggctctgactttcccataggcttaatattacatttggacatcgtggccaactctatcaagaccacaaataccacttacaattaattttaaattattcatctgtacatagttttctaaaatgtatataattcaaacagagcatcttgtaactgaagacacaccatatctatgatatcgcattagtccatgtggggaaaagaaagatcagattgttactgtgtctgtgtagaaaaggaagacataagaaactccattttgatctgtactaagaaaaattgtttctgctttgagatgttgttagcctataactttagccccaactctgtgctcacagaaacatgcgctgtaatgaatcaaagtttaatggatttagggctgtgcaggatgtgccttgttaacaatatgtttgcaggctgtatgcttggtagaagtcatcgccattctccattctcgattaaccagggacacaatgcacagcagaaagctgcagggacctctgcccaagaaagcctgggtattgtccaaggtttcccccccactgagacagcctgagatatggcctcatgggaagggaaagacctgactgtcccccagcccgacacctgtaaagggtcggtgctgaggaggaatagtgaaggagggaggcctctttgcagttgagataagaggaaggcttctgtctcctgcttgtccctggtaatggaatgtctcggtgtaaaaagctgaccattcccattcgttctattctgagataggagaaaaccgccctgtggctggaggtgagatatgctggcagcaatactgctctgttactccttgctacactgagatgtttgggtaaagagaaacataaatctagcctacgtgcacatctgggcacagtacctttccttgaacttattcgtgatacagattcctttgctcacatgtttccctgctgaccttcttcccacctgttgccctgctacactcccctcgctaagacagtaaaaataatgatcaataaatactgagggaactcagaggccagcgccggtgcgggtcctccacatgctgagcgccggtcctgggcccactgttctttctctatactttgtctctgtgtcttatttcttttctcaaaaaaatttttctttttttaactgcaataaagtaggtcgttacccctaaagtgagcgagtcccttcctgctctaacgtccagtgcttccttgagatcatggaattctggagagtttctgtggatatatttgcacagatatctttgaagacacaaacactcacctgggacgttggccggagatgtctttttatttttgtgctgtaaaattctcttacagcaaaaataggctttagaaaggtcttctactgtcttcagcaaccatctcatcttccagcttcacctgattgtccagttatcatacatttgactttcaaatgtatgaaccagcatgtaccccatggatttaatcttatctaccccgtggattcaatcttcttatcagaaggttcttttatgtcaaaaaacctgctgtcaaggcttgaagagccggcacactcaatggcaaacacagcaccgagtctgctctgaatcctggaggatctggccctcctctcaatccccactcacagtcaccgtcttacaactcagggccacctgggatcagtcatcagtcagggtgcgtaagccttgaataccaggtagcctcaggagtgaaaagataaatgtcctagatcattaccttattcagtgtccccaccttgcagcgcattccaaccacctgggagcatttaaaactccagatgcccacaccacaccctggggccacccatcagaccttctggaagcaagacctgggcctccatggccccaaaaactccctaggtgatccgatgtgcagccaaatctgagaggccccatttaaaaaagaaagaacatgggtggtacattgaggagtatttacattttataaaatgacttaaaaatttgaaggcatttttgagcatttccaattatatggaagagttacttctacggaatagtttttgctcatggaactcaaacagatgaagcaccactgttacagaataatgtgctccagatgaaaatgtctcgtttctgtgaatttcatgaagagcagaacatttctcaagaatcctcttgagccagtaatcaatcctgtctcaaaaaatgttctttgccatttcctagatactgcacaaaagtggccatgtcgacatttgtccacccaccctccaataagctggagcgacaaagggacattccatccctgtacccttagtggtagccatgacacgatggccagatcatggactccggaaagctttctgtttttactggaaacatagcaaaccttgatttagctccaagaaattgagtagggaaatatttgttttttagcaattgtcatagtaaataaaactctaagcaagtgtatctac

SEQ ID NO: 203162 - protein, 837 aa, Artificial Sequence
  derived and/or modified sequence
MLRTAMGLRSWLAAPWGALPPRPPLLLLLLLLLLLQPPPPTWALSPRISLPLGSEERPFLRFEAEHISNYTALLLSRDGRTLYVGAREALFALSSNLSFLPGGEYQELLWGADAEKKQQCSFKGKDPQRDCQNYIKILLPLSGSHLFTCGTAAFSPMCTYINMENFTLARDEKGNVLLEDGKGRCPFDPNFKSTALVVDGELYTGTVSSFQGNDPAISRSQSLRPTKTESSLNWLQDPAFVASAYIPESLGSLQGDDDKIYFFFSETGQEFEFFENTIVSRIARICKGDEGGERVLQQRWTSFLKAQLLCSRPDDGFPFNVLQDVFTLSPSPQDWRDTLFYGVFTSQWHRGTTEGSAVCVFTMKDVQRVFSGLYKEVNRETQQWYTVTHPVPTPRPGACITNSARERKINSSLQLPDRVLNFLKDHFLMDGQVRSRMLLLQPQARYQRVAVHRVPGLHHTYDVLFLGTGDGRLHKAVSVGPRVHIIEELQIFSSGQPVQNLLLDTHRGLLYAASHSGVVQVPMANCSLYRSCGDCLLARDPYCAWSGSSCKHVSLYQPQLATRPWIQDIEGASAKDLCSASSVVSPSFVPTGEKPCEQVQFQPNTVNTLACPLLSNLATRLWLRNGAPVNASASCHVLPTGDLLLVGTQQLGEFQCWSLEEGFQQLVASYCPEVVEDGVADQTDEGGSVPVIISTSRVSAPAGGKASWGADRSYWKEFLVMCTLFVLAVLLPVLFLLYRHRNSMKVFLKQGECASVHPKTCPVVLPPETRPLNGLGPPSTPLDHRGYQSLSDSPPGSRVFTESEKRPLSIQDSFVEVSPVCPRPRVRLGSEIRDSVV

SEQ ID NO: 203163 - protein, 737 aa, Artificial Sequence
  derived and/or modified sequence
MGLRSWLAAPWGALPPRPPLLLLLLLLLLLQPPPPTWALSPRISLPLGSEERPFLRFEAEHISNYTALLLSRDGRTLYVGAREALFALSSNLSFLPGGEYQELLWGADAEKKQQCSFKGKDPQRDCQNYIKILLPLSGSHLFTCGTAAFSPMCTYINMENFTLARDEKGNVLLEDGKGRCPFDPNFKSTALVVDGELYTGTVSSFQGNDPAISRSQSLRPTKTESSLNWLQDPAFVASAYIPESLGSLQGDDDKIYFFFSETGQEFEFFENTIVSRIARICKGDEGGERVLQQRWTSFLKAQLLCSRPDDGFPFNVLQDVFTLSPSPQDWRDTLFYGVFTSQWHRGTTEGSAVCVFTMKDVQRVFSGLYKEVNRETQQWYTVTHPVPTPRPGACITNSARERKINSSLQLPDRVLNFLKDHFLMDGQVRSRMLLLQPQARYQRVAVHRVPGLHHTYDVLFLGTGDGRLHKAVSVGPRVHIIEELQIFSSGQPVQNLLLDTHRGLLYAASHSGVVQVPMANCSLYRSCGDCLLARDPYCAWSGSSCKHVSLYQPQLATRPWIQDIEGASAKDLCSASSVVSPSFVPTGEKPCEQVQFQPNTVNTLACPLLSNLATRLWLRNGAPVNASASCHVLPTGDLLLVGTQQLGEFQCWSLEEGFQQLVASYCPEVVEDGVADQTDEGGSVPVIISTSRVSAPAGGKASWGADRSWARTQLLDLSSLYQAVATREDSASSGEIS

SEQ ID NO: 203164 - protein, 91 aa, Artificial Sequence
  derived and/or modified sequence
MLRTAMGLRSWLAAPWGALPPRPPLLLLLLLLLLLQPPPPTWALSPRISLPLGSEERPFLRFEAEHISNYTALLLSRDGRTLYVGAREALF

SEQ ID NO: 203165 - protein, 114 aa, Artificial Sequence
  derived and/or modified sequence
MLRTAMGLRSWLAAPWGALPPRPPLLLLLLLLLLLQPPPPTWALSPRISLPLGSEERPFLRFEAEHISNYTALLLSRDGRTLYVGAREALFALSSNLSFLPGGEYQELLWGADA

SEQ ID NO: 203166 - protein, 121 aa, Artificial Sequence
  derived and/or modified sequence
MLRTAMGLRSWLAAPWGALPPRPPLLLLLLLLLLLQPPPPTWALSPRISLPLGSEERPFLRFEAEHISNYTALLLSRDGRTLYVGAREALFALSSNLSFLPGGEYQELLWGADAEKKQQCS

SEQ ID NO: 203167 - DNA, 2514 bp, Artificial Sequence
  derived and/or modified sequence
atgctgagaaccgccatgggcctgagaagctggctggccgccccctggggcgccctgccccccagaccccccctgctgctgctgctgctgctgctgctgctgctgcagccccccccccccacctgggccctgagccccagaatcagcctgcccctgggcagcgaggagagacccttcctgagattcgaggccgagcacatcagcaactacaccgccctgctgctgagcagagacggcagaaccctgtacgtgggcgccagagaggccctgttcgccctgagcagcaacctgagcttcctgcccggcggcgagtaccaggagctgctgtggggcgccgacgccgagaagaagcagcagtgcagcttcaagggcaaggacccccagagagactgccagaactacatcaagatcctgctgcccctgagcggcagccacctgttcacctgcggcaccgccgccttcagccccatgtgcacctacatcaacatggagaacttcaccctggccagagacgagaagggcaacgtgctgctggaggacggcaagggcagatgccccttcgaccccaacttcaagagcaccgccctggtggtggacggcgagctgtacaccggcaccgtgagcagcttccagggcaacgaccccgccatcagcagaagccagagcctgagacccaccaagaccgagagcagcctgaactggctgcaggaccccgccttcgtggccagcgcctacatccccgagagcctgggcagcctgcagggcgacgacgacaagatctacttcttcttcagcgagaccggccaggagttcgagttcttcgagaacaccatcgtgagcagaatcgccagaatctgcaagggcgacgagggcggcgagagagtgctgcagcagagatggaccagcttcctgaaggcccagctgctgtgcagcagacccgacgacggcttccccttcaacgtgctgcaggacgtgttcaccctgagccccagcccccaggactggagagacaccctgttctacggcgtgttcaccagccagtggcacagaggcaccaccgagggcagcgccgtgtgcgtgttcaccatgaaggacgtgcagagagtgttcagcggcctgtacaaggaggtgaacagagagacccagcagtggtacaccgtgacccaccccgtgcccacccccagacccggcgcctgcatcaccaacagcgccagagagagaaagatcaacagcagcctgcagctgcccgacagagtgctgaacttcctgaaggaccacttcctgatggacggccaggtgagaagcagaatgctgctgctgcagccccaggccagataccagagagtggccgtgcacagagtgcccggcctgcaccacacctacgacgtgctgttcctgggcaccggcgacggcagactgcacaaggccgtgagcgtgggccccagagtgcacatcatcgaggagctgcagatcttcagcagcggccagcccgtgcagaacctgctgctggacacccacagaggcctgctgtacgccgccagccacagcggcgtggtgcaggtgcccatggccaactgcagcctgtacagaagctgcggcgactgcctgctggccagagacccctactgcgcctggagcggcagcagctgcaagcacgtgagcctgtaccagccccagctggccaccagaccctggatccaggacatcgagggcgccagcgccaaggacctgtgcagcgccagcagcgtggtgagccccagcttcgtgcccaccggcgagaagccctgcgagcaggtgcagttccagcccaacaccgtgaacaccctggcctgccccctgctgagcaacctggccaccagactgtggctgagaaacggcgcccccgtgaacgccagcgccagctgccacgtgctgcccaccggcgacctgctgctggtgggcacccagcagctgggcgagttccagtgctggagcctggaggagggcttccagcagctggtggccagctactgccccgaggtggtggaggacggcgtggccgaccagaccgacgagggcggcagcgtgcccgtgatcatcagcaccagcagagtgagcgcccccgccggcggcaaggccagctggggcgccgacagaagctactggaaggagttcctggtgatgtgcaccctgttcgtgctggccgtgctgctgcccgtgctgttcctgctgtacagacacagaaacagcatgaaggtgttcctgaagcagggcgagtgcgccagcgtgcaccccaagacctgccccgtggtgctgccccccgagaccagacccctgaacggcctgggcccccccagcacccccctggaccacagaggctaccagagcctgagcgacagcccccccggcagcagagtgttcaccgagagcgagaagagacccctgagcatccaggacagcttcgtggaggtgagccccgtgtgccccagacccagagtgagactgggcagcgagatcagagacagcgtggtgtag

SEQ ID NO: 203168 - DNA, 2214 bp, Artificial Sequence
  derived and/or modified sequence
atgggcctgagaagctggctggccgccccctggggcgccctgccccccagaccccccctgctgctgctgctgctgctgctgctgctgctgcagccccccccccccacctgggccctgagccccagaatcagcctgcccctgggcagcgaggagagacccttcctgagattcgaggccgagcacatcagcaactacaccgccctgctgctgagcagagacggcagaaccctgtacgtgggcgccagagaggccctgttcgccctgagcagcaacctgagcttcctgcccggcggcgagtaccaggagctgctgtggggcgccgacgccgagaagaagcagcagtgcagcttcaagggcaaggacccccagagagactgccagaactacatcaagatcctgctgcccctgagcggcagccacctgttcacctgcggcaccgccgccttcagccccatgtgcacctacatcaacatggagaacttcaccctggccagagacgagaagggcaacgtgctgctggaggacggcaagggcagatgccccttcgaccccaacttcaagagcaccgccctggtggtggacggcgagctgtacaccggcaccgtgagcagcttccagggcaacgaccccgccatcagcagaagccagagcctgagacccaccaagaccgagagcagcctgaactggctgcaggaccccgccttcgtggccagcgcctacatccccgagagcctgggcagcctgcagggcgacgacgacaagatctacttcttcttcagcgagaccggccaggagttcgagttcttcgagaacaccatcgtgagcagaatcgccagaatctgcaagggcgacgagggcggcgagagagtgctgcagcagagatggaccagcttcctgaaggcccagctgctgtgcagcagacccgacgacggcttccccttcaacgtgctgcaggacgtgttcaccctgagccccagcccccaggactggagagacaccctgttctacggcgtgttcaccagccagtggcacagaggcaccaccgagggcagcgccgtgtgcgtgttcaccatgaaggacgtgcagagagtgttcagcggcctgtacaaggaggtgaacagagagacccagcagtggtacaccgtgacccaccccgtgcccacccccagacccggcgcctgcatcaccaacagcgccagagagagaaagatcaacagcagcctgcagctgcccgacagagtgctgaacttcctgaaggaccacttcctgatggacggccaggtgagaagcagaatgctgctgctgcagccccaggccagataccagagagtggccgtgcacagagtgcccggcctgcaccacacctacgacgtgctgttcctgggcaccggcgacggcagactgcacaaggccgtgagcgtgggccccagagtgcacatcatcgaggagctgcagatcttcagcagcggccagcccgtgcagaacctgctgctggacacccacagaggcctgctgtacgccgccagccacagcggcgtggtgcaggtgcccatggccaactgcagcctgtacagaagctgcggcgactgcctgctggccagagacccctactgcgcctggagcggcagcagctgcaagcacgtgagcctgtaccagccccagctggccaccagaccctggatccaggacatcgagggcgccagcgccaaggacctgtgcagcgccagcagcgtggtgagccccagcttcgtgcccaccggcgagaagccctgcgagcaggtgcagttccagcccaacaccgtgaacaccctggcctgccccctgctgagcaacctggccaccagactgtggctgagaaacggcgcccccgtgaacgccagcgccagctgccacgtgctgcccaccggcgacctgctgctggtgggcacccagcagctgggcgagttccagtgctggagcctggaggagggcttccagcagctggtggccagctactgccccgaggtggtggaggacggcgtggccgaccagaccgacgagggcggcagcgtgcccgtgatcatcagcaccagcagagtgagcgcccccgccggcggcaaggccagctggggcgccgacagaagctgggccagaacccagctgctggacctgagcagcctgtaccaggccgtggccaccagagaggacagcgccagcagcggcgagatcagctag

SEQ ID NO: 203169 - DNA, 276 bp, Artificial Sequence
  derived and/or modified sequence
atgctgagaaccgccatgggcctgagaagctggctggccgccccctggggcgccctgccccccagaccccccctgctgctgctgctgctgctgctgctgctgctgcagccccccccccccacctgggccctgagccccagaatcagcctgcccctgggcagcgaggagagacccttcctgagattcgaggccgagcacatcagcaactacaccgccctgctgctgagcagagacggcagaaccctgtacgtgggcgccagagaggccctgttctag

SEQ ID NO: 203170 - DNA, 345 bp, Artificial Sequence
  derived and/or modified sequence
atgctgagaaccgccatgggcctgagaagctggctggccgccccctggggcgccctgccccccagaccccccctgctgctgctgctgctgctgctgctgctgctgcagccccccccccccacctgggccctgagccccagaatcagcctgcccctgggcagcgaggagagacccttcctgagattcgaggccgagcacatcagcaactacaccgccctgctgctgagcagagacggcagaaccctgtacgtgggcgccagagaggccctgttcgccctgagcagcaacctgagcttcctgcccggcggcgagtaccaggagctgctgtggggcgccgacgcctag

SEQ ID NO: 203171 - DNA, 366 bp, Artificial Sequence
  derived and/or modified sequence
atgctgagaaccgccatgggcctgagaagctggctggccgccccctggggcgccctgccccccagaccccccctgctgctgctgctgctgctgctgctgctgctgcagccccccccccccacctgggccctgagccccagaatcagcctgcccctgggcagcgaggagagacccttcctgagattcgaggccgagcacatcagcaactacaccgccctgctgctgagcagagacggcagaaccctgtacgtgggcgccagagaggccctgttcgccctgagcagcaacctgagcttcctgcccggcggcgagtaccaggagctgctgtggggcgccgacgccgagaagaagcagcagtgcagctag

SEQ ID NO: 203172 - DNA, 2514 bp, Artificial Sequence
  derived and/or modified sequence
atgctgcgaactgctatgggcttgagatcttggctcgccgccccttggggtgctctaccaccgcggccacctctgctactgttgctgctgttattactgttactccagccccctcctcctacatgggcgctctctcctcggattagtctccctctaggatccgaagagcggccgttcctccgctttgaagcagaacatataagtaattacacggctctgctgctgagccgcgacggacgaacgctgtatgtgggagctagagaggcccttttcgcactgagctctaacctctcattccttccgggcggggaataccaggagctgctttggggcgcagacgccgaaaaaaaacaacagtgttctttcaaaggtaaggacccacagagggactgtcagaactacatcaagattctcttacccctgtctggcagtcatctttttacctgtgggacagctgctttctcccctatgtgtacctacattaacatggaaaacttcacccttgcccgcgatgaaaagggcaatgtgttgttagaagacggcaagggtagatgtcccttcgacccaaatttcaaatcgactgcgttggttgtagatggggagctgtacacgggcacggtgtctagttttcaaggcaatgaccctgcgatcagcaggtcacagtccctccggcccaccaaaaccgagagttccctgaactggctacaagaccctgcttttgttgctagcgcctacattcccgagagtctcggctctctgcagggggacgatgacaaaatctacttttttttctcggagacaggccaggagtttgagttttttgaaaacaccatcgtgtctcgcattgctagaatctgtaagggggacgaaggcggcgaaagggtgctccagcagcggtggacatcctttttgaaggcccaacttttgtgttcaaggccagatgatggtttcccgttcaacgtgctgcaggatgtgttcacactgtccccgtctcctcaggattggcgggacactctcttctacggggtgtttacctcacagtggcaccgtggcaccactgagggcagcgccgtctgtgtattcacaatgaaagacgtacagagggtattctctggcctttacaaggaagtaaaccgagagacgcaacagtggtacaccgtgacccatccagttcctactccccgacctggcgcatgtatcactaatagcgcaagagagaggaaaatcaatagctcccttcagcttccggaccgcgtgctgaatttcctgaaagaccatttcctgatggacggccaggtgagaagccggatgctgctcctccagcctcaggctaggtaccagcgggtggctgttcacagggtccctggattgcaccatacctatgacgtcctgttcttagggactggcgacggccggctgcacaaggcagtatcagtgggtccccgggtacatattattgaggaactgcagatcttcagctcagggcagcctgtgcaaaatttgctgttagacacccatagaggcttgctgtatgccgcgagtcattctggcgtcgttcaggtgcctatggccaactgcagcctttataggagctgcggagattgtctcctggcccgtgacccctattgcgcctggagcggctcatcctgtaagcacgtctcgctatatcaaccacaactcgccacccgcccatggatccaggacatagagggagcatcagccaaagacctatgtagcgcatcgagtgtcgtgtcaccgtctttcgtaccgaccggggagaagccttgtgagcaggtccaattccaacctaacaccgttaacaccctcgcatgcccgttgttgtcaaacctggctaccaggttgtggttacgcaatggcgctcccgttaacgcatctgccagttgtcatgttttaccaaccggggacctgctgcttgtggggacacagcaactgggcgagtttcaatgttggtctctcgaggagggctttcagcagctggtagcttcctattgccccgaagttgtcgaagatggcgttgcagatcagaccgatgaaggcggcagtgtgcccgtgatcatttcgacatcccgcgtgagcgcacccgcaggcggcaaggctagctggggggctgaccggtcttattggaaagaatttctggtcatgtgtacccttttcgtcctggccgtgctccttcctgtgctgtttttactttatagacacaggaattccatgaaagttttcttaaaacagggcgaatgcgcatcagtccatccaaagacctgccctgtcgtgttgccgccggaaacacgcccactgaatggcctcggcccgccatcaacgccactggaccacagaggatatcagagcctatcagacagcccacccggtagtagggtgttcactgaatcagaaaagcggccactttcaattcaggactcattcgtcgaggtgtcccctgtgtgtcctcgtccgagagtacgactcggttcagaaatccgcgactcagtagtctag

SEQ ID NO: 203173 - DNA, 2214 bp, Artificial Sequence
  derived and/or modified sequence
atgggcctgaggtcttggctggctgcaccatggggcgcgctgccacctcgtcccccattgcttctcctgctgctattgcttcttctcctccagcctcctccacctacatgggctttgtccccacgtatttcattgcctcttgggtcagaagagcgtccattcctcagatttgaagctgagcacatatcgaactacacagcacttttactctccagggatggacgaaccctttatgtcggggcccgagaagccctttttgctcttagttcgaacttatcgtttctgccggggggcgagtatcaagagctattgtggggtgccgacgccgaaaagaaacagcagtgttctttcaaggggaaagaccctcagcgagattgtcagaattatataaaaattttacttcccctgtccggtagtcaccttttcacttgtggcacagcggccttctctccaatgtgcacctacattaatatggagaactttacattagcgcgcgatgagaagggtaatgtactccttgaggatgggaagggccgctgccccttcgaccccaactttaaatctactgcacttgttgtcgacggtgaactttacaccgggacagtctcatcatttcaggggaacgacccggctataagtaggtctcaatctctgcggcccactaagacagagtcttccctaaactggcttcaggatcctgcttttgtggcatcagcttacattccagagtctctcgggtccctgcagggcgatgacgacaagatctacttcttcttttccgagactgggcaggagtttgaattctttgagaacaccatcgtatctagaatagcacgcatttgcaaaggcgacgaaggaggcgaacgagtgctgcagcagcggtggacatcgttcctcaaagcccaattgctgtgtagcagacctgatgacggttttccttttaatgttctccaggatgtgtttaccctgagcccgagcccccaggattggcgtgatacccttttttatggggtgtttacctctcagtggcatagggggactaccgaaggctccgcagtgtgcgtttttaccatgaaagatgtgcaaagggtgttttcaggcctctacaaagaggtgaatcgagaaacacagcagtggtataccgtgactcatcctgttcctacgccccggcctggagcttgcattacgaacagcgcacgcgaaaggaaaattaatagctctctgcaactgccagatcgtgtgctcaactttctgaaagaccatttcttgatggacggccaggtgcggtctaggatgctgttgctgcagccacaggcccggtaccagcgtgtagctgtccaccgggtgcctggtctgcatcacacctacgatgttctcttcctgggtactggggatggccggctgcataaagcagtcagcgtgggcccgcgagtgcacattatagaagagctgcagatcttcagctcaggtcaaccagtacagaatcttctactggatacgcaccggggattgctgtacgccgctagccacagtggcgtagtgcaggttccaatggccaattgctctctctacaggagttgcggggactgcctgcttgctagggacccgtactgcgcctggtcaggaagcagctgcaagcacgtatcactctatcagccccagctcgccactcgcccttggatccaggacatagagggagcttcagccaaggacttgtgtagtgcctcctctgtggtaagcccaagctttgtgccaactggggaaaagccctgtgaacaagtgcaattccaacctaacaccgtcaacactctggcctgccccctgctaagcaacctggccactcggctctggttacgcaacggtgctcccgttaatgctagtgccagctgtcacgtgctgcctaccggggacctcctcctggtgggcacacagcaactgggtgaattccaatgttggtcgcttgaggaaggattccagcagcttgtagcctcttattgccccgaggtggtggaagacggagtcgcagaccagaccgatgagggcggctctgtgccggtgatcatttcaacatcaagagtgagcgcacccgctggggggaaggcatcatggggagccgacaggagttgggcccgcactcagctgctggatcttagcagcctctaccaagctgtggctacaagggaggactctgccagcagcggcgagatctcctag

SEQ ID NO: 203174 - DNA, 2514 bp, Artificial Sequence
  derived and/or modified sequence
atgctgcggactgctatgggtctgcgttcatggctggccgccccttggggcgcacttccacccaggccaccgcttctgctgcttcttctcttactactgcttctacaaccccctccgccgacatgggccctgtctccgcggatcagcctgccgctggggagcgaggaacgaccttttttgagatttgaggcagaacacatttctaactacacagccttgttgctgtcccgagatggtcgcaccctgtatgttggcgcccgagaggccctcttcgcactatccagtaatttatcctttcttcctggtggcgaatatcaggagctgctatggggtgcagacgccgaaaagaaacagcagtgcagctttaaaggaaaggatccgcagagggattgtcaaaattatatcaagatccttctccccctttcgggatctcatcttttcacctgcggcaccgctgctttttctcccatgtgcacttacatcaatatggaaaactttacactggctagggatgaaaagggcaatgttctcctggaggatggcaaagggcggtgtccttttgatcccaattttaagtcaactgcgctggttgtggatggtgaactgtacactggcaccgtctcttctttccaaggaaatgatcccgccatctcccggtcacagtctttgcggcccactaagaccgagtcatccctgaattggctacaagaccctgcttttgtcgcctccgcttatattccggaaagcctcgggagtctacagggggacgacgacaagatttacttttttttctccgaaacaggacaggagttcgaattttttgaaaatactatcgtcagtagaattgctcgtatctgtaaaggcgacgaggggggcgagagagttctgcagcagagatggacttcttttctgaaggcgcaactcttgtgttctcgaccagatgatgggttcccatttaacgtgctccaggatgtgtttactctgagcccttctccgcaagactggcgagatactttgttctacggagtctttacttcccagtggcatcgaggcaccactgaggggtccgccgtgtgcgtttttactatgaaagatgttcagcgggtgtttagtggactgtacaaggaggtaaaccgagagacccagcaatggtacaccgtaactcatccagtacccacccctcgcccaggcgcttgtattacaaactcagcccgtgaacgcaaaatcaactcgtctctgcagctacccgaccgggttctgaacttcctcaaagaccacttcctcatggatggacaggtcagaagccggatgctccttctgcagcctcaggcccgttaccaaagagtcgcagttcaccgcgtgccggggttacaccacacgtacgacgtgctgtttctcggaactggtgacgggcgactacataaagccgtctctgttggaccgcgtgtgcatattatagaagaattgcaaatcttctcatcaggccagcccgtgcagaatctgctgctcgacactcatcggggtctgctgtacgcagcgagccattcaggcgtggtgcaggtgcccatggccaactgttccctctacagatcttgtggtgactgtctgctcgcgcgggacccttactgcgcctggtcaggcagtagctgtaagcacgtgagcctgtaccagcctcagctcgccacacggccctggatccaagacatcgaaggagcatccgccaaggacctgtgttccgcaagcagtgttgtttcaccaagctttgtgcccacgggtgagaagccgtgtgaacaggtgcaattccaacctaatactgtgaacacgctggcctgtcccttgctgtccaacctggcaactcggctgtggctacggaacggggcccccgtgaacgcaagcgcctcttgtcacgttctccctacaggcgatctcctgctagtcggtactcagcagctgggagaattccagtgttggtcactggaggaaggatttcagcagctggtagcctcttactgccccgaggtcgtcgaagacggcgtggctgatcagacagacgagggaggatccgtgcctgtgatcatttccacaagcagggtgtccgcccccgctgggggcaaggcctcatggggcgccgataggtcatactggaaggaattcctcgtcatgtgtacactcttcgttctggccgtgctgctgcccgttctttttttgctctatagacatcgtaattcaatgaaagtgttcctgaagcagggcgagtgcgcatctgttcatcccaagacgtgtccagtagtccttccccccgaaacaaggcctctaaatggacttgggccgcccagtacaccactggatcatagggggtatcaatcattgagcgactcacctcccgggtcccgggtgttcaccgaaagtgagaagcgacctctctccatccaagatagttttgttgaagtgagccctgtgtgcccacgcccaagggtacgactgggctcggagattcgagacagcgtcgtttag

SEQ ID NO: 203175 - DNA, 276 bp, Artificial Sequence
  derived and/or modified sequence
atgctacgcaccgcaatggggcttcgttcctggctggctgccccctggggcgcgctgccacccagaccacccttgctgcttctcttactgcttctcctgctattacagccccctccccctacttgggcactgagccccagaatctcgcttccattaggtagcgaagagcggcccttcctgcggtttgaggcagaacatatttctaattacaccgccttgcttcttagcagggatggccggactctgtacgtcggggctcgggaagcattgttctag

SEQ ID NO: 203176 - DNA, 345 bp, Artificial Sequence
  derived and/or modified sequence
atgctgcgaaccgccatgggcctgaggagctggctggcagccccttggggagccctgccaccgagaccccccctcctgctcctgctccttttacttcttctgctgcagccccctccccccacctgggcactttctccccgaatctctttgccactggggtcagaagaaaggccttttctgcgttttgaggccgaacacatttcgaattacaccgccctgctcttgtcccgcgacggcagaaccctgtacgtgggagcaagggaggctctgttcgctttgagctctaacttgtcttttcttccagggggtgagtatcaggaactcctctggggcgctgacgcgtag

SEQ ID NO: 203177 - DNA, 366 bp, Artificial Sequence
  derived and/or modified sequence
atgctgaggaccgcaatgggtctgcggtcctggctggcggccccatggggagcgctacccccaagaccacccctgctccttctactcttgctgcttctactgctgcagcccccaccaccaacatgggccctgagcccacggatttctcttcctctcggatctgaggagcgtcccttcctgcgattcgaggccgaacacatttcgaactacaccgctctgttgctcagcagggatggtcgaaccctgtacgttggagctcgagaggcactgttcgctcttagctccaatttaagcttcctgccagggggagaatatcaggaactcctgtggggcgccgatgctgaaaaaaaacaacagtgctcgtag

SEQ ID NO: 203178 - DNA, 2514 bp, Artificial Sequence
  derived and/or modified sequence
atgctgaggacagccatgggcctgcgctcctggctggccgccccctggggcgccctgccccccaggcctcccctgctgctgctgctgctgctgctgctgctgctgcagcccccaccacccacctgggccctgagcccccgcatcagcctgcccctgggcagcgaggagcggcccttcctgcgctttgaggccgagcacatcagcaactacacagccctgctgctgagcagagatggccgcaccctgtatgtgggcgcccgggaggccctgtttgccctgagcagcaacctgtccttcctgcctggaggagagtaccaggagctgctgtggggcgcagatgctgagaagaagcagcagtgcagcttcaagggcaaggacccccagagggactgccagaactacatcaagatcctgctgcccctgagcggcagccacctgttcacctgtggcacagctgccttcagccccatgtgcacctacatcaacatggagaacttcaccctggccagagatgagaagggaaatgtgctgctggaggatggcaagggccgctgcccctttgaccccaacttcaagagcacagccctggtggtggatggagagctgtacacaggcaccgtgtcctccttccagggcaatgaccctgccatcagccgcagccagagcctgcggcccaccaagacagagagcagcctgaactggctgcaggaccctgcctttgtggccagcgcctacatccctgagagcctgggcagcctgcagggagatgatgacaagatctacttcttcttcagcgagaccggccaggagtttgagttctttgagaacaccatcgtgagccgcatcgcccgcatctgcaagggagatgaaggaggagagcgggtgctgcagcagcgctggaccagcttcctgaaggcccagctgctgtgcagcaggccagatgatggcttccccttcaacgtgctgcaggatgtgttcaccctgagccccagcccccaggactggagggacaccctcttctatggagtcttcaccagccagtggcaccggggcaccacagagggcagcgctgtgtgtgtgttcaccatgaaggatgtgcagagggtcttcagcggcctgtacaaggaggtgaaccgggagacccagcagtggtacacagtgacccaccctgtgcccacccccaggcctggggcctgcatcaccaacagcgcccgggagaggaagatcaacagcagcctgcagctgcctgacagagtgctgaacttcctgaaggaccacttcctgatggatggccaggtgcgcagcaggatgctgctgctgcagccccaggcccgctaccagagggtggccgtgcaccgggtgcccggcctgcaccacacctatgatgtgctcttcctgggcactggagatggccgcctgcacaaggctgtgtctgtgggcccccgggtgcacatcatcgaggagctgcagatcttcagcagcggccagcctgtgcagaacctgctgctggacacccaccggggcctgctgtatgctgccagccacagcggcgtggtgcaggtgcccatggccaactgcagcctgtaccgcagctgtggggactgcctgctggcccgggacccctactgtgcctggagcggcagcagctgcaagcacgtgtccctgtaccagccccagctggccacccggccctggatccaggacattgaaggagccagcgccaaggacctgtgcagcgccagctctgtggtgagccccagctttgtgcccactggagagaagccctgtgagcaggtgcagttccagcccaacacagtgaacaccctggcctgccccctgctgagcaacctggccacccggctgtggctgagaaatggagcccctgtgaatgccagcgccagctgccacgtgctgcccaccggggacctgctgctggtgggcacccagcagctgggggagttccagtgctggagcctggaggagggcttccagcagctggtggccagctactgcccagaggtggtggaggatggagtggccgaccagacagatgagggcggctctgtgcctgtgatcatcagcaccagccgggtgtctgccccagctgggggcaaggcctcctggggcgctgacaggagctactggaaggagttcctggtgatgtgcaccctgtttgtgctggccgtgctgctgcctgtgctcttcctgctgtaccgccacagaaattccatgaaggtgttcctgaagcagggagaatgtgcctctgtgcaccccaagacctgccctgtggtgctgcccccagagacccggcccctgaatggcctgggcccccccagcacccccctggaccaccggggctaccagagcctgagtgacagccccccaggcagcagggtcttcacagaaagtgagaagaggcccctgagcatccaggacagctttgtggaggtgtcccctgtgtgcccccggccccgggtgcggctgggcagcgagatccgggacagcgtggtgtag

SEQ ID NO: 203179 - DNA, 2214 bp, Artificial Sequence
  derived and/or modified sequence
atgggcctgcgctcctggctggccgccccctggggcgccctgcccccccggccccccctgctgctgctgctgctgctgctgctgctgctgcagcccccaccacccacctgggccctgagcccccgcatcagcctgcccctgggcagcgaggagcggcccttcctgcgctttgaagctgagcacatcagcaactacacagccctgctgctgagcagagatggccgcaccctgtatgtgggcgcccgggaggccctgtttgccctgagcagcaacctgtccttcctgcccggcggggagtaccaggagctgctgtggggcgcagatgctgagaagaagcagcagtgcagcttcaagggcaaggacccccagagggactgccagaactacatcaagatcctgctgcccctgagcggcagccacctgttcacctgtggcacagctgccttcagccccatgtgcacctacatcaacatggagaacttcaccctggccagagatgagaagggaaatgtgctgctggaggatggcaagggccgctgcccctttgaccccaacttcaagagcacagccctggtggtggatggagagctgtacacaggaacagtgagcagcttccagggcaatgaccctgccatcagccgcagccagagcctgcggcccaccaagacagagagcagcctgaactggctgcaggaccctgcctttgtggccagcgcctacatccctgagagcctgggcagcctgcagggagatgatgacaagatctacttcttcttcagcgagaccggccaggagtttgagttctttgagaacaccatcgtgtccagaattgcccgcatctgcaagggagatgagggcggggagcgggtgctgcagcagcgctggaccagcttcctgaaggcccagctgctgtgcagcaggccagatgatggcttccccttcaacgtgctgcaggatgtgttcaccctgagccccagcccccaggactggagggacaccctcttctacggcgtcttcaccagccagtggcaccggggcaccacagagggcagcgctgtgtgtgtgttcaccatgaaggatgtgcagagggtcttcagcggcctgtacaaggaggtgaaccgggagacccagcagtggtacacagtgacccaccctgtgcccacccccaggcctggggcctgcatcaccaacagcgcccgggagaggaagatcaacagcagcctgcagctgcctgacagagtgctgaacttcctgaaggaccacttcctgatggatggccaggtgcgcagcaggatgctgctgctgcagccccaggcccgctaccagagggtggccgtgcaccgggtgcccggcctgcaccacacctatgatgtgctcttcctgggcactggagatggccgcctgcacaaggctgtgtctgtgggcccccgggtgcacatcatcgaggagctgcagatcttcagcagcggccagcctgtgcagaacctgctgctggacacccaccggggcctgctgtatgctgccagccacagcggcgtggtgcaggtgcccatggccaactgcagcctgtaccgcagctgtggggactgcctgctggcccgggacccctactgtgcctggagcggcagcagctgcaagcacgtgtccctgtaccagccccagctggccacccggccctggatccaggacatcgagggcgccagcgccaaggacctgtgcagcgccagctctgtggtgagccccagctttgtgcccaccggggagaagccctgtgagcaggtgcagttccagcccaacacagtgaacaccctggcctgccccctgctgagcaacctggccacccggctgtggctgagaaatggagcccctgtgaatgccagcgccagctgccacgtgctgcccactggagacctgctgctggtgggcacccagcagctgggggagttccagtgctggagcctggaggagggcttccagcagctggtggccagctactgcccagaggtggtggaggatggagtggccgaccagacagatgaaggaggctctgtgcctgtgatcatcagcaccagccgggtgtctgccccagctgggggcaaggcctcctggggcgctgaccgctcctgggcccggacccagctgctggacctgagcagcctgtaccaggccgtggccacccgggaggacagcgccagcagtggagagatctcctag

SEQ ID NO: 203180 - DNA, 276 bp, Artificial Sequence
  derived and/or modified sequence
atgctgaggacagccatgggcctgcgctcctggctggccgccccctggggcgccctgccccccaggcctcccctgctgctgctgctgctgctgctgctgctgctgcagcccccaccacccacctgggccctgagcccccgcatcagcctgcccctgggcagcgaggagcggcccttcctgcgctttgaggccgagcacatcagcaactacacagccctgctgctgagcagagatggccgcaccctgtatgtgggcgcccgggaggccctcttctag

SEQ ID NO: 203181 - DNA, 345 bp, Artificial Sequence
  derived and/or modified sequence
atgctgaggacagccatgggcctgcgctcctggctggccgccccctggggcgccctgccccccaggcctcccctgctgctgctgctgctgctgctgctgctgctgcagcccccaccacccacctgggccctgagcccccgcatcagcctgcccctgggcagcgaggagcggcccttcctgcgctttgaggccgagcacatcagcaactacacagccctgctgctgagcagagatggccgcaccctgtatgtgggcgcccgggaggccctgtttgccctgagcagcaacctgtccttcctgcctggaggagagtaccaggagctgctgtggggcgcagatgcctag

SEQ ID NO: 203182 - DNA, 366 bp, Artificial Sequence
  derived and/or modified sequence
atgctgaggacagccatgggcctgcgctcctggctggccgccccctggggcgccctgccccccaggcctcccctgctgctgctgctgctgctgctgctgctgctgcagcccccaccacccacctgggccctgagcccccgcatcagcctgcccctgggcagcgaggagcggcccttcctgcgctttgaggccgagcacatcagcaactacacagccctgctgctgagcagagatggccgcaccctgtatgtgggcgcccgggaggccctgtttgccctgagcagcaacctgtccttcctgcctggaggagagtaccaggagctgctgtggggcgcagatgctgagaagaagcagcagtgcagctag

SEQ ID NO: 203183 - DNA, 2514 bp, Artificial Sequence
  derived and/or modified sequence
atgctgcggaccgccatgggcctgcggagctggctggccgccccctggggggctttgccaccccgtccccccttgctcctccttctgctgttgctgctactcctccagcctcccccccccacctgggccctctccccgagaattagtctgccactgggcagcgaggaacggcccttcttaagattcgaagccgagcacatttccaattatacggccctgctgctctctagagacggccgcactctgtacgtcggggctagagaggctctttttgcgttgagctccaatttatcttttcttccaggcggtgagtaccaggagctgctttggggagctgatgctgaaaagaaacagcagtgttctttcaaaggaaaggatccacagagagactgtcaaaattatatcaagatactgctgcctctcagtggctcacacctgttcacttgtggaacagccgcttttagtcctatgtgcacctacataaatatggaaaactttaccctggcacgcgacgaaaaagggaacgtgttgttggaagatgggaagggcaggtgtccatttgacccgaattttaaaagcaccgctctggttgttgacggcgagctgtatacaggaaccgtgtcatccttccaggggaatgaccctgccataagccgatcgcaatctctgcggcccacaaagacagagagctccctgaattggctccaagaccctgccttcgtcgcttccgcttatatccccgaatcgttaggtagccttcaaggcgacgatgataagatttacttctttttcagcgagaccggacaagagtttgaattctttgaaaacaccatcgtctctcgcatcgcaagaatatgtaagggcgacgagggaggagagcgcgtgttgcaacaacgttggacgtcctttctcaaagcccagctgttatgctctcggcccgacgacggatttccatttaacgtcctgcaagacgtcttcactctgagcccatcaccacaggactggagggataccctgttctatggggttttcacgtctcagtggcatagaggaaccactgaaggctccgccgtctgtgtcttcacaatgaaggacgttcagagggttttttcgggcctctacaaggaagtaaatagagaaacacagcaatggtatacagtgacacatcccgttcccacaccccgtcctggtgcctgtatcaccaatagtgctcgggaacggaaaatcaacagtagcttgcagctccctgatagggtgctgaactttctgaaggaccattttctgatggacggtcaggttcgaagcagaatgttacttctgcagcctcaggcccggtatcagagagtcgccgtgcatcgcgtacctggcctgcatcacacttacgacgttctattcttgggtaccggagatggtcgtctccacaaggcagtaagcgttggaccgagagtgcacatcattgaagaactgcagatcttctccagtgggcagcctgtgcagaacctcctgttggatacacacagaggtcttctgtacgctgcctctcactctggcgttgtccaggtacctatggcaaactgcagtctgtatagatcatgtggagattgccttttggctagagacccctactgtgcttggagcggatcgagttgtaagcatgtgagcctctatcagccacaactcgccaccaggccctggatccaggatatcgagggggcctcggctaaagatctgtgttccgcctcttcagtggtctcgcccagttttgtgcccaccggagagaagccttgtgaacaggtgcagttccaacccaacaccgtgaacactttagcctgccccctgctctcgaatctcgccactcgtttgtggctgcgcaatggagcccccgtaaacgctagcgccagctgtcacgttttaccaacaggcgacctgctgctcgtcggcactcagcagctgggcgaattccagtgctggtcactggaggaggggtttcagcaattggtagccagctactgccctgaggtggttgaagatggcgtagcagatcaaactgatgagggcggcagtgtccccgttatcatttccacgtcgcgcgtgagcgcccctgcaggcggtaaggcctcatggggtgccgatagatcatattggaaggagtttctggtaatgtgcaccctcttcgtgctcgcggtccttctccctgttctatttttgctttaccgccaccgaaatagcatgaaagtgtttctgaaacagggcgagtgcgctagcgttcaccctaaaacctgtcccgtagtactgcccccagagactcgccctctgaacggcctcggacccccttccactccgttggaccaccgcggctatcagtctctaagtgattcacctcccggcagcagagttttcactgagagcgagaaacggcccctgtcaatccaggatagtttcgtggaagttagccctgtgtgcccacgcccccgcgtgaggctaggcagcgagattagggattctgttgtgtag

SEQ ID NO: 203184 - DNA, 2214 bp, Artificial Sequence
  derived and/or modified sequence
atgggcctgcggagctggctggccgccccctggggcgccctgcccccccgtccaccccttctgctcctcctcctcctgcttctcctcctacaaccgccccctcctacatgggcattatcaccaagaatatctctccccctgggcagcgaagagcgcccctttctccgtttcgaggccgagcatatctcaaattacaccgctctgctccttagcagggacggccgcactctctacgtgggtgcacgtgaagccttgttcgccttgagctccaatttgagcttcctgccggggggtgagtatcaggagctgctctggggtgcggacgcagaaaaaaaacagcagtgtagttttaagggcaaggacccccagagagattgccagaactatatcaaaatcctgctgccactgtccggatcccatctcttcacttgtggaacagcagccttttcccccatgtgcacctatatcaacatggagaattttaccctggctcgcgatgaaaaaggcaacgtgctgttagaggacgggaaggggaggtgcccctttgatcccaactttaagtccactgctctcgtggttgatggagaactctacacaggaacagtcagtagctttcaggggaacgacccggcaatcagccgttcacaaagtctccggcctaccaaaactgagtcctcactgaactggctacaggaccctgcctttgtggcaagcgcctacattccagaaagtctggggtccctgcaaggcgacgatgacaaaatttacttcttttttagcgagacaggccaggagtttgagttttttgagaacactattgtgtccagaatcgcacgaatttgcaagggagacgagggcggggagagagtgttacagcagcgatggacatcatttctgaaggcccagttactctgtagtagaccggatgacggctttcctttcaatgtcctgcaagatgtatttaccctctcgccttccccccaggactggagagacacacttttttatggggtcttcacctcgcaatggcacaggggtacaacagaagggagtgcagtgtgcgtgtttactatgaaggacgtgcagcgggtttttagcggtctctataaggaagtcaatcgggaaacccagcagtggtatactgtgactcacccagtgcccacacctcgtccaggcgcttgtatcactaatagtgctagagaacgcaagatcaatagcagcctccaactgccggacagggtcctcaacttcctaaaggaccacttcctcatggacggacaggtccgcagtaggatgctcctcctgcagcctcaggcaaggtaccagagagtcgccgttcatagggtccccggactgcatcacacctacgacgtgctctttctaggcacgggagacggacggttgcacaaagcagtctctgtcggccccagggtacatattatcgaagagttgcagatcttcagcagtggtcagcccgtgcagaatctactacttgatacccaccgaggattactgtacgccgcttcgcattccggagtggttcaggtgccaatggccaattgcagtttataccggagctgcggtgactgccttttagcccgcgacccatattgcgcgtggagtgggtccagttgcaaacacgtgagcctgtaccagccacagctcgcaacaaggccttggattcaggatattgagggagcttccgcaaaagatctttgtagcgctagtagtgtggtgtccccatcctttgtgcctacgggtgaaaagccctgcgaacaagtgcagttccagcccaatactgtgaatactctggcatgtccactgttatcaaatctcgccacacggttgtggttgaggaacggcgcacccgtcaatgccagtgcttcatgtcatgtgctgcctacgggggaccttctgcttgtgggcactcagcagctcggcgaatttcagtgttggtcacttgaagaaggctttcagcaacttgtcgcatcatactgcccagaagtggtagaggatggcgtggctgaccagacagatgagggcggcagtgttccggtgattatctctacaagccgggtgagcgccccagccggtggcaaggcgagctggggcgcggaccgatcatgggctcgcactcagttgttagatcttagttctctctaccaggccgtggcaaccagggaggactcagctagctccggcgaaataagctag

SEQ ID NO: 203185 - DNA, 2514 bp, Artificial Sequence
  derived and/or modified sequence
atgctgcggaccgccatgggcctgcggagctggctggccgccccctggggcgccctgcccccaagacctcccctcttgctgctgcttcttctgctgttgctgttacaacctcccccacctacatgggccctgtcacctcgaataagcctccctctcgggtcggaggagaggccctttttgaggttcgaggcggagcacatttccaactatacagcacttctgttatcacgggacgggaggactctctatgtcggagcccgggaggccctttttgctctgtcgtcaaatttgtcattcctgccgggcggggaataccaggagctgctttggggggcggatgccgagaagaagcagcagtgctcctttaaaggaaaagacccgcagcgcgactgccagaattatattaaaattctccttccactgagcggcagtcatctctttacttgtggcacagctgccttctctccgatgtgtacctatattaatatggagaatttcactcttgctcgagatgagaaaggaaacgtacttctcgaggatggaaaaggccggtgtccgtttgacccaaattttaagtccactgctctggtcgtcgatggcgaactctacactggcacagtatctagctttcaaggaaatgacccagcaatcagccgctctcagagtctgcgtccaacaaagaccgagtcttcactgaactggctccaggatccggcttttgtcgcctccgcctatatcccggaaagccttggatctctgcagggagacgatgataagatttacttctttttctccgaaacgggtcaagaatttgaattctttgaaaataccattgtgtcccgaattgctcgcatatgcaagggtgacgaaggaggagagcgagttcttcagcagagatggacttcctttctgaaagcccagctgttatgtagccgacccgacgacggcttcccctttaacgtcttgcaggacgtcttcaccctcagtcccagtccccaagactggcgcgataccctgttctatggtgtgttcacttctcagtggcaccgtggcactaccgaagggagcgcagtctgcgtatttaccatgaaggacgtgcagcgcgttttcagcgggctctacaaggaggttaacagagaaactcagcaatggtacactgtgacacatcctgttcctactccacgacctggagcatgtataacaaactccgccagagaacggaaaatcaacagctccctacagctgcccgacagagtactgaatttcttgaaagaccatttcctcatggacggacaagttaggtctcgcatgctcctcctccaaccacaggcccgataccagagagtggctgtccacagagtgcccgggctgcatcatacctacgatgtcctattccttggaactggtgatgggcgacttcacaaggccgtctcggtggggccaagagtacatattattgaagagttacaaatattttctagcgggcaacctgtccaaaacctgctgctggacacgcatcgcggtctgctgtatgcggcgtcccactctggcgtcgttcaggtccctatggccaactgttctctgtataggagctgtggtgactgtctgctagcccgggacccttattgtgcatggtctggatcttcctgcaaacatgtatcactctatcaaccccagttggcaacccgaccgtggatacaggatattgagggagcaagcgccaaagacttatgctccgcctcctccgtggtgtccccctcctttgtgcctaccggcgagaagccctgcgaacaggttcagttccagcccaatacagtgaacacactggcatgccccctactcagcaacctggctactcgcctctggctgcgcaacggtgcaccggtaaatgcctccgcatcctgtcacgtgctgcccactggggacctgctactggtaggaacacagcagctgggggagttccaatgctggagcctggaggaggggtttcagcaactcgttgcttcctattgtcctgaggtggtggaggacggcgttgcagatcagacagacgaaggaggatcagtccctgtgatcatatcgactagccgcgtgagcgctcctgccggaggcaaggccagctggggcgcggacagaagttattggaaggaatttctggtaatgtgcactcttttcgtgttagccgtgttgttgcccgtactgttccttctctacaggcatcgtaactcaatgaaggtctttctgaaacagggcgagtgtgcttccgtacatccaaagacgtgccccgtcgttctgcctcccgagacacgaccacttaatgggcttgggccaccaagtacccctcttgaccatcggggctaccagagcctcagtgacagcccacctgggtcccgcgtcttcactgaatccgaaaaaagaccgctctctattcaggattccttcgtggaagtgtcccccgtgtgtccacgtccaagggtgcggctgggctccgagatcagggacagcgttgtttag

SEQ ID NO: 203186 - DNA, 276 bp, Artificial Sequence
  derived and/or modified sequence
atgctgcggaccgccatgggcctgcggagctggctggccgccccctggggcgcactccctccccgcccccctttgctattacttctcctgctgctgcttcttctccagcctcccccccccacctgggccctcagccccagaatctcgctgcccctggggagtgaggagaggcccttccttagatttgaggcggaacacatttctaattacaccgctctcctgctctcacgggacggtaggacattatatgtgggcgcgcgagaagccctgttctag

SEQ ID NO: 203187 - DNA, 345 bp, Artificial Sequence
  derived and/or modified sequence
atgctgcggaccgccatgggcctgcggagctggctggccgccccctggggtgctctgcctcctcgcccccctctgctgcttctgcttctgttgctgctcctcttgcagcctccaccccctacttgggccctgagcccaagaatttccctgccattgggctctgaggaaagacccttccttcggttcgaggccgagcatataagtaactataccgccttgctgctctccagggatggaaggaccctatatgtgggagcccgggaggcgctgttcgccttatcttcaaacctgtcgttcttacccgggggggagtaccaggaactcctttggggcgctgatgcatag

SEQ ID NO: 203188 - DNA, 366 bp, Artificial Sequence
  derived and/or modified sequence
atgctgcggaccgccatgggcctgcggagctggctggccgccccctggggcgcattacccccccggccccctctgctcttacttttgcttttactcctgctgctgcagcctccacctcccacatgggccctgtctcccaggatttccctcccattgggctccgaggaaagaccattcctgcggttcgaggcggaacacatcagcaactacaccgccttgctgctgtctcgggatggaagaacattatacgtcggcgccagggaggcgttattcgcactgtcctccaatcttagcttcctacccggcggtgagtaccaggaactcctttggggggctgacgcagaaaaaaaacagcagtgtagctag

SEQ ID NO: 203189 - DNA, 2514 bp, Artificial Sequence
  derived and/or modified sequence
atgctgcggactgccatggggctaagatcttggctggcagccccatggggtgccttgcccccaaggcctcctctgctgcttcttctgctgctgttattattactgcagccgcctccccctacttgggccctgagtccgaggatcagcctgccactggggagcgaggagaggcccttcctaagattcgaggctgagcatatctcaaattacactgcccttctcctatctcgggacggacgcaccctgtatgtgggagcccgagaggctttattcgccctaagcagtaatttgtctttcctgcctggaggggagtatcaggaactgctgtggggggctgatgcagagaaaaaacaacagtgcagcttcaagggcaaggacccccagagagattgtcagaactatattaagatactgctcccactgtcaggatctcacctgtttacgtgtggaaccgcagccttctcccctatgtgcacatatataaacatggaaaactttactctggcccgtgacgaaaaagggaacgtcttactggaggatgggaagggcaggtgcccattcgaccccaactttaaatccaccgctcttgtggttgacggcgaattgtacaccggtacagtgtcttccttccagggtaatgatcccgctatctcgcgcagtcagagtctccgcccaacaaaaacggaatcatccctgaattggcttcaagaccctgcgttcgtggcctccgcatatatcccagagagccttggttcgctgcaaggcgacgatgataaaatttacttcttcttttcggagactgggcaggaattcgaatttttcgagaacacaatcgttagtaggattgccaggatttgcaagggagacgagggaggtgagagggtcttgcaacagcggtggacaagcttcttgaaagctcagcttctgtgcagcagacccgacgacggctttccatttaacgtgctccaggacgtgttcacactctctccttcccctcaggattggcgggacacgctgttctatggtgtttttacaagccagtggcacagaggtacgaccgagggtagtgcggtatgcgtctttaccatgaaagacgttcagagagtattctcagggctctataaagaagtaaaccgcgaaactcagcagtggtataccgttactcatccggtcccaacaccgcgtcctggcgcttgcataaccaattctgcaagggaacgtaaaatcaactcctccctgcaattacccgaccgggttctgaattttctgaaggaccattttctcatggatggtcaagtgaggagcagaatgttgctgttacaacctcaagcgcgatatcagcgagttgccgtacatagagtcccgggattacaccacacctatgatgtgctgttcctcggtaccggcgacggtaggctgcataaggcggtcagcgtcggtcccagagttcacattattgaggagttacaaatcttcagcagtggccagccggtgcagaacctgctgctggatactcaccggggactgctgtacgcagccagccactctggagtggtccaggtacctatggcaaactgctctctgtaccgctcctgtggcgactgtcttctggcacgtgacccctactgcgcctggtctggctcctcttgcaaacacgtatctctttaccagccgcagctggccacccgtccttggattcaggatatcgagggcgctagtgcaaaagatttgtgttccgcaagctcagtcgttagcccttcattcgttcctacaggcgagaaaccctgcgagcaagtgcaattccagccaaacaccgttaacacgctggcctgtcctttgctgtcaaacctcgcaacacgcttgtggttaagaaatggggcacccgtcaatgcttcagcctcatgtcacgtgctccctacaggcgacctgcttttagtcggaacccaacaactaggagaatttcaatgctggtctttggaagaagggtttcaacagcttgtggcctcctattgtccagaggttgtggaagacggtgtggccgatcagacagatgagggtggcagcgtgcccgtgataattagcacgtcaagggtgtccgcccctgcgggtggaaaagccagttggggagccgatcgatcctactggaaagagtttttggtgatgtgtactctgtttgtgctggccgtgctcctgcccgtgctctttctcctgtatcgtcatcgaaactctatgaaagtcttccttaagcagggagagtgcgctagcgtccaccctaagacgtgtccagtggtgctaccgccagaaacaaggccactgaatggactgggcccaccatccacccctctagatcacaggggttatcaatctctgtcagactcacccccagggtcccgagttttcaccgagtctgagaagcgtccattatccatccaggactcgtttgtcgaagtaagccccgtgtgccccaggcccagggtcaggctcggctccgagatacgcgatagtgtggtttag

SEQ ID NO: 203190 - DNA, 2214 bp, Artificial Sequence
  derived and/or modified sequence
atgggtctgcgctcatggttagcggctccatggggagcattgccacccagacctcctctgttgttgctgctgctcttgctcctactgctgcaaccccctccgcctacctgggcattatccccaagaattagtcttccactcggctctgaggaaagacctttccttcgctttgaagctgaacatattagtaactataccgctctgttgctgtctagagacggacgtacactctacgtcggggctcgcgaagctctgtttgctttgtccagtaacctcagcttccttcccggaggtgagtaccaggaactcttatggggggcagacgctgagaagaagcaacagtgttcgttcaaagggaaggatccacagagggactgtcagaactatatcaagatccttctgcccctgtcaggttcccatttgtttacctgcggcaccgcagcatttagcccaatgtgcacatacataaacatggaaaatttcacgttggccagagacgaaaagggcaatgtattgctggaggatggtaagggtcggtgtccatttgatcccaacttcaagtcaactgcactggtggtggatggcgagctctacacggggacggtgtcttctttccagggtaacgaccccgcaatcagtcgctcacagtctcttcggcctaccaagacagagtccagcttgaattggttgcaagacccagcatttgttgcaagtgcctatatcccggagtccctgggaagtctgcagggggacgatgataagatttactttttcttcagtgaaacagggcaggagttcgagttttttgagaatacaatagtgagccgaattgccagaatttgtaagggggatgaggggggtgagcgggtcttgcagcaaagatggacttcttttctgaaggcccagttgttgtgttctagacccgatgatgggtttccttttaatgtcctacaggacgtgttcaccctgtcccccagtccacaagactggcgggatactttattctacggcgtttttacatcacagtggcatcgtggtactacggaaggttctgcagtatgtgtgttcaccatgaaggacgtgcaacgagtgttcagcggcctctataaagaggtgaatcgggagacacagcaatggtacacggttacgcaccctgtgcccacaccgcgtcccggtgcatgtataaccaattcggctcgcgaaaggaagatcaacagctccctacagttacccgacagggtgttgaacttcctaaaggatcacttcctcatggacgggcaggtgagaagcaggatgctgcttctccagccccaggcccgatatcagcgagtagcagtgcacagggtgcccggactgcaccacacatatgacgtgcttttcctcgggacaggggacggaagactccacaaggcagtttcagtgggcccacgcgtacatatcatcgaggaactccagattttcagctccgggcagcccgtccagaatttactcctggacactcaccgcggacttctctatgcagcatcacacagtggcgtcgtgcaagtccccatggcaaactgtagtctgtatcgcagctgtggagactgtctgctcgccagggacccatattgtgcctggtccggaagcagctgtaaacacgtgtctttataccaaccacagttggccactaggccttggatccaagacattgagggcgctagcgccaaggatctgtgtagtgcctcatcggtcgtttccccatcttttgttcccacaggcgaaaaaccatgcgaacaggttcaatttcagccaaatactgtgaacactctggcctgccctctcctatccaacctggccaccaggctttggctgcgcaacggcgctcccgttaatgcgtcagcctcctgtcatgttctgccaaccggcgatcttttactggtggggacccagcagctgggcgagtttcagtgttggtccctggaagaagggtttcagcaactagtggccagctattgtcccgaggtggtcgaggacggcgtagccgaccagaccgacgagggtggctcggtccccgtaatcatctccacatcccgagtgtctgctccggcaggtggtaaggcttcttggggggcagatcgctcctgggcacggactcaacttctggacctgtcaagcctctatcaagctgtcgccacacgagaggactcggcttccagtggtgagatctcatag

SEQ ID NO: 203191 - DNA, 2514 bp, Artificial Sequence
  derived and/or modified sequence
atgctgcggaccgccatggggctccgctcttggcttgctgccccatggggagcattgcccccaagaccccctctgctgttgctactgctgctgctgctgctcttgcagccccctccacccacctgggccctgtcaccgcgaatatctcttcctctaggaagcgaggaaaggcccttcctcagatttgaggctgaacatataagtaactacacagccctgctgctctctagggatggaagaacgctgtacgtgggtgcacgcgaggctctctttgccctcagtagtaacctttcattcctcccaggaggcgaatatcaagagctcctgtggggcgcagatgcggagaaaaaacagcagtgtagctttaaagggaaagaccctcagcgggattgtcagaattacatcaaaatcctgttgcctctcagcggaagtcatctgtttacctgtggtacagctgccttttctcctatgtgcacttatatcaacatggaaaactttaccctggccagggatgaaaaaggtaacgtcctcctggaagacggaaaaggacggtgccctttcgaccccaactttaagtccactgctttagtggtggacggggaactgtacactgggacagtcagcagtttccaggggaacgatcccgctatctcaaggagtcagtccctccgaccgaccaaaacagagtcttccctaaactggctccaggacccagcctttgtggcttctgcctacattcctgaatcgcttggaagccttcagggcgacgatgacaagatttactttttcttctccgagacaggccaggaatttgaattcttcgagaatacaatagtgtcccgtatcgccaggatttgtaaaggcgatgaaggcggtgagcgcgtcttacagcagcgttggacatcattcctcaaagcacaactgctctgttcccggcctgacgatgggttccccttcaacgtacttcaggacgtgtttacgttgtcgcccagtccacaggattggcgtgacacgctgttctatggcgtgtttacatctcaatggcaccgcggaactactgaggggagcgcggtgtgcgttttcaccatgaaggatgtgcaaagggtcttttccggactgtacaaagaagtcaatagagagactcaacagtggtatactgtcacgcatccagtaccgacaccgagacctggagcatgcatcacaaacagcgccagagagcgcaaaattaactcttccctccagctgcccgacagggtgctgaattttctcaaggaccatttcttgatggacggacaggtgagatctcgcatgctgctgcttcagcctcaagcgagatatcaacgtgttgcggtgcaccgtgttcccggtcttcatcacacatatgacgtcctgtttttaggcaccggagacgggaggctgcataaggccgtttcagtcggacctagggtgcacataattgaagaactacagatcttcagctcagggcagcctgtgcagaacctcctgcttgatactcatcgtggattgttatatgcagcttctcactccggggtcgtccaagtgcccatggctaactgctctctgtaccgatcgtgcggggactgcttgctcgcacgcgacccctactgtgcgtggtccgggagttcctgtaagcatgtcagtctgtatcagccgcagctcgctactcgcccttggattcaggacatcgaaggagcaagcgccaaagatctctgctctgcctccagcgttgtttctccctcttttgtgcctactggggagaaaccctgcgaacaggttcagtttcaacccaataccgtgaacacactagcctgcccactgttgagcaatctagcaactcgtctctggctccggaacggcgctcctgttaatgcctcggccagttgtcacgtcctgcccaccggagacctgctcctagtgggcacacagcaacttggcgaattccagtgttggagtctagaggaaggctttcaacagctcgtcgcttcctattgcccggaggtagtcgaggatggtgtggcagatcaaaccgacgaaggtggaagtgttcccgtgatcatctctacatcccgagtgtcagctccagctggcggtaaagcctcttggggcgcagataggtcctactggaaggaattccttgtgatgtgtactctgttcgttctggctgtgctgttacccgtgttatttctgttatatcgccaccgcaactcaatgaaagtgtttctgaaacagggcgagtgtgcttcggtgcaccctaaaacttgccctgtcgtgctgccacccgagactagacctttgaacggattaggcccacctagcactcccctggaccacagagggtaccaatccttaagcgactctccacctggcagtagggtgttcactgagtcggagaagcgcccactgtccatacaggattctttcgtcgaagtctcgccagtgtgtccccgtccacgcgttaggctaggatccgagattcgcgattctgtcgtctag

SEQ ID NO: 203192 - DNA, 276 bp, Artificial Sequence
  derived and/or modified sequence
atgctgcggactgccatgggtctgaggtcttggctggcagctccatggggggcactcccacctcgtccccctctgctgctgctcctgttgctcctgttacttctgcagcccccaccaccgacctgggctctgtcaccacgaatttccttgccactcggctctgaagaaaggccctttctacgattcgaggcggaacacatctcgaattacactgctttgctccttagccgggatggccgaaccctgtatgtaggtgcccgtgaggccctgttttag

SEQ ID NO: 203193 - DNA, 345 bp, Artificial Sequence
  derived and/or modified sequence
atgcttagaaccgctatggggttacggtcttggctggcggcaccgtggggcgctcttccaccgaggcccccactgctcttgcttcttctgttgctgctcttactgcaaccgccaccaccaacatgggccctgtctcctaggatctccctgccactgggttcagaggaaagaccattcttgagattcgaagctgagcacatatccaactatactgccctgttgttgtccagagacgggagaacactgtatgtgggcgctcgtgaggctctgtttgccctgagttctaatctgagctttctgccaggcggagagtaccaggagctactgtggggagcggatgcctag

SEQ ID NO: 203194 - DNA, 366 bp, Artificial Sequence
  derived and/or modified sequence
atgcttcggacagctatgggcctccgatcctggctagcagcgccatggggagctttaccccctaggccacccctgctgctgctgctcctgctgttgctactcctgcagccaccaccccctacctgggccttaagtcctcgaatcagtctgccactgggttctgaggaacggcctttcctgaggtttgaggcggaacatattagtaactacactgctcttctcctatccagggatggacggaccctgtatgtgggcgcacgagaagcactcttcgccctgtcttccaacctctccttcctcccaggaggtgagtaccaggagctgctgtggggagccgatgccgagaagaagcagcaatgttcctag

SEQ ID NO: 203195 - DNA, 3781 bp, Artificial Sequence
  derived and/or modified sequence
ctccgggtccccaggggctgcgccgggccggcctggcaagggggacgagtcagtggacactccaggaagagcggccccgcggggggcgatgaccgtgcgctgaccctgactcactccaggtccggaggcgggggcccccggggcgactcgggggcggaccgcggggcggagctgccgcccgtgagtccggccgagccacctgagcccgagccgcgggacaccgtcgctcctgctctccgaatgctgcgcaccgcgatgggcctgaggagctggctcgccgccccatggggcgcgctgccgcctcggccaccgctgctgctgctcctgctgctgctgctcctgctgcagccgccgcctccgacctgggcgctcagcccccggatcagcctgcctctgggctctgaagagcggccattcctcagattcgaagctgaacacatctccaactacacagcccttctgctgagcagggatggcaggaccctgtacgtgggtgctcgagaggccctctttgcactcagtagcaacctcagcttcctgccaggcggggagtaccaggagctgctttggggtgcagacgcagagaagaaacagcagtgcagcttcaagggcaaggacccacagcgcgactgtcaaaactacatcaagatcctcctgccgctcagcggcagtcacctgttcacctgtggcacagcagccttcagccccatgtgtacctacatcaacatggagaacttcaccctggcaagggacgagaaggggaatgtcctcctggaagatggcaagggccgttgtcccttcgacccgaatttcaagtccactgccctggtggttgatggcgagctctacactggaacagtcagcagcttccaagggaatgacccggccatctcgcggagccaaagccttcgccccaccaagaccgagagctccctcaactggctgcaagacccagcttttgtggcctcagcctacattcctgagagcctgggcagcttgcaaggcgatgatgacaagatctactttttcttcagcgagactggccaggaatttgagttctttgagaacaccattgtgtcccgcattgcccgcatctgcaagggcgatgagggtggagagcgggtgctacagcagcgctggacctccttcctcaaggcccagctgctgtgctcacggcccgacgatggcttccccttcaacgtgctgcaggatgtcttcacgctgagccccagcccccaggactggcgtgacacccttttctatggggtcttcacttcccagtggcacaggggaactacagaaggctctgccgtctgtgtcttcacaatgaaggatgtgcagagagtcttcagcggcctctacaaggaggtgaaccgtgagacacagcagtggtacaccgtgacccacccggtgcccacaccccggcctggagcgtgcatcaccaacagtgcccgggaaaggaagatcaactcatccctgcagctcccagaccgcgtgctgaacttcctcaaggaccacttcctgatggacgggcaggtccgaagccgcatgctgctgctgcagccccaggctcgctaccagcgcgtggctgtacaccgcgtccctggcctgcaccacacctacgatgtcctcttcctgggcactggtgacggccggctccacaaggcagtgagcgtgggcccccgggtgcacatcattgaggagctgcagatcttctcatcgggacagcccgtgcagaatctgctcctggacacccacagggggctgctgtatgcggcctcacactcgggcgtagtccaggtgcccatggccaactgcagcctgtacaggagctgtggggactgcctcctcgcccgggacccctactgtgcttggagcggctccagctgcaagcacgtcagcctctaccagcctcagctggccaccaggccgtggatccaggacatcgagggagccagcgccaaggacctttgcagcgcgtcttcggttgtgtccccgtcttttgtaccaacaggggagaagccatgtgagcaagtccagttccagcccaacacagtgaacactttggcctgcccgctcctctccaacctggcgacccgactctggctacgcaacggggcccccgtcaatgcctcggcctcctgccacgtgctacccactggggacctgctgctggtgggcacccaacagctgggggagttccagtgctggtcactagaggagggcttccagcagctggtagccagctactgcccagaggtggtggaggacggggtggcagaccaaacagatgagggtggcagtgtacccgtcattatcagcacatcgcgtgtgagtgcaccagctggtggcaaggccagctggggtgcagacaggtcctactggaaggagttcctggtgatgtgcacgctctttgtgctggccgtgctgctcccagttttattcttgctctaccggcaccggaacagcatgaaagtcttcctgaagcagggggaatgtgccagcgtgcaccccaagacctgccctgtggtgctgccccctgagacccgcccactcaacggcctagggccccctagcaccccgctcgatcaccgagggtaccagtccctgtcagacagccccccggggtcccgagtcttcactgagtcagagaagaggccactcagcatccaagacagcttcgtggaggtatccccagtgtgcccccggccccgggtccgccttggctcggagatccgtgactctgtggtgtgagagctgacttccagaggacgctgccctggcttcaggggctgtgaatgctcggagagggtcaactggacctcccctccgctctgctcttcgtggaacacgaccgtggtgcccggcccttgggagccttggggccagctggcctgctgctctccagtcaagtagcgaagctcctaccacccagacacccaaacagccgtggccccagaggtcctggccaaatatgggggcctgcctaggttggtggaacagtgctccttatgtaaactgagccctttgtttaaaaaacaattccaaatgtgaaactagaatgagagggaagagatagcatggcatgcagcacacacggctgctccagttcatggcctcccaggggtgctggggatgcatccaaagtggttgtctgagacagagttggaaaccctcaccaactggcctcttcaccttccacattatcccgctgccaccggctgccctgtctcactgcagattcaggaccagcttgggctgcgtgcgttctgccttgccagtcagccgaggatgtagttgttgctgccgtcgtcccaccacctcagggaccagagggctaggttggcactgcggccctcaccaggtcctgggctcggacccaactcctggacctttccagcctgtatcaggctgtggccacacgagaggacagcgcgagctcaggagagatttcgtgacaatgtacgcctttccctcagaattcagggaagagactgtcgcctgccttcctccgttgttgcgtgagaacccgtgtgccccttcccaccatatccaccctcgctccatctttgaactcaaacacgaggaactaactgcaccctggtcctctccccagtccccagttcaccctccatccctcaccttcctccactctaagggatatcaacactgcccagcacaggggccctgaatttatgtggtttttatacattttttaataagatgcactttatgtcattttttaataaagtctgaagaattactgtttaatcctggctct

SEQ ID NO: 203196 - DNA, 2512 bp, Artificial Sequence
  derived and/or modified sequence
atttccggggacgccgcgccggactgaggctgtgcgcccgagactccgggtccccaggggctgcgccgggccggcctggcaagggggacgagtcagtggacactccaggaagagcggccccgcggggggcgatgaccgtgcgctgaccctgactcactccaggtccggaggcgggggcccccggggcgactcgggggcggaccgcggggcggagctgccgcccgtgagtccggccgagccacctgagcccgagccgcgggacaccgtcgctcctgctctccgaatgctgcgcaccgcgatgggcctgaggagctggctcgccgccccatggggcgcgctgccgcctcggccaccgctgctgctgctcctgctgctgctgctcctgctgcagccgccgcctccgacctgggcgctcagcccccggatcagcctgcctctgggctctgaagagcggccattcctcagattcgaagctgaacacatctccaactacacagcccttctgctgagcagggatggcaggaccctgtacgtgggtgctcgagaggccctctttgcactcagtagcaacctcagcttcctgccaggcggggagtaccaggagctgctttggggtgcagacgcagagaagaaacagcagtgcagcttcaagggcaaggacccacagcgcgactgtcaaaactacatcaagatcctcctgccgctcagcggcagtcacctgttcacctgtggcacagcagccttcagccccatgtgtacctacatcaacatggagaacttcaccctggcaagggacgagaaggggaatgtcctcctggaagatggcaagggccgttgtcccttcgacccgaatttcaagtccactgccctggtggttgatggcgagctctacactggaacagtcagcagcttccaagggaatgacccggccatctcgcggagccaaagccttcgccccaccaagaccgagagctccctcaactggctgcaagacccagcttttgtggcctcagcctacattcctgagagcctgggcagcttgcaaggcgatgatgacaagatctactttttcttcagcgagactggccaggaatttgagttctttgagaacaccattgtgtcccgcattgcccgcatctgcaagggcgatgagggtggagagcgggtgctacagcagcgctggacctccttcctcaaggcccagctgctgtgctcacggcccgacgatggcttccccttcaacgtgctgcaggatgtcttcacgctgagccccagcccccaggactggcgtgacacccttttctatggggtcttcacttcccagtggcacaggggaactacagaaggctctgccgtctgtgtcttcacaatgaaggatgtgcagagagtcttcagcggcctctacaaggaggtgaaccgtgagacacagcagtggtacaccgtgacccacccggtgcccacaccccggcctggagcgtgcatcaccaacagtgcccgggaaaggaagatcaactcatccctgcagctcccagaccgcgtgctgaacttcctcaaggaccacttcctgatggacgggcaggtccgaagccgcatgctgctgctgcagccccaggctcgctaccagcgcgtggctgtacaccgcgtccctggcctgcaccacacctacgatgtcctcttcctgggcactggtgacggccggctccacaaggcagtgagcgtgggcccccgggtgcacatcattgaggagctgcagatcttctcatcgggacagcccgtgcagaatctgctcctggacacccacagggggctgctgtatgcggcctcacactcgggcgtagtccaggtgcccatggccaactgcagcctgtacaggagctgtggggactgcctcctcgcccgggacccctactgtgcttggagcggctccagctgcaagcacgtcagcctctaccagcctcagctggccaccaggccgtggatccaggacatcgagggagccagcgccaaggacctttgcagcgcgtcttcggttgtgtccccgtcttttgtaccaacaggtgagaagccatgtgagcaagtccagttccagcccaacacagtgaacactttggcctgcccgctcctctccaacctggcgacccgactctggctacgcaacggggcccccgtcaatgcctcggcctcctgccacgtgctacccactggggacctgctgctggtgggcacccaacagctgggggagttccagtgctggtcactagaggagggcttccagcagctggtagccagctactgcccagaggtggtggaggacggggtggcagaccaaacagatgagggtggcagtgtacccgtcattatcagcacatcgcgtgtgagtgcaccagctggtggcaaggccagctggggtgcagacaggtcctgggctcggacccaactcctggacctttccagcctgtatcaggctgtggccacacgagaggacagcgcgagctcaggagagatttcgtga

SEQ ID NO: 203197 - DNA, 3807 bp, Artificial Sequence
  derived and/or modified sequence
cgccctccgccgcttgcgggtgagctctgcccaagccgaggctgcggggccggcgccggcgggaggactgcggtgccccgcggaggggctgagtttgccagggcccacttgaccctgtttcccacctcccgccccccaggtccggaggcgggggcccccggggcgactcgggggcggaccgcggggcggagctgccgcccgtgagtccggccgagccacctgagcccgagccgcgggacaccgtcgctcctgctctccgaatgctgcgcaccgcgatgggcctgaggagctggctcgccgccccatggggcgcgctgccgcctcggccaccgctgctgctgctcctgctgctgctgctcctgctgcagccgccgcctccgacctgggcgctcagcccccggatcagcctgcctctgggctctgaagagcggccattcctcagattcgaagctgaacacatctccaactacacagcccttctgctgagcagggatggcaggaccctgtacgtgggtgctcgagaggccctctttgcactcagtagcaacctcagcttcctgccaggcggggagtaccaggagctgctttggggtgcagacgcagagaagaaacagcagtgcagcttcaagggcaaggacccacagcgcgactgtcaaaactacatcaagatcctcctgccgctcagcggcagtcacctgttcacctgtggcacagcagccttcagccccatgtgtacctacatcaacatggagaacttcaccctggcaagggacgagaaggggaatgtcctcctggaagatggcaagggccgttgtcccttcgacccgaatttcaagtccactgccctggtggttgatggcgagctctacactggaacagtcagcagcttccaagggaatgacccggccatctcgcggagccaaagccttcgccccaccaagaccgagagctccctcaactggctgcaagacccagcttttgtggcctcagcctacattcctgagagcctgggcagcttgcaaggcgatgatgacaagatctactttttcttcagcgagactggccaggaatttgagttctttgagaacaccattgtgtcccgcattgcccgcatctgcaagggcgatgagggtggagagcgggtgctacagcagcgctggacctccttcctcaaggcccagctgctgtgctcacggcccgacgatggcttccccttcaacgtgctgcaggatgtcttcacgctgagccccagcccccaggactggcgtgacacccttttctatggggtcttcacttcccagtggcacaggggaactacagaaggctctgccgtctgtgtcttcacaatgaaggatgtgcagagagtcttcagcggcctctacaaggaggtgaaccgtgagacacagcagtggtacaccgtgacccacccggtgcccacaccccggcctggagcgtgcatcaccaacagtgcccgggaaaggaagatcaactcatccctgcagctcccagaccgcgtgctgaacttcctcaaggaccacttcctgatggacgggcaggtccgaagccgcatgctgctgctgcagccccaggctcgctaccagcgcgtggctgtacaccgcgtccctggcctgcaccacacctacgatgtcctcttcctgggcactggtgacggccggctccacaaggcagtgagcgtgggcccccgggtgcacatcattgaggagctgcagatcttctcatcgggacagcccgtgcagaatctgctcctggacacccacagggggctgctgtatgcggcctcacactcgggcgtagtccaggtgcccatggccaactgcagcctgtacaggagctgtggggactgcctcctcgcccgggacccctactgtgcttggagcggctccagctgcaagcacgtcagcctctaccagcctcagctggccaccaggccgtggatccaggacatcgagggagccagcgccaaggacctttgcagcgcgtcttcggttgtgtccccgtcttttgtaccaacaggggagaagccatgtgagcaagtccagttccagcccaacacagtgaacactttggcctgcccgctcctctccaacctggcgacccgactctggctacgcaacggggcccccgtcaatgcctcggcctcctgccacgtgctacccactggggacctgctgctggtgggcacccaacagctgggggagttccagtgctggtcactagaggagggcttccagcagctggtagccagctactgcccagaggtggtggaggacggggtggcagaccaaacagatgagggtggcagtgtacccgtcattatcagcacatcgcgtgtgagtgcaccagctggtggcaaggccagctggggtgcagacaggtcctactggaaggagttcctggtgatgtgcacgctctttgtgctggccgtgctgctcccagttttattcttgctctaccggcaccggaacagcatgaaagtcttcctgaagcagggggaatgtgccagcgtgcaccccaagacctgccctgtggtgctgccccctgagacccgcccactcaacggcctagggccccctagcaccccgctcgatcaccgagggtaccagtccctgtcagacagccccccggggtcccgagtcttcactgagtcagagaagaggccactcagcatccaagacagcttcgtggaggtatccccagtgtgcccccggccccgggtccgccttggctcggagatccgtgactctgtggtgtgagagctgacttccagaggacgctgccctggcttcaggggctgtgaatgctcggagagggtcaactggacctcccctccgctctgctcttcgtggaacacgaccgtggtgcccggcccttgggagccttggggccagctggcctgctgctctccagtcaagtagcgaagctcctaccacccagacacccaaacagccgtggccccagaggtcctggccaaatatgggggcctgcctaggttggtggaacagtgctccttatgtaaactgagccctttgtttaaaaaacaattccaaatgtgaaactagaatgagagggaagagatagcatggcatgcagcacacacggctgctccagttcatggcctcccaggggtgctggggatgcatccaaagtggttgtctgagacagagttggaaaccctcaccaactggcctcttcaccttccacattatcccgctgccaccggctgccctgtctcactgcagattcaggaccagcttgggctgcgtgcgttctgccttgccagtcagccgaggatgtagttgttgctgccgtcgtcccaccacctcagggaccagagggctaggttggcactgcggccctcaccaggtcctgggctcggacccaactcctggacctttccagcctgtatcaggctgtggccacacgagaggacagcgcgagctcaggagagatttcgtgacaatgtacgcctttccctcagaattcagggaagagactgtcgcctgccttcctccgttgttgcgtgagaacccgtgtgccccttcccaccatatccaccctcgctccatctttgaactcaaacacgaggaactaactgcaccctggtcctctccccagtccccagttcaccctccatccctcaccttcctccactctaagggatatcaacactgcccagcacaggggccctgaatttatgtggtttttatacattttttaataagatgcactttatgtcattttttaataaagtctgaagaattactgtttaatcctggctcttcctct

SEQ ID NO: 203198 - DNA, 533 bp, Artificial Sequence
  derived and/or modified sequence
gagatccgtggcaacccgtctgtgcatccccgctacccacctaggcatacctgttcctgcccactctctgggatcagcatcagaaccaagagcaaggctctgtctgggagtaagagtggcagccaccaggtgacctgaggtccggaggcgggggcccccggggcgactcgggggcggaccgcggggcggagctgccgcccgtgagtccggccgagccacctgagcccgagccgcgggacaccgtcgctcctgctctccgaatgctgcgcaccgcgatgggcctgaggagctggctcgccgccccatggggcgcgctgccgcctcggccaccgctgctgctgctcctgctgctgctgctcctgctgcagccgccgcctccgacctgggcgctcagcccccggatcagcctgcctctgggctctgaagagcggccattcctcagattcgaagctgaacacatctccaactacacagcccttctgctgagcagggatggcaggaccctgtacgtgggtgctcgagaggccctcttt

SEQ ID NO: 203199 - DNA, 559 bp, Artificial Sequence
  derived and/or modified sequence
gttaaacggcatcttccttggatggtctcaggatcacagccttctctaaagaagtattcctctccaaagagctgcaggccttcaacagccttattaggtccggaggcgggggcccccggggcgactcgggggcggaccgcggggcggagctgccgcccgtgagtccggccgagccacctgagcccgagccgcgggacaccgtcgctcctgctctccgaatgctgcgcaccgcgatgggcctgaggagctggctcgccgccccatggggcgcgctgccgcctcggccaccgctgctgctgctcctgctgctgctgctcctgctgcagccgccgcctccgacctgggcgctcagcccccggatcagcctgcctctgggctctgaagagcggccattcctcagattcgaagctgaacacatctccaactacacagcccttctgctgagcagggatggcaggaccctgtacgtgggtgctcgagaggccctctttgcactcagtagcaacctcagcttcctgccaggcggggagtaccaggagctgctttggggtgcagacgc

SEQ ID NO: 203200 - DNA, 585 bp, Artificial Sequence
  derived and/or modified sequence
aacatgtactgatgctgcagctgagctgctgcccagcccctggggagaagacaccagcagcatgcccagccagggcagggtggagagctgcagctgcaggtccggaggcgggggcccccggggcgactcgggggcggaccgcggggcggagctgccgcccgtgagtccggccgagccacctgagcccgagccgcgggacaccgtcgctcctgctctccgaatgctgcgcaccgcgatgggcctgaggagctggctcgccgccccatggggcgcgctgccgcctcggccaccgctgctgctgctcctgctgctgctgctcctgctgcagccgccgcctccgacctgggcgctcagcccccggatcagcctgcctctgggctctgaagagcggccattcctcagattcgaagctgaacacatctccaactacacagcccttctgctgagcagggatggcaggaccctgtacgtgggtgctcgagaggccctctttgcactcagtagcaacctcagcttcctgccaggcggggagtaccaggagctgctttggggtgcagacgcagagaagaaacagcagtgcagctt

SEQ ID NO: 203201 - protein, 450 aa, Artificial Sequence
  derived and/or modified sequence
MQPPRERLVVTGRAGWMGMGRGAGRSALGFWPTLAFLLCSFPAATSPCKILKCNSEFWSATSGSHAPASDDTPEFCAALRSYALCTRRTARTCRGDLAYHSAVHGIEDLMSQHNCSKDGPTSQPRLRTLPPAGDSQERSDSPEICHYEKSFHKHSATPNYTHCGLFGDPHLRTFTDRFQTCKVQGAWPLIDNNYLNVQVTNTPVLPGSAATATSKLTIIFKNFQECVDQKVYQAEMDELPAAFVDGSKNGGDKHGANSLKITEKVSGQHVEIQAKYIGTTIVVRQVGRYLTFAVRMPEEVVNAVEDWDSQGLYLCLRGCPLNQQIDFQAFHTNAEGTGARRLAAASPAPTAPETFPYETAVAKCKEKLPVEDLYYQACVFDLLTTGDVNFTLAAYYALEDVKMLHSNKDKLHLYDRTRDLPGRAAAGLPLAPRPLLGALVPLLALLPVFC

SEQ ID NO: 203202 - DNA, 1353 bp, Artificial Sequence
  derived and/or modified sequence
atgcagcctccccgagagcgattggtcgtgaccggccgagcaggctggatgggtatggggagaggtgccggcaggagcgctctgggcttctggcccacgttggccttccttctgtgcagcttcccagccgcgacctccccttgcaagattctgaagtgcaacagtgaattctggagcgccacctccggctctcatgcacccgccagtgacgatacccctgagttttgtgctgcacttaggtcttatgcactctgcactagacggactgctagaacctgtcgcggagaccttgcctatcactccgccgtacacggcattgaggacctgatgtcgcagcataattgctccaaagacggccctacctctcagccaaggctcaggactcttccacccgcaggagactcacaggaaagatccgatagtccagagatatgccactacgaaaagtctttccacaagcacagcgcaactcccaattatacccactgtggcttgtttggcgacccacatctacgcactttcactgaccgcttccagacctgcaaggttcagggcgcctggcctctgattgataacaactatttgaacgtgcaagtcactaacactccagtgctgcctggctccgcggcaacagctacttccaagttgacgattatatttaagaattttcaggaatgcgttgatcagaaggtttaccaggctgagatggatgagctaccagctgcttttgttgatggctctaagaatggtggggataagcacggagccaatagcttaaaaatcactgaaaaagttagcggccaacacgtcgagatccaggctaaatatatcggcacaacgatagttgtgcgccaggtcgggcgctatctgacttttgctgtgagaatgcccgaagaagtagtgaacgccgtggaagactgggactcacagggtctgtacttgtgcctgagaggctgtcctctcaaccaacaaattgactttcaagcctttcacaccaacgcagagggcacaggcgctcgtcggctcgccgcggccagtccggccccgacggccccggaaacatttccctatgagacagctgttgcaaagtgcaaggagaagctacccgtggaagatctgtactaccaagcatgtgtgttcgatttgctgacaacaggagacgtcaactttacgcttgcggcttattacgcgttggaggacgttaagatgcttcactctaataaggacaagctccatctgtacgacagaacccgcgatctccctggtagagcagccgccggccttccgttggctccaagaccactgctgggcgccctggtccctctgctggcgttgttgcccgtgttttgctag

SEQ ID NO: 203203 - DNA, 1353 bp, Artificial Sequence
  derived and/or modified sequence
atgcagcccccccgggagcggctggtggtgacaggccgggccggctggatgggcatgggcagaggagctggccgcagcgccctgggcttctggcccaccctggccttcctgctgtgcagcttccctgctgccaccagcccctgcaagatcctgaagtgcaacagcgagttctggagcgccaccagcggcagccacgccccagccagtgatgacaccccagagttctgtgccgccctgcggagctatgccctgtgcaccaggagaacagcccggacctgccgcggggacctggcctaccacagcgctgtgcacggcatcgaggacctgatgagccagcacaactgcagcaaggatggccccaccagccagccccggctgcggaccctgcccccagctggggacagccaggagaggagtgacagccctgagatctgccactatgagaagagcttccacaagcacagcgccacccccaactacacccactgcggcctgtttggagacccccacctgcggaccttcacagaccgcttccagacctgcaaggtgcagggcgcctggcccctgattgacaacaactacctgaatgtgcaggtgaccaacacccctgtgctgcccggcagcgctgccacagccaccagcaagctgaccatcatcttcaagaacttccaggagtgtgtggaccagaaggtgtaccaggccgagatggatgagctgcctgctgcctttgtggatggcagcaagaatggaggagacaagcacggggccaacagcctgaagatcacagagaaggtgtctggccagcacgtggagatccaggccaagtacatcggcaccaccatcgtggtgcggcaggtgggccgctacctgacctttgctgtgaggatgcctgaggaggtggtgaatgctgtggaggactgggacagccagggcctgtacctgtgcctgcggggctgccccctgaaccagcagattgacttccaggccttccacaccaatgctgagggcactggagcccggcggctggccgccgccagccctgcccccacagcccctgagaccttcccctatgaaacagctgtggccaagtgcaaggagaagctgcctgtggaggacctgtactaccaggcctgtgtgtttgacctgctgaccactggagatgtgaacttcaccctggccgcctactatgccctggaggatgtgaagatgctgcacagcaacaaggacaagctgcacctgtatgacaggacccgggacctgcccggccgggctgctgctggcctgcccctggccccccggcccctgctgggcgccctggtgcccctgctggccctgctgcctgtgttctgctag

SEQ ID NO: 203204 - DNA, 1353 bp, Artificial Sequence
  derived and/or modified sequence
atgcagcccccccgggagcggctggtggtgaccggccgggccggctggatgggaatgggtaggggggctggcaggtcagcattgggattctggccaaccttggccttcctgctgtgttcatttccggcggctaccagtccatgtaagattctgaagtgcaactcagaattctggtctgcaacttcagggagtcatgcgcccgcatctgatgataccccggagttttgtgccgccttgagatcatatgccctctgtacccgcagaaccgcccggacttgtcggggggatttagcttatcactctgctgtgcatggcatcgaggatctgatgtctcagcacaattgtagcaaggatggccctacctcacagcccagacttcgcacccttccccctgctggtgactctcaggagcgatcagatagccccgaaatttgtcactacgaaaaaagttttcataaacactcagccactccgaactatactcattgtggattattcggcgatcctcacttgcggaccttcaccgacagattccagacctgtaaagtccagggagcctggccacttatcgacaacaactatctgaacgtacaggtaactaacacccctgtgctccctggaagcgctgccaccgcaacatccaaactgacaatcatattcaaaaatttccaggagtgtgtggatcagaaagtgtaccaggccgaaatggatgagctgccggcagcattcgtggatggatccaagaatggaggagacaagcatggggccaattcattgaaaatcaccgaaaaagtcagtgggcaacacgtagagatccaggccaaatatatcgggaccaccattgttgtacgccaggtgggcaggtacctgacctttgccgtgcggatgccagaggaagtcgttaacgcagtcgaggactgggactctcaggggctatacctgtgcctgagagggtgccccctgaaccagcagatcgattttcaggcctttcacaccaacgcggaagggactggggcacggcggttggcggcagctagtcccgctccaacggctcccgagacatttccttacgaaactgcggttgctaaatgtaaggagaaactgcccgtggaggacctgtactatcaggcctgcgtcttcgatctgctgaccactggcgacgtcaacttcactcttgccgcttattatgcactggaagacgttaagatgctccattctaataaggacaagctgcatttgtacgaccgaacccgcgacctaccaggaagggccgcagccggcctccccctggcgccaagacccctgttgggcgccctcgttcctctgcttgctctgctgcctgtcttttgttag

SEQ ID NO: 203205 - DNA, 1353 bp, Artificial Sequence
  derived and/or modified sequence
atgcagccacctcgggagagactcgtcgtcactggcagagctggatggatgggaatgggacgtggtgcgggtcggagcgctctaggtttctggccaactcttgcattcctactctgttcctttcccgcagcaacttcgccctgtaaaattctcaagtgcaattctgagttttggtctgccacttccggctcacacgcacccgcatctgatgatacgcctgagttttgtgccgctctgcgcagctacgcactttgtacacgaagaactgcccgaacctgtcggggagatttagcctaccactcagcagtccacggcatagaggatctcatgagtcagcacaactgtagcaaagacgggccaacaagccagccacgcctgagaaccctgcctccagccggtgactcacaggagagatctgactctccagaaatctgccactacgagaagtcgttccacaaacactctgctactcctaactatacccattgcgggctgtttggggatccccatttaagaaccttcactgaccggtttcagacttgtaaagtccagggagcttggccccttatcgacaacaattatcttaatgtgcaggtgacgaacacccccgtcctgccaggctccgcagcaaccgcgaccagtaagctgacgatcatttttaagaatttccaagagtgcgtggatcaaaaggtctaccaggcagaaatggacgaactgcctgccgcatttgtggatggaagcaagaacggaggcgacaagcacggcgctaattcgctcaaaataactgagaaggtatcaggccagcatgtcgagatacaggccaagtacataggaaccaccatcgtggtgcggcaagtgggacgctatttaactttcgctgtccggatgccggaggaagttgttaacgctgttgaggactgggattcccaaggtctgtatctatgccttcgcggatgtcctctgaaccagcaaatcgatttccaggcatttcataccaacgcggaaggtactggcgctcgcaggttagctgcagcctcccccgctccaactgcaccagagaccttcccttacgaaactgccgtggcaaagtgcaaagaaaagctgccggtggaggacctgtactaccaagcttgtgtgttcgaccttctgacaacaggggatgtaaatttcaccctggctgcgtactacgccctagaggatgttaagatgttgcacagcaataaagataaattgcatttatacgatcggacacgcgatctgccgggacgcgcagctgccggattgccactcgccccacggccacttctgggtgccctggtaccactgctcgctctgttaccagttttttgctag

SEQ ID NO: 203206 - DNA, 3216 bp, Artificial Sequence
  derived and/or modified sequence
agttgtctcccgagcgctggctgcgccgcccgagccgctgggccggggaagcactggccgttcgctcccgggccggctccgccaggcgctcgcaggcatgcagcccgggagcaggaggcgctccccgggccgctgctgagccggccggggcggcggggaccagcgccagcggagcccctcccaccttgccccggggcagacgagcggcgccccgacaccccctcttctcccgcagccccgccagcgccaccccccgcgggccgcaggggctcatgcagccgccaagggagaggctagtggtaacaggccgagctggatggatgggtatggggagaggggcaggacgttcagccctgggattctggccgaccctcgccttccttctctgcagcttccccgcagccacctccccgtgcaagatcctcaagtgcaactctgagttctggagcgccacgtcgggcagccacgccccagcctcagacgacacccccgagttctgtgcagccttgcgcagctacgccctgtgcacgcggcggacggcccgcacctgccggggtgacctggcctaccactcggccgtccatggcatagaggacctcatgagccagcacaactgctccaaggatggccccacctcgcagccacgcctgcgcacgctcccaccggccggagacagccaggagcgctcggacagccccgagatctgccattacgagaagagctttcacaagcactcggccacccccaactacacgcactgtggcctcttcggggacccacacctcaggactttcaccgaccgcttccagacctgcaaggtgcagggcgcctggccgctcatcgacaataattacctgaacgtgcaggtcaccaacacgcctgtgctgcccggctcagcggccactgccaccagcaagctcaccatcatcttcaagaacttccaggagtgtgtggaccagaaggtgtaccaggctgagatggacgagctcccggccgccttcgtggatggctctaagaacggtggggacaagcacggggccaacagcctgaagatcactgagaaggtgtcaggccagcacgtggagatccaggccaagtacatcggcaccaccatcgtggtgcgccaggtgggccgctacctgacctttgccgtccgcatgccagaggaagtggtcaatgctgtggaggactgggacagccagggtctctacctctgcctgcggggctgccccctcaaccagcagatcgacttccaggccttccacaccaatgctgagggcaccggtgcccgcaggctggcagccgccagccctgcacccacagcccccgagaccttcccatacgagacagccgtggccaagtgcaaggagaagctgccggtggaggacctgtactaccaggcctgcgtcttcgacctcctcaccacgggcgacgtgaacttcacactggccgcctactacgcgttggaggatgtcaagatgctccactccaacaaagacaaactgcacctgtatgataggactcgggacctgccaggcagggcggctgcggggctgcccctggccccccggcccctcctgggcgccctcgtcccgctcctggccctgctccctgtgttctgctagacgcgtagatgtggagggaggcgcgggctccgtcctctcggcttccccatgtgtgggctgggaccgcccacggggtgcagatctcctggcgtgtccaccatggccccgcagaacgccagggaccgcctgctgccaagggctcaggcacggacccctccccttctagtgcacgtgacaaggttgtggtgactggtgccatgatgtttgacagtagagctgtgtgagagggagagcagctcccctcgccccgcccctgcagtgtgaatgtgtgaaacatcccctcaggctgaagccccccacccccaccagagacacactgggaaccgtcagagtcagctccttccccctcgcaatgcactgaaaggcccggccgactgctgctcgccgatccgtggggccccctgtgcccgccacacgcacgcacacactcttacacgagagcacactcgatccccctaggccagcggggacaccccagccacacagggaggcatccttggggcttggccccaggcagggcaaccccggggcgctgcttggcaccttagcagactgctggaaccttttggccagtaggtcgtgcccgcctggtgccttctggcctgtggcctccctgcccatgttcacctggctgctgtgggtaccagtgcaggtcccggttttcaggcacctgctcagctgcccgtctctggcctgggcccctgccccttccaccctgtgcttagaaagtcgaagtgcttggttctaaatgtctaaacagagaagagatccttgacttctgttcctctctctcctgcagatgcaagagctcctgggcaggggtgcctgggccccagggtgtggcaggagacccagtggatggggccagctggcctgccctgatcctctgcttcctcctcacaaccccaagagcccccagcccggtccatccacgtctggagtctggggagaggagcagggtcttaggactctcagctctgagcatccctggcagggtcttcaacctctaatctcttcccttaagccctgtggccacacagccaggagagacttgccgctggctcccgcctcatttcagcccagggtgctcatccaggggcccagaacagtcccacctgtgctgctgtgcccacagcacaaagccaggcttcactcccaaaagtgcagccaggccctggagggtgatcctgccagcagccctacagctccacaccctacccacccatcggcagcccctctgctgttccccagggacctctcatacactggccaggaggctgcagaacgtgtgtctccccctccctccaagaggtcctgctccctctgccagaaccgtgtgtgggcgggtgggagggcgctcggggcccggcccctccctctccctgctggttttagttggtccctatgttggaagtaaaaagtgaagcactttattttggttgtgtttgctcacgttctgcttggaagtggggacccctcactgcgtccacgtgtctgcgacctgtgtggagtgtcaccgcgtgtacatactgtaaattatttattaatggctaaatgcaagtaaagtttggtttttttgttattttctttt

SEQ ID NO: 203207 - DNA, 3078 bp, Artificial Sequence
  derived and/or modified sequence
gtagctgagatgcagagagccatcctgcccagacctagacaactcggaagtgggtttttcagcctcctgcaccggtgtcgcgtctgagtgcgactgatgagccagggggcgtcggtggaagcttggggtcggcagtctggttggaaaggagaggctagtggtaacaggccgagctggatggatgggtatggggagaggggcaggacgttcagccctgggattctggccgaccctcgccttccttctctgcagcttccccgcagccacctccccgtgcaagatcctcaagtgcaactctgagttctggagcgccacgtcgggcagccacgccccagcctcagacgacacccccgagttctgtgcagccttgcgcagctacgccctgtgcacgcggcggacggcccgcacctgccggggtgacctggcctaccactcggccgtccatggcatagaggacctcatgagccagcacaactgctccaaggatggccccacctcgcagccacgcctgcgcacgctcccaccggccggagacagccaggagcgctcggacagccccgagatctgccattacgagaagagctttcacaagcactcggccacccccaactacacgcactgtggcctcttcggggacccacacctcaggactttcaccgaccgcttccagacctgcaaggtgcagggcgcctggccgctcatcgacaataattacctgaacgtgcaggtcaccaacacgcctgtgctgcccggctcagcggccactgccaccagcaagctcaccatcatcttcaagaacttccaggagtgtgtggaccagaaggtgtaccaggctgagatggacgagctcccggccgccttcgtggatggctctaagaacggtggggacaagcacggggccaacagcctgaagatcactgagaaggtgtcaggccagcacgtggagatccaggccaagtacatcggcaccaccatcgtggtgcgccaggtgggccgctacctgacctttgccgtccgcatgccagaggaagtggtcaatgctgtggaggactgggacagccagggtctctacctctgcctgcggggctgccccctcaaccagcagatcgacttccaggccttccacaccaatgctgagggcaccggtgcccgcaggctggcagccgccagccctgcacccacagcccccgagaccttcccatacgagacagccgtggccaagtgcaaggagaagctgccggtggaggacctgtactaccaggcctgcgtcttcgacctcctcaccacgggcgacgtgaacttcacactggccgcctactacgcgttggaggatgtcaagatgctccactccaacaaagacaaactgcacctgtatgataggactcgggacctgccaggcagggcggctgcggggctgcccctggccccccggcccctcctgggcgccctcgtcccgctcctggccctgctccctgtgttctgctagacgcgtagatgtggagggaggcgcgggctccgtcctctcggcttccccatgtgtgggctgggaccgcccacggggtgcagatctcctggcgtgtccaccatggccccgcagaacgccagggaccgcctgctgccaagggctcaggcacggacccctccccttctagtgcacgtgacaaggttgtggtgactggtgccatgatgtttgacagtagagctgtgtgagagggagagcagctcccctcgccccgcccctgcagtgtgaatgtgtgaaacatcccctcaggctgaagccccccacccccaccagagacacactgggaaccgtcagagtcagctccttccccctcgcaatgcactgaaaggcccggccgactgctgctcgccgatccgtggggccccctgtgcccgccacacgcacgcacacactcttacacgagagcacactcgatccccctaggccagcggggacaccccagccacacagggaggcatccttggggcttggccccaggcagggcaaccccggggcgctgcttggcaccttagcagactgctggaaccttttggccagtaggtcgtgcccgcctggtgccttctggcctgtggcctccctgcccatgttcacctggctgctgtgggtaccagtgcaggtcccggttttcaggcacctgctcagctgcccgtctctggcctgggcccctgccccttccaccctgtgcttagaaagtcgaagtgcttggttctaaatgtctaaacagagaagagatccttgacttctgttcctctctctcctgcagatgcaagagctcctgggcaggggtgcctgggccccagggtgtggcaggagacccagtggatggggccagctggcctgccctgatcctctgcttcctcctcacaaccccaagagcccccagcccggtccatccacgtctggagtctggggagaggagcagggtcttaggactctcagctctgagcatccctggcagggtcttcaacctctaatctcttcccttaagccctgtggccacacagccaggagagacttgccgctggctcccgcctcatttcagcccagggtgctcatccaggggcccagaacagtcccacctgtgctgctgtgcccacagcacaaagccaggcttcactcccaaaagtgcagccaggccctggagggtgatcctgccagcagccctacagctccacaccctacccacccatcggcagcccctctgctgttccccagggacctctcatacactggccaggaggctgcagaacgtgtgtctccccctccctccaagaggtcctgctccctctgccagaaccgtgtgtgggcgggtgggagggcgctcggggcccggcccctccctctccctgctggttttagttggtccctatgttggaagtaaaaagtgaagcactttattttggttgtgtttgctcacgttctgcttggaagtggggacccctcactgcgtccacgtgtctgcgacctgtgtggagtgtcaccgcgtgtacatactgtaaattatttattaatggctaaatgcaagtaaagtttggtttttttgttattttctttta

SEQ ID NO: 203208 - DNA, 3174 bp, Artificial Sequence
  derived and/or modified sequence
ctcccgctcgacgcccggctgcggagctgcctggccatctcctgccctcggggatgtcggcgcagtgcaccgcgtgggctcgcgtcccggcggccctttgcctcggcgcgccggcgtacgggaaggtgcggaccttggattgagggccgaggatgcccattgccaagccgccccggctttcctaagtggacgggagggcacggcgacgattcagcgccggctcgcgccgcagctcaacccaggggagaggctagtggtaacaggccgagctggatggatgggtatggggagaggggcaggacgttcagccctgggattctggccgaccctcgccttccttctctgcagcttccccgcagccacctccccgtgcaagatcctcaagtgcaactctgagttctggagcgccacgtcgggcagccacgccccagcctcagacgacacccccgagttctgtgcagccttgcgcagctacgccctgtgcacgcggcggacggcccgcacctgccggggtgacctggcctaccactcggccgtccatggcatagaggacctcatgagccagcacaactgctccaaggatggccccacctcgcagccacgcctgcgcacgctcccaccggccggagacagccaggagcgctcggacagccccgagatctgccattacgagaagagctttcacaagcactcggccacccccaactacacgcactgtggcctcttcggggacccacacctcaggactttcaccgaccgcttccagacctgcaaggtgcagggcgcctggccgctcatcgacaataattacctgaacgtgcaggtcaccaacacgcctgtgctgcccggctcagcggccactgccaccagcaagctcaccatcatcttcaagaacttccaggagtgtgtggaccagaaggtgtaccaggctgagatggacgagctcccggccgccttcgtggatggctctaagaacggtggggacaagcacggggccaacagcctgaagatcactgagaaggtgtcaggccagcacgtggagatccaggccaagtacatcggcaccaccatcgtggtgcgccaggtgggccgctacctgacctttgccgtccgcatgccagaggaagtggtcaatgctgtggaggactgggacagccagggtctctacctctgcctgcggggctgccccctcaaccagcagatcgacttccaggccttccacaccaatgctgagggcaccggtgcccgcaggctggcagccgccagccctgcacccacagcccccgagaccttcccatacgagacagccgtggccaagtgcaaggagaagctgccggtggaggacctgtactaccaggcctgcgtcttcgacctcctcaccacgggcgacgtgaacttcacactggccgcctactacgcgttggaggatgtcaagatgctccactccaacaaagacaaactgcacctgtatgataggactcgggacctgccaggcagggcggctgcggggctgcccctggccccccggcccctcctgggcgccctcgtcccgctcctggccctgctccctgtgttctgctagacgcgtagatgtggagggaggcgcgggctccgtcctctcggcttccccatgtgtgggctgggaccgcccacggggtgcagatctcctggcgtgtccaccatggccccgcagaacgccagggaccgcctgctgccaagggctcaggcacggacccctccccttctagtgcacgtgacaaggttgtggtgactggtgccatgatgtttgacagtagagctgtgtgagagggagagcagctcccctcgccccgcccctgcagtgtgaatgtgtgaaacatcccctcaggctgaagccccccacccccaccagagacacactgggaaccgtcagagtcagctccttccccctcgcaatgcactgaaaggcccggccgactgctgctcgccgatccgtggggccccctgtgcccgccacacgcacgcacacactcttacacgagagcacactcgatccccctaggccagcggggacaccccagccacacagggaggcatccttggggcttggccccaggcagggcaaccccggggcgctgcttggcaccttagcagactgctggaaccttttggccagtaggtcgtgcccgcctggtgccttctggcctgtggcctccctgcccatgttcacctggctgctgtgggtaccagtgcaggtcccggttttcaggcacctgctcagctgcccgtctctggcctgggcccctgccccttccaccctgtgcttagaaagtcgaagtgcttggttctaaatgtctaaacagagaagagatccttgacttctgttcctctctctcctgcagatgcaagagctcctgggcaggggtgcctgggccccagggtgtggcaggagacccagtggatggggccagctggcctgccctgatcctctgcttcctcctcacaaccccaagagcccccagcccggtccatccacgtctggagtctggggagaggagcagggtcttaggactctcagctctgagcatccctggcagggtcttcaacctctaatctcttcccttaagccctgtggccacacagccaggagagacttgccgctggctcccgcctcatttcagcccagggtgctcatccaggggcccagaacagtcccacctgtgctgctgtgcccacagcacaaagccaggcttcactcccaaaagtgcagccaggccctggagggtgatcctgccagcagccctacagctccacaccctacccacccatcggcagcccctctgctgttccccagggacctctcatacactggccaggaggctgcagaacgtgtgtctccccctccctccaagaggtcctgctccctctgccagaaccgtgtgtgggcgggtgggagggcgctcggggcccggcccctccctctccctgctggttttagttggtccctatgttggaagtaaaaagtgaagcactttattttggttgtgtttgctcacgttctgcttggaagtggggacccctcactgcgtccacgtgtctgcgacctgtgtggagtgtcaccgcgtgtacatactgtaaattatttattaatggctaaatgcaagtaaagtttggtttttttgttattttctttta

SEQ ID NO: 203209 - DNA, 1353 bp, Artificial Sequence
  derived and/or modified sequence
atgcagccccccagagagagactggtggtgaccggcagagccggctggatgggcatgggcagaggcgccggcagaagcgccctgggcttctggcccaccctggccttcctgctgtgcagcttccccgccgccaccagcccctgcaagatcctgaagtgcaacagcgagttctggagcgccaccagcggcagccacgcccccgccagcgacgacacccccgagttctgcgccgccctgagaagctacgccctgtgcaccagaagaaccgccagaacctgcagaggcgacctggcctaccacagcgccgtgcacggcatcgaggacctgatgagccagcacaactgcagcaaggacggccccaccagccagcccagactgagaaccctgccccccgccggcgacagccaggagagaagcgacagccccgagatctgccactacgagaagagcttccacaagcacagcgccacccccaactacacccactgcggcctgttcggcgacccccacctgagaaccttcaccgacagattccagacctgcaaggtgcagggcgcctggcccctgatcgacaacaactacctgaacgtgcaggtgaccaacacccccgtgctgcccggcagcgccgccaccgccaccagcaagctgaccatcatcttcaagaacttccaggagtgcgtggaccagaaggtgtaccaggccgagatggacgagctgcccgccgccttcgtggacggcagcaagaacggcggcgacaagcacggcgccaacagcctgaagatcaccgagaaggtgagcggccagcacgtggagatccaggccaagtacatcggcaccaccatcgtggtgagacaggtgggcagatacctgaccttcgccgtgagaatgcccgaggaggtggtgaacgccgtggaggactgggacagccagggcctgtacctgtgcctgagaggctgccccctgaaccagcagatcgacttccaggccttccacaccaacgccgagggcaccggcgccagaagactggccgccgccagccccgcccccaccgcccccgagaccttcccctacgagaccgccgtggccaagtgcaaggagaagctgcccgtggaggacctgtactaccaggcctgcgtgttcgacctgctgaccaccggcgacgtgaacttcaccctggccgcctactacgccctggaggacgtgaagatgctgcacagcaacaaggacaagctgcacctgtacgacagaaccagagacctgcccggcagagccgccgccggcctgcccctggcccccagacccctgctgggcgccctggtgcccctgctggccctgctgcccgtgttctgctag

SEQ ID NO: 203210 - protein, 686 aa, Artificial Sequence
  derived and/or modified sequence
MSFPRGSQTQKIKHPIGTRKGPLEVPPPTEKDWPKDDEQDHVLVDPDEELDSLPQPYRMINKLVNLLFDQSWEIIEERNALREAESSQIQPTVYPPLGEIQLNKMPNCMAVSQDYVFIGGAKGFSIYNLYSAKQIYAWEKLKVDVTSIWATDLGNEILIAPVDEMGIIRLFYFYKEGLYLVKAINEVDDTSKQTTCIKMEISQGGDFAAFLLQGAGDIWLDVYKLPKETWLKKLEHPQLTSNPKKKVRQPQLNSLGPISADPLEMDANVSFKGDIKLSLPVYIMKIKPPKPVTGTTFKSPLEVFAKIKDCYGLGSGQNHFIKDSQWEQQAEIFNASYKKYLDREWEEEPLSTATFYFLLPSCLFAMPPEVKGPSGMACVLGIHWTRSHNFFLYSLNRTLKDKADPEGVWPCAAPIAVSQLSCSSSYLVLACEDGVLTLWDLAKGFPLGVAALPQGCFCQSIHFLKYFSVHKGQNMYPEGQVKSQMKCVVLCTDASLHLVEASGTQGPTISVLVERPVKHLDKTICAVAPVPALPGMVLIFSKNGSVCLMDVAKREIICAFAPPGAFPLEVPWKPVFAVSPDHPCFLLRGDYSHETASTDDAGIQYSVFYFNFEACPLLENISKNCTIPQRDLDNMAFPQALPLEKRCERFLQKSYRKLEKNPEKEEEHWARLQRYSLSLQRENFKK

SEQ ID NO: 203211 - DNA, 2061 bp, Artificial Sequence
  derived and/or modified sequence
atgagcttccccagaggcagccagacccagaagatcaagcaccccatcggcaccagaaagggccccctggaggtgcccccccccaccgagaaggactggcccaaggacgacgagcaggaccacgtgctggtggaccccgacgaggagctggacagcctgccccagccctacagaatgatcaacaagctggtgaacctgctgttcgaccagagctgggagatcatcgaggagagaaacgccctgagagaggccgagagcagccagatccagcccaccgtgtacccccccctgggcgagatccagctgaacaagatgcccaactgcatggccgtgagccaggactacgtgttcatcggcggcgccaagggcttcagcatctacaacctgtacagcgccaagcagatctacgcctgggagaagctgaaggtggacgtgaccagcatctgggccaccgacctgggcaacgagatcctgatcgcccccgtggacgagatgggcatcatcagactgttctacttctacaaggagggcctgtacctggtgaaggccatcaacgaggtggacgacaccagcaagcagaccacctgcatcaagatggagatcagccagggcggcgacttcgccgccttcctgctgcagggcgccggcgacatctggctggacgtgtacaagctgcccaaggagacctggctgaagaagctggagcacccccagctgaccagcaaccccaagaagaaggtgagacagccccagctgaacagcctgggccccatcagcgccgaccccctggagatggacgccaacgtgagcttcaagggcgacatcaagctgagcctgcccgtgtacatcatgaagatcaagccccccaagcccgtgaccggcaccaccttcaagagccccctggaggtgttcgccaagatcaaggactgctacggcctgggcagcggccagaaccacttcatcaaggacagccagtgggagcagcaggccgagatcttcaacgccagctacaagaagtacctggacagagagtgggaggaggagcccctgagcaccgccaccttctacttcctgctgcccagctgcctgttcgccatgccccccgaggtgaagggccccagcggcatggcctgcgtgctgggcatccactggaccagaagccacaacttcttcctgtacagcctgaacagaaccctgaaggacaaggccgaccccgagggcgtgtggccctgcgccgcccccatcgccgtgagccagctgagctgcagcagcagctacctggtgctggcctgcgaggacggcgtgctgaccctgtgggacctggccaagggcttccccctgggcgtggccgccctgccccagggctgcttctgccagagcatccacttcctgaagtacttcagcgtgcacaagggccagaacatgtaccccgagggccaggtgaagagccagatgaagtgcgtggtgctgtgcaccgacgccagcctgcacctggtggaggccagcggcacccagggccccaccatcagcgtgctggtggagagacccgtgaagcacctggacaagaccatctgcgccgtggcccccgtgcccgccctgcccggcatggtgctgatcttcagcaagaacggcagcgtgtgcctgatggacgtggccaagagagagatcatctgcgccttcgccccccccggcgccttccccctggaggtgccctggaagcccgtgttcgccgtgagccccgaccacccctgcttcctgctgagaggcgactacagccacgagaccgccagcaccgacgacgccggcatccagtacagcgtgttctacttcaacttcgaggcctgccccctgctggagaacatcagcaagaactgcaccatcccccagagagacctggacaacatggccttcccccaggccctgcccctggagaagagatgcgagagattcctgcagaagagctacagaaagctggagaagaaccccgagaaggaggaggagcactgggccagactgcagagatacagcctgagcctgcagagagagaacttcaagaagtag

SEQ ID NO: 203212 - DNA, 2061 bp, Artificial Sequence
  derived and/or modified sequence
atgtcctttcctagggggtcccagactcaaaagatcaagcatcctatcggcacaaggaagggccccctggaagtgccaccacccacagaaaaggattggcctaaagatgacgagcaggatcatgtcttagttgatccggacgaggagctagacagtttgcctcagccttaccggatgataaataagctggtgaacttactttttgatcagtcatgggagattatcgaagaacgaaacgcccttcgggaggctgaaagcagccaaatccagccgactgtatacccacccttaggggaaatccaactgaacaaaatgccaaactgcatggccgtcagtcaggattacgtgttcataggcggcgcaaagggtttctctatttataatctgtatagcgccaagcagatttatgcttgggaaaagcttaaggtagatgtgacaagcatttgggccacagatctgggaaatgaaatccttattgcgccggttgacgaaatgggcattataaggttgttttacttttataaggaaggcctatatctggtgaaggccatcaatgaggtcgatgacacatccaagcagactacctgtatcaaaatggagatatcacagggaggcgatttcgcagcgtttctccttcagggagccggcgatatttggctcgacgtgtataagctcccaaaggaaacatggctgaagaagctggagcacccacagcttactagcaatccaaaaaagaaggtccgccagccccaacttaattccttgggtccgataagtgcggatcccctggaaatggacgccaatgtgtcgtttaagggcgatattaagctctccttgcccgtttacatcatgaaaattaaaccccccaaacccgtgacgggaacgacttttaagagtcccttagaagtgttcgcaaaaatcaaggactgttatggtctgggttcaggtcaaaatcactttataaaggactcccaatgggaacagcaggcagagatctttaacgcctcctataagaagtaccttgatagggagtgggaggaggaacccctatcgacagcaactttctacttcttactgccatcctgcctgtttgccatgccaccggaggtcaaggggccctctggaatggcatgcgtgctgggaatacactggaccaggtcacacaattttttcctgtactctctaaaccgaacccttaaagacaaggctgatcccgagggtgtgtggccatgcgctgccccaatcgcagtaagccaattgtcgtgcagtagctcctacctggtactggcctgtgaagatggcgttctgaccctctgggatctggcaaaaggatttcccctgggagtcgcagctctgcctcagggctgtttctgtcaatctatccacttcctgaaatatttcagcgtacacaagggacagaacatgtacccagagggacaggtcaagagccagatgaaatgcgtcgtattgtgcacagatgctagcctgcatctggtcgaggccagcgggacccaggggccaacaatctctgttttggtagagagacccgtgaagcacctcgacaaaacaatttgcgcagtcgccccggtgcctgcacttcccgggatggtgttgatcttttctaaaaacggctcagtctgtctcatggatgtagctaagagggagatcatctgcgcctttgcccccccaggggctttccctcttgaggtgccatggaagccggtctttgccgtgtcaccagaccatccatgcttcttactccgaggggactactctcatgagacagctagcactgacgacgcaggaattcagtactctgtattctatttcaattttgaggcttgcccactcctcgaaaacatcagcaagaattgcaccatccctcagagagatctggataatatggcatttccccaggcactcccgctcgaaaagcgatgtgagagattcctgcaaaagtcatatagaaaattagaaaagaaccccgagaaggaagaggagcactgggcccgcttgcagaggtattccctgagcctgcagagagagaacttcaaaaagtag

SEQ ID NO: 203213 - DNA, 2061 bp, Artificial Sequence
  derived and/or modified sequence
atgtccttcccccggggcagccagacccagaagatcaagcaccccatcggcaccaggaagggccccctggaggtgcccccacccacagagaaggactggcccaaggatgatgagcaggaccacgtgctggtggaccctgatgaggagctggacagcctgccccagccctacaggatgatcaacaagctggtgaacctgctgtttgaccagagctgggagatcatcgaggagagaaatgccctgcgggaggccgagagcagccagatccagcccaccgtgtacccacccctgggggagatccagctgaacaagatgcccaactgcatggctgtgtcccaggactatgtgttcatcggcggggccaagggcttcagcatctacaacctgtacagcgccaagcagatctatgcctgggagaagctgaaggtggatgtgaccagcatctgggccacagacctgggcaatgagatcctgattgcccctgtggatgagatgggcatcatccgcctcttctacttctacaaggagggcctgtacctggtgaaggccatcaatgaggtggatgacaccagcaagcagaccacctgcatcaagatggagatcagccagggcggggactttgctgccttcctgctgcagggcgctggggacatctggctggatgtgtacaagctgcccaaggagacctggctgaagaagctggagcacccccagctgaccagcaaccccaagaagaaggtgcggcagccccagctgaacagcctgggccccatctctgctgaccccctggagatggatgccaacgtgtccttcaagggggacatcaagctgagcctgcctgtgtacatcatgaagatcaagccacccaagcctgtgacaggcaccaccttcaagagccccctggaggtgtttgccaagatcaaggactgctacggcctgggcagcggccagaaccacttcatcaaggacagccagtgggagcagcaggccgagatcttcaatgccagctacaagaagtacctggaccgggagtgggaggaggagcccctgagcacagccaccttctacttcctgctgcccagctgcctgtttgccatgcctcctgaggtgaagggccccagcggcatggcctgtgtgctgggcatccactggaccaggagccacaacttcttcctgtacagcctgaacagaaccctgaaggacaaggctgaccctgagggcgtgtggccctgtgccgcccccatcgctgtgtcccagctgagctgcagcagcagctacctggtgctggcctgtgaagatggagtgctgaccctgtgggacctggccaagggcttccccctgggcgtggccgccctgccccagggctgcttctgccagagcatccacttcctgaagtacttctctgtgcacaagggccagaacatgtacccagagggccaggtgaagagccagatgaagtgtgtggtgctgtgcacagatgccagcctgcacctggtggaggccagcggcacccagggccccaccatctctgtgctggtggagaggcctgtgaagcacctggacaagaccatctgtgctgtggcccctgtgcctgccctgcccggcatggtgctgatcttcagcaagaatggatctgtgtgcctgatggatgtggccaagcgggagatcatctgtgcctttgcccctcctggggccttccccctggaggtgccctggaagcctgtgtttgctgtgtccccagaccacccctgcttcctgctgcggggggactacagccatgaaacagccagcacagatgatgctggcatccagtacagcgtcttctacttcaactttgaggcctgccccctgctggagaacatcagcaagaactgcaccatcccccagagggacctggacaacatggccttcccccaggccctgcccctggagaagagatgtgagcgcttcctgcagaagagctacaggaagctggagaagaaccctgagaaggaggaggagcactgggcccggctgcagcgctacagcctgagcctgcagcgggagaacttcaagaagtag

SEQ ID NO: 203214 - DNA, 2061 bp, Artificial Sequence
  derived and/or modified sequence
atgagcttcccccggggcagccagacccagaagatcaagcaccccattggcaccagaaagggacccctggaggtgccccccccgacagagaaggattggcccaaggacgatgagcaggaccatgtgctggttgaccccgatgaggaactcgattccctcccccaaccatataggatgatcaataaactggttaacctgctgttcgatcaaagctgggaaatcatagaggagcgtaatgctctgcgggaggccgagtcctctcaaattcaaccaactgtctatcctcccctgggagagatacagctcaataagatgccaaattgcatggcagtgtcccaggattatgtgttcattggcggcgcaaagggattttccatctacaatctgtactctgcaaaacaaatatatgcttgggaaaaactgaaggtagatgtgactagcatctgggctacagacctgggcaatgaaattttaatcgcgccggttgatgagatgggcatcatcaggttattttatttctataaagagggtctctatctggtcaaggcaatcaacgaggtggacgacacaagcaagcagacaacatgcattaaaatggagatcagccagggcggcgacttcgccgccttcttgcttcaaggcgcaggcgacatctggctagatgtgtacaagttaccaaaggaaacatggttgaagaaactggagcatcctcagctcacctccaacccgaagaagaaagtccgacagcctcagctgaatagccttggccctatcagcgctgaccctctagaaatggatgccaatgtgtctttcaaaggggacattaagcttagtctgccagtttacataatgaagatcaaaccccccaagccagtgaccggcactacattcaagagccccctggaggtgttcgcaaagatcaaggattgctacggcctgggctcgggtcaaaatcactttatcaaagacagtcagtgggaacagcaggcagagatctttaatgctagttataaaaaatatttggaccgcgaatgggaagaggaacctctctccacggccacattctattttctccttccctcatgtctgtttgcaatgccgcctgaggtgaaaggtccctctggaatggcatgcgtgctcggcatccactggacacgctcccataactttttcctttattctctcaacagaacattgaaggataaagcagatcctgaaggagtatggccatgtgcagcgcccatagccgtttcgcagctctcttgctctagctcctacctggtgctcgcatgtgaggacggagttctcaccttatgggatctagctaagggatttccgttgggtgtcgctgcacttcctcagggatgcttttgtcaatcgatccattttctgaaatattttagtgtccataagggtcaaaatatgtacccagagggacaggttaaaagtcagatgaagtgcgttgtgttgtgcactgacgcatccctccacctggtcgaggcctccggaactcagggcccaaccatttcggtactggtggaaagaccggtgaaacatttggacaaaaccatctgcgccgtggccccggtccctgcactccctgggatggtgttgattttcagcaagaatggcagcgtatgtcttatggacgtggccaagcgtgagataatctgtgctttcgccccacctggcgcttttccactggaggtgccctggaagccagtgtttgccgtgtcccctgatcatccttgttttttactacggggtgactatagtcacgagaccgcatcaacagacgacgctggcatccagtattccgttttttactttaatttcgaagcgtgcccgctgctcgaaaatatttcaaagaactgtaccatcccacagcgagacctggacaatatggccttcccacaagcccttcctcttgagaaacggtgtgagcgctttctgcagaagtcatatcgaaagctggagaagaaccccgaaaaggaggaggaacactgggctcgtctccaaaggtactccctgagcctgcaacgggaaaactttaaaaaatag

SEQ ID NO: 203215 - DNA, 2061 bp, Artificial Sequence
  derived and/or modified sequence
atgtcattcccgcgtggttcacagactcaaaaaattaaacaccctattggaactcggaaagggcctttagaagtgccaccacctaccgagaaggattggcccaaagacgatgagcaagaccatgtgctggttgatcccgacgaggaactggacagtcttcctcagccataccgcatgatcaataagctggtcaacctactttttgatcagtcatgggaaataattgaagaacgcaacgctctcagagaagcagaatcctctcagattcagcccacagtttatccccctctcggcgagatccagcttaataaaatgccaaattgtatggctgtctcccaggactacgtattcatcggcggagcaaagggctttagcatttacaacctctatagcgccaaacagatttatgcttgggaaaagctcaaggttgatgttacaagcatttgggcgactgatctgggcaatgaaatcctgatagctcccgtggatgagatggggattattagactgttctatttctataaggaaggcctgtatctggtgaaagcaatcaacgaagtcgacgatacaagtaagcagactacctgcattaaaatggaaatctcgcaggggggagatttcgctgctttcctactccaaggagccggagacatctggcttgacgtgtacaagctgcctaaggagacatggctgaagaaactggagcatccccaactgacatccaaccccaaaaagaaggtccgtcagcctcagcttaatagcctcggccctatttccgcggatccattggagatggacgccaatgtcagctttaaaggagatattaaactgtcgcttccagtgtacattatgaaaattaagcctcctaagccggtgaccggtacgacctttaaatcccccctggaagtttttgctaagattaaggattgttatggcctgggcagcggacagaatcattttattaaggacagtcagtgggaacagcaagcggagattttcaacgcgtcctataaaaaatacttggatcgtgagtgggaagaggagccattaagtactgctacattttactttctcctcccgagctgtctgttcgccatgcccccagaagtgaagggccctagtggtatggcctgtgtactggggatccactggactcgatctcacaatttttttctgtacagcctcaaccgtacactcaaagacaaagcggacccagaaggagtgtggccatgcgctgctcccatcgccgtctctcagctgtcttgtagcagctcatacctcgtcttggcttgcgaagacggggtgctcacgctgtgggatctcgcaaaagggttcccactcggagttgctgccttaccacaaggctgtttctgccagtcgatacactttcttaaatacttctctgttcataaggggcagaatatgtatcccgagggccaagtgaaaagccagatgaagtgcgtcgtcctgtgtacagatgctagtctgcacctggtggaagcctctggaacgcagggcccaactatcagcgtgctggtggagagacctgtgaaacatctggacaagactatttgtgccgtcgccccagtgcccgcactgccaggcatggtactgattttctccaagaatggatccgtgtgccttatggacgtagcaaagcgagagataatttgtgcattcgctccgccaggcgcattccctctcgaagtaccatggaaaccggttttcgctgtgtcccctgaccatccctgctttttgctgagaggcgactatagccatgaaacagcttcaaccgacgatgctggaatccagtacagtgttttctactttaactttgaggcttgtcccctgttggagaacattagcaaaaattgcactatcccacagcgtgacctggacaacatggcgttcccacaggcccttcctctggagaagcgatgtgagcgctttcttcaaaagtcatacagaaagctggagaagaaccctgaaaaggaagaagaacattgggctcgattacaacgttattctctttctctgcagagagaaaattttaaaaagtag

SEQ ID NO: 203216 - DNA, 2409 bp, Artificial Sequence
  derived and/or modified sequence
cggacttccggttcaagccggaagttgtggttaccaaggcgacgcaacgccgcccggccagcttttcagtttcatagaggttcccagtgccaccttctgtgatgtcattcccaagaggaagtcagacccagaaaataaagcaccccattggtacacgaaagggaccattggaggtgccacccccaacagagaaggactggcctaaagacgatgaacaggatcatgtcctcgtggatccagatgaggagctggattccttgcctcagccttatcgaatgatcaacaagctggtgaaccttctgtttgaccagtcttgggaaattattgaagagagaaacgcactgagggaagctgagagcagccagatccagcccaccgtctaccctccacttggagaaatccagctcaacaaaatgccaaattgtatggctgtttcccaagactatgtgtttattggaggagccaaaggattctcaatttataatctgtacagtgctaaacaaatatatgcgtgggagaagcttaaggttgatgtcacttccatctgggccacagatttagggaatgaaatactcattgctcctgtggatgaaatgggtatcattagactcttttatttttataaggaaggactttacctagtcaaagccatcaatgaagtggatgataccagcaagcaaactacctgtataaagatggagatctctcaaggaggggactttgcagccttcctcctacaaggagccggagatatttggctggatgtgtataaattgcccaaggagacttggctcaagaaactagagcacccccaactcacttcaaatccaaagaaaaaagtcagacagccgcaactgaactcccttggtcccatttctgcagatcctttagaaatggatgcaaatgttagttttaaaggagacattaaattgagtcttccagtttacataatgaagatcaaaccacctaagcctgttacaggcaccacattcaaaagccccctggaagtctttgcaaagatcaaggactgctacggactgggctccgggcagaatcatttcatcaaggacagtcagtgggagcagcaagctgagatcttcaacgcttcctacaagaagtacctagatagggagtgggaggaagagccactcagtacggccaccttctatttccttcttcctagctgcctatttgcaatgccaccggaagtcaagggcccctcaggaatggcctgtgtccttggtatacactggaccagaagtcacaatttcttcctgtattcactaaaccgaactctaaaggataaagctgaccccgagggtgtgtggccctgtgctgcgcccattgcagtctctcagctcagctgctcctcctcctacctggtgctggcctgcgaggatggtgtgctcacgctgtgggacctggccaaaggattccctcttggggtcgctgctcttcctcagggatgtttctgccaaagcattcacttcctaaaatatttctcggtccacaaaggacagaatatgtatcctgaaggtcaagtgaaatcccaaatgaaatgtgtggtgctgtgcacagacgcctccctccatctggtggaggctagcgggacccaaggacccaccatcagtgtgcttgttgagaggcctgtaaagcacctggataaaaccatctgtgccgtggccccagtcccagccttacctggcatggtgctcatcttttccaagaatggctctgtgtgccttatggatgtggccaagcgtgaaatcatctgtgcctttgcccctccgggagcctttcctctggaggtcccctggaagccagtgtttgctgtgtctccagaccatccatgtttcctgctccgaggagactattcacatgaaactgcgtccaccgacgatgctggaatccaatattctgttttctattttaattttgaggcctgcccactcctggaaaatatctcaaaaaattgtaccattcctcaaagggacttggataacatggccttcccccaagcactgccactggagaagagatgtgagcgtttcctccagaagagctatcggaagctggagaagaacccagagaaggaggaggagcactgggcccggcttcagaggtactccttgtcgctccagagagagaacttcaagaagtgaggctgccaccgccctgggatctctgaaaaggaggtttcagccacgaggcagctgctcccaggacactgaggccaagagaaatgtaacagagccacagctccacaggcctgcactcggagtctggggcctctgcagagccagcaaggggaaaagtataatctgggggaccttcaaccactaagcctcttgtcagagccctcaggcaggcagatgtgtcacccaaataaacagtgatattgtctccaga

SEQ ID NO: 203217 - protein, 630 aa, Artificial Sequence
  derived and/or modified sequence
MDIKGQFWNDDDSEGDNESEEFLYGVQGSCAADLYRHPQLDADIEAVKEIYSENSVSIREYGTIDDVDIDLHINISFLDEEVSTAWKVLRTEPIVLRLRFSLSQYLDGPEPSIEVFQPSNKEGFGLGLQLKKILGMFTSQQWKHLSNDFLKTQQEKRHSWFKASGTIKKFRAGLSIFSPIPKSPSFPIIQDSMLKGKLGVPELRVGRLMNRSISCTMKNPKVEVFGYPPSPQAGLLCPQHVGLPPPARTSPLVSGHCKNIPTLEYGFLVQIMKYAEQRIPTLNEYCVVCDEQHVFQNGSMLKPAVCTRELCVFSFYTLGVMSGAAEEVATGAEVVDLLVAMCRAALESPRKSIIFEPYPSVVDPTDPKTLAFNPKKKNYERLQKALDSVMSIREMTQGSYLEIKKQMDKLDPLAHPLLQWIISSNRSHIVKLPLSRLKFMHTSHQFLLLSSPPAKEARFRTAKKLYGSTFAFHGSHIENWHSILRNGLVNASYTKLQLHGAAYGKGIYLSPISSISFGYSGMGKGQHRMPSKDELVQRYNRMNTIPQTRSIQSRFLQSRNLNCIALCEVITSKDLQKHGNIWVCPVSDHVCTRFFFVYEDGQVGDANINTQDPKIQKEIMRVIGTQVYTN

SEQ ID NO: 203218 - protein, 518 aa, Artificial Sequence
  derived and/or modified sequence
MDIKGQFWNDDDSEGDNESEEFLYGVQGSCAADLYRHPQLDADIEAVKEIYSENSVSIREYGTIDDVDIDLHINISFLDEEVSTAWKVLRTEPIVLRLRFSLSQYLDGPEPSIEVFQPSNKEGFGLGLQLKKILGMFTSQQWKHLSNDFLKTQQEKRHSWFKASGTIKKFRAGLSIFSPIPKSPSFPIIQDSMLKGKLGVPELRVGRLMNRSISCTMKNPKVEVFGYPPSPQAGLLCPQHVGLPPPARTSPLVSGHCKNIPTLEYGFLVQIMKYAEQRIPTLNEYCVVCDEQHVFQNGSMLKPAVCTRELCVFSFYTLGVMSGAAEEVATGAEVVDLLVAMCRAALESPRKSIIFEPYPSVVDPTDPKTLAFNPKKKNYERLQKALDSVMSIREMTQGSYLEIKKQMDKLDPLAHPLLQWIISSNRSHIVKLPLSRLKFMHTSHQFLLLSSPPAKEARFRTAKKLYGSTFAFHGSHIENWHSILRNGLVNASYTKLQEWEKDSTGCPPRMSWSRDTTG

SEQ ID NO: 203219 - protein, 388 aa, Artificial Sequence
  derived and/or modified sequence
MDIKGQFWNDDDSEGDNESEEFLYGVQGSCAADLYRHPQLDADIEAVKEIYSENSVSIREYGTIDDVDIDLHINISFLDEEVSTAWKVLRTEPIVLRLRFSLSQYLDGPEPSIEVFQPSNKEGFGLGLQLKKILGMFTSQQWKHLSNDFLKTQQEKRHSWFKASGTIKKFRAGLSIFSPIPKSPSFPIIQDSMLKGKLGVPELRVGRLMNRSISCTMKNPKVEVFGYPPSPQAGLLCPQHVGLPPPARTSPLVSGHCKNIPTLEYGFLVQIMKYAEQRIPTLNEYCVVCDEQHVFQNGSMLKPAVCTRELCVFSFYTLGVMSGAAEEVATGAEVVDLLVAMCRAALESPRKSIIFEPYPSVVDPTDPKTVAFMVELDPRTTPHSDGPD

SEQ ID NO: 203220 - DNA, 1893 bp, Artificial Sequence
  derived and/or modified sequence
atggacatcaagggccagttctggaacgacgacgacagcgagggcgacaacgagagcgaggagttcctgtacggcgtgcagggcagctgcgccgccgacctgtacagacacccccagctggacgccgacatcgaggccgtgaaggagatctacagcgagaacagcgtgagcatcagagagtacggcaccatcgacgacgtggacatcgacctgcacatcaacatcagcttcctggacgaggaggtgagcaccgcctggaaggtgctgagaaccgagcccatcgtgctgagactgagattcagcctgagccagtacctggacggccccgagcccagcatcgaggtgttccagcccagcaacaaggagggcttcggcctgggcctgcagctgaagaagatcctgggcatgttcaccagccagcagtggaagcacctgagcaacgacttcctgaagacccagcaggagaagagacacagctggttcaaggccagcggcaccatcaagaagttcagagccggcctgagcatcttcagccccatccccaagagccccagcttccccatcatccaggacagcatgctgaagggcaagctgggcgtgcccgagctgagagtgggcagactgatgaacagaagcatcagctgcaccatgaagaaccccaaggtggaggtgttcggctacccccccagcccccaggccggcctgctgtgcccccagcacgtgggcctgcccccccccgccagaaccagccccctggtgagcggccactgcaagaacatccccaccctggagtacggcttcctggtgcagatcatgaagtacgccgagcagagaatccccaccctgaacgagtactgcgtggtgtgcgacgagcagcacgtgttccagaacggcagcatgctgaagcccgccgtgtgcaccagagagctgtgcgtgttcagcttctacaccctgggcgtgatgagcggcgccgccgaggaggtggccaccggcgccgaggtggtggacctgctggtggccatgtgcagagccgccctggagagccccagaaagagcatcatcttcgagccctaccccagcgtggtggaccccaccgaccccaagaccctggccttcaaccccaagaagaagaactacgagagactgcagaaggccctggacagcgtgatgagcatcagagagatgacccagggcagctacctggagatcaagaagcagatggacaagctggaccccctggcccaccccctgctgcagtggatcatcagcagcaacagaagccacatcgtgaagctgcccctgagcagactgaagttcatgcacaccagccaccagttcctgctgctgagcagcccccccgccaaggaggccagattcagaaccgccaagaagctgtacggcagcaccttcgccttccacggcagccacatcgagaactggcacagcatcctgagaaacggcctggtgaacgccagctacaccaagctgcagctgcacggcgccgcctacggcaagggcatctacctgagccccatcagcagcatcagcttcggctacagcggcatgggcaagggccagcacagaatgcccagcaaggacgagctggtgcagagatacaacagaatgaacaccatcccccagaccagaagcatccagagcagattcctgcagagcagaaacctgaactgcatcgccctgtgcgaggtgatcaccagcaaggacctgcagaagcacggcaacatctgggtgtgccccgtgagcgaccacgtgtgcaccagattcttcttcgtgtacgaggacggccaggtgggcgacgccaacatcaacacccaggaccccaagatccagaaggagatcatgagagtgatcggcacccaggtgtacaccaactag

SEQ ID NO: 203221 - DNA, 1557 bp, Artificial Sequence
  derived and/or modified sequence
atggacatcaagggccagttctggaacgacgacgacagcgagggcgacaacgagagcgaggagttcctgtacggcgtgcagggcagctgcgccgccgacctgtacagacacccccagctggacgccgacatcgaggccgtgaaggagatctacagcgagaacagcgtgagcatcagagagtacggcaccatcgacgacgtggacatcgacctgcacatcaacatcagcttcctggacgaggaggtgagcaccgcctggaaggtgctgagaaccgagcccatcgtgctgagactgagattcagcctgagccagtacctggacggccccgagcccagcatcgaggtgttccagcccagcaacaaggagggcttcggcctgggcctgcagctgaagaagatcctgggcatgttcaccagccagcagtggaagcacctgagcaacgacttcctgaagacccagcaggagaagagacacagctggttcaaggccagcggcaccatcaagaagttcagagccggcctgagcatcttcagccccatccccaagagccccagcttccccatcatccaggacagcatgctgaagggcaagctgggcgtgcccgagctgagagtgggcagactgatgaacagaagcatcagctgcaccatgaagaaccccaaggtggaggtgttcggctacccccccagcccccaggccggcctgctgtgcccccagcacgtgggcctgcccccccccgccagaaccagccccctggtgagcggccactgcaagaacatccccaccctggagtacggcttcctggtgcagatcatgaagtacgccgagcagagaatccccaccctgaacgagtactgcgtggtgtgcgacgagcagcacgtgttccagaacggcagcatgctgaagcccgccgtgtgcaccagagagctgtgcgtgttcagcttctacaccctgggcgtgatgagcggcgccgccgaggaggtggccaccggcgccgaggtggtggacctgctggtggccatgtgcagagccgccctggagagccccagaaagagcatcatcttcgagccctaccccagcgtggtggaccccaccgaccccaagaccctggccttcaaccccaagaagaagaactacgagagactgcagaaggccctggacagcgtgatgagcatcagagagatgacccagggcagctacctggagatcaagaagcagatggacaagctggaccccctggcccaccccctgctgcagtggatcatcagcagcaacagaagccacatcgtgaagctgcccctgagcagactgaagttcatgcacaccagccaccagttcctgctgctgagcagcccccccgccaaggaggccagattcagaaccgccaagaagctgtacggcagcaccttcgccttccacggcagccacatcgagaactggcacagcatcctgagaaacggcctggtgaacgccagctacaccaagctgcaggagtgggagaaggacagcaccggctgcccccccagaatgagctggagcagagacaccaccggctag

SEQ ID NO: 203222 - DNA, 1893 bp, Artificial Sequence
  derived and/or modified sequence
atggacattaagggccagttctggaatgatgatgatagcgagggggataatgagagcgaggaatttttatacggtgtgcagggctcatgtgcggccgacctgtacagacatcctcaactcgatgcagatatcgaggccgttaaggaaatctacagcgagaattccgtgtccatcagggaatacggcactatcgatgatgtggatattgacctccacatcaacatcagcttcctggacgaagaagttagcacagcttggaaagtgctgcgaactgagcccatcgttcttagattaaggttctctctcagccagtatttagacggacctgagcctagcatcgaggtcttccaacctagcaataaggagggcttcggcctgggactgcagttgaagaaaatcttgggcatgttcacctctcagcagtggaagcaccttagcaatgacttcttgaagacccagcaggaaaagagacatagctggttcaaagcatcaggaactataaaaaaattccgtgctggactcagtatcttcagcccgatcccgaaatctccatcctttcccattatacaggactccatgctgaaggggaagttaggggttcctgagttgcgagtgggaagattgatgaacaggtccatttcctgcactatgaagaatcctaaggttgaggtgttcggttatccacctagcccccaggccggcctgctgtgtccacaacatgtgggtcttcctcctcctgcccgcacgtcacccctggtaagcggtcattgcaagaacatcccaactctcgaatacggattcctggtacaaattatgaaatacgccgaacagcgaatcccaactctgaacgagtattgcgtggtatgcgacgagcagcacgtttttcagaatggttctatgttgaagcctgctgtgtgcaccagagagctgtgcgtgttttccttttataccctgggagtgatgtcaggggccgccgaggaggtggccactggtgctgaagtggtcgacctcttagtggccatgtgcagggccgctctcgagagccctaggaaaagtattatctttgagccttacccgagtgtcgtggaccctactgaccctaagacactcgcgttcaatccaaagaaaaagaattatgagcggttgcagaaagccctggactctgttatgtctatccgggagatgacgcaaggctcttacctggaaattaaaaaacaaatggacaaattggatccactggcccatcccctgcttcagtggatcatctctagtaacagatcacacattgttaagctccccttgagtcgtcttaagttcatgcacacttcccaccagtttctgctgctgtcctcaccccctgccaaggaggccagattcagaacagcgaagaaactctacggcagtacttttgcattccacggctcccacatcgagaattggcattccatcctgcgtaacggtttggtcaacgcttcgtacaccaagctgcagttgcatggcgcagcttatggaaaagggatatacctatctcccatctcgtcgatctccttcggctacagtggcatgggaaaagggcagcacagaatgcccagcaaggatgagctcgtgcaacgctacaacagaatgaatacaatccctcagacccgttcaatccagtctagatttttgcaatctcgcaatctgaactgtatcgcactttgcgaggttatcacatccaaggacctacagaagcacggcaacatctgggtgtgtccggtgagtgatcacgtttgcacaaggttcttctttgtgtacgaggacgggcaggtgggagacgccaacatcaacactcaggacccgaagatccagaaggaaattatgcgggttatcggcacacaagtgtatactaattag

SEQ ID NO: 203223 - DNA, 1557 bp, Artificial Sequence
  derived and/or modified sequence
atggacatcaagggacagttttggaacgatgacgacagcgagggtgacaacgagtctgaggagttcctgtatggggttcaagggtcttgtgccgccgacctgtaccgccacccccagctggacgctgatattgaggccgtcaaggagatttattccgagaactcagtgagcataagagaatatgggaccatcgatgacgtagacatagacctgcatatcaacatatctttccttgatgaagaggtgtccactgcttggaaagtattgcgcacagagccaatagtgctgagacttcgattttctctcagccagtacttagatggtcctgagccttctattgaagtgttccagccatccaataaggaaggattcggtctgggactacaattaaagaagatcttaggcatgtttacctcccagcagtggaagcatctctcaaatgacttcctgaaaacccagcaggagaaacgtcattcctggtttaaagcgagcggcactatcaaaaaattccgcgctggcctgtccatctttagcccgatccccaaatcaccctccttcccgattattcaggactccatgctgaaggggaagctgggcgtgccagagcttagagtcggccggctaatgaatcggtctatttcctgtaccatgaagaaccctaaggttgaggttttcggttatcctcctagcccccaagccgggttgttgtgtccgcagcacgttggattacctccacccgctcgtactagtcctctggttagtgggcattgtaaaaatattccaactctggagtatggatttctggtacagataatgaaatatgccgagcagcgaatcccaacattgaacgaatattgcgttgtgtgtgacgagcagcatgtcttccagaatgggtccatgctcaaacccgccgtctgcacccgagagctgtgtgtattttctttctatacgttaggtgtcatgagcggagcggccgaggaggtggcaactggcgcagaggtggtggatctgctggtggccatgtgtcgcgcagccctggaatcgccgagaaagtccataattttcgagccatacccatccgtggtagatcccaccgacccaaagactctcgcctttaatccgaagaaaaagaattacgaaagattgcagaaggctctggacagcgtaatgtccattcgcgaaatgacccagggaagctatcttgaaattaagaaacaaatggacaaattggatccgctggcccacccactgttacagtggatcataagctcaaatcggtctcacattgtcaagctgcctctgagtagacttaagttcatgcacacatcacatcaatttctgctactgtcctccccccccgcaaaggaggctcgtttcagaaccgcgaagaaactgtatggaagcacttttgcatttcacggttcccacatagaaaactggcattccatcctgcgtaatggcctggtgaacgcttcctataccaagctccaggagtgggaaaaggattccactggctgtccaccgaggatgtcatggtcccgtgacactaccggttag

SEQ ID NO: 203224 - DNA, 1893 bp, Artificial Sequence
  derived and/or modified sequence
atggacatcaaaggccagttctggaacgacgacgattccgagggcgacaatgagtctgaggagttcctgtatggggtgcaggggtcctgcgccgccgacctctatcggcacccccagcttgacgctgacattgaggctgtaaaggaaatctacagtgaaaatagtgtcagcatccgggagtatggcaccatcgacgacgttgatatcgatctgcatattaatatctctttcctggatgaggaagtctctaccgcatggaaggtgctcagaactgaacccatcgtgttacggctcaggttctcactgtcacagtatctggacggtccagagccttcaattgaggtcttccagccgtcaaacaaggaagggttcggcttgggactgcagctgaagaagattcttggaatgtttacttctcagcagtggaagcatctgtctaacgatttcctgaagacccaacaggagaaacggcacagctggttcaaagcatcaggcactattaaaaagttccgcgctggtctctctatcttctcccctattcccaaatctccttcttttcctatcatacaggattccatgctcaagggcaagctaggggtgcccgaattgagggtggggcggctcatgaacagatctatctcatgtaccatgaaaaacccaaaggtggaagtttttggctatcctccaagcccacaggccggactgctgtgtcctcagcatgttggcctccccccccctgcaagaacgtctcctctggtgtcaggccattgcaagaacattcctacccttgagtacggtttcctggtccagatcatgaagtatgccgagcagagaattcctaccctgaatgagtactgcgtggtctgcgacgaacagcacgtgttccagaatggtagcatgctcaagcctgcggtgtgcacccgggaactatgcgtattctctttctatacattgggcgtgatgagtggagccgctgaggaggtagcaacaggtgcagaagtggtcgatctgctggtggctatgtgcagagctgctctcgaatcccccaggaagagtataattttcgagccctacccctccgtggtggatcccacggatcccaaaacgctcgctttcaaccccaaaaaaaagaactatgaacgcttgcagaaagccctggattcagtcatgagcatcagagagatgacgcaaggttcgtatctagaaatcaaaaagcagatggataaattggatcccctggctcaccccttattgcagtggatcataagcagcaaccgttcccacattgttaaactcccactgagcaggttgaaattcatgcacacttctcatcaatttcttttattatcctctccgccagcaaaggaagccaggtttcgtaccgcgaagaagttgtatggttctacatttgcatttcacggatcccacatcgagaactggcattctattctcaggaatggtctggttaacgcgtcctataccaagctccaattacatggggctgcctatggcaagggtatttacttgagtccgatttccagcatcagtttcgggtactctggaatgggcaaaggacagcaccgcatgccttcaaaggacgaactggtgcaacgctacaatcgtatgaacactatccctcagaccagatccatccaaagcagattcctgcagagccgaaacctcaattgcattgccctgtgtgaggtaattacgagcaaagacttgcagaaacacggcaatatctgggtgtgccccgttagcgaccatgtgtgcacgcggttctttttcgtctatgaagacggccaggtgggtgacgcaaacataaatactcaagatcctaaaatccagaaggagattatgagggtgatagggacccaggtgtataccaattag

SEQ ID NO: 203225 - DNA, 1893 bp, Artificial Sequence
  derived and/or modified sequence
atggacatcaagggccagttctggaatgatgatgattctgagggggacaatgaaagtgaggagttcctgtatggagtgcagggcagctgtgccgctgacctgtaccgccacccccagctggatgctgacatcgaggccgtgaaggagatctacagtgaaaattctgtgtccatccgggagtatggcaccattgatgatgtggacatcgacctgcacatcaacatctccttcctggatgaggaggtgtccacagcctggaaggtgctgaggacagagcccatcgtgctgcggctgcgcttcagcctgagccagtacctggatggccctgagcccagcattgaggtgttccagcccagcaacaaggagggcttcggcctgggcctgcagctgaagaagatcctgggcatgttcaccagccagcagtggaagcacctgagcaatgacttcctgaagacccagcaggagaagaggcacagctggttcaaggccagcggcaccatcaagaagttccgggccggcctgagcatcttcagccccatccccaagagccccagcttccccatcatccaggacagcatgctgaagggcaagctgggcgtgcctgagctgcgggtgggccgcctgatgaacagaagcatcagctgcaccatgaagaaccccaaggtggaggtgtttggctacccacccagcccccaggccggcctgctgtgcccccagcacgtgggcctgcccccaccagcccggaccagccccctggtgtctggccactgcaagaacatccccaccctggagtatggcttcctggtgcagatcatgaagtatgcagagcagaggatccccaccctgaatgagtactgtgtggtgtgtgatgagcagcacgtgttccagaatggctccatgctgaagccagctgtgtgcacccgggagctgtgtgtgttctccttctacaccctgggcgtgatgtctggagctgctgaggaggtggccaccggggctgaggtggtggacctgctggtggccatgtgccgggccgccctggagagccccaggaagagcatcatctttgagccctaccccagcgtggtggaccccacagaccccaagaccctggccttcaaccccaagaagaagaactatgagcggctgcagaaggccctggacagcgtgatgagcatccgggagatgacccagggcagctacctggagatcaagaagcagatggacaagctggaccccctggcccaccccctgctgcagtggatcatcagcagcaacagaagccacatcgtgaagctgcccctgagccggctgaagttcatgcacaccagccaccagttcctgctgctgagcagccccccagccaaggaggcccgcttcagaacagccaagaagctgtatggcagcacctttgccttccacggcagccacatcgagaactggcacagcatcctgagaaatggcctggtgaatgccagctacaccaagctgcagctgcatggagctgcctacggcaagggcatctacctgagccccatcagcagcatcagctttggctacagcggcatgggcaagggccagcacaggatgcccagcaaggatgagctggtgcagcgctacaacaggatgaacaccatcccccagaccaggagcatccagagccgcttcctgcagagcaggaacctgaactgcatcgccctgtgtgaggtgatcaccagcaaggacctgcagaagcacggcaacatctgggtgtgccctgtgtctgaccacgtgtgcacccgcttcttctttgtgtatgaagatggccaggtgggagatgccaacatcaacacccaggaccccaagatccagaaggagatcatgagggtgattggcacccaggtgtacaccaactag

SEQ ID NO: 203226 - DNA, 1557 bp, Artificial Sequence
  derived and/or modified sequence
atggacatcaagggccagttctggaatgatgatgattctgagggggacaatgaaagtgaggagttcctgtatggagtgcagggcagctgtgccgctgacctgtaccgccacccccagctggatgctgacatcgaggccgtgaaggagatctacagtgaaaattctgtgtccatccgggagtatggcaccattgatgatgtggacatcgacctgcacatcaacatctccttcctggatgaggaggtgtccacagcctggaaggtgctgaggacagagcccatcgtgctgcggctgcgcttcagcctgagccagtacctggatggccctgagcccagcattgaggtgttccagcccagcaacaaggagggcttcggcctgggcctgcagctgaagaagatcctgggcatgttcaccagccagcagtggaagcacctgagcaatgacttcctgaagacccagcaggagaagaggcacagctggttcaaggccagcggcaccatcaagaagttccgggccggcctgagcatcttcagccccatccccaagagccccagcttccccatcatccaggacagcatgctgaagggcaagctgggcgtgcctgagctgcgggtgggccgcctgatgaacagaagcatcagctgcaccatgaagaaccccaaggtggaggtgtttggctacccacccagcccccaggccggcctgctgtgcccccagcacgtgggcctgcccccaccagcccggaccagccccctggtgtctggccactgcaagaacatccccaccctggagtatggcttcctggtgcagatcatgaagtatgcagagcagaggatccccaccctgaatgagtactgtgtggtgtgtgatgagcagcacgtgttccagaatggctccatgctgaagccagctgtgtgcacccgggagctgtgtgtgttctccttctacaccctgggcgtgatgtctggagctgctgaggaggtggccaccggggctgaggtggtggacctgctggtggccatgtgccgggccgccctggagagccccaggaagagcatcatctttgagccctaccccagcgtggtggaccccacagaccccaagaccctggccttcaaccccaagaagaagaactatgagcggctgcagaaggccctggacagcgtgatgagcatccgggagatgacccagggcagctacctggagatcaagaagcagatggacaagctggaccccctggcccaccccctgctgcagtggatcatcagcagcaacagaagccacatcgtgaagctgcccctgagccggctgaagttcatgcacaccagccaccagttcctgctgctgagcagccccccagccaaggaggcccgcttcagaacagccaagaagctgtatggcagcacctttgccttccacggcagccacatcgagaactggcacagcatcctgagaaatggcctggtgaatgccagctacaccaagctgcaggagtgggagaaggacagcacaggctgcccccccaggatgtcctggagccgggacaccactggatag

SEQ ID NO: 203227 - DNA, 1893 bp, Artificial Sequence
  derived and/or modified sequence
atggacatcaagggccagttctggaacgacgacgacagcgagggcgataatgaaagtgaagaattcttgtacggcgtgcagggaagctgtgctgccgatctatatagacaccctcaattggacgccgacatcgaggcagtaaaggaaatatattccgaaaattccgtctccattagagagtatggcacaatcgatgatgttgatatagatctccacataaatatctcctttctggacgaggaagtgtcgacagcgtggaaggtgctcagaacagaaccaattgtgctgcgactcaggttttccctgtcacagtatttagatggacctgagcctagtatagaggtctttcaaccgagcaataaggagggatttggactgggtctccagcttaagaagattttaggcatgttcacgagccagcaatggaagcacctctctaacgattttctgaagacacagcaagagaaacggcactcatggttcaaggcctccgggacaatcaagaaatttcgcgccggactgagtatcttcagccctatccccaagtcaccatcgtttcccatcattcaggactcaatgttgaaaggaaaactgggagtccccgaactgagggtaggaaggcttatgaataggtccatcagctgtacaatgaaaaaccctaaggtggaggtatttggataccctcccagtccacaggctgggctgttgtgcccgcagcatgttgggctgcctccacctgcccggacttctcctttggtgtcgggacactgtaagaacatacccacattagaatatggcttcctggtacagataatgaagtatgctgagcagagaataccgactctgaatgagtattgcgttgtttgcgacgaacaacacgtcttccagaatggttccatgttgaaacctgccgtgtgcacgagggagctgtgcgtattcagcttctacacactgggcgtgatgtcaggcgcagcagaggaggtggccaccggtgcggaagtagttgatttgctcgtagcgatgtgtcgagccgccttggaaagcccccgaaaatccatcatctttgagccctatccatccgtggtcgatcccacagaccccaagacactggccttcaacccaaaaaaaaagaactacgagcgactgcagaaagctctggactccgtgatgagcatccgggagatgactcaaggatcctacttggaaattaagaaacaaatggataagctggatcccctggcccacccactgctgcagtggattataagtagcaataggtctcacattgttaaactgccattgagccgacttaaattcatgcatacctcacaccagttccttttgctttcgtcacccccagccaaagaggcccgctttcgcacagccaaaaaattgtatggctcgacttttgcctttcatggctcccacatagaaaattggcactcaattctcagaaatggacttgtgaatgcgtcatacactaaacttcaactgcatggtgccgcctacggaaaagggatatatctcagtcccatctcaagtatatccttcggctattcaggaatgggtaaaggacagcatcggatgcctagcaaggacgagctggtccagcggtacaacagaatgaatacaattcctcaaacacggtccattcagtccaggtttctccaatccagaaaccttaattgcatcgccctgtgcgaggtgattacatccaaggatctgcagaagcacggaaatatctgggtgtgtcccgtctccgaccacgtgtgtacccgattcttcttcgtgtacgaggatggccaggtcggcgatgctaatatcaatacacaggacccaaaaatccagaaggagatcatgcgtgttattgggacacaggtgtacactaattag

SEQ ID NO: 203228 - DNA, 1557 bp, Artificial Sequence
  derived and/or modified sequence
atggacatcaagggccagttctggaacgacgacgacagcgagggcgataatgaaagtgaagaatttctctacggggtgcagggcagttgtgccgccgatctgtataggcaccctcaactggacgccgatatagaggcagtgaaggagatctattcggagaatagcgttagtatacgcgaatacggcactatcgatgacgtggacatcgacctgcacatcaatatcagcttccttgatgaggaggtcagcactgcgtggaaggtactccgcactgaacctatcgtcttaagactccggtttagcttatcacaataccttgatggaccggaaccttctattgaggtgtttcaacccagtaacaaggaggggttcggactggggttacagctgaaaaaaatcttggggatgtttacaagccagcaatggaaacacctgtctaatgactttctcaaaacccagcaagagaaacgtcattcatggtttaaggccagcggtaccattaaaaaatttcgcgccggccttagcatctttagtcctattcctaaaagcccatcattccccattattcaggactctatgctgaagggcaagctaggcgtgcccgagttgcgggtaggcaggcttatgaataggtctatcagctgtaccatgaaaaaccctaaggtggaggttttcggctatccccctagtccgcaggctggcttgttatgcccacagcatgtgggcctgcccccacctgctcggacgagccctttggtctccggtcactgcaaaaacataccaactttggaatacgggttcttagtccagatcatgaaatacgccgaacagcggatccctacattgaatgagtactgcgtggtttgtgatgaacaacatgtgttccagaacgggagtatgctgaagcctgctgtatgcacgcgcgaactgtgcgtgttcagtttctacacattgggcgtaatgtctggcgccgccgaggaggtggcaacaggagctgaagttgtggacttactcgtggctatgtgccgcgctgcactagagtcacctagaaagtccatcatcttcgagccttatccgagcgtggtggacccaacagaccccaaaacgctcgcattcaatcccaagaaaaagaactacgaaagattacagaaggctctggacagcgtcatgtccatccgggagatgacacaaggatcctacttggagattaagaagcagatggataagctggacccactggcccaccccctcctccagtggataatatcctcaaacagaagccatattgtgaaactcccacttagcaggcttaaattcatgcataccagtcatcaattcctgctcctgtcttccccaccggctaaggaggcccggttcagaacagccaagaagctgtacggcagtacgttcgccttccacggttcacacatcgaaaactggcatagcattcttagaaatggtctggttaatgccagctacaccaaactccaggagtgggagaaagactctaccggctgccctcccaggatgtcctggtcacgcgacaccacaggctag

SEQ ID NO: 203229 - DNA, 1893 bp, Artificial Sequence
  derived and/or modified sequence
atggacatcaagggccagttctggaacgacgacgacagcgagggcgataacgagtcggaagaatttctctacggcgtacagggctcatgcgctgcagatctctaccgtcacccacagctggacgccgacatagaagcagtgaaggaaatttattccgagaactcggtcagtatccgggagtatggtactattgatgatgtggacattgatctgcacataaatatatcattcctggacgaagaggtctccacagcatggaaggttttgcgcacagaacccatcgtgctgcgtttaaggttttctctgtcccagtacctggatggacctgaaccctccatcgaagtctttcaaccttccaacaaggaggggttcggactgggactccagctaaaaaagatcttggggatgtttacttcacagcagtggaaacatctcagcaacgatttcctgaagacacaacaagagaaacgccatagttggtttaaggccagtggcacaatcaagaagttcagagcaggcttgtccatcttttctcccatcccgaaatcaccctctttccctatcattcaggattccatgttaaaaggtaaactgggcgtccccgagttgcgggtgggccgcctgatgaacaggtctataagttgcaccatgaagaatcccaaggtagaagtctttggctatcctccttcaccgcaggccggcctgctgtgcccccaacacgtggggcttcctccgcccgctaggaccagccctctcgtatctggccactgcaaaaacatccccacactggagtacggattcctggtccaaattatgaagtatgctgagcaacggatcccaacattgaatgagtattgcgtggtgtgtgacgagcagcatgtgttccagaatggatcgatgctgaaacctgccgtgtgtaccagggaactatgcgtgtttagcttttataccctgggagtaatgtctggcgccgcagaagaagttgcgaccggagctgaagttgtggaccttctggtggctatgtgtcgtgccgctctcgagtcccccagaaagagcattatcttcgaaccatatccttccgtagtggatcccaccgatcccaaaacgctcgcttttaatccaaaaaaaaaaaactacgaaaggctgcaaaaagccctggattctgtgatgtccattcgcgagatgacacaggggagctacttggagattaaaaagcagatggacaagttagatcctctggcccatcccttgctgcaatggattatctcatccaaccgttcacatattgtgaagttgccactgagccgactcaaattcatgcacacatctcatcaatttttactcctgtcttctccccccgcaaaggaggccaggtttcgcacagcgaaaaaactgtacggttctacttttgcttttcacggctcacacatcgagaactggcattctattctgcggaacgggttggtcaacgcatcatacactaagttgcagctccacggggccgcgtatggcaaaggcatctatctgagtcctatttcctctataagctttggctacagtggcatgggcaaaggccaacatcgaatgccttccaaagatgagctggtgcagaggtacaatcgcatgaatacaatccctcaaacccggtcaattcagagtcgcttcctacaatcccgcaatctgaattgtattgccttgtgcgaggtgatcacctcaaaggatctgcagaaacatgggaacatatgggtttgcccagtcagtgaccatgtgtgcaccaggtttttcttcgtttacgaggatggccaggtgggagatgccaatatcaacacacaggacccgaagattcagaaggagataatgcgggtgatcggaacccaggtctatactaattag

SEQ ID NO: 203230 - DNA, 2855 bp, Artificial Sequence
  derived and/or modified sequence
gggtgcgcgacctcgcccgccaggcccggcccccgccccttggcctgccgctccgcccccgcggggcgtcccgggccgctcgtcccgtcggctgcggccgcgcgcggcccggggtcgccgtgagtactcgccaggctggcctgtgtggccgccaccacgggcacagggcggtgcggccgggccacgggaagggtgcggggctcgccccgtctccgcaggggtggacgaacaacagaaaccaagcagcaacagcccttggaaagaggctaaatttttcttgacttctgcagcaacaaagaccgtgaaaagttggcacttctggcctaacgctgccgtcatcctacccctcaccccagggcaacccaggctggacatttagtgcctccctctttattcctctgtgatcatccagatcagcacttgactgtttattttcaaatctcacgaacctcaccccaagatcttcacattctggatctcagctgctcttgaaggacagtgacttgttaccaccgcaacagcagagcctgccatccccaacagatcaccagttgtccctgacatcgtgccctaccttgtctccctttgtggtctcctaaatgcccatctcgttggccttggttcggctagtggtatggaggggtgctgcctagcactgacctgagagtgtgtgtgacccactgacccaatggacatcaaaggccagttctggaatgatgacgactcggagggagataatgaatcagaggaatttctctatggcgttcaggggagctgtgcagctgacctgtatcgacacccacagcttgatgcagacattgaagccgtgaaggagatctacagtgagaactctgtatccatcagagaatatggaactatcgatgacgtggacattgacctccacatcaacatcagcttcctcgatgaggaagtctctacagcctggaaggtcctccggacagaacctattgtgttgaggctgcgattttctctctcccagtacctagatggaccagaaccatccattgaggttttccagccatcaaataaggaaggatttgggctgggtcttcagttgaaaaagatcctgggtatgtttacatcccaacaatggaaacatctgagcaatgatttcttgaagacccagcaggagaagaggcacagttggttcaaggcaagtggtaccatcaagaagttccgagctggcctcagcatcttttcacccatccccaagtctcccagtttccctatcatacaggactccatgctgaaaggcaaactaggtgtaccagagcttcgggttgggcgcctcatgaaccgttccatctcctgtaccatgaagaaccccaaagtggaagtgtttggctaccctcccagcccccaggcaggtctcctgtgccctcagcacgtgggcctccctcccccagcacggacctctcctttggtcagtggtcactgcaagaacattcccactctggagtatggattcctcgttcagatcatgaagtatgcagaacagaggattccaacattgaatgagtactgtgtggtgtgtgatgagcagcatgtcttccaaaatggatctatgctgaagccagctgtctgtactcgtgaactatgcgttttctccttctacacactgggcgtcatgtctggagctgcagaggaggtggccactggagcagaggtggtggatctgctggtggccatgtgtagggcagctttagagtcccctagaaagagcatcatctttgagccttatccctctgtggtggaccccactgatcccaagactctggcctttaaccctaagaagaagaattatgagcggcttcagaaagctctggatagtgtgatgtctattcgggagatgacccagggctcatatttggaaatcaagaaacagatggacaagttggatcccctggcccatcctctcctgcagtggatcatctctagcaacaggtcacacattgtcaaactacctctcagcaggctgaagttcatgcacacctcacaccagttcctcctgctgagcagccctcctgccaaggaggctcggttccggaccgccaagaagctctatggcagcacctttgccttccatgggtcccacattgagaactggcattcgatcctgcgcaatgggctggtcaatgcatcctacaccaaactgcagctgcatggagcagcctatggcaaaggcatctacctgagccccatctccagtatttcctttggatactcaggaatgggaaaaggacagcacaggatgccctccaaggatgagctggtccagagatacaacaggatgaataccatcccccagacccgatccattcagtcacggttcctgcagagtcggaatctaaactgtatagcactttgtgaagtgattacatctaaggacctccagaagcatgggaacatctgggtgtgccctgtgtccgaccatgtctgcacaagattcttctttgtatatgaggatggtcaggtgggcgatgccaacattaatactcaggaccccaagatacagaaggaaatcatgcgtgtgatcggaactcaggtttacacaaactgagggggccccagccctcgtaccacccctgttaccccaggatccatctgccctcataaaagtgttcaggtacagcagctgaggctgccctgaggaatcaaggggccattaccaaggggcaggaaaaggatatgtaagaggtggccttcatggtagagcttgacccaagaactactccacattcggatggcccagactgactccatcccctgactttccctttgacttcaccctgtttgtaaataaaacaataaaatggaaggtgctgtggactgga

SEQ ID NO: 203231 - DNA, 2555 bp, Artificial Sequence
  derived and/or modified sequence
caacagaaaccaagcagcaacagcccttggaaagaggctaaatttttcttgacttctgcagcaacaaagaccgtgaaaagttggcacttctggcctaacgctgccgtcatcctacccctcaccccagggcaacccaggctggacatttagtgcctccctctttattcctctgtgatcatccagatcagcacttgactgtttattttcaaatctcacgaacctcaccccaagatcttcacattctggatctcagctgctcttgaaggacagtgacttgttaccaccgcaacagcagagcctgccatccccaacagatcaccagttgtccctgacatcgtgccctaccttgtctccctttgtggtctcctaaatgcccatctcgttggccttggttcggctagtggtatggaggggtgctgcctagcactgacctgagagtgtgtgtgacccactgacccaatggacatcaaaggccagttctggaatgatgacgactcggagggagataatgaatcagaggaatttctctatggcgttcaggggagctgtgcagctgacctgtatcgacacccacagcttgatgcagacattgaagccgtgaaggagatctacagtgagaactctgtatccatcagagaatatggaactatcgatgacgtggacattgacctccacatcaacatcagcttcctcgatgaggaagtctctacagcctggaaggtcctccggacagaacctattgtgttgaggctgcgattttctctctcccagtacctagatggaccagaaccatccattgaggttttccagccatcaaataaggaaggatttgggctgggtcttcagttgaaaaagatcctgggtatgtttacatcccaacaatggaaacatctgagcaatgatttcttgaagacccagcaggagaagaggcacagttggttcaaggcaagtggtaccatcaagaagttccgagctggcctcagcatcttttcacccatccccaagtctcccagtttccctatcatacaggactccatgctgaaaggcaaactaggtgtaccagagcttcgggttgggcgcctcatgaaccgttccatctcctgtaccatgaagaaccccaaagtggaagtgtttggctaccctcccagcccccaggcaggtctcctgtgccctcagcacgtgggcctccctcccccagcacggacctctcctttggtcagtggtcactgcaagaacattcccactctggagtatggattcctcgttcagatcatgaagtatgcagaacagaggattccaacattgaatgagtactgtgtggtgtgtgatgagcagcatgtcttccaaaatggatctatgctgaagccagctgtctgtactcgtgaactatgcgttttctccttctacacactgggcgtcatgtctggagctgcagaggaggtggccactggagcagaggtggtggatctgctggtggccatgtgtagggcagctttagagtcccctagaaagagcatcatctttgagccttatccctctgtggtggaccccactgatcccaagactctggcctttaaccctaagaagaagaattatgagcggcttcagaaagctctggatagtgtgatgtctattcgggagatgacccagggctcatatttggaaatcaagaaacagatggacaagttggatcccctggcccatcctctcctgcagtggatcatctctagcaacaggtcacacattgtcaaactacctctcagcaggctgaagttcatgcacacctcacaccagttcctcctgctgagcagccctcctgccaaggaggctcggttccggaccgccaagaagctctatggcagcacctttgccttccatgggtcccacattgagaactggcattcgatcctgcgcaatgggctggtcaatgcatcctacaccaaactgcaggaatgggaaaaggacagcacaggatgccctccaaggatgagctggtccagagatacaacaggatgaataccatcccccagacccgatccattcagtcacggttcctgcagagtcggaatctaaactgtatagcactttgtgaagtgattacatctaaggacctccagaagcatgggaacatctgggtgtgccctgtgtccgaccatgtctgcacaagattcttctttgtatatgaggatggtcaggtgggcgatgccaacattaatactcaggaccccaagatacagaaggaaatcatgcgtgtgatcggaactcaggtttacacaaactgagggggccccagccctcgtaccacccctgttaccccaggatccatctgccctcataaaagtgttcaggtacagcagctgaggctgccctgaggaatcaaggggccattaccaaggggcaggaaaaggatatgtaagaggtggccttcatggtagagcttgacccaagaactactccacattcggatggcccagactgactccatcccctgactttccctttgacttcaccctgtttgtaaataaaacaataaaatggaaggtgctgtggactgg

SEQ ID NO: 203232 - DNA, 2625 bp, Artificial Sequence
  derived and/or modified sequence
aacagaaaccaagcagcaacagcccttggaaagaggctaaatttttcttgacttctgcagcaacaaagaccgtgaaaagttggcacttctggcctaacgctgccgtcatcctacccctcaccccagggcaacccaggctggacatttagtgcctccctctttattcctctgtgatcatccagatcagcacttgactgtttattttcaaatctcacgaacctcaccccaagatcttcacattctggatctcagctgctcttgaaggacagtgacttgttaccaccgcaacagcagagcctgccatccccaacagatcaccagttgtccctgacatcgtgccctaccttgtctccctttgtggtctcctaaatgcccatctcgttggccttggttcggctagtggtatggaggggtgctgcctagcactgacctgagagtgtgtgtgacccactgacccaatggacatcaaaggccagttctggaatgatgacgactcggagggagataatgaatcagaggaatttctctatggcgttcaggggagctgtgcagctgacctgtatcgacacccacagcttgatgcagacattgaagccgtgaaggagatctacagtgagaactctgtatccatcagagaatatggaactatcgatgacgtggacattgacctccacatcaacatcagcttcctcgatgaggaagtctctacagcctggaaggtcctccggacagaacctattgtgttgaggctgcgattttctctctcccagtacctagatggaccagaaccatccattgaggttttccagccatcaaataaggaaggatttgggctgggtcttcagttgaaaaagatcctgggtatgtttacatcccaacaatggaaacatctgagcaatgatttcttgaagacccagcaggagaagaggcacagttggttcaaggcaagtggtaccatcaagaagttccgagctggcctcagcatcttttcacccatccccaagtctcccagtttccctatcatacaggactccatgctgaaaggcaaactaggtgtaccagagcttcgggttgggcgcctcatgaaccgttccatctcctgtaccatgaagaaccccaaagtggaagtgtttggctaccctcccagcccccaggcaggtctcctgtgccctcagcacgtgggcctccctcccccagcacggacctctcctttggtcagtggtcactgcaagaacattcccactctggagtatggattcctcgttcagatcatgaagtatgcagaacagaggattccaacattgaatgagtactgtgtggtgtgtgatgagcagcatgtcttccaaaatggatctatgctgaagccagctgtctgtactcgtgaactatgcgttttctccttctacacactgggcgtcatgtctggagctgcagaggaggtggccactggagcagaggtggtggatctgctggtggccatgtgtagggcagctttagagtcccctagaaagagcatcatctttgagccttatccctctgtggtggaccccactgatcccaagactctggcctttaaccctaagaagaagaattatgagcggcttcagaaagctctggatagtgtgatgtctattcgggagatgacccagggctcatatttggaaatcaagaaacagatggacaagttggatcccctggcccatcctctcctgcagtggatcatctctagcaacaggtcacacattgtcaaactacctctcagcaggctgaagttcatgcacacctcacaccagttcctcctgctgagcagccctcctgccaaggaggctcggttccggaccgccaagaagctctatggcagcacctttgccttccatgggtcccacattgagaactggcattcgatcctgcgcaatgggctggtcaatgcatcctacaccaaactgcagctgcatggagcagcctatggcaaaggcatctacctgagccccatctccagtatttcctttggatactcaggaatgggaaaaggacagcacaggatgccctccaaggatgagctggtccagagatacaacaggatgaataccatcccccagacccgatccattcagtcacggttcctgcagagtcggaatctaaactgtatagcactttgtgaagtgattacatctaaggacctccagaagcatgggaacatctgggtgtgccctgtgtccgaccatgtctgcacaagattcttctttgtatatgaggatggtcaggtgggcgatgccaacattaatactcaggaccccaagatacagaaggaaatcatgcgtgtgatcggaactcaggtttacacaaactgagggggccccagccctcgtaccacccctgttaccccaggatccatctgccctcataaaagtgttcaggtacagcagctgaggctgccctgaggaatcaaggggccattaccaaggggcaggaaaaggatatgtaagaggtggccttcatggtagagcttgacccaagaactactccacattcggatggcccagactgactccatcccctgactttccctttgacttcaccctgtttgtaaataaaacaataaaatggaaggtgctgtggactgga

SEQ ID NO: 203233 - DNA, 1893 bp, Artificial Sequence
  derived and/or modified sequence
atggatattaagggccagttttggaacgatgatgactccgaaggcgacaatgagagcgaggagtttctctacggggtgcaagggtcctgcgccgctgacctataccggcatccccagctggacgctgatattgaggccgtgaaggagatctacagtgaaaacagcgtatcaattagagaatatggaaccattgacgatgtggacatcgacctgcatatcaacatatcctttctcgatgaggaagtgagcactgcgtggaaagttctgagaaccgagcccattgtgctgcgacttcgattctcacttagccagtacctcgatggaccagaacctagtattgaggtctttcagcccagtaacaaggagggattcggactgggactgcagcttaagaaaatcctcggcatgttcacctcacagcagtggaaacacttgtcaaacgatttcttgaaaacccagcaggagaagagacatagctggttcaaggcatccggaaccatcaagaaattccgcgctggcctgagcatcttttcacctattcccaagagcccatcattccctatcatccaggatagtatgctgaaaggaaagctgggggtcccggagcttagggtgggacgactgatgaaccgctcaatctcctgtactatgaaaaacccaaaggtggaggttttcggctaccctccgtccccacaagccggtttgctgtgcccgcagcacgtcggactgccgcctccagctcgtacctccccacttgtgagtggacactgcaagaacatccccaccttggaatatgggttcttggttcaaatcatgaaatacgcggagcagcggattccaacgttgaatgagtactgtgtagtgtgtgacgagcagcatgtcttccaaaacgggagtatgttgaagcctgctgtgtgtacaagagaactttgtgtatttagcttttacactctcggcgtgatgtcaggggctgccgaagaggtggcaacaggagccgaggtcgttgacctgctggtggcaatgtgcagagccgctcttgaatcccctcggaaatcgattatttttgaaccgtacccttctgtggtggatcccaccgatccgaagacactagcattcaacccaaagaaaaagaactatgagcggctgcaaaaagcccttgacagcgtgatgtccattagagagatgacccaaggaagctacctggaaatcaagaagcagatggacaagctcgacccattggcccacccgttgctgcaatggattatttcttctaaccggtctcacatcgtcaagctgccactgtcaagactgaaatttatgcataccagccatcaattcttattgttgtctagccccccagctaaggaagccagatttcggacggcaaagaagctgtacggtagtacttttgccttccacgggagccacattgagaattggcactctatcctgagaaacgggctggttaatgccagctacaccaagctgcagctgcatggcgctgcctacggaaagggaatttatctctcccccatatcgagcatatcgtttggatattcagggatgggaaagggccagcatcggatgcccagcaaggatgagctggtgcagagatataacaggatgaataccattccccaaacaagatctattcagagtagatttctgcaatcacgcaacttgaactgcatcgccttgtgcgaagtgatcacttcgaaggatctgcagaagcatggcaacatctgggtgtgccctgtttctgatcatgtgtgtactcgctttttctttgtttacgaggacggccaggttggagatgcaaacatcaacacccaggatcccaagattcagaaagagatcatgagagtgattggaacccaggtctatacaaactag

SEQ ID NO: 203234 - DNA, 1557 bp, Artificial Sequence
  derived and/or modified sequence
atggacatcaaaggccagttctggaacgacgacgatagcgaaggagacaatgagtccgaagagttcctgtatggggtgcaggggtcctgtgcagcagacctgtataggcaccctcagcttgatgctgatatagaagccgtgaaggaaatatactctgaaaattccgtatctatacgagaatatggaaccatcgatgatgtggacatcgaccttcacatcaatattagttttctcgatgaagaggtttcaacagcttggaaggtgcttaggactgaacctatagttcttagattgcgtttcagtttaagccaatacctcgatggacccgagccatccatcgaggtatttcaaccttctaataaagagggcttcggtctagggctgcagctgaaaaagattttaggcatgtttactagccagcagtggaagcatctgtcaaacgatttccttaagacgcaacaggaaaagaggcattcttggtttaaggcctctgggactatcaagaaattccgcgctggactttccattttttctcctatccctaagtcaccctccttcccaatcatccaggacagcatgctgaagggcaagttgggcgtgcccgagttgcgggtgggcaggctcatgaatcgcagcatctcctgcaccatgaaaaacccgaaagtggaagtgtttggttacccacccagcccgcaggccggactactctgtcctcagcatgttggcttgcccccacctgctcgaacgagcccgctggtatcagggcattgcaaaaatatcccaaccttagaatacggttttcttgtccagattatgaagtatgccgagcaaaggattcctacactgaacgagtattgcgtggtgtgtgacgagcaacacgtcttccagaatgggtctatgctgaagccagccgtgtgtacaagagagctgtgtgtgttttccttctacacactgggcgtcatgtcaggcgcagcagaagaggttgccacaggagcggaagtggtggatctgctggtggccatgtgtcgcgctgctctcgagagtcctagaaagtctatcatctttgaaccatacccgtcagtcgtcgacccgacagaccctaagactctcgcctttaacccaaagaagaagaactacgagagactgcagaaagccctggattctgtaatgagtatacgcgagatgacccagggctcctatctggaaattaagaagcagatggataagctagacccactggcacatcccctgcttcagtggattatttcttccaaccggagccatattgtgaagctcccactgagccggctgaagtttatgcacacgtcccaccaattcctcctgctcagctctccacctgccaaggaggctagattccggaccgccaagaagctttatggatccacatttgctttccatgggtcacacattgagaactggcattcaatcctgagaaacgggctggttaacgccagctatacaaaactgcaggaatgggagaaggactccacagggtgtcctcctcgaatgagctggtcgcgcgataccaccgggtag

SEQ ID NO: 203235 - DNA, 1893 bp, Artificial Sequence
  derived and/or modified sequence
atggatattaaaggtcagttttggaacgatgacgacagtgaaggcgataacgaaagtgaggagtttttgtacggagtgcaggggtcttgcgcagccgatttgtacaggcatccccaactcgatgcagacatcgaggccgtgaaagagatatatagcgaaaatagtgtttcgattagagaatacggtacaatagatgacgtagatatcgacctccacatcaatataagctttctggatgaggaggtctctactgcttggaaggtgttaaggaccgagcccatcgtcctgcgactccggttctccctgtcgcagtatcttgatggtcccgaaccctcaatcgaagtttttcaaccctccaacaaggaaggtttcggcttgggacttcagcttaagaagatattgggaatgttcacctcgcagcagtggaagcacctgagcaatgacttcttgaagacacagcaggagaaaagacactcctggttcaaggcaagcggcaccatcaaaaaattccgtgcaggcctgtctattttttccccaatccccaagagtcccagtttccccattatccaagactcaatgctcaaagggaaattaggtgtgcccgaactccgggtcggacgcctgatgaatagatccatcagttgcaccatgaagaatccgaaggtggaagttttcggataccctccgtctccccaggcgggtttactgtgccctcagcacgttggactgccgccaccagctcgtacctcaccgctggtgtctggtcactgtaagaacatccccacccttgaatacggcttcttagtacagataatgaaatacgctgaacaacgaattcctacactcaatgagtattgtgtggtctgcgatgagcaacatgtgtttcagaacggcagcatgcttaagcccgcagtttgtactagggaattgtgtgtcttttccttttacaccctaggcgtgatgtccggcgctgcagaagaggttgccacgggcgctgaggtggtggacttgctggtcgccatgtgtagagcggctctggaatcgcccagaaagagcattattttcgaaccctaccctagtgtcgtggatcctactgacccgaaaacactggcattcaatcccaagaagaagaactacgaaaggctacaaaaggccctggactccgtcatgtccattagggagatgacacaggggtcttacctggagatcaagaaacaaatggacaaactcgatcctttggcccatcccttgttgcagtggattatttcgtccaacaggagccatatagtcaagttaccactctcaaggctgaagttcatgcacaccagccaccagtttctgctcctgtcgtcaccaccagccaaggaggcacgattcagaacagccaagaagttgtatggtagcacgtttgccttccacggcagccatattgagaactggcactctattctccggaacggcctggttaatgcaagctacacaaaactgcagcttcacggcgcagcatacggaaagggaatttatcttagccccatttcttctataagctttggctactcgggcatgggtaaaggccagcacaggatgccctcaaaagatgagcttgtgcagcggtacaataggatgaataccattccccagacccgctccattcagtcaagattcctgcagtcccgtaatctgaattgcattgcactttgtgaggtgattacatcaaaggaccttcagaagcatggcaatatctgggtgtgtccagtatccgaccacgtttgtacaaggttcttctttgtctatgaggatgggcaggtcggcgatgctaacatcaacacacaggacccaaagattcagaaggaaattatgcgtgttatcggaactcaggtctatacaaactag

SEQ ID NO: 203236 - protein, 650 aa, Artificial Sequence
  derived and/or modified sequence
MASGEHSPGSGAARRPLHSAQAVDVASASNFRAFELLHLHLDLRAEFGPPGPGAGSRGLSGTAVLDLRCLEPEGAAELRLDSHPCLEVTAAALRRERPGSEEPPAEPVSFYTQPFSHYGQALCVSFPQPCRAAERLQVLLTYRVGEGPGVCWLAPEQTAGKKKPFVYTQGQAVLNRAFFPCFDTPAVKYKYSALIEVPDGFTAVMSASTWEKRGPNKFFFQMCQPIPSYLIALAIGDLVSAEVGPRSRVWAEPCLIDAAKEEYNGVIEEFLATGEKLFGPYVWGRYDLLFMPPSFPFGGMENPCLTFVTPCLLAGDRSLADVIIHEISHSWFGNLVTNANWGEFWLNEGFTMYAQRRISTILFGAAYTCLEAATGRALLRQHMDITGEENPLNKLRVKIEPGVDPDDTYNETPYEKGFCFVSYLAHLVGDQDQFDSFLKAYVHEFKFRSILADDFLDFYLEYFPELKKKRVDIIPGFEFDRWLNTPGWPPYLPDLSPGDSLMKPAEELAQLWAAEELDMKAIEAVAISPWKTYQLVYFLDKILQKSPLPPGNVKKLGDTYPSISNARNAELRLRWGQIVLKNDHQEDFWKVKEFLHNQGKQKYTLPLYHAMMGGSEVAQTLAKETFASTASQLHSNVVNYVQQIVAPKGS

SEQ ID NO: 203237 - protein, 611 aa, Artificial Sequence
  derived and/or modified sequence
MASGEHSPGSGAARRPLHSAQAVDVASASNFRAFELLHLHLDLRAEFGPPGPGAGSRGLSGTAVLDLRCLEPEGAAELRLDSHPCLEVTAAALRRERPGSEEPPAEPVSFYTQPFSHYGQALCVSFPQPCRAAERLQVLLTYRVGEGPGVCWLAPEQTAGKKKPFVYTQGQAVLNRAFFPCFDTPAVKYKYSALIEVPDGFTAVMSASTWEKRGPNKFFFQMCQPIPSYLIALAIGDLVSAEVGPRYDLLFMPPSFPFGGMENPCLTFVTPCLLAGDRSLADVIIHEISHSWFGNLVTNANWGEFWLNEGFTMYAQRRISTILFGAAYTCLEAATGRALLRQHMDITGEENPLNKLRVKIEPGVDPDDTYNETPYEKGFCFVSYLAHLVGDQDQFDSFLKAYVHEFKFRSILADDFLDFYLEYFPELKKKRVDIIPGFEFDRWLNTPGWPPYLPDLSPGDSLMKPAEELAQLWAAEELDMKAIEAVAISPWKTYQLVYFLDKILQKSPLPPGNVKKLGDTYPSISNARNAELRLRWGQIVLKNDHQEDFWKVKEFLHNQGKQKYTLPLYHAMMGGSEVAQTLAKETFASTASQLHSNVVNYVQQIVAPKGS

SEQ ID NO: 203238 - protein, 168 aa, Artificial Sequence
  derived and/or modified sequence
LIDAAKEEYNGVIEEFLATGEKLFGPYVWGRYDLLFMPPSFPFGGMENPCLTFVTPCLLAGDRSLADVIIHEISHSWFGNLVTNANWGEFWLNEGFTMYAQRRISTILFGVDPDDTYNETPYEKGFCFVSYLAHLVGDQDQFDSFLKAYVHEFKFRSILADDFLDFYL

SEQ ID NO: 203239 - DNA, 1953 bp, Artificial Sequence
  derived and/or modified sequence
atggcatccggtgaacatagcccagggtccggcgctgcacgcaggcccttgcattccgcgcaggcggtcgatgtggcctccgccagtaactttcgggccttcgagctgctgcacctgcacctagatttacgggcagaattcggcccaccaggacctggagcaggcagccggggactgtccggcaccgccgttctcgatctcaggtgtctcgagccagagggcgccgccgagctgagactggattctcacccctgtctggaagtcacagccgccgcactcagaagggagcgccccggctccgaggagccccctgcagagcccgttagcttttatacgcaaccattttcgcactacggccaggccctgtgcgtatcgttcccacagccatgtcgggccgcagagaggctgcaggtactcctaacttaccgcgtgggagagggtcctggggtgtgctggttggcaccggaacaaactgcagggaaaaagaaaccttttgtttacactcagggacaggccgttctgaatcgcgccttcttcccctgttttgatactcctgcagtaaaatataaatactccgcgctgattgaagtccctgacggctttacagcggtgatgtcggctagtacctgggaaaagcggggccccaataagtttttctttcaaatgtgccagcccattccttcatacctaattgcacttgcaataggggatctcgtgagcgccgaagtaggccctcggtctcgggtatgggcagagccatgcctgattgacgccgcgaaggaggaatataatggcgtgatcgaagagttcctggctacaggcgagaaactgttcggaccatatgtgtggggaagatatgacttattgttcatgcctccttcatttccgtttggaggcatggaaaatccctgcctgacctttgtcactccctgcttgctcgctggggatcggtcactggccgacgttattatccacgaaatttctcattcctggtttggcaacctcgtcactaatgccaactggggtgagttctggctgaacgagggtttcactatgtatgcccagaggcgcatcagcacaattctgttcggggcggcctacacctgccttgaggccgccacaggcagagcacttctgcggcagcacatggacatcaccggagaggagaaccccctgaacaaactgagagtgaagatcgagcccggagttgacccagacgacacctacaatgagaccccctacgaaaagggattctgcttcgtgtcctacctggcccatctggtaggggatcaggatcagttcgattcctttctcaaagcctacgttcacgaattcaagttccggtcgatcctcgcagacgacttccttgacttttatctggagtactttcccgaactcaaaaagaagagagtggacattattcccggattcgaattcgaccgttggttaaacactccaggctggcctccctatcttcccgatctgtcccctggggattcccttatgaagcccgcagaggagctggcccaattgtgggccgccgaggaattagacatgaaagccattgaggctgtggctatctcaccctggaaaacctaccagcttgtatactttcttgacaagatccttcagaaatcaccactcccacccggcaatgtgaagaagttgggtgatacctatcctagtatcagcaacgccaggaacgcagagttgcggttgaggtggggtcagatagtgttgaagaatgaccatcaggaggacttttggaaggtaaaagagttccttcacaaccaggggaagcaaaaatacacactgcctctatatcatgcaatgatgggaggctctgaggtggcccaaacacttgcaaaagagacatttgccagcacagcttcacagctgcactcaaacgtagttaactacgtacagcagatagtggctcctaagggttcctag

SEQ ID NO: 203240 - DNA, 1836 bp, Artificial Sequence
  derived and/or modified sequence
atggcctctggcgagcactcaccggggtcgggggcagcaagaaggccactccactccgctcaggccgtggacgtcgcttccgcgtccaacttccgagcctttgagctgttgcaccttcacctcgacctgcgggccgagtttggcccaccgggccctggcgcgggctctaggggactatccggtaccgcggtgcttgacctacgatgcctggagcctgaaggtgctgctgagctgcggctcgacagtcacccttgcctcgaagtcactgcagcagccctgcgtcgagagcggccagggtccgaggagccccccgccgagcctgtgagcttctatacacagcccttttcccactacggacaggccttgtgtgtgtcttttcctcagccctgtagagccgctgaaagactccaggtgctcttgacctatagagtgggggaagggccaggcgtttgctggctcgcccccgagcaaactgccggtaagaaaaagccgttcgtgtacacacaaggtcaggccgtccttaacagagctttctttccctgttttgataccccagccgttaagtataaatactccgcattgatagaggtgcccgatggcttcactgcagttatgagtgcttctacctgggagaagaggggacctaacaagttcttttttcagatgtgccagccaataccttcctatcttatcgctttggctattggagacctcgtctcagctgaggtaggcccccggtacgatctgctatttatgccacccagcttcccgttcgggggcatggaaaacccttgcctcacattcgttactccttgcctgctggcaggggatcggagcttggctgatgtgatcatccatgagatctcacattcctggtttggtaacctggtgaccaatgcaaactggggtgaattctggctcaacgagggctttacaatgtacgcccagcgaagaatttctactattctgtttggagctgcctatacgtgtctggaggctgcgaccgggagagcacttcttcgccagcacatggatattaccggcgaggagaaccctttaaacaagctgagggtgaagatagaacctggcgtggatcccgatgatacatacaatgaaaccccttacgaaaaaggcttctgtttcgtgagttacctcgcccacttggtgggagatcaggatcagtttgatagtttcctgaaagcctacgtgcatgagttcaaattccgatccattctggcagacgacttcctggatttctacttggaatattttccagagctgaagaagaaacgggtagatattatcccgggctttgagtttgataggtggcttaacacacctggatggcccccttaccttccagacctgagtccgggcgattctctcatgaagccggcggaagagctagctcagctgtgggcagccgaggagctagacatgaaggccatcgaagcagtagctatcagtccctggaagacatatcagttggtatattttctggataaaatcctccagaagagcccactccctccgggaaatgtgaaaaaactgggagacacatatccttctattagcaatgcacgcaacgccgagcttagactccggtggggtcagattgttctgaaaaatgaccaccaggaagacttctggaaggtgaaagaattcctccacaatcaaggcaagcagaagtacactctgccactataccatgccatgatggggggttcagaagtggcccagactctcgcaaaggagacgttcgctagtactgcatcccagttacattctaacgtggtcaattacgtccagcagatcgtcgcacccaagggctcatag

SEQ ID NO: 203241 - DNA, 1953 bp, Artificial Sequence
  derived and/or modified sequence
atggccagcggggagcacagccctggcagcggggccgcccggcggcccctgcacagcgcccaggccgtggatgtggccagcgccagcaacttccgggcctttgagctgctgcacctgcacctggacctgcgggcagagtttggacctcctggccctggggccggcagccggggcctgagcggcacagctgtgctggacctgcgctgcctggagcctgagggcgctgctgagctgcggctggacagccacccctgcctggaggtgacagctgctgccctgcggcgggagcggcccggcagcgaggagcccccagctgagcctgtgtccttctacacccagcccttcagccactacggccaggccctgtgtgtgtccttcccccagccctgcagagctgctgagcggctgcaggtgctgctgacctacagagtgggggagggccctggggtgtgctggctggcccctgagcagacagctgggaagaagaagccctttgtgtacacccagggccaggccgtgctgaacagagccttcttcccctgctttgacaccccagctgtgaagtacaagtacagcgccctgattgaggtgcctgatggcttcaccgctgtgatgtctgccagcacctgggagaagaggggccccaacaagttcttcttccagatgtgccagcccatccccagctacctgattgccctggccatcggggacctggtgtctgctgaggtgggccccaggagccgggtgtgggccgagccctgcctgattgatgctgccaaggaggagtacaacggggtgattgaggagttcctggccactggagagaagctgtttggcccctacgtgtggggccgctatgacctgctcttcatgccacccagcttcccctttggaggcatggagaacccctgcctgacctttgtgaccccctgcctgctggccggggacaggagcctggctgatgtgatcatccacgagatcagccacagctggtttggaaacctggtgaccaatgccaactggggcgagttctggctgaatgaaggcttcaccatgtatgcccagaggcgcatcagcaccatcctgtttggagctgcctacacctgcctggaggccgccaccggccgggccctgctgcggcagcacatggacatcaccggggaggagaaccccctgaacaagctgcgggtgaagattgagcccggggtggaccctgatgacacctacaatgagaccccctatgagaagggcttctgctttgtgtcctacctggcccacctggtgggggaccaggaccagtttgacagcttcctgaaggcctacgtgcatgagttcaagttccgcagcatcctggctgatgacttcctggacttctacctggagtacttccctgagctgaagaagaagagggtggacatcatccctggctttgaatttgaccgctggctgaacaccccaggctggccaccctacctgcctgacctgagccctggggacagcctgatgaagccagctgaggagctggcccagctgtgggccgctgaggagctggacatgaaggccatcgaggccgtggccatcagcccctggaagacctaccagctggtgtacttcctggacaagatcctgcagaagagccccctgcccccaggaaatgtgaagaagctgggggacacctaccccagcatcagcaatgccagaaatgctgagctgcggctgcgctggggccagatcgtgctgaagaatgaccaccaggaggacttctggaaggtgaaggagttcctgcacaaccagggcaagcagaagtacaccctgcccctgtaccacgccatgatgggcggcagcgaggtggcccagaccctggccaaggagacctttgccagcacagccagccagctgcacagcaatgtggtgaactacgtgcagcagatcgtggcccccaagggcagctag

SEQ ID NO: 203242 - DNA, 1836 bp, Artificial Sequence
  derived and/or modified sequence
atggccagcggggagcacagccctggcagcggggccgcccggcggcccctgcacagcgcccaggccgtggatgtggccagcgccagcaacttccgggcctttgagctgctgcacctgcacctggacctgcgggcagagtttggacctcctggccctggggccggcagccggggcctgagcggcacagctgtgctggacctgcgctgcctggagcctgagggcgctgctgagctgcggctggacagccacccctgcctggaggtgacagctgctgccctgcggcgggagcggcccggcagcgaggagcccccagctgagcctgtgtccttctacacccagcccttcagccactacggccaggccctgtgtgtgtccttcccccagccctgcagagctgctgagcggctgcaggtgctgctgacctacagagtgggggagggccctggggtgtgctggctggcccctgagcagacagctgggaagaagaagccctttgtgtacacccagggccaggccgtgctgaacagagccttcttcccctgctttgacaccccagctgtgaagtacaagtacagcgccctgattgaggtgcctgatggcttcaccgctgtgatgtctgccagcacctgggagaagaggggccccaacaagttcttcttccagatgtgccagcccatccccagctacctgattgccctggccatcggggacctggtgtctgctgaggtgggccccaggtatgacctgctcttcatgcctccttccttcccctttggaggcatggagaacccctgcctgacctttgtgaccccctgcctgctggccggggacaggagcctggctgatgtgatcatccacgagatcagccacagctggtttggaaacctggtgaccaatgccaactggggcgagttctggctgaatgaaggcttcaccatgtatgcccagaggcgcatcagcaccatcctgtttggagctgcctacacctgcctggaggccgccaccggccgggccctgctgcggcagcacatggacatcactggagaggagaaccccctgaacaagctgcgggtgaagattgagcccggggtggaccctgatgacacctacaatgagaccccctatgagaagggcttctgctttgtgtcctacctggcccacctggtgggggaccaggaccagtttgacagcttcctgaaggcctacgtgcatgagttcaagttccgcagcatcctggctgatgacttcctggacttctacctggagtacttccctgagctgaagaagaagagggtggacatcatccctggctttgaatttgaccgctggctgaacaccccaggctggccaccctacctgcctgacctgagccctggggacagcctgatgaagccagctgaggagctggcccagctgtgggccgctgaggagctggacatgaaggccattgaagctgtggccatcagcccctggaagacctaccagctggtgtacttcctggacaagatcctgcagaagagccccctgcccccaggaaatgtgaagaagctgggggacacctaccccagcatcagcaatgccagaaatgctgagctgcggctgcgctggggccagatcgtgctgaagaatgaccaccaggaggacttctggaaggtgaaggagttcctgcacaaccagggcaagcagaagtacaccctgcccctgtaccacgccatgatgggcggcagcgaggtggcccagaccctggccaaggagacctttgccagcacagccagccagctgcacagcaatgtggtgaactacgtgcagcagatcgtggcccccaagggcagctag

SEQ ID NO: 203243 - DNA, 1953 bp, Artificial Sequence
  derived and/or modified sequence
atggccagcggcgagcacagccccggcagcggcgccgcccggcggcccctgcactccgcccaagcagtggatgtggcttccgcctcaaactttcgggccttcgagttgctccacctgcatttagatctcagagcagagtttgggccacccgggccaggcgccggctctcgaggcctgagtggaaccgcggtgctcgatctcaggtgcttagagcctgagggcgccgctgaacttcggctagatagccacccctgcttggaggtaaccgccgccgcactacggagagaacggcctggcagcgaagagccaccagccgagcccgtctcattttatacccaacctttcagccactatggccaggcactttgtgtgtcattcccacagccatgcagggccgctgagaggctgcaggtcctcctgacatatcgtgtgggtgagggacccggcgtctgctggttggctccagagcagacagccggaaagaagaagccatttgtctacacccagggtcaagccgttctcaaccgggccttcttcccttgcttcgacacccctgctgtcaagtacaagtattcagctctgatagaagtacctgatggcttcacagccgtgatgtccgcatctacatgggaaaagcgagggcccaataagttttttttccagatgtgtcaacccatcccttcttacctcatcgcacttgcaatcggcgatttggtgtcggccgaagttggccccaggtccagagtgtgggccgagccctgccttattgatgccgctaaagaggagtataacggagtcatagaagagttcctggccactggcgaaaagctcttcggaccttatgtgtggggccgatatgacttactatttatgcctccttcttttccctttggaggcatggaaaatccttgcttgaccttcgttaccccctgcctcttggctggtgaccgctccctcgccgacgtcattattcacgagattagtcactcgtggttcggcaatcttgtcactaacgctaattggggagagttttggctgaatgaaggcttcacaatgtacgctcagaggaggatatcgaccatcctgtttggggctgcctacacgtgcctcgaggcagccactggccgcgcactgctgcgacaacatatggacatcaccggggaagagaatccactcaataagctgcgcgtgaagattgagccgggcgttgatcctgatgacacttacaacgagactccctacgaaaaaggattctgttttgtcagttacttagcgcatctggtgggcgaccaggaccagtttgatagcttcctaaaagcttacgtacatgaatttaaatttaggagtatcctggccgatgactttttggatttctacctagaatacttccctgaactcaaaaaaaagcgggtggatatcatacccgggttcgagtttgacaggtggctgaacaccccaggatggccgccatacctgcctgacctgtcccccggcgattctctgatgaagcccgccgaggagctggcccagctgtgggctgctgaagagctggatatgaaagctattgaggcagtcgcgatcagcccttggaaaacataccagctggtttattttctcgacaaaattcttcagaaaagtcccttaccgcccggaaatgtgaagaaattgggtgacacgtatccatctataagcaatgcgcgtaatgcagaactgagactgcggtggggtcagatcgtgctgaaaaacgaccatcaggaggacttttggaaggtgaaagaatttttgcacaaccaggggaaacaaaaatacactctgcccctctatcacgcaatgatgggtggttctgaagtggctcaaacattggcgaaagagacttttgccagcacagccagtcagctgcactcaaatgtggtgaattacgtccagcagattgtcgctcccaagggctcatag

SEQ ID NO: 203244 - DNA, 1836 bp, Artificial Sequence
  derived and/or modified sequence
atggccagcggcgagcacagccccggcagcggcgccgcccggcggccgctgcatagtgcacaggcagttgacgtggcatccgcttccaacttccgcgctttcgaactcttgcatctgcatctggacttacgcgcggagttcggacctcctggacccggcgctggcagccgcggtcttagcggcaccgcagtcctcgaccttcgctgcctggaacctgagggagcagccgagctgcgcttggacagtcatccctgccttgaagtgaccgccgctgcgctacgccgggagcggcctggatcagaagagccacccgcagagcccgtatcattttatactcagccctttagtcactacggccaggccctgtgcgtctcttttccccagccttgccgcgccgcagagagactgcaggtactcttgacttatagagtgggagaaggcccaggagtgtgctggctggctccagaacaaacagccggcaaaaagaagccgttcgtctacactcagggccaggccgtgctgaatcgcgccttcttcccatgtttcgatacccctgctgtgaaatacaaatatagcgcactcattgaggttcccgatggcttcactgccgtcatgagtgccagtacctgggaaaagcgagggccaaataagttcttttttcagatgtgtcagccgatcccgagttatctcatcgcgctggccattggggacctggtttctgccgaagttgggcctcgatatgatttgctttttatgcccccctcttttccatttgggggtatggagaatccctgtctcacattcgtgactccttgtctactggcaggagataggtctttggccgacgtgatcattcacgagattagccatagctggtttggcaacctggtaaccaacgccaactggggggaattctggctgaacgaaggctttaccatgtacgctcagcgtcgaatctctaccatacttttcggtgccgcatacacctgcttagaggctgccactggacgagccctgctgcgccaacacatggatatcactggcgaagagaacccgctcaacaaacttcgggtcaaaatcgagccaggcgttgaccctgacgacacctacaacgaaaccccgtatgagaaagggttttgttttgtgtcttacctggcacacctggtgggagatcaggatcagtttgatagtttccttaaggcatacgttcacgagtttaagttccggtcaatcctcgcggatgacttcttagatttctacctggaatatttccccgagctaaagaagaagcgggtggatataatccccgggttcgagtttgatagatggttaaatacccccggctggccaccctacttgcccgacctgagtccaggcgactctctgatgaagccggcagaggagctggcccagctctgggccgccgaggaactcgatatgaaagccatcgaagcagtggctattagcccctggaaaacctatcagctcgtgtattttctggacaaaatacttcagaagtctccactgcctcctggcaacgtcaagaagttgggcgacacatatccttctatttctaatgcccgcaacgctgagctgcggctgagatggggacagattgtactaaagaatgatcaccaggaggacttttggaaagtcaaagaatttcttcacaaccaaggaaagcagaaatacacacttcccctataccacgccatgatggggggcagcgaagtggcccaaaccctggccaaggagacgttcgcttccaccgcctcccaactccattctaacgttgtcaattacgtccaacagatcgttgctcccaaaggtagctag

SEQ ID NO: 203245 - DNA, 1953 bp, Artificial Sequence
  derived and/or modified sequence
atggccagcggagaacattctcctgggagtggcgctgcgaggcgtccgctgcattccgcacaggctgtcgacgtagctagcgcttccaacttccgggcatttgagttattgcatcttcatctagatctccgagcagagttcggtccacccggtccaggggctggttctaggggcctaagtggcactgccgtgctcgacctgcgatgcctcgagcctgagggcgctgcggagttgcgactcgactcccacccctgtctggaggtgacggccgctgccctccgcagagagagacccggtagtgaggagccacctgccgaaccagttagcttctacactcagcccttctcccactacggacaggcgctctgcgtgagctttccacagccctgtcgtgccgctgagcggctccaggttctgctgacctaccgcgtcggggagggcccaggtgtctgctggttagctccagagcagaccgctggcaagaaaaaaccttttgtgtacacccaaggtcaagctgtgctcaatcgggcattttttccatgttttgacacgcctgctgtcaaatataaatacagcgccctgatagaagtgccggatggattcaccgctgtgatgagtgccagtacctgggaaaaaagaggcccaaataagttcttcttccagatgtgccagccaatacccagctatctgatcgctctggctattggagatcttgtcagtgctgaagtgggccctcgaagcagggtatgggccgaaccatgtctgattgatgcggctaaagaagaatacaacggagtgattgaggagttcctggccaccggcgagaaactttttggcccatatgtttggggacgttacgacctgctctttatgcctcctagtttccccttcggcggtatggaaaatccgtgcctgactttcgtcacaccatgtctccttgccggtgaccgatcactcgctgatgttattatccacgaaatctctcactcctggttcggaaatctggtgactaatgctaactggggcgagttctggctcaatgagggatttaccatgtacgcccagaggagaatttctacaatactgtttggagcggcttatacctgcctcgaggctgctacaggccgagctctgttgcgccagcatatggacatcacaggggaggagaatcctcttaataaactgcgtgtgaagatcgaaccaggggtggatcctgacgacacctataacgaaacgccatacgagaaaggcttttgcttcgtgagttacctggctcacctggtgggagatcaggatcagtttgactcattcctgaaggcatacgtacatgaattcaagtttaggtctatcctggctgacgactttttagatttttatctggaatactttcccgaattgaagaaaaagcgagtggacatcatcccgggattcgaatttgaccgatggctgaacactcctggatggccaccttacctgcctgacctttctccgggtgattccttaatgaagcctgccgaggaattggctcaactgtgggccgctgaggaactcgacatgaaggccatcgaggcggtcgcgattagtccctggaaaacttatcaactggtgtattttttggacaagatactacaaaagagtccactcccaccaggtaatgttaagaaactcggggatacatacccatccatcagcaatgcgagaaatgcagaactacggctgcgatggggtcagatagttctgaagaatgaccaccaggaggatttttggaaagttaaagaatttctccataatcagggaaagcagaaatacactctaccattgtatcatgcaatgatgggagggagtgaagtggcacaaactctcgccaaggagacatttgctagcaccgccagccagctgcattctaacgtggtaaactatgtacagcagatcgtggcacctaaaggatcttag

SEQ ID NO: 203246 - DNA, 1836 bp, Artificial Sequence
  derived and/or modified sequence
atggcctctggagaacattcccctggcagcggggctgcccgtcggccattgcacagtgcccaggcagtcgacgtggcatctgcatcaaatttccgggctttcgagctgttacatctgcatctggacttgagggccgagttcggacctccagggccaggtgccggttcacgtggtctgagcgggactgcagtcctcgacctccgatgcctggagcctgaaggcgctgccgagctgagactcgattcacacccctgcttggaagtaaccgccgcagctctgcgtcgcgagcgccctggttcagaagagccgcctgctgaacctgtgagtttctacactcagccttttagtcactacgggcaagccctgtgtgtcagctttccccagccttgtcgcgcagctgagcggctgcaggtccttctcacataccgtgtgggcgaaggaccgggagtgtgctggctggcacctgagcaaacagctggaaagaaaaagcctttcgtgtatacacaagggcaagctgtcctgaatagagctttcttcccttgcttcgacacccccgcagtcaaatacaaatattcagcactcatcgaagtgccagatggctttactgctgtcatgtccgccagtacctgggagaaaaggggaccgaacaaatttttcttccagatgtgccagcctatcccctcctacctgattgcattggcgatcggagaccttgtgtccgcggaagtgggtccacgctacgacctgttgtttatgcctccaagctttccattcgggggaatggagaatccctgcttgacgttcgtgactccatgtttgctcgccggtgatcgcagtctggccgacgtcatcatccacgaaattagtcatagttggttcgggaatctggtgaccaacgccaactggggtgagttttggctgaacgaggggttcactatgtatgcacagagaagaatttcaaccattctattcggtgctgcatacacctgtctggaggcggcaactggtagggcactcctacgccagcacatggacatcaccggagaggaaaaccccttgaataagctacgcgtgaagatagagccaggggttgaccctgatgatacatacaacgaaactccatacgaaaagggattttgttttgtgtcataccttgctcacctggttggcgatcaagaccagttcgatagcttcttgaaggcttatgttcacgagtttaaatttcggagcattctggccgacgacttcctggacttttatctcgagtacttcccagagcttaagaagaagcgtgtggatattatacccggtttcgaattcgacaggtggctcaatacccctggttggccaccctacttgccggacctgagccctggcgacagcctcatgaagccagctgaggagctggcccaactctgggccgctgaagagctcgatatgaaggcaatcgaggcagtcgccatctccccctggaaaacataccagctcgtgtatttcctggacaaaatcttgcaaaagagccctctgccacctgggaatgtaaaaaaactcggcgacacataccctagcatcagcaatgcccgtaatgctgaactccggctcaggtggggccagatcgtcctcaagaacgatcaccaggaggacttttggaaagtgaaagagttcctgcataatcaaggcaaacagaaatacactctgcccctgtaccacgccatgatggggggtagcgaggttgcccagacgctcgccaaggaaactttcgcttctactgcaagccagcttcatagcaacgtggttaattatgtacaacaaatcgtagctcccaagggaagttag

SEQ ID NO: 203247 - DNA, 2427 bp, Artificial Sequence
  derived and/or modified sequence
cctcgggttcgcggcccggccggtgagcaacggctctgcggccatggcgagcggcgagcattcccccggcagcggcgcggcccggcggccgctgcactccgcgcaggctgtggacgtggcctcggcctccaacttccgggcctttgagctgctgcacttgcacctggacctgcgggctgagttcgggcctccagggcccggcgcagggagccgggggctgagcggcaccgcggtcctggacctgcgctgcctggagcccgagggcgccgccgagctgcggctggactcgcacccgtgcctggaggtgacggcggcggcgctgcggcgggagcggcccggctcggaggagccgcctgcggagcccgtgagcttctacacgcagcccttctcgcactatggccaggccctgtgcgtgtccttcccgcagccctgccgcgccgccgagcgcctccaggtgctgctcacctaccgcgtcggggagggacccggggtttgctggttggctcccgagcagacagcaggaaagaagaagcccttcgtgtacacccagggccaggctgtcctaaaccgggccttcttcccttgcttcgacacgcctgctgttaaatacaagtattcagctcttattgaggtcccagatggcttcacagctgtgatgagtgctagcacctgggagaagagaggtccaaataagttcttcttccagatgtgtcagcccatcccctcctatctgatagctttggccatcggagatctggtttcggctgaagttggacccaggagccgggtgtgggctgagccctgcctgattgatgctgccaaggaggagtacaacggggtgatagaagaatttttggcaacaggagagaagctttttggaccttatgtttggggaaggtatgacttgctcttcatgccaccgtcctttccatttggaggaatggagaacccttgtctgacctttgtcaccccctgcctgctagctggggaccgctccttggcagatgtcatcatccatgagatctcccacagttggtttgggaacctggtcaccaacgccaactggggtgaattctggctcaatgaaggtttcaccatgtacgcccagaggaggatctccaccatcctctttggcgctgcgtacacctgcttggaggctgcaacggggcgggctctgctgcgtcagcacatggacatcactggagaggaaaacccactcaacaagctccgcgtgaagattgaaccaggcgttgacccggacgacacctataatgagaccccctacgagaaaggtttctgctttgtttcatacctggcccacttggtgggtgatcaggatcagtttgacagttttctcaaggcctatgtgcatgaattcaaattccgaagcatcttagccgatgactttctggacttctacttggaatatttccctgagcttaagaaaaagagagtggatatcattccaggttttgagtttgatcgatggctgaatacccccggctggcccccgtacctccctgatctctcccctggggactcactcatgaagcctgctgaagagctagcccaactgtgggcagccgaggagctggacatgaaggccattgaagccgtggccatctctccctggaagacctaccagctggtctacttcctggataagatcctccagaaatcccctctccctcctgggaatgtgaaaaaacttggagacacatacccaagtatctcaaatgcccggaatgcagagctccggctgcgatggggccaaatcgtccttaagaacgaccaccaggaagatttctggaaagtgaaggagttcctgcataaccaggggaagcagaagtatacacttccgctgtaccacgcaatgatgggtggcagtgaggtggcccagaccctcgccaaggagacttttgcatccaccgcctcccagctccacagcaatgttgtcaactatgtccagcagatcgtggcacccaagggcagttagaggctcgtgtgcatggcccctgcctcttcaggctctccaggctttcagaataattgtttgttcccaaattcctgttccctgatcaacttcctggagtttatatcccctcaggataatctattctctagcttaggtatctgtgactcttgggcctctgctctggtgggaacttacttctctatagcccactgagccccgagacagagaacctgcccacagctctccccgctacaggctgcaggcactgcagggcagcgggtattctcctccccacctaagtctctgggaagaagtggagaggactgatgctcttcttttttctctttctgtcctttttcttgctgattttatgcaaagggctggcattctgattgttcttttttcaggtttaatccttattttaataaagttttcaagcaaaaattaagtta

SEQ ID NO: 203248 - DNA, 2282 bp, Artificial Sequence
  derived and/or modified sequence
aacggctctgcggccatggcgagcggcgagcattcccccggcagcggcgcggcccggcggccgctgcactccgcgcaggctgtggacgtggcctcggcctccaacttccgggcctttgagctgctgcacttgcacctggacctgcgggctgagttcgggcctccagggcccggcgcagggagccgggggctgagcggcaccgcggtcctggacctgcgctgcctggagcccgagggcgccgccgagctgcggctggactcgcacccgtgcctggaggtgacggcggcggcgctgcggcgggagcggcccggctcggaggagccgcctgcggagcccgtgagcttctacacgcagcccttctcgcactatggccaggccctgtgcgtgtccttcccgcagccctgccgcgccgccgagcgcctccaggtgctgctcacctaccgcgtcggggagggacccggggtttgctggttggctcccgagcagacagcaggaaagaagaagcccttcgtgtacacccagggccaggctgtcctaaaccgggccttcttcccttgcttcgacacgcctgctgttaaatacaagtattcagctcttattgaggtcccagatggcttcacagctgtgatgagtgctagcacctgggagaagagaggtccaaataagttcttcttccagatgtgtcagcccatcccctcctatctgatagctttggccatcggagatctggtttcggctgaagttggacccaggtatgacttgctcttcatgccaccgtcctttccatttggaggaatggagaacccttgtctgacctttgtcaccccctgcctgctagctggggaccgctccttggcagatgtcatcatccatgagatctcccacagttggtttgggaacctggtcaccaacgccaactggggtgaattctggctcaatgaaggtttcaccatgtacgcccagaggaggatctccaccatcctctttggcgctgcgtacacctgcttggaggctgcaacggggcgggctctgctgcgtcagcacatggacatcactggagaggaaaacccactcaacaagctccgcgtgaagattgaaccaggcgttgacccggacgacacctataatgagaccccctacgagaaaggtttctgctttgtttcatacctggcccacttggtgggtgatcaggatcagtttgacagttttctcaaggcctatgtgcatgaattcaaattccgaagcatcttagccgatgactttctggacttctacttggaatatttccctgagcttaagaaaaagagagtggatatcattccaggttttgagtttgatcgatggctgaatacccccggctggcccccgtacctccctgatctctcccctggggactcactcatgaagcctgctgaagagctagcccaactgtgggcagccgaggagctggacatgaaggccattgaagccgtggccatctctccctggaagacctaccagctggtctacttcctggataagatcctccagaaatcccctctccctcctgggaatgtgaaaaaacttggagacacatacccaagtatctcaaatgcccggaatgcagagctccggctgcgatggggccaaatcgtccttaagaacgaccaccaggaagatttctggaaagtgaaggagttcctgcataaccaggggaagcagaagtatacacttccgctgtaccacgcaatgatgggtggcagtgaggtggcccagaccctcgccaaggagacttttgcatccaccgcctcccagctccacagcaatgttgtcaactatgtccagcagatcgtggcacccaagggcagttagaggctcgtgtgcatggcccctgcctcttcaggctctccaggctttcagaataattgtttgttcccaaattcctgttccctgatcaacttcctggagtttatatcccctcaggataatctattctctagcttaggtatctgtgactcttgggcctctgctctggtgggaacttacttctctatagcccactgagccccgagacagagaacctgcccacagctctccccgctacaggctgcaggcactgcagggcagcgggtattctcctccccacctaagtctctgggaagaagtggagaggactgatgctcttcttttttctctttctgtcctttttcttgctgattttatgcaaagggctggcattctgattgttcttttttcaggtttaatccttattttaataaagttttcaagcaaaaattaagtta

SEQ ID NO: 203249 - DNA, 1953 bp, Artificial Sequence
  derived and/or modified sequence
atggccagcggcgagcacagccccggcagcggcgccgccagaagacccctgcacagcgcccaggccgtggacgtggccagcgccagcaacttcagagccttcgagctgctgcacctgcacctggacctgagagccgagttcggcccccccggccccggcgccggcagcagaggcctgagcggcaccgccgtgctggacctgagatgcctggagcccgagggcgccgccgagctgagactggacagccacccctgcctggaggtgaccgccgccgccctgagaagagagagacccggcagcgaggagccccccgccgagcccgtgagcttctacacccagcccttcagccactacggccaggccctgtgcgtgagcttcccccagccctgcagagccgccgagagactgcaggtgctgctgacctacagagtgggcgagggccccggcgtgtgctggctggcccccgagcagaccgccggcaagaagaagcccttcgtgtacacccagggccaggccgtgctgaacagagccttcttcccctgcttcgacacccccgccgtgaagtacaagtacagcgccctgatcgaggtgcccgacggcttcaccgccgtgatgagcgccagcacctgggagaagagaggccccaacaagttcttcttccagatgtgccagcccatccccagctacctgatcgccctggccatcggcgacctggtgagcgccgaggtgggccccagaagcagagtgtgggccgagccctgcctgatcgacgccgccaaggaggagtacaacggcgtgatcgaggagttcctggccaccggcgagaagctgttcggcccctacgtgtggggcagatacgacctgctgttcatgccccccagcttccccttcggcggcatggagaacccctgcctgaccttcgtgaccccctgcctgctggccggcgacagaagcctggccgacgtgatcatccacgagatcagccacagctggttcggcaacctggtgaccaacgccaactggggcgagttctggctgaacgagggcttcaccatgtacgcccagagaagaatcagcaccatcctgttcggcgccgcctacacctgcctggaggccgccaccggcagagccctgctgagacagcacatggacatcaccggcgaggagaaccccctgaacaagctgagagtgaagatcgagcccggcgtggaccccgacgacacctacaacgagaccccctacgagaagggcttctgcttcgtgagctacctggcccacctggtgggcgaccaggaccagttcgacagcttcctgaaggcctacgtgcacgagttcaagttcagaagcatcctggccgacgacttcctggacttctacctggagtacttccccgagctgaagaagaagagagtggacatcatccccggcttcgagttcgacagatggctgaacacccccggctggcccccctacctgcccgacctgagccccggcgacagcctgatgaagcccgccgaggagctggcccagctgtgggccgccgaggagctggacatgaaggccatcgaggccgtggccatcagcccctggaagacctaccagctggtgtacttcctggacaagatcctgcagaagagccccctgccccccggcaacgtgaagaagctgggcgacacctaccccagcatcagcaacgccagaaacgccgagctgagactgagatggggccagatcgtgctgaagaacgaccaccaggaggacttctggaaggtgaaggagttcctgcacaaccagggcaagcagaagtacaccctgcccctgtaccacgccatgatgggcggcagcgaggtggcccagaccctggccaaggagaccttcgccagcaccgccagccagctgcacagcaacgtggtgaactacgtgcagcagatcgtggcccccaagggcagctag

SEQ ID NO: 203250 - DNA, 1836 bp, Artificial Sequence
  derived and/or modified sequence
atggccagcggcgagcacagccccggcagcggcgccgccagaagacccctgcacagcgcccaggccgtggacgtggccagcgccagcaacttcagagccttcgagctgctgcacctgcacctggacctgagagccgagttcggcccccccggccccggcgccggcagcagaggcctgagcggcaccgccgtgctggacctgagatgcctggagcccgagggcgccgccgagctgagactggacagccacccctgcctggaggtgaccgccgccgccctgagaagagagagacccggcagcgaggagccccccgccgagcccgtgagcttctacacccagcccttcagccactacggccaggccctgtgcgtgagcttcccccagccctgcagagccgccgagagactgcaggtgctgctgacctacagagtgggcgagggccccggcgtgtgctggctggcccccgagcagaccgccggcaagaagaagcccttcgtgtacacccagggccaggccgtgctgaacagagccttcttcccctgcttcgacacccccgccgtgaagtacaagtacagcgccctgatcgaggtgcccgacggcttcaccgccgtgatgagcgccagcacctgggagaagagaggccccaacaagttcttcttccagatgtgccagcccatccccagctacctgatcgccctggccatcggcgacctggtgagcgccgaggtgggccccagatacgacctgctgttcatgccccccagcttccccttcggcggcatggagaacccctgcctgaccttcgtgaccccctgcctgctggccggcgacagaagcctggccgacgtgatcatccacgagatcagccacagctggttcggcaacctggtgaccaacgccaactggggcgagttctggctgaacgagggcttcaccatgtacgcccagagaagaatcagcaccatcctgttcggcgccgcctacacctgcctggaggccgccaccggcagagccctgctgagacagcacatggacatcaccggcgaggagaaccccctgaacaagctgagagtgaagatcgagcccggcgtggaccccgacgacacctacaacgagaccccctacgagaagggcttctgcttcgtgagctacctggcccacctggtgggcgaccaggaccagttcgacagcttcctgaaggcctacgtgcacgagttcaagttcagaagcatcctggccgacgacttcctggacttctacctggagtacttccccgagctgaagaagaagagagtggacatcatccccggcttcgagttcgacagatggctgaacacccccggctggcccccctacctgcccgacctgagccccggcgacagcctgatgaagcccgccgaggagctggcccagctgtgggccgccgaggagctggacatgaaggccatcgaggccgtggccatcagcccctggaagacctaccagctggtgtacttcctggacaagatcctgcagaagagccccctgccccccggcaacgtgaagaagctgggcgacacctaccccagcatcagcaacgccagaaacgccgagctgagactgagatggggccagatcgtgctgaagaacgaccaccaggaggacttctggaaggtgaaggagttcctgcacaaccagggcaagcagaagtacaccctgcccctgtaccacgccatgatgggcggcagcgaggtggcccagaccctggccaaggagaccttcgccagcaccgccagccagctgcacagcaacgtggtgaactacgtgcagcagatcgtggcccccaagggcagctag

SEQ ID NO: 203251 - protein, 300 aa, Artificial Sequence
  derived and/or modified sequence
MEIPMGTQGCFSKSLLLSASILVLWMLQGSQAALYIQKIPEQPQKNQDLLLSVQGVPDTFQDFNWYLGEETYGGTRLFTYIPGIQRPQRDGSAMGQRDIVGFPNGSMLLRRAQPTDSGTYQVAITINSEWTMKAKTEVQVAEKNKELPSTHLPTNAGILAATIIGSLAAGALLISCIAYLLVTRNWRGQSHRLPAPRGQGSLSILCSAVSPVPSVTPSTWMATTEKPELGPAHDAGDNNIYEVMPSPVLLVSPISDTRSINPARPLPTPPHLQAEPENHQYQQDLLNPDPAPYCQLVPTS

SEQ ID NO: 203252 - DNA, 903 bp, Artificial Sequence
  derived and/or modified sequence
atggagatccccatgggcacccagggctgcttcagcaagagcctgctgctgagcgccagcatcctggtgctgtggatgctgcagggcagccaggccgccctgtacatccagaagatccccgagcagccccagaagaaccaggacctgctgctgagcgtgcagggcgtgcccgacaccttccaggacttcaactggtacctgggcgaggagacctacggcggcaccagactgttcacctacatccccggcatccagagaccccagagagacggcagcgccatgggccagagagacatcgtgggcttccccaacggcagcatgctgctgagaagagcccagcccaccgacagcggcacctaccaggtggccatcaccatcaacagcgagtggaccatgaaggccaagaccgaggtgcaggtggccgagaagaacaaggagctgcccagcacccacctgcccaccaacgccggcatcctggccgccaccatcatcggcagcctggccgccggcgccctgctgatcagctgcatcgcctacctgctggtgaccagaaactggagaggccagagccacagactgcccgcccccagaggccagggcagcctgagcatcctgtgcagcgccgtgagccccgtgcccagcgtgacccccagcacctggatggccaccaccgagaagcccgagctgggccccgcccacgacgccggcgacaacaacatctacgaggtgatgcccagccccgtgctgctggtgagccccatcagcgacaccagaagcatcaaccccgccagacccctgcccacccccccccacctgcaggccgagcccgagaaccaccagtaccagcaggacctgctgaaccccgaccccgccccctactgccagctggtgcccaccagctag

SEQ ID NO: 203253 - DNA, 903 bp, Artificial Sequence
  derived and/or modified sequence
atggaaatcccgatgggaacccagggctgcttttctaaatctctcctcctgtccgcgtctatactggtgttatggatgcttcaaggaagccaggcagccttgtacatccaaaagatccccgagcagccccaaaaaaatcaagatctcttgttgtccgtgcagggcgtccccgacactttccaggactttaattggtatctgggtgaggagacctatggcgggacccggcttttcacatatatcccaggcattcagcggccacagcgggacggaagtgcaatgggccaacgggatattgtgggattccccaacggtagtatgctgctgcgtcgcgcacagccaacagatagcggcacctaccaggtggcaatcactatcaatagcgagtggactatgaaggctaagaccgaagtgcaggtggctgaaaaaaataaagagcttccatcaacccatttgccaaccaatgccggtatccttgctgccaccattatcggctctcttgcagctggggcccttctgatttcctgcatagcctatctgctggtcacacggaattggaggggacaatcccatcgcctgcccgcccctcggggacagggctcactgtccattttgtgctcagcagtgagccctgttccatccgtgaccccaagcacgtggatggctaccaccgaaaagcctgagctcggacccgcgcacgatgccggtgataataatatctacgaagtgatgccatctcctgtgctgctggtgagtccgataagcgacacccgttctatcaacccagctagacccttgccaacacccccccatctgcaggccgagccagagaaccaccagtaccaacaagacctacttaaccccgaccctgccccttactgccagcttgtgcccaccagctag

SEQ ID NO: 203254 - DNA, 903 bp, Artificial Sequence
  derived and/or modified sequence
atggagatccccatgggcacccagggctgcttcagcaagagcctgctgctgagcgccagcatcctggtgctgtggatgctgcagggcagccaggccgccctgtacatccagaagatccctgagcagccccagaagaaccaggacctgctgctgtctgtgcagggcgtgcctgacaccttccaggacttcaactggtacctgggggaggagacctacggcggcaccaggctcttcacctacatccctggcatccagaggccccagagagatggcagcgccatgggccagagggacatcgtgggcttccccaacggctccatgctgctgcggcgggcccagcccacagattctggcacctaccaggtggccatcaccatcaacagcgagtggaccatgaaggccaagacagaggtgcaggtggccgagaagaacaaggagctgcccagcacccacctgcccaccaatgccggcatcctggccgccaccatcatcggcagcctggccgccggggccctgctgatcagctgcatcgcctacctgctggtgaccaggaactggaggggccagagccaccggctgcctgccccccggggccagggcagcctgagcatcctgtgcagcgctgtgtcccctgtgcccagcgtgacccccagcacctggatggccaccacagagaagccagagctgggccctgcccatgatgctggggacaacaacatctatgaggtgatgcccagccctgtgctgctggtgagccccatcagtgacaccaggagcatcaacccagcccggcccctgcccaccccaccccacctgcaggccgagcctgagaaccaccagtaccagcaggacctgctgaacccagaccctgccccctactgccagctggtgcccaccagctag

SEQ ID NO: 203255 - DNA, 903 bp, Artificial Sequence
  derived and/or modified sequence
atggagatccccatgggcacccagggctgcttcagcaagagcctgctgctgtcagcttcaattctagtattatggatgctacagggtagtcaggctgcattgtatatacaaaagataccagagcaaccccagaaaaatcaggacctcctgttgtccgtgcagggggtgcctgacacctttcaggatttcaattggtacctgggggaggagacatacggtggcactcgtctcttcacctatattcccggcatccaacggccacaacgggatggcagcgcaatgggccagagagacattgtgggctttcctaatgggagtatgctgctgcgccgcgcacagccaacagacagcggaacataccaggtggccatcactattaattccgagtggacgatgaaggcaaagactgaggttcaggtggcggagaaaaacaaggagcttcccagtacacacttacctaccaacgcagggattcttgctgcaaccattatcggatcgttagccgctggggccctgttaatcagttgtatagcctaccttttggtgactcgcaattggcgtggacagagtcaccggctacccgctccccggggtcaagggtccctgtctatcctctgctcagccgtgtctcccgtgccgtcagtaacaccatcgacatggatggccacgacagaaaaacctgagctcggacccgcgcatgacgctggcgataacaatatttatgaggtaatgccatcacctgttctcctagtttctcccatttccgatactcggagcatcaaccccgcccggcccctgcccacccctccacatcttcaagccgagccagaaaaccaccagtatcaacaggatctgctcaacccggatcctgcaccctactgccagttagtgccaacttcatag

SEQ ID NO: 203256 - DNA, 903 bp, Artificial Sequence
  derived and/or modified sequence
atggagatacccatgggtacccagggttgtttttcaaagtcactactcttgtccgcttccatcttagtgctctggatgctgcagggcagtcaggccgctctgtacatacagaaaatccctgaacagccgcagaaaaaccaggatcttcttctgtctgtgcaaggtgtgccggatactttccaggactttaactggtatctgggggaggaaacttatggcggtaccaggctatttacgtatattcctggcatccagcgtccccagcgagacggctctgccatgggccagagggatatcgttggattccctaatggaagcatgctccttcgaagagcgcaaccaaccgattctggcacttatcaggtggcaattacaattaattcagaatggactatgaaagccaagaccgaggtacaggtggcagaaaagaacaaagagcttcctagcactcacctgcctactaacgccggaattctagccgcaacaattattgggtccctggccgctggtgccctcctcattagttgtatcgcctacctcttggtcacccgcaattggcgcggacagtcacacagattgcccgcaccacggggtcaagggagtctttctatcttgtgctcagcagtgtctcctgttccaagcgtgactccaagcacctggatggccactacggagaagcccgagttgggacccgctcacgatgcaggcgacaataatatctacgaggtcatgccgtctcctgtgctcctcgtcagccccatcagtgacacaaggtccatcaacccagctaggcctctacctactcctccccatttacaggcagagccagagaatcatcagtaccagcaggacctgctcaatccagatcccgcaccctattgtcaactggtgccaacctcttag

SEQ ID NO: 203257 - DNA, 1982 bp, Artificial Sequence
  derived and/or modified sequence
cctctgtctgtgctcccatcccagggagtataggtggagcctccagagcccatggacagggcatgctggggctgggccagccccagcggtgtctctaaggcacccctgggatccccactgagctggcctacttcagacagccagggcccacccctctggcccccttagtgtccagctcgtggccccttggcatttccacaagacgccaagatggagattcccatggggacccagggctgcttctcaaagagcctcctgctctcagcctcaatcctggtcctctggatgctccaaggctcccaggcagctctctacatccagaagattccagagcagcctcaaaagaaccaggaccttctcctgtcagtccagggtgtcccagacaccttccaggacttcaactggtacctgggggaggagacgtacggaggcacgaggctatttacctacatccctgggatacaacggcctcagagggatggcagtgccatgggacagcgagacatcgtgggcttccccaatggttccatgctgctgcgccgcgcccagcctacagacagtggcacctaccaagtagccattaccatcaactctgaatggactatgaaggccaagactgaggtccaggtagctgaaaagaataaggagctgcccagtacacacctgcccaccaacgctgggatcctggcggccaccatcattggatctcttgctgccggggcccttctcatcagctgcattgcctatctcctggtgacaaggaactggaggggccagagccacagactgcctgctccgaggggccagggatctctgtccatcttgtgctcggctgtatccccagtgccttcagtgacgcccagcacatggatggcgaccacagagaagccagaattgggccctgctcatgatgctggtgacaacaacatctatgaagtgatgccctctccagtcctcctggtgtcccccatcagtgacacaaggtccataaacccagcccggcccctgcccacacccccacacctgcaggcggagccagagaaccaccagtaccagcaggacctgctaaaccccgaccctgccccctactgccagctggtgccaacttcctgatgggtcctgggccaggccagccagggagaagacaaggccccagccctcctctgggagcctcacacctgagaccagcaggacaaggccattgggggctgtggggccgatgaggtggactcagccaaagactcagcagcacatggggcaggtgtcctggcagggggacaggagactgtaacaggcccaggtccttgtgcagcccgtgaatgcacgcccgccttcggtctgttccttcaagcaagctggcctgggccatgtgcctgtgaaaggcaggctctggcccctttccatgccaaagtcccccaagatctggatatctggggacaagatggtggcctcaggcctgcctcccaggcagttggctgggctcccaactgtctgtcctcaatgccctaccccaactccactagtgaccctcagagtcttctccccttaggacaaggcagacaccccaccatgcgggcctcaggtggcagagaggcccagcctcacaggcctgtggccccacacaccagtcccagcaaggtgaccacggctgctggaccccttccctgttcaggcaggcccagcccctctcagaacctgctgccagctgctggtcttggcccccaccctgaatcttactgagtccctctgggcagcagctcccttctccaccccaccccagcacccgtcccaaatgtggcctcagcttgtcctccccttccccaaactatgcattcattcagcaataaatgagcctttgctgtatgccagacccagttctaggctcttgcagccctggtagaaagcaaaacaaaaactcccgctttcccagagggtcacttggcaggggaaagaatcaggaaataaaataaataatgaacatg

SEQ ID NO: 203258 - protein, 584 aa, Artificial Sequence
  derived and/or modified sequence
MKMMLVRRFRVLILMVFLVACALHIALDLLPRLERRGARPSGEPGCSCAQPAAEVAAPGWAQVRGRPGEPPAASSAAGDAGWPNKHTLRILQDFSSDPSSNLSSHSLEKLPPAAEPAERALRGRDPGALRPHDPAHRPLLRDPGPRRSESPPGPGGDASLLARLFEHPLYRVAVPPLTEEDVLFNVNSDTRLSPKAAENPDWPHAGAEGAEFLSPGEAAVDSYPNWLKFHIGINRYELYSRHNPAIEALLHDLSSQRITSVAMKSGGTQLKLIMTFQNYGQALFKPMKQTREQETPPDFFYFSDYERHNAEIAAFHLDRILDFRRVPPVAGRMVNMTKEIRDVTRDKKLWRTFFISPANNICFYGECSYYCSTEHALCGKPDQIEGSLAAFLPDLSLAKRKTWRNPWRRSYHKRKKAEWEVDPDYCEEVKQTPPYDSSHRILDVMDMTIFDFLMGNMDRHHYETFEKFGNETFIIHLDNGRGFGKYSHDELSILVPLQQCCRIRKSTYLRLQLLAKEEYKLSLLMAESLRGDQVAPVLYQPHLEALDRRLRVVLKAVRDCVERNGLHSVVDDDLDTEHRAASAR

SEQ ID NO: 203259 - DNA, 2751 bp, Artificial Sequence
  derived and/or modified sequence
gcggccgctccggagaggccgagcggggacgggcccgagatggcgcggggacccagcgctccggcggcgggcgccctgcacgcggcccgggcccggggacagccccggagctggtagccgcccggcaccgatggaccttgacccgcgaggcggcgccgcgctcgtgcccagctgcagctagaggggcgcgcgggcagaacgcgctccaggcccgggccggcccgcgcggccatgaagatgatgctggtgcgccggttccgcgtgctcatcctgatggtgttcctggtggcctgcgcgctgcacatcgccctggacctgctgcccaggctggagcgacgcggcgcgcggccctcgggggagcccggctgttcgtgcgcgcagcccgccgccgaggtggccgcgcccggctgggcccaggttcggggccgccccggggagcccccggccgcctcctccgccgccggcgacgcgggctggcccaacaagcacacgctccgcatcctgcaggacttcagctccgacccctcctccaacctctcgtcccactcgctggagaaactgccgcccgcggccgagccggccgagcgcgccttgcgggggcgggatcccggcgccctaagaccccacgaccccgcgcaccggccgctgctgcgagaccccggcccgcgtcggtccgagtcgccccccggccccggcggagacgcctccctcctggccaggctgttcgagcacccgctttaccgggtggcggttccgccgctcacggaggaggacgtcctgttcaatgtgaacagcgacaccaggctcagccccaaagcggcggagaacccggactggccgcatgcgggtgctgaaggtgcagaattcctctcccccggggaggcggccgtggactcctatcccaactggctcaagttccacattggtatcaaccggtacgagctgtactccagacacaacccggccatcgaggccctgctgcacgacctcagctcccagaggatcaccagcgtggccatgaagtcggggggcacgcagctgaagctcatcatgaccttccagaattacgggcaagcgctgttcaaacccatgaaacaaacgagggagcaggagacaccccctgactttttttatttctctgactacgagaggcacaatgcggagattgctgccttccacctggacaggatcctggacttccgccgggtccctcccgtggccggcaggatggtcaacatgaccaaggagatccgggacgtcacacgggacaagaagctctggaggaccttcttcatctctccagccaacaacatctgcttctacggcgagtgttcctactactgctccacggagcacgccctgtgcgggaagccagaccagatcgagggctcgctggcggccttcctgcccgacctgtccctggccaagaggaagacctggcggaacccttggcggcgttcctaccacaagcgcaagaaggccgagtgggaggtggaccctgactactgcgaggaggtgaagcagacaccgccctacgacagcagccaccgcatcctggacgtcatggacatgacgatcttcgacttcctcatgggaaacatggaccgtcaccactacgagacttttgagaagtttgggaatgaaacgttcatcatccacttagacaatggaagagggtttgggaagtattcgcacgacgagctctccatcctggtgccgctacagcagtgctgcaggatccggaagtccacctacctgcgtctgcagctcctggccaaggaggagtacaagctgagcctgctgatggccgagtctctgcggggggaccaggtggcacccgtgctgtaccagccgcacctggaggccctggaccggcggctccgcgtcgtgctaaaggccgtccgggactgcgtggagaggaacgggctccacagcgtggtggatgacgacctggacactgagcacagagccgcctcggcgaggtagtgtccgccggccgctgcgctgcccgggacggagacagaggcgccggacctcccagcaagcgcatgcgcccgtcgtgaattcagtgaattcagaggcaggacgggatcatccggagtcgggagctgctgccacaggaggcgaggctccccaggtctcataggacacattttgtcagtgtttgaccagaaaagcttgggaaggaagcgctgtctgtgctcacggacagaggcggccggcgccggaggcattccatcctttctgtagggaaaggagcctttatttactattttgtatttatatttgatgaataagtatataaacagagacgtgtacacagatgccaatcacctaccaaaccaaacacgaggaccgccctccctggttctgggggcccctcaaggccaagctcacccctcaagtgctctcacactcgggacctaattcaagtaaaaaccctttctccttcctggggcctcggctcctggagggctggagggtctcgtctgaggacgggaggaggctctcgctggacgtctggcctgtgcgctggtggacggatgcctacgtggttttggaggacccgatgaccaggcgtcctgcgagtccgcccgctggcctgcagcacccacctcggacttggctgtggacggttggtgcaagtgcatcctgcagggctggctgtgcgcagctgtgggctgacctttgcagagttttgtggaatagtttgcaatgtcataaaagtgcaataaaggtacagcagatgtg

SEQ ID NO: 203260 - DNA, 1755 bp, Artificial Sequence
  derived and/or modified sequence
atgaagatgatgctcgtcaggcgatttcgagtgctgatcctcatggtgttcctggtggcttgtgctctgcacatcgctctggacttgctaccccgtcttgaacggagaggagccaggccaagtggcgaaccgggctgttcatgcgctcaacctgccgcggaggtcgcggcccccggatgggcgcaggtgcggggccgccctggggagccacccgcagcctcgtccgccgctggggacgcgggctggccgaacaaacacactctgcggatactacaggattttagtagtgatcccagttctaacctgagctcacatagcctggaaaaactcccacctgcagcggaacccgctgagcgagcactccgcgggagggaccctggggccctgaggccacatgaccccgctcaccggccccttctgagggaccccggcccccgaagatctgaaagcccaccaggacctggcggagacgcatcactcctcgccaggttgttcgagcacccgctgtacagagttgccgtgcccccactcaccgaagaggacgtactgttcaatgttaatagcgacactcgactgagcccaaaggccgccgagaacccggactggccccacgccggagccgagggcgctgaattcctgagccccggcgaggctgccgtggacagctatcccaactggctgaaatttcacattggcattaacagatatgagctgtactctaggcacaaccctgccattgaggccttattacacgacttaagctcacagcgcataacatccgttgccatgaagtcaggcggtacccaactgaaactcattatgacattccagaactatgggcaagctttatttaaaccgatgaaacagactagggaacaagagaccccacccgacttcttctatttcagcgactatgagaggcataatgcggagattgctgctttccatctggacagaatactcgacttccggagggtcccacccgttgccggaagaatggtgaatatgactaaggaaatcagggatgttaccagggataaaaagctctggaggacattcttcattagcccagctaataatatttgcttctatggggaatgttcctattactgctctactgaacatgccctgtgcgggaagcctgatcagattgagggatccctggcagcttttttaccagatctgtcactcgccaaacgcaaaacttggcggaatccctggagaaggtcctatcataaacgcaaaaaggctgaatgggaggtcgatcccgactactgtgaagaggtgaaacagacgcctccgtacgactcttcccaccggatcctggatgtgatggatatgactatctttgacttcctcatggggaacatggatagacatcactacgaaaccttcgagaaattcggtaacgagacttttatcattcacctggataatgggaggggctttggcaaatatagccatgatgagctcagcatacttgtcccgttgcagcagtgttgtaggataaggaagtctacttaccttcgcctgcagctgctggccaaggaagagtacaaactgagcctgctgatggccgaaagccttaggggcgaccaggtggcacctgtgctataccagcctcatcttgaggccctggacagaaggctccgagttgtgctaaaggctgtgagggattgtgtcgagcggaacggactgcactctgtagtagatgacgatctggacaccgagcaccgcgccgcgtccgctcgttag

SEQ ID NO: 203261 - DNA, 1755 bp, Artificial Sequence
  derived and/or modified sequence
atgaagatgatgctggtgcggcgcttccgggtgctgatcctgatggtgttcctggtggcctgtgccctgcacatcgccctggacctgctgccccggctggagaggagaggagcccggcccagcggggagcccggctgcagctgtgcccagcctgctgctgaggtggccgcccctggctgggcccaggtgcggggccggcctggagagcccccagctgccagcagcgctgctggagatgctggctggcccaacaagcacaccctgcgcatcctgcaggacttcagcagtgaccccagcagcaacctgagcagccacagcctggagaagctgcccccagctgctgagcctgctgagcgggccctgcggggccgggaccccggggccctgcggccccatgaccctgcccaccggcccctgctgcgggaccccggcccccggcgctctgagagccccccaggccctggaggagatgccagcctgctggcccggctgtttgagcaccccctgtacagagtggccgtgccccccctgacagaggaggatgtgctcttcaacgtgaacagcgacacccggctgagccccaaggctgctgagaacccagactggccccatgctggagctgagggcgctgagttcctgagccctggagaggccgctgtggacagctaccccaactggctgaagttccacatcggcatcaacagatatgagctgtacagccgccacaacccagccatcgaggccctgctgcatgacctgagcagccagaggatcacctctgtggccatgaagagcggcggcacccagctgaagctgatcatgaccttccagaactacggccaggccctcttcaagcccatgaagcagacccgggagcaggagaccccaccagacttcttctacttcagtgactatgagcggcacaatgctgagattgctgccttccacctggaccgcatcctggacttccggcgggtgccccctgtggccggccgcatggtgaacatgaccaaggagatcagagatgtgacccgggacaagaagctgtggaggaccttcttcatcagccctgccaacaacatctgcttctacggggagtgcagctactactgcagcacagaacatgccctgtgtgggaagccagaccagatcgagggcagcctggccgccttcctgcctgacctgagcctggccaagaggaagacctggaggaacccctggaggaggagctaccacaagaggaagaaggccgagtgggaggtggaccctgactactgtgaggaggtgaagcagaccccaccctatgacagcagccaccgcatcctggatgtgatggacatgaccatctttgacttcctgatgggcaacatggacagacaccactatgagacctttgagaagtttggaaatgagaccttcatcatccacctggacaatggccggggctttgggaagtacagccatgatgagctgagcatcctggtgcccctgcagcagtgctgccgcatcaggaagagcacctacctgcggctgcagctgctggccaaggaggagtacaagctgagcctgctgatggccgagagcctgcggggggaccaggtggcccctgtgctgtaccagccccacctggaggccctggaccggcggctgcgggtggtgctgaaggctgtgcgggactgtgtggagagaaatggcctgcacagcgtggtggatgatgacctggacacagagcaccgggccgccagcgccaggtag

SEQ ID NO: 203262 - DNA, 1755 bp, Artificial Sequence
  derived and/or modified sequence
atgaagatgatgctggtgcggcggttccgggtgctgatcctgatggtgtttcttgtagcctgcgctttgcatattgccctcgacctgctgccgcggctggaaagacgaggagcccggccttccggtgagccgggctgcagttgtgcgcaaccagcagcggaggtagccgctccaggctgggctcaggtgagaggaaggcccggtgagccaccagctgcttccagcgccgccggcgacgccgggtggccgaacaaacatacactaaggattctccaggatttcagttctgatcccagctcgaacctgagctcccacagtcttgagaagctccctccagcagcagagccggctgaacgggcccttcggggcagagatcctggggccctgcgacctcatgaccctgctcaccggcctttactaagagatccgggaccgcgacgaagtgaaagcccgcccggtccaggtggcgatgccagtctactagctagactattcgaacatccactttatcgggtggccgttcccccactcacggaggaagatgtgctgtttaacgtgaattcagatactcggctgtcccccaaagctgcggagaacccggactggccgcatgcaggtgccgaaggtgcagagtttctcagccccggcgaggccgccgtcgacagctaccctaactggctgaagttccacattgggatcaaccggtatgaactgtatagtcgccataatccggcaatagaagcattgttacacgatctttctagccagaggattacatccgttgccatgaagagcgggggaacacagctaaagcttatcatgacattccaaaactatggacaggccctattcaagccgatgaagcaaaccagggagcaagaaacccctccagatttcttttatttttccgattatgagcgtcacaacgcagagatcgccgccttccacctcgatcgcatcctggattttagacgggtgcctccagtggctgggcgtatggttaacatgacaaaagaaataagagacgtcacacgagacaaaaaattgtggcgaactttttttattagccccgcaaataacatttgcttctacggggagtgctcctattactgctccacggaacatgccttatgcggtaagccagaccaaatcgaggggtcactcgcagccttcctccctgacctttccttggccaagaggaagacatggcggaatccttggcggcggagttatcacaagcggaagaaggccgagtgggaagttgaccctgactactgcgaagaggttaagcagacaccaccttacgattcctctcaccggattttggacgtgatggatatgaccattttcgattttctaatgggcaatatggaccgacatcattatgaaaccttcgaaaagtttggtaacgaaacatttatcatacacctcgacaatggcagagggtttggaaagtactctcatgatgagttatcgatcctcgtgccactgcagcagtgttgcaggattcgcaagtccacatatctgcgacttcagttgctagcaaaagaggaatacaaacttagcctgctgatggcggaatcccttcggggagatcaagtggcccctgtcctgtatcagccccacctagaagccttggatcgaaggctgcgtgtagtactgaaggccgtgcgggattgcgtggagaggaacggcctgcattccgtggtcgatgacgatcttgataccgaacaccgggccgcttcagcccggtag

SEQ ID NO: 203263 - DNA, 1755 bp, Artificial Sequence
  derived and/or modified sequence
atgaagatgatgctcgtgcgacggttcagagtgctaatccttatggtgtttttggtcgcttgtgcactccacatcgcattggatctcctccctcgcctggagcgacgaggcgcacggccatctggggagcctgggtgtagctgtgctcaaccggcagccgaggtcgccgcaccgggatgggctcaggtcagagggagaccgggagagccacctgcagcctctagcgctgctggagatgccggatggccaaataaacatactctaagaatcctgcaagacttttcatcagacccaagttctaacttgagcagtcactccctcgaaaaactgccccctgctgcggagccggcagagagggctctgcgcggaagagatcccggagccctaagaccccacgatcccgctcaccgcccactgcttcgtgaccctggccctaggcggtctgaaagccccccaggtcctggcggagacgcctctttactggccaggctctttgagcatcccctttaccgcgtggccgtcccccctctgactgaggaagatgttctcttcaatgtcaattccgatacacgtctctcacccaaggctgcagaaaatcccgactggccgcacgctggcgctgagggtgccgaattccttagtcccggtgaagcggcagtggatagttatccaaactggttaaagtttcatatcgggataaatcgctacgagctgtattccagacacaatcctgccatcgaggctctgctccatgatctcagtagccagcgcattacctcagtggctatgaagtctgggggaacccagctcaagttgatcatgactttccagaactacgggcaagcactgtttaaaccaatgaaacagacgcgggagcaggaaacccctcccgattttttttattttagcgactacgagcggcataacgcggagatcgctgcatttcacctcgataggatcttggactttagacgcgttcccccagtggctgggaggatggtcaatatgaccaaggaaattcgcgatgtgacaagagacaagaagctctggcgcactttcttcatcagcccggcaaataacatctgtttttacggtgagtgctcatactattgctccaccgagcacgccctgtgtggaaaacccgatcagattgaagggtccctggctgcgtttctgcctgacttgagcttggcaaaacggaaaacttggcgcaacccctggcggaggtcataccacaagagaaaaaaagccgaatgggaagtagacccggactactgtgaagaggtgaaacaaaccccaccttacgactcaagccaccggatcctggatgtaatggacatgaccatcttcgattttctgatgggcaatatggacagacaccactatgaaaccttcgagaaattcgggaatgaaactttcatcatccatctggacaatgggcgaggtttcgggaagtacagtcacgacgaactctctatcctagtcccgttgcagcaatgctgcagaattagaaagtccacataccttcgattgcagttactggcaaaagaagagtacaaactgtccttgttgatggcagagagtctgagaggcgaccaagttgctccagtgctgtatcagcctcatctggaagcgctggacaggcggctgcgcgtagtgctcaaggcggttcgtgactgcgtggaaagaaatggattacacagcgtcgtggatgacgatctggacaccgaacatcgcgcagcctcggccagatag

SEQ ID NO: 203264 - DNA, 1755 bp, Artificial Sequence
  derived and/or modified sequence
atgaagatgatgctggtgagaagattcagagtgctgatcctgatggtgttcctggtggcctgcgccctgcacatcgccctggacctgctgcccagactggagagaagaggcgccagacccagcggcgagcccggctgcagctgcgcccagcccgccgccgaggtggccgcccccggctgggcccaggtgagaggcagacccggcgagccccccgccgccagcagcgccgccggcgacgccggctggcccaacaagcacaccctgagaatcctgcaggacttcagcagcgaccccagcagcaacctgagcagccacagcctggagaagctgccccccgccgccgagcccgccgagagagccctgagaggcagagaccccggcgccctgagaccccacgaccccgcccacagacccctgctgagagaccccggccccagaagaagcgagagcccccccggccccggcggcgacgccagcctgctggccagactgttcgagcaccccctgtacagagtggccgtgccccccctgaccgaggaggacgtgctgttcaacgtgaacagcgacaccagactgagccccaaggccgccgagaaccccgactggccccacgccggcgccgagggcgccgagttcctgagccccggcgaggccgccgtggacagctaccccaactggctgaagttccacatcggcatcaacagatacgagctgtacagcagacacaaccccgccatcgaggccctgctgcacgacctgagcagccagagaatcaccagcgtggccatgaagagcggcggcacccagctgaagctgatcatgaccttccagaactacggccaggccctgttcaagcccatgaagcagaccagagagcaggagaccccccccgacttcttctacttcagcgactacgagagacacaacgccgagatcgccgccttccacctggacagaatcctggacttcagaagagtgccccccgtggccggcagaatggtgaacatgaccaaggagatcagagacgtgaccagagacaagaagctgtggagaaccttcttcatcagccccgccaacaacatctgcttctacggcgagtgcagctactactgcagcaccgagcacgccctgtgcggcaagcccgaccagatcgagggcagcctggccgccttcctgcccgacctgagcctggccaagagaaagacctggagaaacccctggagaagaagctaccacaagagaaagaaggccgagtgggaggtggaccccgactactgcgaggaggtgaagcagacccccccctacgacagcagccacagaatcctggacgtgatggacatgaccatcttcgacttcctgatgggcaacatggacagacaccactacgagaccttcgagaagttcggcaacgagaccttcatcatccacctggacaacggcagaggcttcggcaagtacagccacgacgagctgagcatcctggtgcccctgcagcagtgctgcagaatcagaaagagcacctacctgagactgcagctgctggccaaggaggagtacaagctgagcctgctgatggccgagagcctgagaggcgaccaggtggcccccgtgctgtaccagccccacctggaggccctggacagaagactgagagtggtgctgaaggccgtgagagactgcgtggagagaaacggcctgcacagcgtggtggacgacgacctggacaccgagcacagagccgccagcgccagatag

SEQ ID NO: 203265 - protein, 689 aa, Artificial Sequence
  derived and/or modified sequence
MEDTGIQRGIWDGDAKAVQQCLTDIFTSVYTTCDIPENAIFGPCVLSHTSLYDSIAFIALKSTDKRTVPYIFRVDTSAANGSSEGLMWLRLVQSARDKEEQNLEAYIKNGQLFYRSLRRIAKDEELLVWYGKELTELLLLCPSRSHNKMNGSSPYTCLECSQRFQFEFPYVAHLRFRCPKRLHSADISPQDEQGGGVGTKDHGGGGGGGKDQQQQQQEAPLGPGPKFCKAGPLHHYPSPSPESSNPSAAAGGSSAKPSTDFHNLARELENSRGGSSCSPAQSLSSGSGSGGGGGHQEAELSPDGIATGGGKGKRKFPEEAAEGGGGAGLVGGRGRFVERPLPASKEDLVCTPQQYRASGSYFGLEENGRLFAPPSPETGEAKRSAFVEVKKAARAASLQEEGTADGAGVASEDQDAGGGGGSSTPAAASPVGAEKLLAPRPGGPLPSRLEGGSPARGSAFTSVPQLGSAGSTSGGGGTGAGAAGGAGGGQGAASDERKSAFSQPARSFSQLSPLVLGQKLGALEPCHPADGVGPTRLYPAAADPLAVKLQGAADLNGGCGSLPSGGGGLPKQSPFLYATAFWPKSSAAAAAAAAAAAAGPLQLQLPSALTLLPPSFTSLCLPAQNWCAKCNASFRMTSDLVYHMRSHHKKEYAMEPLVKRRREEKLKCPICNESFRERHHLSRHMTSHN

SEQ ID NO: 203266 - DNA, 2070 bp, Artificial Sequence
  derived and/or modified sequence
atggaggacaccggtatccaacgaggtatctgggatggggacgccaaggcggtgcagcagtgtctgaccgatattttcaccagcgtgtacacgacctgtgacatccccgagaacgctatttttgggccttgcgtgctctcacacacgtcactgtatgacagcattgcctttatcgccctcaaatcaacagataaacgcactgttccttacatcttcagagtcgatacaagtgctgcaaatggttcctctgaggggctgatgtggttaagacttgttcagagtgcccgagataaagaagagcagaacctggaggcatatatcaaaaatggacagctgttttaccggtcattgcggcggatcgccaaagacgaggagctgctggtctggtacgggaaggaactcaccgagctcctgctcctttgtccctcgcggtcacacaataagatgaatggttcttctccttatacgtgcttggagtgctcgcagcgatttcagtttgaatttccatacgtggctcacctgcggtttcggtgtccaaaacgcctgcactcagcagacataagtccgcaggacgagcagggtggtggggtaggaaccaaagatcacggcggagggggcgggggaggtaaagatcaacagcagcaacagcaggaggctcccctggggccaggtcctaaattctgtaaggcaggacctctacaccattatccctctccatccccagagagcagtaaccctagcgcagctgccggtggatcctcagcaaaaccaagtactgatttccacaaccttgcccgggagcttgagaattctagaggaggctcttcatgtagcccagctcagagcctgagttccggctctggctctggcggcgggggcggacaccaggaagcggagctgtcccctgatggtatagctaccggggggggtaagggaaagcgaaagtttcctgaggaggcggcagagggaggcgggggagctggattggtaggcggccggggacgatttgtagagagaccactgcccgcttctaaagaggacctcgtgtgtacgcctcagcagtaccgggcctctggaagttacttcgggctggaggaaaacggacgactgttcgctccgccctcacctgaaacaggagaagctaagaggtcagccttcgtggaagtgaaaaaagcagctcgtgccgccagcctacaggaggagggtactgctgacggggcaggcgtggcctctgaagatcaagacgcgggggggggaggggggagcagtaccccggccgccgctagtcctgtgggtgccgagaagctgcttgcacccaggcctgggggacccctgccctctagactcgaagggggcagtccagccagagggagcgcctttacctccgttccccagttgggaagcgcagggtcaacctcaggaggcggcggcacaggggcaggcgctgctggtggtgcaggtggaggacagggtgcagcatcagacgagaggaagagcgctttctctcagcccgcgcgaagcttcagccagctgtcccccctggtcctgggccagaaacttggagcccttgagccgtgccatcccgcagacggcgtgggcccgacacgcttgtaccctgctgccgcggatcccctcgctgtgaagttgcagggagccgctgatctcaatggcgggtgtggttccctgcccagcggaggcgggggactcccaaagcagagccccttcctgtacgctacggctttctggcctaagtcttccgccgctgcagccgccgccgccgccgcagctgcggcaggtcccctccagctgcagttgccctccgccttgaccctgctacctccgagcttcacgagcctttgtctgccagctcaaaactggtgtgccaagtgtaacgcttctttcaggatgaccagtgacctcgtttaccatatgcgaagccatcacaagaaagagtacgctatggagcccctggttaaacgacgacgagaagaaaagctgaaatgtccaatttgcaatgagtcgtttcgtgaacgacaccatctgtcacgacacatgacaagccacaactag

SEQ ID NO: 203267 - DNA, 2070 bp, Artificial Sequence
  derived and/or modified sequence
atggaagataccggaatccagaggggaatctgggatggtgacgcaaaagccgtgcagcagtgccttaccgacatattcacctcagtctacaccacctgtgatattcctgagaacgccatcttcggtccctgtgtgctgagtcatacatccctttatgactctatcgcctttattgccctcaagagcactgataagcgaaccgtgccgtatatcttccgcgtggatacatcagctgccaatggaagcagcgaggggctcatgtggttgagactcgttcaaagcgcacgtgacaaagaggagcagaacttagaggcctacataaagaacggacagctgttctatcgaagtcttaggagaatcgcaaaggatgaggaactcctggtgtggtacgggaaagagttgaccgagctccttttgttgtgcccgtcgaggtctcataataagatgaatggttcgtctccatacacttgtctggagtgcagccaacgcttccaattcgagttcccgtatgtggcacatctgagatttcgatgccctaaacggctacacagtgcagatattagtccgcaggacgaacagggcggaggagtgggaaccaaagatcatggaggggggggaggcggtggaaaagatcagcagcagcaacagcaagaggcgcccctggggcccgggcccaaattctgcaaagccggacccctgcatcactacccatctccaagtccagagagctccaatcccagtgcggccgctggaggttcatctgccaaaccttccactgactttcataacttagcaagagaattagaaaattcgcgcggggggagttcctgctcaccagctcagagcctgtccagtggatcgggtagcgggggtggtgggggccatcaggaagcagagctgtccccagatggcattgctaccggcggggggaaaggtaaacgaaagttccccgaggaggctgcagagggtggtgggggggcaggtctggtgggcgggcgtggccggtttgtagaacgtcccctccctgccagcaaggaagacctggtgtgtactccccagcaatatcgtgctagcggaagttacttcgggctggaggagaacggtcgcctgtttgcccccccatcccccgagaccggagaggctaaacgatccgcctttgtggaagtgaagaaggccgcacgcgccgcctccctgcaggaggagggcacagctgacggggcaggagtcgccagtgaggaccaggatgccggcggaggcgggggctcctctacacctgcggctgcctctccagtcggagcggagaagctgctagcgccccggcccggagggcctcttccgtctaggttggagggagggtccccagcaaggggctctgcttttacatctgtgccccagctgggttccgcaggtagcaccagcggaggcggagggacaggagcaggcgctgctggaggtgctggcggtggccagggcgcagccagcgatgaacgcaagagtgcgttttctcaaccagctcggtcattctcccagttgtctcctcttgttctgggtcagaaactaggtgccctcgagccttgccatcccgccgacggcgttgggcccactcgactttatccagccgccgctgatcctctggcggtgaagcttcagggagccgccgatcttaacggcggatgtgggtcactccctagcggtggaggcggcctcccgaagcagtctcctttcctctacgcaactgctttttggccgaaaagctcagctgcagccgctgccgcagcggccgctgctgcagccggtccactgcaactccagttgccttctgcacttaccctgcttcctccatcattcacatctctctgcctgccggctcaaaattggtgcgccaagtgcaatgcaagctttagaatgacatccgacttggtttatcacatgcggagtcatcacaagaaggagtatgctatggagccgctggtgaagcgtagacgtgaagaaaaactgaagtgtcccatttgtaacgagagtttcagggaacgacatcatttgtcccgccacatgacaagccataattag

SEQ ID NO: 203268 - DNA, 2070 bp, Artificial Sequence
  derived and/or modified sequence
atggaagacaccggtattcagcgtggcatttgggatggagacgccaaagccgtacaacagtgcctgactgacatttttacgagtgtgtatacaacttgcgacatccctgagaacgcaatcttcggaccgtgcgttctgtcacatacctcactttatgacagcatagcatttatagccctgaaatccacagataaacggacagtaccatatatctttagagtcgacacgagcgccgccaacgggagcagcgaaggactgatgtggttacgcttggtgcaaagcgcaagggacaaggaagagcaaaacctggaagcctatatcaagaatggacagttgttctaccgatccctgaggaggatcgcaaaggatgaggaactcctggtgtggtacggaaaggagctgaccgagctgttacttctctgcccaagtcgcagtcataacaagatgaacggtagttcgccttacacctgcctggagtgttcccagaggtttcaattcgaatttccatacgtggctcacttgagatttcggtgtcccaaacgcttgcatagcgccgatatctccccacaagacgagcaggggggcggcgtgggtaccaaggaccatggaggaggaggaggtggaggcaaagatcaacaacaacagcagcaggaggcccctctcggaccaggacccaaattttgtaaagccgggcccctccatcactatccatctccaagcccagaaagctcaaacccctctgcagctgccgggggcagctcggctaaaccaagtaccgatttccataatctggctcgagaattagagaacagtcgcggcggcagcagctgttctcctgctcagagcctctcttcaggatcgggctcaggcggaggtggaggtcatcaggaggctgaattatcacctgacgggattgccaccgggggtggaaaagggaaaagaaagtttcctgaggaagctgccgaaggcggcggcggtgccggattagtgggcggccgtggaagatttgtggagcggccactgcccgcctctaaggaagacctggtctgcaccccgcagcagtatagagcttctggcagctacttcgggctggaagagaacggacggctattcgcacctcccagcccagagaccggagaggccaaacgcagtgcgtttgtcgaggtgaaaaaggctgcgagagctgcttctttgcaggaggagggtaccgccgatggcgccggagtggcaagcgaagaccaggatgctgggggcggtggggggtccagcactcccgcagccgcgagtccagtcggagccgaaaaactgctggctccacggccaggaggtccactgccttcacgacttgagggaggcagtccagccagaggctctgcctttacctccgtgccccagctcgggagcgccgggtcaacatcgggtgggggcgggaccggcgccggagcagccggcggggcaggcgggggacagggggccgcatccgatgaacggaagagtgcgttcagccagccagccagaagctttagccaactgtcccccttagtgctgggccaaaagctcggtgctctcgagccatgtcatcctgcagacggcgtcggcccaactcgactatatcctgccgccgctgatccactggccgtcaagttgcaaggggcggctgatctcaacgggggatgcgggtccctgcctagtggtggaggcggcttacctaaacagtcccccttcctgtacgccacggcattttggcccaagtcatccgctgcagccgccgccgcagcagcagctgcagctgcaggcccccttcagctccagctcccttccgccctcactctcctaccacccagctttacttcactttgcctgccagcgcagaactggtgtgccaaatgtaatgcttcctttcgtatgactagcgatctcgtctaccatatgcgctctcatcacaaaaaggaatatgccatggagcccctggtgaaaagacgccgcgaggaaaaactcaaatgtccgatttgcaatgagtccttcagggagagacatcacctgtcgcggcacatgacaagccacaattag

SEQ ID NO: 203269 - DNA, 1287 bp, Artificial Sequence
  derived and/or modified sequence
atggaggacaccgggatccaaagagggatctgggacggcgatgccaaagccgttcagcagtgtctgaccgacattttcaccagcgtgtacaccacatgcgacatacccgaaaacgccatttttggtccatgcgtgctctctcacaccagtctgtatgacagtatcgctttcatagctctgaagtccacagataagcgaacagtcccgtacatctttcgggtggacactagcgccgccaacgggtccagtgagggactgatgtggctgcggctggtgcaatctgcgcgcgacaaagaggaacaaaacctggaggcctatatcaagaatgggcaattattctatcgatcactgcgtaggatcgccaaagacgaagagttgctcgtgtggtacgggaaggaactaaccgagcttctcctcctgtgcccaagccggtctcacaataagatgaacgggagttcaccgtacacgtgcctggagtgctcacagcgcttccagttcgaatttccctatgttgctcatctacgattcagatgtcctaaaagactgcatagtgcagacatatctccccaagacgaacaagggggcggggtcggaaccaaggatcacggaggaggcggcggaggcggcaaagatcagcagcagcagcaacaggaggctccacttggtcctgggcccaaattttgtaaagctggccctctacatcactatccttcccctagtccagagtcctccaatcctagtgccgcagccggcggaagtagtgctaagccctcaacagatttccataatttggctcgtgaactggaaaacagccgcggaggaagtagctgcagtcctgctcagtcactgtcctccggatctggaagcggtggtggcggtgggcaccaggaggccgaactgagtcctgatggaatcgctactggcggagggaaaggcaagcgtaaattcccggaagaggcggctgaaggaggaggcggagcagggctggttggcggtagagggaggtttgtggagcggcccctccccgcttcaaaggaagatcttgtctgtacaccccagcagtacagagcgagtggcagctattttggcctcgaggagaatggaagacttttcgctccaccatccccggagaccggcgaggcaaaacgctccgcctttgtagaggttaagaaggctgcgagagcggccagccttcaggaggaggggaccgccgatggggccggcgtggccagcgaggaccaggacgccggcggaggtgggggcagttcaacaccagcagctgcctag

SEQ ID NO: 203270 - DNA, 2070 bp, Artificial Sequence
  derived and/or modified sequence
atggaggacaccggcatccagaggggcatctgggatggagatgccaaggctgtgcagcagtgcctgacagacatcttcacctctgtgtacaccacctgtgacatcccagaaaatgccatcttcggcccctgtgtgctgagccacaccagcctgtatgacagcatcgccttcatcgccctgaagagcacagacaagaggacagtgccctacatcttccgggtggacaccagcgctgccaacggcagcagcgagggcctgatgtggctgcggctggtgcagagcgcccgggacaaggaggagcagaacctggaggcctacatcaagaatggccagctgttctaccgcagcctgcggcgcatcgccaaggatgaggagctgctggtgtggtacggcaaggagctgacagagctgctgctgctgtgccccagccgcagccacaacaagatgaatggcagcagcccctacacctgcctggagtgcagccagcgcttccagtttgagttcccctacgtggcccacctgcgcttccgctgccccaagaggctgcacagcgctgacatcagcccccaggatgagcagggcggcggcgtgggcaccaaggaccacggcggcggcggcggcggcggcaaggaccagcagcagcagcagcaggaggcccccctgggccctggccccaagttctgcaaggccggccccctgcaccactaccccagccccagccctgagagcagcaaccccagcgctgctgctgggggcagcagcgccaagcccagcacagacttccacaacctggcccgggagctggagaacagcagaggaggcagcagctgcagccctgcccagagcctgagcagcggcagcggcagcggcggcggcggcggccaccaggaggccgagctgagcccagatggcatcgccactggaggcggcaagggcaagaggaagtttcctgaggaggccgctgagggcggcggcggggccggcctggtgggcggccggggccgctttgtggagcggcccctgcctgccagcaaggaggacctggtgtgcaccccccagcagtaccgggccagcggcagctacttcggcctggaggagaatggccgcctgtttgccccacccagccctgagaccggggaggccaagaggtctgcctttgtggaggtgaagaaggccgcccgggccgccagcctgcaggaggagggcacagcagatggagctggggtggccagcgaggaccaggatgctgggggcggcggcggcagcagcaccccagctgctgccagccctgtgggcgctgagaagctgctggcccccaggcctgggggccccctgcccagccggctggagggcggcagccctgcccggggcagcgccttcacctctgtgccccagctgggcagcgctggcagcaccagcggcggcggcggcaccggggccggggctgctggaggagctgggggcggccagggcgccgccagtgatgagaggaagagcgccttcagccagcctgcccgctccttcagccagctgagccccctggtgctgggccagaagctgggcgccctggagccctgccacccagcagatggagtgggccccacccggctgtacccagctgctgctgaccccctggccgtgaagctgcagggcgctgctgacctgaatggaggctgcggcagcctgcccagcggcggcggcggcctgcccaagcagagccccttcctgtatgccacagccttctggcccaagagcagcgctgctgctgctgctgctgctgctgctgctgctgctggccccctgcagctgcagctgcccagcgccctgaccctgctgcccccatccttcaccagcctgtgcctgcctgcccagaactggtgtgccaagtgcaatgccagcttcaggatgaccagtgacctggtgtaccacatgaggagccaccacaagaaggagtatgccatggagcccctggtgaagagaagaagagaggagaagctgaagtgccccatctgcaatgaaagcttccgggagcggcaccacctgagccgccacatgaccagccacaactag

SEQ ID NO: 203271 - DNA, 1287 bp, Artificial Sequence
  derived and/or modified sequence
atggaggacaccggcatccagaggggcatctgggatggagatgccaaggctgtgcagcagtgcctgacagacatcttcacctctgtgtacaccacctgtgacatcccagaaaatgccatcttcggcccctgtgtgctgagccacaccagcctgtatgacagcatcgccttcatcgccctgaagagcacagacaagaggacagtgccctacatcttccgggtggacaccagcgctgccaacggcagcagcgagggcctgatgtggctgcggctggtgcagagcgcccgggacaaggaggagcagaacctggaggcctacatcaagaatggccagctgttctaccgcagcctgcggcgcatcgccaaggatgaggagctgctggtgtggtacggcaaggagctgacagagctgctgctgctgtgccccagccgcagccacaacaagatgaatggcagcagcccctacacctgcctggagtgcagccagcgcttccagtttgagttcccctacgtggcccacctgcgcttccgctgccccaagaggctgcacagcgctgacatcagcccccaggatgagcagggcggcggcgtgggcaccaaggaccacggcggcggcggcggcggcggcaaggaccagcagcagcagcagcaggaggcccccctgggccctggccccaagttctgcaaggccggccccctgcaccactaccccagccccagccctgagagcagcaaccccagcgctgctgctgggggcagcagcgccaagcccagcacagacttccacaacctggcccgggagctggagaacagcagaggaggcagcagctgcagccctgcccagagcctgagcagcggcagcggcagcggcggcggcggcggccaccaggaggccgagctgagcccagatggcatcgccactggaggcggcaagggcaagaggaagtttcctgaggaggccgctgagggcggcggcggggccggcctggtgggcggccggggccgctttgtggagcggcccctgcctgccagcaaggaggacctggtgtgcaccccccagcagtaccgggccagcggcagctacttcggcctggaggagaatggccgcctgtttgccccacccagccctgagaccggggaggccaagaggtctgcctttgtggaggtgaagaaggccgcccgggccgccagcctgcaggaggagggcacagcagatggagctggggtggccagcgaggaccaggatgctgggggcggcggcggcagcagcaccccagctgctgcctag

SEQ ID NO: 203272 - DNA, 2070 bp, Artificial Sequence
  derived and/or modified sequence
atggaggacaccggcatccagcggggcatctgggacggcgacgccaaggcagtgcagcagtgcctaactgacatcttcacgagcgtgtacactacatgtgacattccagagaacgcaatctttggcccatgcgttctgtcccacacctcgctgtatgactcaatcgccttcatcgccctaaaatctactgacaaacggaccgtgccctacatctttcgggtggacaccagtgcagcaaacggcagttccgagggcctcatgtggttgcgccttgttcaaagtgctcgcgataaagaggaacagaatctggaggcttatatcaagaatggccagttgttttacaggtcgttgaggcggatcgctaaggacgaggaattgctcgtttggtacgggaaggaactgaccgagcttttgctcctgtgcccctcgaggtcgcataacaagatgaatggaagcagtccatatacttgcctggagtgctcccagcgctttcagttcgaattcccctacgtcgctcatctgcgtttcagatgtccaaagcgcctccactcggccgacatttcgccacaggatgagcaagggggaggggttgggacaaaggatcatggaggcggcggcggcggtggaaaggatcaacaacaacagcagcaggaggccccactgggcccgggtcccaaattttgcaaggctggcccgcttcaccattaccctagcccatctcccgagtcgtctaacccttcggccgccgcaggtgggtcgagcgctaaaccaagcacggactttcataacctagcccgggagctagaaaactcaagaggaggcagcagctgtagccccgctcagtcactatccagtggatccgggagtggaggtgggggagggcaccaggaggctgaactctcacccgatggcattgccactggcggcggcaaggggaaacgaaagtttcccgaggaagcagctgaaggaggtggcggcgccggacttgtcggtggacgtggcaggttcgttgagcgaccgctccctgcgagtaaggaagacctggtgtgcactccacaacaatacagagcttccggctcctacttcggactcgaagaaaacggcagactattcgcccccccttcacctgagaccggagaggctaaaaggtctgcgttcgtggaggtgaaaaaggcagctcgggcagcttcgctccaggaggaaggaacagctgacggcgctggggtcgcttcagaagaccaagatgccggaggcggcgggggctcgtcaacccctgccgctgcttcaccagtgggggcggaaaagctgctggctcccaggccaggcggaccccttccttcccgtcttgaaggcgggtctccagcaagaggaagcgcttttacttcggtgccacagctggggagcgcgggcagcacaagtggggggggagggaccggggctggggccgccggaggcgccggagggggccagggtgctgccagcgatgagcgtaagtccgcattctctcagccggcacgatccttctcacaactttctccactggtgctcggccaaaagctgggcgccctggagccctgccacccagcagacggtgtcgggccaacgcgcttatatcccgcggctgccgatcccttggcggttaagcttcagggggcagcagacctcaatgggggttgcggcagcctaccgtcagggggcgggggattgcctaagcagagcccctttctctatgcgactgctttctggcctaagtcaagcgctgcagccgccgccgccgccgcggcagcagccgccggcccactacagctacaactcccatccgctttaaccttgctacctccaagttttacctcgctgtgcttgcctgcccaaaattggtgcgccaaatgcaacgcctcttttcgcatgacttcagacttggtctaccacatgaggtcccaccataaaaaggaatatgctatggaacctctcgtgaagcggcgtagggaggagaaattgaaatgccctatatgcaacgagtcatttcgagagcgtcatcacctctcaaggcacatgacttcccataactag

SEQ ID NO: 203273 - DNA, 2070 bp, Artificial Sequence
  derived and/or modified sequence
atggaggacaccggcatccagcggggcatctgggacggcgacgccaaggctgtgcagcagtgtctgaccgacatctttacatccgtgtatacaacatgtgacattcccgaaaatgccatcttcggtccatgcgtgttatcacacacctccctatatgacagcattgccttcattgccctgaaatcaaccgacaagaggaccgtaccatatatctttcgggtagataccagtgccgcaaatggaagcagcgaagggctcatgtggctaagactcgtgcagagcgcacgggacaaggaggagcagaatctggaagcttatatcaaaaatggccagctcttttatcgctccttgaggagaatagcgaaggacgaggaactattggtttggtacgggaaagaactgaccgaacttctgctgctatgccctagccggagccataataaaatgaacggatcatctccctatacatgcctggagtgttctcagagatttcaatttgaatttccttatgtggcacaccttagatttaggtgccccaagagattgcattccgcggatatcagtcctcaggatgagcagggaggcggcgtgggtaccaaagatcacggggggggcgggggcggaggcaaagaccagcaacagcaacagcaagaagcccccctcggcccgggccccaagttctgtaaagctggaccattgcatcattatccttcccctagtcccgagagttctaaccccagcgctgcagccgggggtagttcggctaagccatcaaccgactttcataacctggcgcgcgagctggagaactctcggggaggaagctcttgttcacctgcacagtccctgagcagtggctccggcagtgggggaggaggaggtcatcaggaggcagaattgagcccggatgggatcgcaactggaggagggaaaggtaaaaggaagttccctgaggaagccgctgagggtggcggcggtgctggactggtaggcgggaggggccgctttgtggaaaggcccctgccagcttctaaagaagatctggtttgcactccccagcaatatcgtgctagtgggtcttacttcggacttgaggagaacggcagactcttcgcacccccctcccctgagacaggggaagccaagcggagtgcatttgtagaggtcaagaaggctgcccgcgctgcctctctgcaggaggagggtaccgctgatggagctggggtcgcttctgaggaccaggacgcggggggtggcggcggatctagcaccccagctgccgccagtccggtcggagcagagaaattgctggcgccgagacctggcggacctctcccctccagacttgaaggaggaagtcccgcaaggggttccgcgtttacatctgtgcctcagttaggcagtgctggaagcacttccggcggaggcggaacaggtgcaggggcggccggaggtgcaggcggcggccagggagccgcctctgatgagcgaaaaagtgcattttcccagcctgctaggtcctttagtcagctgagccctctcgtcctcggccagaaactgggcgccctcgaaccgtgccacccagccgacggtgtgggccctaccaggctctaccctgctgccgccgaccctcttgcagtgaagcttcagggagccgccgacctgaacggcggttgtggctctctccccagcggtggcggcggactgccaaaacagtctcctttcttgtacgcaactgcattctggcctaaatcttccgccgccgccgcagccgccgcagctgcagccgctgcggggccgctacagcttcagctgccaagcgcgcttacgcttctgcccccaagttttacctcactgtgcttgcccgcgcagaactggtgcgcaaagtgtaatgccagcttccgaatgactagcgacctcgtgtatcacatgaggagccatcacaagaaggaatacgccatggaaccgctggtaaaacgcaggcgggaggaaaaattgaagtgtcccatatgtaacgagagctttcgggagagacatcatctctccaggcatatgacgagccacaattag

SEQ ID NO: 203274 - DNA, 2070 bp, Artificial Sequence
  derived and/or modified sequence
atggaggacaccggcatccagcggggcatctgggacggcgacgccaaagccgtgcagcagtgtctgacagacatctttaccagtgtatatactacatgtgacatcccagagaatgctattttcggcccttgcgtgctctctcacacctcgctgtatgacagcatcgcatttatcgcgctgaagtccaccgacaagcgaaccgtcccctacatattccgagtggataccagtgccgcgaacggatctagcgaggggctcatgtggcttaggctggtacagtccgctagagacaaggaagaacagaatctcgaggcttatatcaaaaacggtcaactgttttaccgctccctgcggcggatcgctaaggacgaggaactgctggtgtggtatggaaaggaactgacggaacttcttttgctctgcccaagccgatctcacaacaagatgaatggctcttcaccttatacatgcttggaatgttctcagcggttccagtttgaatttccatatgtggcacacctgcggttccgatgtcccaaaaggctccattcagcagacatatctccacaggacgagcagggtggcggggtcggcaccaaggaccacgggggagggggcgggggagggaaggaccaacaacagcaacaacaggaggctccactggggccaggacctaaattctgtaaggcagggccactccaccactacccctcaccctcgcccgagagtagcaatcctagtgcagcagctggcggatcctcagccaaaccatccaccgacttccacaatctggcccgcgaactggagaacagcagaggtggctccagctgttctccggcccagagcctgagctctggaagcggatccggggggggagggggccaccaggaggcagaactgagtcccgatggaattgccaccggcgggggtaaggggaagcgcaagtttccagaagaagctgctgagggagggggcggtgccggtctggtaggagggcggggcagattcgttgagagacccctccccgcaagcaaagaagatctggtgtgcactccacaacaataccgggccagtggctcatacttcggcttggaagaaaatggaagattgtttgcgcctccttcacccgagaccggagaggctaagaggagcgctttcgtggaggtgaagaaggctgctcgcgccgcatcgctgcaagaggagggcactgccgacggtgccggtgtggctagtgaggatcaagacgccggaggaggaggaggttcatcaactccggcagcagctagcccagtcggcgcagagaagcttttggccccaagacctggtgggcccctgccctccaggttggaaggcgggagtcctgcccgcggaagtgccttcacttctgttcctcagctaggctctgccggctcaaccagtgggggtggcgggacgggcgctggcgccgcaggcggcgctggaggcggtcagggcgccgcgtcagacgaaagaaagagcgcatttagccagcctgctaggtccttctctcaactctccccactggtgttaggccagaagctaggcgcactggagccttgtcacccggctgatggcgtgggaccaacccggctgtacccggctgcagcagaccccttagctgtgaaactacagggcgccgctgacctcaacggaggatgtgggagtttacccagcggcggaggaggactgccaaagcaatctcctttcctgtacgcgacagcgttttggcccaaaagctctgcggccgctgcagcagctgcagcagcagctgcagcaggcccactgcagctccagctcccatccgcccttactctgctcccaccctcctttacaagcttgtgtctgccggcccaaaactggtgtgctaagtgcaatgcgagttttcgtatgaccagtgatttggtataccacatgcgctcccaccacaagaaggagtatgccatggagcccctagtcaaaaggcgcagggaagagaagctgaagtgtcctatttgtaacgagtccttcagggaacggcaccacctaagcagacacatgaccagccacaattag

SEQ ID NO: 203275 - DNA, 1287 bp, Artificial Sequence
  derived and/or modified sequence
atggaggacaccggcatccagcggggcatctgggacggcgacgccaaagctgtgcagcagtgtctgacagacatcttcacctctgtgtatacaacatgcgacatcccagaaaacgctatttttggtccttgcgtgctgagtcatacgagtctgtacgatagtatagcgttcatcgccctcaagagcaccgacaaacgcacagtgccttatatctttagggtcgacacatcagcagctaacggctcgtccgaaggcctgatgtggttgcggctcgtgcaatctgcgcgggataaagaggagcagaacctggaagcctacatcaagaatggacagttattctacagaagtctgagacggatcgccaaagacgaggaactgttggtgtggtatggaaaggagctcactgagctcctccttttgtgccccagcaggtcccataacaaaatgaacggaagttccccttatacgtgcctggaatgttcccagaggtttcagtttgaattcccgtacgtggcacaccttagattccgctgcccaaagcggctgcattctgcggatatatcccctcaggacgaacagggaggtggtgtgggcacaaaggatcatgggggcggcggtgggggcgggaaggatcagcaacagcagcagcaggaagccccattaggcccgggccctaagttctgtaaggctggaccattgcatcattatccttcaccatcaccggaatcctcaaacccaagcgctgcagccggcggatcgagcgcgaagccatccaccgactttcacaacctcgctagggaactggagaatagcaggggaggcagcagctgctctcccgcgcagagcctgtccagtggaagcggatccggagggggtgggggtcaccaggaggcagagttgagcccagatggcatcgccactggaggcgggaaagggaaacgtaaattccccgaagaagccgcggagggggggggtggtgctgggctcgtcgggggcagaggtaggttcgtagaaaggcccctgcccgcttcaaaagaggacctggtctgtacaccacagcaatacagggccagcggtagctactttggtctggaagagaacggccggctttttgctccgccttcacccgaaacaggagaggcaaagcgttccgctttcgtcgaggtgaaaaaagctgccagagctgcaagtcttcaggaagaagggacggccgatggggctggagtggcctctgaagaccaagatgcaggaggtggcggagggagctccacaccagctgcagcttag

SEQ ID NO: 203276 - DNA, 2070 bp, Artificial Sequence
  derived and/or modified sequence
atggaggatacaggaattcagcgcggtatctgggacggggacgctaaagctgtgcaacagtgtctaacagacatctttaccagcgtgtacaccacctgtgatatcccagaaaacgcaatatttggaccttgcgttctgagccacaccagcttatatgacagcattgcgttcatcgcgctgaaaagtactgataagcgaaccgtcccatacatcttcagggtcgatacctcagctgccaacggtagctctgagggattgatgtggcttcggctcgtgcagagcgcccgagataaagaggagcagaacctggaggcctatatcaaaaatggacagctgttttaccggtctctgcgaagaatcgctaaggatgaggagcttctcgtgtggtatggaaaggagctgaccgagctgctgctgctctgtccttccagaagccacaacaagatgaacggtagctccccttacacatgtctggagtgttcccagaggttccagttcgagtttccatacgtggcgcatctgcggttcagatgtcccaaaaggttgcattccgctgacattagtcctcaggacgagcaaggaggcggagtcgggaccaaggatcacgggggtgggggaggaggagggaaggatcagcaacaacagcagcaggaggcgccacttggtccaggccctaagttttgcaaagcaggacctttgcaccattatccctcaccaagccctgaatcttctaacccctctgctgctgcaggcggttcttcagccaagccaagcaccgactttcacaatctggcacgagagctggaaaacagccggggagggagctcctgctcccccgcacagagcctaagttctggaagtggatccggcggaggtggaggccatcaggaggcagagctatcacccgacggcattgcaaccggcggaggtaaaggtaagcgcaaatttcccgaggaggctgccgaaggcggtggcggagccggacttgtgggtggtaggggacggtttgtcgaacggccattaccagcaagcaaagaagacttagtttgtaccccacaacagtatagggcctcaggctcctacttcggcctcgaggaaaacggacggctcttcgcgccaccctcacccgaaaccggagaggccaagcgctctgcttttgtagaagttaaaaaggctgctagggctgcaagtttgcaggaggaaggaacagcagacggcgcaggggtcgcctccgaagaccaggacgccggaggaggcggaggcagcagtactcctgcggctgcttcgcctgtgggagcagagaaacttctagcccctagaccgggtggtccactcccatctcggctcgaaggaggtagtcccgctaggggttccgcctttacctcagtgccacagctgggcagcgccggaagtaccagcggcggaggtggaactggggctggtgcagctggtggcgcaggcggtggacagggtgccgctagcgatgagcgaaaatctgcattctcccagcctgcacggagctttagtcaactatctcctctcgtactcggtcagaagctgggcgcactggagccgtgtcatcctgccgatggcgtggggcctacgaggttatatccagccgctgcagatcccttagcagttaagttacaaggagccgcagatctgaacggaggttgcgggagcctaccctccggtgggggaggtcttccaaaacagtcgccattcctctatgctaccgccttttggccaaaatcgtcggccgcagctgcagccgctgccgcagcggcagccgctggccctttgcagctgcagctgccctctgccctgacactgctgcccccttcattcacctcactttgtctgccggcacagaattggtgcgccaagtgtaacgcctcttttaggatgacgtcagatctcgtttatcacatgcgctcccaccacaagaaggagtacgcaatggagccactggtaaagcggagacgagaggaaaagctcaaatgtccaatttgcaacgagagctttcgggagcgccatcatttgagccgccacatgacctcccacaattag

SEQ ID NO: 203277 - DNA, 2070 bp, Artificial Sequence
  derived and/or modified sequence
atggaggacaccggaattcagcgcggaatatgggatggggacgccaaagcagtacagcaatgcctcactgatattttcacctctgtatacactacatgtgacatcccagaaaatgccatcttcgggccatgcgtgttgagccatacatccctgtatgattctatcgcgttcatcgctctgaagagcacggataagcgcactgttccctacatattcagggtggacacaagtgcagccaatggatctagcgaggggctgatgtggcttagactggtccagtctgctagggataaggaagaacagaatctggaggcatatatcaagaacggccagttgttctaccgtagtcttagaaggattgcaaaggacgaagagctacttgtgtggtacggcaaggagctgacagagctacttctcctgtgcccctcgaggtctcataacaagatgaacggatctagcccatacacgtgcctggagtgttctcagcggtttcagttcgaatttccttacgttgcccatttgaggttcaggtgccctaaaagactccactctgcagacatttcacctcaagatgaacaggggggtggggtgggcaccaaagatcatgggggaggcggaggtggcggtaaagatcagcagcagcagcagcaggaggccccactgggacccggtcccaagttttgcaaagctggcccactacatcattatccatctccctcccctgaatcgagcaatccttcagctgctgcagggggatcgagtgccaagccatctacagatttccacaatcttgcacgcgagctggagaacagcagaggcggaagctcttgttctcccgctcagagcctgagttccgggtccggatctggcggaggcggtggacatcaggaagccgagctaagccccgacggcattgctacaggcggaggaaagggtaaaaggaaattccccgaggaggccgcagaaggtggtggcggtgccggactggttgggggaagaggccgattcgtggaaaggccgttaccagctagtaaggaggacctcgtttgcacacctcaacaatacagagccagcggtagctattttggactggaggagaacggaaggcttttcgcacctccgagcccagaaaccggcgaggccaagcggtcagccttcgtggaggtgaagaaggcagccagagctgcgtcccttcaggaggaggggaccgctgatggagctggggtcgccagcgaggatcaggacgcaggaggaggaggaggcagctcgacccctgccgctgcatcccctgtgggagccgaaaaactattagccccaaggcccggtggccctctgccttctcgactggagggcggatcacctgctcgtgggtctgcattcacatccgtgcctcagcttggatccgctggatcgacgtcagggggtggtggtacaggggcaggggctgccggaggcgctggaggcggtcagggcgcagcatccgacgagcgtaagagcgccttctcacagccggcacgcagcttctcacagctgagtcctctcgtgctagggcaaaagctgggggctctagagccgtgccatcctgccgacggcgtgggtccaacaagactctatccggctgccgcagatcccctcgccgtgaaactgcagggagccgcagacttgaacggtgggtgcggaagccttccaagtggaggcggaggcctaccaaaacagtcacccttcttgtatgcaactgcattttggcccaagtcgtccgccgcagccgctgccgcagctgccgctgccgcagcaggtcccttgcagctgcagttaccgtccgcgcttacgctgctgccaccatctttcacttcattgtgtcttcctgcacaaaattggtgcgccaaatgtaacgcatcatttagaatgacatccgacctcgtgtatcacatgcgctcccatcataagaaggaatacgcaatggagccactagtgaagagacgccgagaggaaaaactcaaatgtccaatttgcaacgagagcttccgagaaaggcaccacctgtctaggcacatgaccagccataattag

SEQ ID NO: 203278 - DNA, 2070 bp, Artificial Sequence
  derived and/or modified sequence
atggaagacacaggcatccaacgtgggatatgggacggagacgcgaaagccgtccaacaatgtctgactgatatcttcacttccgtgtacacaacttgcgacatccccgaaaatgcaatatttggcccttgcgttctgagtcatacgagtctctatgattctattgcattcattgccttgaagtctaccgacaaaaggaccgtgccttacatcttccgagtcgatactagcgcagctaatgggtcatcagagggccttatgtggctcaggctcgtacagagcgccagagacaaggaggagcaaaatttggaggcctatatcaagaacggccaactgttttatagatctctgcgccgtattgctaaagatgaagagttgctggtgtggtatggtaaagaacttactgagctgttgttgctgtgccccagcagaagccacaacaagatgaacgggtcgtcgccctacacatgcctggaatgctcccagagattccagtttgagttcccctacgtggcccatctgagatttagatgccctaaacgcctgcatagtgctgatatttcaccacaggacgaacaggggggaggcgtcggtacaaaagaccacggtggtgggggaggcggaggtaaggatcaacaacagcaacagcaggaggctcctctagggcctgggcctaagttctgtaaagccggaccgttgcatcactacccttccccctcccctgaatccagcaacccaagcgctgcggcaggaggatcttccgccaagcccagcactgactttcacaacttggctcgtgaattggagaattctcgagggggttcctcttgtagtccagcccagagcctaagcagcggctctgggagcggcggaggtggcggtcatcaggaggctgaattatccccagacggcattgccactggtggaggaaagggaaaacgcaagtttcccgaagaagccgcagagggcggtggaggggcagggctcgttggcggacgaggtagattcgtggaacgccctctgccggctagcaaggaggacctcgtgtgtacaccccagcagtaccgggcaagcggcagttattttggtctggaggagaacggcagactatttgccccaccaagtcccgaaaccggcgaggctaagaggagcgcttttgtagaagtaaaaaaagccgctagagcggcatctctgcaagaagagggcaccgctgatggagctggtgttgccagcgaagaccaagacgccggtgggggtggaggaagttccaccccggcagccgcaagccctgtgggggcagagaagctgctggcaccacgcccagggggtccgctcccttccagactggagggcggtagtccggcaagaggatccgcattcaccagcgttcctcaacttgggagtgccggatccacgtcaggtggcggtggtaccggcgcaggcgctgcgggtggtgccggagggggtcagggggcagcaagcgacgaacggaaaagcgcatttagtcagccggctcgatccttctcacagctgagtccgcttgtccttgggcaaaaactaggagccctggagccctgtcatcccgctgatggcgttgggcctacaaggctatatccagccgctgcagatccactcgccgtgaaactgcagggggcagctgaccttaatggaggctgtggaagcctgcccagcggaggtgggggactgccaaagcagagtccgttcctttatgctacggctttctggccaaagtcgtctgccgctgccgctgccgctgcagccgctgccgcagccggacccctgcagctacagctgccaagtgccttgacccttttgccaccctccttcactagtctctgtctgccagcccagaactggtgcgccaagtgtaatgccagctttagaatgacatctgacctcgtgtatcacatgagatcccaccataagaaggagtatgctatggagccgttggttaaaaggaggcgggaagagaaactcaaatgcccaatctgtaatgagtcatttagggagagacatcatttgtcccgacatatgacctctcacaattag

SEQ ID NO: 203279 - DNA, 1287 bp, Artificial Sequence
  derived and/or modified sequence
atggaagacaccggtattcaacggggtatatgggacggggacgcaaaggctgtccagcagtgtctgactgatatctttaccagcgtttataccacctgtgatattccagaaaatgcgatatttggcccttgcgtcctgtcacacacatctctttatgattcaatcgcatttatcgctctcaagtccaccgacaaaaggacggtcccttatatttttagagtcgatacttctgctgcaaatggatccagcgaagggctgatgtggttacgtttggtccagagcgcccgagataaagaagagcagaatctggaagcctatatcaaaaatggtcagttattctaccggagcctgaggcgtatcgcgaaggacgaagagttacttgtttggtacgggaaggaactgaccgagcttctgttgttgtgcccatctcggagccacaataaaatgaacggaagcagtccctacacctgtttggagtgtagtcagcgattccagtttgaatttccgtatgtggcacatctgaggttcaggtgtcctaaacgcctccacagcgctgacataagccctcaggacgaacagggtggcggagtcggcacaaaagaccacggtgggggaggaggcggtggcaaggatcagcagcagcagcagcaggaggccccactgggtcctggcccaaagttctgcaaggctgggccacttcaccactaccccagtcccagccctgaatcttccaaccccagtgccgctgccggaggctcatccgccaaaccttcaacagattttcataaccttgccagagagcttgagaactccagagggggaagcagttgttctcctgctcagtctttaagcagcggttcaggaagcggagggggaggaggtcatcaagaggccgagctgagccccgacggaatagcgaccggtggcggtaaagggaaaaggaagttccctgaggaagccgctgagggtggcggtggagccggtctggtgggcggtcgtggcagattcgtggaacgtcccctgccagcgagcaaagaagacctggtctgcactccccagcagtaccgggcatcaggcagctattttggtttggaggagaatgggaggttgttcgcacctccctcccccgaaaccggggaggccaaaaggagcgctttcgtcgaggtcaagaaggcagcacgcgcagcctcgctgcaagaggaaggcaccgctgatggagctggtgtggcctctgaggaccaagatgctggcggtggtggcggatcaagtacaccggcagcggcttag

SEQ ID NO: 203280 - DNA, 2070 bp, Artificial Sequence
  derived and/or modified sequence
atggaggacaccggcatccagagaggcatctgggacggcgacgccaaggccgtgcagcagtgcctgaccgacatcttcaccagcgtgtacaccacctgcgacatccccgagaacgccatcttcggcccctgcgtgctgagccacaccagcctgtacgacagcatcgccttcatcgccctgaagagcaccgacaagagaaccgtgccctacatcttcagagtggacaccagcgccgccaacggcagcagcgagggcctgatgtggctgagactggtgcagagcgccagagacaaggaggagcagaacctggaggcctacatcaagaacggccagctgttctacagaagcctgagaagaatcgccaaggacgaggagctgctggtgtggtacggcaaggagctgaccgagctgctgctgctgtgccccagcagaagccacaacaagatgaacggcagcagcccctacacctgcctggagtgcagccagagattccagttcgagttcccctacgtggcccacctgagattcagatgccccaagagactgcacagcgccgacatcagcccccaggacgagcagggcggcggcgtgggcaccaaggaccacggcggcggcggcggcggcggcaaggaccagcagcagcagcagcaggaggcccccctgggccccggccccaagttctgcaaggccggccccctgcaccactaccccagccccagccccgagagcagcaaccccagcgccgccgccggcggcagcagcgccaagcccagcaccgacttccacaacctggccagagagctggagaacagcagaggcggcagcagctgcagccccgcccagagcctgagcagcggcagcggcagcggcggcggcggcggccaccaggaggccgagctgagccccgacggcatcgccaccggcggcggcaagggcaagagaaagttccccgaggaggccgccgagggcggcggcggcgccggcctggtgggcggcagaggcagattcgtggagagacccctgcccgccagcaaggaggacctggtgtgcaccccccagcagtacagagccagcggcagctacttcggcctggaggagaacggcagactgttcgccccccccagccccgagaccggcgaggccaagagaagcgccttcgtggaggtgaagaaggccgccagagccgccagcctgcaggaggagggcaccgccgacggcgccggcgtggccagcgaggaccaggacgccggcggcggcggcggcagcagcacccccgccgccgccagccccgtgggcgccgagaagctgctggcccccagacccggcggccccctgcccagcagactggagggcggcagccccgccagaggcagcgccttcaccagcgtgccccagctgggcagcgccggcagcaccagcggcggcggcggcaccggcgccggcgccgccggcggcgccggcggcggccagggcgccgccagcgacgagagaaagagcgccttcagccagcccgccagaagcttcagccagctgagccccctggtgctgggccagaagctgggcgccctggagccctgccaccccgccgacggcgtgggccccaccagactgtaccccgccgccgccgaccccctggccgtgaagctgcagggcgccgccgacctgaacggcggctgcggcagcctgcccagcggcggcggcggcctgcccaagcagagccccttcctgtacgccaccgccttctggcccaagagcagcgccgccgccgccgccgccgccgccgccgccgccgccggccccctgcagctgcagctgcccagcgccctgaccctgctgccccccagcttcaccagcctgtgcctgcccgcccagaactggtgcgccaagtgcaacgccagcttcagaatgaccagcgacctggtgtaccacatgagaagccaccacaagaaggagtacgccatggagcccctggtgaagagaagaagagaggagaagctgaagtgccccatctgcaacgagagcttcagagagagacaccacctgagcagacacatgaccagccacaactag

SEQ ID NO: 203281 - DNA, 1287 bp, Artificial Sequence
  derived and/or modified sequence
atggaggacaccggcatccagagaggcatctgggacggcgacgccaaggccgtgcagcagtgcctgaccgacatcttcaccagcgtgtacaccacctgcgacatccccgagaacgccatcttcggcccctgcgtgctgagccacaccagcctgtacgacagcatcgccttcatcgccctgaagagcaccgacaagagaaccgtgccctacatcttcagagtggacaccagcgccgccaacggcagcagcgagggcctgatgtggctgagactggtgcagagcgccagagacaaggaggagcagaacctggaggcctacatcaagaacggccagctgttctacagaagcctgagaagaatcgccaaggacgaggagctgctggtgtggtacggcaaggagctgaccgagctgctgctgctgtgccccagcagaagccacaacaagatgaacggcagcagcccctacacctgcctggagtgcagccagagattccagttcgagttcccctacgtggcccacctgagattcagatgccccaagagactgcacagcgccgacatcagcccccaggacgagcagggcggcggcgtgggcaccaaggaccacggcggcggcggcggcggcggcaaggaccagcagcagcagcagcaggaggcccccctgggccccggccccaagttctgcaaggccggccccctgcaccactaccccagccccagccccgagagcagcaaccccagcgccgccgccggcggcagcagcgccaagcccagcaccgacttccacaacctggccagagagctggagaacagcagaggcggcagcagctgcagccccgcccagagcctgagcagcggcagcggcagcggcggcggcggcggccaccaggaggccgagctgagccccgacggcatcgccaccggcggcggcaagggcaagagaaagttccccgaggaggccgccgagggcggcggcggcgccggcctggtgggcggcagaggcagattcgtggagagacccctgcccgccagcaaggaggacctggtgtgcaccccccagcagtacagagccagcggcagctacttcggcctggaggagaacggcagactgttcgccccccccagccccgagaccggcgaggccaagagaagcgccttcgtggaggtgaagaaggccgccagagccgccagcctgcaggaggagggcaccgccgacggcgccggcgtggccagcgaggaccaggacgccggcggcggcggcggcagcagcacccccgccgccgcctag

SEQ ID NO: 203282 - protein, 408 aa, Artificial Sequence
  derived and/or modified sequence
MCQNFFIDSCAAHGPPTFVKDSAVDKGHPNRSALSLPPGLRIGPSGIPQAGLGVWNEASDLPLGLHFGPYEGRITEDEEAANNGYSWLITKGRNCYEYVDGKDKSWANWMRYVNCARDDEEQNLVAFQYHRQIFYRTCRVIRPGCELLVWYGDEYGQELGIKWGSKWKKELMAGREPKPEIHPCPSCCLAFSSQKFLSQHVERNHSSQNFPGPSARKLLQPENPCPGDQNQEQQYPDPHSRNDKTKGQEIKERSKLLNKRTWQREISRAFSSPPKGQMGSCRVGKRIMEEESRTGQKVNPGNTGKLFVGVGISRIAKVKYGECGQGFSVKSDVITHQRTHTGEKPYVCRECGRGFSWQSVLLTHQRTHTGEKPYVCRECGRGFSRQSVLLTHQRTHTGEKPYVCREDE

SEQ ID NO: 203283 - protein, 894 aa, Artificial Sequence
  derived and/or modified sequence
MSPEKSQEESPEEDTERTERKPMVKDAFKDISIYFTKEEWAEMGDWEKTRYRNVKRNYNALITIGLRATRPAFMCHRRQAIKLQVDDTEDSDEEWTPRQQVKPPWMALRVEQRKHQKGMPKASFSNESSLKELSRTANLLNASGSEQAQKPVSPSGEASTSGQHSRLKLELRKKETERKMYSLRERKGHAYKEVSEPQDDDYLYCEMCQNFFIDSCAAHGPPTFVKDSAVDKGHPNRSALSLPPGLRIGPSGIPQAGLGVWNEASDLPLGLHFGPYEGRITEDEEAANNGYSWLITKGRNCYEYVDGKDKSWANWMRYVNCARDDEEQNLVAFQYHRQIFYRTCRVIRPGCELLVWYGDEYGQELGIKWGSKWKKELMAGREPKPEIHPCPSCCLAFSSQKFLSQHVERNHSSQNFPGPSARKLLQPENPCPGDQNQEQQYPDPHSRNDKTKGQEIKERSKLLNKRTWQREISRAFSSPPKGQMGSCRVGKRIMEEESRTGQKVNPGNTGKLFVGVGISRIAKVKYGECGQGFSVKSDVITHQRTHTGEKLYVCRECGRGFSWKSHLLIHQRIHTGEKPYVCRECGRGFSWQSVLLTHQRTHTGEKPYVCRECGRGFSRQSVLLTHQRRHTGEKPYVCRECGRGFSRQSVLLTHQRRHTGEKPYVCRECGRGFSWQSVLLTHQRTHTGEKPYVCRECGRGFSWQSVLLTHQRTHTGEKPYVCRECGRGFSNKSHLLRHQRTHTGEKPYVCRECGRGFRDKSHLLRHQRTHTGEKPYVCRECGRGFRDKSNLLSHQRTHTGEKPYVCRECGRGFSNKSHLLRHQRTHTGEKPYVCRECGRGFRNKSHLLRHQRTHTGEKPYVCRECGRGFSDRSSLCYHQRTHTGEKPYVCREDE

SEQ ID NO: 203284 - protein, 100 aa, Artificial Sequence
  derived and/or modified sequence
MSPEKSQEESPEEDTERTERKPMVKDAFKDISIYFTKEEWAEMGDWEKTRYRNVKRNYNALITIGLRATRPAFMCHRRQAIKLQVDDTEDSDEEWTPRQQ

SEQ ID NO: 203285 - DNA, 1227 bp, Artificial Sequence
  derived and/or modified sequence
atgtgtcagaatttcttcattgatagctgcgcagcccacggccctccaacttttgtaaaagattcagccgtcgacaagggccatcccaaccgttccgccctgtctttaccccccggtctccgtataggaccctccgggattcctcaagctgggctgggcgtctggaacgaggctagtgatttgcccttaggccttcacttcggaccctatgaaggccggattactgaagacgaagaagccgctaataatggctactcctggctgatcaccaagggtagaaattgctacgagtatgttgacggcaaggacaaatcatgggccaattggatgaggtacgtgaactgcgctagggacgatgaagagcagaaccttgtggcgttccagtatcaccgtcagatcttttatcgcacatgtagagttataagacctggctgcgagcttctggtgtggtatggagacgagtacggccaggaactcggcataaagtggggtagcaagtggaagaaagagctcatggccgggagggaacctaaacctgagattcacccgtgcccctcttgctgcttagctttttctagccagaaattcctaagtcagcacgtcgaaagaaatcatagctcccaaaattttcctggaccctcagcccggaaactgctgcagcccgaaaatccctgccccggcgatcaaaatcaagaacagcaatatcctgatccccactcccggaatgacaagactaaaggtcaggaaattaaagaaaggtctaaactcttgaacaaaagaacctggcaaagagagatttcgagggccttttctagtccacctaaggggcaaatgggctcttgccgcgtagggaagaggatcatggaggaggagtcaagaacaggacaaaaggttaaccctggtaacactggtaaacttttcgtgggcgtcggcatctcaagaatcgcaaaagttaaatacggagagtgcgggcaaggcttttcggttaagtctgacgtaattactcaccaacgaacccacacaggagaaaagccttacgtgtgccgcgagtgtggccgaggtttcagctggcagagcgtactattgactcaccaaaggacacacaccggagagaagccgtacgtatgtcgcgaatgtggccgcgggtttagccggcagtcagttttgctcactcaccagaggacacacaccggtgagaaaccctacgtgtgccgggaagacgaatag

SEQ ID NO: 203286 - DNA, 2685 bp, Artificial Sequence
  derived and/or modified sequence
atgtcgcctgaaaagtcacaggaagaatctccggaagaggacacagagcggaccgaacggaaacctatggtaaaggatgcgttcaaggatatatcaatttatttcacgaaagaagagtgggctgagatgggcgactgggaaaagacacgatatagaaatgtcaaaaggaactataatgccctcataacaatcggtctgagggctactaggccagcgttcatgtgccaccgtcgacaagcgatcaaactgcaagtggatgacaccgaagacagcgatgaagagtggacaccccgacaacaggtcaaacctccttggatggcactgcgagtcgagcaaaggaaacaccagaagggaatgcccaaagcgtctttttccaacgaatcgtcattgaaagagttgagcagaacggccaatctcctcaatgcctcgggttctgagcaagcccagaaacctgttagcccaagtggcgaagccagcacctcaggccagcattccaggctgaaactggagctgcgaaagaaagagacagagagaaagatgtatagtctgagggaaagaaaagggcatgcctacaaggaagtgagcgaaccacaggatgacgattacctttattgtgagatgtgccaaaatttcttcattgacagttgtgctgcccatggccccccaaccttcgttaaggattccgctgtagataagggacatcctaatcgctctgcactgagcctgccccctggcttaagaatcggaccttcaggcatcccccaggccggactaggagtatggaacgaagcctccgatcttcccttgggtctccattttggcccctatgaagggcgcattactgaagatgaggaagctgccaacaatggctactcttggctcatcactaaaggtagaaactgttatgaatacgtcgacgggaaagataagtcctgggccaattggatgaggtacgtaaactgcgcaagggacgatgaggagcagaacctggtagcttttcagtaccatcggcagatcttttatagaacctgcagggtgattcgccctggatgcgagcttctcgtgtggtatggcgatgagtatggacaggaactggggattaaatggggatccaaatggaaaaaagagttgatggctgggcgagagcctaaacccgaaattcacccatgtcccagctgttgtctcgctttttcttcacaaaagtttcttagccagcacgttgaacgcaaccactcgtcccaaaactttcccggccctagtgcgcgaaaactgcttcagccagagaatccatgtccaggtgatcaaaaccaagagcagcaataccccgaccctcacagccgaaatgacaagactaaaggacaagaaattaaagaaaggagtaaactgttaaataagcgaacctggcaacgagagataagtcgggcattcagtagcccccctaaaggtcagatgggtagctgcagggttggtaaacgaatcatggaggaggaatcaaggaccggccaaaaggtcaacccaggcaataccggcaaactcttcgttggcgtaggtataagtcgcatcgcgaaagttaagtacggcgagtgtgggcagggattctctgtgaaaagcgacgtcattacccaccaacgcacgcacacaggtgagaagctctacgtctgcagggagtgtggacgcggattttcttggaagtcccatcttttgatccatcagaggattcacaccggtgagaagccttacgtttgcagagaatgtggccgcggctttagttggcagtcagtgctcctaacacatcagaggacccataccggggaaaagccttatgtctgtcgggagtgcggccgcgggtttagtcggcagagtgtcctcttgacccaccagcggcggcatacaggggaaaagccatatgtgtgccgcgagtgcggccgcgggttctcccgtcagagcgtattacttactcaccagcgtcgccatactggcgagaagccatatgtgtgcagggagtgcggtcgtgggttcagttggcagagcgtcctccttacccaccagcgcacacataccggtgaaaagccctacgtctgccgcgagtgtggtcggggtttttcctggcagtcggtgctgttgacacaccagcggacacatactggcgagaagccctatgtttgcagagagtgcggccgaggtttcagtaacaaatcacatctcttgcgacatcagaggacccacacaggagagaagccatatgtgtgtcgggaatgtgggcgagggtttagggacaagtcccatctattacgccatcagagaacgcacactggggagaagccctacgtctgccgcgagtgcggtcgcggttttagggacaagtctaatcttctatcacaccagcgaacacataccggtgaaaaaccatacgtgtgtagagaatgtggacggggtttttccaataaatcccacttactcaggcatcagcggacacacaccggagaaaagccttacgtgtgccgggaatgtggacggggcttccgcaataagtcccacttgctcagacatcagagaacccacaccggagaaaagccttatgtttgccgggaatgtgggagaggtttctcagatcggtcctcgctctgttaccaccagcgtactcacacaggtgaaaagccttacgtgtgtcgtgaagatgagtag

SEQ ID NO: 203287 - DNA, 1227 bp, Artificial Sequence
  derived and/or modified sequence
atgtgccagaacttcttcatcgacagctgtgccgcccacggcccccccacctttgtgaaggacagcgctgtggacaagggccaccccaacagaagtgccctgagcctgcccccaggcctgcgcatcggccccagcggcatcccccaggccggcctgggcgtgtggaatgaggccagtgacctgcccctgggcctgcacttcggcccctatgagggccgcatcacagaagatgaggaggccgccaacaacggctacagctggctgatcaccaagggcaggaactgctatgaatatgtggatggcaaggacaagtcctgggccaactggatgagatatgtgaactgtgccagagatgatgaggagcagaacctggtggccttccagtaccaccggcagatcttctaccgcacctgcagggtcatccggcccggctgtgagctgctggtgtggtatggagatgaatatggccaggagctgggcatcaagtggggcagcaagtggaagaaggagctgatggccggccgggagcccaagccagagatccacccctgccccagctgctgcctggccttcagcagccagaagttcctgagccagcacgtggagaggaaccacagcagccagaacttccctggccccagcgccaggaagctgctgcagcctgagaacccctgccctggggaccagaaccaggagcagcagtacccagacccccacagcagaaatgacaagaccaagggccaggagatcaaggagaggagcaagctgctgaacaagaggacctggcagcgggagatcagccgggccttcagcagcccccccaagggccagatgggcagctgccgggtgggcaagaggatcatggaggaggagagcaggacaggccagaaggtgaaccctggcaacacaggcaagctgtttgtgggcgtgggcatcagcagaattgccaaggtgaagtacggggagtgtggccagggcttctctgtgaagagtgatgtgatcacccaccagaggacccacactggagagaagccctacgtgtgccgggagtgtggccggggcttctcctggcagagcgtgctgctgacccaccagaggacccacactggagagaagccctacgtgtgccgggagtgtggccggggcttcagccggcagagcgtgctgctgacccaccagaggacccacactggagagaagccctacgtgtgccgggaggatgaatag

SEQ ID NO: 203288 - DNA, 2685 bp, Artificial Sequence
  derived and/or modified sequence
atgagccctgagaagagccaggaggagagccctgaggaggacacagagaggacagagaggaagcccatggtgaaggatgccttcaaggacatcagcatctacttcaccaaggaggagtgggccgagatgggagactgggagaagacccgctacagaaatgtgaagaggaactacaatgccctgatcaccatcggcctgcgggccaccaggcctgccttcatgtgccaccggcggcaggccatcaagctgcaggtggatgacacagaagattctgatgaggagtggaccccccggcagcaggtgaagccaccctggatggccctgcgggtggagcagaggaagcaccagaagggcatgcccaaggccagcttcagcaatgaaagcagcctgaaggagctgagcaggacagccaacctgctgaatgccagcggcagcgagcaggcccagaagcctgtgagccccagcggggaggccagcaccagcggccagcacagccggctgaagctggagctgaggaagaaggagacagagaggaagatgtacagcctgcgggagaggaaaggacatgcctacaaggaggtgtctgagccccaggatgatgactacctgtactgtgagatgtgccagaacttcttcatcgacagctgtgccgcccacggcccccccacctttgtgaaggacagcgctgtggacaagggccaccccaacagaagtgccctgagcctgcccccaggcctgcgcatcggccccagcggcatcccccaggccggcctgggcgtgtggaatgaggccagtgacctgcccctgggcctgcacttcggcccctatgagggccgcatcacagaagatgaggaggccgccaacaacggctacagctggctgatcaccaagggcaggaactgctatgaatatgtggatggcaaggacaagtcctgggccaactggatgagatatgtgaactgtgccagagatgatgaggagcagaacctggtggccttccagtaccaccggcagatcttctaccgcacctgcagggtcatccggcccggctgtgagctgctggtgtggtatggagatgaatatggccaggagctgggcatcaagtggggcagcaagtggaagaaggagctgatggccggccgggagcccaagccagagatccacccctgccccagctgctgcctggccttcagcagccagaagttcctgagccagcacgtggagaggaaccacagcagccagaacttccctggccccagcgccaggaagctgctgcagcctgagaacccctgccctggggaccagaaccaggagcagcagtacccagacccccacagcagaaatgacaagaccaagggccaggagatcaaggagaggagcaagctgctgaacaagaggacctggcagcgggagatcagccgggccttcagcagcccccccaagggccagatgggcagctgccgggtgggcaagaggatcatggaggaggagagcaggacaggccagaaggtgaaccctggcaacacaggcaagctgtttgtgggcgtgggcatcagcagaattgccaaggtgaagtacggggagtgtggccagggcttctctgtgaagagtgatgtgatcacccaccagaggacccacactggagagaagctgtatgtgtgccgggagtgtggccggggcttctcctggaagagccacctgctgatccaccagaggatccacactggagagaagccctacgtgtgccgggagtgtggccggggcttctcctggcagagcgtgctgctgacccaccagaggacccacactggagagaagccctacgtgtgccgggagtgtggccggggcttcagccggcagagcgtgctgctgacccaccagaggaggcacactggagagaagccctacgtgtgccgggagtgtggccggggcttcagccggcagagcgtgctgctgacccaccagaggaggcacactggagagaagccctacgtgtgccgggagtgtggccggggcttctcctggcagagcgtgctgctgacccaccagaggacccacactggagagaagccctacgtgtgccgggagtgtggccggggcttctcctggcagagcgtgctgctgacccaccagaggacccacactggagagaagccctacgtgtgccgggagtgtggccggggcttcagcaacaagagccacctgctgcggcaccagaggacccacactggagagaagccctacgtgtgccgggagtgtggccggggcttccgggacaagagccacctgctgcggcaccagaggacccacactggagagaagccctacgtgtgccgggagtgtggccggggcttccgggacaagagcaacctgctgagccaccagaggacccacactggagagaagccctacgtgtgccgggagtgtggccggggcttcagcaacaagagccacctgctgcggcaccagaggacccacactggagagaagccctacgtgtgccgggagtgtggccggggcttcaggaacaagagccacctgctgcggcaccagaggacccacactggagagaagccctacgtgtgccgggagtgtggccggggcttcagtgacaggagcagcctgtgctaccaccagaggacccacactggagagaagccctacgtgtgccgggaggatgaatag

SEQ ID NO: 203289 - DNA, 1227 bp, Artificial Sequence
  derived and/or modified sequence
atgtgccagaacttcttcatcgacagctgcgccgcccacggcccccccacgtttgtgaaggacagcgcagtggataagggccacccaaataggagcgctttaagcctgccacctgggctaaggatcggaccaagcggaattccacaggcagggctcggcgtttggaacgaggcaagtgacctccctttagggctgcatttcgggccctatgagggccgcataacagaggatgaggaagccgcgaataatggctattcttggctaataacaaagggccggaactgctatgagtacgtcgacggcaaggacaaatcgtgggcaaactggatgaggtacgtcaattgcgctcgggatgatgaggagcaaaatctggtggcatttcaatatcaccgccagatcttttacagaacctgcagagtgattcgccccggatgcgagctcctggtgtggtacggcgatgagtatggacaggagctgggtataaaatggggttctaaatggaagaaggagttgatggcaggacgtgaacccaagccggaaatacacccctgtcccagctgctgtctggcattttctagccaaaagtttctgagccagcacgttgagcgcaatcatagcagccagaactttccaggaccttccgcgcgcaaacttctgcagccagaaaacccctgccccggcgatcagaaccaggagcaacagtacccggacccccactcccgcaatgataagaccaaagggcaggaaatcaaggagcggagtaagctactcaacaagcgaacatggcagcgggagatttctcgcgcattctcatcccctccgaaaggccaaatggggtcatgccgggtcggaaagcgtattatggaggaagaaagtagaacaggtcaaaaagttaaccctggaaacacggggaagttattcgttggggtgggcatcagtcgaatagccaaagttaaatatggtgaatgtggccaaggcttctccgtgaagagcgatgttatcacacatcagcgcactcacactggcgagaaaccctacgtctgtcgagaatgtgggaggggattttcctggcagtccgttttgctaacacaccaaaggacacatactggtgagaagccttacgtgtgcagggagtgtggacgaggcttttctaggcagtcagttctcctcacacatcagagaactcatacgggtgagaaaccgtacgtctgccgtgaggacgagtag

SEQ ID NO: 203290 - DNA, 2685 bp, Artificial Sequence
  derived and/or modified sequence
atgagccccgagaagagccaggaggagagccccgaggaggacaccgagagaaccgagcgcaagcccatggtgaaagatgccttcaaagacataagcatttacttcacaaaggaagagtgggccgagatgggtgattgggaaaaaacacgatatcgcaacgtcaagagaaactacaacgctctgatcacaatcgggctgagggccacgcgacccgccttcatgtgccatcgccgccaagctattaaactccaggtggacgataccgaggattccgatgaggagtggacgcctcggcagcaggtcaagcccccctggatggccctccgggtggaacagcgcaaacaccagaaaggaatgcctaaagctagcttctccaacgaatcttcactaaaagagttgagcaggactgctaacttactgaacgcgagcggcagcgaacaggctcagaaacccgtgtcacccagcggcgaggcaagcacttcagggcagcacagccggttgaaactggagctgcggaaaaaggagacggagaggaagatgtattcccttcgggagagaaagggccatgcgtacaaagaggtctccgagccacaggacgatgactatctgtactgtgagatgtgtcaaaatttttttatcgactcctgcgctgctcatgggccacctacctttgtgaaggattccgctgttgataaaggacacccaaatcgctctgcgctatccctgccccctggtctgcgtatcggcccgagtggaattcctcaagctggactcggggtgtggaatgaggcatccgaccttcctctgggcctgcacttcggaccatacgaaggtagaataactgaggacgaggaggccgcaaataacggctactcatggctcatcaccaagggacggaattgttacgaatatgtagacggcaaggataaatcctgggctaattggatgcggtacgtaaactgcgcacgagacgacgaggagcagaacctggttgcgtttcaataccaccggcaaatcttttaccgcacgtgccgggtcatccgaccaggatgtgaactcctggtctggtacggcgacgaatacggccaggaattaggtatcaagtgggggagcaagtggaaaaaagaattgatggccggccgtgaacccaaacctgaaattcacccttgtccttcatgctgtctcgcattctcttcccagaagtttctgtcccaacatgtagagcggaaccattcctcacagaactttccagggccatcggcacggaagctgcttcagccagaaaatccgtgccctggtgatcaaaaccaagaacagcagtatcctgatccgcattctaggaatgataagaccaaggggcaggaaatcaaagagcgttcaaagctactgaacaagaggacctggcaacgtgaaatctccagagcattcagctcgccaccaaagggtcagatggggtcttgccgggtggggaaaagaatcatggaggaggagtcacgaacaggccagaaagtgaatcccgggaacacgggaaaactgtttgttggcgtcgggattagtcgcattgccaaagtcaaatatggggaatgtgggcaggggttcagcgtaaaatccgatgtgatcacccatcagcggactcacacaggagaaaagctgtatgtctgtcgcgagtgtgggagaggcttctcttggaagtctcacctgctcatacatcaaaggattcacaccggcgagaagccttatgtgtgtcgcgagtgcggtagaggattctcttggcagagcgtcctattgacccaccagaggactcacacaggggagaaaccatacgtgtgccgcgaatgtggcaggggattctcgcgacaatctgtgttgctcacccatcaacggcggcacactggcgagaaaccatacgtgtgcagagagtgcggacgcggtttttctcggcaatccgtgctgttgacacaccagcgcaggcacaccggagagaagccttacgtatgtagagagtgcggaagaggttttagctggcagagcgttctcctgactcaccagcggacccacactggtgaaaaaccatacgtgtgcagggagtgtggcagaggattcagctggcagtcagtgttactgacccatcagaggacgcacaccggcgagaagccttacgtgtgtagagaatgtggccgcggcttcagtaataagtcccatctgctgagacaccagaggacacatacaggagaaaaaccatatgtgtgtagggagtgcggtagagggttcagagacaaaagccatctgcttagacatcaaaggacccacaccggagagaaaccctatgtgtgccgcgaatgcggcaggggatttcgagacaagtctaacctcctgtcacatcaacgcacccacaccggcgaaaagccgtacgtgtgccgtgaatgcggaagaggcttcagtaataagtcacacctactgagacaccagaggacacatactggcgagaagccttatgtatgtcgcgaatgcgggcgagggttccgcaacaagagccaccttctgagacatcagcgtacacacaccggggagaaaccgtacgtatgtcgggagtgcggaaggggtttttctgatcggagctccctgtgttaccaccagagaacacacaccggagaaaaaccatacgtctgccgcgaagacgagtag

SEQ ID NO: 203291 - DNA, 2027 bp, Artificial Sequence
  derived and/or modified sequence
ctctgagagaacgcccggccagggtgaacgccgcggcaggagagcacgggagattgtgaagagcatggggagcctttgtcgtgcagcgtgaaacccttgagcctttggcctaggagctgggagactcagggcccttctcacactcagaattggagcagggccttctagacagtcccagcaccatgagccctgaaaagtcccaagaggagagcccagaagaagacacagagagaacagagcggaagcccatggtcaaagatgccttcaaagacatttccatatacttcaccaaggaagaatgggcagagatgggagactgggagaaaactcgctataggaatgtgaaaaggaactataatgcactgattactataggtctcagagccactcgaccagctttcatgtgtcaccgaaggcaggccatcaaactccaggtggatgacacagaagattctgatgaagaatggacccctaggcagcaagtcaaacctccttggatggccttaagagtggaacagcgtaaacaccagaagggaatgcccaaggcgtcattcagtaatgaatctagtttgaaagaattgtcaagaacagcaaatttactgaatgcaagtggctcagagcaggctcagaaaccagtgtccccttctggagaagcaagtacctctggacagcactcaagactaaaactggaactcaggaagaaggagactgaaagaaagatgtatagcctgcgagaaagaaagggtcatgcatacaaagaggtcagcgagccgcaggatgatgattacctctattgtgagatgtgtcagaacttcttcattgacagctgtgctgcccatgggccccctacatttgtaaaggacagtgcagtggacaaggggcaccccaaccgttcagccctcagtctgcccccagggctgagaattgggccatcaggcatccctcaggctgggcttggagtatggaatgaggcatctgatctgccgctgggtctgcactttggcccttatgagggccgaattacagaagacgaagaggcagccaacaatggatactcctggctgatcaccaaggggagaaactgctatgagtatgtggatggaaaagataaatcctgggccaactggatgaggtatgtgaactgtgcccgggatgatgaagagcagaacctggtggccttccagtaccacaggcagatcttctatagaacctgccgagtcattaggccaggctgtgaactgctggtctggtatggggatgaatacggccaggaactgggcatcaagtggggcagcaagtggaagaaagagctcatggcagggagagaaccaaagccagagatccatccatgtccctcatgctgtctggccttttcaagtcagaaatttctcagtcaacatgtagaacgcaatcactcctctcagaacttcccaggaccatctgcaagaaaactcctccaaccagagaatccctgcccaggggatcagaatcaggagcagcaatatccagatccacacagccgtaatgacaaaaccaaaggtcaagagatcaaagaaaggtccaaactcttgaataaaaggacatggcagagggagatttcaagggccttttctagcccacccaaaggacaaatggggagctgtagagtgggaaaaagaataatggaagaagagtccagaacaggccagaaagtgaatccagggaacacaggcaaattatttgtgggggtaggaatctcaagaattgcaaaagtcaagtatggagagtgtggacaaggtttcagtgttaaatcagatgttattacacaccaaaggacacatacaggggagaagccctatgtctgcagggagtgtgggcggggctttagctggcagtcagtcctcctcactcaccagaggacacacacaggggagaagccctatgtctgcagggagtgtgggcggggctttagccggcagtcagtcctcctcactcaccagaggacacacacaggggagaagccctacgtctgcagggaggatgagtaa

SEQ ID NO: 203292 - DNA, 3691 bp, Artificial Sequence
  derived and/or modified sequence
ctctgagagaacgcccggccagggtgaacgccgcggcaggagagcacgggagattgtgaagagcatggggagcctttgtcgtgcagcgtgaaacccttgagcctttggcctaggagctgggagactcagggcccttctcacactcagaattggagcagggccttctagacagtcccagcaccatgagccctgaaaagtcccaagaggagagcccagaagaagacacagagagaacagagcggaagcccatggtcaaagatgccttcaaagacatttccatatacttcaccaaggaagaatgggcagagatgggagactgggagaaaactcgctataggaatgtgaaaaggaactataatgcactgattactataggtctcagagccactcgaccagctttcatgtgtcaccgaaggcaggccatcaaactccaggtggatgacacagaagattctgatgaagaatggacccctaggcagcaagtcaaacctccttggatggccttaagagtggaacagcgtaaacaccagaagggaatgcccaaggcgtcattcagtaatgaatctagtttgaaagaattgtcaagaacagcaaatttactgaatgcaagtggctcagagcaggctcagaaaccagtgtccccttctggagaagcaagtacctctggacagcactcaagactaaaactggaactcaggaagaaggagactgaaagaaagatgtatagcctgcgagaaagaaagggtcatgcatacaaagaggtcagcgagccgcaggatgatgattacctctattgtgagatgtgtcagaacttcttcattgacagctgtgctgcccatgggccccctacatttgtaaaggacagtgcagtggacaaggggcaccccaaccgttcagccctcagtctgcccccagggctgagaattgggccatcaggcatccctcaggctgggcttggagtatggaatgaggcatctgatctgccgctgggtctgcactttggcccttatgagggccgaattacagaagacgaagaggcagccaacaatggatactcctggctgatcaccaaggggagaaactgctatgagtatgtggatggaaaagataaatcctgggccaactggatgaggtatgtgaactgtgcccgggatgatgaagagcagaacctggtggccttccagtaccacaggcagatcttctatagaacctgccgagtcattaggccaggctgtgaactgctggtctggtatggggatgaatacggccaggaactgggcatcaagtggggcagcaagtggaagaaagagctcatggcagggagagaaccaaagccagagatccatccatgtccctcatgctgtctggccttttcaagtcagaaatttctcagtcaacatgtagaacgcaatcactcctctcagaacttcccaggaccatctgcaagaaaactcctccaaccagagaatccctgcccaggggatcagaatcaggagcagcaatatccagatccacacagccgtaatgacaaaaccaaaggtcaagagatcaaagaaaggtccaaactcttgaataaaaggacatggcagagggagatttcaagggccttttctagcccacccaaaggacaaatggggagctgtagagtgggaaaaagaataatggaagaagagtccagaacaggccagaaagtgaatccagggaacacaggcaaattatttgtgggggtaggaatctcaagaattgcaaaagtcaagtatggagagtgtggacaaggtttcagtgttaaatcagatgttattacacaccaaaggacacatacaggggagaagctctacgtctgcagggagtgtgggcggggctttagctggaagtcacacctcctcattcaccagaggatacacacaggggagaagccctatgtctgcagggagtgtgggcggggctttagctggcagtcagtcctcctcactcaccagaggacacacacaggggagaagccctatgtctgcagggagtgtgggcggggctttagccggcagtcagtcctcctcactcaccagaggagacacacaggggagaagccctatgtctgcagggagtgtgggcggggctttagccggcagtcagtcctcctcactcaccagaggagacacacaggggagaagccctatgtctgcagggagtgtgggcggggctttagctggcagtcagtcctcctcactcaccagaggacacacacaggggagaagccctatgtctgcagggagtgtgggcggggctttagctggcagtcagtcctcctcactcaccagaggacacacacaggggagaagccctatgtctgcagggagtgtgggcggggctttagcaataagtcacacctcctcagacaccagaggacacacacaggggagaagccctatgtctgcagggagtgtgggcggggctttcgcgataagtcacacctcctcagacaccagaggacacacacaggggagaagccctatgtctgcagggagtgtgggcggggctttagagataagtcaaacctcctcagtcaccagaggacacacacaggggagaagccctatgtctgcagggagtgtgggcggggctttagcaataagtcacacctcctcagacaccagaggacacacacaggggagaagccctatgtctgcagggagtgtgggcggggctttcgcaataagtcacacctcctcagacaccagaggacacacacaggggagaagccctacgtctgcagggagtgtgggcggggctttagcgataggtcaagcctctgctatcaccagaggacacacacaggggagaagccctacgtctgcagggaggatgagtaagtcattagtaataaaacctcatctcaatagccacaaaaagacaaatgtggtcaccacacacttgcacaccccagctgtgaggtggcttcagcggaagtctgctgaccccttatattccccgagagtataaagagatcggaaataactgattaaacaaatccgccactttcatgactagagatgaggaagaacaagggatagttctgtaagtgttcgggggacatcagcatgtgtggttctttcccgcactgatcccctccattttttgtttgtttttttgcctcctgttctaataaattttgtctccatacaaatctgaaccccaagtgtgtacctcattcttcccttatcactgaaggcaagaagagtccagaagggccacagagaactcatgtgttcagctcaagactccacaggaattcaacccccagaaagacataaacttggagtccgtctggtttaattattggagaatcgattcccaagtccaggaagagaaatgtaagattctagaaagtcgcagcaggaaagggagttccctggtctcctgggaagtgtggcttcttctcctaatggacacctctcctctgctgccatactctcccttggctccccagtctcctctcctgatctcctccaatctctgtagcccaagatgtgaaagccagacaagaacacgcgtgtgtgtatatatgtgttcgggtgtgggggtatgtgccctccgtgtaggtaactgtgtgagtgtggggggtttcaagggtgtgttaggaacaacgctcaaaatcctaaggaaactgaacactcgaacgaaggattcttagcaa

SEQ ID NO: 203293 - DNA, 1227 bp, Artificial Sequence
  derived and/or modified sequence
atgtgtcagaatttttttatagattcctgcgccgctcatggcccaccaacgttcgtgaaggatagtgccgttgacaaaggccaccccaacagatctgccctaagcctccccccagggctgcgtatcggcccatccgggattccacaggcaggacttggcgtctggaacgaggctagcgacctcccattaggattacactttgggccttatgagggccgtatcacggaggacgaggaagctgccaacaatggatactcgtggctgattaccaaaggacgcaattgttatgagtatgtcgacggaaaggacaaatcttgggctaattggatgcggtatgtgaactgcgccagggatgacgaggaacaaaatttggttgcatttcaatatcacagacagatcttttatagaacgtgccgagtcatccggccaggatgtgaactcctggtgtggtacggcgacgaatatggccaggaattaggaatcaagtgggggtctaagtggaagaaagaattgatggccggaagagaacccaagccagagatacacccctgtccatcgtgctgcctggctttcagttctcagaagttcctgagccagcatgtcgagcggaaccacagcagccagaattttccagggccaagcgcccgaaagttacttcagccagaaaatccttgtccaggtgaccagaatcaggaacaacagtacccagatccacattcccgtaacgacaaaaccaaaggccaggagattaaagagaggagtaaactccttaataaaaggacctggcagcgcgagatcagccgcgcttttagtagcccacctaaggggcagatggggagttgtcgggtcgggaagcgtattatggaggaagagtcgaggacaggacagaaggttaatcccggtaacaccggtaagttattcgtgggggtcggtattagtcggatcgccaaagtcaagtacggggagtgtggacagggatttagcgtcaagtcggacgtaatcactcaccaacgcactcacaccggggaaaaaccttacgtgtgccgggagtgtggcagaggcttctcttggcagtcagttcttctgacccatcagagaacccacaccggagagaagccctatgtgtgtagggaatgcggccgtgggttcagccgacagtccgtactattgacccatcagcgtacccacacgggcgagaagccatatgtttgccgagaagacgagtag

SEQ ID NO: 203294 - DNA, 2685 bp, Artificial Sequence
  derived and/or modified sequence
atgtcccccgagaagagtcaggaggaatcccccgaagaagataccgagagaacggaacggaagccaatggtcaaggacgcattcaaagacatcagcatttattttacaaaggaagaatgggcagaaatgggggattgggaaaaaactcgctatcgcaacgttaagcggaattataatgcattgattaccatcgggctccgggctaccagaccggcattcatgtgccacaggagacaggccataaaattgcaggtggacgacaccgaggactctgacgaggaatggactccccgacagcaagtgaagccaccttggatggcactccgcgtggaacagagaaagcaccagaaaggcatgccaaaagcatcgttcagcaatgagtcatcacttaaagagctgtctcgcaccgctaacttgttaaacgcaagcggctcggagcaggctcaaaagccagtgagcccatctggcgaagcatcgacttcgggccagcacagcagactcaagctggagctacgcaaaaaagaaacggagcgtaaaatgtactctctcagagagagaaagggccacgcctacaaagaggttagtgaaccacaggacgacgactatctgtactgtgagatgtgtcagaatttttttattgatagttgtgcagcccacggacctcccaccttcgtgaaagacagcgctgtcgataaaggccaccctaaccggtctgccctgtctctccctccaggactcagaatcggaccttctggtattccccaggccggactaggcgtgtggaatgaagccagcgaccttccactcggactccacttcggaccctacgagggcagaatcacagaggatgaggaggccgcaaacaacggatactcctggctcatcaccaagggacggaactgctatgagtatgtcgacggcaaagacaagagctgggcaaactggatgaggtacgttaattgtgcccgagatgacgaagagcagaacctggtagcctttcagtaccaccggcagatcttttacaggacatgccgcgtgatcagacccggttgcgagctgctcgtgtggtatggggatgaatacggtcaggaacttggcattaaatgggggagcaaatggaagaaagagctgatggcagggagagagcctaagcccgaaattcatccatgcccctcctgctgcctcgcattctctagtcaaaagttcctgagccaacacgtagaacgcaaccactctagccagaatttccccggaccgagtgcaaggaaacttttacagccggaaaatccatgtccgggtgatcaaaaccaggagcagcaatacccggatccacactcacgcaacgacaaaacaaaagggcaggagattaaggaaaggtcaaaactgctcaataaacggacatggcagagggaaatctctagagcctttagcagccctccaaaagggcaaatggggtcttgcagggtggggaagagaataatggaggaagagtctcgcacggggcagaaggtaaatcctggtaataccggcaaacttttcgttggcgttggcatctccagaatcgctaaggtaaagtacggagagtgcgggcagggatttagcgtgaagtcagacgtcatcacccaccagcgaacccacacaggagagaagctttatgtatgccgtgagtgtggtcggggattctcctggaaaagccatctcttgatccatcagaggatccatactggagagaagccttacgtttgcagagagtgtgggagggggttcagctggcagagcgtacttcttacccaccagaggacccacacaggcgagaaaccctacgtttgtcgggagtgcggcagagggttttctcgacagtcagtattgctaacgcaccagagacgtcatacaggcgaaaagccatatgtgtgcagagaatgcggaaggggcttttctcggcagagtgtgctgctaacgcaccagcgcaggcacacaggcgagaaaccctacgtatgccgcgagtgcggtagggggttttcatggcagagcgtattactgactcatcagcgcacacacactggggagaagccgtacgtgtgtcgtgagtgtgggcgaggcttcagttggcaaagtgttctcctgacccatcagcgcacccatactggtgagaagccttacgtgtgccgagaatgcggacgcggatttagcaacaaaagccatctcttacgccatcagaggactcatacgggtgagaagccatacgtatgccgcgagtgcggccgagggtttcgggacaaaagccaccttctgcggcaccagaggacccatacaggtgaaaaaccatatgtttgtagagagtgcgggcgaggcttcagagacaaatctaatttgttaagtcaccaacgcacccacactggagagaagccttacgtctgccgtgagtgcgggcgagggttcagtaacaaaagtcatctcctgaggcaccaacgcactcataccggtgaaaaaccctacgtgtgtagggaatgtggacgcggattccgaaacaagagccacctcttaaggcatcagagaactcatactggcgaaaaaccttatgtttgcagggaatgcggacgagggttctcagaccggtcaagcctgtgttaccatcagcgcacccataccggggaaaaaccttacgtttgccgggaagacgagtag

SEQ ID NO: 203295 - DNA, 1227 bp, Artificial Sequence
  derived and/or modified sequence
atgtgccagaacttcttcatcgacagctgcgccgcccacggcccccccaccttcgtgaaggacagcgccgtggacaagggccaccccaacagaagcgccctgagcctgccccccggcctgagaatcggccccagcggcatcccccaggccggcctgggcgtgtggaacgaggccagcgacctgcccctgggcctgcacttcggcccctacgagggcagaatcaccgaggacgaggaggccgccaacaacggctacagctggctgatcaccaagggcagaaactgctacgagtacgtggacggcaaggacaagagctgggccaactggatgagatacgtgaactgcgccagagacgacgaggagcagaacctggtggccttccagtaccacagacagatcttctacagaacctgcagagtgatcagacccggctgcgagctgctggtgtggtacggcgacgagtacggccaggagctgggcatcaagtggggcagcaagtggaagaaggagctgatggccggcagagagcccaagcccgagatccacccctgccccagctgctgcctggccttcagcagccagaagttcctgagccagcacgtggagagaaaccacagcagccagaacttccccggccccagcgccagaaagctgctgcagcccgagaacccctgccccggcgaccagaaccaggagcagcagtaccccgacccccacagcagaaacgacaagaccaagggccaggagatcaaggagagaagcaagctgctgaacaagagaacctggcagagagagatcagcagagccttcagcagcccccccaagggccagatgggcagctgcagagtgggcaagagaatcatggaggaggagagcagaaccggccagaaggtgaaccccggcaacaccggcaagctgttcgtgggcgtgggcatcagcagaatcgccaaggtgaagtacggcgagtgcggccagggcttcagcgtgaagagcgacgtgatcacccaccagagaacccacaccggcgagaagccctacgtgtgcagagagtgcggcagaggcttcagctggcagagcgtgctgctgacccaccagagaacccacaccggcgagaagccctacgtgtgcagagagtgcggcagaggcttcagcagacagagcgtgctgctgacccaccagagaacccacaccggcgagaagccctacgtgtgcagagaggacgagtag

SEQ ID NO: 203296 - DNA, 2685 bp, Artificial Sequence
  derived and/or modified sequence
atgagccccgagaagagccaggaggagagccccgaggaggacaccgagagaaccgagagaaagcccatggtgaaggacgccttcaaggacatcagcatctacttcaccaaggaggagtgggccgagatgggcgactgggagaagaccagatacagaaacgtgaagagaaactacaacgccctgatcaccatcggcctgagagccaccagacccgccttcatgtgccacagaagacaggccatcaagctgcaggtggacgacaccgaggacagcgacgaggagtggacccccagacagcaggtgaagcccccctggatggccctgagagtggagcagagaaagcaccagaagggcatgcccaaggccagcttcagcaacgagagcagcctgaaggagctgagcagaaccgccaacctgctgaacgccagcggcagcgagcaggcccagaagcccgtgagccccagcggcgaggccagcaccagcggccagcacagcagactgaagctggagctgagaaagaaggagaccgagagaaagatgtacagcctgagagagagaaagggccacgcctacaaggaggtgagcgagccccaggacgacgactacctgtactgcgagatgtgccagaacttcttcatcgacagctgcgccgcccacggcccccccaccttcgtgaaggacagcgccgtggacaagggccaccccaacagaagcgccctgagcctgccccccggcctgagaatcggccccagcggcatcccccaggccggcctgggcgtgtggaacgaggccagcgacctgcccctgggcctgcacttcggcccctacgagggcagaatcaccgaggacgaggaggccgccaacaacggctacagctggctgatcaccaagggcagaaactgctacgagtacgtggacggcaaggacaagagctgggccaactggatgagatacgtgaactgcgccagagacgacgaggagcagaacctggtggccttccagtaccacagacagatcttctacagaacctgcagagtgatcagacccggctgcgagctgctggtgtggtacggcgacgagtacggccaggagctgggcatcaagtggggcagcaagtggaagaaggagctgatggccggcagagagcccaagcccgagatccacccctgccccagctgctgcctggccttcagcagccagaagttcctgagccagcacgtggagagaaaccacagcagccagaacttccccggccccagcgccagaaagctgctgcagcccgagaacccctgccccggcgaccagaaccaggagcagcagtaccccgacccccacagcagaaacgacaagaccaagggccaggagatcaaggagagaagcaagctgctgaacaagagaacctggcagagagagatcagcagagccttcagcagcccccccaagggccagatgggcagctgcagagtgggcaagagaatcatggaggaggagagcagaaccggccagaaggtgaaccccggcaacaccggcaagctgttcgtgggcgtgggcatcagcagaatcgccaaggtgaagtacggcgagtgcggccagggcttcagcgtgaagagcgacgtgatcacccaccagagaacccacaccggcgagaagctgtacgtgtgcagagagtgcggcagaggcttcagctggaagagccacctgctgatccaccagagaatccacaccggcgagaagccctacgtgtgcagagagtgcggcagaggcttcagctggcagagcgtgctgctgacccaccagagaacccacaccggcgagaagccctacgtgtgcagagagtgcggcagaggcttcagcagacagagcgtgctgctgacccaccagagaagacacaccggcgagaagccctacgtgtgcagagagtgcggcagaggcttcagcagacagagcgtgctgctgacccaccagagaagacacaccggcgagaagccctacgtgtgcagagagtgcggcagaggcttcagctggcagagcgtgctgctgacccaccagagaacccacaccggcgagaagccctacgtgtgcagagagtgcggcagaggcttcagctggcagagcgtgctgctgacccaccagagaacccacaccggcgagaagccctacgtgtgcagagagtgcggcagaggcttcagcaacaagagccacctgctgagacaccagagaacccacaccggcgagaagccctacgtgtgcagagagtgcggcagaggcttcagagacaagagccacctgctgagacaccagagaacccacaccggcgagaagccctacgtgtgcagagagtgcggcagaggcttcagagacaagagcaacctgctgagccaccagagaacccacaccggcgagaagccctacgtgtgcagagagtgcggcagaggcttcagcaacaagagccacctgctgagacaccagagaacccacaccggcgagaagccctacgtgtgcagagagtgcggcagaggcttcagaaacaagagccacctgctgagacaccagagaacccacaccggcgagaagccctacgtgtgcagagagtgcggcagaggcttcagcgacagaagcagcctgtgctaccaccagagaacccacaccggcgagaagccctacgtgtgcagagaggacgagtag

SEQ ID NO: 203297 - protein, 1160 aa, Artificial Sequence
  derived and/or modified sequence
MDSKDESSHVWPTSAEHEQNAAQVHFVPDTGTVAQIVYTDDQVRPPQQVVYTADGASYTSVDGPEHTLVYIHPVEAAQTLFTDPGQVAYVQQDATAQQASLPVHNQVLPSIESVDGSDPLATLQTPLGRLEAKEEEDEDEDEDTEEDEEEDGEDTDLDDWEPDPPRPFDPHDLWCEECNNAHASVCPKHGPLHPIPNRPVLTRARASLPLVLYIDRFLGGVFSKRRIPKRTQFGPVEGPLVRGSELKDCYIHLKVSLDKGDRKERDLHEDLWFELSDETLCNWMMFVRPAQNHLEQNLVAYQYGHHVYYTTIKNVEPKQELKVWYAASYAEFVNQKIHDISEEERKVLREQEKNWPCYECNRRFISSEQLQQHLNSHDEKLDVFSRTRGRGRGRGKRRFGPGRRPGRPPKFIRLEITSENGEKSDDGTQDLLHFPTKEQFDEAEPATLNGLDQPEQTTIPIPQLPQETQSSLEHEPETHTLHLQPQHEESVVPTQSTLTADDMRRAKRIRLELQNAALQHLFIRKSFRPFKCLQCGKAFREKDKLDQHLRFHGREGNCPLTCDLCNKGFISSTSLESHMKLHSDQKTYSCIFCPESFDRLDLLKDHVAIHINDGYFTCPTCKKRFPDFIQVKKHVRSFHSEKIYQCTECDKAFCRPDKLRLHMLRHSDRKDFLCSTCGKQFKRKDKLREHMQRMHNPEREAKKADRISRSKTFKPRITSTDYDSFTFKCRLCMMGFRRRGMLVNHLSKRHPDMKIEEVPELTLPIIKPNRDYFCQYCDKVYKSASKRKAHILKNHPGAELPPSIRKLRPAGPGEPDPMLSTHTQLTGTIATPPVCCPHCSKQYSSKTKMVQHIRKKHPEFAQLSNTIHTPLTTAVISATPAVLTTDSATGETVVTTDLLTQAMTELSQTLTTDYRTPQGDYQRIQYIPVSQSASGLQQPQHIQLQVVQVASATSPHQSQQSTVDVGQLHDPQPYPQHAIQVQHIQVSEPTASAPSSAQVSGQPLSPSAQQAQQGLSPSHIQGSSSTQGQALQQQQQQQQNSSVQHTYLPSAWNSFRGYSSEIQMMTLPPGQFVITDSGVATPVTTGQVKAVTSGHYVLSESQSELEEKQTSALSGGVQVEPPAHSDSLDPQTNSQQQTTQYIITTTTNGNGSSEVHITKP

SEQ ID NO: 203298 - protein, 1074 aa, Artificial Sequence
  derived and/or modified sequence
MSAYSVPSTFAQASLPVHNQVLPSIESVDGSDPLATLQTPLGRLEAKEEEDEDEDEDTEEDEEEDGEDTDLDDWEPDPPRPFDPHDLWCEECNNAHASVCPKHGPLHPIPNRPVLTRARASLPLVLYIDRFLGGVFSKRRIPKRTQFGPVEGPLVRGSELKDCYIHLKVSLDKGDRKERDLHEDLWFELSDETLCNWMMFVRPAQNHLEQNLVAYQYGHHVYYTTIKNVEPKQELKVWYAASYAEFVNQKIHDISEEERKVLREQEKNWPCYECNRRFISSEQLQQHLNSHDEKLDVFSRTRGRGRGRGKRRFGPGRRPGRPPKFIRLEITSENGEKSDDGTQDLLHFPTKEQFDEAEPATLNGLDQPEQTTIPIPQLPQETQSSLEHEPETHTLHLQPQHEESVVPTQSTLTADDMRRAKRIRLELQNAALQHLFIRKSFRPFKCLQCGKAFREKDKLDQHLRFHGREGNCPLTCDLCNKGFISSTSLESHMKLHSDQKTYSCIFCPESFDRLDLLKDHVAIHINDGYFTCPTCKKRFPDFIQVKKHVRSFHSEKIYQCTECDKAFCRPDKLRLHMLRHSDRKDFLCSTCGKQFKRKDKLREHMQRMHNPEREAKKADRISRSKTFKPRITSTDYDSFTFKCRLCMMGFRRRGMLVNHLSKRHPDMKIEEVPELTLPIIKPNRDYFCQYCDKVYKSASKRKAHILKNHPGAELPPSIRKLRPAGPGEPDPMLSTHTQLTGTIATPPVCCPHCSKQYSSKTKMVQHIRKKHPEFAQLSNTIHTPLTTAVISATPAVLTTDSATGETVVTTDLLTQAMTELSQTLTTDYRTPQGDYQRIQYIPVSQSASGLQQPQHIQLQVVQVASATSPHQSQQSTVDVGQLHDPQPYPQHAIQVQHIQVSEPTASAPSSAQVSGQPLSPSAQQAQQGLSPSHIQGSSSTQGQALQQQQQQQQNSSVQHTYLPSAWNSFRGYSSEIQMMTLPPGQFVITDSGVATPVTTGQVKAVTSGHYVLSESQSELEEKQTSALSGGVQVEPPAHSDSLDPQTNSQQQTTQYIITTTTNGNGSSEVHITKP

SEQ ID NO: 203299 - DNA, 6341 bp, Artificial Sequence
  derived and/or modified sequence
actctgcggcgggaagaaccacctggaggtggcggggggggttgatttctatcacccctagggagagaggatcggggacccgctgatcttccagctcccctcacccaacgtcgtgcatgctgcagacagacctttccgtccttcatgaacacacgtgtggtagacagatgactgtcctgtaccctgtgctgctctaggtgtgccagacgtggagctgtccagttgggagaagatggattccaaagatgaaagctcgcatgtgtggccgacatctgcagagcatgaacagaatgccgcacaggtgcactttgttccggacacaggaacagtggctcagattgtctataccgatgaccaggttcgccccccacagcaggtggtgtacacggcagatggtgcctcctacacatcagtggatggtccagagcacacgctggtgtacatccacccggtggaagctgcacagactctgtttacagaccccggccaggtagcttatgtccaacaggatgctacagctcagcaggcctcattgccagttcataaccaggtgctgccttccatcgagagtgtagatgggtccgaccctttggcaactctgcagacccctctaggcagactggaggccaaagaggaagaggatgaggatgaggacgaggacactgaggaagatgaggaagaagacggtgaggacacggatctggatgactgggagccagacccgccccggcccttcgacccacacgacttgtggtgtgaggagtgcaataacgcgcatgcttcagtgtgtccgaagcacggccccttgcacccgatccccaaccggccggtgctcacccgggccagggcgagcctccccctggtgctctacatagacaggtttctgggcggggtgttctccaagcggcgcatccccaagcgcacccagtttggccccgtggaggggcctctcgtcaggggctcggagctgaaagactgttacattcacctcaaggtttctcttgataaaggggacaggaaagaaagggatttacatgaagacctatggtttgagttgtctgatgagacgctttgtaactggatgatgtttgtacggccagcccagaatcacctggagcagaacctggtggcttaccagtatggccaccatgtgtattatacaaccataaaaaatgtggagcccaagcaggaactgaaggtgtggtatgccgcatcctatgctgagttcgtgaaccagaaaattcatgacatttctgaggaagaaaggaaagttcttcgagagcaagagaagaattggccctgctatgaatgtaaccgccgatttataagctcggagcagttgcaacagcatctcaattctcatgatgagaaactagatgtgtttagcagaacaagaggcagaggaaggggacgaggcaagaggcgattcggtccaggtcgacggccggggcgtcctccaaaatttatccgcctggaaatcaccagcgaaaatggggaaaagagtgacgatgggacacaggacttgctacattttcccacaaaggagcaatttgatgaggctgaaccagccactctgaatgggctggatcaaccagaacagaccactatcccaatccctcagctgccacaggaaacccagtcttccctggaacatgaaccagaaactcacaccctgcacctgcagccgcagcatgaagagagcgtggtgcccacccagagcacgctgacagccgacgacatgcgcagagccaagcgcatccgattggagctgcagaatgcagctcttcagcatctgtttattcggaagtccttccggccttttaaatgcttgcagtgtgggaaggccttccgggaaaaggacaaactggaccagcacttacgcttccatgggcgggaggggaactgcccactgacctgtgatctctgtaacaagggcttcatcagcagcacatccttggagagccacatgaagctccactcagaccagaagacttactcttgcattttttgcccagaatcctttgaccgccttgatttgttgaaagatcatgtggccattcatatcaatgatggctacttcacctgcccaacttgtaagaaacggttcccagattttatccaggtgaaaaaacacgtgcgcagcttccactcagaaaagatctaccagtgcacagagtgtgacaaggccttctgtcgccccgataaactgcgactccacatgctccggcattcggaccgcaaagacttcctgtgttccacctgtgggaagcaatttaagcgaaaagacaaactacgggaacacatgcagaggatgcataatcctgagagggaggccaagaaagccgaccgcatcagccgctccaagacgttcaagccccgcatcacgtccacagactacgacagcttcacgttcaagtgccgcctgtgcatgatgggcttccggcggcgcggcatgctggtaaatcacttatcgaagagacacccagacatgaagatagaagaggtgccagagttaactctacccatcataaaacccaatcgtgattacttttgtcagtattgcgataaggtttataaaagtgccagcaagcgcaaagcccacattctgaagaaccacccaggagcagagctcccaccgagcattcggaagctccgacccgctggtcctggagagccagaccccatgctgagcacacacacccagctgacgggcaccatcgccacccctcccgtctgctgtccccactgctccaagcagtacagcagcaagaccaagatggtccagcacattcgaaagaagcatccagagttcgcccagctctccaacaccatacacacaccactgacgacagctgtgatcagtgccaccccagcggttttgactacagacagcgccactggagagactgtggtgacgacggacctgctcacccaagcaatgacagaactgtcccagaccttaacgacagactaccgaacgccacaaggggattaccagagaattcagtacatccctgtgtcgcagtcggcgtctggcctccagcagcctcagcacatacagctgcaagtggttcaagtggcctcggccacttcccctcaccagtcacagcagtccactgtggatgttggccagctccatgatcctcagccctacccccagcacgccatccaggtgcagcacatccaggtcagcgagcctaccgcctcggccccgtcctccgcccaggtatctgggcagccgttgagtccctcagcccagcaggctcagcaggggctcagcccctcccacatccagggcagttcttccacacaggggcaggctctgcagcagcagcagcagcagcagcagaattcctctgtgcagcacacgtacctgcccagtgcttggaattccttccgtggctattcatctgagattcaaatgatgacgcttcctccgggtcagtttgtgattacagacagtggtgtggcaactccagttactactggccaggtgaaggcggttacttcgggtcattatgtgttatcagaaagtcaatcagaattggaagaaaagcaaacttctgccctctctggtggagtccaggtcgagccacctgcacacagtgactccctggacccccagaccaacagccaacagcagaccacacagtacatcatcaccaccaccaccaacgggaacggaagcagcgaagtgcatatcaccaaaccatgacttccaccctggagcttgaatccagcacccacctcatgtctgttctcataagtctgaaagctctgacacgtagagctcttttgtaagatttattattcactcaagagttcggaaaccacagttttgtctctcatccatacactggggtttattttgccaaggtcatctttatcaaattgactcttcaaaccctcggtttttgccacagaacagagatctttcaggggaaagtagatttcgaggtggagagaatttgccttgctcttgagctggtcttttaacatactgacgagccttacttttcctttgtggaaatattaagtggcatattgtgttcataccaaaggtggagacaggatgtgccaagttcatggttactggacttcttattccaagccatggcaccaaaggagaaggggcattttgtgggtgtgcattaggtctgaactgctttatcttgttttagttttcagtaatttaacaaagggagcctgctgaataacaaaattaaaatgatgaaacaaaagtttgacagtgatattctgaagcaaaaactgtcatctaaatttttcttgctgattttttttaacttccctattttagaaaactattgttgggctgttggtagtgctttccacagatgctggtcctcagtggattaggtcagaagctcatgttctgatagttcttcattatttcacaaaggtggacaacctgaaagagaaaaggctgcttgatgtcagcagaatctaaacccctacattaaagctttgcctcccattctgtggttgtggtggtggtaagaaggagatattggtaccaagaaaaatttccaaaactattgagagagagagagagaaagtattgaaattttgttctgccttgcaggatccatttatcattcattggtaaaggatatattccttgttcttaccaagtgtacatttaactcttgctgacatgttcagtgtattttattacttttaatgctgtcttaaaatgaacattctttaaagttggacaggaaggtggcatttcttatttattaacatttttaactttaaacatattgtgactcatctagaccttttaataagacgatcaacttcacacttagggaaaaaattaaaatgtgatggccacttctaataattcaggtagttataagggatctggaagaaatccagtctttatgaatatactattagttgggcattaaaaaatcagtatatattttaactttttgtgacatgctaacacattttcagaataattattgcatagtagaatttattactccagaacagaaagaccttacttcatttcaaatgaagttaattaatttacatttctgggtaaaaactggttctataaattaagtagagtagcttctttatgataaagacaattttctgaaaagtgaacaattctgttaaaagaactttattgatgtgtagatttcgcactttatttctgagactgcgttcatgtagttgttccccaatgtttgagtactaagagaacttgagaaaattacttcataaacatatggaaactgaaaatggactctctttgtgacaaagatattcaacagaaaatattgaccctgcattgcaaaacacaggttcgggttccctaagtcccacagtgtaatgattacaaatatcctagtgtccggtctagaaagactttctaggagaagactagtggaattttctaaaggttcagttttagcttttataacttaaatttggccctgttacgttctttttaatttgaaccataaggtatctcccctcccttcaggaataacttattggaaaactgaaaagaatcactgaatggaatgttcattttatggcagttgttttaagttttaaaatacacagaggaaaatattgtggaaggacctctttgttgctttcccttctaagttgtcttcttcttcttcttcttcttcttcttctttggtccttaagtgaaataaagactctaaaactaatttgtatattatcagccagagatgcggatggcagtcgagccaaatcgcatggctttcagatcaggtattctgcacattcattccaaggtcatagatttttaaaaggacctggatttgaagagatggcaaatgatgagccatcagaaaacttaatttggaaaacatgtatgtagccagtgtggatattgtggcctctctcaagacacattgacactgtagacttcattcagtccagtgtgagtattttggagtaggttggatgtagattttgtttttatcattgatttgtaccgacagaaatagacatttcatcatgtaaaattcctgttattctggaaaaacctattgttttgatcttcttgttttctgacttggaagtatcctttcaaaaaaactcttaagatatctaggtctaaaaagcacttcatgagatgctaaagctgacccactggttgaaaatgttgaccctatcctgttatttaaatgtgaacatttattgtacattcagtgagttatagtgttaatagtcttgtgctatgcagcaggtgtaaaaattaataaatatattttttaataaacatgtttgtatgtgtgaagctacaagaaaaaaaaaaaaaaaaaaaa

SEQ ID NO: 203300 - DNA, 3483 bp, Artificial Sequence
  derived and/or modified sequence
atggacagcaaggacgagagcagccacgtgtggcccaccagcgccgagcacgagcagaacgccgcccaggtgcacttcgtgcccgacaccggcaccgtggcccagatcgtgtacaccgacgaccaggtgagacccccccagcaggtggtgtacaccgccgacggcgccagctacaccagcgtggacggccccgagcacaccctggtgtacatccaccccgtggaggccgcccagaccctgttcaccgaccccggccaggtggcctacgtgcagcaggacgccaccgcccagcaggccagcctgcccgtgcacaaccaggtgctgcccagcatcgagagcgtggacggcagcgaccccctggccaccctgcagacccccctgggcagactggaggccaaggaggaggaggacgaggacgaggacgaggacaccgaggaggacgaggaggaggacggcgaggacaccgacctggacgactgggagcccgacccccccagacccttcgacccccacgacctgtggtgcgaggagtgcaacaacgcccacgccagcgtgtgccccaagcacggccccctgcaccccatccccaacagacccgtgctgaccagagccagagccagcctgcccctggtgctgtacatcgacagattcctgggcggcgtgttcagcaagagaagaatccccaagagaacccagttcggccccgtggagggccccctggtgagaggcagcgagctgaaggactgctacatccacctgaaggtgagcctggacaagggcgacagaaaggagagagacctgcacgaggacctgtggttcgagctgagcgacgagaccctgtgcaactggatgatgttcgtgagacccgcccagaaccacctggagcagaacctggtggcctaccagtacggccaccacgtgtactacaccaccatcaagaacgtggagcccaagcaggagctgaaggtgtggtacgccgccagctacgccgagttcgtgaaccagaagatccacgacatcagcgaggaggagagaaaggtgctgagagagcaggagaagaactggccctgctacgagtgcaacagaagattcatcagcagcgagcagctgcagcagcacctgaacagccacgacgagaagctggacgtgttcagcagaaccagaggcagaggcagaggcagaggcaagagaagattcggccccggcagaagacccggcagaccccccaagttcatcagactggagatcaccagcgagaacggcgagaagagcgacgacggcacccaggacctgctgcacttccccaccaaggagcagttcgacgaggccgagcccgccaccctgaacggcctggaccagcccgagcagaccaccatccccatcccccagctgccccaggagacccagagcagcctggagcacgagcccgagacccacaccctgcacctgcagccccagcacgaggagagcgtggtgcccacccagagcaccctgaccgccgacgacatgagaagagccaagagaatcagactggagctgcagaacgccgccctgcagcacctgttcatcagaaagagcttcagacccttcaagtgcctgcagtgcggcaaggccttcagagagaaggacaagctggaccagcacctgagattccacggcagagagggcaactgccccctgacctgcgacctgtgcaacaagggcttcatcagcagcaccagcctggagagccacatgaagctgcacagcgaccagaagacctacagctgcatcttctgccccgagagcttcgacagactggacctgctgaaggaccacgtggccatccacatcaacgacggctacttcacctgccccacctgcaagaagagattccccgacttcatccaggtgaagaagcacgtgagaagcttccacagcgagaagatctaccagtgcaccgagtgcgacaaggccttctgcagacccgacaagctgagactgcacatgctgagacacagcgacagaaaggacttcctgtgcagcacctgcggcaagcagttcaagagaaaggacaagctgagagagcacatgcagagaatgcacaaccccgagagagaggccaagaaggccgacagaatcagcagaagcaagaccttcaagcccagaatcaccagcaccgactacgacagcttcaccttcaagtgcagactgtgcatgatgggcttcagaagaagaggcatgctggtgaaccacctgagcaagagacaccccgacatgaagatcgaggaggtgcccgagctgaccctgcccatcatcaagcccaacagagactacttctgccagtactgcgacaaggtgtacaagagcgccagcaagagaaaggcccacatcctgaagaaccaccccggcgccgagctgccccccagcatcagaaagctgagacccgccggccccggcgagcccgaccccatgctgagcacccacacccagctgaccggcaccatcgccaccccccccgtgtgctgcccccactgcagcaagcagtacagcagcaagaccaagatggtgcagcacatcagaaagaagcaccccgagttcgcccagctgagcaacaccatccacacccccctgaccaccgccgtgatcagcgccacccccgccgtgctgaccaccgacagcgccaccggcgagaccgtggtgaccaccgacctgctgacccaggccatgaccgagctgagccagaccctgaccaccgactacagaaccccccagggcgactaccagagaatccagtacatccccgtgagccagagcgccagcggcctgcagcagccccagcacatccagctgcaggtggtgcaggtggccagcgccaccagcccccaccagagccagcagagcaccgtggacgtgggccagctgcacgacccccagccctacccccagcacgccatccaggtgcagcacatccaggtgagcgagcccaccgccagcgcccccagcagcgcccaggtgagcggccagcccctgagccccagcgcccagcaggcccagcagggcctgagccccagccacatccagggcagcagcagcacccagggccaggccctgcagcagcagcagcagcagcagcagaacagcagcgtgcagcacacctacctgcccagcgcctggaacagcttcagaggctacagcagcgagatccagatgatgaccctgccccccggccagttcgtgatcaccgacagcggcgtggccacccccgtgaccaccggccaggtgaaggccgtgaccagcggccactacgtgctgagcgagagccagagcgagctggaggagaagcagaccagcgccctgagcggcggcgtgcaggtggagccccccgcccacagcgacagcctggacccccagaccaacagccagcagcagaccacccagtacatcatcaccaccaccaccaacggcaacggcagcagcgaggtgcacatcaccaagccctag

SEQ ID NO: 203301 - DNA, 3483 bp, Artificial Sequence
  derived and/or modified sequence
atggatagcaaagatgagtcttcccacgtctggccaacatcagccgagcacgagcaaaatgctgcccaggtccactttgtgcctgacaccggcaccgtcgctcagatcgtgtacacggacgatcaggtcaggcctccgcagcaggtcgtctatactgctgatggagcaagttacacttctgtagacgggccagagcacactctcgtctatattcatcccgtggaagcagctcaaaccctgttcaccgacccgggccaagtggcctacgtccagcaggatgctaccgcccagcaggcgtccctgcctgtgcacaatcaagtattgccatcgattgaatctgttgatgggtccgacccgcttgctactctgcagacaccgctagggaggctggaggcaaaggaagaggaagacgaggatgaggatgaggacaccgaagaagacgaggaagaggatggggaagacaccgacttggacgattgggaaccagaccctccccgtccatttgaccctcatgatctgtggtgcgaggagtgcaataacgcacacgcttccgtttgtcccaagcacgggccattacaccccatccctaatcggccggttttaaccagggcgagagcttccctgcctctcgttttatacattgaccgatttctgggcggtgttttttccaagcgacgtataccgaagcggacgcagttcgggccggtcgagggccctctggtgcggggctccgagttgaaagattgttatatccacctcaaggtctccctggacaagggagatagaaaggaaagggacctccatgaagacctgtggtttgagttatctgacgagaccctctgtaactggatgatgtttgtaagacccgcccaaaatcatctcgaacaaaacctggtggcttaccaatatgggcaccatgtttattacaccacaataaagaacgtggaacctaagcaagagttgaaggtgtggtacgccgcttcctacgccgagttcgtgaaccagaaaatccatgatatctccgaggaagaacgaaaagttttgcgcgaacaggaaaagaactggccctgttacgagtgcaacaggcggttcatcagtagtgaacagctgcagcagcatctgaactcacacgatgaaaaactggatgtgtttagcagaacaaggggccgaggtaggggccgcggcaagcggaggtttgggccaggcagacggccaggcagacctccaaaattcatccggctggagataaccagcgagaatggagaaaagtctgacgatggaacacaggacctgttgcactttcctactaaggaacagttcgacgaggccgagcccgccacgttgaacggattggaccagcctgaacagacaaccatacccattcctcagctgccacaggaaactcaatcgtccctggagcacgaacctgagacccatacactgcatctccagccacagcatgaagagagcgtagtgcccactcagagcacactgacagctgatgacatgcgccgggcaaaaagaattcgattggaactgcagaacgccgcgcttcagcatctttttattcggaagtcattccgtcccttcaaatgcctacagtgtggcaaagcctttagggaaaaagataaattggatcagcacctccgattccatgggagagagggaaattgccccctgacctgcgacttgtgcaacaaaggcttcatttctagtacatctcttgaaagccatatgaagcttcacagcgaccagaaaacttacagttgcatcttttgccctgagagctttgacaggctcgacctgttgaaggaccacgtggcgattcacatcaacgatggctattttacctgccccacatgtaaaaagcgattccctgactttatacaggtgaaaaagcatgtaaggagtttccatagtgagaagatctaccagtgcaccgaatgcgataaagctttctgtcgccccgacaagctgcgactccacatgctccgccattccgacagaaaggatttcctgtgctcaacatgcggaaagcagtttaaacggaaagacaaactgcgtgagcacatgcagaggatgcataaccccgaaagagaagcaaagaaggccgatagaattagccggagcaagaccttcaagcctagaatcacctctaccgactacgacagcttcacctttaagtgtagactctgcatgatgggattccgccgccggggtatgcttgtcaatcatctcagcaaaagacatccagacatgaagattgaggaggtgccagaactgaccctccccataatcaagccaaacagagattacttttgtcagtactgcgataaagtctacaagagcgcaagcaaaagaaaagcacacatcctgaagaatcatcctggtgccgaacttcccccctctatcaggaagctgcgccccgcaggccccggtgaacctgatcctatgttgagcacacatactcagctaaccggaaccatagctactcctcccgtgtgctgcccccactgctccaagcagtattctagcaagacaaagatggtgcagcacatacggaaaaaacacccagagtttgctcagctcagtaatacaatccacactcctctgacaactgctgttatcagcgctacccccgcagtgctaactacagactcggccaccggagagacagtcgtcaccacagaccttctgactcaggcgatgacagagctatcacagaccttgacaaccgactacaggacaccccagggtgattatcaaagaattcagtacattccagtatcgcagtctgcatctggattacagcaaccacagcatatccaactgcaagttgtacaggttgcctcagctactagtcctcatcagtcccaacagagcaccgttgatgtcggtcaattgcatgacccccagccttatccacagcacgcaatccaggtgcagcatatccaggtgagcgagcccaccgcttcagctccctcaagcgcacaagtctcagggcaacctctctccccttccgcacagcaggcccagcagggactgagccccagccacattcaaggttccagttccacgcagggccaagctttgcagcagcagcagcaacagcagcagaatagctctgtgcagcatacgtatttaccgagtgcatggaacagcttccgcgggtattctagcgagattcagatgatgactctgcccccagggcagttcgtgatcacagactcaggggttgcaaccccagtgaccactggtcaggttaaagcggtaacctcaggacactatgtactgagtgaatcacaatccgaactggaggagaaacagacgagcgctctctccggaggtgttcaggtggagccacctgcccatagcgacagcctggacccgcagacgaattcccagcaacagacaacacagtatatcatcacgaccaccaccaatggaaacgggtctagtgaggtgcacattaccaagccctag

SEQ ID NO: 203302 - DNA, 3483 bp, Artificial Sequence
  derived and/or modified sequence
atggacagcaaggatgagagcagccacgtgtggcccaccagcgctgagcacgagcagaatgctgcccaggtgcactttgtgcctgacaccggcaccgtggcccagatcgtgtacacagatgaccaggtgcggcccccccagcaggtggtgtacacagcagatggagccagctacacctctgtggatggccctgagcacaccctggtgtacatccaccctgtggaggccgcccagaccctcttcacagaccccggccaggtggcctacgtgcagcaggatgccacagcccagcaggccagcctgcctgtgcacaaccaggtgctgcccagcattgaatctgtggatggcagtgaccccctggccaccctgcagacccccctgggccgcctggaggccaaggaggaggaggatgaagatgaagatgaggacacagaggaggatgaggaggaggatggagaggacacagacctggatgactgggagccagaccccccccggccctttgacccccatgacctgtggtgtgaggagtgcaacaatgcccacgcctctgtgtgccccaagcacggccccctgcaccccatccccaacagacctgtgctgacccgggcccgggccagcctgcccctggtgctgtacatcgaccgcttcctgggcggcgtcttcagcaagaggcgcatccccaagaggacccagtttggacctgtggagggccccctggtgcggggcagcgagctgaaggactgctacatccacctgaaggtgtccctggacaagggggacaggaaggagcgggacctgcacgaggacctgtggtttgagctgagtgatgagaccctgtgcaactggatgatgtttgtgcggcctgcccagaaccacctggagcagaacctggtggcctaccagtatggccaccacgtgtactacaccaccatcaagaatgtggagcccaagcaggagctgaaggtgtggtacgccgccagctatgcagagtttgtgaaccagaagatccatgacatcagcgaggaggagaggaaggtgctgcgggagcaggagaagaactggccctgctatgagtgcaacagacgcttcatcagcagcgagcagctgcagcagcacctgaacagccatgatgagaagctggatgtgttcagcaggacccggggccggggccggggccggggcaagagaagatttggacctggaagaagacctggccggccccccaagttcatccggctggagatcaccagtgaaaatggagagaagagtgatgatggcacccaggacctgctgcacttccccaccaaggagcagtttgatgaagctgagcccgccaccctgaatggcctggaccagcctgagcagaccaccatccccatcccccagctgccccaggagacccagagcagcctggagcacgagcctgagacccacaccctgcacctgcagccccagcacgaggagagcgtggtgcccacccagagcaccctgacagcagatgacatgaggcgggccaagaggatccggctggagctgcagaatgctgccctgcagcacctgttcatcaggaagagcttccggcccttcaagtgcctgcagtgtgggaaggccttccgggagaaggacaagctggaccagcacctgcgcttccacggccgggagggcaactgccccctgacctgtgacctgtgcaacaagggcttcatcagcagcaccagcctggagagccacatgaagctgcacagcgaccagaagacctacagctgcatcttctgcccagagagctttgaccggctggacctgctgaaggaccacgtggccatccacatcaatgatggctacttcacctgccccacctgcaagaagcgcttcccagacttcatccaggtgaagaagcacgtgcgctccttccacagcgagaagatctaccagtgcacagaatgtgacaaggccttctgcaggccagacaagctgcggctgcacatgctgcggcacagcgacaggaaggacttcctgtgcagcacctgtgggaagcagttcaagaggaaggacaagctgcgggagcacatgcagaggatgcacaaccctgagcgggaggccaagaaggctgaccgcatcagccgcagcaagaccttcaagccccgcatcaccagcacagattatgacagcttcaccttcaagtgccgcctgtgcatgatgggcttcagaagaagaggcatgctggtgaaccacctgagcaagaggcacccagacatgaagattgaggaggtgcctgagctgaccctgcccatcatcaagcccaacagagactacttctgccagtactgtgacaaggtgtacaagagcgccagcaagaggaaggcccacatcctgaagaaccaccctggagctgagctgcccccatccatcaggaagctgcggcctgctggccctggagagccagaccccatgctgagcacccacacccagctgaccggcaccatcgccaccccacctgtgtgctgcccccactgcagcaagcagtacagcagcaagaccaagatggtgcagcacatcaggaagaagcaccctgagtttgcccagctgagcaacaccatccacacccccctgaccacagctgtgatcagcgccaccccagctgtgctgaccacagattctgccactggagagaccgtggtgaccacagacctgctgacccaggccatgacagagctgagccagaccctgaccacagactaccgcaccccccagggcgactaccagaggatccagtacatccctgtgtcccagagcgccagcggcctgcagcagccccagcacatccagctgcaggtggtgcaggtggccagcgccaccagcccccaccagagccagcagagcacagtggatgtgggccagctgcatgacccccagccctacccccagcacgccatccaggtgcagcacatccaggtgtctgagcccacagccagcgcccccagcagcgcccaggtgtctggccagcccctgagccccagcgcccagcaggcccagcagggcctgagccccagccacatccagggcagcagcagcacccagggccaggccctgcagcagcagcagcagcagcagcagaacagctctgtgcagcacacctacctgcccagcgcctggaacagcttccggggctacagcagcgagatccagatgatgaccctgcccccaggccagtttgtgatcacagattctggagtggccacccctgtgaccaccggccaggtgaaggctgtgaccagcggccactacgtgctgtctgagagccagagcgagctggaggagaagcagaccagcgccctgagcggcggcgtgcaggtggagcccccagcccacagcgacagcctggacccccagaccaacagccagcagcagaccacccagtacatcatcaccaccaccaccaatggaaatggcagcagcgaggtgcacatcaccaagccctag

SEQ ID NO: 203303 - DNA, 3483 bp, Artificial Sequence
  derived and/or modified sequence
atggacagcaaggacgagagcagccacgtgtggcccaccagcgccgagcatgagcagaacgctgctcaggttcacttcgtgccagacacagggaccgtggcccagatcgtctacacagacgaccaggtaaggccaccacaacaggtcgtgtacactgccgacggcgcttcttacaccagtgtggacggccctgaacatacactcgtgtatattcaccccgtcgaggcagcccagacactgtttactgacccagggcaagttgcttatgtgcagcaagatgctaccgcacagcaagcatccctccctgtacacaatcaggtgctcccttccattgagtcggttgatggcagcgacccactggcaacattgcagacaccattggggcgtctggaggctaaggaggaagaggatgaagacgaggacgaggacactgaagaagatgaagaagaggacggcgaagataccgacctggacgactgggagccagacccaccccgacccttcgatccccatgacttgtggtgtgaggaatgcaacaatgcgcacgcatccgtctgtccaaaacacggccctctccatcccattccgaaccggcctgtgttgacaagagcacgggcttccttgccactggtgctgtacattgatcgtttcctggggggagtgtttagtaagaggaggatcccaaaacgcactcagtttgggcctgttgagggtcctctggtccgcgggtccgaattaaaggattgctacatccacctcaaggtgagtttagataagggagatcgcaaagaacgagatcttcacgaggatctgtggttcgagctgtccgatgaaacactgtgcaactggatgatgttcgtgcgaccagcacagaaccacctggagcagaacctggtggcctatcagtatggccatcacgtctattatacaaccattaagaatgtggagcccaaacaagaactgaaggtctggtacgcggcgagctacgctgagttcgtcaaccagaaaatacacgatatcagtgaggaagagcgaaaggtgctgcgggaacaggagaagaactggccctgttacgaatgcaatcgccgttttatctccagtgagcaactgcagcagcatctaaactcacacgacgagaagcttgacgtcttttcaagaactagggggcgcggtcgagggcgggggaagagaaggttcggaccggggcggcgcccgggtcgaccccctaagttcatcagacttgaaatcacttcagagaacggcgaaaagagcgacgatggaacccaggatttgctgcatttcccaacgaaggagcagttcgatgaagctgagcctgcaactcttaacggtttggaccagcctgagcagacaaccattcctattccccaattaccccaagagacccaatcttcacttgaacatgaacccgaaactcacaccctccatctgcagcctcaacacgaagaatccgtggtaccaactcagagcacattaactgctgacgatatgaggagggctaagcggattcggctcgagctgcaaaatgcagccctgcaacatctgttcattaggaagagtttcaggccatttaaatgcctgcaatgcggcaaagcattccgggaaaaggacaagctggatcaacatctcaggttccatggcagagaggggaactgcccactgacctgtgacctctgcaacaagggattcataagctccacatccctggagagtcacatgaagctccactctgatcagaagacatacagctgcatcttctgtccggagtccttcgaccgccttgatctcctaaaggatcacgtggctatccacatcaacgacgggtactttacttgtcctacttgtaagaagcggttcccagactttattcaggtgaagaagcacgtgcgaagctttcactctgagaaaatataccagtgcaccgaatgcgacaaggctttctgtaggcccgacaagctcaggctccatatgcttagacattccgatcgcaaggactttctgtgcagcacctgcggcaaacaattcaaaagaaaggacaaactccgagagcatatgcagaggatgcacaatcctgaacgagaggccaaaaaggccgatagaatatcccgctcaaagacattcaagccccgcatcacttccactgattacgattctttcactttcaagtgccgactctgtatgatgggattccgcagacgcggaatgcttgtcaaccatttgtccaagcggcatccagacatgaagattgaggaagtgcccgaattaacacttcccatcataaagcccaaccgagattacttctgtcagtactgtgataaggtctacaagagtgcttctaaacgtaaggcccatattctcaaaaaccaccctggcgcagagttgccaccatccattcgcaaactccgacccgctgggcctggggagcccgaccccatgctgtccactcatactcaattgacgggcaccatcgccactcctccagtctgctgcccacattgttcaaagcagtactctagcaagactaagatggtccagcatatcaggaagaaacatccagagtttgcccagttgtcgaatacaatccacaccccccttaccacagccgtcattagcgccactccggccgtacttacaactgattctgccaccggcgagactgtagttactaccgatctcctcacacaggccatgaccgaactctcccagaccttgacgacagattatcgcacccctcagggggactaccagaggatacagtatattccagtttcccaatctgcgtctgggttgcagcagcctcaacatatccagctgcaggtcgtccaagtggcctcagccacatcacctcatcagtcccagcaatccactgtcgatgtgggccagctgcatgaccctcagccttatccacagcatgccatccaggtgcagcacattcaggtttctgaacccactgcctctgcgccttcttccgcccaggtgagtggccagcctctgtcgccctctgcgcagcaggctcagcagggtctatcccccagtcacattcagggtagcagttcaacacaagggcaggctctgcagcaacaacagcagcagcagcagaattcaagcgtacaacacacttacctccccagtgcctggaacagctttcgcggatatagtagcgaaatccaaatgatgacccttccccccgggcaattcgtcataaccgactccggagtggcgacaccggtgaccactggtcaggtgaaagctgttacttcgggtcattacgttctgagcgagtctcagtccgagttggaggagaaacagacgtcagccctgtctggcggcgtgcaggtcgagccacctgctcacagcgatagtctagacccccagaccaactcacagcagcagacaacacagtatattattacaaccactaccaacggcaacggatcaagcgaagtgcacatcaccaagccctag

SEQ ID NO: 203304 - DNA, 3483 bp, Artificial Sequence
  derived and/or modified sequence
atggattctaaggacgaaagcagccacgtctggcctacatcagccgagcatgaacaaaatgcggctcaggtccatttcgtccccgacaccgggacggttgcgcagatcgtgtacacagatgaccaagtacgcccaccacagcaggtggtgtacaccgcagatggtgcctcttacactagcgtggacggccctgaacacacactggtgtatattcacccagtcgaagcagcccagactcttttcactgacccaggtcaggtggcttatgtgcagcaagacgccacggcccagcaagcctcattgcccgtccacaaccaggtgcttccctcgattgaaagcgtcgatggcagcgaccccctggccaccctccagacacccctgggaaggcttgaggctaaagaagaagaggacgaagacgaagacgaggacacagaagaggacgaggaagaagacggagaagatactgacttggacgactgggaacctgatccccctcgcccatttgatccccatgacctttggtgcgaagagtgcaacaatgctcacgcgtcagtctgccccaagcacggcccactgcatcccattcccaatcggccagtgctgacccgcgcaagagcgtccctgcctctagttctgtatatagacaggttcctcggaggcgtgttcagcaagcgaagaatcccaaagcgtacacagtttgggcctgtggaaggaccactggttcgcggtagtgaactgaaggactgttacatacatctgaaagtgagcctggataaaggcgacagaaaggagcgcgatctgcatgaggatttgtggttcgagctgtcggatgaaaccctgtgcaactggatgatgttcgtgaggccagcgcaaaaccaccttgaacaaaacctagtagcttaccagtacggccatcatgtttattatacaacaattaagaacgtcgagcctaaacaggagctgaaggtatggtacgccgcatcatacgctgaattcgtgaaccaaaaaatccatgatatcagtgaagaagagcgcaaggttctccgcgagcaggaaaagaattggccttgttacgagtgtaaccgaaggttcatctccagtgagcagctgcagcaacatctcaattcccatgacgagaaattggacgttttttctcgcacacgtgggagaggccgtgggaggggcaagcggcgatttggaccaggcagaagacctggtcggccacccaagttcatccgtctagagattaccagcgagaacggtgagaaatccgacgacggcacccaagatttgctgcattttcctaccaaagagcagtttgacgaagcagagcccgctaccctcaacggtcttgaccagcccgagcaaaccactattcctataccacagctgccccaggaaactcagtctagcctggagcacgagcccgagactcatactctgcacctgcaaccccagcatgaggaatccgttgtgcctacccagtcaacgcttactgctgatgatatgagaagagccaaacgcattcgtctcgagctgcagaacgctgccctgcaacatcttttcatccgcaagtcatttaggccctttaagtgcctgcagtgcggcaaggccttccgtgagaaggataagctcgaccagcaccttcgtttccacgggagggaaggcaattgccctctaacctgcgacctgtgcaataagggatttatcagctccactagcctggaatcccacatgaagcttcactccgatcagaaaacatatagttgtattttctgcccggagagtttcgatcgccttgacctgcttaaagaccacgtggcgatacatatcaatgatggttatttcacctgccccacctgtaaaaaacgctttcccgacttcattcaggtcaagaagcacgtgagaagttttcacagtgagaagatctatcagtgcacagagtgcgataaagcgttttgtcgtcccgacaaattgaggcttcacatgcttcggcactctgacagaaaggatttcctgtgcagcacatgtggaaaacaatttaagcggaaagacaagttgagggagcacatgcagcggatgcacaaccctgaaagagaggcaaaaaaagctgaccgcatcagcaggagtaagaccttcaaaccccgtattacgagcaccgattacgattctttcactttcaagtgccggctatgcatgatggggttccggagacggggaatgttggtcaatcacctgtcaaaacgacatcctgatatgaaaattgaggaggtccccgagctgactttgccaattatcaagccaaacagggactacttctgtcagtactgtgataaagtgtataagtctgcaagcaaaaggaaggcgcatatacttaagaaccatcccggagccgaactcccgccatcaatccgtaagctgcggccagcgggaccgggagagcctgatccaatgctgtcaacacacacccagctgaccggcacaatagccacccctcccgtgtgctgtccccactgctccaagcagtattcctccaaaactaaaatggtacagcacatccgaaagaagcatccagaattcgctcaactaagcaacaccatccacacaccccttaccacagcagtaataagcgctactcccgcagtcttaaccaccgattctgcaacaggcgagactgtggtaaccacagacctcctcacacaagctatgaccgagttaagccagacccttaccaccgactaccgaacaccccagggggactatcaacgcatacaatacatcccagtcagccagagtgcttctgggctgcagcagccacaacacattcagctccaagtggtgcaggttgcttctgcgacttcccctcatcagagccagcaatctacagtggacgtgggacaattacacgatccacagccatacccccaacacgcgatccaggttcagcatatccaggtatcagagcctacggcatctgccccatcttctgcgcaggtgagtggtcagccgctcagccccagcgctcagcaggcccagcagggattgagcccctcccacatacaggggtcctcgtctactcagggacaggccttgcagcaacagcaacaacagcagcagaactcctcagtccagcatacttacctgccaagtgcttggaacagcttcagaggctacagctccgagatacagatgatgacattgccacccggacagttcgtgatcactgactctggcgtcgcgactccggttacaaccgggcaagtcaaggctgtaactagcggccattacgttctgagcgagtctcagagtgaattggaagaaaagcagacctctgctctgtctggtggggtgcaggtcgagcctcctgcgcactccgactcactggacccccagactaacagccaacagcagacgacccagtatatcataactaccaccactaatggaaatggatcctctgaggtgcatattaccaaaccttag

SEQ ID NO: 203305 - DNA, 6322 bp, Artificial Sequence
  derived and/or modified sequence
actctgcggcgggaagaaccacctggaggtggcggggggggttgatttctatcacccctagggagagaggatcggggacccgctgatcttccagctcccctcacccaacgtcgtgcatgctgcagacagacctttccgtccttcatgaacacacgtgtggtagacagatgactgtcctgtaccctgtgctgctctaggtgtgccagacgtggagctgtccagttgggagaagatggattccaaagatgaaagctcgcatgtgtggccgacatctgcagagcatgaacagaatgccgcacaggtgcactttgttccggacacaggaacagtggctcagattgtctataccgatgaccaggttcgccccccacagcaggtggtgtacacggcagatggtgcctcctacacatcagtggatggtccagagcacacgctggtgtacatccacccggtggaagctgcacagactctgtttacagaccccggccaggtagcttatgtccaacaggatgctacagctcagcaggcctcattgccagttcataaccaggtgctgccttccatcgagagtgtagatgggtccgaccctttggcaactctgcagacccctctaggcagactggaggccaaagaggaagaggatgaggatgaggacgaggacactgaggaagatgaggaagaagacggtgaggacacggatctggatgactgggagccagacccgccccggcccttcgacccacacgacttgtggtgtgaggagtgcaataacgcgcatgcttcagtgtgtccgaagcacggccccttgcacccgatccccaaccggccggtgctcacccgggccagggcgagcctccccctggtgctctacatagacaggtttctgggcggggtgttctccaagcggcgcatccccaagcgcacccagtttggccccgtggaggggcctctcgtcaggggctcggagctgaaagactgttacattcacctcaaggtttctcttgataaaggggacaggaaagaaagggatttacatgaagacctatggtttgagttgtctgatgagacgctttgtaactggatgatgtttgtacggccagcccagaatcacctggagcagaacctggtggcttaccagtatggccaccatgtgtattatacaaccataaaaaatgtggagcccaagcaggaactgaaggtgtggtatgccgcatcctatgctgagttcgtgaaccagaaaattcatgacatttctgaggaagaaaggaaagttcttcgagagcaagagaagaattggccctgctatgaatgtaaccgccgatttataagctcggagcagttgcaacagcatctcaattctcatgatgagaaactagatgtgtttagcagaacaagaggcagaggaaggggacgaggcaagaggcgattcggtccaggtcgacggccggggcgtcctccaaaatttatccgcctggaaatcaccagcgaaaatggggaaaagagtgacgatgggacacaggacttgctacattttcccacaaaggagcaatttgatgaggctgaaccagccactctgaatgggctggatcaaccagaacagaccactatcccaatccctcagctgccacaggaaacccagtcttccctggaacatgaaccagaaactcacaccctgcacctgcagccgcagcatgaagagagcgtggtgcccacccagagcacgctgacagccgacgacatgcgcagagccaagcgcatccgattggagctgcagaatgcagctcttcagcatctgtttattcggaagtccttccggccttttaaatgcttgcagtgtgggaaggccttccgggaaaaggacaaactggaccagcacttacgcttccatgggcgggaggggaactgcccactgacctgtgatctctgtaacaagggcttcatcagcagcacatccttggagagccacatgaagctccactcagaccagaagacttactcttgcattttttgcccagaatcctttgaccgccttgatttgttgaaagatcatgtggccattcatatcaatgatggctacttcacctgcccaacttgtaagaaacggttcccagattttatccaggtgaaaaaacacgtgcgcagcttccactcagaaaagatctaccagtgcacagagtgtgacaaggccttctgtcgccccgataaactgcgactccacatgctccggcattcggaccgcaaagacttcctgtgttccacctgtgggaagcaatttaagcgaaaagacaaactacgggaacacatgcagaggatgcataatcctgagagggaggccaagaaagccgaccgcatcagccgctccaagacgttcaagccccgcatcacgtccacagactacgacagcttcacgttcaagtgccgcctgtgcatgatgggcttccggcggcgcggcatgctggtaaatcacttatcgaagagacacccagacatgaagatagaagaggtgccagagttaactctacccatcataaaacccaatcgtgattacttttgtcagtattgcgataaggtttataaaagtgccagcaagcgcaaagcccacattctgaagaaccacccaggagcagagctcccaccgagcattcggaagctccgacccgctggtcctggagagccagaccccatgctgagcacacacacccagctgacgggcaccatcgccacccctcccgtctgctgtccccactgctccaagcagtacagcagcaagaccaagatggtccagcacattcgaaagaagcatccagagttcgcccagctctccaacaccatacacacaccactgacgacagctgtgatcagtgccaccccagcggttttgactacagacagcgccactggagagactgtggtgacgacggacctgctcacccaagcaatgacagaactgtcccagaccttaacgacagactaccgaacgccacaaggggattaccagagaattcagtacatccctgtgtcgcagtcggcgtctggcctccagcagcctcagcacatacagctgcaagtggttcaagtggcctcggccacttcccctcaccagtcacagcagtccactgtggatgttggccagctccatgatcctcagccctacccccagcacgccatccaggtgcagcacatccaggtcagcgagcctaccgcctcggccccgtcctccgcccaggtatctgggcagccgttgagtccctcagcccagcaggctcagcaggggctcagcccctcccacatccagggcagttcttccacacaggggcaggctctgcagcagcagcagcagcagcagcagaattcctctgtgcagcacacgtacctgcccagtgcttggaattccttccgtggctattcatctgagattcaaatgatgacgcttcctccgggtcagtttgtgattacagacagtggtgtggcaactccagttactactggccaggtgaaggcggttacttcgggtcattatgtgttatcagaaagtcaatcagaattggaagaaaagcaaacttctgccctctctggtggagtccaggtcgagccacctgcacacagtgactccctggacccccagaccaacagccaacagcagaccacacagtacatcatcaccaccaccaccaacgggaacggaagcagcgaagtgcatatcaccaaaccatgacttccaccctggagcttgaatccagcacccacctcatgtctgttctcataagtctgaaagctctgacacgtagagctcttttgtaagatttattattcactcaagagttcggaaaccacagttttgtctctcatccatacactggggtttattttgccaaggtcatctttatcaaattgactcttcaaaccctcggtttttgccacagaacagagatctttcaggggaaagtagatttcgaggtggagagaatttgccttgctcttgagctggtcttttaacatactgacgagccttacttttcctttgtggaaatattaagtggcatattgtgttcataccaaaggtggagacaggatgtgccaagttcatggttactggacttcttattccaagccatggcaccaaaggagaaggggcattttgtgggtgtgcattaggtctgaactgctttatcttgttttagttttcagtaatttaacaaagggagcctgctgaataacaaaattaaaatgatgaaacaaaagtttgacagtgatattctgaagcaaaaactgtcatctaaatttttcttgctgattttttttaacttccctattttagaaaactattgttgggctgttggtagtgctttccacagatgctggtcctcagtggattaggtcagaagctcatgttctgatagttcttcattatttcacaaaggtggacaacctgaaagagaaaaggctgcttgatgtcagcagaatctaaacccctacattaaagctttgcctcccattctgtggttgtggtggtggtaagaaggagatattggtaccaagaaaaatttccaaaactattgagagagagagagagaaagtattgaaattttgttctgccttgcaggatccatttatcattcattggtaaaggatatattccttgttcttaccaagtgtacatttaactcttgctgacatgttcagtgtattttattacttttaatgctgtcttaaaatgaacattctttaaagttggacaggaaggtggcatttcttatttattaacatttttaactttaaacatattgtgactcatctagaccttttaataagacggtcaacttcacacttagggaaaaaattaaaatgtgatggccacttctaataattcaggtagttataagggatctggaagaaatccagtctttatgaatatactattagttgggcattaaaaaatcagtatatattttaactttttgtgacatgctaacacattttcagaataattattgcatagtagaatttattactccagaacagaaagaccttacttcatttcaaatgaagttaattaatttacatttctgggtaaaaactggttctataaattaagtagagtagcttctttatgataaagacaattttctgaaaagtgaacaattctgttaaaagaactttattgatgtgtagatttcgcactttatttctgagactgcgttcatgtagttgttccccaatgtttgagtactaagagaacttgagaaaattacttcataaacatatggaaactgaaaatggactctctttgtgacaaagatattcaacagaaaatattgaccctgcattgcaaaacacaggttcgggttccctaagtcccacagtgtaatgattacaaatatcctagtgtccggtctagaaagactttctaggagaagactagtggaattttctaaaggttcagttttagcttttataacttaaatttggccctgttacgttctttttaatttgaaccataaggtatctcccctcccttcaggaataacttattggaaaactgaaaagaatcactgaatggaatgttcattttatggcagttgttttaagttttaaaatacacagaggaaaatattgtggaaggacctctttgttgctttcccttctaagttgtcttcttcttcttcttcttcttcttcttctttggtccttaagtgaaataaagactctaaaactaatttgtatattatcagccagagatgcggatggcagtcgagccaaatcgcatggctttcagatcaggtattctgcacattcattccaaggtcatagatttttaaaaggacctggatttgaagagatggcaaatgatgagccatcagaaaacttaatttggaaaacatgtatgtagccagtgtggatattgtggcctctctcaagacacattgacactgtagacttcattcagtccagtgtgagtattttggagtaggttggatgtagattttgtttttatcattgatttgtaccgacagaaatagacatttcatcatgtaaaattcctgttattctggaaaaacctattgttttgatcttcttgttttctgacttggaagtatcctttcaaaaaaactcttaagatatctaggtctaaaaagcacttcatgagatgctaaagctgacccactggttgaaaatgttgaccctatcctgttatttaaatgtgaacatttattgtacattcagtgagttatagtgttaatagtcttgtgctatgcagcaggtgtaaaaattaataaatatattttttaataaacatgtttgtatgtgtgaagctacaaga

SEQ ID NO: 203306 - protein, 264 aa, Artificial Sequence
  derived and/or modified sequence
MFVPCGESAPDLAGFTLLMPAVSVGNVGQLAMDLIISTLNMSKIGYFYTDCLVPMVGNNPYATTEGNSTELSINAEVYSLPSRKLVALQLRSIFIKYKSKPFCEKLLSWVKSSGCARVIVLSSSHSYQRNDLQLRSTPFRYLLTPSMQKSVQNKIKSLNWEEMEKSRCIPEIDDSEFCIRIPGGGITKTLYDESCSKEIQMAVLLKFVSEGDNIPDALGLVEYLNEWLQILKPLSDDPTVSASRWKIPSSWRLLFGSGLPPALF

SEQ ID NO: 203307 - protein, 152 aa, Artificial Sequence
  derived and/or modified sequence
MPAVSVGNVGQLAMDLIISTLNMSKIGYFYTDCLVPMVGNNPYATTEGNSTELSINAEVYSLPSRKLVALQLRSIFIKYKSKPFCEKLLSWVKSSGCARVIVLSSSHSYQRNDLQLRSTPFRYLLTPSMQKSVQNKIKSLNWEEMEKGAFLK

SEQ ID NO: 203308 - DNA, 795 bp, Artificial Sequence
  derived and/or modified sequence
atgttcgtgccctgcggcgaaagcgccccagatcttgcaggctttacactgttgatgcctgctgttagcgtgggcaatgttggccagctcgcaatggatcttataatatccaccctgaatatgtctaagatcgggtacttctatactgattgtctggtgccaatggttgggaacaatccttacgctactacggagggaaacagcacagagctgagcatcaatgccgaggtttattccttgccctcccgaaagctcgtcgccctacagctcagatctatctttataaaatataaaagcaagcctttctgcgaaaaactcctttcttgggtgaagtcttcaggctgtgcccgagttatagttctctccagtagccattcttatcaaaggaacgatttacagcttcgttccactcccttccggtaccttctgacccccagtatgcagaagtctgtgcagaataagatcaagagccttaattgggaggaaatggagaagtcgagatgcataccagagatcgacgatagtgagttttgcatcaggatccctggcggagggatcacgaaaactctctatgacgagtcatgctcaaaggaaatacagatggccgtcctactgaagtttgtaagcgagggagataacatcccagacgccctgggtctggtcgaatatttaaatgaatggctgcaaattcttaaaccattgtcagatgatccgactgtgtcagccagtcgctggaagatcccctccagttggaggttattgtttggcagcggcttgccacccgccctgttttag

SEQ ID NO: 203309 - DNA, 459 bp, Artificial Sequence
  derived and/or modified sequence
atgccggccgtgtcagttggtaacgtgggacagcttgccatggatttaattattagcactctgaacatgtccaaaatcgggtatttttacaccgattgtctggttcccatggtggggaacaatccgtatgctacaacggaaggaaacagcacagaactgtctatcaacgccgaagtgtactccctcccgtctagaaaactagttgcactgcaactacgttccattttcataaaatataagagcaagccattttgtgagaaattattaagctgggtgaaaagttccggatgcgctcgggtgatcgtgctcagttcttcacattcttaccagcggaacgatctacagctacgctcgactccattccgatacttgctgaccccaagtatgcagaagagcgttcagaataaaataaagagcctgaactgggaagagatggaaaaaggtgcattcctgaaatag

SEQ ID NO: 203310 - DNA, 795 bp, Artificial Sequence
  derived and/or modified sequence
atgtttgtgccctgtggggagagcgccccagacctggccggcttcaccctgctgatgcctgctgtgtctgtgggcaatgtgggccagctggccatggacctgatcatcagcaccctgaacatgagcaagattggctacttctacacagactgcctggtgcccatggtgggcaacaacccctatgccaccacagagggcaacagcacagagctgagcatcaatgctgaggtgtacagcctgcccagcaggaagctggtggccctgcagctgcggagcatcttcatcaagtacaagagcaagcccttctgtgagaagctgctgtcctgggtgaagagcagcggctgtgcccgggtgattgtgctgagcagcagccacagctaccagagaaatgacctgcagctgcggagcacccccttccgctacctgctgacccccagcatgcagaagtctgtgcagaacaagatcaagagcctgaactgggaggagatggagaagagccgctgcatccctgagattgatgattctgagttctgcatccgcatccctgggggcggcatcaccaagaccctgtatgatgagagctgcagcaaggagatccagatggctgtgctgctgaagtttgtgtctgagggggacaacatcccagatgccctgggcctggtggagtacctgaatgagtggctgcagatcctgaagcccctgagtgatgaccccaccgtgtctgccagccgctggaagatccccagctcctggaggctgctgtttggaagtggcctgcccccagccctcttctag

SEQ ID NO: 203311 - DNA, 459 bp, Artificial Sequence
  derived and/or modified sequence
atgcctgctgtgtctgtgggcaatgtgggccagctggccatggacctgatcatcagcaccctgaacatgagcaagattggctacttctacacagactgcctggtgcccatggtgggcaacaacccctatgccaccacagagggcaacagcacagagctgagcatcaatgctgaggtgtacagcctgcccagcaggaagctggtggccctgcagctgcggagcatcttcatcaagtacaagagcaagcccttctgtgagaagctgctgtcctgggtgaagagcagcggctgtgcccgggtgattgtgctgagcagcagccacagctaccagagaaatgacctgcagctgcggagcacccccttccgctacctgctgacccccagcatgcagaagtctgtgcagaacaagatcaagagcctgaactgggaggagatggagaagggggccttcctgaagtag

SEQ ID NO: 203312 - DNA, 795 bp, Artificial Sequence
  derived and/or modified sequence
atgttcgtgccctgcggcgagagcgcccccgacctggccggcttcacactgctaatgccagctgtcagcgtgggtaacgtagggcagctggctatggatctgatcatttcaaccctgaacatgagcaaaattggttatttttacactgactgcctggtgcccatggttggtaacaacccctatgctacaactgagggtaattcaaccgaattatctattaacgccgaagtatattcccttcctagccgaaagctcgtggctctccagctacgatctattttcatcaagtacaagagtaagccattctgtgagaagctgctgagttgggtgaaatcatctgggtgcgcgagagtgatcgtgctctcctcatctcattcttaccagcgaaatgatcttcagctgcgctccactcctttcagataccttctgactccgagtatgcaaaaatccgtgcagaataagattaaatctctaaattgggaagagatggagaaaagtcggtgtataccagagattgatgattcggagttttgtattcgcataccaggcggcggaattacaaaaacgttgtacgacgaaagctgttccaaagaaatccagatggctgttctcctgaagtttgtgtctgagggcgataacatccccgacgctctgggcttggtggagtacctgaacgagtggttgcagatacttaagcctctttccgatgacccaacagtgtccgcctcacgctggaaaattcccagctcttggcggttattgttcggtagcggcttaccgccagctctgttctag

SEQ ID NO: 203313 - DNA, 459 bp, Artificial Sequence
  derived and/or modified sequence
atgcccgccgtgagcgtgggcaacgtgggccagctggccatggacctaattatctctactctgaacatgtccaagatcgggtacttttataccgactgtctggtgccaatggtgggcaataacccatacgctaccactgaaggaaattccaccgaactctcgatcaacgcagaggtctacagtctccccagtaggaagctggttgcactgcaacttaggagtatcttcatcaaatacaaaagtaagccgttctgtgagaaacttctaagctgggtgaaatctagcggttgtgctagggtcatcgttctgtcttcatcacacagttaccagcgtaacgacctccaactgagaagtaccccttttcggtatttgcttaccccttcgatgcagaagtctgtgcagaataaaataaaatcgctgaactgggaggagatggaaaaaggggccttcctcaagtag

SEQ ID NO: 203314 - DNA, 795 bp, Artificial Sequence
  derived and/or modified sequence
atgtttgtaccctgcggtgaaagcgcaccggacctggctgggttcactttattgatgccggcagtatctgttggcaacgttgggcaactggctatggacctcattatctcaacgctcaatatgagcaaaatcggttatttttatacagattgcttagtgcctatggtgggcaataatccttatgcaactaccgaaggaaactctaccgaacttagcattaatgctgaagtctactcgctgcccagccgcaagctcgttgctttgcagctgagatctattttcatcaaatacaagagcaaacccttctgtgaaaagctgttgagttgggtcaaatcttcggggtgtgccagagtcatagtcctctcctcttctcactcctatcagaggaatgatctccagctccgctcgacgccatttagatatttgctgacacctagcatgcagaagtcagtccagaataagatcaagtccctgaattgggaggaaatggagaaatcaagatgcatccctgaaatagacgacagtgagttttgtatccgtatcccagggggaggaatcacaaagactctgtacgatgaatcctgcagtaaggagatccaaatggctgtgctgctcaagtttgtgtccgagggcgacaacattcccgatgcccttggcctggtggaatatctgaatgaatggttgcaaattcttaagccactctccgacgaccccaccgtgagcgcctcccggtggaaaataccttcttcctggcgcctgctgttcggttctggtcttccaccggctctgttttag

SEQ ID NO: 203315 - DNA, 459 bp, Artificial Sequence
  derived and/or modified sequence
atgccggctgtgagcgttggtaacgtgggccagctggccatggacctcatcatttccaccctcaatatgtctaaaatcggctacttctacactgactgcctggttcccatggtgggtaacaacccatacgcaaccacagaagggaatagcaccgagctatcaatcaacgcagaagtgtactcgctgccgtccagaaagctggtggcactgcagcttcggagtatttttattaaatacaaatcaaagccattctgcgagaaactcctgagttgggttaagagttccggatgtgcaagagtgatcgttctgtcctcttcccactcttatcagagaaacgaccttcaactgagaagtacaccctttaggtatctgttgactccttctatgcagaaatcagttcagaataagatcaagagcctgaactgggaggagatggagaagggcgctttcctgaagtag

SEQ ID NO: 203316 - DNA, 1686 bp, Artificial Sequence
  derived and/or modified sequence
ggcaggagggaaaggttatgggtcggcccggcggtctctcccagcacccgcgactctcaccttgctcagctgctggtggatgagctgcttcagctcggaggctttctccggaggcagcgacatgctggcagccggcgtctccccgccgcttctccccgcctcagatgccctaactgcgcggccccggccgggccagggagcgttaggagcgactggagcacaaagcgccgcagccgttcgcctagcgcagctcccgggggacgcaacgccgcgtcaggccgggggctgacctggaaatgaggccccggcggcggcggcgccaactgttttcaaacagtggcggacaaacagggcttggggctggcccgcacgctgcctgatcgtttccgcccgccgctccacctccccgcgggccccgcaccccgagacctcagcgcaccccatcgccttgcttgccagggtctccgaaagcgctgctggcccctcttcgcggccacccggcggcctctttccgccctctgaaccggcagttagctggacgggcctcaagggcccggcgcccagggactcaaaggaccctcccgcgccccgcgaggctccggggtctcgggcttccgccttcttgctgccctcgttcttgccagggccgcggttagtccctgctggccaccccactgcgaccatgttcgttccctgcggggagtcggcccccgaccttgccggcttcaccctcctaatgccagcagtatctgttggaaatgttggccagcttgcaatggatctgattatttctacactgaatatgtctaagattggttacttctataccgattgtcttgtgccaatggttggaaacaatccatatgcgaccacagaaggaaattcaacagaacttagcataaatgctgaagtgtattcattgccttcaagaaagctggtggctctacagttaagatccatttttattaagtataaatcaaagccattctgtgaaaaactgctttcctgggtgaaaagcagtggctgtgccagagtcattgttctttcaagcagtcattcatatcagcgtaatgatctgcagcttcgtagtactcccttccggtacctacttacaccttccatgcaaaaaagtgttcaaaataaaataaagagccttaactgggaagaaatggaaaaaagccggtgcattcctgaaatagatgattccgagttttgtatccgcattccgggaggaggtatcacaaaaacactctatgatgaaagctgttctaaagaaatccaaatggcagttctgctgaaatttgtttcagaaggggacaacatcccagatgcattaggtcttgttgagtatcttaatgagtggcttcagatactcaaaccacttagcgatgaccccacagtatctgcctcacggtggaaaataccaagttcttggagattactctttggcagtggtcttccccctgcacttttctgatctaatttctgttttataccttatacccaaaacacttactaccaacacagctgttaaacattctatacaaaaaaattgtatgatctggtattaggaaattactttcacagtaaatatcaaagaaaaaagattaagggtctctttgccatgcttttcatcatatgcaccaaatgtaaattttgtacaataaaattttatttcctaagtaa

SEQ ID NO: 203317 - DNA, 1050 bp, Artificial Sequence
  derived and/or modified sequence
ctcgttcttgccagggccgcggttagtccctgctggccaccccactgcgaccatgttcgttccctgcggggagtcggcccccgaccttgccggcttcaccctcctaatgccagcagtatctgttggaaatgttggccagcttgcaatggatctgattatttctacactgaatatgtctaagattggttacttctataccgattgtcttgtgccaatggttggaaacaatccatatgcgaccacagaaggaaattcaacagaacttagcataaatgctgaagtgtattcattgccttcaagaaagctggtggctctacagttaagatccatttttattaagtataaatcaaagccattctgtgaaaaactgctttcctgggtgaaaagcagtggctgtgccagagtcattgttctttcaagcagtcattcatatcagcgtaatgatctgcagcttcgtagtactcccttccggtacctacttacaccttccatgcaaaaaagtgttcaaaataaaataaagagccttaactgggaagaaatggaaaaaggtgcattcctgaaatagatgattccgagttttgtatccgcattccgggaggaggtatcacaaaaacactctatgatgaaagctgttctaaagaaatccaaatggcagttctgctgaaatttgtttcagaaggggacaacatcccagatgcattaggtcttgttgagtatcttaatgagtggcttcagatactcaaaccacttagcgatgaccccacagtatctgcctcacggtggaaaataccaagttcttggagattactctttggcagtggtcttccccctgcacttttctgatctaatttctgttttataccttatacccaaaacacttactaccaacacagctgttaaacattctatacaaaaaaattgtatgatctggtattaggaaattactttcacagtaaatatcaaagaaaaaagattaagggtctctttgccatgcttttcatcatatgcaccaaatgtaaattttgtacaataaaattttatttcctaagt

SEQ ID NO: 203318 - DNA, 795 bp, Artificial Sequence
  derived and/or modified sequence
atgttcgtgccctgcggcgagagcgcccccgacctggccggcttcaccctgctgatgcccgccgtgagcgtgggcaacgtgggccagctggccatggacctgatcatcagcaccctgaacatgagcaagatcggctacttctacaccgactgcctggtgcccatggtgggcaacaacccctacgccaccaccgagggcaacagcaccgagctgagcatcaacgccgaggtgtacagcctgcccagcagaaagctggtggccctgcagctgagaagcatcttcatcaagtacaagagcaagcccttctgcgagaagctgctgagctgggtgaagagcagcggctgcgccagagtgatcgtgctgagcagcagccacagctaccagagaaacgacctgcagctgagaagcacccccttcagatacctgctgacccccagcatgcagaagagcgtgcagaacaagatcaagagcctgaactgggaggagatggagaagagcagatgcatccccgagatcgacgacagcgagttctgcatcagaatccccggcggcggcatcaccaagaccctgtacgacgagagctgcagcaaggagatccagatggccgtgctgctgaagttcgtgagcgagggcgacaacatccccgacgccctgggcctggtggagtacctgaacgagtggctgcagatcctgaagcccctgagcgacgaccccaccgtgagcgccagcagatggaagatccccagcagctggagactgctgttcggcagcggcctgccccccgccctgttctag

SEQ ID NO: 203319 - DNA, 459 bp, Artificial Sequence
  derived and/or modified sequence
atgcccgccgtgagcgtgggcaacgtgggccagctggccatggacctgatcatcagcaccctgaacatgagcaagatcggctacttctacaccgactgcctggtgcccatggtgggcaacaacccctacgccaccaccgagggcaacagcaccgagctgagcatcaacgccgaggtgtacagcctgcccagcagaaagctggtggccctgcagctgagaagcatcttcatcaagtacaagagcaagcccttctgcgagaagctgctgagctgggtgaagagcagcggctgcgccagagtgatcgtgctgagcagcagccacagctaccagagaaacgacctgcagctgagaagcacccccttcagatacctgctgacccccagcatgcagaagagcgtgcagaacaagatcaagagcctgaactgggaggagatggagaagggcgccttcctgaagtag

SEQ ID NO: 203320 - protein, 911 aa, Artificial Sequence
  derived and/or modified sequence
MKGSNRNKDHSAEGEGVGKRPKRKCLQWHPLLAKKLLDFSEEEEEEDEEEDIDKVQLLGADGLEQDVGETEDDESPEQRARRPMNAFLLFCKRHRSLVRQEHPRLDNRGATKILADWWAVLDPKEKQKYTDMAKEYKDAFMKANPGYKWCPTTNKPVKSPTPTVNPRKKLWAFPSDSSRDLPSPKKAKTEEMPQLNFGMADPTQMGGLSMLLLAGEHALGTPEVSSGTCRPDVSESPELRQKSPLFQFAEISSSTSHSDASTKQCQTSALFQFAEISSNTSQLGGAEPVKRCGKSALFQLAEMCLASEGMKMEESKLIKAKESDGGRIKELEKGKEEKEIKMEKTDETRLQKEAEFEKSAKENLRDSKELRNFEALQIDDIMAIKMEDPKEIRKEELEEDHKCSHFPDFSYSASSKIIISDVPSRKDHMCHPHGIMIIEDPAALNKPEKLKKKKKKSKMDRHGNDKSTPKKTCKKRQSSESDIESVIYTIEAVAKGDWGIEKLGDTPRKKVRTSSSGKGSILDAKPPKKKVKSREKKMSKEKSSDTTKESRPPDFISISASKNISGETPEGIKAEPLTPMEDALPPSLSGQAKPEDSDCHRKIETCGSRKSERSCKGALYKTLVSEGMLTSLRANVDRGKRSSGKGNSSDHEGCWNEESWTFSQSGTSGSKKFKKTKPKEDCLLGSAKLDEEFEKKFNSLPQYSPVTFDRKCVPVPRKKKKTGNVSSEPTKTSKGSGDKWSNKQLFLDAIHPTEAIFSEDRNTMEPVHKVKNIPSIFNTPEPTTTQEPLVGSQKRKARKTKITHLVRTADGRVSPAGGTLDDKPKEQLQRSLPKATETDCNDKCSHNTEVGETRSSTPEMPAVSAFFSLAALAEVAAMENVHRGQRSTPLTHDGQPKEMPQAPVLISCADQ

SEQ ID NO: 203321 - protein, 103 aa, Artificial Sequence
  derived and/or modified sequence
MKGSNRNKDHSAEGEGVGKRPKRKCLQWHPLLAKKLLDFSEEEEEEDEEEDIDKVQLLGADGLEQDVGETEDDESPEQRARRPMNAFLLFCKRHRSLVRQEHP

SEQ ID NO: 203322 - DNA, 2736 bp, Artificial Sequence
  derived and/or modified sequence
atgaagggaagtaaccgcaacaaggatcattctgccgagggggagggagttgggaagcggcctaagcggaaatgtctgcagtggcaccctcttttggcaaaaaaacttctggactttagcgaggaagaggaggaagaggatgaagaggaagatattgacaaggtgcaactgctgggcgctgatgggttagaacaggatgttggtgagactgaagacgacgagagtccagagcagcgggctcggcgaccgatgaacgcctttctcctcttttgcaagaggcaccgctccctggttagacaagagcatccacggcttgataacagaggagcaaccaaaatactggctgattggtgggcggtgttagaccccaaggaaaaacaaaagtacactgacatggctaaggaatacaaagacgcgtttatgaaggctaaccccgggtacaaatggtgccctacaacgaataaaccggtaaaaagccccacccccacagtgaatcctcgcaagaaactatgggccttccctagcgattcgagcagggacctccctagccccaaaaaagcgaaaaccgaggaaatgccccagctgaattttgggatggctgacccgacccagatggggggtcttagcatgctgctgctcgctggcgaacatgctcttggaacaccggaggtctcctcaggaacatgtcgccccgatgtaagtgagagccccgagctgcggcagaagagtcctttgtttcagtttgcagaaatcagttcaagcacttcacattctgacgctagcactaaacagtgtcagacatcagccttgttccagttcgcagagatatcatcgaacacatcccagctcggcggtgccgaacccgtcaagcggtgcggtaagtctgccctcttccaactcgctgagatgtgtttagcctctgagggtatgaagatggaagaatcgaagcttatcaaagccaaggagagtgatggaggacgcattaaagagctcgaaaagggaaaagaggaaaaagagatcaagatggaaaagaccgacgaaacgagactccagaaggaagctgaatttgagaaatccgcaaaggaaaacttacgagatagcaaggaactgcggaattttgaagcattacagattgatgacattatggccattaagatggaagatccaaaggagatccggaaggaagagctggaggaagatcataagtgcagccacttcccagacttttcatacagtgcctcaagtaagattatcatatcggatgttccgagcaggaaggaccatatgtgccacccccacggtataatgattatagaggatcccgccgccctgaacaaacctgagaagctcaagaagaagaagaaaaagagcaagatggatcgccatggcaacgacaagtccacgcctaaaaaaacgtgtaagaagaggcagtctagcgagtctgatattgagtcggttatctacaccattgaagcagtggccaaaggagactggggaatagaaaaactgggggatactccgagaaagaaagtccgcacgtcttctagtgggaaagggagcattctcgatgcaaaaccaccgaagaaaaaagttaagtcgagagaaaagaagatgtcaaaagagaaaagttctgacactactaaagagagccggcctcccgatttcatctcaatctctgctagtaaaaatatatccggcgaaactcccgaaggtattaaggctgaacccctaacccccatggaagatgccttgccaccatcactctccggccaggccaagcccgaggattcggactgtcaccggaagatagaaacatgtggttctcgcaagtcagagcgtagttgcaaaggggcattgtataaaactctggtttcagagggtatgctgacatctctgcgagccaacgtggaccgcggaaaaagaagttccggcaaaggaaacagctctgaccacgagggttgctggaatgaggaatcttggacatttagccagtccggaaccagtggatccaagaagttcaagaagacaaagcccaaggaagattgcctgctaggttcagccaagctggacgaggagttcgaaaagaagttcaattctctccctcagtattcacccgtgactttcgaccgcaagtgtgttcctgtgccacgaaagaaaaagaagaccggaaatgtctctagtgagccaaccaaaactagtaagggatcgggagataaatggtcgaataaacaactttttctcgacgcaatccacccaactgaggccatattcagcgaggaccgcaatactatggagcctgtgcataaagtgaaaaacatcccatctatctttaataccccagagcctactaccacacaggagcccctcgtggggtcgcagaagcggaaagccaggaagaccaagattacccacttggtccggacagccgatggccgtgtttctcccgctgggggtacactcgacgacaagcccaaagagcaactgcagaggtcgttaccaaaggctacagagactgactgtaacgacaagtgctcccataacacagaagtcggtgagaccaggtcaagtacaccggaaatgccggctgtgtcagcattcttctcactcgccgcgctggccgaagtggctgctatggaaaacgtgcacagaggacaacgcagcacccctttaacccacgatggacaacccaaggaaatgccacaagccccagtattgattagctgtgcggaccaatag

SEQ ID NO: 203323 - DNA, 2736 bp, Artificial Sequence
  derived and/or modified sequence
atgaagggttctaatcgtaataaggaccattcagcagagggagagggtgttggaaaacgacccaagcgtaaatgcctacagtggcaccctctgctggctaagaagctattagacttcagcgaagaggaggaggaagaggatgaagaagaagatatagataaggtccagctactgggagccgacggtctggagcaagacgtgggcgagacagaggacgatgaatcacccgagcagcgggcgaggaggcccatgaacgccttcttgcttttctgcaaaagacatcgtagtcttgtgaggcaagagcaccccaggctcgacaatcgtggcgctaccaaaattctggccgactggtgggccgttctggatccaaaagaaaaacagaagtatactgatatggcaaaagaatacaaggacgcgtttatgaaggccaatccggggtacaagtggtgtcccacgactaataagcccgtgaaatcacctaccccaacagttaaccctcgcaagaagctgtgggccttcccatccgattcgagccgtgatctacccagtccaaagaaggctaaaaccgaggagatgcctcagctaaatttcggtatggccgacccgactcaaatgggaggcctgtccatgctcttactcgccggcgagcacgcgctcggaacaccggaagtctccagcgggacctgtcgccctgatgtgtcagaatcacctgaacttcggcaaaagagcccccttttccagtttgctgagatctcgtcgtccacctcccattccgacgcctctaccaagcagtgccagaccagcgcattgttccagtttgccgagatctcaagcaatactagtcagttgggtggcgcggagccagtcaagcggtgcggaaagagtgcgctcttccaactcgcggagatgtgtcttgcttctgagggaatgaagatggaggagagcaagctgattaaggctaaggaaagtgatggagggagaatcaaggagttggagaagggcaaggaggagaaggagattaagatggagaagacagatgagacccgtctgcagaaggaagcggaatttgaaaaatcagctaaggaaaacttaagagactccaaggagctccgcaacttcgaggcactgcagattgacgacatcatggctatcaaaatggaagacccaaaggaaatccgaaaagaggagttggaggaagatcataagtgcagtcattttccagacttctcctactctgcctctagcaagatcattatctccgatgttccctccaggaaggaccacatgtgtcacccacacggaatcatgatcattgaagatcccgccgctctgaacaagcccgaaaaattgaaaaagaagaaaaaaaaaagtaaaatggacagacatggaaacgataagtctactcccaaaaagacttgtaagaaacgccagtccagcgagagcgacatcgagtccgttatctataccatagaggccgtagcgaagggggattggggcattgaaaagctcggggacactccacggaagaaggtccgcaccagctcgtctggcaagggcagtattttagatgctaagcctccgaagaaaaaggtcaagtctcgagaaaagaagatgagcaaagagaagagcagcgacaccactaaagaaagtcgccccccagacttcatctccatttcagcctcgaaaaacatctccggcgagacgccagaggggattaaggcagaaccgctgactcccatggaagacgctctaccccccagcctgagcggacaggcaaagccagaagattcggactgccacaggaagatcgaaacatgtggctcgcggaaatccgaacgcagttgtaaaggggcattgtataaaactctcgtctcagagggaatgctgacgtcgctcagagccaatgtggacaggggaaaacgctcgagtggtaaaggcaacagctctgatcacgaaggttgctggaatgaggagtcctggacattttcccagagcggcaccagcgggagcaagaagttcaagaagacaaaacccaaggaagattgcctgctggggtccgccaagttggacgaggaatttgagaagaagtttaattcactgcctcagtatagcccagtgacatttgataggaagtgcgtacctgtgcctcgcaaaaagaagaaaacaggcaacgtttcaagtgaaccaacaaaaacatccaaagggagtggtgacaaatggagcaacaagcagctgttcctggacgccatacaccccacagaggcaatcttctcagaggatcgcaacaccatggaacccgtccacaaagtgaagaacatacctagtatcttcaacacacccgagcccaccacgacgcaggagcctttggtaggaagccagaagaggaaagcccgcaaaaccaagatcacacaccttgtgcgcactgcagacggccgagtgagccctgctggcgggaccctggatgataaaccaaaggagcaactgcaaagatccctccccaaggctactgaaactgactgtaacgacaagtgtagccataacaccgaagttggcgagacccgcagctccaccccagaaatgccagccgtgagtgccttctttagcttggcggctcttgccgaggtcgctgctatggaaaatgtccatcgtggtcaaaggtccacccctcttactcacgacggtcaaccaaaggaaatgccccaagctccagttctgatcagttgtgcagaccagtag

SEQ ID NO: 203324 - DNA, 2736 bp, Artificial Sequence
  derived and/or modified sequence
atgaagggcagcaacagaaacaaggaccacagcgctgagggggagggcgtgggcaagaggcccaagaggaagtgcctgcagtggcaccccctgctggccaagaagctgctggacttcagcgaggaggaggaggaggaggatgaggaggaggacatcgacaaggtgcagctgctgggcgcagatggcctggagcaggatgtgggggagacagaagatgatgagagccctgagcagagggcccggcggcccatgaatgccttcctgctcttctgcaagaggcacaggagcctggtgcggcaggagcacccccggctggacaacagaggagccaccaagatcctggccgactggtgggccgtgctggaccccaaggagaagcagaagtacacagacatggccaaggagtacaaggatgccttcatgaaggccaaccctggctacaagtggtgccccaccaccaacaagcctgtgaagagccccacccccaccgtgaaccccaggaagaagctgtgggccttccccagcgacagcagccgggacctgcccagccccaagaaggccaagacagaggagatgccccagctgaactttggcatggctgaccccacccagatgggcggcctgtccatgctgctgctggccggggagcacgccctgggcaccccagaggtgagcagcggcacctgcaggccagatgtgtctgagagccctgagctgcggcagaagagccccctcttccagtttgctgagatcagcagcagcaccagccacagtgatgccagcaccaagcagtgccagaccagcgccctcttccagtttgctgagatcagcagcaacaccagccagctgggcggcgctgagcctgtgaagagatgtgggaagagcgccctcttccagctggccgagatgtgcctggccagcgagggcatgaagatggaggagagcaagctgatcaaggccaaggagagtgatggcggccgcatcaaggagctggagaagggcaaggaggagaaggagatcaagatggagaagacagatgagacccggctgcagaaggaggccgagtttgagaagagcgccaaggagaacctgcgggacagcaaggagctgaggaactttgaggccctgcagattgatgacatcatggccatcaagatggaggaccccaaggagatcaggaaggaggagctggaggaggaccacaagtgcagccacttcccagacttctcctacagcgccagcagcaagatcatcatcagtgatgtgcccagcaggaaggaccacatgtgccacccccacggcatcatgatcattgaagatcctgctgccctgaacaagccagagaagctgaagaagaagaagaagaagagcaagatggacagacatggaaatgacaagagcacccccaagaagacctgcaagaagaggcagagcagcgagagtgacattgaatctgtcatctacaccatcgaggccgtggccaagggggactggggcatcgagaagctgggggacacccccaggaagaaggtgaggaccagcagcagcggcaagggcagcatcctggatgccaagccacccaagaagaaggtgaagagccgggagaagaagatgagcaaggagaagagcagtgacaccaccaaggagagccggcccccagacttcatcagcatcagcgccagcaagaacatctctggagagaccccagagggcatcaaggccgagcccctgacccccatggaggatgccctgccccccagcctgagcggccaggccaagccagaagattctgactgccacaggaagattgagacctgtggcagcaggaagtctgagaggagctgcaagggggccctgtacaagaccctggtgtctgagggcatgctgaccagcctgcgggccaacgtggaccggggcaagaggagcagtggaaaaggaaacagcagtgaccacgagggctgctggaatgaggagagctggaccttcagccagagcggcaccagcggcagcaagaagttcaagaagaccaagcccaaggaggactgcctgctgggcagcgccaagctggatgaggagtttgagaagaagttcaacagcctgccccagtacagccctgtgacctttgacagaaaatgtgtgcctgtgcccaggaagaagaagaagacaggaaatgtgtcctctgagcccaccaagaccagcaagggcagcggggacaagtggagcaacaagcagctgttcctggatgccatccaccccacagaggccatcttctctgaagatagaaacaccatggagcctgtgcacaaggtgaagaacatccccagcatcttcaacaccccagagcccaccaccacccaggagcccctggtgggcagccagaagaggaaggccaggaagaccaagatcacccacctggtgaggacagcagatggccgggtgtccccagctgggggcaccctggatgacaagcccaaggagcagctgcagaggagcctgcccaaggccacagaaacagactgcaatgacaagtgcagccacaacacagaggtgggggagaccaggagcagcaccccagagatgcctgctgtgtctgccttcttcagcctggccgccctggccgaggtggccgccatggagaatgtgcaccggggccagaggagcacccccctgacccatgatggccagcccaaggagatgccccaggcccctgtgctgatcagctgtgccgaccagtag

SEQ ID NO: 203325 - DNA, 2736 bp, Artificial Sequence
  derived and/or modified sequence
atgaagggcagcaaccggaacaaggaccacagcgccgagggcgagggcgtaggtaaaaggccaaaaagaaagtgcctacagtggcaccctctactcgccaaaaagctgctagatttttctgaagaagaggaagaggaggacgaggaggaagacattgacaaggtccagctcctgggtgctgatggcctcgagcaggatgtgggggaaaccgaggatgacgagagtccagagcagcgggccaggaggcccatgaacgccttcttactcttctgcaaaaggcacaggagcctagtgcgacaagagcatcctcgactggataataggggcgcgacgaagatcctggccgactggtgggctgtgctcgacccaaaggagaagcagaagtacacagacatggcgaaggaatacaaagacgctttcatgaaagcaaatcccgggtacaaatggtgcccaacgactaacaaacccgtaaaatccccaacacccacagtgaacccccgcaagaagctgtgggccttcccatcggacagctcaagggatcttccgtctccgaaaaaagcaaagaccgaagaaatgcctcagctgaacttcggcatggctgatccaacccagatgggtgggctgtctatgttgctgcttgcaggcgagcatgccctgggtaccccggaggtgagtagtgggacttgtagaccggacgtgtcagagtcacccgaactgagacagaaatcaccgctttttcagttcgccgaaatctcaagttctacatctcacagtgatgccagcaccaagcagtgtcaaaccagcgccttgttccagtttgcggagatttcatcaaatacgagccagctggggggggcggagcctgtgaagcgctgtggtaagagtgccctgtttcaattagccgaaatgtgcctcgcatccgaggggatgaaaatggaagagtctaagctaattaaagccaaggaaagtgatggaggtcgcatcaaggaactggagaaagggaaggaagaaaaggaaataaaaatggagaagacagatgaaactcggctacagaaggaggccgaattcgaaaagtcggctaaggagaacctgagggactctaaggagctgcggaactttgaagccctacaaatcgacgacatcatggcgattaagatggaggatcctaaagaaattcgaaaggaggaattagaggaggaccataaatgtagccacttccccgatttctcttattctgctagtagcaagatcatcatcagcgacgtgccatcccggaaggaccatatgtgccacccccatggtattatgataatcgaggatcccgccgctctgaacaaacctgagaagctcaaaaaaaagaaaaaaaagtctaagatggacagacacggaaacgacaagagcacgcccaaaaagacctgcaagaagcgccaaagctcagaaagcgacattgagtctgtgatctacaccatcgaggctgtggcaaagggagactggggcatcgaaaagctcggcgacaccccccggaaaaaagtaagaacgagctcttctgggaaaggaagcattctcgatgctaagccgcctaaaaaaaaggtgaaatcccgcgagaagaaaatgtctaaggaaaaaagcagcgataccacaaaagaatctcgtccgccggacttcattagcattagcgcctctaaaaacatcagcggagagactccagagggcatcaaagctgagcctctgacccctatggaggacgccttgccgcctagtctctctggccaggccaaacccgaagacagtgactgtcaccgcaagattgagacatgtggttcgcgcaagtccgagagatcttgcaagggggcactgtataagaccttagtctcggagggaatgctgacatcactccgggctaacgtggacagaggaaaaagaagcagtggaaaaggaaatagcagcgaccatgaggggtgttggaacgaagagagttggaccttctcacaatcgggcacctcaggctccaagaaattcaagaagactaaacccaaggaagattgtttgctggggtcggctaaactggacgaagaattcgaaaagaaatttaactcattacctcaatacagccccgtgaccttcgacaggaagtgcgtgcccgtgcctaggaagaagaagaaaacgggaaatgtatcttccgagccaactaaaactagcaagggatcaggcgacaaatggagtaacaaacaattgttcttggatgccattcatcccacagaggcaatcttctcagaagaccgcaacactatggaacctgtccacaaggtaaagaatataccaagcatctttaatacccccgaacccacaacaactcaagagcctttagtggggagccagaaaaggaaggctagaaagacaaaaattacacacctcgtccgcaccgcagatgggcgtgtgtctccagcgggcggtactcttgacgacaaacccaaagagcagctccagaggtcactgccaaaggcgaccgaaaccgattgcaacgacaaatgctcccacaatacagaagtcggagagactaggtcctctactccagaaatgcctgctgtctctgctttcttctctctggccgccttggcagaggtggccgcaatggagaacgtgcatcggggtcagagaagtactccacttacacacgacggacagccaaaggagatgcctcaggcccctgtgctcatatcctgcgcggatcagtag

SEQ ID NO: 203326 - DNA, 2736 bp, Artificial Sequence
  derived and/or modified sequence
atgaagggcagcaaccggaacaaggaccacagcgccgagggcgagggggtcggcaagcgtcctaagcgaaagtgcctgcagtggcatcccctcctggctaagaagctgcttgattttagtgaagaggaggaggaagaagacgaggaagaagacatcgacaaagtgcaactgttgggtgccgatggattggaacaggacgtgggcgagaccgaggatgacgaaagccccgagcaacgtgcccgccgcccgatgaatgcgtttctcctcttctgcaaacggcacagaagcttagtgagacaggagcatccgcgactagacaataggggcgcgaccaagattctggcagattggtgggcagttctcgaccctaaagagaagcagaagtacactgacatggcaaaggagtataaggacgctttcatgaaggccaaccccggatataagtggtgccccacgactaacaagccagtcaagtcaccaacaccaactgtgaatccgcggaaaaaactgtgggcattcccgagcgacagttcgcgggacctcccatcccctaagaaagccaagacggaggaaatgccacagctgaatttcggtatggccgaccccactcagatggggggcctgagcatgctgctgcttgcgggggagcacgcattgggcacccctgaggtcagttccggcacctgtagacctgatgtgagcgagtcacctgagctacggcagaaaagcccgttatttcagttcgcagaaatttctagctcaacatcgcactctgacgcttcaactaagcagtgccaaacctctgcgttattccagttcgccgaaatcagttcaaatacatcgcagctcggcggtgcggaacctgtgaagagatgcggtaaatcggcactgttccagctcgccgaaatgtgtctggctagtgaaggaatgaagatggaggagtcaaaactcataaaggccaaggagtcagatggaggcagaattaaagagttagagaagggaaaagaggagaaagagatcaaaatggaaaaaaccgatgagacaagactccagaaggaagcagagtttgaaaagtccgccaaggaaaacctcagagacagcaaggaacttagaaatttcgaagcattgcaaatcgatgacattatggcgatcaagatggaggacccaaaggaaatacggaaagaagagttggaggaggaccataagtgcagtcacttccctgacttctcttattccgcctcaagcaaaatcatcatatcagacgttcctagtcgtaaagatcatatgtgccacccccatggcataatgatcattgaagatcccgccgctctaaacaaacctgaaaaactgaaaaagaaaaaaaagaaatcaaagatggataggcacggcaacgataaaagtaccccaaaaaagacttgtaaaaagcggcagtcttcagaatcagatattgaatctgtgatttacaccatcgaggcagttgcgaagggggattggggcatagaaaagttgggcgataccccccgtaagaaagttagaacatcaagcagtggcaagggcagcattctggatgccaagcccccgaagaaaaaggtgaagtctcgggagaaaaaaatgagtaaagagaagtcctctgatacaacaaaagaatcccggccaccagactttatcagcatttctgccagtaagaatatctctggagagaccccagaaggtatcaaagcggagcctctaacacccatggaggatgcactgccaccttccctctctggccaagctaaaccagaggactccgactgccataggaaaattgagacttgtggcagccgcaagagcgaacggagttgcaaaggagcattatataaaaccctggtgagtgagggaatgttgactagcctacgagccaacgtggacaggggaaaaagatcaagcggcaaaggaaactcctccgaccacgaaggatgctggaatgaggagtcgtggacgttctcccaatccggaacctctggaagcaaaaaatttaagaagaccaagcccaaggaagactgcttattgggttcagctaagcttgacgaagaatttgaaaagaagtttaacagtctgcctcagtacagcccagtcacattcgatagaaagtgcgtgcccgttcctcgtaaaaagaagaagacaggcaacgtgtcttccgagccaaccaagacatctaaggggagtggggataaatggtctaataagcaactgtttttggatgctattcatccaacagaggccatcttttccgaggacaggaacaccatggaacccgtccacaaagttaaaaacatcccttcgatcttcaacactcctgaacccactacaacacaggaaccccttgttggcagtcagaaacggaaagcccgcaaaaccaaaatcacacacctcgtacgcaccgccgatgggcgtgtcagtccagccgggggaactttagatgataagcccaaggagcaactccagcggtctctgcccaaggcaacagaaaccgactgtaacgacaagtgttctcacaatacagaggtgggagaaacacgcagctccaccccggagatgcctgctgtcagtgcgttcttctctcttgcagctctcgcagaggtagccgctatggagaatgttcaccggggacagaggtctacccccctgactcacgacggacagcccaaggaaatgccgcaggcccccgtgctcatttcttgcgccgaccagtag

SEQ ID NO: 203327 - DNA, 2736 bp, Artificial Sequence
  derived and/or modified sequence
atgaaaggcagcaatagaaacaaggatcactcggctgagggggaaggagtggggaagcgacctaaacgcaagtgtctgcaatggcaccctttacttgcaaaaaaattgctagatttctcggaggaagaggaggaagaggacgaagaagaggatattgataaagtgcaactgcttggcgctgatggtttagagcaggacgttggcgagaccgaggacgatgaaagcccagaacagcgagccagaaggcccatgaacgctttcctccttttctgtaaaagacatcgcagtctagtccgccaggagcatccaaggttagataaccggggagcaacgaaaatactggctgactggtgggcggttttggaccctaaggagaagcaaaaatataccgacatggctaaggagtataaagatgcttttatgaaggctaaccctggttacaaatggtgtccgactacaaacaaacccgtaaaaagccccaccccaaccgtgaatccgaggaaaaaactctgggcgtttcctagtgactcctcacgagatctgccttctcccaagaaggcaaaaaccgaagagatgccacagttgaattttggtatggctgaccccactcaaatggggggattgtccatgctgttgctcgccggagaacacgctctaggaaccccagaagtgtccagcgggacatgtcgcccagacgtttctgagagtcccgaattaaggcagaaatcacccctgtttcagtttgctgaaatctctagttccacctctcactccgacgcttctacaaagcaatgccagacatcggcgctcttccagtttgccgagatctcttccaatacttcccagctcggcggagccgaacccgtgaagaggtgtggaaagtctgccctgttccagctggctgagatgtgtctggcttcggagggcatgaaaatggaggagtccaagctcataaaggcgaaagagtcggatggcggtcgcatcaaggaactggagaaaggcaaggaagagaaggaaattaagatggaaaagacagacgagacccgcctgcagaaagaggccgaattcgagaaatccgcaaaggagaatctacgggattcaaaggagcttaggaacttcgaggctctccaaatagatgatattatggctatcaagatggaagaccccaaagagattcggaaagaagaacttgaggaggaccacaagtgcagccatttcccggacttttcctacagcgcctcctcaaaaattatcatttctgatgtcccttcccgcaaggatcatatgtgccaccctcacggcattatgatcattgaggaccctgctgcactcaacaaaccggagaagctgaaaaaaaaaaaaaaaaaatcgaaaatggaccgacatggcaacgataaaagcacaccaaaaaagacctgtaaaaagcgccagtcctctgagtccgacatcgagtccgtgatttacacaatcgaagcagtggccaaaggtgattggggcatagagaagctgggagataccccacgaaaaaaagtccggacctcaagcagcggaaaggggtctatcctggatgccaagcctcccaaaaagaaggtgaagtctagagagaaaaaaatgagcaaggaaaagagctccgacacaaccaaagaaagtagaccccctgacttcatctctattagtgcctccaaaaacatcagtggggagacccctgaggggattaaggccgagccactaacacccatggaagatgccctgcctccaagcttgtccggccaggcaaagcctgaggatagcgactgccaccgcaaaatcgagacgtgcggttcccggaagtccgagcgttcctgcaagggtgccttatacaagaccctggtgagcgaaggaatgttaacatctctaagggctaatgtcgacaggggtaagcggtcttctggcaagggtaatagcagtgatcatgaaggatgctggaacgaagagtcatggacttttagccagagcgggacttccggatccaaaaagtttaaaaagacgaaacctaaggaagattgccttctggggtccgccaaactcgacgaggagttcgagaaaaaattcaactcactgccccagtattctccagtgacttttgaccggaaatgcgtgcctgtacctcgcaaaaagaagaagactgggaatgtgtcttccgagcccaccaaaacctccaagggatctggcgataagtggtcgaataagcagctctttcttgatgccatccaccctacggaggcaattttcagtgaggataggaatactatggagccagttcataaagtgaaaaatatcccaagcatattcaacaccccagaaccaacgactacccaagaaccactagtcgggagccagaagagaaaagctaggaaaaccaagatcacgcacctagtccgcacagctgatggaagagtgtctccagcaggcggtacactcgacgacaagcctaaagaacaacttcagcgctctttgcctaaggcaaccgaaaccgactgcaacgacaaatgctcccacaatacagaagtcggcgagacccgcagttccactcccgagatgcctgctgttagtgccttcttttcactggccgctctggctgaagtggcggcaatggaaaatgtgcatcggggtcaacgttcgactccacttacccatgatggccaacccaaagagatgcctcaggcaccagtcctgattagctgcgctgatcagtag

SEQ ID NO: 203328 - DNA, 2736 bp, Artificial Sequence
  derived and/or modified sequence
atgaagggttctaacaggaacaaagaccattctgccgaaggggaaggggtgggcaagagacctaaacgcaagtgcctgcagtggcatcctctcctcgcgaagaagcttcttgatttcagtgaagaagaggaggaagaggatgaagaagaggatatcgacaaagtccagctcctaggcgctgatggtttagagcaagatgtaggggagacagaagacgacgagtctccagaacaacgggctcgaagacccatgaatgcatttcttcttttctgtaagagacacagatcactcgtgcgccaagagcacccaaggctggacaatagaggagctacaaagattctggccgattggtgggccgtgctggacccgaaagagaagcagaaatacaccgacatggccaaggaatacaaggacgccttcatgaaggccaaccccggatacaaatggtgtccaactactaataagcctgtgaaatcccctactccaaccgtgaacccacgtaagaagctgtgggcgtttccttctgactctagtcgggatctcccttcgccaaagaaggccaaaactgaggaaatgccccagttgaatttcggtatggcagacccaacccagatgggtggcctgagcatgctgttgctggccggtgagcacgccttggggactcccgaggttagctcaggaacttgccgccctgatgtctctgagagtccagagcttcggcagaaatccccactgttccagttcgcggagatttcctcttcgacgtcccactcagacgctagtactaaacaatgccagaccagcgcactttttcaattcgcagagatcagtagcaacacaagtcagcttggcggagctgagcctgtgaagagatgtggtaaaagtgcactctttcaactggcggagatgtgtctggcaagcgaaggaatgaagatggaggagagcaagttaattaaagccaaggaatccgatggcggtcgaatcaaggagctcgagaaagggaaagaggaaaaggagataaagatggagaaaacagatgagacccgccttcagaaggaggccgagtttgagaagagcgccaaggagaaccttcgtgactcaaaggagttaagaaactttgaagccctccaaatcgacgacatcatggcgattaaaatggaggaccctaaggagatcaggaaggaggagcttgaggaggatcacaaatgcagccatttccctgattttagctattctgcctcgagtaaaatcatcatttccgacgtgccatctcgaaaagatcatatgtgtcacccgcatggaatcatgatcatcgaggatccagcagccctgaacaagccagagaaactcaagaagaagaaaaagaagtccaagatggaccggcatggcaatgataaatccacgccaaagaagacatgcaaaaaacgccagtcctccgagtccgacattgagagcgtgatatacacaattgaggcagtcgcaaagggggactggggtatcgagaaactgggggatacgcctcggaaaaaggtcagaacatcaagctccggaaagggtagcatcctagacgccaagcctccaaaaaagaaggtcaagtcacgtgagaaaaaaatgagcaaagaaaaaagcagtgacaccacaaaagagtcacggccacctgacttcatctctatcagcgcaagtaaaaacataagtggcgagacccctgagggaatcaaggcagagcctctgaccccgatggaagacgcactgccacctagcctgagtgggcaggctaaaccggaagactctgactgccaccggaagatcgagacatgtggctcccgcaagtcagaacggtcctgtaagggagccctctacaaaacactggtctccgaggggatgcttacctccttgcgtgccaatgttgaccgcggaaaaaggtcttccggaaaaggaaacagttcagatcatgaaggctgctggaatgaggaaagctggacattctcccagtctggaacgtcaggcagtaaaaaattcaaaaagacaaaaccgaaagaggattgccttttggggagcgccaaactggatgaagagttcgaaaaaaaattcaattccttaccacaatattctccagtcacattcgataggaagtgcgtgcctgtgccgcgaaaaaagaaaaaaacaggaaacgtttcttccgagcccaccaagacaagcaaaggttccggcgacaagtggtcaaacaagcaactgttcttggacgctattcatccaaccgaggccatcttttccgaggaccggaacactatggagccagttcataaagtgaagaatatccctagtatttttaatacccccgagcctaccacaacacaggaacccctggttggcagtcagaagaggaaagctcgcaagaccaagatcactcacctcgtgagaactgccgacggcagagtaagtcctgcaggagggaccttggacgataaaccaaaggaacagcttcagcgttcactccccaaggctactgagaccgactgtaacgacaaatgctcccacaacaccgaggtcggagagacccgatctagcacgcctgaaatgcctgccgtgtcggcttttttcagtctggccgctctcgccgaagtagcagccatggagaacgtgcacaggggacagcgcagcacgcccctgacccacgatgggcagccaaaggagatgccccaggccccagtcctcatttcttgtgccgaccagtag

SEQ ID NO: 203329 - DNA, 3674 bp, Artificial Sequence
  derived and/or modified sequence
tgctcagatcagcttcctgcttctcatgaaagctgttcccctataaagctggtctgctttcactgaaagaattatattcataagtctgaggctggttttgtggaagtattgttggtttggtttcctttgggggatgaaggaggaggaaacaattttttttaaaaaaaaagtgggggcaggctgaaagagcaaaatcatcttgaattttgttgtcacatcgtgccggtgttataaccagctctgtagactgccgcactgaaaacatttctgtgagagaatcctgctgcatcacagaagctggaagttctgatgttccactgaaatcacaatggaaagtcttgacttgactggtaagagctgttgtgaaggtacatcttacttacttacctggaagcagtgaggcagtcaagaattatgtgctgtcagagctggtctcagcatgatcaaggaagtgtgatcattggatatttttttcttgtcaattttattattttttaaagtgtgacttttattgatctccattatcaagtcacagtaatgaaaggcagtaatagaaataaggatcattcagcagaaggagaaggggttggaaaacgaccaaaacgaaagtgtcttcagtggcatccattgctagcaaagaaacttcttgatttttcagaagaggaagaagaggaagacgaagaggaggatattgataaggttcaacttcttggggccgatggcctagagcaagatgttggtgaaactgaagatgatgaatcaccagagcagcgagcccggagaccaatgaatgcatttcttttattttgcaaacgccatcgctctcttgtacgtcaggaacaccccaggcttgataaccgaggtgctaccaagatactagctgattggtgggctgttcttgatccaaaggaaaagcagaaatacacagacatggccaaggagtataaggatgcatttatgaaagcaaatcctggctacaaatggtgtcctaccacaaacaagcctgtgaaatccccaacacccactgtcaatccacgaaagaaactttgggccttcccatctgactcttcaagagacttgccaagccccaagaaagcaaagactgaagaaatgcctcagcttaactttggaatggctgatcctactcaaatgggaggcctgagtatgctgctgttagctggagaacatgctcttggcacaccagaggtatcctctggcacatgcaggcctgatgtttcagaatctcctgaattacgtcagaagtcaccattgtttcagtttgccgagatatcttcaagtacgtcccactctgatgcttctacaaagcagtgtcaaacatctgccttgtttcagtttgcagagatttcttcaaacacttcgcagttgggtggtgctgagcctgtaaaacgctgtggaaagtctgcactctttcaactggcagagatgtgcctggcatcagaagggatgaaaatggaagaatcaaagctaataaaagcaaaagaatccgatggtggaagaattaaagaattagagaagggaaaggaagaaaaagaaattaaaatggagaaaacagatgaaactaggttacagaaggaagcagaatttgaaaaatcggctaaggaaaatttaagagattctaaggaattgagaaattttgaggcattgcaaatagatgacataatggctataaaaatggaagatcccaaagaaattagaaaggaagagttagaagaagatcacaaatgtagtcattttcctgatttttcttattctgccagtagcaagataataattagtgatgttcccagtagaaaggatcatatgtgccatcctcatggaattatgatcattgaggatcccgcagcattaaacaagccagaaaagctaaaaaagaaaaagaagaaaagcaaaatggatcgacatggaaatgataaatccacacccaagaagacttgcaaaaagaggcagtcttcggaatctgacattgagagcgtcatatataccattgaagccgtcgcaaaaggagactggggcatagagaaacttggagatacccctcgcaagaaggtccgcacatcctcaagtggcaagggaagcattttggatgccaagccaccaaagaaaaaagtgaaatcaagagagaagaaaatgtcaaaggagaaatcctcagacaccaccaaagagtcaagacctccagatttcattagtatttctgctagcaagaacatttctggtgagacaccagagggtataaaagcagaaccattgacccctatggaagatgcactaccacccagcctatcaggacaggccaagcctgaggacagtgactgtcacagaaaaatagaaacttgtggttccaggaaatccgagaggtcttgcaaaggtgctctttataaaaccctggtgtctgagggcatgctcacctctctgcgagctaatgttgacagaggaaaacgaagctcaggaaaaggaaactcctctgatcatgaagggtgttggaatgaagaaagctggacatttagtcagagtgggaccagtgggagcaagaagttcaagaagacaaagccaaaagaagactgtctccttggctccgcaaagctggatgaagaatttgaaaaaaaattcaacagcctccctcaatatagtcctgttacatttgaccggaaatgtgtacctgtcccaagaaaaaagaagaagactggaaatgtgtcctcagaaccgactaaaaccagcaaaggaagtggggataaatggtcaaacaagcaactcttcttggatgccattcaccctacagaagccatattttcagaagacagaaacaccatggagcctgttcataaggttaaaaatatcccatccattttcaacactccagagccaacaacaacgcaagaacctttggtgggcagccaaaagagaaaagcaaggaaaaccaagattacacaccttgtcaggacagcagatggccgggtatcaccagcaggaggtactttggatgacaaaccaaaggaacaactgcagaggagtctccctaaagcaactgagacagactgcaatgacaaatgctcacacaacaccgaggtcggggagacgcggagcagtactccagaaatgcctgccgtgtctgcgttctttagcctcgctgcgctggctgaagtggcagccatggaaaatgtgcacagaggtcagaggtcaactccgctcacccatgatggacagccaaaagaaatgccgcaggctcctgtacttatttcctgcgctgaccagtgaagcgccctttcattgtaaaacattgtgctttacctactaccctagccttgtctttaccgagggatgctagtgagtccaagtggtggaaaatatagactgcaaacaagtgcttgttgccccacacggcccagattcacttgaagcagaagttagcatcctgggccagtttgttctctcagaacccagaatctttgagggtaaggttatctgtctgatactgagcagaaacagaatgatcctggagctttgctttctattgaaggcttttgacggtaataggtggtaacttggtaaaaggctgcctttactgtagctcacccagcatctcttttaccaaccagagagtgtgaaactagtttcatatattacctagttattctttcaaaacaaaacaaaaaaaa

SEQ ID NO: 203330 - DNA, 8930 bp, Artificial Sequence
  derived and/or modified sequence
aaaatgagtgttttcagtctctccgggttgcatgtactgtatgtggagcagtgtacagtgaagcggaggcagagcggctccgcgagcttctctccactttcccatagagaaaccctgactggccgctgagggctagctacacacacgccctcacgcccggcgagcccgcgaggtcactatcatatgacaaaggctttgccgcagttcatcttcctccctgtgtactttccatttgccttcctggaatcctgctgcatcacagaagctggaagttctgatgttccactgaaatcacaatggaaagtcttgacttgactggtcacagtaatgaaaggcagtaatagaaataaggatcattcagcagaaggagaaggggttggaaaacgaccaaaacgaaagtgtcttcagtggcatccattgctagcaaagaaacttcttgatttttcagaagaggaagaagaggaagacgaagaggaggatattgataaggttcaacttcttggggccgatggcctagagcaagatgttggtgaaactgaagatgatgaatcaccagagcagcgagcccggagaccaatgaatgcatttcttttattttgcaaacgccatcgctctcttgtacgtcaggaacaccccaggcttgataaccgaggtgctaccaagatactagctgattggtgggctgttcttgatccaaaggaaaagcagaaatacacagacatggccaaggagtataaggatgcatttatgaaagcaaatcctggctacaaatggtgtcctaccacaaacaagcctgtgaaatccccaacacccactgtcaatccacgaaagaaactttgggccttcccatctgactcttcaagagacttgccaagccccaagaaagcaaagactgaagaaatgcctcagcttaactttggaatggctgatcctactcaaatgggaggcctgagtatgctgctgttagctggagaacatgctcttggcacaccagaggtatcctctggcacatgcaggcctgatgtttcagaatctcctgaattacgtcagaagtcaccattgtttcagtttgccgagatatcttcaagtacgtcccactctgatgcttctacaaagcagtgtcaaacatctgccttgtttcagtttgcagagatttcttcaaacacttcgcagttgggtggtgctgagcctgtaaaacgctgtggaaagtctgcactctttcaactggcagagatgtgcctggcatcagaagggatgaaaatggaagaatcaaagctaataaaagcaaaagaatccgatggtggaagaattaaagaattagagaagggaaaggaagaaaaagaaattaaaatggagaaaacagatgaaactaggttacagaaggaagcagaatttgaaaaatcggctaaggaaaatttaagagattctaaggaattgagaaattttgaggcattgcaaatagatgacataatggctataaaaatggaagatcccaaagaaattagaaaggaagagttagaagaagatcacaaatgtagtcattttcctgatttttcttattctgccagtagcaagataataattagtgatgttcccagtagaaaggatcatatgtgccatcctcatggaattatgatcattgaggatcccgcagcattaaacaagccagaaaagctaaaaaagaaaaagaagaaaagcaaaatggatcgacatggaaatgataaatccacacccaagaagacttgcaaaaagaggcagtcttcggaatctgacattgagagcgtcatatataccattgaagccgtcgcaaaaggagactggggcatagagaaacttggagatacccctcgcaagaaggtccgcacatcctcaagtggcaagggaagcattttggatgccaagccaccaaagaaaaaagtgaaatcaagagagaagaaaatgtcaaaggagaaatcctcagacaccaccaaagagtcaagacctccagatttcattagtatttctgctagcaagaacatttctggtgagacaccagagggtataaaagcagaaccattgacccctatggaagatgcactaccacccagcctatcaggacaggccaagcctgaggacagtgactgtcacagaaaaatagaaacttgtggttccaggaaatccgagaggtcttgcaaaggtgctctttataaaaccctggtgtctgagggcatgctcacctctctgcgagctaatgttgacagaggaaaacgaagctcaggaaaaggaaactcctctgatcatgaagggtgttggaatgaagaaagctggacatttagtcagagtgggaccagtgggagcaagaagttcaagaagacaaagccaaaagaagactgtctccttggctccgcaaagctggatgaagaatttgaaaaaaaattcaacagcctccctcaatatagtcctgttacatttgaccggaaatgtgtacctgtcccaagaaaaaagaagaagactggaaatgtgtcctcagaaccgactaaaaccagcaaaggaagtggggataaatggtcaaacaagcaactcttcttggatgccattcaccctacagaagccatattttcagaagacagaaacaccatggagcctgttcataaggttaaaaatatcccatccattttcaacactccagagccaacaacaacgcaagaacctttggtgggcagccaaaagagaaaagcaaggaaaaccaagattacacaccttgtcaggacagcagatggccgggtatcaccagcaggaggtactttggatgacaaaccaaaggaacaactgcagaggagtctccctaaagcaactgagacagactgcaatgacaaatgctcacacaacaccgaggtcggggagacgcggagcagtactccagaaatgcctgccgtgtctgcgttctttagcctcgctgcgctggctgaagtggcagccatggaaaatgtgcacagaggtcagaggtcaactccgctcacccatgatggacagccaaaagaaatgccgcaggctcctgtacttatttcctgcgctgaccagtgaagcgccctttcattgtaaaacattgtgctttacctactaccctagccttgtctttaccgagggatgctagtgagtccaagtggtggaaaatatagactgcaaacaagtgcttgttgccccacacggcccagattcacttgaagcagaagttagcatcctgggccagtttgttctctcagaacccagaatctttgagggtaaggttatctgtctgatactgagcagaaacagaatgatcctggagctttgctttctattgaaggcttttgacggtaataggtggtaacttggtaaaaggctgcctttactgtagctcacccagcatctcttttaccaaccagagagtgtgaaactagtttcatatattacctagttattctttcaaaacaaaacaaaaaaaaaacaaaaactgacgcactgcactagttattattagatattcttagtcttttttgtacatggagatttaagtttaagatggtttatataataggttatacctacatttatattgtagaataaatattaaaaagcctgttccagagactcccaagcagcctgggcaggcagatgtaccattgttagtggtgtatgctcggcctcgtggtccatatattctgcacttttatatttgccaccagaatggtagtttgctggcaaaaaaaaaaaaaaaagagagagagaaaaaattacaactcttacaatctgaatttttttcttagccttgagtgaccaagaagaatttgcttgaggcaaattgtggcaaatattttcccagacaggggaagagtcctgcagattacagattactggtgttttcatgccttgaggattcttttatttttacataggggtctaagtgaccaatggattgttcatacaaacaaaaaaaaagacaaaaatattattcagaagtgaccttagtattacttcactattctaaacacattgaagacactcacttcatgtggacttggagctacagaccttttacatccatcacagattggctggacgggttgcaattgctatgcacagcctgattggcactgcaggtttttagagccattttgagtttgtgttgtttaggaggtactgagtcaatgatgagggaggtatgcctgaccagagtgggactctcagtcatagatccacctgcaagtctctgtttcctttttgtgttttgttgcttttgaacataaaaccaaccatacataagcagcgccaagtggattaactggcttagaacattcaacatattgacttaaccacctgacattcacagtgtcttgtttcctagcaacagatgcaaagtgataaatcaaaattagtctgaggctacagattttacagggtatttgttctatagcacaaagtatttccccactcttgcgtcacagcacaaactaccaaattttaattattggattccagcaataatttttaatggttttcaaactggcggaattttgacagtgctagttcgagtttgaagcttttgaattagatctctaaatggtgacagtttacatggttttatctagctttcttatttatacttgactgaattgtaatgattttttttctaattgtaatttgacgtaatagccatacaaaaaatgactctattcatactaggtttagcttctcatggttgtagatattacttcagttccggtgctggaaaatatgtacaacatactaacaggattgaaaaaaaaatagaggtttttcttcttgtttttttttccaaagcaggtaaagagggtagcaaagcatcggaatgatgtgctcaaaaatgcatattcctggtggggatggaggaagaaggcattagtaaaaggttaatcaaacgttacaacttaaccccattcatgtaggaataaatcaagtgagcagttccagacttttgcataatatttttactatgatgctgttttattaatattttctaaatttcaaaacaaaaagtgaatgtttgaaattgctgggtcccgatgttggtggctgttggagttttggaccactcgctagcagtgatttgaagattataattagctaaaatccaaaacaaaaaaccaacaacaaaaattgtatggtgcggaacatgcaccttgacaatggtactaacttgttattctatagaacacgttagaatagatctatttttgccagagcaccctccttcagtcctccgattacatttcactagagttccttacgagattgctgtatattcctgggaccttttttaaaaaaaaaaaaagcaaaacaaaagattactttttttctatgtgattaatatcttacttgatctgcttttcctaaacctcagtggcttttcccttaggcagggttgggggtgggagggcaacttactggagatgactgttttcagatactttaaaacaaacctttttgtagaaatgcttaatttttaagcggttaggcactgagagtagcagaaatcctgcaaagctttatagttccttagactcaccttgtcgattctctgagtaaagtcttgatttcaataattgtgcttctcatgccctgaaactgctggagaggagtgttgttattttcaggtaacaacattcgttagcacaaatatttcagaccaatattagtgctctccaccccaccttttgttatcattttcatttcatttctctcattcttttttattttggaaaatcatattgctatagtgtgtactttaatctgccagcagataccatctacactaacatttgtcccacagcatcctcaagagaaaaagttgttgcaccttatatatatctcaagcaaaccaaaatatgatgctcttctgctttgttttattctaaattgttgtatcatatctttctgaaaccattctgaatttagttgaaattatcaatatttatgcttttaaccttaatttctggattcaagcctgtatataaatcttttgaaaaaaaattgtcctagcccttctctgcgatgctggaagtagaagattgcgtctcagatggagacgcagtactgttccagttttctttagccttttatttatttagttattctgggtatttcctatgtaattttgaagtgtgtagagtatattatagtaactgaagctgcagctgtaagaagctgagtgaaagaaaaaatactgtaagacatccttaaagtttttatttgtttgggtactgtatatgagatcaggaaaaagaaaaatgtcccacagccacattggaaatacaggttcttgtccccaaattaggttagttcccagattttagatcaaaactgttaattcattaaaaccccttttaaaaggtaaattctactgttgtaattccgatagtctttttcccacaaatatcagaaatatatttatttaattctgtcagatgagctttctaccgatgccatgtcccaaagccatgttaaaataattcccacgttatcattgtgattctacttcctgccactaaaattgctggagaaacaaaataatgatggaacactatgaacaaaaaggagcatctgaactggtctggttatttagaatccaatgtgttcaaatccttttgttttcttattaagtcagatgctactgtaagtcagataaaattttgtttgcactctgcagtctttggctcaatgtatggaaatgtttgcacctatgtaaagtcacaagctaattacaaattgctacagaacaggagtaagctgaaaactgaatgccatgttttgtttataaggtggggaggggagggaaaataccaaaaaactctgttccaagtttggcatttgacattaatgtgaagcagtgggaccatgctgcctgctaaactactgtatgaatcgtaaatgttctgaagacgagcagctggaggctggaggatggcattccatacagcaaaggagaagcacccaccacttcatctgggaaaaggaaggaaattgcaggaggcctggagccatcatttgtaaaggggatgttgcggggtgtgatgctgttgaggagattcaccttcaattgcactgctccacagagccctcatataaggccaatcctaatgggctacctcggctttaaaagttaatttcagtaagtcctgtttcaaaagtttgtctttttttgcttctaccttcagtgccactattttccactgcagtgttttgacttcacaaactgcctcctccagagagaacaatgtattgctgaaaatgggcagtagaagcaaatgctgttgttacatttgacctataaagtattcagagtgactgctaggtagaaattaaaacttagctttcccaaatagctccttattttgcaccttataaaaagtatactaattgttaattagatgttgcttttgtttatacaagcattcccaaagaactagatttggattttgttttgagtttttggatttttaaaaattatcttatttagattgactaacagcatacttacaattttaaaagaagctgttgttcagttcatcttaccagatgtgtctggcgaagtattcagggtttgatggactgctttactttcgtttggaagtgatagctaagtttattatactctatattaaacaactttgttcatttcactgaggaccttatcttccttatatttcagaacaaagaagcaacaagcgtgaataaaaagacaaatgtatttgactccctcataatccccatctgtatgtgctacccttccttcaaatatataaatgtgcatcttttttttaaaaaaaaaaaaaaaaaaggttcctcttctggccaaatttgatctatggtggtatgattcatactgttaaattgagagaggaaaccttgtggttaaaaattatatggctgctgttttctttttgcagtcagtggtcaaaactgatcatgtgcttaaatcgatttttatgcacagaactagttattgtgaacattactgctccctccaaagatttcctgataacttgggccagaggtggttactgagtaacaaggatctaattcaatgcctcaaaactcttccacccacaatgcaaatcttacctcacaagctctaacctaaatcacagagacatgcatgtttcatgcattaacactgatttcgctctgtggcccaccagaggggtgggctcatgtcccctgactcctcacatgagtgcctcagctctaagagccgtggaacggggggtagggaaggtttgcgatctggagctcagcaactggctcagcaacgttttctccatttcattagcactaaacaagtctcttgctctcaggaatttgtcagaaaaaagaataaaatcacctgagactccacataccagattataaactcttctcgtaggtttgaattgcttactcacatgtcataaattaaccacagcttcatttgaccaccaggtctaaagtctgttgacagtttcagcatgactgaatcgctcattttttttttttgctttcagaaattggcttggttctctttagagttggtgtaaacatgccatgtaataaatgatttccacttaatggtacaacagaattattgctttcttagatgtatgtgtagtaaaagtcaatatacacatttatataatttctttcttcaaaatcttatacctaatttgatatttctaaaaattgcacatgtaagtcatgtgtataacatgctaaagtactttaactgtgatcttaaaactgaataaaaatatttaataaaactttgaaatattttaaagatattattcaaatatatttctttatgttcacactactggccgtagagtatgtgcctttaatgtaccattttcactaaaaacagtaggaaaaatactaataaaagtaagatatttcaacta

SEQ ID NO: 203331 - DNA, 2736 bp, Artificial Sequence
  derived and/or modified sequence
atgaagggcagcaacagaaacaaggaccacagcgccgagggcgagggcgtgggcaagagacccaagagaaagtgcctgcagtggcaccccctgctggccaagaagctgctggacttcagcgaggaggaggaggaggaggacgaggaggaggacatcgacaaggtgcagctgctgggcgccgacggcctggagcaggacgtgggcgagaccgaggacgacgagagccccgagcagagagccagaagacccatgaacgccttcctgctgttctgcaagagacacagaagcctggtgagacaggagcaccccagactggacaacagaggcgccaccaagatcctggccgactggtgggccgtgctggaccccaaggagaagcagaagtacaccgacatggccaaggagtacaaggacgccttcatgaaggccaaccccggctacaagtggtgccccaccaccaacaagcccgtgaagagccccacccccaccgtgaaccccagaaagaagctgtgggccttccccagcgacagcagcagagacctgcccagccccaagaaggccaagaccgaggagatgccccagctgaacttcggcatggccgaccccacccagatgggcggcctgagcatgctgctgctggccggcgagcacgccctgggcacccccgaggtgagcagcggcacctgcagacccgacgtgagcgagagccccgagctgagacagaagagccccctgttccagttcgccgagatcagcagcagcaccagccacagcgacgccagcaccaagcagtgccagaccagcgccctgttccagttcgccgagatcagcagcaacaccagccagctgggcggcgccgagcccgtgaagagatgcggcaagagcgccctgttccagctggccgagatgtgcctggccagcgagggcatgaagatggaggagagcaagctgatcaaggccaaggagagcgacggcggcagaatcaaggagctggagaagggcaaggaggagaaggagatcaagatggagaagaccgacgagaccagactgcagaaggaggccgagttcgagaagagcgccaaggagaacctgagagacagcaaggagctgagaaacttcgaggccctgcagatcgacgacatcatggccatcaagatggaggaccccaaggagatcagaaaggaggagctggaggaggaccacaagtgcagccacttccccgacttcagctacagcgccagcagcaagatcatcatcagcgacgtgcccagcagaaaggaccacatgtgccacccccacggcatcatgatcatcgaggaccccgccgccctgaacaagcccgagaagctgaagaagaagaagaagaagagcaagatggacagacacggcaacgacaagagcacccccaagaagacctgcaagaagagacagagcagcgagagcgacatcgagagcgtgatctacaccatcgaggccgtggccaagggcgactggggcatcgagaagctgggcgacacccccagaaagaaggtgagaaccagcagcagcggcaagggcagcatcctggacgccaagccccccaagaagaaggtgaagagcagagagaagaagatgagcaaggagaagagcagcgacaccaccaaggagagcagaccccccgacttcatcagcatcagcgccagcaagaacatcagcggcgagacccccgagggcatcaaggccgagcccctgacccccatggaggacgccctgccccccagcctgagcggccaggccaagcccgaggacagcgactgccacagaaagatcgagacctgcggcagcagaaagagcgagagaagctgcaagggcgccctgtacaagaccctggtgagcgagggcatgctgaccagcctgagagccaacgtggacagaggcaagagaagcagcggcaagggcaacagcagcgaccacgagggctgctggaacgaggagagctggaccttcagccagagcggcaccagcggcagcaagaagttcaagaagaccaagcccaaggaggactgcctgctgggcagcgccaagctggacgaggagttcgagaagaagttcaacagcctgccccagtacagccccgtgaccttcgacagaaagtgcgtgcccgtgcccagaaagaagaagaagaccggcaacgtgagcagcgagcccaccaagaccagcaagggcagcggcgacaagtggagcaacaagcagctgttcctggacgccatccaccccaccgaggccatcttcagcgaggacagaaacaccatggagcccgtgcacaaggtgaagaacatccccagcatcttcaacacccccgagcccaccaccacccaggagcccctggtgggcagccagaagagaaaggccagaaagaccaagatcacccacctggtgagaaccgccgacggcagagtgagccccgccggcggcaccctggacgacaagcccaaggagcagctgcagagaagcctgcccaaggccaccgagaccgactgcaacgacaagtgcagccacaacaccgaggtgggcgagaccagaagcagcacccccgagatgcccgccgtgagcgccttcttcagcctggccgccctggccgaggtggccgccatggagaacgtgcacagaggccagagaagcacccccctgacccacgacggccagcccaaggagatgccccaggcccccgtgctgatcagctgcgccgaccagtag

SEQ ID NO: 203332 - protein, 325 aa, Artificial Sequence
  derived and/or modified sequence
MAAAVRCMGRALIHHQRHSLSKMVYQTSLCSCSVNIRVPNRHFAAATKSAKKTKKGAKEKTPDEKKDEIEKIKAYPYMEGEPEDDVYLKRLYPRQIYEVEKAVHLLKKFQILDFTSPKQSVYLDLTLDMALGKKKNVEPFTSVLSLPYPFASEINKVAVFTENASEVKIAEENGAAFAGGTSLIQKIWDDEIVADFYVAVPEIMPELNRLRKKLNKKYPKLSRNSIGRDIPKMLELFKNGHEIKVDEERENFLQTKIATLDMSSDQIAANLQAVINEVCRHRPLNLGPFVVRAFLRSSTSEGLLLKIDPLLPKEVKNEESEKEDA

SEQ ID NO: 203333 - protein, 302 aa, Artificial Sequence
  derived and/or modified sequence
MVYQTSLCSCSVNIRVPNRHFAAATKSAKKTKKGAKEKTPDEKKDEIEKIKAYPYMEGEPEDDVYLKRLYPRQIYEVEKAVHLLKKFQILDFTSPKQSVYLDLTLDMALGKKKNVEPFTSVLSLPYPFASEINKVAVFTENASEVKIAEENGAAFAGGTSLIQKIWDDEIVADFYVAVPEIMPELNRLRKKLNKKYPKLSRNSIGRDIPKMLELFKNGHEIKVDEERENFLQTKIATLDMSSDQIAANLQAVINEVCRHRPLNLGPFVVRAFLRSSTSEGLLLKIDPLLPKEIKSQPKKKKN

SEQ ID NO: 203334 - DNA, 978 bp, Artificial Sequence
  derived and/or modified sequence
atggcggccgccgtgaggtgcatggggcgggctctgatccatcatcagcgtcacagtctttctaaaatggtttaccagacttcactctgtagctgctccgtaaacatccgagtacctaatcgccatttcgccgcagcaactaagagcgccaagaagacaaagaagggagccaaggagaaaacgcctgatgagaaaaaggatgagattgagaagataaaggcttacccctacatggaaggcgagcccgaagatgacgtgtatcttaaacgactctacccacgacagatttacgaggtggagaaagctgttcacctgttgaaaaaatttcagatcctggactttactagtcccaaacagtctgtgtacctggatctaaccctcgacatggccctaggcaaaaagaaaaatgtagaaccttttacaagtgtcctgagtctcccttatcccttcgcatcggaaattaacaaggtggcagtctttaccgagaatgcctctgaagtgaagatcgctgaggaaaacggggccgcgtttgcaggtggtacatcgctgatacagaagatttgggacgatgaaatcgtcgctgacttttacgttgccgtaccggagatcatgcctgaactgaacaggctccgaaagaagttaaataagaaataccctaaactcagtcgaaactctattggccgtgatatccccaagatgctggaactgtttaagaacggccacgagataaaggtggacgaggagagagaaaactttctgcagaccaaaattgcaacacttgacatgtcatcagatcaaattgccgcaaacctccaggccgtgattaatgaagtgtgcagacacaggccgcttaatctggggccgttcgtcgtccgggcctttctccggtcttccaccagtgagggacttctgctgaagatcgaccctttactgcccaaggaggtcaagaacgaagaatctgagaaagaggatgcctag

SEQ ID NO: 203335 - DNA, 978 bp, Artificial Sequence
  derived and/or modified sequence
atggctgctgctgtgcgctgcatgggccgggccctgatccaccaccagaggcacagcctgagcaagatggtgtaccagaccagcctgtgcagctgcagcgtgaacatccgggtgcccaacagacactttgctgctgccaccaagagcgccaagaagaccaagaagggggccaaggagaagaccccagatgagaagaaggatgaaattgagaagatcaaggcctacccctacatggagggggagccagaagatgatgtgtacctgaagaggctgtacccccggcagatctatgaggtggagaaggctgtgcacctgctgaagaagttccagatcctggacttcaccagccccaagcagagcgtgtacctggacctgaccctggacatggccctgggcaagaagaagaatgtggagcccttcacctctgtgctgagcctgccctacccctttgccagcgagatcaacaaggtggccgtgttcacagaaaatgccagcgaggtgaagattgctgaggagaatggagctgcctttgctgggggcaccagcctcatccagaagatctgggatgatgagatcgtggccgacttctacgtggccgtgcctgagatcatgcctgagctgaaccggctgaggaagaagctgaacaagaagtaccccaagctgagcagaaattccatcggccgggacatccccaagatgctggagctgttcaagaatggacatgagatcaaggtggatgaggagcgggagaacttcctgcagaccaagatcgccaccctggacatgagcagtgaccagattgctgccaacctgcaggccgtcatcaatgaggtgtgccgccaccggcccctgaacctgggcccctttgtggtgcgggccttcctgcggagcagcaccagcgagggcctgctgctgaagattgaccccctgctgcccaaggaggtgaagaatgaggagagcgagaaggaggatgcctag

SEQ ID NO: 203336 - DNA, 1490 bp, Artificial Sequence
  derived and/or modified sequence
gtcgctctgagtacacttgcaggatcaaaaaagaaaaagaataagaaggaaggattaaaataatcacagcatcgccaacaggatcgtattttcccgaaggtggttaaccagccataccggaaccacgaaacacacagggtcctgggcaacacggaggactaacagtaacaccgccacgccggcagcaaagctcattttggtccccgccccgttcctctttctctttttaactccttccctctttgcggattctagaacggaacctttttttaattcttcccagtagaaacgtaggaacaatttcgtgaacgcaatccggagtgcccaacatggcggcggccgtaaggtgcatgggtagagccttgatacatcatcaaaggcatagcctttccaagatggtttatcagacatcactttgttcttgttctgtaaacatccgagtgcccaacagacattttgctgctgctacaaagtctgcaaagaaaacaaaaaaaggtgctaaagaaaaaacaccagatgagaaaaaagatgaaatagaaaaaataaaagcatatccctatatggaaggcgaacctgaggatgatgtctatttaaaacgcttatacccgagacagatatatgaggtggagaaagctgttcacttacttaagaaatttcaaattcttgactttactagtccaaagcaaagtgtttatcttgatttgacactggatatggcactgggaaagaagaaaaacgtggagccatttaccagtgttcttagtttgccatacccatttgcttccgaaatcaataaagttgctgtatttacagagaatgcatcagaggtcaaaatagcggaagaaaatggagctgcatttgcaggaggcactagtctgatacagaagatttgggatgatgaaattgttgcagacttttacgtagctgttccagaaataatgcctgaacttaatcgattaaggaagaaactgaataaaaaatatccaaagctttctcgaaattccattggccgtgacatccccaaaatgcttgaattatttaaaaatggacatgaaattaaggtagatgaagaaagggagaactttctccagaccaaaatagcaacattggatatgtcaagtgaccagatagctgccaatctgcaagcagttattaatgaagtttgtaggcacagaccgctgaatttgggtccctttgtggtacgtgctttccttcgtagttcaacaagtgaaggtttattactgaagattgatccattgttgcctaaagaagtaaaaaatgaagaaagtgaaaaagaagatgcctaaatgtggtgaattgtgaaattactttcagtggtttaagaagcaatggagaaaatgataatacagcataatttttacatttgatgtcttgttattgatcatacttgaaagtgaactttaacattgaaaaatcgtacagtcatttcaagaataagaaaataaaattttctctttgtctgaacctgc

SEQ ID NO: 203337 - DNA, 983 bp, Artificial Sequence
  derived and/or modified sequence
gagtgcccaacatggcggcggccgtaaggtgcatgggtagagccttgatacatcatcaaaggcatagcctttccaagatggtttatcagacatcactttgttcttgttctgtaaacatccgagtgcccaacagacattttgctgctgctacaaagtctgcaaagaaaacaaaaaaaggtgctaaagaaaaaacaccagatgagaaaaaagatgaaatagaaaaaataaaagcatatccctatatggaaggcgaacctgaggatgatgtctatttaaaacgcttatacccgagacagatatatgaggtggagaaagctgttcacttacttaagaaatttcaaattcttgactttactagtccaaagcaaagtgtttatcttgatttgacactggatatggcactgggaaagaagaaaaacgtggagccatttaccagtgttcttagtttgccatacccatttgcttccgaaatcaataaagttgctgtatttacagagaatgcatcagaggtcaaaatagcggaagaaaatggagctgcatttgcaggaggcactagtctgatacagaagatttgggatgatgaaattgttgcagacttttacgtagctgttccagaaataatgcctgaacttaatcgattaaggaagaaactgaataaaaaatatccaaagctttctcgaaattccattggccgtgacatccccaaaatgcttgaattatttaaaaatggacatgaaattaaggtagatgaagaaagggagaactttctccagaccaaaatagcaacattggatatgtcaagtgaccagatagctgccaatctgcaagcagttattaatgaagtttgtaggcacagaccgctgaatttgggtccctttgtggtacgtgctttccttcgtagttcaacaagtgaaggtttattactgaagattgatccattgttgcctaaagaaataaaaagccaaccaaaaaaaaaaaaaaac

SEQ ID NO: 203338 - DNA, 978 bp, Artificial Sequence
  derived and/or modified sequence
atggccgccgccgtgcggtgcatgggccgggccctgatccaccaccagaggcattccctcagtaagatggtgtaccagacatccctctgctcatgcagcgtgaatattagggtgcccaaccgacacttcgcagctgcaaccaaatcagcaaaaaaaactaaaaagggggcgaaggagaaaaccccagatgaaaaaaaggacgagattgagaagataaaggcatatccctacatggaaggagaaccggaggatgacgtgtatctgaagagactgtatccacgccaaatctatgaggtagaaaaagcagtgcacttacttaagaagttccagatccttgattttacaagccccaagcagtcagtctatctggaccttacactcgatatggccttggggaagaaaaaaaacgtcgaacctttcacatccgtcctctccctcccttaccctttcgcctcagaaatcaataaagtggctgtattcacagagaacgcctcggaagtaaagatcgccgaagagaatggtgccgcctttgctggcgggacatctcttatccagaagatctgggacgacgagattgtggcggacttttacgtggcagtgcccgagatcatgcctgagctcaacagacttcgtaagaaactgaataaaaaatatcctaagctttctaggaactccattgggcgcgacatccccaagatgctggagctcttcaaaaatggccatgagattaaggtcgatgaggagcgggagaattttttgcagacgaagattgctaccttggatatgagcagcgatcagatcgcagccaatctgcaggcagtgattaatgaagtttgccggcatcggcctctgaatttgggaccgttcgtggtgcgagcctttttgcgctcaagtacctcggagggactacttctgaagatcgaccccttgcttcccaaggaggttaagaacgaggagtccgagaaagaagacgcttag

SEQ ID NO: 203339 - DNA, 978 bp, Artificial Sequence
  derived and/or modified sequence
atggctgcagctgtgaggtgtatgggcagggcgcttatacaccatcagagacacagtctgagtaagatggtgtaccaaaccagcttgtgttcatgtagcgtaaatattcgagtgccaaacaggcatttcgccgcagccactaagtctgccaaaaagactaagaagggcgctaaggaaaaaactcctgatgagaaaaaagatgaaatagagaaaatcaaggcctacccgtacatggaaggggaacctgaagatgacgtttaccttaaacgcttgtatccccgtcagatttatgaagtggagaaggctgtgcatctgctgaagaagttccagatccttgattttacgtcccctaaacagtcagtctacctcgatctcactctggatatggcattgggaaaaaagaagaatgttgagcccttcacaagcgtcctgagtctgccctaccctttcgccagtgagattaataaggtggccgtgttcacagagaatgcttctgaagtgaagattgccgaggaaaatggagccgctttcgcgggaggtacatctttgattcagaagatctgggacgacgaaatagtcgcagatttctacgtggccgtgcccgagatcatgcccgaattgaaccgtctgagaaagaagttgaataagaagtaccctaagctgagcaggaacagcatcggccgtgatatacctaaaatgttggagctgtttaaaaatggacacgagatcaaagtcgatgaagaacgcgaaaattttctgcaaaccaagatagctaccctcgacatgagtagcgaccagatcgcggcaaacctgcaggcagttatcaacgaggtgtgtcgccatcgcccactcaacctcggaccttttgtggtgagggccttcctacgttcctcaacctcagaggggctgcttctgaagatcgaccctttactgccaaaggaggtgaagaacgaagaatccgagaaggaagatgcttag

SEQ ID NO: 203340 - DNA, 978 bp, Artificial Sequence
  derived and/or modified sequence
atggccgccgccgtgagatgcatgggcagagccctgatccaccaccagagacacagcctgagcaagatggtgtaccagaccagcctgtgcagctgcagcgtgaacatcagagtgcccaacagacacttcgccgccgccaccaagagcgccaagaagaccaagaagggcgccaaggagaagacccccgacgagaagaaggacgagatcgagaagatcaaggcctacccctacatggagggcgagcccgaggacgacgtgtacctgaagagactgtaccccagacagatctacgaggtggagaaggccgtgcacctgctgaagaagttccagatcctggacttcaccagccccaagcagagcgtgtacctggacctgaccctggacatggccctgggcaagaagaagaacgtggagcccttcaccagcgtgctgagcctgccctaccccttcgccagcgagatcaacaaggtggccgtgttcaccgagaacgccagcgaggtgaagatcgccgaggagaacggcgccgccttcgccggcggcaccagcctgatccagaagatctgggacgacgagatcgtggccgacttctacgtggccgtgcccgagatcatgcccgagctgaacagactgagaaagaagctgaacaagaagtaccccaagctgagcagaaacagcatcggcagagacatccccaagatgctggagctgttcaagaacggccacgagatcaaggtggacgaggagagagagaacttcctgcagaccaagatcgccaccctggacatgagcagcgaccagatcgccgccaacctgcaggccgtgatcaacgaggtgtgcagacacagacccctgaacctgggccccttcgtggtgagagccttcctgagaagcagcaccagcgagggcctgctgctgaagatcgaccccctgctgcccaaggaggtgaagaacgaggagagcgagaaggaggacgcctag

SEQ ID NO: 203341 - protein, 914 aa, Artificial Sequence
  derived and/or modified sequence
MGTTAPGPIHLLELCDQKLMEFLCNMDNKDLVWLEEIQEEAERMFTREFSKEPELMPKTPSQKNRRKKRRISYVQDENRDPIRRRLSRRKSRSSQLSSRRLRSKDSVEKLATVVGENGSVLRRVTRAAAAAAAATMALAAPSSPTPESPTMLTKKPEDNHTQCQLVPVVEIGISERQNAEQHVTQLMSTEPLPRTLSPTPASATAPTSQGIPTSDEESTPKKSKARILESITVSSLMATPQDPKGQGVGTGRSASKLRIAQVSPGPRDSPAFPDSPWRERVLAPILPDNFSTPTGSRTDSQSVRHSPIAPSSPSPQVLAQKYSLVAKQESVVRRASRRLAKKTAEEPAASGRIICHSYLERLLNVEVPQKVGSEQKEPPEEAEPVAAAEPEVPENNGNNSWPHNDTEIANSTPNPKPAASSPETPSAGQQEAKTDQADGPREPPQSARRKRSYKQAVSELDEEQHLEDEELQPPRSKTPSSPCPASKVVRPLRTFLHTVQRNQMLMTPTSAPRSVMKSFIKRNTPLRMDPKEKERQRLENLRRKEEAEQLRRQKVEEDKRRRLEEVKLKREERLRKVLQARERVEQMKEEKKKQIEQKFAQIDEKTEKAKEERLAEEKAKKKAAAKKMEEVEARRKQEEEARRLRWLQQEEEERRHQELLQKKKEEEQERLRKAAEAKRLAEQREQERREQERREQERREQERREQERREQERQLAEQERRREQERLQAERELQEREKALRLQKEQLQRELEEKKKKEEQQRLAERQLQEEQEKKAKEAAGASKALNVTVDVQSPACTSYQMTPQGHRAPPKINPDNYGMDLNSDDSTDDEAHPRKPIPTWARGTPLSQAIIHQYYHPPNLLELFGTILPLDLEDIFKKSKPRYHKRTSSAVWNSPPLQGARVPSSLAYSLKKH

SEQ ID NO: 203342 - protein, 167 aa, Artificial Sequence
  derived and/or modified sequence
MGTTAPGPIHLLELCDQKLMEFLCNMDNKDLVWLEEIQEEAERMFTREFSKEPELMPKTPSQKNRRKKRRISYVQDENRDPIRRRLSRRKSRSSQLSSRRLRSKDSVEKLATVVGENGSVLRRVTRAAAAAAAATMALAAPSSPTPESPTMLTKKPEDNHTQCQLVP

SEQ ID NO: 203343 - DNA, 504 bp, Artificial Sequence
  derived and/or modified sequence
atgggcaccaccgcccccggccccatccacctgctggagctgtgcgaccagaagctgatggagttcctgtgcaacatggacaacaaggacctggtgtggctggaggagatccaggaggaggccgagagaatgttcaccagagagttcagcaaggagcccgagctgatgcccaagacccccagccagaagaacagaagaaagaagagaagaatcagctacgtgcaggacgagaacagagaccccatcagaagaagactgagcagaagaaagagcagaagcagccagctgagcagcagaagactgagaagcaaggacagcgtggagaagctggccaccgtggtgggcgagaacggcagcgtgctgagaagagtgaccagagccgccgccgccgccgccgccgccaccatggccctggccgcccccagcagccccacccccgagagccccaccatgctgaccaagaagcccgaggacaaccacacccagtgccagctggtgccctag

SEQ ID NO: 203344 - DNA, 2745 bp, Artificial Sequence
  derived and/or modified sequence
atgggaacgactgctccggggcctatacacttgcttgaattatgcgaccagaaacttatggaattcctgtgtaacatggataataaggatctggtgtggctggaggagatccaggaagaggccgagcggatgtttactagggagttcagtaaagagcctgaattgatgccaaagacacccagccagaaaaaccgcagaaaaaaacgtcggatttcatacgtgcaggatgagaatcgggaccccataagaagacgactgtctcgccgcaaaagcaggtcttcacaactcagttcacgaagactccgcagtaaggattccgtggaaaagctggcaactgtggtgggcgaaaatgggtccgtgctgagacgtgtcaccagggccgccgccgctgctgctgcagctactatggccctggctgcaccttcttcacccacacctgagtctccgaccatgctgactaaaaagcccgaagataatcacactcagtgccaattagtcccagtggttgagatcggaatctccgaacgacagaacgctgaacaacacgtcacacagttaatgtcaaccgaaccactgcctcggaccctctccccaacaccagcaagtgcaacagcccccacctctcagggcatccccacctccgatgaagaatccacacccaaaaagtccaaggctaggattctggagtcaataaccgtgagctctcttatggctaccccacaggatcctaaaggacaaggagtgggaacagggcggagcgcttcaaaactacgcatagcgcaggtgagtcccggacctcgtgactctcccgcctttccagactctccatggagagagagagtgttagcgcctatcctcccagataacttctccacccctactgggtcccgcacagattcccagtcagtccgtcatagccccatcgccccaagtagtcccagcccacaagtgctggcgcaaaaatatagtctcgtggctaaacaggagtcagtagttaggcgcgcaagccgcaggctggccaagaagactgctgaggaacccgccgcttccggtaggatcatttgtcatagttatctagaacgacttctgaacgttgaggtaccccagaaggtaggctcagaacaaaaggaacctccggaggaggccgagcccgtcgcagccgccgagccagaggtgccagaaaataatgggaacaatagctggccccacaacgacacagagattgcgaactccacccctaaccccaagccggcagcctctagtcccgagacaccatccgcaggccagcaggaggccaagactgaccaggctgacggaccacgggagccgccccaatctgcccgccgaaagcgctcatataagcaggctgtcagcgagctcgacgaggagcagcatctggaggacgaggaactccagcctccccgaagcaaaactcccagctccccgtgccctgcaagtaaggttgtgcgtcctctgcgcacatttttgcataccgtgcaacggaaccaaatgctaatgacgcccacctccgctccaaggtccgttatgaagtcattcatcaaacgcaatacgccactacggatggatcctaaggagaaggaacgccaacggctggaaaaccttagaagaaaggaggaggccgagcagctgaggagacagaaagtggaggaagacaagcgaagaaggctcgaagaggtgaagctaaagagggaggagcgtctgcggaaagtgctgcaggccagagaaagggtggaacagatgaaggaagagaagaaaaagcagattgagcagaaatttgctcagattgatgagaaaacagaaaaagcgaaggaggagagactggccgaggagaaggccaagaagaaggcagccgcaaaaaaaatggaagaggtcgaggctcgcagaaagcaagaagaagaggcacgacgcctgcgctggctgcaacaagaagaggaggagcggcggcaccaggagttactacaaaaaaagaaggaagaagagcaggagaggttgcgaaaggcagctgaagcaaagcggttggccgagcagagggagcaggagcgcagagagcaagaacggagggagcaagaacggcgggagcaagaacggcgggaacaagaacgtcgagagcaggaacgccagttggccgaacaggagcgcagacgggagcaggaacggttgcaagcagaacgggagctgcaggaacgggagaaagccctaaggctgcagaaggaacagctgcagagagagctggaggaaaaaaagaaaaaggaagagcaacagcggctggccgagcggcagctgcaagaggagcaagagaaaaaggctaaggaggccgccggagcttccaaagcccttaacgtgaccgtagatgtacaatctccagcttgtacaagctaccagatgactccacagggccatagggcaccccctaagatcaaccctgacaactacgggatggaccttaacagcgatgactcaaccgatgatgaggcccaccccagaaaaccgataccaacctgggctcggggtaccccattgagtcaggccattatccatcaatactaccatccaccgaatctccttgagctcttcggcacgatcctgcccctagacctggaagacattttcaagaaatccaaaccacgttatcataagcgcacatcctctgctgtttggaatagccctccactgcagggtgctcgagttccctcctccctggcctactcactgaaaaaacactag

SEQ ID NO: 203345 - DNA, 504 bp, Artificial Sequence
  derived and/or modified sequence
atgggcactaccgcgcccggtccaattcacctgctcgagttatgcgatcagaagctgatggagtttctctgcaacatggataacaaggacctcgtatggctggaggagatccaggaggaggctgaaaggatgttcacacgtgagttcagtaaggagccagaattgatgccaaagaccccaagccagaagaacaggcgaaagaagagaaggatttcctacgtccaggacgaaaacagagatccaatcagacgcagattgagcaggaggaagagtaggagctcacagttaagcagcaggaggctgcggtctaaggacagtgtcgaaaagcttgctactgtggtgggagaaaatggaagcgttctcagacgggtaactagggccgctgccgcggccgccgctgctaccatggccctcgccgcgccaagttcccctacccctgagtcacccaccatgctgaccaaaaaacctgaagacaatcatacccagtgtcaactcgtgccctag

SEQ ID NO: 203346 - DNA, 2745 bp, Artificial Sequence
  derived and/or modified sequence
atgggcaccacagcccctggccccatccacctgctggagctgtgtgaccagaagctgatggagttcctgtgcaacatggacaacaaggacctggtgtggctggaggagatccaggaggaggccgagaggatgttcacccgggagttcagcaaggagcctgagctgatgcccaagacccccagccagaagaacagaaggaagaagaggcgcatctcctatgtgcaggatgaaaatagagaccccatcagaagaaggctgagcaggaggaagagccgcagcagccagctgagcagccggcggctgcggagcaaggacagcgtggagaagctggccaccgtggtgggggagaatggatctgtgctgcggcgggtgaccagggctgctgctgctgctgctgctgccaccatggccctggccgcccccagcagccccaccccagagagccccaccatgctgaccaagaagccagaggacaaccacacccagtgccagctggtgcctgtggtggagatcggcatcagcgagcggcagaatgctgagcagcacgtgacccagctgatgagcacagagcccctgcccaggaccctgagccccaccccagccagcgccacagcccccaccagccagggcatccccaccagtgatgaggagagcacccccaagaagagcaaggcccgcatcctggagagcatcaccgtgagcagcctgatggccaccccccaggaccccaagggccagggcgtgggcaccggccgcagcgccagcaagctgagaattgcccaggtgtccccaggcccccgggacagccctgccttcccagacagcccctggagggagcgggtgctggcccccatcctgcctgacaacttcagcacccccaccggcagcaggacagacagccagagcgtgcgccacagccccatcgcccccagcagccccagcccccaggtgctggcccagaagtacagcctggtggccaagcaggagagcgtggtgagaagagccagccggcggctggccaagaagacagctgaggagcctgctgccagcggccgcatcatctgccacagctacctggagcggctgctgaatgtggaggtgccccagaaggtgggcagcgagcagaaggagcccccagaggaggccgagcctgtggccgctgctgagcctgaggtgcctgagaacaacggcaacaacagctggccccacaatgacacagagatcgccaacagcacccccaaccccaagccagctgccagcagccctgagacccccagcgctggccagcaggaggccaagacagaccaggctgatggcccccgggagcccccccagagcgcccggaggaagaggagctacaagcaggccgtgtctgagctggatgaggagcagcacctggaggatgaggagctgcagcccccaagaagcaagacccccagcagcccctgcccagccagcaaggtggtgcggcccctgcggaccttcctgcacacagtgcagaggaaccagatgctgatgacccccaccagcgcccccaggtctgtgatgaagagcttcatcaagaggaacacccccctgaggatggaccccaaggagaaggagcggcagaggctggagaacctgcggaggaaggaggaggccgagcagctgcggcggcagaaggtggaggaggacaagagaagaaggctggaggaggtgaagctgaagcgggaggagcggctgaggaaggtgctgcaggcccgggagcgggtggagcagatgaaggaggagaagaagaagcagatcgagcagaagtttgcccagattgatgagaagacagagaaggccaaggaggagcggctggccgaggagaaggccaagaagaaggccgccgccaagaagatggaggaggtggaggcccggaggaagcaggaggaggaggcccggcggctgcgctggctgcagcaggaggaggaggagcggcggcaccaggagctgctgcagaagaagaaggaggaggagcaggagcggctgaggaaggctgctgaggccaagaggctggccgagcagcgggagcaggagcggcgggagcaggagcggcgggagcaggagcggcgggagcaggagcggcgggagcaggagcggcgggagcaggagcggcagctggccgagcaggagaggagaagagagcaggagcggctgcaggccgagcgggagctgcaggagcgggagaaggccctgcggctgcagaaggagcagctgcagcgggagctggaggagaagaagaagaaggaggagcagcagaggctggccgagcggcagctgcaggaggagcaggagaagaaggccaaggaggccgccggggccagcaaggccctgaatgtgacagtggatgtgcagagccctgcctgcaccagctaccagatgaccccccagggccaccgggccccacccaagatcaacccagacaactacggcatggacctgaacagtgatgacagcacagatgatgaggcccaccccaggaagcccatccccacctgggcccggggcacccccctgagccaggccatcatccaccagtactaccacccccccaacctgctggagctgtttggcaccatcctgcccctggacctggaggacatcttcaagaagagcaagccccgctaccacaagaggaccagcagcgctgtgtggaacagcccccccctgcagggcgcccgggtgcccagcagcctggcctacagcctgaagaagcactag

SEQ ID NO: 203347 - DNA, 504 bp, Artificial Sequence
  derived and/or modified sequence
atgggcaccacagcccctggccccatccacctgctggagctgtgtgaccagaagctgatggagttcctgtgcaacatggacaacaaggacctggtgtggctggaggagatccaggaggaggccgagaggatgttcacccgggagttcagcaaggagcctgagctgatgcccaagacccccagccagaagaacagaaggaagaagaggcgcatctcctatgtgcaggatgaaaatagagaccccatcagaagaaggctgagcaggaggaagagccgcagcagccagctgagcagccggcggctgcggagcaaggacagcgtggagaagctggccaccgtggtgggggagaatggatctgtgctgcggcgggtgaccagggctgctgctgctgctgctgctgccaccatggccctggccgcccccagcagccccaccccagagagccccaccatgctgaccaagaagccagaggacaaccacacccagtgccagctggtgccctag

SEQ ID NO: 203348 - DNA, 2745 bp, Artificial Sequence
  derived and/or modified sequence
atgggcaccaccgcccccggccccatccacctgctggagctgtgcgaccagaaactgatggaattcctgtgcaacatggacaacaaagatctggtctggttggaggaaatccaggaggaggcggaaaggatgttcacacgggaattttccaaagagcctgaactgatgccaaaaacccccagccaaaaaaaccgccgcaaaaaaagacggatcagttacgtgcaagacgaaaacagggatcctatccggcggagactttcccgtagaaagagtcggtcatcacagctgagtagccgcagactgcggtctaaggattcagtggaaaagcttgccaccgtggttggcgagaatggatccgtattacggcgcgttactcgcgccgcagcagctgcagccgccgctaccatggccctggccgccccatcatcacccacacccgaaagtcccaccatgctgactaagaagcctgaggacaaccacactcaatgccagttggtgccagtcgtggagatcggtatttcagaacggcaaaacgccgagcaacatgtgacccagctgatgagcaccgagccattgcctcgaaccttgtctcccactccagcgtcagcgacggccccaactagtcagggcatacctacaagtgacgaggaaagcacccccaaaaagtccaaagctcggattctcgagagcattacagtttctagtctgatggcaacccctcaggaccctaaaggccagggggtggggaccggccgctccgcatcaaagcttagaattgcacaggtgtctcccgggccccgggattcacccgccttcccagattctccttggcgagagcgcgtgcttgctcctatcctgccggataacttttccacaccgacaggaagtcggactgattcccagagtgtgcgccattcaccaatcgcacctagtagcccaagccctcaggtgctggcccagaaatacagcttggtagccaagcaggagagcgtcgtgcgtagggcttcaagaaggctggcgaaaaagacagccgaggagcccgccgcctcaggcaggatcatttgccacagttacctggaaagactcctgaacgtggaagtcccgcagaaggtgggctccgaacaaaaagagcctcctgaagaagcagagcctgtggcagcggcagagccagaggttccagaaaacaacggaaataatagctggccacacaacgatactgagatcgctaattccacccccaacccgaagccggccgcgtcttcccccgagactccatcagctggacagcaagaagccaagaccgatcaggccgacggccctcgggagcccccacaatccgcaaggcggaaacgcagttacaaacaagccgtctcagagcttgacgaagaacagcatctggaggatgaggagctgcagcccccgcggtctaagacaccgtcttccccctgtcccgctagtaaggtcgtccggcccctgaggacttttctgcatacagttcagcgaaaccagatgctgatgacacccaccagcgcaccccgcagtgtgatgaagtctttcatcaagcgaaacactcccctgagaatggatccaaaagagaaggagcggcagaggctggagaacctccgtcggaaggaagaggccgagcagctcagaaggcagaaagtggaggaggataaaagaagacggctggaggaggttaaactcaaacgggaagaacgattgagaaaagtcctccaagcacgcgagcgggtcgagcaaatgaaagaagaaaagaagaaacagattgaacaaaaatttgctcagatagatgagaagacagagaaggccaaagaagagagactggcagaggagaaggctaagaagaaagccgccgccaagaagatggaggaggttgaggcccgccggaaacaggaagaagaggcaaggagattaagatggctgcagcaagaggaggaagaacggcgacaccaggaattgcttcaaaaaaaaaaagaggaggagcaggagcggcttcggaaagctgctgaggcaaaaagattggccgagcagcgcgagcaggagaggcgggagcaggagaggagagaacaggaacgacgggaacaagagcggagggagcaagagagaagagaacaggaacggcaactagcggaacaagaaaggagaagagaacaagagcgccttcaggccgaacgcgagctgcaggagagggagaaggccctcagactacaaaaggagcaactgcaaagagaactcgaggaaaaaaagaagaaggaggaacagcagcgcttggccgaacgccagttgcaggaggaacaggagaagaaggctaaggaggctgccggggcctcaaaggcacttaatgtgaccgtcgatgttcaatcccccgcatgcaccagctaccagatgacaccccaaggtcatcgtgccccacccaagatcaaccctgacaactacggcatggacctcaactcagatgattccacagatgatgaagcccaccctagaaagcctatccccacatgggcccgcggaactccactctcgcaggcaatcattcaccaatattatcacccccctaaccttctcgaacttttcgggaccattttgccccttgatctggaagacatctttaagaagtcgaaacccaggtaccacaagagaacatccagcgcggtgtggaactccccgcccctgcaaggcgcccgggttcccagctctctggcctactccctgaagaaacattag

SEQ ID NO: 203349 - DNA, 504 bp, Artificial Sequence
  derived and/or modified sequence
atgggcaccaccgcccccggccccatccacctgctggagctgtgcgaccaaaagctgatggagttcctttgtaacatggataataaggacttggtctggcttgaggagatccaggaagaagcggaacgaatgttcacccgtgaattttccaaggaacctgaactcatgccaaagacacccagccaaaagaaccggagaaagaagaggaggatcagctacgtgcaggatgaaaacagagaccctatcaggcggcgactgagcaggcggaagtcccgttcgagccagctttcttcccgccgattacggagtaaagattctgtggaaaagttggcaacagtggtcggtgaaaatggaagcgtgcttaggcgggtcacccgggctgccgcagccgctgccgcagccaccatggcactggctgccccatccagccctaccccggaatctccaaccatgctcacaaagaagccagaggacaaccacacacaatgccaactcgtgccttag

SEQ ID NO: 203350 - DNA, 2745 bp, Artificial Sequence
  derived and/or modified sequence
atgggaacgacggcccctgggccaattcatctgctggagctctgcgaccaaaaacttatggagttcctgtgcaatatggacaacaaggaccttgtgtggcttgaggagatccaggaagaggctgagcggatgtttactcgggagttctccaaggagcccgaactgatgcctaaaacaccttctcagaaaaacaggcggaagaaaaggcgcatcagctacgtacaggatgagaaccgggatccgattagacgtagactgtcaaggcgcaagagccgctcatcccagctgtcatcccgacggttacgctctaaagatagcgtggagaagcttgctaccgttgtcggggagaacggctctgtactgcggcgagtaacacgggctgcagccgctgctgccgctgccacaatggccctggctgcgccttctagtcctaccccagagtctcccaccatgttgactaaaaagcctgaagataaccatactcagtgccagctcgtaccagtggtggagatcggcatctcggagcgccaaaacgctgagcagcacgttacccagttgatgtctacagaacctcttccaaggaccctctctcctacaccagcttccgccaccgcaccaacatcacagggtatcccgaccagcgacgaggagagtacaccaaagaagagtaaagcgaggattctcgagtcaattaccgtgagttccctgatggccacgccgcaagatcccaagggacagggggtcggaactggacggtcagcatcaaagctgcgcatcgcacaggtgtcccctgggcctcgcgactctcctgccttcccagactctccatggagggaacgggtccttgctcctatcctgcccgataatttctcaacaccaacaggctcaagaaccgactctcagagcgtcaggcactctcccatcgccccatcttctcctagcccccaggtactggcgcagaaatactctctggtggcaaagcaagagagtgtcgtgcgacgggcatctcgcaggctcgccaagaagacagcagaggagcctgccgctagcggaagaatcatttgccactcctacttggaaagattgcttaacgtggaagtgccccagaaggtggggtcagagcagaaagagcccccagaagaggccgaacctgtggccgcagcagagcccgaagtcccggagaataatggcaataactcttggcctcataatgacaccgagatcgcgaacagcacacctaacccaaagccggctgcctcaagccctgagacccccagcgcaggccaacaggaggcgaagactgatcaggctgacgggcctagggaacccccacagagcgccagacgtaagcggagctataaacaggcagtaagtgagctggacgaggagcagcacttggaagatgaagagttgcaacctcctcgtagcaagactccctcttcaccctgtccggcaagtaaggtggtgaggccactgaggacattccttcacacagtgcagagaaaccagatgttaatgacacctacctctgcacccagatccgtgatgaaatccttcataaagcggaacactcctctcaggatggatccgaaggagaaagagcggcaacgcctcgagaacctgaggcggaaggaagaggctgaacagttgcgtaggcagaaagtggaggaagataaacggagacggctcgaagaagtgaagctcaagcgcgaggagcggctcagaaaagtgcttcaggctagagaaagagtcgagcagatgaaggaggagaaaaaaaagcaaatcgagcagaagtttgcccagattgatgagaaaacagagaaagccaaggaggagagactcgctgaagaaaaggccaagaagaaggccgctgcaaagaagatggaagaggtcgaggccagaaggaagcaggaggaggaggcccgacggttgcggtggttgcagcaggaggaagaggagagaaggcaccaagaattgcttcagaagaagaaagaggaggagcaagagcggttgagaaaagccgcagaggccaaacggctggccgaacagagagagcaggagaggagagagcaagagagaagagaacaggagaggagagaacaggaacgaagagagcaggagaggcgtgaacaagaacgccagcttgcggagcaagaacgcaggagggagcaagaacggctgcaggccgagagggagctgcaagagcgcgaaaaagccctgcgcctgcagaaggagcagctgcaaagagagttagaggagaaaaagaagaaagaagagcagcagaggctagccgagcggcaattgcaggaagagcaggagaagaaggcaaaggaggccgctggagcgtccaaagcgctgaatgttaccgtcgatgtgcaaagtcctgcctgcacctcataccaaatgaccccccagggccatcgcgctcctcctaagatcaaccctgacaattacgggatggatttaaattctgatgattcgacagatgacgaagcacacccgagaaagccgataccaacatgggcccgtgggacacctttgagtcaagctattatccatcagtattaccacccacccaatttactggagctctttgggactattctgcctctggacctggaagatatcttcaagaaatcaaaacccagatatcataaaaggactagttccgctgtttggaactctccgccattgcaaggggcacgcgtgccatcctccctcgcatacagcctaaagaagcactag

SEQ ID NO: 203351 - DNA, 504 bp, Artificial Sequence
  derived and/or modified sequence
atgggaactaccgctcccggacctatccatttattggagctgtgcgatcagaagctcatggaattcctgtgcaatatggataataaagacctggtgtggctggaagagattcaagaggaggctgagcggatgttcacccgggagtttagcaaggagcccgagctcatgccaaagactccctcccagaaaaataggcggaaaaagagacgaatcagctatgtccaggatgaaaacagagatccgatcagaaggagactctcgagaaggaagagccgatccagtcagctgagtagtcggaggctgcgatccaaagattccgtggaaaagctcgcaactgttgtgggggaaaacggaagtgtgctcagacgtgtgactagagctgccgcagccgcagctgctgctacgatggccttggccgctcctagctcaccgacccctgaaagccccacgatgctgacaaagaagcctgaggataaccacacccaatgccagttagtgccctag

SEQ ID NO: 203352 - DNA, 570 bp, Artificial Sequence
  derived and/or modified sequence
agttttgaaaatcatagttttcgcccgcgctgcgccgcctggttgctcctcccgtgcgacagagccaccatggggacgacggccccagggcccattcacctgctggagctatgtgaccagaagctcatggagtttctctgcaacatggataataaggacttggtgtggcttgaggaaatccaagaggaggccgagcgcatgttcaccagagaattcagcaaagagccagagctgatgcccaaaacaccttctcagaagaaccgacggaagaagagacggatttcttatgttcaggatgaaaacagagatcccatcaggagaaggttatcccgcagaaagtctcggagcagccagctgagctcccgacgcctccgcagcaaggacagtgtagagaagctggctacagtggtcggggagaacggctccgtcctgcggcgtgtgacccgtgctgcggctgcagctgccgcggctaccatggcattggctgcaccttcttcacccacccctgagtctcccacgatgctgactaagaagcccgaggataaccacacccagtgccagctggtgcct

SEQ ID NO: 203353 - DNA, 3698 bp, Artificial Sequence
  derived and/or modified sequence
agttttgaaaatcatagttttcgcccgcgctgcgccgcctggttgctcctcccgtgcggtgagtcccgaaggcccggagccaagtgggtctgggcaagcggggccttacctagggataccaccggacttggatcggagcagccttcaggggacgtggcgcagtcgaacagagccaccatggggacgacggccccagggcccattcacctgctggagctatgtgaccagaagctcatggagtttctctgcaacatggataataaggacttggtgtggcttgaggaaatccaagaggaggccgagcgcatgttcaccagagaattcagcaaagagccagagctgatgcccaaaacaccttctcagaagaaccgacggaagaagagacggatttcttatgttcaggatgaaaacagagatcccatcaggagaaggttatcccgcagaaagtctcggagcagccagctgagctcccgacgcctccgcagcaaggacagtgtagagaagctggctacagtggtcggggagaacggctccgtcctgcggcgtgtgacccgtgctgcggctgcagctgccgcggctaccatggcattggctgcaccttcttcacccacccctgagtctcccacgatgctgactaagaagcccgaggataaccacacccagtgccagctggtgcctgtggtggagatcggcatcagtgagcgccagaatgctgagcagcatgtcacccagctcatgtccaccgagcctctgccccgcactctgtccccgactccagcttcagccacagctccaacctcccagggcatcccgacatcagatgaggaatcaacacctaagaagtcgaaggccaggatactggagtccatcacagtgagctccctgatggctacaccccaggaccccaagggtcaaggggtcgggacggggcggtctgcgtctaagctcaggattgcgcaggtctcccctggcccacgggactcgccagcctttccagattctccatggcgggagcgggtgctggctcccatcctgccggataacttctccacgcccacgggctctcgcacggactctcaatcggtgcggcacagcccgatcgccccgtcttccccgagtccccaagtcttagcccagaagtactctctggtggccaaacaggaaagtgttgtccgcagggcgagcagaaggcttgccaagaagactgccgaagagccagctgcctctggccgcatcatctgtcacagttacctggagaggctcctgaatgttgaggtgccccagaaagttggttctgagcagaaggaaccccccgaggaggctgagcctgtggcggcagctgagccagaggtccctgagaacaatggaaataactcgtggccccacaatgacacggagattgccaacagcacacccaacccgaagcctgcagccagcagcccggaaacaccctctgcagggcagcaagaggccaagacggaccaagcagatggacccagagagccaccgcagagtgccaggaggaagcgcagctacaagcaggccgtgagtgagctggacgaggagcagcacctggaggatgaggagctgcagccccccaggagcaagaccccttcctcaccctgcccagccagcaaggtggtacggcccctccggacctttctgcacacagtgcagaggaaccagatgctcatgaccccgacctcagccccacgcagcgtcatgaagtcctttattaagcgcaacactcccctgcgcatggaccccaaggagaaggagcggcagcgcctggagaatctgcggcggaaggaggaggccgagcagctgcgcaggcagaaggtggaggaggacaagcggcggcggctggaggaggtgaagctgaagcgtgaggaacgcctccgcaaggtgctgcaggcccgcgagcgggtggagcagatgaaggaggagaagaagaagcagattgagcagaagtttgctcagatcgacgagaagactgagaaggccaaggaggagcggctggcagaggagaaggccaagaaaaaggcggcggccaagaagatggaggaggtggaagcacgcaggaagcaggaagaggaggcacgtaggctcaggtggctgcagcaggaggaggaagagcggcggcaccaagagctgctgcagaagaagaaggaagaggagcaggagcggctgcggaaggcggccgaggctaagcggctggcagagcagcgggagcaggagcggcgggagcaggagcggcgcgagcaggagcggcgcgagcaggagcggcgggagcaggagcggcgcgagcaggagcgacagctggcagagcaggagcgtcggcgggagcaggagcggctccaggccgagagggagctgcaggagcgggagaaggccctgcggctgcagaaggagcagctgcagagggaactggaggagaagaagaagaaggaagagcagcagcgtctggctgagcggcagctgcaggaggagcaagagaagaaagccaaggaggcagcaggggccagcaaggccctgaatgtgactgtggacgtgcagtctccagcttgtacctcatatcagatgactccgcaagggcacagggcccctcccaagatcaacccagataactacgggatggatctgaatagcgacgactccaccgatgatgaggcccatccccggaagcccatccccacctgggcccgaggcaccccgctcagccaggctatcattcaccagtactaccacccaccgaaccttctggagctctttggaaccattctcccactggacttggaggatatcttcaagaagagcaagccccgctatcacaagcgcaccagctctgctgtctggaactcaccgcccctgcagggcgccagggtccccagcagcctggcctacagcctgaagaagcactgaggctggcctgcggccttcttggcagcctcgcctcctgtccatgtctatctgtctgtctgtcggtctctgtcttggtctgttgccctccttcttggcatgccattgtggagggcttggccaggtgtatataaacgtcctctgtgctgggtgtttctgctgcaggtggcaggtggccccaggcctgtttggaggatgggctgggtgggtgggtggggaagaaatgggcccagccccacatggcctgcagacagtgctctgtaaatagttgttttaatttagctgaatgttagcattttagtctttggcattttagcgtttgggaggtagattaataaagtatattccttcaagcctgctgttgataccatgaagactgggcgcctcagtcccagccctgtagctgtgtgtcttgggccaccagtggcctgcaggacgaaggtactgttccatcacctgcggtgtgcctcaggatcaccaggtgcaggcccccaccctcggagatgctgctgcagtgagtggttccactgcctggataacccttgaggaacacgtcagttactgtcacgatggggcaggtggagctccttcctattttttggggtgctccctgtttgtaaaggggagtttgttcattgggaaagacctgggtcttgacacggccctgccacttagtcccctaccctctccattccccaggctccacccgtgctgctcaggtgcaaatggacttgagagcatctatgtgctggtgaagcatgaggtctgagtagaaaagg

SEQ ID NO: 203354 - DNA, 2745 bp, Artificial Sequence
  derived and/or modified sequence
atgggcaccaccgcccccggccccatccacctgctggagctgtgcgaccagaagctgatggagttcctgtgcaacatggacaacaaggacctggtgtggctggaggagatccaggaggaggccgagagaatgttcaccagagagttcagcaaggagcccgagctgatgcccaagacccccagccagaagaacagaagaaagaagagaagaatcagctacgtgcaggacgagaacagagaccccatcagaagaagactgagcagaagaaagagcagaagcagccagctgagcagcagaagactgagaagcaaggacagcgtggagaagctggccaccgtggtgggcgagaacggcagcgtgctgagaagagtgaccagagccgccgccgccgccgccgccgccaccatggccctggccgcccccagcagccccacccccgagagccccaccatgctgaccaagaagcccgaggacaaccacacccagtgccagctggtgcccgtggtggagatcggcatcagcgagagacagaacgccgagcagcacgtgacccagctgatgagcaccgagcccctgcccagaaccctgagccccacccccgccagcgccaccgcccccaccagccagggcatccccaccagcgacgaggagagcacccccaagaagagcaaggccagaatcctggagagcatcaccgtgagcagcctgatggccaccccccaggaccccaagggccagggcgtgggcaccggcagaagcgccagcaagctgagaatcgcccaggtgagccccggccccagagacagccccgccttccccgacagcccctggagagagagagtgctggcccccatcctgcccgacaacttcagcacccccaccggcagcagaaccgacagccagagcgtgagacacagccccatcgcccccagcagccccagcccccaggtgctggcccagaagtacagcctggtggccaagcaggagagcgtggtgagaagagccagcagaagactggccaagaagaccgccgaggagcccgccgccagcggcagaatcatctgccacagctacctggagagactgctgaacgtggaggtgccccagaaggtgggcagcgagcagaaggagccccccgaggaggccgagcccgtggccgccgccgagcccgaggtgcccgagaacaacggcaacaacagctggccccacaacgacaccgagatcgccaacagcacccccaaccccaagcccgccgccagcagccccgagacccccagcgccggccagcaggaggccaagaccgaccaggccgacggccccagagagcccccccagagcgccagaagaaagagaagctacaagcaggccgtgagcgagctggacgaggagcagcacctggaggacgaggagctgcagccccccagaagcaagacccccagcagcccctgccccgccagcaaggtggtgagacccctgagaaccttcctgcacaccgtgcagagaaaccagatgctgatgacccccaccagcgcccccagaagcgtgatgaagagcttcatcaagagaaacacccccctgagaatggaccccaaggagaaggagagacagagactggagaacctgagaagaaaggaggaggccgagcagctgagaagacagaaggtggaggaggacaagagaagaagactggaggaggtgaagctgaagagagaggagagactgagaaaggtgctgcaggccagagagagagtggagcagatgaaggaggagaagaagaagcagatcgagcagaagttcgcccagatcgacgagaagaccgagaaggccaaggaggagagactggccgaggagaaggccaagaagaaggccgccgccaagaagatggaggaggtggaggccagaagaaagcaggaggaggaggccagaagactgagatggctgcagcaggaggaggaggagagaagacaccaggagctgctgcagaagaagaaggaggaggagcaggagagactgagaaaggccgccgaggccaagagactggccgagcagagagagcaggagagaagagagcaggagagaagagagcaggagagaagagagcaggagagaagagagcaggagagaagagagcaggagagacagctggccgagcaggagagaagaagagagcaggagagactgcaggccgagagagagctgcaggagagagagaaggccctgagactgcagaaggagcagctgcagagagagctggaggagaagaagaagaaggaggagcagcagagactggccgagagacagctgcaggaggagcaggagaagaaggccaaggaggccgccggcgccagcaaggccctgaacgtgaccgtggacgtgcagagccccgcctgcaccagctaccagatgaccccccagggccacagagccccccccaagatcaaccccgacaactacggcatggacctgaacagcgacgacagcaccgacgacgaggcccaccccagaaagcccatccccacctgggccagaggcacccccctgagccaggccatcatccaccagtactaccacccccccaacctgctggagctgttcggcaccatcctgcccctggacctggaggacatcttcaagaagagcaagcccagataccacaagagaaccagcagcgccgtgtggaacagcccccccctgcagggcgccagagtgcccagcagcctggcctacagcctgaagaagcactag

SEQ ID NO: 203355 - DNA, 2547 bp, Artificial Sequence
  derived and/or modified sequence
gcggcctcccgcaccgaagggaccctgggcgtctgaggccctgatccgggcgggccttcaggatgttagcagtccctgtccggttgaaggtaggaagccgaaaacccgagtgggggacgaacagacttacctcctgtcccgcaaaagatccactagatcgtcgtctccaaaacctgagagaccgcgaacgggttccagagccgcagcgttctctcagacctggcgttcaggaagattctagagagcacgggcaggtcccggaggtctcagacccgcaggtagatctcgaattcgtagacttgcaggcgaagcccagatatcgtaggctgatcctaaagactcagattcccgaggcctcagactcgcaggcagctcagaaaccacaggctcataggcagatccctgagaccacagaggctggccgagaaaccaccagcaactaagctgcattcagctggagttcctcggaacgggaggactcgcagctctccctttccccagccaggatgagggaattagacaatggaagtcgagcactggggaaagcaggcattctgcgtggggaagagctcccagctcgctgtagccttggagagggaagtgatggaaaaagaatatagcagcttattagggactcccaccctcttcaagttataaatatccccagaaccttggctacgtgcccggaagcctgttgtctctaactgtacaggagacttctctgcctgggctgggaaaggggcctttcttttgttttgcagatagatccacccactgaggaacttgaaaatttttttcaaacataactccaggccttgcttttattagtgagtgtcctgttcccagtgcccggttatttatgattaaattactgaagtgtctaaaaagaacagaaggacccaccccagccataatgcagactttcccattccttctctttccacccgcaactgtggggctaagaattcttaagatgtcacagaattataccatcctacctcatctaaagtcgatccgaggctggtccgatggtagtgggttaccagaacttaataacattaataactctaaagttagtatacaaccccccactgctaaatttggctataaaaataaaattgatctgagcaccatataaaatggaatcctggagggtcccctagaggcagtatccccagtggaaagagcgtgggcctcaaggtcagacaagcctggtttggaatccaggctgtgtatcctttggaaagtcattgaatccaggcccatttccttttctctaaaatgagggtcatcatacctaaggatgttgtgaggcgtgagtgagatgattaaagcgttccagagagtgcgctcttggatgatagccgttactttttattaaccctggctttggtggtaagggaaacttccagaaatgcttgtgggtatattggatagctcagaaaatctgggaaatcaaagtggctcaatagctgtgaggaactgtgggtgactttatcctcacatcgtgtttcttccagaaattcagacgcaacagaggttaggccagtttggtgggttccagtgagcggtgtgttgagcctagtagagcataggtacttggggttgccaaaaccccagcaagttgaggcttcacgctcagggaaacttctgggtcagaggttaataaccacgctccttggagcaaggaggaggggagcctttctgactagctgaagtaattgcaggtttctaactgggcctaaggtgagctgagggcttgagcccctcagcccagcgggggtcccttttcatcccttctctgacagattgctttgtaaactttcttaggccttccccccacccctttgccccagtgctttaagcccttctttgtcttcttgctgtttcttttattcctcaggcctgcggggcgggggcggggtggcgcccaggacgactccccgggctcagcttggctgcctgcctccttctgtaagtgctttttttttcttcacctgggaccctctagaggttggaaagagaagagaggctgggagcggatggaaagcatgactgcatctggagcccctggggggagtggggaagagggagtggaaggacagtggctgaggggcttcctgttgcagccttcagctggactcagggttggggtcactggaggaggaggtggcttcctgccccattgttctggactgcagtgtttcttgggaatacttactgtatgtggattttcagtaaccaacttggaaagctgtatttgttcccatgattcagcaaacaatgagtacctactgtgtgtagaagcagcaggacagcctgtcatcactgggaaagaggccagaagagccgtttggccagggtctccaatttaggctttcaacattatctctaaagaaggttatacattatgtcggctccactggctgatgggatcaaagaccctccttgtatatccttaaacctgtactctattaccaggccactgtgcctgtggagcactgtaagttcctaccttttaataaattttataattatcttgtgagc

SEQ ID NO: 203356 - DNA, 381 bp, Artificial Sequence
  derived and/or modified sequence
atgctggccgtgcccgtgagactgaaggtgggcagcagaaagcccgagtggggcaccaacagactgaccagctgccccgccaaggaccccctggacagaagactgcagaacctgagagacagagagagagtgcccgagccccagagaagcctgagacccggcgtgcaggaggacagcagagagcacggccaggtgcccgaggtgagcgacccccaggtggacctggagttcgtggacctgcaggccaagcccagatacagaagactgatcctgaagacccagatccccgaggccagcgacagccaggccgcccagaagccccaggcccacagacagatccccgagaccaccgaggccggcagagagaccaccagcaactag

SEQ ID NO: 203357 - DNA, 381 bp, Artificial Sequence
  derived and/or modified sequence
atgctggccgtgcctgtccgactgaaggttgggtctcggaagcccgagtggggaacaaacagactcacctcctgcccagcaaaggatcctctcgatcgaagactgcagaacttacgagatcgagagagagtacctgagccccagcgcagtctgcgccccggggtgcaggaagatagccgagaacacgggcaggttccagaggtttcggacccccaggtggacctcgaatttgtggatctccaggcaaagccccgctataggcggcttatcctgaagacacaaattccggaggcctcagactcccaggcagcgcagaagcctcaagcccaccgccagattccagagaccacagaagccggaagggagacgacttctaactag

SEQ ID NO: 203358 - DNA, 381 bp, Artificial Sequence
  derived and/or modified sequence
atgctggccgtgcctgtgcggctgaaggtgggcagcaggaagccagagtggggcaccaaccggctgaccagctgcccagccaaggaccccctggaccggcggctgcagaacctgcgggaccgggagcgggtgcctgagccccagaggagcctgcggcctggggtgcaggaggacagccgggagcacggccaggtgcctgaggtgtctgacccccaggtggacctggagtttgtggacctgcaggccaagccccgctacagaagactcatcctgaagacccagatccctgaggccagtgacagccaggccgcccagaagccccaggcccaccggcagatccctgagaccacagaagctggccgggagaccaccagcaactag

SEQ ID NO: 203359 - DNA, 381 bp, Artificial Sequence
  derived and/or modified sequence
atgctggccgtgcccgtgcggctgaaggtgggcagccggaagcccgaatggggcacgaaccggttgacctcctgccccgccaaggatccgttagatagaaggttgcaaaacctgcgagatagagagagggtgcctgaacctcagcggtcattgcgacccggagtgcaggaagactcgagagaacacggccaggtcccagaagtcagtgaccctcaagtcgatttggagtttgtggacctgcaagctaaacccagataccgtagactgatactaaagactcagattcctgaagcatcagattctcaggcagcacagaaacctcaggcccatcggcagatccccgagactacagaggcgggacgagaaaccacatccaattag

SEQ ID NO: 203360 - DNA, 381 bp, Artificial Sequence
  derived and/or modified sequence
atgttagccgtgccggtgcgacttaaggtgggatccagaaaacccgagtggggcacaaaccgactaacgtcttgcccagccaaggacccactggacagacgccttcagaacctacgcgaccgcgagagggttcccgaaccacagcggagtctaagacccggagtgcaggaagacagtagggaacacggccaagtaccggaagtgtctgacccacaggttgatctggagtttgtggatcttcaggctaaaccccgataccgcagactaatccttaaaacccagatccctgaagcctcagactcccaggccgcacaaaagccacaggcccatcgccaaattcccgagaccacggaggctgggagagagactacctcgaactag

SEQ ID NO: 203361 - protein, 1388 aa, Artificial Sequence
  derived and/or modified sequence
MAPGCKTELRSVTNGQSNQPSNEGDAIKVFVRIRPPAERSGSADGEQNLCLSVLSSTSLRLHSNPEPKTFTFDHVADVDTTQESVFATVAKSIVESCMSGYNGTIFAYGQTGSGKTFTMMGPSESDNFSHNLRGVIPRSFEYLFSLIDREKEKAGAGKSFLCKCSFIEIYNEQIYDLLDSASAGLYLREHIKKGVFVVGAVEQVVTSAAEAYQVLSGGWRNRRVASTSMNRESSRSHAVFTITIESMEKSNEIVNIRTSLLNLVDLAGSERQKDTHAEGMRLKEAGNINRSLSCLGQVITALVDVGNGKQRHVCYRDSKLTFLLRDSLGGNAKTAIIANVHPGSRCFGETLSTLNFAQRAKLIKNKAVVNEDTQGNVSQLQAEVKRLKEQLAELASGQTPPESFLTRDKKKTNYMEYFQEAMLFFKKSEQEKKSLIEKVTQLEDLTLKKEKFIQSNKMIVKFREDQIIRLEKLHKESRGGFLPEEQDRLLSELRNEIQTLREQIEHHPRVAKYAMENHSLREENRRLRLLEPVKRAQEMDAQTIAKLEKAFSEISGMEKSDKNQQGFSPKAQKEPCLFANTEKLKAQLLQIQTELNNSKQEYEEFKELTRKRQLELESELQSLQKANLNLENLLEATKACKRQEVSQLNKIHAETLKIITTPTKAYQLHSRPVPKLSPEMGSFGSLYTQNSSILDNDILNEPVPPEMNEQAFEAISEELRTVQEQMSALQAKLDEEEHKNLKLQQHVDKLEHHSTQMQELFSSERIDWTKQQEELLSQLNVLEKQLQETQTKNDFLKSEVHDLRVVLHSADKELSSVKLEYSSFKTNQEKEFNKLSERHMHVQLQLDNLRLENEKLLESKACLQDSYDNLQEIMKFEIDQLSRNLQNFKKENETLKSDLNNLMELLEAEKERNNKLSLQFEEDKENSSKEILKVLEAVRQEKQKETAKCEQQMAKVQKLEESLLATEKVISSLEKSRDSDKKVVADLMNQIQELRTSVCEKTETIDTLKQELKDINCKYNSALVDREESRVLIKKQEVDILDLKETLRLRILSEDIERDMLCEDLAHATEQLNMLTEASKKHSGLLQSAQEELTKKEALIQELQHKLNQKKEEVEQKKNEYNFKMRQLEHVMDSAAEDPQSPKTPPHFQTHLAKLLETQEQEIEDGRASKTSLEHLVTKLNEDREVKNAEILRMKEQLREMENLRLESQQLIEKNWLLQGQLDDIKRQKENSDQNHPDNQQLKNEQEESIKERLAKSKIVEEMLKMKADLEEVQSALYNKEMECLRMTDEVERTQTLESKAFQEKEQLRSKLEEMYEERERTSQEMEMLRKQVECLAEENGKLVGHQNLHQKIQYVVRLKKENVRLAEETEKLRAENVFLKEKKRSES

SEQ ID NO: 203362 - protein, 1196 aa, Artificial Sequence
  derived and/or modified sequence
VPPCPAELRSVTNGQSNQPSNEGDAIKVFVRIRPPAERSGSADGEQNLCLSVLSSTSLRLHSNPEPKTFTFDHVADVDTTQESVFATVAKSIVESCMSGYNGTIFAYGQTGSGKTFTMMGPSESDNFSHNLRGVIPRSFEYLFSLIDREKEKAGAGKSFLCKCSFIEIYNEQIYDLLDSASAGLYLREHIKKGVFVVGAVEQVVTSAAEAYQVLSGGWRNRRVASTSMNRESSRSHAVFTITIESMEKSNEIVNIRTSLLNLVDLAGSERQKDTHAEGMRLKEAGNINRSLSCLGQVITALVDVGNGKQRHVCYRDSKLTFLLRDSLGGNAKTAIIANVHPGSRCFGETLSTLNFAQRAKLIKNKAVVNEDTQGNVSQLQAEVKRLKEQLAELASGQTPPESFLTRDKKKTNYMEYFQEAMLFFKKSEQEKKSLIEKVTQLEDLTLKKEKFIQSNKMIVKFREDQIIRLEKLHKESRGGFLPEEQDRLLSELRNEIQTLREQIEHHPRVAKYAMENHSLREENRRLRLLEPVKRAQEMDAQTIAKLEKAFSEISGMEKSDKNQQGFSPKAQKEPCLFANTEKLKAQLLQIQTELNNSKQEYEEFKELTRKRQLELESELQSLQKANLNLENLLEATKACKRQEVSQLNKIHAETLKIITTPTKAYQLHSRPVPKLSPEMGSFGSLYTQNSSILDNDILNEPVPPEMNEQAFEAISEELRTVQEQMSALQAKLDEEEHKNLKLQQHVDKLEHHSTQMQELFSSERIDWTKQQEELLSQLNVLEKQLQETQTKNDFLKSEVHDLRVVLHSADKELSSVKLEYSSFKTNQEKEFNKLSERHMHVQLQLDNLRLENEKLLESKACLQDSYDNLQEIMKFEIDQLSRNLQNFKKENETLKSDLNNLMELLEAEKERNNKLSLQFEEDKENSSKEILKVLEAVRQEKQKETAKCEQQMAKVQKLEESLLATEKVISSLEKSRDSDKKVVADLMNQIQELRTSVCEKTETIDTLKQELKDINCKYNSALVDREESRVLIKKQEVDILDLKETLRLRILSEDIERDMLCEDLAHATEQLNMLTEASKKHSGLLQSAQRTDQEGSPDSGTSAQAKPKERGSRTEEEYNFKMRQLEHVMDSAAEDPQSPKTPPHFQTHLAKLLETQEQEIEDGRASKTSLEHLVTKLNEDREVKNAEILRMKEQLR

SEQ ID NO: 203363 - DNA, 4167 bp, Artificial Sequence
  derived and/or modified sequence
atggcccccggctgcaagaccgagctgagaagcgtgaccaacggccagagcaaccagcccagcaacgagggcgacgccatcaaggtgttcgtgagaatcagaccccccgccgagagaagcggcagcgccgacggcgagcagaacctgtgcctgagcgtgctgagcagcaccagcctgagactgcacagcaaccccgagcccaagaccttcaccttcgaccacgtggccgacgtggacaccacccaggagagcgtgttcgccaccgtggccaagagcatcgtggagagctgcatgagcggctacaacggcaccatcttcgcctacggccagaccggcagcggcaagaccttcaccatgatgggccccagcgagagcgacaacttcagccacaacctgagaggcgtgatccccagaagcttcgagtacctgttcagcctgatcgacagagagaaggagaaggccggcgccggcaagagcttcctgtgcaagtgcagcttcatcgagatctacaacgagcagatctacgacctgctggacagcgccagcgccggcctgtacctgagagagcacatcaagaagggcgtgttcgtggtgggcgccgtggagcaggtggtgaccagcgccgccgaggcctaccaggtgctgagcggcggctggagaaacagaagagtggccagcaccagcatgaacagagagagcagcagaagccacgccgtgttcaccatcaccatcgagagcatggagaagagcaacgagatcgtgaacatcagaaccagcctgctgaacctggtggacctggccggcagcgagagacagaaggacacccacgccgagggcatgagactgaaggaggccggcaacatcaacagaagcctgagctgcctgggccaggtgatcaccgccctggtggacgtgggcaacggcaagcagagacacgtgtgctacagagacagcaagctgaccttcctgctgagagacagcctgggcggcaacgccaagaccgccatcatcgccaacgtgcaccccggcagcagatgcttcggcgagaccctgagcaccctgaacttcgcccagagagccaagctgatcaagaacaaggccgtggtgaacgaggacacccagggcaacgtgagccagctgcaggccgaggtgaagagactgaaggagcagctggccgagctggccagcggccagaccccccccgagagcttcctgaccagagacaagaagaagaccaactacatggagtacttccaggaggccatgctgttcttcaagaagagcgagcaggagaagaagagcctgatcgagaaggtgacccagctggaggacctgaccctgaagaaggagaagttcatccagagcaacaagatgatcgtgaagttcagagaggaccagatcatcagactggagaagctgcacaaggagagcagaggcggcttcctgcccgaggagcaggacagactgctgagcgagctgagaaacgagatccagaccctgagagagcagatcgagcaccaccccagagtggccaagtacgccatggagaaccacagcctgagagaggagaacagaagactgagactgctggagcccgtgaagagagcccaggagatggacgcccagaccatcgccaagctggagaaggccttcagcgagatcagcggcatggagaagagcgacaagaaccagcagggcttcagccccaaggcccagaaggagccctgcctgttcgccaacaccgagaagctgaaggcccagctgctgcagatccagaccgagctgaacaacagcaagcaggagtacgaggagttcaaggagctgaccagaaagagacagctggagctggagagcgagctgcagagcctgcagaaggccaacctgaacctggagaacctgctggaggccaccaaggcctgcaagagacaggaggtgagccagctgaacaagatccacgccgagaccctgaagatcatcaccacccccaccaaggcctaccagctgcacagcagacccgtgcccaagctgagccccgagatgggcagcttcggcagcctgtacacccagaacagcagcatcctggacaacgacatcctgaacgagcccgtgccccccgagatgaacgagcaggccttcgaggccatcagcgaggagctgagaaccgtgcaggagcagatgagcgccctgcaggccaagctggacgaggaggagcacaagaacctgaagctgcagcagcacgtggacaagctggagcaccacagcacccagatgcaggagctgttcagcagcgagagaatcgactggaccaagcagcaggaggagctgctgagccagctgaacgtgctggagaagcagctgcaggagacccagaccaagaacgacttcctgaagagcgaggtgcacgacctgagagtggtgctgcacagcgccgacaaggagctgagcagcgtgaagctggagtacagcagcttcaagaccaaccaggagaaggagttcaacaagctgagcgagagacacatgcacgtgcagctgcagctggacaacctgagactggagaacgagaagctgctggagagcaaggcctgcctgcaggacagctacgacaacctgcaggagatcatgaagttcgagatcgaccagctgagcagaaacctgcagaacttcaagaaggagaacgagaccctgaagagcgacctgaacaacctgatggagctgctggaggccgagaaggagagaaacaacaagctgagcctgcagttcgaggaggacaaggagaacagcagcaaggagatcctgaaggtgctggaggccgtgagacaggagaagcagaaggagaccgccaagtgcgagcagcagatggccaaggtgcagaagctggaggagagcctgctggccaccgagaaggtgatcagcagcctggagaagagcagagacagcgacaagaaggtggtggccgacctgatgaaccagatccaggagctgagaaccagcgtgtgcgagaagaccgagaccatcgacaccctgaagcaggagctgaaggacatcaactgcaagtacaacagcgccctggtggacagagaggagagcagagtgctgatcaagaagcaggaggtggacatcctggacctgaaggagaccctgagactgagaatcctgagcgaggacatcgagagagacatgctgtgcgaggacctggcccacgccaccgagcagctgaacatgctgaccgaggccagcaagaagcacagcggcctgctgcagagcgcccaggaggagctgaccaagaaggaggccctgatccaggagctgcagcacaagctgaaccagaagaaggaggaggtggagcagaagaagaacgagtacaacttcaagatgagacagctggagcacgtgatggacagcgccgccgaggacccccagagccccaagacccccccccacttccagacccacctggccaagctgctggagacccaggagcaggagatcgaggacggcagagccagcaagaccagcctggagcacctggtgaccaagctgaacgaggacagagaggtgaagaacgccgagatcctgagaatgaaggagcagctgagagagatggagaacctgagactggagagccagcagctgatcgagaagaactggctgctgcagggccagctggacgacatcaagagacagaaggagaacagcgaccagaaccaccccgacaaccagcagctgaagaacgagcaggaggagagcatcaaggagagactggccaagagcaagatcgtggaggagatgctgaagatgaaggccgacctggaggaggtgcagagcgccctgtacaacaaggagatggagtgcctgagaatgaccgacgaggtggagagaacccagaccctggagagcaaggccttccaggagaaggagcagctgagaagcaagctggaggagatgtacgaggagagagagagaaccagccaggagatggagatgctgagaaagcaggtggagtgcctggccgaggagaacggcaagctggtgggccaccagaacctgcaccagaagatccagtacgtggtgagactgaagaaggagaacgtgagactggccgaggagaccgagaagctgagagccgagaacgtgttcctgaaggagaagaagagaagcgagagctag

SEQ ID NO: 203364 - DNA, 3591 bp, Artificial Sequence
  derived and/or modified sequence
gtgcccccctgccccgccgagctgagaagcgtgaccaacggccagagcaaccagcccagcaacgagggcgacgccatcaaggtgttcgtgagaatcagaccccccgccgagagaagcggcagcgccgacggcgagcagaacctgtgcctgagcgtgctgagcagcaccagcctgagactgcacagcaaccccgagcccaagaccttcaccttcgaccacgtggccgacgtggacaccacccaggagagcgtgttcgccaccgtggccaagagcatcgtggagagctgcatgagcggctacaacggcaccatcttcgcctacggccagaccggcagcggcaagaccttcaccatgatgggccccagcgagagcgacaacttcagccacaacctgagaggcgtgatccccagaagcttcgagtacctgttcagcctgatcgacagagagaaggagaaggccggcgccggcaagagcttcctgtgcaagtgcagcttcatcgagatctacaacgagcagatctacgacctgctggacagcgccagcgccggcctgtacctgagagagcacatcaagaagggcgtgttcgtggtgggcgccgtggagcaggtggtgaccagcgccgccgaggcctaccaggtgctgagcggcggctggagaaacagaagagtggccagcaccagcatgaacagagagagcagcagaagccacgccgtgttcaccatcaccatcgagagcatggagaagagcaacgagatcgtgaacatcagaaccagcctgctgaacctggtggacctggccggcagcgagagacagaaggacacccacgccgagggcatgagactgaaggaggccggcaacatcaacagaagcctgagctgcctgggccaggtgatcaccgccctggtggacgtgggcaacggcaagcagagacacgtgtgctacagagacagcaagctgaccttcctgctgagagacagcctgggcggcaacgccaagaccgccatcatcgccaacgtgcaccccggcagcagatgcttcggcgagaccctgagcaccctgaacttcgcccagagagccaagctgatcaagaacaaggccgtggtgaacgaggacacccagggcaacgtgagccagctgcaggccgaggtgaagagactgaaggagcagctggccgagctggccagcggccagaccccccccgagagcttcctgaccagagacaagaagaagaccaactacatggagtacttccaggaggccatgctgttcttcaagaagagcgagcaggagaagaagagcctgatcgagaaggtgacccagctggaggacctgaccctgaagaaggagaagttcatccagagcaacaagatgatcgtgaagttcagagaggaccagatcatcagactggagaagctgcacaaggagagcagaggcggcttcctgcccgaggagcaggacagactgctgagcgagctgagaaacgagatccagaccctgagagagcagatcgagcaccaccccagagtggccaagtacgccatggagaaccacagcctgagagaggagaacagaagactgagactgctggagcccgtgaagagagcccaggagatggacgcccagaccatcgccaagctggagaaggccttcagcgagatcagcggcatggagaagagcgacaagaaccagcagggcttcagccccaaggcccagaaggagccctgcctgttcgccaacaccgagaagctgaaggcccagctgctgcagatccagaccgagctgaacaacagcaagcaggagtacgaggagttcaaggagctgaccagaaagagacagctggagctggagagcgagctgcagagcctgcagaaggccaacctgaacctggagaacctgctggaggccaccaaggcctgcaagagacaggaggtgagccagctgaacaagatccacgccgagaccctgaagatcatcaccacccccaccaaggcctaccagctgcacagcagacccgtgcccaagctgagccccgagatgggcagcttcggcagcctgtacacccagaacagcagcatcctggacaacgacatcctgaacgagcccgtgccccccgagatgaacgagcaggccttcgaggccatcagcgaggagctgagaaccgtgcaggagcagatgagcgccctgcaggccaagctggacgaggaggagcacaagaacctgaagctgcagcagcacgtggacaagctggagcaccacagcacccagatgcaggagctgttcagcagcgagagaatcgactggaccaagcagcaggaggagctgctgagccagctgaacgtgctggagaagcagctgcaggagacccagaccaagaacgacttcctgaagagcgaggtgcacgacctgagagtggtgctgcacagcgccgacaaggagctgagcagcgtgaagctggagtacagcagcttcaagaccaaccaggagaaggagttcaacaagctgagcgagagacacatgcacgtgcagctgcagctggacaacctgagactggagaacgagaagctgctggagagcaaggcctgcctgcaggacagctacgacaacctgcaggagatcatgaagttcgagatcgaccagctgagcagaaacctgcagaacttcaagaaggagaacgagaccctgaagagcgacctgaacaacctgatggagctgctggaggccgagaaggagagaaacaacaagctgagcctgcagttcgaggaggacaaggagaacagcagcaaggagatcctgaaggtgctggaggccgtgagacaggagaagcagaaggagaccgccaagtgcgagcagcagatggccaaggtgcagaagctggaggagagcctgctggccaccgagaaggtgatcagcagcctggagaagagcagagacagcgacaagaaggtggtggccgacctgatgaaccagatccaggagctgagaaccagcgtgtgcgagaagaccgagaccatcgacaccctgaagcaggagctgaaggacatcaactgcaagtacaacagcgccctggtggacagagaggagagcagagtgctgatcaagaagcaggaggtggacatcctggacctgaaggagaccctgagactgagaatcctgagcgaggacatcgagagagacatgctgtgcgaggacctggcccacgccaccgagcagctgaacatgctgaccgaggccagcaagaagcacagcggcctgctgcagagcgcccagagaaccgaccaggagggcagccccgacagcggcaccagcgcccaggccaagcccaaggagagaggcagcagaaccgaggaggagtacaacttcaagatgagacagctggagcacgtgatggacagcgccgccgaggacccccagagccccaagacccccccccacttccagacccacctggccaagctgctggagacccaggagcaggagatcgaggacggcagagccagcaagaccagcctggagcacctggtgaccaagctgaacgaggacagagaggtgaagaacgccgagatcctgagaatgaaggagcagctgagatag

SEQ ID NO: 203365 - DNA, 4167 bp, Artificial Sequence
  derived and/or modified sequence
atggccccaggctgtaaaacagagcttagatcggtgacaaatgggcagtcaaaccagcccagtaacgagggcgatgctatcaaagtgttcgtgcggatacggcctccggccgagcgctcaggctcagccgatggggagcagaatctgtgcttgagtgtactgagttccactagcctcaggcttcacagcaatccggaaccgaagactttcacatttgatcatgtggccgatgtggatactactcaggagagtgtttttgccactgtcgccaaatctatagtggagtcttgtatgtcgggttacaatggaacaatcttcgcgtacggtcagactggaagtgggaaaacatttacaatgatgggaccgtcagagtcagataacttttcacacaacttacggggcgtgatacctagatctttcgagtatctgtttagccttattgacagggagaaggaaaaggcaggcgccggcaagtctttcctgtgtaaatgctcatttatcgaaatttacaatgagcagatctacgatctgctcgacagtgcgtcggccggactgtacctgcgggaacacataaaaaagggcgtcttcgtggttggtgcagtcgagcaagtagtgacttcagctgccgaggcctaccaggtcttaagcggtgggtggcggaaccgtagagtggccagcacaagcatgaaccgagaatcatcacgatcccatgctgtctttaccatcacaattgagtctatggagaaatccaacgagatcgtgaatataagaacctctctgctgaatctcgtcgatctggcaggctccgagcggcagaaagatactcacgcagaaggaatgcgtcttaaggaagctggaaatatcaatcggtccctgtcctgtcttggacaggttatcaccgccctagtagacgtgggcaacggaaaacaacggcacgtgtgttacagggatagcaagctgacgtttcttctaagagactccctgggaggcaacgccaagactgctatcatcgccaacgtgcacccaggatcgaggtgttttggagaaaccctgtctacactgaatttcgcccagagggccaaattgataaaaaacaaggccgtggtgaacgaggatacgcaaggcaacgtcagccaactccaggccgaggtgaaaaggctcaaggagcagctggcagagctggccagtggtcagactccccccgagtcgttcctgactagagataagaagaaaaccaattatatggagtattttcaggaagccatgcttttttttaagaaaagcgaacaggaaaaaaaaagcctgattgaaaaggtaacacagctggaagacctcaccctgaagaaggaaaagtttatacagtctaataagatgattgttaagttccgtgaagatcagattatccggcttgaaaaactgcacaaggagtccagaggcggcttcctcccggaagagcaggacagactgctttctgagctaagaaatgaaatccagactttgagagaacagatcgagcaccatcctcgagtagccaaatacgcgatggagaatcacagcctgagagaggaaaatagaagactgcgcctactagaaccagttaagagagctcaggaaatggacgctcaaacaattgcaaagctcgaaaaggctttttccgaaatttcaggaatggagaagagcgataagaatcaacagggatttagcccaaaagctcaaaaagagccttgccttttcgccaacaccgagaagttgaaagctcaactcctgcagatacagaccgaactcaataattcgaaacaggagtacgaagagtttaaagagctgaccagaaaacgtcagctcgaattggagtcggagctccagagcctccagaaggctaatttgaacttggagaaccttctagaagcaacaaaggcatgcaagagacaggaagtgagtcaactaaacaaaatccatgccgagaccctgaagataattactaccccaaccaaggcctatcagttgcattcccgtccagtaccgaagctatctccagagatggggtcttttggaagtctctacactcagaacagctcgattttggataatgatatattaaacgagcccgttcctccagaaatgaacgaacaggctttcgaggctatctctgaggagctcaggacggtccaggagcaaatgagtgccttgcaggctaaattggacgaggaagagcataaaaacttgaaactccaacagcatgtggataagttagaacatcatagtacccagatgcaggagctcttctcctctgagcgaatcgactggacaaagcaacaggaagaacttctgagtcagttgaatgtactggaaaagcagctccaggaaacccagaccaaaaacgattttcttaagagcgaggtgcacgatttacgggtggtgctgcactctgctgacaaggagctatcaagcgttaaactggagtactcctcctttaagaccaatcaggaaaaagaattcaataagttgtctgaaagacatatgcatgtccagctccagctcgataacctgaggctggagaatgagaaactgctggaatccaaagcttgcctgcaagactcatacgataatctgcaggaaatcatgaagtttgaaatcgatcagctcagcaggaatctgcaaaactttaagaaagaaaatgaaactctaaaatcggatttgaataacctgatggaactcctagaagccgaaaaggaacgcaataacaagcttagtctccagtttgaagaagataaggaaaactcttctaaggagatcctgaaggtgttggaagcggtccgtcaggaaaaacagaaagagactgctaaatgtgagcagcaaatggcaaaggttcagaagcttgaggaaagtctgttagccaccgagaaagtgatttcgtccctcgagaaaagccgggactctgataaaaaagtcgtggccgacctgatgaatcaaatccaggagctccggacctccgtctgcgagaagaccgagaccattgacactctcaaacaagaactgaaggacatcaactgtaaatataatagcgcgctggttgatagagaagagtcccgggtcctcataaagaaacaggaggtggacatcctggatctgaaggagaccttgagactacgaatcctcagcgaagacatcgagcgggacatgttgtgtgaagaccttgctcatgccaccgagcagctgaacatgctcacggaagcctctaagaaacattcaggactccttcaatccgctcaggaggaactcactaagaaggaggctctcattcaggaactgcagcacaagctcaaccaaaaaaaggaggaggtggagcagaagaagaacgaatacaactttaagatgagacagctggagcatgtaatggattcggcagccgaggatccccagtcaccgaaaacccccccgcattttcagacacatctcgcaaaactcctagagactcaggagcaggaaattgaggatggcagggcctcgaaaacttctctggagcatctcgtcaccaaactcaacgaggatagggaggttaaaaatgccgagatcctgaggatgaaagagcaattacgcgagatggagaatctgcggctggagagccagcagctgattgaaaaaaattggttgttacagggccaattggacgacattaagcggcaaaaggaaaatagcgaccaaaaccaccctgacaatcagcagctcaagaatgaacaggaagagagcattaaagagcgtttggccaaatccaaaatagtcgaagagatgctaaaaatgaaagcggatctggaagaggtacaaagcgctctttacaacaaggagatggagtgtctgcgtatgacagacgaggtggaacgcacccaaacgctggagtcaaaagccttccaggagaaggaacagttgcgatccaaactggaagaaatgtacgaggaacgtgaacgaacatcacaggagatggagatgctgaggaaacaggtggaatgcctggccgaggaaaatggcaagctggtagggcaccaaaacttgcatcagaagatccaatacgtggtgagactcaagaaggagaacgtgaggctcgccgaagagactgagaagttgagggctgaaaacgtctttctgaaagagaaaaagcgcagtgagtcatag

SEQ ID NO: 203366 - DNA, 3591 bp, Artificial Sequence
  derived and/or modified sequence
gtacctccttgtcctgctgagctccgctcagtcactaacggacaatccaatcagcccagcaacgaaggcgatgctatcaaggtgttcgtccgaataagaccacctgctgagaggtcaggttccgccgacggggaacaaaatctttgccttagcgttttgtctagcaccagtctgcgtctgcattctaaccctgaaccaaagacttttactttcgaccatgtcgccgacgtggacacaacacaggagagtgtgttcgcaaccgtcgctaagtccatagtggagagttgtatgtccggctacaatggcacaatttttgcctatgggcagactggaagcggtaaaactttcactatgatgggcccctccgaaagtgataacttcagtcacaacctgagaggcgtcataccacgcagttttgagtacctgttctctctcatcgatcgggaaaaagaaaaggctggcgctgggaaaagtttcttatgtaagtgttcattcatcgaaatctacaacgaacagatttacgatctcctggattcggcttccgccgggctctatctgagggagcacatcaaaaagggtgttttcgtggtgggcgcggtggagcaggtcgtcacatccgcggctgaagcatatcaggtactttcggggggttggaggaatcgccgcgtggcgtccacctcaatgaatcgtgaatcaagccggagtcatgctgtgtttacgatcacaattgagtcaatggagaaatccaatgagatagtgaacattcgcacttcactactgaacctggtggatctcgccggatcagagcgccaaaaagacactcatgccgagggtatgcgtctaaaggaggcggggaacatcaatcgatctctgtcttgtctcggccaggtcatcaccgcgctggtggacgtggggaacggcaaacaacgccacgtttgttaccgggacagcaaactaacctttctgctgcgcgatagcctcggcgggaacgccaagaccgcgatcattgcaaatgtgcaccctgggagccgctgttttggcgagaccctgagtaccctaaatttcgctcagagagccaagctgatcaagaataaagccgtcgtgaatgaagatacccaaggaaatgtttcacaactgcaggcagaggtcaagcgtctgaaggaacaactcgccgaactggcctccggccagacacctcccgaaagtttcttgactagagacaagaagaagaccaattatatggagtattttcaggaggccatgcttttttttaagaagtctgagcaggaaaaaaaaagtttgatcgagaaggtgacacagctcgaagacttgacactgaagaaagagaagttcattcaatccaataaaatgatcgttaagttcagagaggatcagattatcagactggaaaagctccataaagagtccaggggagggtttctgcccgaggagcaagatcgcctcctgtcggagttgaggaatgagatccaaacacttcgggaacagatcgagcatcacccccgcgtggctaagtacgccatggagaaccacagccttcgggaagagaaccggaggctgcgtctgcttgaacctgtgaagcgagcccaggagatggatgcacaaaccattgctaaactggagaaagcctttagtgagatctctggcatggagaagtccgataaaaaccagcagggattcagtccaaaggcccagaaggaaccatgtctatttgccaacactgagaaactgaaggctcagctcttgcagatacagaccgaactgaataacagcaagcaggagtacgaagagttcaaggaactcactcgcaagagacagttggagctcgaatcagagctacagtcactccagaaagctaacctgaacctggagaatttactggaggccactaaagcatgtaaacggcaagaggtctcgcagctgaacaaaatccatgctgaaaccctgaagatcataaccacccccaccaaggcttaccaactacattctaggcctgtccccaagcttagtcccgagatgggaagttttggcagtctgtacactcagaattcaagtatactagataatgacatcctaaacgaaccagtcccccccgaaatgaacgaacaggcatttgaagcaattagtgaagagctgcggactgtgcaggaacagatgagtgcgttacaggccaaactcgatgaggaagagcacaagaacctcaaactccagcagcacgtggacaaactggagcaccactcaacccagatgcaggaactcttcagctccgaacggatcgactggaccaagcagcaggaggaactgttgtctcaactgaacgtccttgaaaagcagctccaggagacccagaccaagaacgatttcctgaagagcgaggtgcacgacctgcgagtagtccttcacagcgcagacaaggagctttcatcagttaagctggaatattcctcctttaagacgaaccaggaaaaggaattcaataaattgtcggaaagacacatgcacgtccagcttcagcttgataatcttagactggagaatgagaagcttcttgagtctaaagcgtgtctgcaggactcttacgacaacttgcaggagattatgaagtttgagatcgatcagctgtcaagaaacctgcaaaactttaagaaggaaaacgaaacactgaaatcagacttgaataatctgatggaactgctcgaagcggagaaggaaagaaacaacaagctcagcctgcagttcgaggaggataaagaaaatagtagtaaggaaatcctgaaagtcctcgaggccgtgcggcaggaaaaacaaaaggagaccgcgaaatgcgagcagcaaatggcaaaggtccagaagctggaggaatcactactcgccaccgagaaggtgatttcttcactcgagaaatcccgggattcagataaaaaggtagtcgcagatctgatgaatcagattcaggaactaagaacttccgtatgcgaaaagacagaaacaatagataccttgaaacaggagttaaaagatattaattgtaaatataactccgcactggtcgatcgcgaggagtctcgagtgctgatcaaaaagcaggaagtggacatactagacctcaaagaaacgctcaggctgcgaattttgagcgaggacatcgaacgcgacatgttgtgtgaggacttggcacacgcaacggagcagctgaatatgcttactgaggcctcaaagaagcattcgggactcctccagtccgctcagcgcactgaccaggagggctcaccagatagtgggacgagcgcgcaggccaaacccaaggagcgtggttcgaggaccgaagaggagtataactttaagatgcggcagctcgagcacgtcatggattcagcggcggaggacccacagagccctaagactcccccccactttcaaacacacctcgcaaaacttcttgagacccaggagcaggagattgaggatgggagagcgtctaaaacttccctggaacatttggtgactaaactgaacgaggatcgcgaggtgaaaaatgctgagatcctgaggatgaaggagcagctccggtag

SEQ ID NO: 203367 - DNA, 4167 bp, Artificial Sequence
  derived and/or modified sequence
atggcccctggctgcaagacagagctgcggtctgtgaccaacggccagagcaaccagcccagcaatgaaggagatgccatcaaggtgtttgtgcgcatccggcccccagctgagaggagcggcagcgcagatggagagcagaacctgtgcctgtctgtgctgagcagcaccagcctgcggctgcacagcaaccctgagcccaagaccttcacctttgaccacgtggctgatgtggacaccacccaggagagcgtgtttgccaccgtggccaagagcatcgtggagagctgcatgagcggctacaacggcaccatctttgcctacggccagacaggcagcggcaagaccttcaccatgatgggccccagcgagagtgacaacttcagccacaacctgcggggcgtcatccccaggagctttgagtacctgttcagcctgattgaccgggagaaggagaaggccggggccggcaagagcttcctgtgcaagtgcagcttcatcgagatctacaatgagcagatctatgacctgctggacagcgccagcgctggcctgtacctgcgggagcacatcaagaagggcgtgtttgtggtgggcgctgtggagcaggtggtgaccagcgctgctgaggcctaccaggtgctgagcggcggctggaggaacagaagagtggccagcacctccatgaaccgggagagcagccgcagccatgctgtgttcaccatcaccatcgagagcatggagaagagcaatgaaattgtgaacatccgcaccagcctgctgaacctggtggacctggccggcagcgagcggcagaaggacacccatgctgagggcatgaggctgaaggaggccggcaacatcaacagaagcctgagctgcctgggccaggtgatcacagccctggtggatgtgggcaatggcaagcagagacatgtgtgctacagagacagcaagctgaccttcctgctgcgggacagcctgggcggcaatgccaagacagccatcatcgccaacgtgcaccctggcagccgctgctttggagagaccctgagcaccctgaactttgcccagagggccaagctgatcaagaacaaggctgtggtgaatgaagacacccagggcaatgtgtcccagctgcaggccgaggtgaagaggctgaaggagcagctggccgagctggccagcggccagaccccacctgagagcttcctgacccgggacaagaagaagaccaactacatggagtacttccaggaggccatgctgttcttcaagaagtctgagcaggagaagaagagcctcatcgagaaggtgacccagctggaggacctgaccctgaagaaggagaagttcatccagagcaacaagatgattgtgaagttccgggaggaccagatcatccggctggagaagctgcacaaggagagcagaggaggcttcctgcctgaggagcaggaccggctgctgtctgagctgagaaatgagatccagaccctgcgggagcagatcgagcaccacccccgggtggccaagtatgccatggagaaccacagcctgcgggaggagaacagaaggctgcggctgctggagcctgtgaagagggcccaggagatggatgcccagaccatcgccaagctggagaaggccttcagcgagatcagcggcatggagaagagtgacaagaaccagcagggcttcagccccaaggcccagaaggagccctgcctgtttgccaacacagagaagctgaaggcccagctgctgcagatccagacagagctgaacaacagcaagcaggagtatgaggagttcaaggagctgaccaggaagaggcagctggagctggagagcgagctgcagagcctgcagaaggccaacctgaacctggagaacctgctggaggccaccaaggcctgcaagaggcaggaggtgtcccagctgaacaagatccatgctgagaccctgaagatcatcaccacccccaccaaggcctaccagctgcacagcaggcctgtgcccaagctgagccctgagatgggcagctttggcagcctgtacacccagaacagcagcatcctggacaatgacatcctgaatgaacctgtgcccccagagatgaatgagcaggcctttgaggccatcagcgaggagctgaggacagtgcaggagcagatgtctgccctgcaggccaagctggatgaggaggagcacaagaacctgaagctgcagcagcacgtggacaagctggagcaccacagcacccagatgcaggagctgttcagcagcgagagaattgactggaccaagcagcaggaggagctgctgagccagctgaatgtgctggagaagcagctgcaggagacccagaccaagaatgacttcctgaagtctgaggtgcatgacctgcgggtggtgctgcacagcgctgacaaggagctgagctctgtgaagctggagtacagcagcttcaagaccaaccaggagaaggagttcaacaagctgtctgagcggcacatgcacgtgcagctgcagctggacaacctgcggctggagaatgagaagctgctggagagcaaggcctgcctgcaggacagctatgacaacctgcaggagatcatgaagtttgaaattgaccagctgagcaggaacctgcagaacttcaagaaggaaaatgagaccctgaagagtgacctgaacaacctgatggagctgctggaggccgagaaggagaggaacaacaagctgagcctgcagtttgaggaggacaaggagaacagcagcaaggagatcctgaaggtgctggaggccgtgcggcaggagaagcagaaggagacagccaagtgtgagcagcagatggccaaggtgcagaagctggaggagagcctgctggccacagagaaggtgatcagcagcctggagaagagccgggacagcgacaagaaggtggtggccgacctgatgaaccagatccaggagctgcggacctctgtgtgtgagaagacagagaccatcgacaccctgaagcaggagctgaaggacatcaactgcaagtacaacagcgccctggtggaccgggaggagagccgggtgctgatcaagaagcaggaggtggacatcctggacctgaaggagaccctgcggctgcgcatcctgtctgaggacatcgagcgggacatgctgtgtgaggacctggcccacgccacagagcagctgaacatgctgacagaggccagcaagaagcacagcggcctgctgcagagcgcccaggaggagctgaccaagaaggaggccctgatccaggagctgcagcacaagctgaaccagaagaaggaggaggtggagcagaagaagaatgagtacaacttcaagatgaggcagctggagcacgtgatggacagcgctgctgaggacccccagagccccaagaccccaccccacttccagacccacctggccaagctgctggagacccaggagcaggagattgaagatggccgggccagcaagaccagcctggagcacctggtgaccaagctgaatgaagatcgggaggtgaagaatgctgagatcctgaggatgaaggagcagctgcgggagatggagaacctgcggctggagagccagcagctgattgagaagaactggctgctgcagggccagctggatgacatcaagaggcagaaggagaacagcgaccagaaccacccagacaaccagcagctgaagaatgagcaggaggagagcatcaaggagcggctggccaagagcaagatcgtggaggagatgctgaagatgaaggctgacctggaggaggtgcagagcgccctgtacaacaaggagatggagtgcctgaggatgacagatgaggtggagaggacccagaccctggagagcaaggccttccaggagaaggagcagctgcggagcaagctggaggagatgtatgaggagcgggagaggaccagccaggagatggagatgctgaggaagcaggtggagtgcctggccgaggagaatggcaagctggtgggccaccagaacctgcaccagaagatccagtatgtggtgcggctgaagaaggaaaatgtgcggctggccgaggagacagagaagctgcgggcagaaaatgtgttcctgaaggagaagaagaggtctgagagctag

SEQ ID NO: 203368 - DNA, 3591 bp, Artificial Sequence
  derived and/or modified sequence
gtgcccccctgcccagctgagctgcggtctgtgaccaacggccagagcaaccagcccagcaatgaaggagatgccatcaaggtgtttgtgcgcatccggcccccagctgagaggagcggcagcgcagatggagagcagaacctgtgcctgtctgtgctgagcagcaccagcctgcggctgcacagcaaccctgagcccaagaccttcacctttgaccacgtggctgatgtggacaccacccaggagagcgtgtttgccaccgtggccaagagcatcgtggagagctgcatgagcggctacaacggcaccatctttgcctacggccagacaggcagcggcaagaccttcaccatgatgggccccagcgagagtgacaacttcagccacaacctgcggggcgtcatccccaggagctttgagtacctgttcagcctgattgaccgggagaaggagaaggccggggccggcaagagcttcctgtgcaagtgcagcttcatcgagatctacaatgagcagatctatgacctgctggacagcgccagcgctggcctgtacctgcgggagcacatcaagaagggcgtgtttgtggtgggcgctgtggagcaggtggtgaccagcgctgctgaggcctaccaggtgctgagcggcggctggaggaacagaagagtggccagcacctccatgaaccgggagagcagccgcagccatgctgtgttcaccatcaccattgaatccatggagaagagcaatgagatcgtgaacatccgcaccagcctgctgaacctggtggacctggccggcagcgagcggcagaaggacacccacgccgagggcatgaggctgaaggaggccggcaacatcaacagaagcctgagctgcctgggccaggtgatcacagccctggtggatgtgggcaatggcaagcagagacatgtgtgctacagagacagcaagctgaccttcctgctgcgggacagcctgggcggcaatgccaagacagccatcatcgccaacgtgcaccctggcagccgctgcttcggggagaccctgagcaccctgaactttgcccagagggccaagctgatcaagaacaaggctgtggtgaatgaagacacccagggcaatgtgtcccagctgcaggccgaggtgaagaggctgaaggagcagctggccgagctggccagcggccagaccccacctgagagcttcctgacccgggacaagaagaagaccaactacatggagtacttccaggaggccatgctgttcttcaagaagtctgagcaggagaagaagagcctgattgagaaggtgacccagctggaggacctgaccctgaagaaggagaagttcatccagagcaacaagatgattgtgaagttccgggaggaccagatcatccggctggagaagctgcacaaggagagccggggcggcttcctgcctgaggagcaggaccggctgctgtctgagctgagaaatgagatccagaccctgcgggagcagatcgagcaccacccccgggtggccaagtatgccatggagaaccacagcctgcgggaggagaacagaaggctgcggctgctggagcctgtgaagagggcccaggagatggatgcccagaccatcgccaagctggagaaggccttcagcgagatcagcggcatggagaagagtgacaagaaccagcagggcttcagccccaaggcccagaaggagccctgcctgtttgccaacacagagaagctgaaggcccagctgctgcagatccagacagagctgaacaacagcaagcaggagtatgaggagttcaaggagctgaccaggaagaggcagctggagctggagagcgagctgcagagcctgcagaaggccaacctgaacctggagaacctgctggaggccaccaaggcctgcaagaggcaggaggtgtcccagctgaacaagatccacgccgagaccctgaagatcatcaccacccccaccaaggcctaccagctgcacagcaggcctgtgcccaagctgagccctgagatgggcagctttggcagcctgtacacccagaacagcagcatcctggacaatgacatcctgaatgaacctgtgcccccagagatgaatgagcaggcctttgaggccatcagcgaggagctgaggacagtgcaggagcagatgtctgccctgcaggccaagctggatgaggaggagcacaagaacctgaagctgcagcagcacgtggacaagctggagcaccacagcacccagatgcaggagctgttcagcagcgagagaattgactggaccaagcagcaggaggagctgctgagccagctgaatgtgctggagaagcagctgcaggagacccagaccaagaatgacttcctgaagtctgaggtgcatgacctgcgggtggtgctgcacagcgctgacaaggagctgagctctgtgaagctggagtacagcagcttcaagaccaaccaggagaaggagttcaacaagctgtctgagcggcacatgcacgtgcagctgcagctggacaacctgcggctggagaatgagaagctgctggagagcaaggcctgcctgcaggacagctatgacaacctgcaggagatcatgaagtttgaaattgaccagctgagcaggaacctgcagaacttcaagaaggaaaatgagaccctgaagagtgacctgaacaacctgatggagctgctggaggccgagaaggagaggaacaacaagctgagcctgcagtttgaggaggacaaggagaacagcagcaaggagatcctgaaggtgctggaggccgtgcggcaggagaagcagaaggagacagccaagtgtgagcagcagatggccaaggtgcagaagctggaggagagcctgctggccacagagaaggtgatcagcagcctggagaagagccgggacagcgacaagaaggtggtggccgacctgatgaaccagatccaggagctgcggacctctgtgtgtgagaagacagagaccatcgacaccctgaagcaggagctgaaggacatcaactgcaagtacaacagcgccctggtggaccgggaggagagccgggtgctgatcaagaagcaggaggtggacatcctggacctgaaggagaccctgcggctgcgcatcctgtctgaagatattgagcgggacatgctgtgtgaggacctggcccacgccacagagcagctgaacatgctgacagaggccagcaagaagcacagcggcctgctgcagagcgcccagaggacagaccaggagggcagcccagattctggcaccagcgcccaggccaagcccaaggagcggggcagcaggacagaggaggagtacaacttcaagatgaggcagctggagcacgtgatggattctgctgctgaggacccccagagccccaagaccccaccccacttccagacccacctggccaagctgctggagacccaggagcaggagattgaagatggccgggccagcaagaccagcctggagcacctggtgaccaagctgaatgaagatcgggaggtgaagaatgctgagatcctgaggatgaaggagcagctgaggtag

SEQ ID NO: 203369 - DNA, 4167 bp, Artificial Sequence
  derived and/or modified sequence
atggcccccggctgcaagaccgagctgcggagcgtgaccaacggccagtcgaatcaacccagtaatgagggggacgccatcaaagttttcgtgagaattcgacccccagcagaacgtagcggatccgctgatggcgagcagaacctgtgcctgtccgttttatcctccacgagcctacggttgcacagcaaccccgagcctaaaaccttcacgttcgatcatgttgctgacgtagataccacacaggaatctgtatttgcaacagtggccaagtcaatcgtggagtcctgtatgagcggatacaatggcaccatttttgcttacggtcagaccggttccggtaagacctttacgatgatgggccccagcgagtcggataatttttcccataatttgaggggtgtgataccgcggagctttgagtacctcttttctctgattgatcgagagaaggagaaagctggggcaggtaagagtttcttgtgtaaatgctctttcattgagatttacaatgaacagatctatgacttactggattccgcatcagcgggtttatatctgcgtgagcacatcaaaaagggcgtctttgtggtgggcgctgtggagcaggtggtaacaagtgcagccgaggcctatcaggttctatctgggggatggcgcaacagaagagtcgcgtccacaagtatgaacagggaatcttcccggagtcacgcggtgttcaccattaccattgagtctatggaaaaatccaacgagattgtgaatattcgaaccagcctgctgaacttggttgatcttgcggggtcagagcgccagaaagatacgcatgcagaaggcatgcgcctgaaggaagccggtaacattaacaggagcctttcttgtctcggtcaggtgataacagcgcttgttgatgtcggtaacggaaagcagcggcacgtttgttatcgggatagcaagctgacctttctgctgcgggattcactgggggggaacgcaaagacagcaatcatcgccaatgtgcatcctgggtcgagatgcttcggagagaccctgtccacattgaattttgctcagagagcaaagctgattaagaataaagccgtggttaatgaagacacacaaggaaatgtgtcacagctccaagccgaagtgaaacgccttaaagagcagcttgccgaacttgcttccggacagacaccacccgagtcctttctgacgagagacaagaagaaaactaactatatggagtacttccaagaggcgatgctgtttttcaagaagtcagaacaagaaaagaagtctcttatcgagaaggtgactcagttggaggacctgactctaaaaaaggaaaagttcattcaaagcaacaagatgatcgtgaaattccgggaagaccagatcattagactcgaaaagctgcacaaggagagtcgagggggatttctgccagaagagcaggacagactgctgtctgaattaaggaacgaaattcagactctgagggagcagatcgaacatcacccacgcgttgccaaatacgccatggaaaaccactccttaagagaggagaacagaaggcttcgcctactcgaacctgttaagcgcgcccaagagatggacgcgcagacaattgctaaactggagaaggctttcagtgaaattagcggcatggagaaaagtgacaaaaaccagcagggtttctcccccaaagcccaaaaagagccctgcttgtttgctaacacagagaagctgaaagctcagttgctgcaaattcaaacggaactcaacaactcgaagcaggagtatgaggaatttaaggagctgacccgcaaacgccagctggagctggagagtgagctgcagtcccttcagaaggcaaacctcaatctagagaacctgctggaggctacgaaggcttgtaagcgccaggaggtgtctcagttaaacaaaattcacgccgaaaccttgaaaatcatcactacccctaccaaagcctaccagctgcattctcgcccggtgcccaaactgagccccgagatggggtccttcggatccctctacactcagaatagttctattctggataacgacattcttaacgagcccgtgcctcccgagatgaacgagcaggcctttgaggctatttcagaagagttgagaaccgttcaggagcaaatgtcagcgctgcaagctaaactggacgaagaggaacacaaaaacctgaaactgcagcagcacgttgataagctagagcatcacagcacacaaatgcaggaacttttcagttctgaacgaatcgattggacgaagcagcaagaagaacttctctcccaactgaacgtattggagaagcagctccaagaaacacagacgaagaacgattttttaaagagcgaagtacatgacctgcgagtggtgctgcattccgccgataaggaactatcttctgtgaagttagaatactcgagcttcaaaacgaaccaggagaaggagtttaataaactgtccgaacggcacatgcacgtgcaactacagctggacaatctgcgacttgagaacgagaaactcttggaatccaaagcatgtctgcaggattcctacgacaacttgcaggagataatgaaattcgagatcgatcaattatcaagaaatctccagaactttaagaaagaaaacgaaaccttgaagtctgatttaaataatctgatggaactgctggaggccgagaaagagagaaacaacaaactgtcactgcagtttgaagaagacaaagagaatagcagcaaggaaatccttaaagtcctcgaagctgtaaggcaggagaagcagaaggaaactgccaagtgtgagcagcagatggccaaagtccaaaaactggaagaatctctgcttgcaactgagaaagtgatctcttcgttagaaaagagtagggattccgacaaaaaggtggtagcggatttgatgaaccagatccaagagcttaggaccagtgtgtgcgagaagaccgaaactatcgatacactgaagcaagagctcaaggatatcaattgcaaatacaacagcgccctggtagacagagaggagagccgagtactcatcaagaagcaagaagtagatatcctcgacctaaaggagacattacggctgcgcatactgagtgaagacattgagagggatatgctctgtgaagatctggcgcatgctaccgagcaattgaatatgctgactgaggcatctaaaaagcattctggtctcctacagtccgcccaagaagaactcactaagaaggaggcactgatccaagagcttcagcacaagctcaatcagaaaaaagaagaagtggagcagaagaagaatgaatacaactttaaaatgcggcagctggagcatgtgatggactctgcagccgaagacccacagagtcctaaaacgcccccgcatttccagacccacctcgcaaagctcctcgagactcaggagcaggagattgaagacggccgagcttcgaaaacaagtctggagcacttagtcaccaagctgaacgaagaccgtgaggtgaagaatgccgagatcttacggatgaaggaacagctgagggagatggagaacttaagacttgagagccagcagttgattgagaagaactggctgttgcaagggcaactggacgacattaagaggcagaaagaaaatagcgatcagaaccacccagataatcaacagctcaagaacgagcaagaggagtccatcaaagagagactggcaaaatctaagattgttgaggaaatgctcaaaatgaaggctgacttagaagaggtacaaagcgctctatacaacaaagagatggagtgcctccggatgactgatgaagtagaaagaacacagactctggaatcaaaagcttttcaagaaaaggagcagctgcgcagcaaacttgaagaaatgtacgaagaacgggaacgaacctcccaggaaatggagatgttgaggaaacaggtggagtgtttggctgaagagaacggcaaactcgtgggacaccagaacctccaccagaagattcagtatgtggtgaggctcaagaaggagaatgtacgcttggcagaggaaacagaaaaattgagagctgagaatgtgttcctcaaggagaaaaagcggagcgagagctag

SEQ ID NO: 203370 - DNA, 4672 bp, Artificial Sequence
  derived and/or modified sequence
gtgccaccatgcccagctgagttacgcagcgtgacaaatggtcagtctaaccaaccaagtaatgaaggtgatgccatcaaagtttttgtgcgaattcgtcctcctgcagaaagatctgggtcagctgatggagagcagaacttatgcttatctgtgctgtcctccacgagtctccggctgcactccaaccctgagcccaagaccttcacgtttgatcatgttgcagatgtggataccactcaggaatctgtattcgcaactgtggctaaaagcattgtggagtcttgcatgagcggttataatggtaccatctttgcatatggacagactggctcagggaagacatttactatgatgggaccatctgaatctgataatttttctcataacctgagaggagtaatcccacgaagttttgaatatttgttttccttaattgatcgtgaaaaagaaaaggctggagctggaaagagtttcctttgtaagtgttcctttattgaaatctacaacgagcagatatatgatctactggactctgcatcggctggactgtacttaagggagcatatcaagaagggagtctttgttgttggtgcggtggagcaggtggtaacctcagctgctgaagcctatcaggtgttgtctggaggatggaggaatagacgtgtggcatcaacatcaatgaacagagaatcgtctaggtctcatgccgtctttacaattacaatagagtcaatggagaaaagtaatgagattgtgaatatacggacctccctactcaacctggtggatttagcaggatctgaaaggcaaaaagatacccatgcagaagggatgagattgaaggaagcaggtaacataaatcgatcattgagctgcctgggccaagtgattacagcacttgtcgacgtgggtaatggaaaacagagacatgtttgctacagagactccaaacttaccttcttactacgggattcccttggaggtaatgccaaaacagccataattgcaaatgttcatcctggatccaggtgttttggggaaaccctatcaacacttaactttgctcaaagagccaagctgattaaaaacaaggcagtagtaaatgaagacacccaaggaaatgtgagccagctccaagctgaagtgaagaggctcaaagaacaactggcggagcttgcttcaggacagacaccaccagaaagcttcctgaccagagacaaaaagaagactaactatatggagtatttccaggaagcaatgttattctttaagaaatctgaacaggaaaagaagtctctgatagaaaaagttacccaattagaagacctcaccctcaaaaaggaaaaatttattcaatctaataaaatgattgtgaaattccgagaggatcaaataatacgcttggaaaagctccacaaggaatcccggggaggttttctgcctgaggagcaggatcgtttgctctcagaattaaggaatgagattcaaactctgcgagaacaaatagagcaccaccccagagttgcaaagtatgctatggaaaatcattccctcagggaggagaatagaagactgagattattagagcctgtgaaaagagctcaagaaatggatgcccagaccattgcaaaactagaaaaagctttctctgaaataagtggcatggagaaaagtgacaaaaatcagcaaggattttcacctaaagctcagaaagagccatgtttgtttgcaaacactgagaagttaaaagcacaactcctgcaaattcagacagagctgaataattcaaagcaagaatatgaagaattcaaagaacttactaggaaaaggcagctagaattggaatcagagcttcagtctttgcaaaaagcgaaccttaatcttgaaaaccttttggaagcaacaaaagcctgcaagcggcaagaagtttctcagctgaataaaattcatgctgaaacacttaagattataactacaccaaccaaggcctaccaacttcattcccgaccagtaccaaaattaagccctgaaatgggaagctttggctctctatacactcagaattctagcatattagataatgatatattaaatgagccagttcctcctgagatgaatgaacaagcttttgaggccatttctgaagagcttagaacagtgcaggaacaaatgagtgctcttcaagccaaactggatgaagaagagcataaaaacctaaagcttcagcagcatgttgacaaactggaacatcattctacccaaatgcaggagcttttctcatcagaaagaattgattggaccaaacagcaggaagagcttctctcacagttgaatgtccttgaaaagcagcttcaagagactcaaactaaaaatgactttttgaaaagtgaggtacatgacctgcgagtagtccttcattctgctgacaaggagctttcttcagtgaaattggaatatagttcattcaaaacgaatcaggagaaagaattcaacaaactttccgaaagacacatgcatgtacagcttcaattagataatctcaggttagaaaacgaaaagctgcttgagagcaaagcctgcctacaggattcctatgacaacttacaagaaataatgaaatttgagattgaccaactttcaagaaacctccaaaacttcaaaaaagaaaatgaaactctgaaatctgatctgaataatttgatggagcttcttgaggcagaaaaagaacgcaataacaaattatcattacagtttgaagaagataaagaaaacagttctaaagaaatcttaaaagttcttgaggctgtacgtcaggagaaacagaaagagacggccaagtgtgagcagcagatggcaaaagtacagaaactagaagagagcttgcttgctactgaaaaagtgatcagttccctggaaaagtctagagattctgataagaaagttgtagctgacctcatgaaccagatccaggagctaagaacatcggtctgtgagaaaacagaaactatagacaccctgaaacaagaactgaaggacataaattgcaaatacaactctgctttggttgacagagaagagagcagagtgttgatcaagaagcaggaagtggatattctggatctgaaagaaacccttaggctgagaatactttctgaggacatagagagggatatgctctgtgaggacctggctcatgccactgagcagctgaacatgctcacagaggcctcaaaaaaacactcggggctgctgcagtctgcccagagaactgaccaagaaggaagccctgattcaggaacttcagcacaagctaaaccaaaagaaagaggaagtagaacagaagaagaatataacttcaaaatgaggcaactagaacatgtgatggattctgctgctgaggatccccagagtcctaagacaccacctcactttcaaacacatttggcaaaactcctggaaacacaagaacaagagatagaagatggaagagcctctaagacttctttggaacaccttgtaacaaagctaaatgaagacagagaagtcaaaaatgctgaaatcctcagaatgaaggagcagttgcgtgaaatggaaaacctacgcctggaaagtcagcagttaatagagaaaaactggctcctgcaaggtcagctggatgatattaaaagacaaaaggaaaacagtgatcagaatcatccagataatcaacagctgaagaatgaacaagaagaaagtatcaaagaaagacttgcaaaaagtaaaatagttgaagaaatgctgaaaatgaaagcagacctagaagaagtccaaagtgccctttacaacaaagagatggaatgccttagaatgactgatgaagtcgaacgaacccaaactttggagtctaaagcattccaggaaaaagaacaactgagatcaaagctggaagaaatgtatgaagaaagagagagaacatcccaggagatggaaatgttaaggaagcaggtggagtgtcttgctgaggaaaatggaaagttggtaggtcaccaaaatttgcatcagaagattcagtacgtagtgcgactaaagaaggaaaatgtcaggcttgctgaggagacagaaaagttgcgtgccgaaaatgtatttttaaaagaaaagaaaagaagtgaatcttgaggattccggtcagctacctaggcatcaccttgtttgaagatgtttcttctcttttacaagtaagacctactcctggccacttaggagagctgaatttatggaccttaattattaaatgtttataaggtggtggtaaccacctcaagtttctgatgaacattctgcatccatatacaccctgtgacagtcagcagtctgctattaagtggcctacttcaaggctttgaatcaacttaagggaaaaccttttgtctttgtaaaaataaaagcctgtagctaaggtttacagtggacattagccagatcattttcttcttagattatgccataatctcctttgattcttatggaagttctaacaatatatggtggttccaacacctgcagtgagtttaatgactgacttagtagcaggtacaagaagcaaacttgttaatatagattatttttgtattcttactttaggtattttcttgagcattttccatgactgtaaataaagccattttttaag

SEQ ID NO: 203371 - DNA, 3591 bp, Artificial Sequence
  derived and/or modified sequence
gtgcccccctgccccgccgagctgcggagcgtgaccaacggccagagtaatcaaccttctaacgaaggggatgccataaaagtcttcgttcgcataagaccccccgccgaacgctcgggaagtgccgacggagagcagaacctgtgtctgagtgtcctgagctccaccagcttgaggctgcacagtaacccagagcccaagacgtttacatttgatcatgtggcagatgtggataccactcaagagtccgtgtttgcaacagtagccaaatccatcgtggaatcgtgtatgagtggctacaacgggacaatcttcgcttacggtcaaaccggatcaggcaagacctttactatgatgggtccatccgaaagcgacaacttctcacataacttaaggggcgtgattccccgcagttttgagtacctcttctccctcatagaccgggagaaggagaaagctggagcaggaaagtcttttttgtgtaaatgcagttttatcgagatctacaacgaacagatctacgacctccttgatagtgcctcagctggcctgtacctcagggagcacatcaagaaaggagtgttcgtggttggcgcggtagaacaggtcgttacaagtgctgcggaggcatatcaagtgctcagtggaggatggcgtaataggcgtgtggcctcaacctcaatgaacagagagtcctctagatcccacgccgtgtttaccatcaccattgagtctatggagaaatccaacgaaatcgttaacatacggacaagtctgctgaatctggtcgacctggccggatcagaacggcagaaggatactcatgctgaagggatgcgactcaaagaggcgggtaatattaataggtctctgtcatgcctgggacaggtcattacagccctggtggacgtgggtaacggtaaacaacgacatgtctgctatcgagatagcaaactcactttcttgctcagggattccctgggtggcaacgccaagactgcgatcatcgcaaatgtgcacccggggagcaggtgttttggcgagacgctgtctactctgaactttgcccagagggctaagctaataaagaataaagccgtagttaacgaggatacacaggggaatgtgtcccagttgcaagcagaagtcaagcgtctgaaggagcaactggctgagttggcctctggccaaacgccacccgagtctttcctgacccgggataagaagaaaactaactatatggagtattttcaggaagcaatgttattctttaagaaaagtgagcaggaaaaaaaaagcctgatcgaaaaggtcactcaactggaggatctgacacttaagaaggagaaattcatccagagcaataagatgattgttaagttcagagaggatcagataattcgactggagaagttgcacaaggaatcaagagggggattcctgcctgaagaacaggacagattactgtcagagctgaggaacgaaatccagacactccgagaacagatcgaacaccacccacgcgtcgccaaatatgccatggaaaatcacagcctcagggaagagaaccgcagactgcgcctcttggaacccgtcaaacgtgctcaggagatggacgctcagactatcgccaaactggagaaggcgttctccgagatcagcggcatggagaagtctgataaaaatcaacaagggttcagccctaaggctcagaaggaaccctgtcttttcgccaacactgagaagctgaaggcccagctactgcagatacagacggaactgaataacagcaagcaggaatatgaagagtttaaagagttaacgaggaagcgccagctcgaattggagagcgagctgcagtccctgcaaaaggcaaacctcaacctcgagaacttgctggaagctacaaaggcttgtaaacggcaagaggtctcccagctcaataaaattcatgccgaaactttaaagatcattaccacccccaccaaggcttaccagctgcacagtcgcccagttcccaaactcagcccggaaatgggatcttttgggtcgctgtatacccagaattcttccatcctcgataacgacatcctgaatgaaccagtccctccagaaatgaatgagcaggcgtttgaagcaatcagcgaggaactgagaacagtgcaggagcagatgagtgccctgcaggccaaattggatgaagaggagcacaagaacctcaagctgcagcaacacgtggataagcttgaacaccattctacccagatgcaggaactgttctcttcagaaagaatcgactggacgaaacaacaggaggagctactgagccaactgaacgtgttagagaagcagttgcaagagacgcagacgaaaaatgactttcttaaatctgaagttcacgaccttcgggtcgtgctgcatagcgccgataaggagctgagctccgtaaagcttgagtatagcagctttaagacaaaccaggagaaagagttcaacaagctgagcgaacgccacatgcacgtgcagctgcagcttgataacctccgactggagaatgagaaactactggagtcaaaagcgtgcctgcaggattcatacgataacctgcaggagatcatgaagttcgaaatcgaccagctctccaggaatttgcagaacttcaaaaaagaaaatgagacattgaagtccgacctaaacaatttgatggagctcctggaggcagagaaagaacgaaacaacaagctttcattgcagtttgaggaagacaaagaaaacagttcgaaggagatccttaaagttttggaggccgtgcgacaggaaaagcagaaagagactgcgaagtgtgagcaacagatggctaaggtgcagaaactcgaggaatcactgcttgctacagagaaggtgatctcaagcttggagaagtctcgagactctgataagaaggtcgttgcagacctaatgaaccagattcaggaactcaggaccagtgtttgcgagaagaccgaaaccatcgacactttgaaacaagagttgaaggacatcaattgcaagtacaattccgcattagttgaccgcgaggagagtcgcgttttgatcaagaagcaggaagtcgacatccttgatctgaaagagacactccggttgagaattctgagtgaggatatcgaaagagacatgctgtgcgaggacctcgcccacgccaccgagcaactgaacatgttgaccgaggcctccaaaaaacacagtggtttgctccagagtgcccagcgcaccgaccaggagggatcacctgacagtggcacatctgcccaagccaaacccaaagagagaggaagcagaacagaagaagaatataacttcaagatgaggcaattggagcacgtaatggactccgctgccgaggacccacagagcccgaaaaccccccctcactttcagacacatctggcgaagctgctagagacgcaagaacaggaaatcgaggacggcagagcgtctaagacatccctagagcacctggtgaccaagctcaacgaggatcgagaggtaaagaatgccgagatcctgcggatgaaagaacagctgcgctag

SEQ ID NO: 203372 - DNA, 4167 bp, Artificial Sequence
  derived and/or modified sequence
atggcgcctggatgcaagacggaactccgatccgtaaccaatggacagagtaatcagccttctaacgagggggatgccataaaggtattcgtccgcatacgccctcctgctgaaaggagcggaagcgcggatggagagcaaaatctgtgtttaagcgtcctgtcttccacttccctgagacttcactctaaccccgaaccaaagacatttacttttgaccatgtggctgacgttgataccacccaagagtcagtattcgctactgttgccaagtctattgtcgaaagctgcatgtcgggctacaatggaacgatctttgcatacggccagaccggatccgggaaaacattcactatgatgggaccatcagaaagcgacaacttctcccataacctgcgcggtgtcattcctagatcttttgaatatctcttttcactgatagacagagagaaagaaaaggccggagcgggaaaaagctttctgtgtaaatgttctttcattgaaatatacaacgaacagatctacgacctccttgatagtgcttccgccggactttacctgagggaacacatcaagaaaggcgttttcgttgtgggtgcagtcgaacaggtagtgacatcggctgccgaggcctaccaggtgctcagtggtggatggaggaaccggagggttgcctccacctctatgaaccgggagtcctctcggtcacatgccgtgtttactatcactatagaaagtatggaaaagagcaacgagattgtaaacatccgcacaagcctgctcaacttagtggatttggccggtagcgagcggcaaaaagacacacatgccgaaggcatgcgcctcaaggaggccggtaacatcaatagaagcctgtcatgtctgggccaagttatcacggctctagtcgacgtgggtaacggcaagcaaagacacgtgtgctaccgcgatagtaagctgacttttctccttcgcgatagcttggggggaaacgccaagactgccatcattgcaaacgtacaccccggatctaggtgtttcggcgagactttaagtacattgaattttgcccagcgggcaaagctgattaagaataaagctgtagtaaacgaggacactcaggggaatgtaagtcagcttcaggctgaggtgaaaaggctcaaggaacagcttgcggaactagcctcaggccagactccccctgaatctttcttgacgcgtgataaaaaaaaaactaactacatggagtactttcaggaagcaatgctcttcttcaagaaaagcgaacaggaaaaaaagtccctcattgaaaaggtgacccagctcgaagacctgacgctaaaaaaggagaagttcatacagtctaataaaatgatagtaaagtttagagaagaccagatcattcgccttgaaaaactgcacaaggagtcccgaggcggtttcttgcctgaggagcaggatcggttactgagcgaattacgcaatgagattcagaccctgcgcgagcaaatcgaacaccatcctagggtggccaagtacgctatggagaatcattcgctccgcgaggagaacagaaggttgagacttctggagcccgttaaacgagcccaggagatggacgcacagaccatcgcgaaactggaaaaggctttttccgaaatttccggtatggagaaaagtgataaaaaccagcagggatttagtccaaaagctcagaaagagccctgtctgtttgccaacactgagaaacttaaggcgcagctcttgcaaatccagaccgaacttaataactcgaaacaagagtacgaggagttcaaggagctaactcggaagaggcaattggaactggagagcgagcttcaatcactgcagaaagccaacttgaacttagaaaacctgctggaagctactaaggcttgtaaacgacaggaggtctcgcagctgaacaaaattcacgctgagaccctgaaaataattacgacacccacaaaagcctatcagctgcacagtagaccagtccccaaactcagccctgaaatgggaagtttcggttcactgtacacgcagaactcttcgatcctagataacgatatcctgaacgagccggtaccaccagaaatgaacgagcaggcattcgaagccatcagcgaggagcttcgtaccgtccaagagcaaatgtccgccctgcaggctaagctagacgaagaagaacataaaaacctgaagctccagcagcacgttgacaagctcgaacaccactcaactcaaatgcaagagctgttttcatccgagcgaattgattggactaagcagcaggaggaactgctgtctcaactgaacgtgctggagaagcagctccaggaaacacaaactaagaacgatttcctcaaaagcgaagtccatgacctccgcgtcgtccttcattcggccgacaaggaattatcatctgtaaagctggagtatagcagtttcaagactaatcaggaaaaggagttcaacaagctgagcgaacgacacatgcacgttcagctgcagctggataacctaagacttgagaatgaaaaactactggagtcaaaagcgtgtctgcaagactcttatgacaacctgcaggagatcatgaagtttgaaatcgaccagctgagcagaaacctgcagaacttcaagaaggagaacgaaaccctgaaaagtgatctcaataacctgatggagttactggaggccgagaaggaacgtaacaacaagctgtcattgcagtttgaggaagacaaagagaattccagtaaggagattctcaaagtgctcgaagccgtgagacaggagaagcagaaggagactgcaaaatgcgaacagcagatggccaaagtccagaagctggaggagtctctcttagctaccgagaaagtgatttcatcattggagaagtctagggacagtgacaaaaaggtagttgccgatctgatgaaccagatccaggagctccgcactagcgtctgcgagaagactgaaaccattgatactcttaagcaggagctcaaggatatcaactgtaagtacaactctgccctggttgatcgtgaggaaagccgagtactcatcaaaaaacaggaggtggatattttggacctaaaggagacccttcggctgcgcattctgtctgaggatatagaaagggatatgctgtgtgaggatctggcccacgcaacagaacaactgaacatgctgaccgaggcttccaagaagcattccggtctgctgcagtcggcccaggaggagctcactaagaaagaggccctgattcaggagctgcagcacaagctgaatcagaaaaaagaagaggttgagcaaaaaaaaaatgaatataattttaaaatgaggcagttggaacacgtgatggactcggcagccgaagacccacaaagcccaaagacaccaccacatttccagacccacctggccaaacttctggagactcaggaacaggagattgaagatggtcgagctagcaagacgtcactggagcacctcgtgactaagctgaacgaagaccgcgaggtgaaaaacgccgaaatcttacgaatgaaagaacagctccgagaaatggaaaacttaaggttggagtcccagcagcttatagaaaagaattggcttctgcagggtcaactggatgatatcaaacgtcaaaaggaaaattcggatcagaatcatcctgataatcagcagttgaagaacgaacaggaggaatctatcaaagagaggctggcaaagagcaaaattgtggaagagatgctgaagatgaaggctgaccttgaggaggtgcaatctgctctgtacaacaaagaaatggagtgcctgaggatgaccgacgaggtggaacgcacacagaccctggaatcgaaagcattccaggagaaagaacagctccggagtaagcttgaagaaatgtatgaggagcgagaaaggacatctcaggagatggagatgctgcggaaacaggtggagtgcctggcagaagagaatggcaaattggttggtcaccaaaacctgcatcagaaaatccagtatgtcgtaagactaaaaaaggagaacgtgagacttgctgaagaaacagagaaactgagagccgagaatgtgttcttaaaggaaaaaaaaagatccgagagttag

SEQ ID NO: 203373 - DNA, 3591 bp, Artificial Sequence
  derived and/or modified sequence
gtgccgccatgtcccgctgaactgaggtccgtgactaatggccaaagtaatcagccaagcaacgaaggagacgcgatcaaggtatttgtgcgaatcagacctcctgcagagaggtctgggtcagctgatggagagcagaatttatgtctaagtgtgctatcctctacatctcttagactgcattcaaatccagagccgaagacattcacttttgaccacgtggccgacgtggacaccacacaggaatctgtctttgctaccgtagcaaagtcgatcgtcgagagctgtatgtcaggttataatggcacaatttttgcgtacggccagacaggatctgggaaaaccttcacaatgatgggtccgtctgagtcggataacttcagccacaatctgcggggagttattccgagatcttttgagtatttgttcagcctcattgaccgcgagaaagagaaggccggagccggaaagtccttcctttgcaaatgctctttcattgagatctacaatgaacagatatacgacttgctggactctgctagcgccggattgtacctgcgagagcacatcaaaaagggagtctttgtggtgggggctgttgaacaagtggtcacttctgctgctgaagcgtaccaagtcctaagcggtggatggagaaacaggcgagtcgcttctacctcgatgaaccgggaatcatcacggtcgcacgccgtttttacaattactatcgaatctatggagaagtcaaacgaaatcgtgaacatcagaaccagtttgctgaatctggtggacctggcaggatcagagagacagaaggatacgcacgccgaggggatgcgtttaaaggaagccggaaatatcaaccggagtctgtcctgccttgggcaggtgattacagctctggttgacgtgggcaacggaaagcagaggcacgtttgctaccgcgacagtaagttaacatttctgctgagggattcgctgggcggaaacgcaaagactgcgataatcgcaaatgtccatcctgggtcacgctgtttcggtgaaaccctgagtacgttgaactttgcacaaagggctaagctgatcaaaaacaaggctgtggtcaacgaggatactcagggaaatgtgagccagctccaggctgaagtcaagcggctgaaggaacagttagctgagctcgcatcagggcagacccccccagagtccttcctgacacgtgacaagaagaagaccaattatatggagtatttccaggaagccatgctcttcttcaagaaatcagagcaagaaaaaaaaagtctcatcgaaaaagtaacacaactggaagacctgaccctcaagaaagagaaatttattcagtcgaataagatgattgttaaatttagggaggaccagataattcggctggaaaaactgcataaagaatctaggggtgggtttctccccgaagaacaggatagactgttgtccgaactgagaaacgagatccagaccctaagagaacaaatcgagcatcaccctagagttgccaagtatgccatggaaaaccactctctacgggaagagaatagacggctgcggctgctggagcccgttaagcgggcacaggagatggacgcacagactatagcaaaactggagaaagcctttagtgagatctctggaatggagaaaagcgataagaatcagcagggattcagtccgaaggcccaaaaagaaccctgtcttttcgcaaacacagagaaactgaaagcccagttgctgcagattcagacggaattaaataattccaagcaggaatatgaggaatttaaagagctgacacggaaaaggcagttagagctggaatctgaacttcaatccctgcagaaggccaacctgaacttggaaaacctgttggaggctaccaaggcctgcaagcgccaagaggtatcccagctcaacaaaatccatgccgaaacccttaagattataaccactcctacgaaggcataccagctgcattcccgtcctgtccctaaactgagtcccgaaatgggctcgtttggaagcctgtatacacaaaactcaagcatccttgataacgacatcctgaatgagccggtgcctccggaaatgaacgaacaagcgttcgaggccatcagcgaagaactgaggaccgtgcaggaacagatgagtgccttgcaggccaagctggacgaagaagagcacaagaatcttaagttgcaacagcatgtcgacaagttagagcatcacagcacccagatgcaggagctgttctccagcgaacggattgattggaccaaacagcaggaagaacttctttcccagctgaatgtcctggaaaagcaattgcaggaaactcagacgaagaatgacttcctgaagtctgaagtccatgatcttcgagtggtattacatagcgccgataaggagttgagcagtgtcaaattagaatactcatcttttaaaacaaaccaggaaaaagagttcaataagctgtctgagcgtcacatgcatgtgcagttacagcttgataacctgaggctggagaatgagaagctactggagtctaaggcttgtctccaagattcctacgacaacctgcaagaaataatgaagttcgaaatagatcaactgagcaggaacctgcagaacttcaagaaagagaacgagacacttaaaagtgatctgaataacctgatggagcttcttgaagctgagaaggaacggaataacaagctctcactccagttcgaggaagacaaagaaaactctagtaaggaaattcttaaagtgctggaagccgttaggcaagaaaaacaaaaggagactgctaagtgcgagcagcagatggccaaagtccagaaactggaggaatctctcctggctactgaaaaagttatatccagcttggaaaagtctcgggactctgataaaaaagttgtggcagacctgatgaaccagatacaggagcttagaaccagtgtgtgcgagaagacagagacaatagacacattgaaacaggagctgaaagacatcaattgcaagtacaatagcgcactggtcgatagagaggagagcagggtgttgatcaaaaaacaggaggttgatatcctcgacctaaaagaaactctcaggctgcgtatcctgagtgaagatattgagagagatatgctgtgtgaggacctggcacatgcaactgaacagcttaacatgctaactgaagcgtcaaagaagcatagcggcttgctccagtccgcccaacgcactgatcaggagggctctcccgattctgggaccagtgcacaagccaaaccgaaggaacgcggatccaggaccgaagaagagtacaacttcaaaatgcgccaactggagcacgtcatggattccgccgctgaggaccctcagagccccaagacgcctccacacttccagactcaccttgcaaagctgctcgagacacaggaacaggagattgaggacggcagggcgtctaagaccagcctggagcatctcgttacaaaactcaacgaggatagagaggtcaaaaatgccgagatacttagaatgaaagagcagctccggtag

SEQ ID NO: 203374 - DNA, 4842 bp, Artificial Sequence
  derived and/or modified sequence
gcggcctccatgcgggcgtcaacgtccgatccaagcgccaaattcaaatttgcggccatcttgagcgggcggaattcagtcgcgcgcggtgcagtcgggaggtggaggcaccggctgcattgttttcgggatcgaggggtgagggcgctatggcacccggctgcaaaactgagttacgcagcgtgacaaatggtcagtctaaccaaccaagtaatgaaggtgatgccatcaaagtttttgtgcgaattcgtcctcctgcagaaagatctgggtcagctgatggagagcagaacttatgcttatctgtgctgtcctccacgagtctccggctgcactccaaccctgagcccaagaccttcacgtttgatcatgttgcagatgtggataccactcaggaatctgtattcgcaactgtggctaaaagcattgtggagtcttgcatgagcggttataatggtaccatctttgcatatggacagactggctcagggaagacatttactatgatgggaccatctgaatctgataatttttctcataacctgagaggagtaatcccacgaagttttgaatatttgttttccttaattgatcgtgaaaaagaaaaggctggagctggaaagagtttcctttgtaagtgttcctttattgaaatctacaacgagcagatatatgatctactggactctgcatcggctggactgtacttaagggagcatatcaagaagggagtctttgttgttggtgcggtggagcaggtggtaacctcagctgctgaagcctatcaggtgttgtctggaggatggaggaatagacgtgtggcatcaacatcaatgaacagagaatcgtctaggtctcatgccgtctttacaattacaatagagtcaatggagaaaagtaatgagattgtgaatatacggacctccctactcaacctggtggatttagcaggatctgaaaggcaaaaagatacccatgcagaagggatgagattgaaggaagcaggtaacataaatcgatcattgagctgcctgggccaagtgattacagcacttgtcgacgtgggtaatggaaaacagagacatgtttgctacagagactccaaacttaccttcttactacgggattcccttggaggtaatgccaaaacagccataattgcaaatgttcatcctggatccaggtgttttggggaaaccctatcaacacttaactttgctcaaagagccaagctgattaaaaacaaggcagtagtaaatgaagacacccaaggaaatgtgagccagctccaagctgaagtgaagaggctcaaagaacaactggcggagcttgcttcaggacagacaccaccagaaagcttcctgaccagagacaaaaagaagactaactatatggagtatttccaggaagcaatgttattctttaagaaatctgaacaggaaaagaagtctctgatagaaaaagttacccaattagaagacctcaccctcaaaaaggaaaaatttattcaatctaataaaatgattgtgaaattccgagaggatcaaataatacgcttggaaaagctccacaaggaatcccggggaggttttctgcctgaggagcaggatcgtttgctctcagaattaaggaatgagattcaaactctgcgagaacaaatagagcaccaccccagagttgcaaagtatgctatggaaaatcattccctcagggaggagaatagaagactgagattattagagcctgtgaaaagagctcaagaaatggatgcccagaccattgcaaaactagaaaaagctttctctgaaataagtggcatggagaaaagtgacaaaaatcagcaaggattttcacctaaagctcagaaagagccatgtttgtttgcaaacactgagaagttaaaagcacaactcctgcaaattcagacagagctgaataattcaaagcaagaatatgaagaattcaaagaacttactaggaaaaggcagctagaattggaatcagagcttcagtctttgcaaaaagcgaaccttaatcttgaaaaccttttggaagcaacaaaagcctgcaagcggcaagaagtttctcagctgaataaaattcatgctgaaacacttaagattataactacaccaaccaaggcctaccaacttcattcccgaccagtaccaaaattaagccctgaaatgggaagctttggctctctatacactcagaattctagcatattagataatgatatattaaatgagccagttcctcctgagatgaatgaacaagcttttgaggccatttctgaagagcttagaacagtgcaggaacaaatgagtgctcttcaagccaaactggatgaagaagagcataaaaacctaaagcttcagcagcatgttgacaaactggaacatcattctacccaaatgcaggagcttttctcatcagaaagaattgattggaccaaacagcaggaagagcttctctcacagttgaatgtccttgaaaagcagcttcaagagactcaaactaaaaatgactttttgaaaagtgaggtacatgacctgcgagtagtccttcattctgctgacaaggagctttcttcagtgaaattggaatatagttcattcaaaacgaatcaggagaaagaattcaacaaactttccgaaagacacatgcatgtacagcttcaattagataatctcaggttagaaaacgaaaagctgcttgagagcaaagcctgcctacaggattcctatgacaacttacaagaaataatgaaatttgagattgaccaactttcaagaaacctccaaaacttcaaaaaagaaaatgaaactctgaaatctgatctgaataatttgatggagcttcttgaggcagaaaaagaacgcaataacaaattatcattacagtttgaagaagataaagaaaacagttctaaagaaatcttaaaagttcttgaggctgtacgtcaggagaaacagaaagagacggccaagtgtgagcagcagatggcaaaagtacagaaactagaagagagcttgcttgctactgaaaaagtgatcagttccctggaaaagtctagagattctgataagaaagttgtagctgacctcatgaaccagatccaggagctaagaacatcggtctgtgagaaaacagaaactatagacaccctgaaacaagaactgaaggacataaattgcaaatacaactctgctttggttgacagagaagagagcagagtgttgatcaagaagcaggaagtggatattctggatctgaaagaaacccttaggctgagaatactttctgaggacatagagagggatatgctctgtgaggacctggctcatgccactgagcagctgaacatgctcacagaggcctcaaaaaaacactcggggctgctgcagtctgcccaggaagaactgaccaagaaggaagccctgattcaggaacttcagcacaagctaaaccaaaagaaagaggaagtagaacagaagaagaatgaatataacttcaaaatgaggcaactagaacatgtgatggattctgctgctgaggatccccagagtcctaagacaccacctcactttcaaacacatttggcaaaactcctggaaacacaagaacaagagatagaagatggaagagcctctaagacttctttggaacaccttgtaacaaagctaaatgaagacagagaagtcaaaaatgctgaaatcctcagaatgaaggagcagttgcgtgaaatggaaaacctacgcctggaaagtcagcagttaatagagaaaaactggctcctgcaaggtcagctggatgatattaaaagacaaaaggaaaacagtgatcagaatcatccagataatcaacagctgaagaatgaacaagaagaaagtatcaaagaaagacttgcaaaaagtaaaatagttgaagaaatgctgaaaatgaaagcagacctagaagaagtccaaagtgccctttacaacaaagagatggaatgccttagaatgactgatgaagtcgaacgaacccaaactttggagtctaaagcattccaggaaaaagaacaactgagatcaaagctggaagaaatgtatgaagaaagagagagaacatcccaggagatggaaatgttaaggaagcaggtggagtgtcttgctgaggaaaatggaaagttggtaggtcaccaaaatttgcatcagaagattcagtacgtagtgcgactaaagaaggaaaatgtcaggcttgctgaggagacagaaaagttgcgtgccgaaaatgtatttttaaaagaaaagaaaagaagtgaatcttgaggattccggtcagctacctaggcatcaccttgtttgaagatgtttcttctcttttacaagtaagacctactcctggccacttaggagagctgaatttatggaccttaattattaaatgtttataaggtggtggtaaccacctcaagtttctgatgaacattctgcatccatatacaccctgtgacagtcagcagtctgctattaagtggcctacttcaaggctttgaatcaacttaagggaaaaccttttgtctttgtaaaaataaaagcctgtagctaaggtttacagtggacattagccagatcattttcttcttagattatgccataatctcctttgattcttatggaagttctaacaatatatggtggttccaacacctgcagtgagtttaatgactgacttagtagcaggtacaagaagcaaacttgttaatatagattatttttgtattcttactttaggtattttcttgagcattttccatgactgtaaataaagccattttttaagataataattaaa

SEQ ID NO: 203375 - protein, 406 aa, Artificial Sequence
  derived and/or modified sequence
MAAGAGAGSAPRWLRALSEPLSAAQLRRLEEHRYSAAGVSLLEPPLQLYWTWLLQWIPLWMAPNSITLLGLAVNVVTTLVLISYCPTATEEAPYWTYLLCALGLFIYQSLDAIDGKQARRTNSCSPLGELFDHGCDSLSTVFMAVGASIAARLGTYPDWFFFCSFIGMFVFYCAHWQTYVSGMLRFGKVDVTEIQIALVIVFVLSAFGGATMWDYTIPILEIKLKILPVLGFLGGVIFSCSNYFHVILHGGVGKNGSTIAGTSVLSPGLHIGLIIILAIMIYKKSATDVFEKHPCLYILMFGCVFAKVSQKLVVAHMTKSELYLQDTVFLGPGLLFLDQYFNNFIDEYVVLWMAMVISSFDMVIYFSALCLQISRHLHLNIFKTACHQAPEQVQVLSSKSHQNNMD

SEQ ID NO: 203376 - protein, 231 aa, Artificial Sequence
  derived and/or modified sequence
MFVFYCAHWQTYVSGMLRFGKVDVTEIQIALVIVFVLSAFGGATMWDYTIPILEIKLKILPVLGFLGGVIFSCSNYFHVILHGGVGKNGSTIAGTSVLSPGLHIGLIIILAIMIYKKSATDVFEKHPCLYILMFGCVFAKVSQKLVVAHMTKSELYLQDTVFLGPGLLFLDQYFNNFIDEYVVLWMAMVISSFDMVIYFSALCLQISRHLHLNIFKTACHQAPEQVHKHID

SEQ ID NO: 203377 - DNA, 1585 bp, Artificial Sequence
  derived and/or modified sequence
tccccgaggccccgccccacccgcgagccgcagccgcggccccacagcttctggggctggggccccggcagccgggcaggccggcctgacctcgacctccgccgtgcgggcccgaccggtgagtccagcccggcagtcgcaggacccggccgccagcctctccctccacctctccctgcccccagcgccaggcgcgggctgcgctcggtggcggcggcggggccctcaggcggccatggcggcaggcgccggggccgggtccgcgccgcgctggctgagggcgctgagcgagccgctgagcgcggcgcagctgcggcgactggaggagcaccgctacagcgcggcgggcgtctcgctgctcgagccgccgctgcagctctactggacctggctgctccagtggatcccgctctggatggcccccaactccatcaccctgctggggctcgccgtcaacgtggtcaccacgctcgtgctcatctcctactgtcccacggccaccgaagaggcaccatactggacataccttttatgtgcactgggactttttatttaccagtcactggatgctattgatgggaaacaagccagaagaacaaactcttgttcccctttaggggagctctttgaccatggctgtgactctctttccacagtatttatggcagtgggagcttcaattgccgctcgcttaggaacttatcctgactggttttttttctgctcttttattgggatgtttgtgttttattgcgctcattggcagacttatgtttcaggcatgttgagatttggaaaagtggatgtaactgaaattcagatagctttagtgattgtctttgtgttgtctgcatttggaggagcaacaatgtgggactatacgattcctattctagaaataaaattgaagatccttccagttcttggatttctaggtggagtaatattttcctgttcaaattatttccatgttatcctccatggtggtgttggcaagaatggatccactatagcaggcaccagtgtcttgtcacctggactccacataggactaattattatactggcaataatgatctataaaaagtcagcaactgatgtgtttgaaaagcatccttgtctttatatcctaatgtttggatgtgtctttgctaaagtctcacaaaaattagtggtagctcacatgaccaaaagtgaactatatcttcaagacactgtctttttggggccaggtcttttgtttttagaccagtactttaataactttatagacgaatatgttgttctatggatggcaatggtgatttcttcatttgatatggtgatatactttagtgctttgtgcctgcaaatttcaagacaccttcatctaaatatattcaagactgcatgtcatcaagcacctgaacaggttcaagttctttcttcaaagagtcatcagaataacatggattgaagagacttccgaacacttgctatctcttgctgctgctgtttcatggaaggagatattaaacatttgtttaatttttatttaagtgttatacctatttcagcaaataaaatatttcattgcttatattaa

SEQ ID NO: 203378 - DNA, 1881 bp, Artificial Sequence
  derived and/or modified sequence
agcttctggggctggggccccggcagccgggcaggccggcctgacctcgacctccgccgtgcgggcccgaccggtgagtccagcccggcagtcgcaggacccggccgccagcctctccctccacctctccctgcccccagcgccaggcgcggcgcagctgcggcgactggaggagcaccgctacagcgcggcgggcgtctcgctgctcgagccgccgctgcagctctactggacctggctgctccagtggatcccgctctggatggcccccaactccatcaccctgctggggctcgccgtcaacgtggtcaccacgctcgtgctcatctcctactgtcccacggccaccgaagaggcaccatactggacataccttttatgtgcactgggactttttatttaccagtcactggatgctattgatgggaaacaagccagaagaacaaactcttgttcccctttaggggagctctttgaccatggctgtgactctctttccacagtatttatggcagtgggagcttcaattgccgctcgcttaggaacttatcctgactggttttttttctgctcttttattgggatgtttgtgttttattgcgctcattggcagacttatgtttcaggcatgttgagatttggaaaagtggatgtaactgaaattcagatagctttagtgattgtctttgtgttgtctgcatttggaggagcaacaatgtgggactatacgattcctattctagaaataaaattgaagatccttccagttcttggatttctaggtggagtaatattttcctgttcaaattatttccatgttatcctccatggtggtgttggcaagaatggatccactatagcaggcaccagtgtcttgtcacctggactccacataggactaattattatactggcaataatgatctataaaaagtcagcaactgatgtgtttgaaaagcatccttgtctttatatcctaatgtttggatgtgtctttgctaaagtctcacaaaaattagtggtagctcacatgaccaaaagtgaactatatcttcaagacactgtctttttggggccaggtcttttgtttttagaccagtactttaataactttatagacgaatatgttgttctatggatggcaatggtgatttcttcatttgatatggtgatatactttagtgctttgtgcctgcaaatttcaagacaccttcatctaaatatattcaagactgcatgtcatcaagcacctgaacaggttcacaagcatattgactgactaatagcccaaggaaaagaggagatgaagttaggggaatctatgagtgaaggaaatccccctgtgcaggaggctagtataccatcaataaggttatatttgaatataaaacataaaccctgtagatttcattgtgtcttatttcagttatgaagcccccattgtatcatcattttttatcacagatgttctcagaattgtctacatattaattagaaacaagactaaagaaatgtcaatcctgaggacaacagtgaacccctgtaattctaagtagcagtttgtctctgagacttatcagacacagggttttcactgccaaaggattacataaatattcagaacataaaggattttagccatcttgagggtgcttactttgactgctaaaaactgaaaagtgattcaatactgcttaagtgcatggcttataatgtaattattgaatcaagttatgttctaagaaattttttatactaatcatttttcaagaggcatattagtatgttataaaatacttgcttttagtatactagaatttaaaagggctacaggaattttttaaataaaatttgtatttaataaaaggaatttgttgtacc

SEQ ID NO: 203379 - DNA, 696 bp, Artificial Sequence
  derived and/or modified sequence
atgttcgtgttctactgcgcccactggcagacctacgtgagcggcatgctgagattcggcaaggtggacgtgaccgagatccagatcgccctggtgatcgtgttcgtgctgagcgccttcggcggcgccaccatgtgggactacaccatccccatcctggagatcaagctgaagatcctgcccgtgctgggcttcctgggcggcgtgatcttcagctgcagcaactacttccacgtgatcctgcacggcggcgtgggcaagaacggcagcaccatcgccggcaccagcgtgctgagccccggcctgcacatcggcctgatcatcatcctggccatcatgatctacaagaagagcgccaccgacgtgttcgagaagcacccctgcctgtacatcctgatgttcggctgcgtgttcgccaaggtgagccagaagctggtggtggcccacatgaccaagagcgagctgtacctgcaggacaccgtgttcctgggccccggcctgctgttcctggaccagtacttcaacaacttcatcgacgagtacgtggtgctgtggatggccatggtgatcagcagcttcgacatggtgatctacttcagcgccctgtgcctgcagatcagcagacacctgcacctgaacatcttcaagaccgcctgccaccaggcccccgagcaggtgcacaagcacatcgactag

SEQ ID NO: 203380 - DNA, 696 bp, Artificial Sequence
  derived and/or modified sequence
atgttcgtgttctactgtgcccattggcagacttacgtaagtggcatgctgagattcggcaaagtggacgtcactgaaattcagattgccctggttatagtctttgtgttgtccgccttcggcggggccaccatgtgggactatacaattccaatcctagaaattaagctgaagatcctgcctgtcctgggcttccttggaggagttatatttagctgctctaattactttcacgtcattttgcacggaggcgtgggaaagaatggatccaccatcgccggcactagtgttttgtcccccggactgcacatcggtttaattattatcctagctatcatgatctataagaagtctgcgacagacgtgtttgagaagcacccttgtctctacatcctgatgttcggatgtgtttttgctaaggtttctcagaagctggtcgtcgctcacatgaccaaatcagagttgtacctgcaggacactgtatttctggggcccggcttgctgttcctggatcagtactttaacaatttcatagatgagtatgtggtgctttggatggcgatggttattagctcttttgatatggtaatatacttttcggcattatgcctacagattagcaggcacctgcacctgaacatcttcaagactgcgtgtcaccaggcccccgagcaggttcacaaacatatcgactag

SEQ ID NO: 203381 - DNA, 696 bp, Artificial Sequence
  derived and/or modified sequence
atgtttgtgttctactgtgcccactggcagacctacgtgtctggcatgctgcgctttgggaaggtggatgtgacagagatccagatcgccctggtgattgtgtttgtgctgagcgccttcggcggggccaccatgtgggactacaccatccccatcctggagatcaagctgaagatcctgcctgtgctgggcttcctgggcggcgtcatcttcagctgcagcaactacttccacgtgatcctgcacggcggcgtgggcaagaatggcagcaccatcgccggcacctctgtgctgagccctggcctgcacatcggcctcatcatcatcctggccatcatgatctacaagaagagcgccacagatgtgtttgagaagcacccctgcctgtacatcctgatgtttggctgtgtgtttgccaaggtgtcccagaagctggtggtggcccacatgaccaagtctgagctgtacctgcaggacaccgtcttcctgggccctggcctgctcttcctggaccagtacttcaacaacttcattgatgaatatgtggtgctgtggatggccatggtgatcagcagctttgacatggtgatctacttcagcgccctgtgcctgcagatcagccgccacctgcacctgaacatcttcaagacagcctgccaccaggcccctgagcaggtgcacaagcacatcgactag

SEQ ID NO: 203382 - DNA, 696 bp, Artificial Sequence
  derived and/or modified sequence
atgttcgtgttctactgcgcccactggcagacctacgtgagcggcatgctccggttcggcaaagtcgatgtcaccgagattcaaattgccctcgtgatagtctttgtactatctgcattcgggggcgctaccatgtgggactataccatccccattctcgaaattaagctaaagatcctaccagtgctcggcttcctagggggcgttatcttttcatgttcaaactattttcacgtgattctgcacggaggggtgggaaagaacgggagtactatagcagggactagtgtcctgtctcctggtctacatatcggactgattattattctggctatcatgatctacaagaagtcagctaccgacgtgttcgaaaagcatccatgcctgtacatcttaatgtttgggtgcgtgtttgccaaagtttcccaaaagctcgtcgtagctcacatgaccaaatctgaactctatctccaagacacggtgtttctggggcctggtctcctctttctggatcagtactttaacaacttcatagacgaatacgtcgtgctttggatggcaatggtgatctcttccttcgacatggtgatttactttagtgcactttgcctccagatctcgcgccacctgcaccttaacatttttaagacagcctgccatcaggcccctgaacaagtgcataagcacatcgattag

SEQ ID NO: 203383 - DNA, 696 bp, Artificial Sequence
  derived and/or modified sequence
atgttcgttttttactgcgcccattggcagacttacgtgagcgggatgttaaggttcggcaaggtggatgtcactgagatccagattgccctcgtgatagtcttcgttctaagtgcttttggcggagcaacgatgtgggactacaccattccaatactggagattaagctaaaaatcctgcccgtactcggtttcctaggaggggtcatattctcatgctccaactacttccatgtcattctccatggcggagttggcaaaaacggtagtacaattgccggtacgtccgtactgtcacccggattgcatataggcttgatcatcattctggccattatgatttataagaaaagtgcaacggatgtttttgaaaagcacccttgcctgtacatcttgatgtttggttgtgtgtttgcaaaagtttctcagaagctggtggttgcccatatgaccaagagcgagctatacctccaggatacagtgtttttagggcctggcctgctgttcctggatcaatacttcaataacttcattgacgaatacgtcgttctttggatggcaatggtcatcagttcttttgatatggtaatttacttctctgctctgtgcttgcagatcagtcgccacctgcacttgaatatctttaagaccgcatgccatcaggctccagagcaggtgcacaaacacatagactag

SEQ ID NO: 203384 - DNA, 1221 bp, Artificial Sequence
  derived and/or modified sequence
atggccgccggcgccggcgccggcagcgcccccagatggctgagagccctgagcgagcccctgagcgccgcccagctgagaagactggaggagcacagatacagcgccgccggcgtgagcctgctggagccccccctgcagctgtactggacctggctgctgcagtggatccccctgtggatggcccccaacagcatcaccctgctgggcctggccgtgaacgtggtgaccaccctggtgctgatcagctactgccccaccgccaccgaggaggccccctactggacctacctgctgtgcgccctgggcctgttcatctaccagagcctggacgccatcgacggcaagcaggccagaagaaccaacagctgcagccccctgggcgagctgttcgaccacggctgcgacagcctgagcaccgtgttcatggccgtgggcgccagcatcgccgccagactgggcacctaccccgactggttcttcttctgcagcttcatcggcatgttcgtgttctactgcgcccactggcagacctacgtgagcggcatgctgagattcggcaaggtggacgtgaccgagatccagatcgccctggtgatcgtgttcgtgctgagcgccttcggcggcgccaccatgtgggactacaccatccccatcctggagatcaagctgaagatcctgcccgtgctgggcttcctgggcggcgtgatcttcagctgcagcaactacttccacgtgatcctgcacggcggcgtgggcaagaacggcagcaccatcgccggcaccagcgtgctgagccccggcctgcacatcggcctgatcatcatcctggccatcatgatctacaagaagagcgccaccgacgtgttcgagaagcacccctgcctgtacatcctgatgttcggctgcgtgttcgccaaggtgagccagaagctggtggtggcccacatgaccaagagcgagctgtacctgcaggacaccgtgttcctgggccccggcctgctgttcctggaccagtacttcaacaacttcatcgacgagtacgtggtgctgtggatggccatggtgatcagcagcttcgacatggtgatctacttcagcgccctgtgcctgcagatcagcagacacctgcacctgaacatcttcaagaccgcctgccaccaggcccccgagcaggtgcaggtgctgagcagcaagagccaccagaacaacatggactag

SEQ ID NO: 203385 - DNA, 1221 bp, Artificial Sequence
  derived and/or modified sequence
atggcggcaggcgctggggccggaagcgcacctagatggctgcgagctctctccgagccgctgtccgctgctcagcttaggcgcttggaggaacaccgctactcagccgctggggtttctctgctggagccccctctccagctctactggacatggctgcttcagtggatccctctctggatggccccaaattctataacactgctggggctggccgtgaatgttgtgactaccctggtgcttatatcttattgtcccacagcgacagaagaagcaccatattggacttacctgctatgcgccttagggctattcatatatcagtcactagacgcaatcgatggaaagcaggcccgccgaaccaattcctgtagtcccctcggagagctattcgatcatggatgcgacagcctgtcgacagtgttcatggctgtgggcgcgagtattgccgcgcggctgggcacatatccagactggttcttcttctgttctttcatcgggatgtttgtgttctactgcgcgcattggcagacatatgtctcagggatgctgagatttggcaaggttgatgttactgaaattcagatcgcactcgttattgttttcgttttatcagcattcggcggggccaccatgtgggactacactatccccatcctcgagatcaagctgaagatcctgcctgtattagggttcttgggcggcgtcatttttagctgttcaaattactttcacgttatcctgcatggtggcgtcgggaaaaatggcagcaccatcgccgggaccagcgtcctcagccctggcttgcatattggtctgatcatcatcctggccataatgatttacaagaaaagtgccactgacgtattcgagaagcacccatgcttgtacattctgatgttcggatgcgtgtttgccaaggtgtctcaaaagctggtggtggcccatatgaccaaatcagagttatacctacaggataccgttttcctgggacccgggctactgttccttgaccaatactttaacaactttatagacgaatacgtggtgctgtggatggccatggtgatttcttccttcgatatggtgatctacttctctgcactctgtctccagattagccgccatctgcacctgaatatattcaaaaccgcttgccaccaagccccagaacaagtgcaggtcctgagctcaaaatcccaccagaataacatggactag

SEQ ID NO: 203386 - DNA, 1221 bp, Artificial Sequence
  derived and/or modified sequence
atggctgctggagctggagctggcagcgccccccgctggctgcgggccctgtctgagcccctgtctgctgcccagctgcggcggctggaggagcaccgctacagcgctgctggggtgtccctgctggagccccccctgcagctgtactggacctggctgctgcagtggatccccctgtggatggcccccaacagcatcaccctgctgggcctggccgtgaatgtggtgaccaccctggtgctgatctcctactgccccacagccacagaggaggccccctactggacctacctgctgtgtgccctgggcctcttcatctaccagagcctggatgccattgatggcaagcaggcccggaggaccaacagctgcagccccctgggggagctgtttgaccacggctgtgacagcctgagcaccgtcttcatggctgtgggcgccagcattgctgcccggctgggcacctacccagactggttcttcttctgcagcttcatcggcatgtttgtgttctactgtgcccactggcagacctacgtgtctggcatgctgcgctttgggaaggtggatgtgacagagatccagatcgccctggtgattgtgtttgtgctgagcgcctttggaggagccaccatgtgggactacaccatccccatcctggagatcaagctgaagatcctgcctgtgctgggcttcctgggcggcgtcatcttcagctgcagcaactacttccacgtgatcctgcatggaggagtgggcaagaatggcagcaccatcgccggcacctctgtgctgagccctggcctgcacatcggcctcatcatcatcctggccatcatgatctacaagaagagcgccacagatgtgtttgagaagcacccctgcctgtacatcctgatgtttggctgtgtgtttgccaaggtgtcccagaagctggtggtggcccacatgaccaagtctgagctgtacctgcaggacacagtgttcctgggccctggcctgctcttcctggaccagtacttcaacaacttcattgatgaatatgtggtgctgtggatggccatggtgatcagcagctttgacatggtgatctacttcagcgccctgtgcctgcagatcagccgccacctgcacctgaacatcttcaagacagcctgccaccaggcccctgagcaggtgcaggtgctgagcagcaagagccaccagaacaacatggactag

SEQ ID NO: 203387 - DNA, 1221 bp, Artificial Sequence
  derived and/or modified sequence
atggccgccggcgccggcgccggcagcgccccccggtggctgcgggctcttagcgaaccactgagcgcagcgcaattacgacggctggaggaacacagatactccgctgccggcgtgtctctgctggaaccccccctgcagctgtactggacttggctccttcaatggatacccttatggatggcccctaatagcataacgctgttggggctggctgtgaatgtggtgactactctcgtgctgattagctactgtcctacagcaactgaggaagctccatattggacctatctgctttgtgccctgggtctcttcatctaccagtcacttgatgcaatagacgggaagcaggctagacggaccaactcttgctcgcctctgggagaactcttcgaccatggttgtgacagtttaagtaccgtgttcatggcagtgggcgcttccatcgcagcccgtttgggcacatatcctgactggttttttttctgctccttcatcggtatgttcgtcttttattgtgctcattggcagacctatgtgagcggcatgctccgatttggtaaagtggatgtgacagagatacagattgcccttgtaattgtattcgtgctgtcggcctttgggggcgccaccatgtgggattataccatccctatcttagagattaaactcaagatactgccagttctggggttcctgggcggtgtaatatttagctgctctaactattttcatgtgatactacatgggggagtcggaaagaatggtagtaccattgccggcacctcagtgctctcacctgggctacatattggcttgattatcattctcgcaatcatgatctataagaaatctgctacagatgtgttcgagaaacacccgtgcctttatattctgatgttcggctgtgtgttcgctaaagtgagccagaaactcgtagtggctcacatgacaaagtcggaactgtacctccaagatacagtgtttctcggaccaggcctcctatttctggatcaatattttaacaactttatcgacgagtacgtggttctctggatggctatggtgatctcaagcttcgacatggttatctacttctcggctctgtgcctgcagatcagtcgccacttgcatctgaacatctttaagactgcgtgccatcaagcgccagagcaggtccaggtcctctcctctaaaagtcatcaaaacaacatggactag

SEQ ID NO: 203388 - DNA, 1221 bp, Artificial Sequence
  derived and/or modified sequence
atggccgctggggctggtgcaggcagcgcacccaggtggctgcgggcactgagcgaacccctctctgctgcccagctgcggaggctggaggaacatagatactccgccgctggtgtctcgctattggagcctcctctgcagctgtactggacatggctgctccagtggatccctctttggatggccccaaactctattaccctgttgggcctcgccgtgaacgttgtcacaactctggtcctcatcagctactgcccaaccgccactgaggaggctccctactggacctaccttctctgcgccctcggactgtttatttaccaaagcctggatgcaatcgatggcaaacaggctaggcggaccaactcttgttccccacttggcgagcttttcgatcacggctgcgatagtctctctaccgtgttcatggccgtcggtgcctccattgctgcccgtctgggcacataccccgattggttctttttttgctcatttattggaatgtttgttttttactgcgcccactggcagacctacgtgagtggtatgctaagattcggaaaagttgatgtaactgaaatacagattgccttggtcatagtgttcgtgttgtcagcttttgggggagcaacaatgtgggactacactatacccatcttggagattaaactcaaaatcctgccagtgcttgggtttctggggggagtgattttcagttgcagcaattactttcacgtgatactccacggaggcgtgggtaaaaacggatcgaccatagctggtacctcagtgctcagtcctgggctacatataggattgattatcatcctggctatcatgatatataagaaaagcgccactgacgtcttcgagaagcatccatgtttgtatattctgatgtttggatgtgtgtttgcaaaggtaagccaaaagttggtggtcgcacacatgactaagtcagagctgtacctgcaggacacagttttcctcggccctggcttactgtttctcgatcagtactttaacaactttatcgatgaatacgtggtgctgtggatggcaatggttatatcctcgttcgatatggtcatttactttagcgctttgtgcctccagatatccagacacttgcatctaaatatttttaagaccgcctgtcaccaggcccctgagcaagttcaggtactttccagcaagtcacatcagaacaatatggactag

SEQ ID NO: 203389 - protein, 678 aa, Artificial Sequence
  derived and/or modified sequence
MYAAVEHGPVLCSDSNILCLSWKGRVPKSEKEKPVCRRRYYEEGWLATGNGRGVVGVTFTSSHCRRDRSTPQRINFNLRGHNSEVVLVRWNEPYQKLATCDADGGIFVWIQYEGRWSVELVNDRGAQVSDFTWSHDGTQALISYRDGFVLVGSVSGQRHWSSEINLESQITCGIWTPDDQQVLFGTADGQVIVMDCHGRMLAHVLLHESDGVLGMSWNYPIFLVEDSSESDTDSDDYAPPQDGPAAYPIPVQNIKPLLTVSFTSGDISLMNNYDDLSPTVIRSGLKEVVAQWCTQGDLLAVAGMERQTQLGELPNGPLLKSAMVKFYNVRGEHIFTLDTLVQRPIISICWGHRDSRLLMASGPALYVVRVEHRVSSLQLLCQQAIASTLREDKDVSKLTLPPRLCSYLSTAFIPTIKPPIPDPNNMRDFVSYPSAGNERLHCTMKRTEDDPEVGGPCYTLYLEYLGGLVPILKGRRISKLRPEFVIMDPRTDSKPDEIYGNSLISTVIDSCNCSDSSDIELSDDWAAKKSPKISRASKSPKLPRISIEARKSPKLPRAAQELSRSPRLPLRKPSVGSPSLTRREFPFEDITQHNYLAQVTSNIWGTKFKIVGLAAFLPTNLGAVIYKTSLLHLQPRQMTIYLPEVRKISMDYINLPVFNPNVFSEDEDDLPGDAVWTD

SEQ ID NO: 203390 - protein, 1543 aa, Artificial Sequence
  derived and/or modified sequence
MYAAVEHGPVLCSDSNILCLSWKGRVPKSEKEKPVCRRRYYEEGWLATGNGRGVVGVTFTSSHCRRDRSTPQRINFNLRGHNSEVVLVRWNEPYQKLATCDADGGIFVWIQYEGRWSVELVNDRGAQVSDFTWSHDGTQALISYRDGFVLVGSVSGQRHWSSEINLESQITCGIWTPDDQQVLFGTADGQVIVMDCHGRMLAHVLLHESDGVLGMSWNYPIFLVEDSSESDTDSDDYAPPQDGPAAYPIPVQNIKPLLTVSFTSGDISLMNNYDDLSPTVIRSGLKEVVAQWCTQGDLLAVAGMERQTQLGELPNGPLLKSAMVKFYNVRGEHIFTLDTLVQRPIISICWGHRDSRLLMASGPALYVVRVEHRVSSLQLLCQQAIASTLREDKDVSKLTLPPRLCSYLSTAFIPTIKPPIPDPNNMRDFVSYPSAGNERLHCTMKRTEDDPEVGGPCYTLYLEYLGGLVPILKGRRISKLRPEFVIMDPRTDSKPDEIYGNSLISTVIDSCNCSDSSDIELSDDWAAKKSPKISRASKSPKLPRISIEARKSPKLPRAAQELSRSPRLPLRKPSVGSPSLTRREFPFEDITQHNYLAQVTSNIWGTKFKIVGLAAFLPTNLGAVIYKTSLLHLQPRQMTIYLPEVRKISMDYINLPVFNPNVFSEDEDDLPVTGASGVPENSPPCTVNIPIAPIHSSAQAMSPTQSIGLVQSLLANQNVQLDVLTNQTTAVGTAEHAGDSATQYPVSNRYSNPGQVIFGSVEMGRIIQNPPPLSLPPPPQGPMQLSTVGHGDRDHEHLQKSAKALRPTPQLAAEGDAVVFSAPQEVQVTKINPPPPYPGTIPAAPTTAAPPPPLPPPQPPVDVCLKKGDFSLYPTSVHYQTPLGYERITTFDSSGNVEEVCRPRTRMLCSQNTYTLPGPGSSATLRLTATEKKVPQPCSSATLNRLTVPRYSIPTGDPPPYPEIASQLAQGRGAAQRSDNSLIHATLRRNNREATLKMAQLADSPRAPLQPLAKSKGGPGGVVTQLPARPPPALYTCSQCSGTGPSSQPGASLAHTASASPLASQSSYSLLSPPDSARDRTDYVNSAFTEDEALSQHCQLEKPLRHPPLPEAAVTLKRPPPYQWDPMLGEDVWVPQERTAQTSGPNPLKLSSLMLSQGQHLDVSRLPFISPKSPASPTATFQTGYGMGVPYPGSYNNPPLPGVQAPCSPKDALSPTQFAQQEPAVVLQPLYPPSLSYCTLPPMYPGSSTCSSLQLPPVALHPWSSYSACPPMQNPQGTLPPKPHLVVEKPLVSPPPADLQSHLGTEVMVETADNFQEVLSLTESPVPQRTEKFGKKNRKRLDSRAEEGSVQAITEGKVKKEARTLSDFNSLISSPHLGREKKKVKSQKDQLKSKKLNKTNEFQDSSESEPELFISGDELMNQSQGSRKGWKSKRSPRAAGELEEAKCRRASEKEDGRLGSQGFVYVMANKQPLWNEATQVYQLDFGGRVTQESAKNFQIELEGRQVMQFGRIDGSAYILDFQYPFSAVQAFAVALANVTQRLK

SEQ ID NO: 203391 - DNA, 11123 bp, Artificial Sequence
  derived and/or modified sequence
gaaattttaatttattattcccccctttttttcctgcatctataggataatattgtaaaatagcaattgaaaccaataatcattaaataaatatcaaggaaaatccaagcaaagctttctttttgttggactagtggtgtggtgtttggagacagtctctgaatgtgaacaggaaagcacccatcagcaaaacacgatcactctctagggagacagctgggggaatctgactctggcttctgcttttgttttaagggattaacttccctgtcaagtccaagaagacttgcgtatgagaagattacctgatggacttaattctaagattagcttttttcatcaagatggaaaaagatctttaggagcagaaaaggggagtgctaactgggggagcgagaagggagacgagcaaaagaaacaaaatcttgccacgtggctctgttttgtcagcaagaggatttaagactcacccagggcaaacactgggaccactgtaagagcgctggaacattctgcctcttgagtgaaggggccttctttctagcctctatggcactgaggggtgcgccggctggtggaggagtagtccgatggagccctgcgttccccggggacacagggccaagctttgaggtggaaagtttctggttctgaaacaacaaggagagagtctgtttttcttcctaaaatttggactcttgtctgcacaaactctggtctgttttgcacggtttgtgtgcctttttttccctttatgcaatctttttcagctttagcagcagaaatttgtctagttcaggaaacatgctagagggtggcttcagaaggaagatgatcctgtgtattctgtctctgcatccgaacttttgaagagaaaaattcgagctagagggattcttaaagccttaagttacttgaaatctatgtatttgcaaccctttgtctctggaatcatattacactaaactggaatctcaggctgaatgagaataaccaagtggagtaaaaagaagaaaaccgtttcttgatcaccacttaattaacgatgctctttctccaaaggatcagcacgttcttcctctgagaacttgaaaatacaaatggaccccatgtttttttaagcattaccttttcttagaagactgccatcatcttttatagaggaattttttcactatgcattcagtggatctttataaaatactgaccttctaattagattcaggtcagtcttaattaaagggggaaaaaagcaacgcaagccaaccacaaaaacacatataccaatgaaagaaattggtttaaatttcacagcattaacattactttttaagtaaaacagttcattgaagaaagtatgtatgcagcagtggaacatgggcctgtgctttgcagtgactccaacatcctgtgcctgtcctggaaggggcgtgtccccaagagtgagaaggagaagcctgtgtgcaggagacgctactatgaggaaggctggctggccacgggcaacgggcgaggagtggttggggtgactttcacctctagtcactgtcgcagggacaggagtactccacagaggataaatttcaacctccggggccacaatagcgaggttgtgctggtgaggtggaatgagccctaccagaaactggccacgtgcgatgcggacggaggcatattcgtgtggattcagtacgagggcaggtggtctgtggagctggtcaacgaccgcggggcgcaggtgagtgatttcacgtggagccatgatggaactcaagcacttatttcctatcgagatgggtttgtcctggttgggtctgtcagtggacaaagacactggtcatccgaaatcaacttggaaagtcaaattacgtgtggcatatggactcctgacgaccaacaggtgctgtttggcacggccgatgggcaggtgattgtcatggattgccacggcagaatgctggcccacgtcctcttgcacgagtcagacggtgtcctcggcatgtcctggaactacccgatcttcctggtggaggacagcagcgagagcgacacggactcagatgactacgcccctccccaagatggtccggcagcatatcccatcccagtgcagaacatcaagcctctgctcaccgtcagcttcacctcgggagacatcagcttaatgaacaactacgatgacttgtctcccacggtcatccgctcagggctgaaagaggtggtagcccagtggtgcacacagggggacttgctggcagtcgctgggatggaacggcagacccagcttggtgagcttcccaatggtccccttctgaagagtgccatggtcaagttctacaatgttcgtggggagcacatcttcacactggacactctcgtgcagcgccccatcatctccatctgctggggtcaccgggattcgaggctgttgatggcatcaggaccagccctgtacgtggtgcgtgtggagcaccgggtgtccagcctgcagctgctgtgccagcaggccatcgccagcaccttgcgtgaggacaaggacgtcagcaagctgactctgcccccccgcctctgctcctacctctccactgccttcatccccaccatcaagcccccaattccagatccgaacaacatgagagactttgtcagctacccatcagccggcaacgagcggctgcactgcaccatgaagcgcacagaggacgacccggaggtgggcggcccgtgctacacgctctacctggagtacctgggcgggcttgtgcccatcctcaaagggcggcgcatcagcaagctgcggccagagttcgtcatcatggacccgcggacagatagcaaaccagatgaaatctatgggaacagcttgatttctactgtgatcgacagctgcaactgctcagactccagtgacattgagctgagtgatgactgggctgccaagaaatctcccaaaatctccagagctagcaaatcacccaaactcccaaggatcagcattgaggcccgcaagtcacccaagctgccccgggctgctcaggagctctcccggtccccacggttgcccctgcgcaagccctctgtgggctcgcccagcctgactcggagagagtttccttttgaagacatcactcagcacaactatcttgctcaggtcacgtctaatatctggggaaccaaatttaagattgtgggcttggctgctttcctgccaaccaacctcggtgcagtaatctataaaaccagcctcctgcatctccagccgcggcagatgaccatttatctcccagaagttcggaaaatttccatggactatattaatttacctgtcttcaacccaaatgttttcagtgaagatgaagatgatttaccagtgacaggagcatctggtgtccctgagaacagcccaccttgtaccgtgaacatccctattgcaccgatccacagctcggctcaggctatgtcccccacgcagagcatagggctggtgcagtccctactggccaatcagaatgtgcagctagatgtcctgaccaaccagacgacagctgtagggacagcagaacatgcaggtgacagtgccacccagtacccagtctccaaccggtactccaatcctggacaggtgattttcggaagcgtggaaatgggccgcatcattcagaacccccctccactgtccctgcctcccccgccgcaggggcccatgcagctgtccacggtgggccatggagaccgagaccacgaacacctgcagaagtcagccaaggccctgcggccaacaccgcagctggcagctgagggggacgcagtggtctttagtgccccccaggaggtccaggtgacgaagataaaccctccacccccgtacccaggaaccatccccgctgcccccaccacagcagcacccccgccccctctgccgcccccacagcccccagtggatgtgtgcttgaagaagggcgacttctccctctaccccacgtcagtgcactaccagacccccctgggctatgagaggatcaccaccttcgacagcagtggcaacgtggaggaggtgtgccggccccgcacccggatgctgtgctcccagaacacctacaccctccccggcccgggtagctctgccaccttgaggctcacggccactgagaagaaggtccctcagccctgcagcagtgccaccctgaaccgcctgaccgtccctcgctactccatccccaccggggacccacccccgtatcctgaaattgccagccagctggcccaggggcggggggctgcccagaggtccgacaatagcctcatccacgctaccctgcggaggaacaaccgtgaggctacgctcaagatggcccagctggccgacagcccgcgggcccccctgcagcccctggccaagtccaagggcgggcccgggggggtggtgacacagctcccagcgcggcccccacctgccctgtacacctgcagtcagtgcagtggcacagggcccagctcacagcccggagcctccctggcccataccgccagcgcctccccgttggcctcccagtcctcctacagcctcctgagcccacccgacagcgcccgcgaccgcaccgactacgtcaactcggccttcacggaggacgaggccctgtcccagcactgtcagcttgagaagcccttgaggcaccctcccctgcctgaagctgctgtcaccctgaaacggccacccccttaccagtgggaccccatgctgggtgaggacgtttgggttcctcaagaaaggacagcacagacttcagggcccaaccccttaaaactgtcctctctgatgctgagtcagggccagcacctggacgtgtcccgactgcccttcatctcccccaagtctcctgccagccccactgccactttccaaacaggctatgggatgggagtgccatatccaggaagctataacaacccccctttgcctggagtgcaggctccctgctctcccaaagatgccctgtccccaacgcagtttgcacaacaggagcctgctgtggtccttcagccgctgtacccacccagcctctcctattgcaccctgccccccatgtacccaggaagcagcacgtgctctagtttacagctgccacctgtcgccttgcatccatggagttcctacagcgcctgcccgcccatgcagaacccccagggcactctccccccaaagccacacttggtggtggagaagccccttgtgtccccaccacctgccgacctccaaagccacttgggcacagaggtgatggtagagactgcagacaacttccaggaagtcctctccctgaccgaaagcccagtcccccagcggacagaaaaatttggaaagaagaaccggaagcgcctggacagccgagcagaagaaggcagcgttcaggccatcactgagggcaaagtgaagaaggaggctaggactttgagtgactttaattccctaatctccagcccacacctggggagagagaagaagaaagtgaagagtcagaaagaccaactgaagtcaaagaagttgaataagacaaacgagttccaggacagctccgagagcgagcctgagctgttcatcagcggggatgagctcatgaaccagagccagggcagcagaaagggctggaaaagcaagcgctccccacgggccgccggcgagctggaggaggccaagtgccggcgggccagtgagaaggaggacgggcggctgggcagccaaggcttcgtgtacgtgatggccaacaagcagccgctgtggaacgaggccacccaggtctaccagctggacttcggggggcgggtgacccaggagtccgccaagaacttccagattgagttagaggggcggcaggtgatgcagtttggacggattgatggcagtgcgtacattctagacttccagtatccgttctcagccgtgcaggcctttgcagttgccctggccaacgtgactcagcgcctcaaatgaagagactggtgtggggaggagagagatgcagagagcctttggaagaggtcttcggagatgccagaggagccctctaggggtccgatgcctgggaggaccagaagccaacagcaaaactggaaaagcccggcaggcccaggagagggcgctgacctgtggtcgtcatttatttggttgggttttattaccttttattgtctgttcttcttttcttctttcatttcagtggcatttggaagcaaagagtgctaggcacctgctgttctttcaggaaacagcttggctgtggtaatgctctactgggcccttcagaatgaagacagtctgccttagagcctgctattcttttagacatagggaggatgcattatcctgtattctcctccaacatcaccactagcgtaaaagcaaaaagcttttacaaaacacagccaaaaattctcaagatgcaggttcttggggaatgggatggggacagcatttgatttacactgattatgttactccccaaaaggtgacttaattaataaagggcatttgggcagacacactgtgttggaccaacaaagtaggctctttacaggggtgttctcaccaggtagaaatgcgatttgctcactgaggatgttggggaagggacgaagggtaaagaagaaactgcacgtatacacaggttcacatcactctgcagacagcaatgtgactcagcgtgtgacttgtagcagcagtacgagggctacactcctctgctgaggatgtctacattgaaagcctccactagtttcatcgtttgtcaaagttccgtaggatcagtgatggtcattcagcatgactggttctgggagaaggtgagagacaaaaatggaaagatcctggcctgtggtagtggtagcagttttctcaaataatgtggtgacagtcactagatcctcacatgctgagaaacagcctctactctctctgccccttttactttttaatctggaatgcattactgtaaacatgatctttcccatgagataccatgttctatgccttcccattctaaaagtgtggacaacgcttgatttgaaaccactccttttctcctcttggctacattaaaattcagttgactacaaatgctttctatcaaattagaaatgtaaccaaaaaaatgttaagtgttcaccagggtattaaaatacagaggagtatggtcaaatctttgacaaaattttcatgatcttctctaacaaaaaaagttgtttattaactgtacagactgtttactaaggagctaaaccactgagaaaacgttattaaaattgtaatacctaggtagttggttgatcacagtttgttaattgtataaaaaaaaattacctagaatatctcttcccacttcctcgtcctcgtgagaacctgtgggcagtattcaagccctgatgacaaaacccagtgttttttgttgttgttttttgttgttgttttttgtttttgtttttgtttttctcagtcttacctgtgatgttgtttaggatcaggcccctctcctgggcctgctgtgcaggagcacaggaactatctgctggcgttgggttccaaatttgcattttatttggaaacagacaagtagaagatgctacagaaaagtattttcaaatttaaacgttttttaatcccctgttttagttaaaaaattggaaaagaaaccgacccatttttttcccagatcaagatgacatgacatcactcccaattctctccaaaccccagagaaatactgacgaagttttctgatgtggcaaaggatatttcccatctaataccagtttctcatttatatttaacgtattggacctgatatttttagtgggtgcattcttccagaaagaattcagcaatgttatcagaattaattcttttatatgagtttatgtagcttgatatggtgtttcagtgcttattggttgtgcaataatggttatagcctgttagataatctaaatgcaattcccctgttttgtcgtttaggagataattatttatcttgcttttcatagtgttcttaggaattattttgttgttacgttttggtgagttatacccattttatttatttagaaaaatagtatctttgttaacgacttacatggtcacagtatattttgctgcaagaaataaagaggatatgatagaaggtttttttttttttttttttttttttttgagacggagtcccactcttgtcgcccaactagagtgtagtggcacaatctcggctccccacaacctctgactccagggttcaggtgattattttgcctcagcctcccaagcagctgggattatagacacccgccaacacgccaggctaatgtttttgtatttttaatagagatggggttttgccatgttggccaggctggtcttgaactcctgacctcaggtgatccgcccgcctcggcctcccaaagtgctgggattacagacgtgagccaccactcccggcccatagaaggttttttgctggataatttgtaacttttctaattgggaaaaaattcctattaatcacttaaaaatttttttttgtattttgtgttattgattatatacaaaggagactttttttttgagataacactcaaatagtattctcttcttttgaaaattttatttttatctgaaaataacagttgatctgaaataaaaaggggagacctattagaatgagagtagccaaggaaagagttactaggtaataagcttcactttttgtgttctaattgtttttgagatataaagaccctgaaaaagcccattttagaacctgtttaataagagcaaatataggggaaaatctttgaaatgaaagctacaaatacatgtgagaagaaaaaaatggatttttttagcaaataattaactaagcttctaaatgcctagctccctcccccaaaggcgctttcccccgatggaggcacaggcttctgtctcggatgtttggcgcacgtgagtttgtatgagtttgtaccggagtgaccccggcagccactgcccacctcccctctacccaggggcctgaaaagaggggctgccctcctgcgccaaggcagacacaagctgcgggctgtgcggtcctagtagtgtgacgtttcagttaatagtggtggtcttattttcaactatgctttcattcagtcagtctctgttgactaaatacgacgaaaattcatactttatgcaggagatttctaaaaatttaatgtttattaatagtttatgaatatcaagatacctcattgaatccctaaatttaaaagcagtccagtaaaaggttaactgtataaagaatctatgactttttgagggaagtgtgatatattaacaaatataaccaattctaaatttgttttagctctaacctcatcaaaccaaaggcacagatttgtgtacaatatacccattgaatgtatatcctgagaaaaattggggccaaagaagcaggaaaatctcaaagctctaatggcagcataaatcaaagaatttcacaggctagtgtttttatccatagccattgctcccttgtcaagtgtctcacaaggacatggaagaatgtgttatgttcatcttgtaatcatagcaaaaagtctgcaaaccccagggtcaagcctgctctgccacagggttggatggtgaccttgggcaagtccctggggctggctaggcctccacttgtccatctgtgaaatgaaaggatcagcctggacagccctctaaactcccttacagctctcagcctaagagcgcagcactgaacagcctcatcattccacttttcatgggaaatatatttcacaccattgcctttgtgtagagaaatatttcttttcctgtgttaatgagctatgtactgaatataaaccagtgcatttaaagtaatatcttttgtgcacctctaaatgtgtttggaattgtgtttgttctcatagaatatacaaaagtactgattctaggtaagaaggagtctccacgggtgtgccctgctcagctggatgtccatgagaacagccatgaaataagtcactacttgtccccaaaaccacaggaatatatacctaggtcacctcaaattcctgagtgtgctctgccatgttacacggtcttcaaattgaaaaggtttcttgaaaaggaaagtttggcccagcaactggagaaggagtccatggtgtcgctgtgtgcctgtatcatttggccaagtcaatggttgtaagcaaagttagtggagacaaaaatgtgtccaaaatgtcgtttgagttcctgggatttctgtaatagcacacaactcagaactcttcagcatttgtgtgattccttacctctggctgataaaactctaatgggttgtggcttactttgtttccattttctttggctttgtgcaatttttgtgtaactttacttgtacctatattttctgtttacagttctttttaaggggaggggtagggttctaagatcttgttgtttattgtagataaaaattttttcgtgttgtagaaaagcatgggttatgcgtttgactgaaaaagacactgtattatttaccaaaggggtattgtttttgcatttgtttataaatgcattattttggtactgtaaatttggacataatttctgagtttattactactggcattttctttttcccttttttttttttttaaccgtaagtgcacgatgcaggtgcataggccccagaccaaactagaccaccagcatgttcatgtccagacctcggcagtggcgtgcactgcttgtgcacctcagttcctccagtgttggtttgtttgttttttaattcagcatcctgctggttttactttccaagcaagatctgttgcgactcccaaatgcgttttaatgagctcatccttatttgcctttcttcttacgtattttgtgtattagattgtgcaggagatattctagaaggcattaatggtttgcattcaaaacgatgtggtttgtccaagttattttctgtctttattactgagacggattaatctccttatttttttcttgatgatttgaagttgtaagagttgtccagctattgcttaataaaattttgcagatcaaaaaa

SEQ ID NO: 203392 - DNA, 4632 bp, Artificial Sequence
  derived and/or modified sequence
atgtacgccgccgtggagcacggccccgtgctgtgcagcgacagcaacatcctgtgcctgagctggaagggcagagtgcccaagagcgagaaggagaagcccgtgtgcagaagaagatactacgaggagggctggctggccaccggcaacggcagaggcgtggtgggcgtgaccttcaccagcagccactgcagaagagacagaagcaccccccagagaatcaacttcaacctgagaggccacaacagcgaggtggtgctggtgagatggaacgagccctaccagaagctggccacctgcgacgccgacggcggcatcttcgtgtggatccagtacgagggcagatggagcgtggagctggtgaacgacagaggcgcccaggtgagcgacttcacctggagccacgacggcacccaggccctgatcagctacagagacggcttcgtgctggtgggcagcgtgagcggccagagacactggagcagcgagatcaacctggagagccagatcacctgcggcatctggacccccgacgaccagcaggtgctgttcggcaccgccgacggccaggtgatcgtgatggactgccacggcagaatgctggcccacgtgctgctgcacgagagcgacggcgtgctgggcatgagctggaactaccccatcttcctggtggaggacagcagcgagagcgacaccgacagcgacgactacgcccccccccaggacggccccgccgcctaccccatccccgtgcagaacatcaagcccctgctgaccgtgagcttcaccagcggcgacatcagcctgatgaacaactacgacgacctgagccccaccgtgatcagaagcggcctgaaggaggtggtggcccagtggtgcacccagggcgacctgctggccgtggccggcatggagagacagacccagctgggcgagctgcccaacggccccctgctgaagagcgccatggtgaagttctacaacgtgagaggcgagcacatcttcaccctggacaccctggtgcagagacccatcatcagcatctgctggggccacagagacagcagactgctgatggccagcggccccgccctgtacgtggtgagagtggagcacagagtgagcagcctgcagctgctgtgccagcaggccatcgccagcaccctgagagaggacaaggacgtgagcaagctgaccctgccccccagactgtgcagctacctgagcaccgccttcatccccaccatcaagccccccatccccgaccccaacaacatgagagacttcgtgagctaccccagcgccggcaacgagagactgcactgcaccatgaagagaaccgaggacgaccccgaggtgggcggcccctgctacaccctgtacctggagtacctgggcggcctggtgcccatcctgaagggcagaagaatcagcaagctgagacccgagttcgtgatcatggaccccagaaccgacagcaagcccgacgagatctacggcaacagcctgatcagcaccgtgatcgacagctgcaactgcagcgacagcagcgacatcgagctgagcgacgactgggccgccaagaagagccccaagatcagcagagccagcaagagccccaagctgcccagaatcagcatcgaggccagaaagagccccaagctgcccagagccgcccaggagctgagcagaagccccagactgcccctgagaaagcccagcgtgggcagccccagcctgaccagaagagagttccccttcgaggacatcacccagcacaactacctggcccaggtgaccagcaacatctggggcaccaagttcaagatcgtgggcctggccgccttcctgcccaccaacctgggcgccgtgatctacaagaccagcctgctgcacctgcagcccagacagatgaccatctacctgcccgaggtgagaaagatcagcatggactacatcaacctgcccgtgttcaaccccaacgtgttcagcgaggacgaggacgacctgcccgtgaccggcgccagcggcgtgcccgagaacagccccccctgcaccgtgaacatccccatcgcccccatccacagcagcgcccaggccatgagccccacccagagcatcggcctggtgcagagcctgctggccaaccagaacgtgcagctggacgtgctgaccaaccagaccaccgccgtgggcaccgccgagcacgccggcgacagcgccacccagtaccccgtgagcaacagatacagcaaccccggccaggtgatcttcggcagcgtggagatgggcagaatcatccagaaccccccccccctgagcctgcccccccccccccagggccccatgcagctgagcaccgtgggccacggcgacagagaccacgagcacctgcagaagagcgccaaggccctgagacccaccccccagctggccgccgagggcgacgccgtggtgttcagcgccccccaggaggtgcaggtgaccaagatcaaccccccccccccctaccccggcaccatccccgccgcccccaccaccgccgccccccccccccccctgccccccccccagccccccgtggacgtgtgcctgaagaagggcgacttcagcctgtaccccaccagcgtgcactaccagacccccctgggctacgagagaatcaccaccttcgacagcagcggcaacgtggaggaggtgtgcagacccagaaccagaatgctgtgcagccagaacacctacaccctgcccggccccggcagcagcgccaccctgagactgaccgccaccgagaagaaggtgccccagccctgcagcagcgccaccctgaacagactgaccgtgcccagatacagcatccccaccggcgacccccccccctaccccgagatcgccagccagctggcccagggcagaggcgccgcccagagaagcgacaacagcctgatccacgccaccctgagaagaaacaacagagaggccaccctgaagatggcccagctggccgacagccccagagcccccctgcagcccctggccaagagcaagggcggccccggcggcgtggtgacccagctgcccgccagacccccccccgccctgtacacctgcagccagtgcagcggcaccggccccagcagccagcccggcgccagcctggcccacaccgccagcgccagccccctggccagccagagcagctacagcctgctgagcccccccgacagcgccagagacagaaccgactacgtgaacagcgccttcaccgaggacgaggccctgagccagcactgccagctggagaagcccctgagacacccccccctgcccgaggccgccgtgaccctgaagagaccccccccctaccagtgggaccccatgctgggcgaggacgtgtgggtgccccaggagagaaccgcccagaccagcggccccaaccccctgaagctgagcagcctgatgctgagccagggccagcacctggacgtgagcagactgcccttcatcagccccaagagccccgccagccccaccgccaccttccagaccggctacggcatgggcgtgccctaccccggcagctacaacaacccccccctgcccggcgtgcaggccccctgcagccccaaggacgccctgagccccacccagttcgcccagcaggagcccgccgtggtgctgcagcccctgtacccccccagcctgagctactgcaccctgccccccatgtaccccggcagcagcacctgcagcagcctgcagctgccccccgtggccctgcacccctggagcagctacagcgcctgcccccccatgcagaacccccagggcaccctgccccccaagccccacctggtggtggagaagcccctggtgagccccccccccgccgacctgcagagccacctgggcaccgaggtgatggtggagaccgccgacaacttccaggaggtgctgagcctgaccgagagccccgtgccccagagaaccgagaagttcggcaagaagaacagaaagagactggacagcagagccgaggagggcagcgtgcaggccatcaccgagggcaaggtgaagaaggaggccagaaccctgagcgacttcaacagcctgatcagcagcccccacctgggcagagagaagaagaaggtgaagagccagaaggaccagctgaagagcaagaagctgaacaagaccaacgagttccaggacagcagcgagagcgagcccgagctgttcatcagcggcgacgagctgatgaaccagagccagggcagcagaaagggctggaagagcaagagaagccccagagccgccggcgagctggaggaggccaagtgcagaagagccagcgagaaggaggacggcagactgggcagccagggcttcgtgtacgtgatggccaacaagcagcccctgtggaacgaggccacccaggtgtaccagctggacttcggcggcagagtgacccaggagagcgccaagaacttccagatcgagctggagggcagacaggtgatgcagttcggcagaatcgacggcagcgcctacatcctggacttccagtaccccttcagcgccgtgcaggccttcgccgtggccctggccaacgtgacccagagactgaagtag

SEQ ID NO: 203393 - DNA, 4632 bp, Artificial Sequence
  derived and/or modified sequence
atgtatgctgccgtagaacacggacctgtgctctgctcggattcgaacattctctgtctaagctggaagggccgagtgcccaaaagtgagaaggagaagcctgtttgtcgacgtaggtattatgaggaaggctggctcgcaactggcaacggccgcggcgtggtgggggtgacattcactagcagccactgccgcagagaccgctccaccccccagcggatcaatttcaacttgcgcggccacaatagcgaagtggttctggtacgttggaacgaaccttaccagaaattagccacttgcgacgctgatggggggatcttcgtgtggatacagtatgagggaaggtggtccgtggagctagtcaatgaccggggggcccaggtcagtgacttcacatggtcccatgatggtacacaggccttaatctcgtacagagatggatttgtactggtaggctcagtcagcggacagcgccactggtcctccgagattaacctggagtcgcagattacttgtggaatctggacacccgatgaccaacaggtcttattcggcactgctgatggccaggtgatcgtcatggattgccatggacggatgctcgcacacgtgctactgcatgaatccgacggcgtgctgggaatgtcctggaactacccaatttttctagttgaggattcatcagaatctgacacagattccgacgactacgcccctccacaggatggcccagcagcctaccccataccagtccagaacattaagccacttctcactgtgagcttcactagcggcgacatctctctaatgaacaactatgatgatctcagcccaactgtgattaggtctggtctgaaggaggtcgtcgcacaatggtgcacccagggagatctgttggccgtcgcagggatggagcgccagacccaattgggggagctccctaacggtccattactcaagagcgccatggtgaaattctacaacgtgcggggagaacacatcttcaccttagataccttggtgcaaagaccaatcatctcaatttgctggggtcatagagacagtaggctcctgatggcttccggaccagccctctacgttgtaagggtcgaacacagagtttcaagtctgcaattgctgtgccagcaggcaattgcttctacactgcgagaggacaaagacgtgtccaaactgaccctgccgccacgcctgtgttcatatctctccacagcttttatcccaaccattaagccgcctatcccggacccaaataacatgagggatttcgtaagctaccctagcgccgggaacgagagactgcactgtacgatgaaacgcaccgaagatgaccctgaggtggggggtccttgctatacactgtaccttgagtacctaggtggactggtgcccatcctgaagggccggaggatatctaaactccggcctgagttcgttattatggaccccagaacggatagcaagcccgacgaaatctacgggaatagtctaatatcgacagtgattgacagttgtaattgcagcgatagttcggatatcgagctttcggatgattgggccgctaaaaagtcacctaaaatcagcagggccagtaagtcacccaaattaccccgcatctcgattgaggccaggaaaagccctaagctcccccgcgcagctcaggagctctcacggagccccaggttacccctcagaaaaccatccgtggggtctcccagtctcacaagacgggagtttccattcgaagatataacgcaacacaattatctcgcgcaggtgacgagtaatatctgggggacaaagtttaaaattgtgggcctggcggcctttttgcctaccaatctgggagccgtgatctacaagacctccctgcttcaccttcagccaagacagatgacgatttaccttccagaagtacggaagatatcaatggactatatcaacctgcctgtttttaaccccaacgtattttctgaggacgaggatgacctgccagtgaccggcgcatccggggtgccagagaattctccgccgtgtacagtgaatatccctattgctcccatccactccagtgcacaggccatgtcccccacccagagtattgggctggttcaatcacttctagctaatcagaacgtgcagttggatgttctgactaaccagacgacagccgtcggtaccgctgaacacgcaggcgattccgccacccagtacccagtctcaaaccgctatagcaatcccggccaggtgatttttgggagcgtcgagatggggcggattattcagaatccaccccccctttccctgccacctcccccccagggacccatgcagctgtccacagttggccacggcgacagagatcatgagcatttacagaaatccgcgaaagctctgcgccctacgcctcaactggctgccgagggcgatgcggtcgtgttctccgccccgcaggaagtgcaggtaacaaaaatcaacccacctccaccgtacccaggcactatcccagccgccccaacaactgcggcccctcctccacccctgcccccaccccagccccccgtggacgtatgtctgaagaaaggcgatttttccctgtatccaacctcagtccattatcagacccctctcggctatgagcgcattaccaccttcgacagctcgggcaatgtagaggaggtgtgcaggcctcgcaccaggatgctgtgttctcaaaacacatatacccttcctgggcctggctcatctgcaaccctgagattaaccgcaacggagaaaaaagtgccacagccctgcagtagcgctaccctgaacaggctgaccgtcccaaggtactccattccaaccggagacccccccccttacccagagatagccagccagcttgctcaaggccggggcgcggcccagcggtccgataacagcctgatccacgcaacactcaggcggaacaaccgcgaggccacactgaagatggcacagctcgccgactcccctcgggcaccgctgcagcccctagccaagtcaaagggtgggcccggcggggtcgtgacacaactgcctgcacgacctccccctgcactgtatacgtgtagccaatgttctgggacggggccttcaagtcagcccggagcatcactggcccacaccgcttctgcctccccgcttgcaagccagtcatcatatagcctgctgtcaccccctgactctgcaagggatagaaccgactacgtaaatagcgcatttacagaggacgaagctctgagtcagcattgtcagctggagaagccactgcgccatccccccctacctgaggcggcggtgacgctaaagaggcctccaccttaccagtgggaccccatgttaggggaggatgtgtgggtgccccaggagaggactgcacagacgtctggacctaaccccctgaagttaagtagtctgatgctttcccagggccagcacctggatgtaagcagattacctttcatctcacctaaaagcccagcaagccctactgccacgtttcagacgggctatggcatgggcgtcccataccccggctcctacaataatccacccctgcccggagtgcaggccccctgctcgccgaaggatgcactgtccccaacccagtttgcgcaacaggagccagcagtggtcttacagcctctatatcccccctcactcagctactgtactttaccacctatgtatcctggctcatctacttgctcttccttacagcttccacccgtggcactgcatccatggtccagctatagcgcctgtccccctatgcagaacccccagggcactctgcctcctaagcctcaccttgtggtggagaaacctctggttagtccaccacccgccgacttgcagtcccaccttggcactgaagttatggtggagacagccgacaattttcaggaagtgctctcacttaccgagagccctgtgcctcagaggaccgaaaaatttggtaaaaaaaacagaaaacgcctcgactccagagctgaggaggggagtgtgcaggcaatcacggagggcaaggtgaaaaaggaggcgcgaaccttgtctgacttcaactctctgatatcttcaccccacctcggtagagaaaagaaaaaggtgaaaagtcaaaaggatcagctgaagagcaagaaattaaacaagaccaacgaattccaagacagttcagagagcgaacccgaactgtttatttccggggatgaactgatgaatcagtcacaaggctctcggaaagggtggaaatccaagcggagtcctagagcagccggcgaactcgaagaggcaaaatgccggagagcatctgagaaggaggacgggcggttgggatcacaaggttttgtttatgttatggccaataagcagcccttgtggaacgaagcgacccaggtgtaccagcttgacttcggcggtcgtgtgacccaggagtcggctaagaactttcaaattgaactggagggccggcaggtaatgcagttcggacgaatcgatggcagcgcctatatcctggacttccagtatccctttagcgcagtccaggcatttgctgtcgcactggccaatgttacacagaggctcaaatag

SEQ ID NO: 203394 - DNA, 11123 bp, Artificial Sequence
  derived and/or modified sequence
gaaattttaatttattattcccccccttttttcctgcatctataggataatattgtaaaatagcaattgaaaccaataattattaaataaatatcaaggaaaatccaagcaaagctttctttttgttggactagtggtgtggtgtttggagacagtctctgaatgtgaacaggaaagcacccatcagcaaaacactatcactctctagggagacagctgggggaatctgactctggcttctgcttttgttttaagggattaacttccctgtcaagtccaagaagacttgcgtatgagaagattacctgatggacttaattctaagattagcttttttcatcaagatggaaaaagatctttaggagcagaaaaggggagtgctaactgggggagcgagaagggagacgagcaaaagaaacaaaatcttgccacgtggctctgttttgtcagcaagaggatttaagactcacccagggcaaacactgggaccactgtaagagcgctggaacattctgcctcttgagtgaaggggccttctttctagcctctatggcactgaggggtgcgccggctggtggaggagcagtccgatggagccctgcgttccccggggacacagggccaagctttgaggtggaaagtttctggttctgaaacaacaaggagagagtctgtttttcttcctaaaatttggactcttgtctgcacaaactctggtctgttttgcacggtttgtgtgcctttttttccctttatgcaatctttttcagctttagcagcagaaatttgtctagttcaggaaacatgctagagggtggcttcagaaggaagatgatcctgtgtattctgtctctgcatccgaacttttgaagagaaaaattcgagctagagggattcttaaagccttaagttacttgaaatctatgtatttgcaaccctttgtctctggaatcatattacactaaactggaatctcaggctgaatgagaataaccaagtggagtaaaaagaagaaaaccgtttcttgatcaccacttaattaacgatgctctttctccaaaggatcagcacgttcttcctctgagaacttgaaaatacaaatggaccccatgtttttttaagcattaccttttcttagaagactgccatcatcttttatagaggaattttttcactatgcattcggtggatctttataaaatactgaccttctaattagattcaggtcagtcttaattaaagggggaaaaaagcaacgcaagccaaccacaaaaacacatataccaatgaaagaaattggtttaaatttcacagcattaacattactttttaagtaaaacagttcattgaagaaagtatgtatgcagcagtggaacatgggcctgtgctttgcagcgattccaacatcctgtgcctgtcctggaaggggcgtgtccccaagagtgagaaggagaagcctgtgtgcaggagacgctactatgaggaaggctggctggccacgggcaacgggcgaggagtggttggggtgactttcacctctagtcactgtcgcagggacaggagtactccacagaggataaatttcaacctccggggccacaatagcgaggttgtgctggtgaggtggaatgagccctaccagaaactggccacgtgcgatgcggacggaggcatattcgtgtggattcagtacgagggcaggtggtctgtggagctggtcaacgaccgcggggcgcaggtgagtgatttcacgtggagccatgatggaactcaagcacttatttcctatcgagatgggtttgtcctggttgggtctgtcagtggacaaagacactggtcatccgaaatcaacttggaaagtcaaattacgtgtggcatatggactcctgacgaccaacaggtgctgtttggcacggccgatgggcaggtgattgtcatggattgccacggcagaatgctggcccacgtcctcttgcacgagtcagacggtgtcctcggcatgtcctggaactacccgatcttcctggtggaggacagcagcgagagcgacacggactcagatgactacgcccctccccaagatggtccggcagcatatcccatcccagtgcagaacatcaagcctctgctcaccgtcagcttcacctcgggagacatcagcttaatgaacaactacgatgacttgtctcccacggtcatccgctcagggctgaaagaggtggtagcccagtggtgcacacagggggacttgctggcagtcgctgggatggaacggcagacccagcttggtgagcttcccaatggtccccttctgaagagtgccatggtcaagttctacaatgttcgtggggagcacatcttcacactggacactctcgtgcagcgccccatcatctccatctgctggggtcaccgggattcgaggctgttgatggcatcaggaccagccctgtacgtggtgcgtgtggagcaccgggtgtccagcctgcagctgctgtgccagcaggccatcgccagcaccttgcgtgaggacaaggacgtcagcaagctgactctgcccccccgcctctgctcctacctctccactgccttcatccccaccatcaagcccccaattccagatccgaacaacatgagagactttgtcagctacccatcagccggcaacgagcggctgcactgcaccatgaagcgcacagaggacgacccggaggtgggcggcccgtgctacacgctctacctggagtacctgggcgggcttgtgcccatcctcaaagggcggcgcatcagcaagctgcggccagagttcgtcatcatggacccgcggacagatagcaaaccagatgaaatctatgggaacagcttgatttctactgtgatcgacagctgcaactgctcagactccagtgacattgagctgagtgatgactgggctgccaagaaatctcccaaaatctccagagctagcaaatcacccaaactcccaaggatcagcattgaggcccgcaagtcacccaagctgccccgggctgctcaggagctctcccggtccccacggttgcccctgcgcaagccctctgtgggctcgcccagcctgactcggagagagtttccttttgaagacatcactcagcacaactatcttgctcaggtcacgtctaatatctggggaaccaaatttaagattgtgggcttggctgctttcctgccaaccaacctcggtgcagtaatctataaaaccagcctcctgcatctccagccgcggcagatgaccatttatctcccagaagttcggaaaatttccatggactatattaatttacctgtcttcaacccaaatgttttcagtgaagatgaagatgatttaccagtgacaggagcatctggtgtccctgagaacagcccaccttgtaccgtgaacatccctattgcaccgatccacagctcggctcaggctatgtcccccacgcagagcatagggctggtgcagtccctactggccaatcagaatgtgcagctagatgtcctgaccaaccagacgacagctgtagggacagcagaacatgcaggtgacagtgccacccagtacccagtctccaaccggtactccaatcctggacaggtgattttcggaagcgtggaaatgggccgcatcattcagaacccccctccactgtccctgcctcccccgccgcaggggcccatgcagctgtccacggtgggccatggagaccgagaccacgaacacctgcagaagtcagccaaggccctgcggccaacaccgcagctggcagctgagggggacgcagtggtctttagtgccccccaggaggtccaggtgacgaagataaaccctccacccccgtacccaggaaccatccccgctgcccccaccacagcagcacccccgccccctctgccgcccccacagcccccagtggatgtgtgcttgaagaagggcgacttctccctctaccccacgtcagtgcactaccagacccccctgggctatgagaggatcaccaccttcgacagcagtggcaacgtggaggaggtgtgccggccccgcacccggatgctgtgctcccagaacacgtacaccctccccggcccgggtagctctgccaccttgaggctcacggccactgagaagaaggtccctcagccctgcagcagtgccaccctgaaccgcctgaccgtccctcgctactccatccccaccggggacccacccccgtatcctgaaattgccagccagctggcccaggggcggggggctgcccagaggtccgacaatagcctcatccacgctaccctgcggaggaacaaccgtgaggctacgctcaagatggcccagctggccgacagcccgcgggcccccctgcagcccctggccaagtccaagggcgggcccgggggggtggtgacacagctcccagcgcggcccccacctgccctgtacacctgcagtcagtgcagtggcacagggcccagctcacagcccggagcctccctggcccataccgccagcgcctccccgttggcctcccagtcctcctacagcctcctgagcccacccgacagcgcccgcgaccgcaccgactacgtcaactcggccttcacggaggacgaggccctgtcccagcactgtcagcttgagaagcccttgaggcaccctcccctgcctgaagctgctgtcaccctgaaacggccacccccttaccagtgggaccccatgctgggtgaggatgtttgggttcctcaagaaaggacagcacagacttcagggcccaaccccttaaaactgtcctctctgatgctgagtcagggccagcacctggacgtgtcccgactgcccttcatctcccccaagtctcctgccagccccactgccactttccaaacaggctatgggatgggagtgccatatccaggaagctataacaacccccctttgcctggagtgcaggctccctgctctcccaaagatgccctgtccccaacgcagtttgcacaacaggagcctgctgtggtccttcagccgctgtacccacccagcctctcctattgcaccctgccccccatgtacccaggaagcagcacgtgctctagtttacagctgccacctgtcgccttgcatccatggagttcctacagcgcctgcccgcccatgcagaacccccagggcactctccccccaaagccacacttggtggtggagaagccccttgtgtccccaccacctgccgacctccaaagccacttgggcacagaggtgatggtagagactgcagacaacttccaggaagtcctctccctgaccgaaagcccagtcccccagcggacagaaaaatttggaaagaagaaccggaagcgcctggacagccgagcagaagaaggcagcgttcaggccatcactgagggcaaagtgaagaaggaggctaggactttgagtgactttaattccctaatctccagcccacacctggggagagagaagaagaaagtgaagagtcagaaagaccaactgaagtcaaagaagttgaataagacaaacgagttccaggacagctccgagagcgagcctgagctgttcatcagcggggatgagctcatgaaccagagccagggcagcagaaagggctggaaaagcaagcgctccccacgggccgccggcgagctggaggaggccaagtgccggcgggccagtgagaaggaggacgggcggctgggcagccaaggcttcgtgtacgtgatggccaacaagcagccgctgtggaacgaggccacccaggtctaccagctggacttcggggggcgggtgacccaggagtccgccaagaacttccagattgagttagaggggcggcaggtgatgcagtttggacggattgatggcagtgcgtacattctagacttccagtatccgttctcagccgtgcaggcctttgcagttgccctggccaacgtgactcagcgcctcaaatgaagagactggtgtggggaggagagagatgcagagagcctttggaagaggtcttcggagatgccagaggagccctctaggggtccgatgcctgggaggaccagaagccaacagcaaaactggaaaagcccggcaggcccaggagagggcgctgacctgtggtcgtcatttatttggttgggttttattaccttttattgtctgttcttcttttcttctttcatttcagtggcatttggaagcaaagagtgctaggcacctgctgttctttcaggaaacagcttggctgtggtaatgctctactgggcccttcagaatgaagacagtctgccttagagcctgctattcttttagacatagggaggatgcattatcctgtattctcctccaacatcaccactagcgtaaaagcaaaaagcttttacaaaacacagccaaaaattctcaagatgcaggttcttggggaatgggatggggacagcatttgatttacactgattatgttactccccaaaaggtgacttaattaataaagggcatttgggcagacacactgtgttggaccaacaaagtaggctctttacaggggtgttctcaccaggtagaaatgcgatttgctcactgaggatgttggggaagggacgaagggtaaagaagaaactgcacgtatacacaggttcacatcactctgcagacagcaatgtgactcagcgtgtgacttgtagcagcagtacgagggctacactcctctgctgaggatgtctacattgaaagcctccactagtttcatcgtttgtcaaagttccgtaggatcagtgatggtcattcagcatgactggttctgggagaaggtgagagacaaaaatggaaagatcctggcctgtggtagtggtagcagttttctcaaataatgtggtgacagtcactagatcctcacatgctgagaaacagcctctactctctctgccccttttactttttaatctggaatgcattactgtaaacatgatctttcccatgagataccatgttctatgccttcccattctaaaagtgtggacaacgcttgatttgaaaccactccttttctcctcttggctacattaaaattcagttgactacaaatgctttctatcaaattagaaatgtaaccaaaaaaatgttaagtgttcaccagggtattaaaatacagaggagtatggtcaaatctttgacaaaattttcatgatcttctctaacaaaaaaagttgtttattaactgtacagactgtttactaaggagctaaaccactgagaaaacgttattaaaattgtaatacctaggtagttggttgatcacagtttgttaattgtataaaaaaaaattacctagaatatctcttcccacttcctcgtcctcgtgagaacctgtgggcagtattcaagccctgatgacaaaacccagtgttttttgttgttgttttttgttgttgttttttgtttttgtttttgtttttctcagtcttacctgtgatgttgtttaggatcaggcccctctcctgggcctgctgtgcaggagcacaggaactatctgctggcgttgggttccaaatttgcattttatttggaaacagacaagtagaagatgctacagaaaagtattttcaaatttaaacgttttttaatcccctgttttagttaaaaaattggaaaagaaaccgacccatttttttcccagatcaagatgacatgacatcactcccaattctctccaaaccccagagaaatactgacgaagttttctgatgtggcaaaggatatttcccatctaataccagtttctcatttatatttaacgtattggacctgatatttttagtgggtgcattcttccagaaagaattcagcaatgttatcagaattaattcttttatatgagtttatgtagcttgatatggtgtttcagtgcttattggttgtgcaataatggttatagcctgttagataatctaaatgcaattcccctgttttgtcgtttaggagataattatttatcttgcttttcatagtgttcttaggaattattttgttgttacgttttggtgagttatacccattttatttatttagaaaaatagtatctttgttaacgacttacatggtcacagtatattttgctgcaagaaataaagaggatatgatagaaggtttttttttttttttttttttttttttgagacggagtcccactcttgtcgcccaactagagtgtagtggcacaatctcggctccccacaacctctgactccagggttcaggtgattattttgcctcagcctcccaagcagctgggattatagacacccgccaacacgccaggctaatgtttttgtatttttaatagagatggggttttgccatgttggccaggctggtcttgaactcctgacctcaggtgatccgcccgcctcggcctcccaaagtgctgggattacagacgtgagccaccactcccggcccatagaaggttttttgctggataatttgtaacttttctaattgggaaaaaattcctattaatcacttaaaaatttttttttgtattttgtgttattgattatatacaaaggagactttttttttgagataacactcaaatagtattctcttcttttgaaaattttatttttatctgaaaataacagttgatctgaaataaaaaggggagacctattagaatgagagtagccaaggaaagagttactaggtaataagcttcactttttgtgttctaattgtttttgagatataaagaccctgaaaaagcccattttagaacctgtttaataagagcaaatataggggaaaatctttgaaatgaaagctacaaatacatgtgagaagaaaaaaatggatttttttagcaaataattaactaagcttctaaatgcctagctccctcccccaaaggcgctttcccccgatggaggcacaggcttctgtctcggatgtttggcgcacgtgagtttgtatgagtttgtaccggagtgaccccggcagccactgcccacctcccctctacccaggggcctgaaaagaggggctgccctcctgcgccaaggcagacacaagctgcgggctgtgcggtcctagtagtgtgacgtttcagttaatagtggtggtcttattttcaactatgctttcattcagtcagtctctgttgactaaatacgacgaaaattcatactttatgcaggagatttctaaaaatttaatgtttattaatagtttatgaatatcaagatacctcattgaatccctaaatttaaaagcagtccagtaaaaggttaactgtataaagaatctatgactttttgagggaagtgtgatatattaacaaatataaccaattctaaatttgttttagctctaacctcatcaaaccaaaggcacagatttgtgtacaatatacccattgaatgtatatcctgagaaaaattggggccaaagaagcaggaaaatctcaaagctctaatggcagcataaatcaaagaatttcacaggctagtgtttttatccatagccattgctcccttgtcaagtgtctcacaaggacatggaagaatgtgttatgttcatcttgtaatcatagcaaaaagtctgcaaaccccagggtcaagcctgctctgccacagggttggatggtgaccttgggcaagtccctggggctggctaggcctccacttgtccatctgtgaaatgaaaggatcagcctggacagccctctaaactcccttacagctctcagcctaagagcgcagcactgaacagcctcatcattccacttttcatgggaaatatatttcacaccattgcctttgtgtagagaaatatttcttttcctgtgttaatgagctatgtactgaatataaaccagtgcatttaaagtaatatcttttgtgcacctctaaatgtgtttggaattgtgtttgttctcatagaatatacaaaagtactgattctaggtaagaaggagtctccacgggtgtgccctgctcagctggatgtccatgagaacagccatgaaataagtcactacttgtccccaaaaccacaggaatatatacctaggtcacctcaaattcctgagtgtgctctgccatgttacacggtcttcaaattgaaaaggtttcttgaaaaggaaagtttggcccagcaactggagaaggagtccatggtgtcgctgtgtgcctgtatcatttggccaagtcaatggttgtaagcaaagttagtggagacaaaaatgtgtccaaaatgtcgtttgagttcctgggatttctgtaatagcacacaactcagaactcttcagcatttgtgtgattccttacctctggctgataaaactctaatgggttgtggcttactttgtttccattttctttggctttgtgcaatttttgtgtaactttacttgtacctatattttctgtttacagttctttttaaggggaggggtagggttctaagatcttgttgtttattgtagataaaaattttttcgtgttgtagaaaagcatgggttatgcgtttgactgaaaaagacactgtattatttaccaaaggggtattgtttttgcatttgtttataaatgcattattttggtactgtaaatttggacataatttctgagtttattactactggcattttctttttcccttttttttttttttaaccgtaagtgcacgatgcaggtgcataggccccagaccaaactagaccaccagcatgttcatgtccagacctcggcagtggcgtgcactgcttgtgcacctcagttcctccagtgttggtttgtttgttttttaattcagcatcctgctggttttactttccaagcaagatctgttgcgactcccaaatgcgttttaatgagctcatccttatttgcctttcttcttacgtattttgtgtattagattgtgcaggagatattctagaaggcattaatggtttgcattcaaaacgatgtggtttgtccaagttattttctgtctttattactgagacggattaatctccttatttttttcttgatgatttgaagttgtaagagttgtccagctattgcttaataaaattttgcagatcaaaaaa

SEQ ID NO: 203395 - DNA, 4632 bp, Artificial Sequence
  derived and/or modified sequence
atgtatgctgctgtggagcacggccctgtgctgtgcagcgacagcaacatcctgtgcctgtcctggaagggccgggtgcccaagtctgagaaggagaagcctgtgtgcagaagacgctactatgaggagggctggctggccactggaaatggccggggcgtggtgggcgtgaccttcaccagcagccactgcagaagagacaggagcaccccccagaggatcaacttcaacctgcggggccacaacagcgaggtggtgctggtgcgctggaatgagccctaccagaagctggccacctgtgatgctgatggcggcatctttgtgtggatccagtatgagggccgctggagcgtggagctggtgaatgacagaggagcccaggtgtctgacttcacctggagccatgatggcacccaggccctgatctcctacagagatggctttgtgctggtgggctctgtgtctggccagaggcactggagcagcgagatcaacctggagagccagatcacctgtggcatctggaccccagatgaccagcaggtgctgtttggaacagcagatggccaggtgattgtgatggactgccacggccgcatgctggcccacgtgctgctgcatgaaagtgatggagtgctgggcatgtcctggaactaccccatcttcctggtggaggacagcagcgagagtgacacagacagtgatgattatgccccaccccaggacggccctgctgcctaccccatccctgtgcagaacatcaagcccctgctgactgtgtccttcaccagcggggacatcagcctgatgaacaactatgatgacctgagccccaccgtcatccgcagcggcctgaaggaggtggtggcccagtggtgcacccagggcgacctgctggccgtggccggcatggagcggcagacccagctgggggagctgcccaacggccccctgctgaagagcgccatggtgaagttctacaacgtgcggggggagcacatcttcaccctggacaccctggtgcagaggcccatcatcagcatctgctggggccaccgggacagccggctgctgatggccagcggccctgccctgtatgtggtgcgggtggagcaccgggtgagcagcctgcagctgctgtgccagcaggccatcgccagcaccctgcgggaggacaaggatgtgtccaagctgaccctgcccccccggctgtgcagctacctgagcacagccttcatccccaccatcaagccacccatcccagaccccaacaacatgagggactttgtgtcctaccccagcgctggaaatgaaaggctgcactgcaccatgaagaggacagaagatgatcctgaggtgggcggcccctgctacaccctgtacctggagtacctgggcggcctggtgcccatcctgaagggccgccgcatcagcaagctgcggcctgagtttgtgatcatggaccccaggacagacagcaagccagatgagatctacggcaacagcctcatcagcaccgtcatcgacagctgcaactgcagcgacagcagtgacatcgagctgagtgatgactgggccgccaagaagagccccaagatcagccgggccagcaagagccccaagctgccccgcatcagcattgaggccaggaagagccccaagctgccccgggccgcccaggagctgagccgcagcccccggctgcccctgaggaagcccagcgtgggcagccccagcctgacccggcgggagttcccctttgaggacatcacccagcacaactacctggcccaggtgaccagcaacatctggggcaccaagttcaagatcgtgggcctggccgccttcctgcccaccaacctgggcgctgtgatctacaagaccagcctgctgcacctgcagccccggcagatgaccatctacctgcctgaggtgaggaagatctccatggactacatcaacctgcccgtcttcaaccccaacgtgttttctgaagatgaagatgacctgcctgtgactggagccagcggcgtgcctgagaacagccccccctgcaccgtgaacatccccatcgcccccatccacagcagcgcccaggccatgagccccacccagagcatcggcctggtgcagagcctgctggccaaccagaatgtgcagctggatgtgctgaccaaccagaccacagctgtgggcacagctgagcacgccggggacagcgccacccagtaccctgtgagcaaccgctacagcaaccctggccaggtgatcttcggctctgtggagatgggccgcatcatccagaaccccccacccctgagcctgcccccaccaccccagggccccatgcagctgagcacagtgggccacggggaccgggaccacgagcacctgcagaagagcgccaaggccctgcggcccaccccccagctggccgcagaaggagatgctgtggtgttttctgccccccaggaggtgcaggtgaccaagatcaaccccccaccaccctacccaggcaccatcccagctgcccccaccacagctgcccctcctccacccctgcccccaccccagccccctgtggatgtgtgcctgaagaagggggacttcagcctgtaccccacctctgtgcactaccagacccccctgggctatgagcgcatcaccacctttgacagcagtggaaatgtggaggaggtgtgccggcccaggaccaggatgctgtgcagccagaacacctacaccctgcccggccctggcagcagcgccaccctgcggctgacagccacagagaagaaggtgccccagccctgcagcagcgccaccctgaaccggctgactgtgccccgctacagcatccccactggagaccccccaccctacccagagatcgccagccagctggcccagggccgcggggccgcccagaggagtgacaacagcctcatccacgccaccctgcggaggaacaaccgggaggccaccctgaagatggcccagctggccgacagcccccgggcccccctgcagcccctggccaagagcaagggcggccctggaggagtggtgacccagctgcctgcccggcccccaccagccctgtacacctgcagccagtgcagcggcaccggccccagcagccagcccggggccagcctggcccacacagccagcgccagccccctggccagccagagcagctacagcctgctgagccccccagacagcgcccgggacagaacagattatgtgaacagcgccttcacagaagatgaggccctgagccagcactgccagctggagaagcccctgcggcacccccccctgcctgaggccgctgtgaccctgaagaggcccccaccctaccagtgggaccccatgctgggggaggatgtgtgggtgccccaggagaggacagcccagaccagcggccccaaccccctgaagctgagcagcctgatgctgagccagggccagcacctggatgtgtcccggctgcccttcatcagccccaagagccctgccagccccacagccaccttccagacaggctacggcatgggcgtgccctacccaggcagctacaacaacccccccctgcccggggtgcaggccccctgcagccccaaggatgccctgagccccacccagtttgcccagcaggagcctgctgtggtgctgcagcccctgtacccacccagcctgagctactgcaccctgccccccatgtacccaggcagcagcacctgcagcagcctgcagctgccccctgtggccctgcacccctggagcagctacagcgcctgcccccccatgcagaacccccagggcaccctgccccccaagccccacctggtggtggagaagcccctggtgagccccccacctgctgacctgcagagccacctgggcacagaggtgatggtggagacagctgacaacttccaggaggtgctgagcctgacagagagccctgtgccccagaggacagagaagtttgggaagaagaacaggaagaggctggacagcagagctgaggagggctctgtgcaggccatcacagagggcaaggtgaagaaggaggcccggaccctgagtgacttcaacagcctcatcagcagcccccacctgggccgggagaagaagaaggtgaagagccagaaggaccagctgaagagcaagaagctgaacaagaccaatgagttccaggacagcagcgagagcgagcctgagctgttcatctctggagatgagctgatgaaccagagccagggcagcaggaagggctggaagagcaagaggagccccagggctgctggggagctggaggaggccaagtgccggcgggccagcgagaaggaggatggccgcctgggcagccagggctttgtgtatgtgatggccaacaagcagcccctgtggaatgaggccacccaggtgtaccagctggactttggaggccgggtgacccaggagagcgccaagaacttccagatcgagctggagggccggcaggtgatgcagtttggaagaattgatggcagcgcctacatcctggacttccagtaccccttctctgctgtgcaggcctttgctgtggccctggccaacgtgacccagaggctgaagtag

SEQ ID NO: 203396 - DNA, 4632 bp, Artificial Sequence
  derived and/or modified sequence
atgtacgccgccgtggagcacggccccgtgctgtgcagcgacagcaacattttgtgtctgagctggaagggaagggttccgaagtctgagaaggagaagcctgtttgccgccggcgctactacgaagaggggtggctcgcgacaggcaatggtcggggagtcgtgggtgttacattcacctcgtctcactgcagacgcgatcggtccactccccagcgcatcaacttcaacttgcgtgggcacaatagtgaagtggtgctggtacggtggaacgaaccttaccaaaaactcgccacttgtgacgccgatggcggcatcttcgtttggatccaatacgagggccgttggagcgtagaattggtgaacgaccgaggagcccaagtctctgacttcacctggtcacacgatggtacccaggctctgatcagctatcgtgatggatttgtattagtcggcagcgtgtcaggccagcgccattggagctcagaaattaacctcgagagccagatcacctgtggcatatggacacccgatgatcagcaagtactctttggcaccgccgatggccaagtcatcgttatggactgccacggtcgcatgctagcacatgtcctgcttcacgagtctgatggcgtcctcggtatgtcttggaattatcccattttccttgtggaagattcttcggaatcagacacagacagcgatgactacgcgccacctcaggatggtcccgcagcctaccctattcccgtccagaacatcaagcccttactgactgtgagttttacctccggcgacatctcactaatgaataattatgatgacctcagcccaactgtgattcgctcagggcttaaggaggtggtggcacagtggtgcacccaaggtgatttactggccgtggccggaatggagcgccagactcagctgggcgagttgcccaacggtccactgctcaagtcggccatggttaagttctacaatgtgcgcggcgaacatatttttacactcgacacgctggtgcagcgacccattatcagtatttgctggggccacagagatagccgtctgcttatggcctccggtccagcgttgtatgtggtacgcgtggaacaccgtgtgagctccttacagttgttgtgtcaacaagccatcgctagtacactgcgtgaggataaggatgtctctaaactgacactcccaccccggctttgcagctacctgtctaccgcattcatcccaactatcaagccacccattcccgaccccaacaacatgagggattttgtaagctacccaagtgccgggaacgaacggctccactgcacaatgaaaagaactgaggacgatcctgaagtgggcggaccgtgttacaccctctacttggagtacctcggtgggttggttcctatcctcaagggacgccgaattagcaagctccgccccgaattcgtgattatggatccacgcacagattcaaaaccagatgaaatctacggcaacagtcttattagtacagttatcgattcatgtaactgtagcgacagctctgatattgagttatcggacgactgggccgcgaaaaaatcaccaaaaattagcagagctagcaagtctcctaaattgccgaggatctccatcgaggcgaggaagtcaccaaagcttccccgcgcagcccaagagctctcaagaagcccccgtctcccacttcgcaagccttcagtggggagtccatccctgacccgcagagaatttccattcgaagatatcactcaacataactatctcgctcaggtgacaagcaatatttggggaacaaagtttaaaatcgtcggtctggctgcttttttgcccaccaacctgggcgctgtgatttataagacgagcttattgcatctgcagccccggcagatgacaatctatctacccgaagtgcgcaaaataagtatggactacattaatttacccgtgtttaacccaaacgtcttctctgaggacgaggacgacctgcctgtgaccggtgcatcaggagtccctgaaaatagtccgccctgcactgtaaacattcccatcgcaccaatacatagctccgcgcaggccatgtctcccacccagagcattggcctcgtgcagagcctgttggccaaccagaacgtgcagcttgacgtgctcacgaatcaaacgacagctgtgggcactgcggaacatgccggcgattccgccacccagtacccggtttccaacagatattcaaaccccggacaggtgatctttggatccgtggagatgggccgaattattcagaaccctccgcctctcagcctgccgccccccccccagggtccaatgcagttgtcaacggttgggcatggcgaccgtgaccacgagcatctccagaagtccgccaaggctttgcgacccaccccacagctagccgctgagggtgacgccgtcgtttttagcgccccccaggaggtccaggtcaccaagatcaaccccccaccgccatatccgggcacaatcccagcggcccctactactgccgcccctccacccccgctgcctccacctcagcctcccgtggacgtgtgtctcaagaaaggcgatttcagtctgtatcccacatctgtgcattatcagacgcctctgggatatgagaggatcactacattcgattcgtctgggaatgtcgaagaggtctgccgaccacggacgagaatgctatgcagtcaaaatacctacacacttcccggtcctggcagctccgccacgctgagactgactgctacagagaagaaagtaccacaaccgtgcagtagtgcgaccctcaacaggctcaccgtcccgaggtattcaataccaaccggggatcctcctccctacccagagatcgcctcccagctggctcagggacgaggagccgcccagcgatcagacaactcactgatacatgcaacgctgcgccggaacaatagagaagcaacactgaagatggcgcagttggccgacagtccaagggctcccttgcagcccctcgctaaatccaaggggggacctggaggagttgtgactcagctcccagctagacccccccccgctctgtatacctgttctcagtgctctgggacaggaccttcctcccaacctggtgcatcccttgcacatacggcatcagcctcgccacttgcctcccagagcagttatagcctgctgagcccccccgacagcgctagggaccgcaccgattacgtcaactcagcattcacggaggatgaagcacttagccagcactgccaactcgaaaagcctttgagacatcctccgctgcccgaagcagccgtgaccctgaagcggccccccccatatcagtgggatccaatgctgggagaggacgtgtgggtgcctcaggagcgcacagcccagaccagcggccccaaccccctgaagcttagctcactgatgttgagtcagggtcaacaccttgacgtttcacgcttgccctttatctcacccaagagtcccgcctcccccacagctacctttcagacggggtatggaatgggggtgccctatcctggatcctacaacaacccaccactgcccggtgtgcaggctccttgttcccccaaggacgcattgagccctacacaattcgcacagcaggagcccgcggtcgttctccaacctctgtatcccccctccttgtcttattgcacactgcccccgatgtaccctggctcatccacctgctccagcctccagcttccaccagtggcgctacacccttggagttcctactccgcatgcccccccatgcagaaccctcaggggacgttgcccccaaaacctcacctggttgtggagaagcctctggttagccccccacctgcagatctacagtcacacttgggcacagaggttatggtggagactgcagacaacttccaagaagtcctgtcactcacggaatcacctgtccctcaacgcaccgagaaattcgggaaaaaaaatagaaagcggctggactcaagagcagaggaaggcagcgttcaagctattacggaaggcaaggttaagaaggaggctcgcacccttagcgattttaactcacttattagctctccccacctagggcgagaaaagaagaaggtgaagagccagaaagaccagctgaagtcaaaaaaacttaacaagaccaacgagttccaagactcatctgaatctgaacccgagctctttatatcaggcgatgagctcatgaatcagagccaaggaagcaggaaggggtggaaatcgaagcgaagcccacgagccgccggagaactggaagaggctaagtgcagacgggcaagcgagaaagaggatgggagactggggtctcagggctttgtttacgtgatggctaataagcagccactctggaatgaggcaacgcaggtatatcaactcgacttcggagggagggtgactcaggagagcgctaaaaatttccagattgaactcgaaggtcgccaggtcatgcaattcggcaggattgacggtagtgcctacattttggactttcagtaccctttcagcgctgtgcaggcgttcgcagtcgcactggcaaacgtcactcaacgattgaagtag

SEQ ID NO: 203397 - DNA, 4631 bp, Artificial Sequence
  derived and/or modified sequence
atgtacgctgccgtagagcacggcccagtcctctgttccgattccaatatcttgtgtctttcatggaagggcagagtccccaagtccgagaaggagaagcccgtgtgcaggagaaggtattacgaagagggatggctcgccacaggaaacgggcgtggggtagtgggagtcacattcacttcaagccattgccgacgagaccgcagcaccccccaaaggattaacttcaatcttagaggacacaattcagaggtcgttctggtgcgctggaatgagccataccagaagctcgccacatgtgacgccgatgggggaatatttgtgtggatacagtacgaaggccgatggagcgtggagctggttaacgataggggcgcacaggtgagcgattttacatggagtcatgacggcactcaggcgcttatcagctatcgcgacggtttcgtgcttgtcggctccgtctccggccagcggcactggtcgtcggaaatcaatctggagagtcagatcacctgcggcatttggacgcccgacgaccaacaggtgttgtttggaaccgcagatggccaggtaattgtgatggattgtcatggccgaatgctagcacatgtcctccttcacgagagcgatggagttctgggaatgtcctggaactaccccattttcctggttgaggacagcagtgagagcgacaccgacagcgatgattatgctccacctcaggacggccctgctgcataccctattcctgttcagaacatcaagccgctcctgacagtgtcttttacatccggggacatcagcctgatgaataattatgatgatctctcccccacggtgatcaggagtggactaaaggaagttgtcgctcaatggtgtacacagggagatcttcttgcggttgccggaatggagaggcagactcagttgggcgagttgcctaacggtccattactgaagtcagctatggtgaagttctataacgtgaggggtgagcacatcttcaccctggatacacttgtgcagaggcccatcatttctatttgctgggggcacagggattctcgattgttgatggcctctggccctgccctttatgttgtgcgtgtcgagcatcgcgtttcgtctctgcaacttttatgccagcaggctattgcttccaccctacgggaggataaggacgtgtccaagctcacactcccccctagactgtgttcttatttaagcacggcttttatacccactatcaagccccctattcccgaccccaataatatgcgggatttcgtcagttaccctagtgccggaaacgaacggcttcattgcaccatgaaaaggactgaagacgaccccgaggttggtgggccttgctacaccctgtacctcgagtaccttggtggactggtgccaattttgaagggcaggagaatttctaagctccgacccgaattcgtcatcatggacccaaggacggatagcaaacccgacgagatctatggaaattccctgatatccaccgtgatagattcctgtaactgttccgattcatcagacatcgagctgtccgacgactgggcggctaaaaaaagccccaaaatctcccgggctagcaaaagccctaagttgccacggataagtattgaagcacgcaaatctcccaagttaccccgagctgcgcaggagctttctagatcgcctcggctgcccctgagaaagccaagcgttggaagcccgtctctgactaggagagagttcccatttgaagacattacacagcataactacttggcccaggtgacatctaatatctgggggacaaagttcaaaattgttggtctggccgcattcctacctaccaatctcggcgcagtgatctacaagacttccctgctgcaccttcagcctcggcagatgaccatatacttgccagaagtacggaagatctccatggattacatcaacctgcccgtgttcaacccaaacgtgttttccgaagacgaagatgacctacccgtgacaggagcatctggcgtccctgaaaacagccccccatgtacagtaaatattcccatagcacctattcacagcagtgcccaggccatgtcccctactcaaagcatcggtctggtccagtcattgctggctaaccagaacgttcaactggatgttctaaccaatcagacgaccgccgttgggactgcggaacacgccggagattcggctacccagtaccccgtttcaaacagatacagcaacccaggccaggtgatattcggatctgtcgagatggggagaattatccagaaccccccacctctgagcctgcctccccctccccaaggacccatgcagctcagcacagtgggacacggcgatcgggaccatgagcacctacaaaaatctgccaaagccctgcgccctacgccacagttggcggctgaaggcgatgccgtggtattcagcgcaccccaagaggtccaagtgacaaagatcaacccccctcccccataccccggaacaatcccggctgcacctaccacagcggcacctcctcctcctctccctccacctcagcctcccgtggatgtgtgcctgaagaagggagacttctccctctacccgacctccgtgcattatcagactccgttgggatatgaaagaatcaccactttcgactcttccgggaacgttgaagaggtctgtaggcccagaacacgcatgttgtgtagccagaatacatacactttgccagggcctggtagtagtgccactctaaggctcaccgctactgagaaaaaggtaccccagccatgcagcagtgccaccctcaaccgacttactgtccccagatattcaatcccaaccggtgatccaccaccttatccagaaattgccagccagttagcccagggtcggggagccgctcagcgatcagacaattcacttattcacgccactcttcggagaaacaaccgggaagctacgctgaagatggctcaactagctgattcccctcgcgctccccttcagcctttggcaaaatcaaaaggcggaccgggaggggtggtcacacagctgcccgcacggcctccccctgccctgtacacatgctcccagtgctctggaactggtccatccagtcaaccaggtgcgagcctggcccacaccgcctccgccagcccactcgcctctcaatcaagctacagtctgctgagtccccctgattccgccagagaccgcacagactacgtgaactctgcctttacagaggacgaggcactctctcagcattgccagctcgagaagccattgaggcaccctcctctgcctgaagccgctgtgacattgaagcgaccccctccttatcagtgggatccgatgctcggggaggacgtgtgggtgcctcaggagcgcacagcccaaaccagcgggccaaaccccttgaagctttcttccttaatgctctcccaagggcagcacctggatgtttctaggctgcccttcattagcccaaagtcccctgcttctcctacagcaacttttcagactggttacggtatgggggttccatacccgggatcttataacaatccaccgctccctggcgttcaggcaccctgtagtcctaaggatgccctgagccctacccaattcgcccagcaagaacctgcagtggtccttcaacccctttaccctccttcactgtcatactgcaccttacccccaatgtacccaggctcctcgacatgctcgtcactacagctgcctcctgttgccctgcatccatggtcttcctattctgcatgcccacctatgcaaaatccacaagggactctacctcctaagccccacctggttgtggagaagccgctggtcagcccaccccctgctgaccttcagtcgcacctgggcaccgaggtgatggttgaaacggccgacaattttcaggaggtgctgtcgctgactgaaagccccgtgccacagagaactgagaaatttggcaagaaaaaccggaagcggctggacagccgggctgaagaagggtcagtacaggccattaccgagggcaaggtgaagaaggaagccagaacgctgtcagacttcaacagtttaatcagttccccgcatctcgggagggaaaaaaaaaaagttaagagtcaaaaagaccagttgaagtccaaaaagttgaacaaaactaatgagtttcaggacagcagcgagtccgaacctgaactgttcatatctggggacgagcttatgaatcagtcacagggatctcggaaagggtggaaatccaaacgcagccctcgggctgctggtgaactggaggaggctaaatgtagacgtgcctctgagaaggaagatgggcgactgggcagccaagggtttgtttacgttatggcaaataagcagcctttgtggaatgaggccacacaggtttaccaactagacttcggaggacgtgtcacccaggaatcagcgaagaactttcagattgaactggagggcaggcaggtgatgcaattcgggagaatcgacggatctgcctacattctcgattttcagtacccatttagcgccgtgcaggccttcgcggtggccctcgcgaacgtgactcaacgcctcaagta

SEQ ID NO: 203398 - protein, 914 aa, Artificial Sequence
  derived and/or modified sequence
MASESSPLLAYRLLGEEGVALPANGAGGPGGASARKLSTFLGVVVPTVLSMFSIVVFLRIGFVVGHAGLLQALAMLLVAYFILALTVLSVCAIATNGAVQGGGAYFMISRTLGPEVGGSIGLMFYLANVCGCAVSLLGLVESVLDVFGADATGPSGLRVLPQGYGWNLLYGSLLLGLVGGVCTLGAGLYARASFLTFLLVSGSLASVLISFVAVGPRDIRLTPRPGPNGSSLPPRFGHFTGFNSSTLKDNLGAGYAEDYTTGAVMNFASVFAVLFNGCTGIMAGANMSGELKDPSRAIPLGTIVAVAYTFFVYVLLFFLSSFTCDRTLLQEDYGFFRAISLWPPLVLIGIYATALSASMSSLIGASRILHALARDDLFGVILAPAKVVSRGGNPWAAVLYSWGLVQLVLLAGKLNTLAAVVTVFYLVAYAAVDLSCLSLEWASAPNFRPTFSLFSWHTCLLGVASCLLMMFLISPGAAGGSLLLMGLLAALLTARGGPSSWGYVSQALLFHQVRKYLLRLDVRKDHVKFWRPQLLLLVGNPRGALPLLRLANQLKKGGLYVLGHVTLGDLDSLPSDPVQPQYGAWLSLVDRAQVKAFVDLTLSPSVRQGAQHLLRISGLGGMKPNTLVLGFYDDAPPQDHFLTDPAFSEPADSTREGSSPALSTLFPPPRAPGSPRALNPQDYVATVADALKMNKNVVLARASGALPPERLSRGSGGTSQLHHVDVWPLNLLRPRGGPGYVDVCGLFLLQMATILGMVPAWHSARLRIFLCLGPREAPGAAEGRLRALLSQLRIRAEVQEVVWGEGAGAGEPEAEEEGDFVNSGRGDAEAEALARSANALVRAQQGRGTGGGPGGPEGGDAEGPITALTFLYLPRPPADPARYPRYLALLETLTRDLGPTLLVHGVTPVTCTDL

SEQ ID NO: 203399 - DNA, 2745 bp, Artificial Sequence
  derived and/or modified sequence
atggccagcgagagcagccccctgctggcctacagactgctgggcgaggagggcgtggccctgcccgccaacggcgccggcggccccggcggcgccagcgccagaaagctgagcaccttcctgggcgtggtggtgcccaccgtgctgagcatgttcagcatcgtggtgttcctgagaatcggcttcgtggtgggccacgccggcctgctgcaggccctggccatgctgctggtggcctacttcatcctggccctgaccgtgctgagcgtgtgcgccatcgccaccaacggcgccgtgcagggcggcggcgcctacttcatgatcagcagaaccctgggccccgaggtgggcggcagcatcggcctgatgttctacctggccaacgtgtgcggctgcgccgtgagcctgctgggcctggtggagagcgtgctggacgtgttcggcgccgacgccaccggccccagcggcctgagagtgctgccccagggctacggctggaacctgctgtacggcagcctgctgctgggcctggtgggcggcgtgtgcaccctgggcgccggcctgtacgccagagccagcttcctgaccttcctgctggtgagcggcagcctggccagcgtgctgatcagcttcgtggccgtgggccccagagacatcagactgacccccagacccggccccaacggcagcagcctgccccccagattcggccacttcaccggcttcaacagcagcaccctgaaggacaacctgggcgccggctacgccgaggactacaccaccggcgccgtgatgaacttcgccagcgtgttcgccgtgctgttcaacggctgcaccggcatcatggccggcgccaacatgagcggcgagctgaaggaccccagcagagccatccccctgggcaccatcgtggccgtggcctacaccttcttcgtgtacgtgctgctgttcttcctgagcagcttcacctgcgacagaaccctgctgcaggaggactacggcttcttcagagccatcagcctgtggccccccctggtgctgatcggcatctacgccaccgccctgagcgccagcatgagcagcctgatcggcgccagcagaatcctgcacgccctggccagagacgacctgttcggcgtgatcctggcccccgccaaggtggtgagcagaggcggcaacccctgggccgccgtgctgtacagctggggcctggtgcagctggtgctgctggccggcaagctgaacaccctggccgccgtggtgaccgtgttctacctggtggcctacgccgccgtggacctgagctgcctgagcctggagtgggccagcgcccccaacttcagacccaccttcagcctgttcagctggcacacctgcctgctgggcgtggccagctgcctgctgatgatgttcctgatcagccccggcgccgccggcggcagcctgctgctgatgggcctgctggccgccctgctgaccgccagaggcggccccagcagctggggctacgtgagccaggccctgctgttccaccaggtgagaaagtacctgctgagactggacgtgagaaaggaccacgtgaagttctggagaccccagctgctgctgctggtgggcaaccccagaggcgccctgcccctgctgagactggccaaccagctgaagaagggcggcctgtacgtgctgggccacgtgaccctgggcgacctggacagcctgcccagcgaccccgtgcagccccagtacggcgcctggctgagcctggtggacagagcccaggtgaaggccttcgtggacctgaccctgagccccagcgtgagacagggcgcccagcacctgctgagaatcagcggcctgggcggcatgaagcccaacaccctggtgctgggcttctacgacgacgcccccccccaggaccacttcctgaccgaccccgccttcagcgagcccgccgacagcaccagagagggcagcagccccgccctgagcaccctgttccccccccccagagcccccggcagccccagagccctgaacccccaggactacgtggccaccgtggccgacgccctgaagatgaacaagaacgtggtgctggccagagccagcggcgccctgccccccgagagactgagcagaggcagcggcggcaccagccagctgcaccacgtggacgtgtggcccctgaacctgctgagacccagaggcggccccggctacgtggacgtgtgcggcctgttcctgctgcagatggccaccatcctgggcatggtgcccgcctggcacagcgccagactgagaatcttcctgtgcctgggccccagagaggcccccggcgccgccgagggcagactgagagccctgctgagccagctgagaatcagagccgaggtgcaggaggtggtgtggggcgagggcgccggcgccggcgagcccgaggccgaggaggagggcgacttcgtgaacagcggcagaggcgacgccgaggccgaggccctggccagaagcgccaacgccctggtgagagcccagcagggcagaggcaccggcggcggccccggcggccccgagggcggcgacgccgagggccccatcaccgccctgaccttcctgtacctgcccagaccccccgccgaccccgccagataccccagatacctggccctgctggagaccctgaccagagacctgggccccaccctgctggtgcacggcgtgacccccgtgacctgcaccgacctgtag

SEQ ID NO: 203400 - DNA, 2745 bp, Artificial Sequence
  derived and/or modified sequence
atggcctctgagagctcgcctctgctggcgtaccggctgttaggcgaagagggcgtggcattacccgccaatggtgctgggggcccaggaggggctagcgcacgtaagctgtccacgttcctcggtgtggttgttcccaccgtcctgtccatgttttctatagtggtttttctaaggatcgggtttgtggtaggccacgcaggtcttcttcaagcattggcaatgcttctcgtcgcttactttatactagccttgacagtgctgtccgtttgtgccatcgcaaccaatggagctgtgcaaggtgggggggcctactttatgatctctcgcaccctcgggccagaagttggaggatccatcggactaatgttctacttggcaaatgtctgtggctgtgcggttagcctcttggggctggtagaatccgtccttgatgtgttcggtgccgatgccactggaccttcaggcttaagagtgctaccccagggctacggctggaacctgctgtatggtagcctcctgttgggtctggtaggaggcgtgtgcaccctgggtgccggtctctatgcgagggcatcattcctcacatttctgctcgtctccggctctctcgcaagcgtgctcataagtttcgtggccgtgggccctcgcgacatcaggctcacccctagacccgggcctaacggctcttctctgcccccccggtttggacatttcactgggtttaatagctctacactgaaagacaatctgggagctgggtacgctgaggactacacaaccggggcagtgatgaacttcgccagtgtgttcgcagtgctctttaacggatgcacggggataatggccggcgcaaacatgagtggcgagttgaaagacccatcccgggcaatccctctgggtactatcgttgctgtggcctatacattctttgtctacgtcttgctcttcttcctcagttctttcacatgcgacagaactctgcttcaggaggactatggatttttcagggctatctctctctggccgcccctggtgttgataggaatttatgcaaccgccctgagcgcttctatgagctcccttattggggctagcaggattctacacgccctggccagagatgacttgttcggtgtgatcctggctccagccaaggtggtcagtcgcgggggcaacccctgggcagccgtcctatattcatggggactggtgcaactagtccttctggctggaaagctcaacacacttgccgcggtagtgaccgtcttctatctggtcgcttatgcagctgtggacctgtcatgtctgagtttggaatgggcatcggccccaaattttaggcccaccttcagtctttttagctggcacacctgtctcctaggggtggcttcatgccttctcatgatgttcctcatcagccctggcgccgcaggcggcagcctgctgcttatgggcctcctcgctgcactacttacagcgcggggagggccttcatcctggggctatgtgagccaagctttgctcttccaccaggtccgtaagtacctgcttcgtctggacgtgcggaaagatcacgtgaagttttggcggcctcaactgctgcttctagtcggtaaccccagaggcgctctgcctctcctgagactcgcgaaccagctgaaaaaaggggggctttatgtcctgggacatgtaacgctgggtgaccttgattccctcccatccgatcctgtccaaccccagtacggggcgtggctttctctggtggacagagcacaggttaaggcttttgtcgatcttaccctgtcgccttctgtgcggcagggcgcccagcatctcctcaggattagtggcctgggcggcatgaaaccaaacactctggtgctgggcttctacgacgacgcacctcctcaggatcacttcttgaccgaccccgccttttccgaacctgccgattccacaagggaaggatcttccccagctctgagtactctctttccccctcctcgggcccctggttcgccccgggcactgaatccccaagattatgtcgcaacggttgccgatgcattaaagatgaataagaacgtagttctggctcgagcatctggagctttgccacccgaacgcctcagcaggggaagcggcggaactagtcagctgcaccacgtcgatgtttggccccttaacctgctgaggccccgcggaggacctgggtatgtggacgtgtgcggcctctttctgttgcagatggcgactatccttggaatggttcccgcctggcattcggccaggctgagaatctttctctgcctggggccaagagaggccccaggcgcagctgagggcagactcagagccctcctgagtcagttgaggataagagctgaagttcaggaggtggtgtggggtgaaggcgccggagccggggaaccagaggcggaagaggagggggacttcgtgaattccggccggggggatgccgaagctgaggccctggctagaagcgcaaatgctctggtgcgcgcccagcagggcagagggactggtggcggacctggggggcccgaggggggtgacgctgagggcccaatcacagcccttactttcctgtacctgccccgacctcccgcagatcccgccagatacccacggtatttggcccttctcgagaccctcactagggaccttgggcctacgctgcttgttcacggcgtcacgccagtgacatgcactgacctgtag

SEQ ID NO: 203401 - DNA, 2745 bp, Artificial Sequence
  derived and/or modified sequence
atggccagcgagagcagccccctgctggcctaccgcctgctgggggaggagggcgtggccctgcctgccaacggggccggcggccctggaggagccagcgccaggaagctgagcaccttcctgggcgtggtggtgcccaccgtgctgtccatgttcagcatcgtggtgttcctgcgcatcggctttgtggtgggccatgctggcctgctgcaggccctggccatgctgctggtggcctacttcatcctggccctgactgtgctgtctgtgtgtgccatcgccaccaacggggctgtgcagggcggcggggcctacttcatgatcagcaggaccctgggccctgaggtgggcggcagcatcggcctgatgttctacctggccaacgtgtgtggctgtgctgtgtccctgctgggcctggtggagagcgtgctggatgtgtttggagcagatgccaccggccccagcggcctgcgggtgctgccccagggctacggctggaacctgctgtatggcagcctgctgctgggcctggtgggcggcgtgtgcaccctgggcgccggcctgtatgcccgggccagcttcctgaccttcctgctggtgtctggcagcctggcctctgtgctgatcagctttgtggccgtgggcccccgggacatccggctgacccccaggcctggccccaacggcagcagcctgcccccacgcttcggccacttcaccggcttcaacagcagcaccctgaaggacaacctgggcgccggctatgcagaggactacaccactggagctgtgatgaactttgcctctgtgtttgctgtgctcttcaacggctgcaccggcatcatggccggggccaacatgtctggagagctgaaggaccccagccgggccatccccctgggcaccatcgtggccgtggcctacaccttctttgtgtatgtgctgctcttcttcctgagcagcttcacctgtgacaggaccctgctgcaggaggactatggcttcttccgggccatcagcctgtggccacccctggtgctgattggcatctatgccacagccctgagcgcctccatgagcagcctgattggagccagccgcatcctgcacgccctggccagagatgacctgtttggagtcatcctggccccagccaaggtggtgtccagaggaggcaacccctgggccgctgtgctgtacagctggggcctggtgcagctggtgctgctggccggcaagctgaacaccctggccgctgtggtgaccgtcttctacctggtggcctatgctgctgtggacctgagctgcctgagcctggagtgggccagcgcccccaacttccggcccaccttcagcctcttctcctggcacacctgcctgctgggcgtggccagctgcctgctgatgatgttcctgatcagccctggagctgctgggggcagcctgctgctgatgggcctgctggccgccctgctgacagcccggggcggccccagctcctggggctacgtgtcccaggccctgctcttccaccaggtgaggaagtacctgctgcggctggatgtgaggaaggaccacgtgaagttctggaggccccagctgctgctgctggtgggcaaccccaggggggccctgcccctgctgcggctggccaaccagctgaagaagggcggcctgtatgtgctgggccacgtgaccctgggggacctggacagcctgcccagcgaccctgtgcagccccagtacggggcctggctgagcctggtggaccgggcccaggtgaaggcctttgtggacctgaccctgagccccagcgtgcggcagggcgcccagcacctgctgcgcatcagcggcctgggcggcatgaagcccaacaccctggtgctgggcttctatgatgatgccccaccccaggaccacttcctgacagatcctgccttcagcgagcctgctgacagcacccgggagggcagcagccctgccctgagcaccctcttccccccaccccgggcccctggcagcccccgggccctgaacccccaggactatgtggccaccgtggctgatgccctgaagatgaacaagaatgtggtgctggcccgggccagcggggccctgcccccagagcggctgagccggggcagcggcggcaccagccagctgcaccacgtggatgtgtggcccctgaacctgctgcggccccggggcggccctggctacgtggatgtgtgtggcctcttcctgctgcagatggccaccatcctgggcatggtgcctgcctggcacagcgcccggctgcgcatcttcctgtgcctgggcccccgggaggcccctggagctgctgagggccgcctgcgggccctgctgagccagctgcgcatccgggcagaggtgcaggaggtggtgtggggcgagggcgctggggccggggagcctgaggccgaggaggagggggactttgtgaacagcggcagaggagatgctgaggccgaggccctggcccggagcgccaatgccctggtgcgggcccagcagggccggggcactggaggcggccctgggggccctgagggcggagatgctgagggccccatcacagccctgaccttcctgtacctgccccggcccccagctgaccctgcccgctacccccgctacctggccctgctggagaccctgacccgggacctgggccccaccctgctggtgcacggcgtgacccctgtgacctgcacagacctgtag

SEQ ID NO: 203402 - DNA, 2745 bp, Artificial Sequence
  derived and/or modified sequence
atggccagcgagagcagccccctgctggcctaccggctgctgggcgaggagggggtggcattgcccgctaacggggccgggggacccggaggcgccagcgctcgaaagttgtctactttccttggcgtggtggtgcctacagtcctgtcaatgttctccatcgtggtgtttttgagaatcggcttcgtggtaggccacgccggactcctccaagcactggctatgctgctggtcgcttacttcattctcgccctgactgtactgagcgtgtgcgcaatagcaacgaatggcgccgtgcaaggcggcggagcctatttcatgatttccagaacattagggcccgaggtgggtggctcaatcggtctgatgttttatcttgctaacgtttgcgggtgcgctgtgagtttgctgggcctcgtagagtcagtcctcgacgtatttggcgccgacgcgactggccctagcggtctgcgagtcctgccccagggctatggatggaatctgctttacgggtcgctgcttttggggctggttggtggggtgtgcaccttgggagcgggtctctacgctcgcgctagctttctgacatttctccttgtctccggctccctggcaagtgtgctcatctctttcgtggccgtgggtcctcgcgacattcggctgaccccaaggcccgggccaaacggttcttcgttgcctccacgctttggccactttactggattcaatagctccactcttaaagataacctgggagctgggtacgccgaagactatactacgggcgctgttatgaatttcgcatctgtcttcgccgttctgttcaacggatgcacgggaattatggctggcgcgaatatgtctggcgagttgaaggacccatcccgcgctatccctctcggaacaatagtggccgtggcttatacttttttcgtgtacgtactgctatttttcttatcctcgttcacgtgtgatcgcaccctcttacaagaggactatggttttttccgcgccattagtctctggcctcctcttgtgctgatcggcatttacgctactgccttaagcgcatcgatgtctagtttgattggagcaagtcgaatcctgcatgcactggcccgagatgacttattcggcgtaattctggctccggctaaggtggtatcacgcggtggcaatccttgggctgctgtactctactcttggggactggtgcaactggttttgcttgctggaaaactgaataccctcgcggcagtggtcaccgtgttctacttggttgcctatgccgccgtggacctgagctgtctgtccctggagtgggcaagtgctccaaattttagacccaccttcagcctgttcagttggcacacctgcctgctgggtgttgcctcatgtctgcttatgatgttcctcatctccccaggcgccgctggcggatccctgctgttgatggggcttctcgcggccctcctgacagccagggggggtccttcttcctgggggtatgtatctcaggcactcctgttccatcaggtgagaaaatatctattaaggcttgacgtcagaaaagatcatgtgaagttttggcgcccacagctgttgctgctggtggggaatccgcgcggcgcactcccattacttcgacttgccaaccaactgaaaaaaggggggttgtatgtactcggacacgtcacactgggagacctcgattcgcttccctcagacccagtgcagccgcaatatggcgcatggttgtcattagtggatcgcgctcaggtgaaggcgttcgtggacctgacactgtcgcccagcgtaagacaaggagctcagcacctcttgagaattagcgggctgggcgggatgaaacctaacaccctcgtcctgggattttacgacgacgcgcctccgcaagatcatttccttacagacccagcattctccgagcccgcagactcaaccagagagggatcttctccagcactctcaacgctgttcccccctccaagagctccagggtcaccacgcgctctcaaccctcaggactatgttgcgactgtggcagatgccctgaagatgaacaagaatgtggtccttgccagagcctccggtgccctgccaccggaaaggcttagcagaggatctggtggcacaagccagttgcatcatgtggatgtgtggcccctgaatctcctccggccccgcggcgggccaggatatgtcgacgtgtgcggtctgtttctgctccaaatggctaccattcttgggatggtgcctgcctggcattctgccagactacgcattttcctctgtctgggcccacgggaggctcccggagctgccgaaggaaggttgagagccttactaagccagctgagaatacgagccgaggtccaggaggttgtatggggcgagggggccggtgctggcgaaccagaggccgaggaagaaggcgattttgtcaactcaggacgtggcgacgcggaggcagaggccctcgcgcgctcagccaatgcattggttagggctcaacagggtaggggaactggggggggccctgggggaccagaaggcggagacgctgaaggacctatcaccgcgcttactttcttgtatttaccgaggccccctgccgatcccgcccggtacccccgctacctggccctccttgaaaccctgacaagagacttgggaccgaccctccttgtgcatggcgtgaccccagtgacttgtactgacctgtag

SEQ ID NO: 203403 - DNA, 2745 bp, Artificial Sequence
  derived and/or modified sequence
atggcatccgaatcttcccctctgctggcctacaggctcctgggcgaagagggcgtggctctgcctgccaatggagccggagggcctggcggagcttctgccaggaaactctcaactttccttggagttgtggttccaactgtgctgtcgatgttttccatcgtcgtgttcctgcgcattggtttcgtggtgggccacgccggacttctgcaggccctagcaatgctgcttgtagcctattttatcctcgctctgactgtgttgtccgtatgtgcaattgcaactaacggtgctgtgcaaggcggtggagcatacttcatgatttccaggacgcttggtcccgaggtgggcggttctattgggctcatgttctacctggccaacgtctgtggctgcgctgtatcactgctgggcctcgttgaatctgtgctcgatgtattcggagccgacgctacagggccttccgggctccgggtgctgccccaggggtacgggtggaacttgctgtacggaagtctgctcctggggcttgtgggaggtgtttgtactctcggggcagggctttacgcacgggcttcatttctgacatttcttttagttagcgggagcctggcatctgtgctaatctcattcgtggccgttggcccacgggatattcggcttacccctcggccaggtcctaacggttcatccctccctccgcgtttcggccacttcacagggtttaatagtagtactctcaaggacaacctcggcgcaggatacgcagaagattatacgactggcgcagtaatgaatttcgcatcagtgtttgccgtgctcttcaatggatgtaccggaattatggccggagcaaatatgagcggcgagctgaaagatcctagccgggcaatcccattgggaacaattgtcgcggttgcctatactttttttgtgtacgtccttctgtttttcctgtcatcttttacctgcgatcggacattgctccaagaggattatggcttcttccgggcaattagtctttggccccctttggtgctgattgggatctacgctaccgcactctctgcctcaatgtccagcctcatcggggcttcacgtattctgcacgccctggctcgggacgacctttttggggtcatacttgcccctgcaaaggtcgtatcaaggggaggcaatccttgggctgcagttctttatagttggggattggttcagctggtgctgcttgccggtaagcttaacacactggctgcagttgtgacggtcttttaccttgtagcctatgctgccgttgaccttagctgtcttagtctggagtgggcatcagccccaaacttccgccctaccttttcactctttagctggcacacctgccttctgggtgtggccagctgcctcctgatgatgtttcttatctcccccggagccgctgggggaagcctgctgttaatgggtctcttggcggctctgctcaccgcacgcggagggcctagtagttgggggtacgtgagtcaggctctcttgtttcaccaagtgcggaaatatctactaagactagatgttcgaaaggatcatgtcaagttctggaggccgcagttgctcctgttagtcggtaacccaagaggggcactccccctactgagactggctaaccagctgaagaagggcggactgtatgtcctgggccacgttactctgggcgatcttgattccctcccatcggatcccgtgcagccccaatatggcgcatggctgtctcttgtcgatcgcgcacaggttaaggctttcgttgacctgactctcagcccttctgtgcgccagggagcgcagcacctcctgaggatcagtggcctgggcggtatgaagccaaatacattagtactcggtttctacgacgatgcacctccgcaggatcactttttgacggacccagccttcagcgagcccgcagactctacaagggaagggagttctcccgctctctcaacgttgttccccccacctcgggctccaggttctcccagggcattgaatcctcaagattacgttgccaccgtggccgacgccctgaagatgaataaaaacgtcgtcctggctagggcctccggggctctgcccccagagcgtctgagcaggggatcggggggaaccagccagctccaccacgtggatgtatggcccctgaatctgctacgccctcgagggggacccggttatgtagacgtatgcggattgttcttgctccagatggctaccattctgggcatggtccctgcctggcactctgcccgtttaaggatattcctgtgtctgggaccgagggaagcacccggagctgcagaaggacggctgcgcgctctcctgagtcagctccggattcgtgctgaagtgcaggaagtcgtctggggagagggcgctggcgcaggcgagcccgaggcagaggaagaaggagatttcgtgaactctggacggggtgacgctgaggctgaggcactcgccagaagcgcaaatgcactggtgcgggctcaacagggacggggtacaggtgggggaccagggggacccgagggcggagacgccgaagggccaatcacggccctaacattcctctatctgccacggccacccgctgacccggcacggtaccctcgctacttagctcttctggagacactgaccagagacctggggccaactctgttggtgcatggggtgacacctgtaacatgcaccgatctgtag

SEQ ID NO: 203404 - DNA, 3273 bp, Artificial Sequence
  derived and/or modified sequence
gtcttttccggcccccgtgcactctccgcccgagcggagccccccggctcgcggggatcgcccccgagcgctgcgtcctgcgggtcacctaacccatttgtggcttcctctacctgtgctcagccatggccagcgagagctcacctctgctggcctaccggctcctgggggaggagggggttgccctccctgccaatggggccgggggtcctggaggggcgtctgcccggaagctgtccaccttcctgggtgtggtggtgcccactgtcctgtccatgttcagcatagttgtttttctgaggattgggttcgtggtgggtcatgctgggctactgcaggccctggccatgctgctggttgcctacttcatcctggcactcaccgtcctctctgtctgtgccatcgccaccaatggagccgtgcaggggggcggagcctacttcatgatcagccgcacactggggcccgaggtcgggggcagcattgggctcatgttctacctggctaacgtctgtggctgtgccgtctccctcctggggctggtggagtctgtgcttgatgtcttcggggccgatgccacagggcccagtgggctccgggtcctgccccagggctacggctggaacctgctgtatggctccctgctgctgggccttgtgggtggggtctgcaccctgggagccggcctctatgcccgggcctcattcctcacattcctgctggtctctggctccctggcctctgtgctcatcagttttgtggctgtggggccgagggacatccgcttgactcctaggcctggccccaatggctcctccctgccgccccggtttggccacttcaccggcttcaacagcagtaccctgaaggacaacttgggcgctggctatgctgaggactacaccacgggagccgtgatgaattttgccagcgtctttgctgtcctctttaacggctgtacaggcatcatggctggggccaacatgtcaggggagctgaaggaccccagccgggcgatccctctgggcacgatcgtcgccgtcgcctacaccttcttcgtctatgtcctgcttttctttctctccagcttcacttgtgacaggaccctgctgcaggaagactatgggttcttccgcgccatcagcctgtggcccccactggtgttgatcggaatctatgccacagcgctctcagcgtccatgagctcgctcattggtgcctcccgcatcctccatgccctggcccgggatgacctctttggcgtgatcttggcaccggccaaggttgtgtcccgagggggaaacccctgggcagctgtactttattcttggggcctggtgcagctggtgctcctggctgggaagctgaacacactggctgctgtggtcactgtcttctacctggtggcctatgctgccgtggacctgtcctgcctgagcctggagtgggcctcggcccccaacttccgccccaccttcagcctgttctcctggcacacctgcctgctgggggtggcctcctgcctgctcatgatgttcctcatcagtcctggcgcggctggtggctccctgctcctcatgggtctgctggctgccctgctcaccgcgcgaggaggccccagtagctggggctatgtcagccaggccttgcttttccaccaggtgcgtaagtatctgcttcggctggacgtccggaaggatcacgtgaagttctggcggccccagctgctgctcctggtggggaacccccggggcgccctgcctctgctgcggttggccaaccagcttaagaagggggggctgtatgtgctgggccacgtcaccctgggagacctcgactccctgccctcggaccctgtacagccgcagtatggggcatggctcagcctggtggaccgtgcccaggtgaaggcttttgtggatctaaccctctcaccctccgtgcgccagggggctcagcatctgctgcgaatctccggcctcggtggcatgaagcccaacacgttggtcctaggtttctacgatgacgctccaccgcaggaccatttcctgacggacccggctttctctgagcctgcagacagcaccagggagggcagttccccagctctgagcaccctgttccctcctccccgggctcctgggagcccccgggccctcaatccccaggactatgtggccacggtggccgacgccctcaagatgaacaagaatgtggtgctggcccgggccagcggggccttgccccctgagcggctgagccgggggtctgggggcacctctcagctgcaccatgtggacgtgtggcccctcaacctgctgcggccccggggtgggcccggctatgtggatgtctgcggcctcttcctgctgcagatggcaaccatcttgggcatggtgcccgcttggcatagcgcccggctccggatcttcctgtgcctggggcctcgggaggcgcctggggcggccgaggggcggctgcgggcactgctgagccaactgaggatccgggctgaggtgcaggaggtggtgtggggcgagggggccggggctggggaacccgaggcggaggaggaaggggactttgtgaacagtgggcggggagacgcagaggcagaggccctggcacgcagcgccaacgccctggttcgggcccagcaggggcgcggcacaggaggagggccgggtgggccggagggtggggatgctgagggccccatcacagccctcaccttcctgtacttgcctcggccgccagccgatcccgcccgatacccccgctacctggcgctactggagactctaacccgagacctgggccccacgctgctggttcatggggtcactccagtcacctgcactgatctgtgatgcccctgcctccagggctaggtagagagggcccaggcaggcggcctatcctgatccttggaggaggaggaagaggaggccactgtggcccgtggccctgcccttgggacgtggagcccaggggaggtttgaaggggatcctgggcttgggcatcacgcccacctcctttggcagagggaccccagcacactaactctgggtggctgtccccaccgtgcaggggagggagtccgcagcctcccttcactggtgccttgatgctaggggccaggcctcctctgtgactctgggctacctcagtttccccattttggccagactcaccggcccactggggtggtgatgttttcgttctgttttatttttctaactctgctgaccatgaataaaagaccaaaacac

SEQ ID NO: 203405 - protein, 492 aa, Artificial Sequence
  derived and/or modified sequence
MGFQRRFFHQDQSPVGGLTAEDIEKARQAKARPENKQHKQTLSEHARERKVPVTRIGRLANFGGLAVGLGFGALAEVAKKSLRSEDPSGKKAVLGSSPFLSEANAERIVRTLCKVRGAALKLGQMLSIQDDAFINPHLAKIFERVRQSADFMPLKQMMKTLNNDLGPNWRDKLEYFEERPFAAASIGQVHLARMKGGREVAMKIQYPGVAQSINSDVNNLMAVLNMSNMLPEGLFPEHLIDVLRRELALECDYQREAACARKFRDLLKGHPFFYVPEIVDELCSPHVLTTELVSGFPLDQAEGLSQEIRNEICYNILVLCLRELFEFHFMQTDPNWSNFFYDPQQHKVALLDFGATREYDRSFTDLYIQIIRAAADRDRETVRAKSIEMKFLTGYEVKVMEDAHLDAILILGEAFASDEPFDFGTQSTTEKIHNLIPVMLRHRLVPPPEETYSLHRKMGGSFLICSKLKARFPCKAMFEEAYSNYCKRQAQQ

SEQ ID NO: 203406 - protein, 572 aa, Artificial Sequence
  derived and/or modified sequence
MAAILGDTIMVAKGLVKLTQAAVETHLQHLGIGGELIMGPAPAYVASGPFREAGFPGQASSPLGRANGRLFANPRDSFSAMGFQRRFFHQDQSPVGGLTAEDIEKARQAKARPENKQHKQTLSEHARERKVPVTRIGRLANFGGLAVGLGFGALAEVAKKSLRSEDPSGKKAVLGSSPFLSEANAERIVRTLCKVRGAALKLGQMLSIQDDAFINPHLAKIFERVRQSADFMPLKQMMKTLNNDLGPNWRDKLEYFEERPFAAASIGQVHLARMKGGREVAMKIQYPGVAQSINSDVNNLMAVLNMSNMLPEGLFPEHLIDVLRRELALECDYQREAACARKFRDLLKGHPFFYVPEIVDELCSPHVLTTELVSGFPLDQAEGLSQEIRNEICYNILVLCLRELFEFHFMQTDPNWSNFFYDPQQHKVALLDFGATREYDRSFTDLYIQIIRAAADRDRETVRAKSIEMKFLTGYEVKVMEDAHLDAILILGEAFASDEPFDFGTQSTTEKIHNLIPVMLRHRLVPPPEETYSLHRKMGGSFLICSKLKARFPCKAMFEEAYSNYCKRQAQQ

SEQ ID NO: 203407 - protein, 647 aa, Artificial Sequence
  derived and/or modified sequence
MAAILGDTIMVAKGLVKLTQAAVETHLQHLGIGGELIMAARALQSTAVEQIGMFLGKVQGQDKHEEYFAENFGGPEGEFHFSVPHAAGASTDFSSASAPDQSAPPSLGHAHSEGPAPAYVASGPFREAGFPGQASSPLGRANGRLFANPRDSFSAMGFQRRFFHQDQSPVGGLTAEDIEKARQAKARPENKQHKQTLSEHARERKVPVTRIGRLANFGGLAVGLGFGALAEVAKKSLRSEDPSGKKAVLGSSPFLSEANAERIVRTLCKVRGAALKLGQMLSIQDDAFINPHLAKIFERVRQSADFMPLKQMMKTLNNDLGPNWRDKLEYFEERPFAAASIGQVHLARMKGGREVAMKIQYPGVAQSINSDVNNLMAVLNMSNMLPEGLFPEHLIDVLRRELALECDYQREAACARKFRDLLKGHPFFYVPEIVDELCSPHVLTTELVSGFPLDQAEGLSQEIRNEICYNILVLCLRELFEFHFMQTDPNWSNFFYDPQQHKVALLDFGATREYDRSFTDLYIQIIRAAADRDRETVRAKSIEMKFLTGYEVKVMEDAHLDAILILGEAFASDEPFDFGTQSTTEKIHNLIPVMLRHRLVPPPEETYSLHRKMGGSFLICSKLKARFPCKAMFEEAYSNYCKRQAQQ

SEQ ID NO: 203408 - protein, 595 aa, Artificial Sequence
  derived and/or modified sequence
MFLGKVQGQDKHEEYFAENFGGPEGEFHFSVPHAAGASTDFSSASAPDQSAPPSLGHAHSEGPAPAYVASGPFREAGFPGQASSPLGRANGRLFANPRDSFSAMGFQRRFFHQDQSPVGGLTAEDIEKARQAKARPENKQHKQTLSEHARERKVPVTRIGRLANFGGLAVGLGFGALAEVAKKSLRSEDPSGKKAVLGSSPFLSEANAERIVRTLCKVRGAALKLGQMLSIQDDAFINPHLAKIFERVRQSADFMPLKQMMKTLNNDLGPNWRDKLEYFEERPFAAASIGQVHLARMKGGREVAMKIQYPGVAQSINSDVNNLMAVLNMSNMLPEGLFPEHLIDVLRRELALECDYQREAACARKFRDLLKGHPFFYVPEIVDELCSPHVLTTELVSGFPLDQAEGLSQEIRNEICYNILVLCLRELFEFHFMQTDPNWSNFFYDPQQHKVALLDFGATREYDRSFTDLYIQIIRAAADRDRETVRAKSIEMKFLTGYEVKVMEDAHLDAILILGEAFASDEPFDFGTQSTTEKIHNLIPVMLRHRLVPPPEETYSLHRKMGGSFLICSKLKARFPCKAMFEEAYSNYCKRQAQQ

SEQ ID NO: 203409 - protein, 598 aa, Artificial Sequence
  derived and/or modified sequence
MAARALQSTAVEQIGMFLGKVQGQDKHEEYFAENFGGPEGEFHFSSASAPDQSAPPSLGHAHSEGPAPAYVASGPFREAGFPGQASSPLGRANGRLFANPRDSFSAMGFQRRFFHQDQSPVGGLTAEDIEKARQAKARPENKQHKQTLSEHARERKVPVTRIGRLANFGGLAVGLGFGALAEVAKKSLRSEDPSGKKAVLGSSPFLSEANAERIVRTLCKVRGAALKLGQMLSIQDDAFINPHLAKIFERVRQSADFMPLKQMMKTLNNDLGPNWRDKLEYFEERPFAAASIGQVHLARMKGGREVAMKIQYPGVAQSINSDVNNLMAVLNMSNMLPEGLFPEHLIDVLRRELALECDYQREAACARKFRDLLKGHPFFYVPEIVDELCSPHVLTTELVSGFPLDQAEGLSQEIRNEICYNILVLCLRELFEFHFMQTDPNWSNFFYDPQQHKVALLDFGATREYDRSFTDLYIQIIRAAADRDRETVRAKSIEMKFLTGYEVKVMEDAHLDAILILGEAFASDEPFDFGTQSTTEKIHNLIPVMLRHRLVPPPEETYSLHRKMGGSFLICSKLKARFPCKAMFEEAYSNYCKRQAQQ

SEQ ID NO: 203410 - protein, 321 aa, Artificial Sequence
  derived and/or modified sequence
MLSIQDDAFINPHLAKIFERVRQSADFMPLKQMMYPGVAQSINSDVNNLMAVLNMSNMLPEGLFPEHLIDVLRRELALECDYQREAACARKFRDLLKGHPFFYVPEIVDELCSPHVLTTELVSGFPLDQAEGLSQEIRNEICYNILVLCLRELFEFHFMQTDPNWSNFFYDPQQHKVALLDFGATREYDRSFTDLYIQIIRAAADRDRETVRAKSIEMKFLTGYEVKVMEDAHLDAILILGEAFASDEPFDFGTQSTTEKIHNLIPVMLRHRLVPPPEETYSLHRKMGGSFLICSKLKARFPCKAMFEEAYSNYCKRQAQQ

SEQ ID NO: 203411 - protein, 368 aa, Artificial Sequence
  derived and/or modified sequence
MLSIQDDAFINPHLAKIFERVRQSADFMPLKQMMKTLNNDLGPNWRDKLEYFEERPFAAASIGQVHLARMKGGREVAMKIQYPGVAQSINSDVNNLMAVLNMSNMLPEGLFPEHLIDVLRRELALECDYQREAACARKFRDLLKGHPFFYVPEIVDELCSPHVLTTELVSGFPLDQAEGLSQEIRNEICYNILVLCLRELFEFHFMQTDPNWSNFFYDPQQHKVALLDFGATREYDRSFTDLYIQIIRAAADRDRETVRAKSIEMKFLTGYEVKVMEDAHLDAILILGEAFASDEPFDFGTQSTTEKIHNLIPVMLRHRLVPPPEETYSLHRKMGGSFLICSKLKARFPCKAMFEEAYSNYCKRQAQQ

SEQ ID NO: 203412 - DNA, 1479 bp, Artificial Sequence
  derived and/or modified sequence
atgggattccagcgaagattcttccaccaggatcagagccctgtgggggggcttaccgcagaggacatcgagaaggcaaggcaagccaaggctcgcccagagaataagcagcacaagcagactctgtcagagcacgccagagagaggaaggttccagttacgcggatcgggaggcttgccaattttggcgggctggccgtgggactaggattcggtgcccttgctgaggtagctaagaaatccctgcgctccgaggatcccagcgggaagaaagctgtcctcgggtcttcccccttcctgtcggaagcaaacgcggaacgtatcgtccgcactctttgtaaagttcggggcgctgcattgaaactggggcaaatgttgagtatccaggacgacgccttcatcaacccacacctggcaaaaattttcgaacgagtgagacagagcgctgatttcatgcctctgaagcagatgatgaagaccttaaataacgatctcgggcctaactggagagataagctagagtatttcgaagaacggcccttcgctgccgcttcaattggacaggttcaccttgcacgaatgaagggagggcgggaagtagccatgaaaatccaatacccgggcgtagctcagagcattaattctgatgtgaataatctcatggctgttttgaacatgagcaacatgctgccagaaggactgttcccagaacacctcatcgatgttctcagacgggaacttgcattagaatgtgattatcagcgggaagccgcctgcgcgcgcaagttcagagatctcctgaaaggacacccctttttttacgtccccgaaatagtggacgaactatgcagcccgcatgtgcttaccacagaactggtgtcaggattcccactggatcaggctgaggggctgagtcaggagatacggaatgagatctgctataatatcctcgtcttgtgtttgcgagaactgtttgaattccatttcatgcagacagaccccaactggagcaatttcttctacgatcctcaacagcacaaggttgccctcctggactttggggctacacgggaatatgatcggagcttcacggatctctatatccagataatccgtgcagctgccgatcgcgatcgagaaacggtcagagccaagtctatcgaaatgaaattcctcactggatacgaggtaaaggtgatggaagacgcacatctcgacgcaatacttattctgggtgaggcatttgccagtgatgaacctttcgacttcggaacgcagtctacaaccgagaagattcacaatctgatccccgtaatgctgaggcacaggttggtgcctcctccagaggaaacctactccctccatcggaaaatgggggggtcctttctaatctgctcaaaactcaaagcacggtttccctgcaaggccatgtttgaagaggcttacagcaactattgtaagagacaggcgcagcagtag

SEQ ID NO: 203413 - DNA, 1719 bp, Artificial Sequence
  derived and/or modified sequence
atggccgccatattaggggacacaatcatggtagctaaagggctggtgaaacttacccaggccgctgtggagacccatctacaacaccttggcatcggtggcgaactgattatggggcccgcacccgcctacgtcgcatccggaccatttagagaggccgggtttcccggacaagctagcagcccgctgggcagagctaacggacggctctttgcaaatccccgggatagcttttcagccatgggctttcagcgccgattcttccaccaagaccagtctccggtcggcggactgacagcagaagatatcgagaaggcaaggcaagctaaggctaggcctgagaataaacagcataagcagaccctatctgagcatgcgagggagaggaaggtgcctgtgaccagaattggaaggctcgccaacttcggcggtttagcagtcggcctcggtttcggagccctggccgaggttgccaagaagagcctccgtagcgaggacccgtccgggaagaaagccgtcctgggatcatctcccttcttatcggaggccaacgctgagcgcatcgtgagaacactctgcaaagtcaggggcgctgccctaaagcttggccagatgttgtccattcaggatgatgcctttattaatcctcatcttgccaaaatttttgaaagggttcgacagtctgcagactttatgcccctgaagcagatgatgaaaacactgaataacgacttagggcccaactggagggacaagttggaatactttgaggagagaccgtttgccgccgcttctattggccaagtccatctcgcaaggatgaagggcggcagagaagtggccatgaagattcaataccctggagtggcccaatcaatcaattccgacgtgaataacttgatggccgtacttaacatgagtaacatgctacccgagggacttttcccggaacacctgatagacgtgctgaggagggagttggcgttggagtgcgactaccagagagaggccgcttgtgcaaggaagttcagggatttactcaaaggccacccattcttctacgtacccgaaatagtcgatgaactctgctctccgcacgtcctaacaactgagctggtgagtggctttcctctcgatcaagctgaaggcctgagccaagaaatccggaacgagatttgttataatatactggtcctgtgtctgcgggagctctttgagttccatttcatgcaaaccgatcccaattggtccaatttcttctacgatccacagcagcataaagtagccctactagacttcggggccacaagagagtatgatcgctctttcacagacctgtacatccaaataatacgcgccgcagcggaccgtgatagagaaaccgtgcgggccaagtcaatcgaaatgaaatttctgacgggttacgaagtgaaagtcatggaggatgcacatctcgatgcaatcctgatcctgggcgaagcattcgcttctgatgaaccctttgatttcgggactcagagcactacggagaagattcacaatctcatccccgttatgctgcggcataggctggtgccaccgccagaggaaacctatagcttgcacaggaaaatgggtggctccttccttatttgtagcaaacttaaggccagatttccatgcaaggcaatgtttgaagaggcctactctaactattgcaaacgccaggcgcaacagtag

SEQ ID NO: 203414 - DNA, 1944 bp, Artificial Sequence
  derived and/or modified sequence
atggctgccatcctgggggacaccattatggtcgcaaaggggctggtgaaactgacccaggcagctgttgaaactcacctgcagcacctggggatcggaggggaattgattatggccgctcgtgcgcttcaatctactgcggttgagcagattggaatgtttctgggcaaagtgcagggacaagacaaacacgaggagtacttcgccgaaaactttggaggacccgaaggggagttccatttctctgtgccacatgccgctggagcctctacagacttttcctcggcaagtgcaccagaccagtccgccccgcctagcttaggccacgcccatagtgagggtcctgcaccagcatatgttgcctccggtcctttccgtgaggcagggttccccggacaggcaagctcccccctcggaagggccaatggcaggttattcgccaatcctagggactccttttcagccatgggattccagcgcaggttcttccaccaggaccagtctcccgtgggaggattgaccgctgaggacatagaaaaggcgaggcaggccaaagctcgacccgagaacaaacaacacaagcagaccctgtcagagcacgctcgggagcggaaagtcccagtgactagaatcggaaggctcgccaactttggagggcttgcagtagggctcggcttcggtgccctcgcagaggtcgcaaagaagtcgctgcgttctgaggacccatctggcaagaaggcggtgctgggctcatctcctttcctttccgaggcaaacgctgaaaggatcgtgagaactctgtgcaaagttcgcggcgctgcattgaaactcggtcagatgctttctattcaggatgatgccttcattaatccacacctggcaaaaatttttgagcgagtacgccagagcgctgattttatgccactcaaacagatgatgaagacacttaacaatgacctgggacccaattggcgggataagctggagtatttcgaagagagaccttttgcggccgcttccattggtcaggtgcatctcgcgcgcatgaaaggtgggcgcgaggtggcgatgaaaatccagtatccaggagtcgcgcaatccatcaactctgacgttaataacctgatggccgtgctgaatatgagcaatatgcttcctgaaggcctatttcctgagcacctcatagacgtcctgagacgggagctggccctggagtgcgattatcaaagagaggctgcctgcgcacgcaagttcagagacctgctcaaaggtcaccccttcttctacgtccccgaaattgtggacgaattgtgtagtcctcacgttcttaccactgagttggttagtggctttccgttggaccaagcagaagggctcagtcaagagatccgcaacgaaatctgttacaacattctggtgctgtgcttgcgagagctattcgaattccactttatgcaaaccgatcccaattggtctaatttcttctatgatccacagcagcacaaggtggctctgctggacttcggcgctacacgcgagtacgatcgctccttcaccgacctgtatattcagatcatacgggcagccgcagatagagaccgtgagactgtgcgcgccaaaagtatcgagatgaagttccttaccggctatgaagtaaaggtcatggaagacgcccacctggacgccatcctgatccttggggaggccttcgcttccgatgaacccttcgattttggaacccagagcacaaccgagaaaatccataacttaatcccagtgatgctgcggcatcggcttgtgccgcctcccgaggagacatattcacttcataggaagatgggcggttcttttctgatctgctcaaagctgaaggcccgtttcccatgcaaagcaatgtttgaggaagcttattctaactactgtaagcggcaggcacaacagtag

SEQ ID NO: 203415 - DNA, 1788 bp, Artificial Sequence
  derived and/or modified sequence
atgttcctgggaaaggttcagggccaggataagcacgaagagtattttgcagaaaattttggaggtcctgagggcgagtttcacttttccgttcctcacgccgcaggcgcttcgactgacttttcatcagcctccgcgcccgaccaaagcgcaccccctagcctgggccacgctcactcagaaggcccagcacctgcttatgtagccagtggccccttccgggaggcaggtttccccggccaggcctcaagtccacttggtagagccaatggccgcctttttgcaaatcctagagattccttttccgcaatggggttccagagacgttttttccatcaggaccaaagccccgttggaggcctgactgccgaagatattgaaaaggcccgccaggcaaaggcccggccagaaaacaaacagcataaacaaaccctgagcgaacatgcccgcgagcggaaggtgcccgtgaccaggatcggccgcctcgccaactttgggggcttagcagtgggactgggcttcggagccctggctgaggtggccaagaagagtctccggagcgaagatccttctgggaagaaggctgtcctcggctcatcacccttcctctccgaagccaacgcagaaaggattgtaaggactttatgtaaggtgcggggcgctgcactcaagctgggccaaatgctgagcatccaggatgacgcgttcattaacccacacctggctaagatctttgagagggtccgccaaagtgccgatttcatgcccctgaagcagatgatgaagaccctcaataatgacctgggacccaactggagagataaactggaatattttgaggagcgtccttttgcagcagcttctatcggccaggtgcacctggctcgcatgaaaggcggaagagaggtcgccatgaagatacagtatccaggggtggctcagtcaatcaattcagacgtgaataatttaatggcagtacttaatatgtctaatatgttacccgaaggtctttttcccgagcatcttatcgacgttttgagacgggaattggctctcgaatgtgactaccagcgtgaagcagcttgcgcccggaaatttcgagatctacttaagggccatcctttcttctatgtccctgagatcgtggatgaactctgcagcccccacgtcctaaccactgagctggtttccgggtttccactggatcaggctgagggactgtcacaggaaattagaaacgagatatgctacaatattctggtcctgtgtttacgcgagctcttcgaatttcacttcatgcagaccgatcctaattggtccaattttttctacgaccctcaacagcacaaggtggctctgctggacttcggcgccacccgggagtacgatcgctcattcacagacttatatatacaaatcatcagagcggctgctgaccgggacagagagacagtgagggctaagtccattgagatgaaatttctcacgggatacgaggtgaaggtgatggaggatgcccatctggatgccatactgatactgggagaagccttcgcttccgatgaacctttcgattttggaacccagagtacaacagagaagattcacaacctcattccggtcatgctgagacaccggctggtgccaccccctgaagagacctacagcttacatcgtaagatgggcggttcctttcttatttgctctaagcttaaagcccggtttccttgcaaggcgatgttcgaagaagcctattcaaactattgcaagcggcaggcccagcagtag

SEQ ID NO: 203416 - DNA, 1944 bp, Artificial Sequence
  derived and/or modified sequence
atggccgccatcctgggtgacactatcatggttgctaaaggcctggtgaagctgacccaagcggctgtggagacacatcttcagcacctcggaataggcggcgaactgattatggccgctcgagctctccagtcaaccgcagtggagcagattgggatgttccttggaaaagtacaagggcaggacaagcatgaggaatacttcgcagagaactttggcgggcccgaaggtgagtttcacttctccgtcccacatgcggccggggccagcaccgacttttcctcagcttctgctcccgaccagtccgcccctccctccctaggccatgcccactcagaaggcccagctcctgcttacgtggctagcggcccttttcgggaagccgggttccctggacaggcatctagccctctgggccgcgcgaatggacgactgttcgcaaatccaagagactctttctcggcaatgggatttcagcggcgcttctttcaccaggatcaatcccctgtcgggggccttaccgccgaggatatcgaaaaggcgcggcaagctaaggctagacccgagaacaagcagcataagcaaacactttcagagcacgcacgagagcgcaaggtgccagtcacacgcattggccgcctggccaacttcgggggcctggctgtcggactggggttcggagccctcgccgaggtggccaaaaagtcgctacgaagcgaagacccaagcggaaaaaaggcagtgcttggctcgagcccatttctttcagaggccaacgccgaacgaattgttcggactctctgtaaagtcaggggcgcggcacttaagctaggacagatgttgtcaatccaagacgacgcattcatcaacccccatctggcaaaaatctttgagcgtgtgcggcagagcgctgattttatgccgcttaaacagatgatgaaaactttgaacaacgacctgggcccgaactggcgggataagctcgagtattttgaggaaagacccttcgctgctgcttccattggccaggtgcacttagcccgcatgaaggggggccgtgaagtcgcaatgaaaatccaataccctggcgttgcccaatccatcaattcggacgtgaataacctcatggctgtgcttaatatgagcaacatgctgcccgaaggtctgttccccgagcatctgattgatgtgctacgccgcgaacttgccttagaatgtgactatcaacgggaggctgcctgcgcccggaaatttcgggacctgttaaaggggcatccttttttctacgtgccagaaattgtcgacgagctctgtagtcctcacgttctaacaacggaactggtttcaggatttcctctggaccaggcagagggcctgtcacaggagatcagaaatgaaatttgctacaatatactcgtgctgtgcctcagagagctgtttgagtttcatttcatgcaaactgatcccaattggtcaaacttcttttatgacccacagcagcacaaggtggcacttctggacttcggggctacaagagaatacgatagatcattcactgacctgtatattcaaatcatccgggctgctgctgaccgcgatagagagacggttagagcgaagtccatcgaaatgaagtttctgactggatatgaagtgaaagtgatggaagacgcccaccttgatgcaattctgatcttaggggaagccttcgctagcgatgaacctttcgattttggtacccagagtacgaccgaaaagattcacaaccttatccctgtcatgctccgccacaggcttgtgccccccccagaagaaacatattcactccacaggaaaatgggcggtagcttcctcatctgctcaaagctgaaagccaggttcccttgtaaggctatgttcgaggaggcctattccaactattgtaagaggcaggcacagcagtag

SEQ ID NO: 203417 - DNA, 1797 bp, Artificial Sequence
  derived and/or modified sequence
atggccgcccgggctctacagagcaccgcggtggaacagataggaatgttcctgggaaaggtccagggacaggacaaacacgaagagtatttcgctgagaatttcggggggcctgaaggggagtttcacttcagctctgcttcagccccggatcagtcggcacccccaagtctcggccacgcccacagcgaagggcccgcaccagcatatgtagcctccgggccttttagggaagccggctttccgggacaggcatcgtcacctctgggccgcgctaacggccggctgtttgccaatccccgggatagcttctcagccatggggtttcagcgacgtttttttcaccaggatcagagcccagtgggaggccttacggcagaagatatagagaaggcgcgccaggccaaggcgcggcctgagaacaagcagcacaagcagaccctgtctgagcatgcccgcgagaggaaggtccctgtcacccggatcgggaggttggccaattttggagggctcgccgtcggacttggcttcggggctctggctgaggtcgcgaagaagagcctgagatccgaggatccctccggtaaaaaagccgtattggggtctagcccatttctgtctgaggcaaatgccgaaagaatcgtgaggaccctatgtaaggtaaggggcgccgccttaaagctcgggcaaatgctgagcattcaagacgacgccttcatcaacccgcatctggccaagatttttgaacgggtgaggcagtcagcagatttcatgcctctcaagcagatgatgaagaccctgaataacgatctggggcctaattggagggacaaacttgaatacttcgaagaacgcccgttcgctgccgccagcatcggccaagtgcacttggcacgcatgaagggcggaagagaggtggccatgaagatccagtaccctggggtagcgcagtcaatcaactccgacgttaataatcttatggccgtcctgaacatgtcgaacatgttaccagaagggctgttcccagaacatctcatcgacgtgctgaggcgcgagttggccctggagtgcgattaccagagagaggccgcctgcgctcgcaagttccgcgacctcctcaaaggccacccttttttttacgtaccagaaatagtggatgagctgtgtagcccgcatgtgttgacaactgagctcgtatccggattcccccttgatcaggctgaaggcctttcacaggaaattcggaatgagatctgttacaacatccttgtgctgtgtctaagagagctattcgagttccacttcatgcagaccgaccccaactggagtaatttcttctacgatcctcagcagcataaggtcgcactcttggattttggcgccacccgcgagtatgataggagctttacagacctgtacattcagatcatccgagcggcggctgatcgggatcgagagacagtccgcgccaagtctatcgagatgaaatttctgactggatacgaagtgaaggtaatggaggatgcccatctggacgcgatcctgattctaggcgaagccttcgcctcagacgaacctttcgacttcggtacccagtccacaactgagaagatacataaccttataccggtgatgctgagacaccgacttgtgccccccccagaagagacatacagcctgcatcggaagatgggggggtcttttctaatttgctcaaagttgaaggcaagatttccctgtaaagcaatgttcgaggaggcgtacagtaactactgtaagcgccaggcacaacaatag

SEQ ID NO: 203418 - DNA, 966 bp, Artificial Sequence
  derived and/or modified sequence
atgttgagtatccaggatgatgcatttattaacccacatctggccaaaatattcgagcgagtccgtcaaagcgcggattttatgcctctgaagcagatgatgtacccaggggtggcccagtctataaattcagatgtgaataatctgatggctgtgcttaacatgtctaacatgcttccagaagggctctttcctgaacacctgatcgatgtcctgcgacgtgaactagcgttggagtgtgattatcagcgagaagcggcctgcgcgcgaaagttccgcgatctgctgaagggtcacccatttttttatgtcccagaaatcgttgacgaactgtgtagcccacatgttttaaccactgagttggtctcaggatttcccttagaccaggccgagggcttaagtcaggaaatccgcaatgagatctgctacaacattcttgttctctgtctgcgggagctctttgaattccatttcatgcagaccgacccaaattggagtaatttcttttatgacccccagcagcacaaggtcgcgttactggattttggtgccacgagggaatacgacagaagtttcacggatctctatatccagatcatccgcgccgccgcagatagagatcgcgagactgtcagagcaaagtctatcgagatgaagttcttaactggttacgaagtaaaggtgatggaagatgcgcatctcgatgccatcctgatactcggggaggccttcgcgagcgacgaaccttttgactttggaacccagtctactaccgagaagattcacaatctgatcccagtgatgctaagacaccgcctagtcccccctcccgaggaaacgtattcattgcaccgaaagatgggcggcagctttctgatctgctctaagctcaaggcccgctttccttgcaaggccatgtttgaggaggcctatagcaattattgcaaacgacaggcccagcagtag

SEQ ID NO: 203419 - DNA, 1107 bp, Artificial Sequence
  derived and/or modified sequence
atgctgagcatacaggatgacgccttcatcaacccacacctggccaaaatcttcgagcgcgtccgtcaatctgctgactttatgcctttgaaacagatgatgaagacactcaataatgacctggggccgaattggcgcgacaaactggagtattttgaggagcggccatttgccgccgcttccataggtcaggttcacttagcccgtatgaaggggggcagggaggtagcaatgaaaatccagtaccctggggtggcccagagcattaattcagatgtcaacaatctgatggccgtgctcaacatgtccaacatgctgcctgagggtctatttcctgagcatcttatcgacgttctcagaagagagcttgcgcttgaatgcgattatcaaagggaggcagcttgcgcccggaagttccgcgatctcttgaaaggccacccattcttctacgtcccggaaatcgtggacgagctctgttcgcctcacgttcttaccactgagctggtgtcgggattccccctagaccaggccgaaggactgtcccaggagattcggaatgagatttgttacaacatccttgtcctctgtcttagggagctctttgaattccacttcatgcagacggatccgaactggtcgaacttcttttatgatcctcagcagcacaaggtcgcactgttggatttcggtgccacccgcgagtatgatagatctttcactgacctgtatatccagatcattagagcagccgccgacagggaccgggaaacggtccgggctaagagtatcgaaatgaagttcttgactggctacgaggttaaagtgatggaggacgctcacctcgatgccatactcatactgggcgaggcctttgcaagtgatgagccttttgattttggcacccaaagcaccaccgagaagatccacaatctgatccccgtgatgctccgccatcgcttggttccaccacctgaagagacctactccttacacagaaagatgggcggcagctttttgatttgcagcaagttaaaggcacggtttccgtgcaaagccatgttcgaggaggcttacagcaattattgtaaacggcaggcacagcagtag

SEQ ID NO: 203420 - DNA, 1479 bp, Artificial Sequence
  derived and/or modified sequence
atgggcttccagaggcgcttcttccaccaggaccagagccctgtgggcggcctgacagcagaagatattgagaaggcccggcaggccaaggcccggcctgagaacaagcagcacaagcagaccctgtctgaacatgcccgggagaggaaggtgcctgtgacccgcatcggccgcctggccaactttggaggcctggccgtgggcctgggctttggagccctggccgaggtggccaagaagagcctgcggtctgaggaccccagcggcaagaaggctgtgctgggcagcagccccttcctgtctgaggccaatgctgagcgcatcgtgaggaccctgtgcaaggtgcggggggccgccctgaagctgggccagatgctgagcatccaggatgatgccttcatcaacccccacctggccaagatctttgagcgggtgcggcagagcgctgacttcatgcccctgaagcagatgatgaagaccctgaacaatgacctgggccccaactggagggacaagctggagtactttgaggagcggccctttgctgctgccagcatcggccaggtgcacctggccaggatgaagggcggccgggaggtggccatgaagatccagtacccaggagtggcccagagcatcaacagtgatgtgaacaacctgatggctgtgctgaacatgagcaacatgctgcctgagggcctcttccctgagcacctgattgatgtgctgcggcgggagctggccctggagtgtgactaccagcgggaggccgcctgtgccaggaagttccgggacctgctgaagggccaccccttcttctacgtgcctgagatcgtggatgagctgtgcagcccccacgtgctgaccacagagctggtgtctggcttccccctggaccaggccgagggcctgagccaggagatcagaaatgagatctgctacaacatcctggtgctgtgcctgcgggagctgtttgagttccacttcatgcagacagaccccaactggagcaacttcttctatgacccccagcagcacaaggtggccctgctggactttggagccacccgggagtatgacaggagcttcacagacctgtacatccagatcatccgggctgctgctgaccgggaccgggagaccgtgcgggccaagagcattgagatgaagttcctgaccggctatgaggtgaaggtgatggaggatgcccacctggatgccatcctgatcctgggggaggcctttgccagtgatgagccctttgattttggcacccagagcaccacagagaagatccacaacctgatccctgtgatgctgcggcaccggctggtgcccccacctgaggagacctacagcctgcacaggaagatgggcggcagcttcctgatctgcagcaagctgaaggcccgcttcccctgcaaggccatgtttgaggaggcctacagcaactactgcaagaggcaggcccagcagtag

SEQ ID NO: 203421 - DNA, 1719 bp, Artificial Sequence
  derived and/or modified sequence
atggccgccatcctgggggacaccatcatggtggccaagggcctggtgaagctgacccaggccgctgtggagacccacctgcagcacctgggcatcggcggggagctgatcatgggccctgccccagcctacgtggccagcggccccttccgggaggccggcttccctggccaggccagcagccccctgggccgggccaacggccgcctgtttgccaacccccgggacagcttcagcgccatgggcttccagaggcgcttcttccaccaggaccagagccctgtgggcggcctgacagcagaagatattgagaaggcccggcaggccaaggcccggcctgagaacaagcagcacaagcagaccctgtctgaacatgcccgggagaggaaggtgcctgtgacccgcatcggccgcctggccaactttggaggcctggccgtgggcctgggctttggagccctggccgaggtggccaagaagagcctgcggtctgaggaccccagcggcaagaaggctgtgctgggcagcagccccttcctgtctgaggccaatgctgagcgcatcgtgaggaccctgtgcaaggtgcggggggccgccctgaagctgggccagatgctgagcatccaggatgatgccttcatcaacccccacctggccaagatctttgagcgggtgcggcagagcgctgacttcatgcccctgaagcagatgatgaagaccctgaacaatgacctgggccccaactggagggacaagctggagtactttgaggagcggccctttgctgctgccagcatcggccaggtgcacctggccaggatgaagggcggccgggaggtggccatgaagatccagtacccaggagtggcccagagcatcaacagtgatgtgaacaacctgatggctgtgctgaacatgagcaacatgctgcctgagggcctcttccctgagcacctgattgatgtgctgcggcgggagctggccctggagtgtgactaccagcgggaggccgcctgtgccaggaagttccgggacctgctgaagggccaccccttcttctacgtgcctgagatcgtggatgagctgtgcagcccccacgtgctgaccacagagctggtgtctggcttccccctggaccaggccgagggcctgagccaggagatcagaaatgagatctgctacaacatcctggtgctgtgcctgcgggagctgtttgagttccacttcatgcagacagaccccaactggagcaacttcttctatgacccccagcagcacaaggtggccctgctggactttggagccacccgggagtatgacaggagcttcacagacctgtacatccagatcatccgggctgctgctgaccgggaccgggagaccgtgcgggccaagagcattgagatgaagttcctgaccggctatgaggtgaaggtgatggaggatgcccacctggatgccatcctgatcctgggggaggcctttgccagtgatgagccctttgattttggcacccagagcaccacagagaagatccacaacctgatccctgtgatgctgcggcaccggctggtgcccccacctgaggagacctacagcctgcacaggaagatgggcggcagcttcctgatctgcagcaagctgaaggcccgcttcccctgcaaggccatgtttgaggaggcctacagcaactactgcaagaggcaggcccagcagtag

SEQ ID NO: 203422 - DNA, 1944 bp, Artificial Sequence
  derived and/or modified sequence
atggccgccatcctgggggacaccatcatggtggccaagggcctggtgaagctgacccaggccgctgtggagacccacctgcagcacctgggcatcggcggggagctgatcatggccgcccgggccctgcagagcacagctgtggagcagatcggcatgttcctgggcaaggtgcagggccaggacaagcatgaggagtactttgctgagaactttggaggccctgagggggagttccacttctctgtgccccacgccgccggggccagcacagacttcagcagcgccagcgccccagaccagagcgccccacccagcctgggccacgcccacagcgagggccctgccccagcctacgtggccagcggccccttccgggaggccggcttccctggccaggccagcagccccctgggccgggccaacggccgcctgtttgccaacccccgggacagcttcagcgccatgggcttccagaggcgcttcttccaccaggaccagagccctgtgggcggcctgacagctgaggacatcgagaaggcccggcaggccaaggcccggcctgagaacaagcagcacaagcagaccctgtctgagcacgcccgggagaggaaggtgcctgtgaccagaattggccgcctggccaactttggaggcctggccgtgggcctgggctttggagccctggccgaggtggccaagaagagcctgcggtctgaggaccccagcggcaagaaggctgtgctgggcagcagccccttcctgtctgaggccaatgctgagagaattgtgaggaccctgtgcaaggtgagaggagctgccctgaagctgggccagatgctgagcatccaggatgatgccttcatcaacccccacctggccaagatctttgagcgggtgcggcagagcgctgacttcatgcccctgaagcagatgatgaagaccctgaacaatgacctgggccccaactggagggacaagctggagtactttgaggagcggccctttgctgctgccagcatcggccaggtgcacctggccaggatgaagggcggccgggaggtggccatgaagatccagtacccaggagtggcccagagcatcaacagtgatgtgaacaacctgatggctgtgctgaacatgagcaacatgctgcctgagggcctcttccctgagcacctgattgatgtgctgcggcgggagctggccctggagtgtgactaccagcgggaggccgcctgtgccaggaagttccgggacctgctgaagggccaccccttcttctacgtgcctgagatcgtggatgagctgtgcagcccccacgtgctgaccacagagctggtgtctggcttccccctggaccaggccgagggcctgagccaggagatcagaaatgagatctgctacaacatcctggtgctgtgcctgcgggagctgtttgagttccacttcatgcagacagaccccaactggagcaacttcttctatgacccccagcagcacaaggtggccctgctggactttggagccacccgggagtatgaccgctccttcacagacctgtacatccagatcatccgggctgctgctgaccgggaccgggagaccgtgcgggccaagagcattgagatgaagttcctgaccggctatgaggtgaaggtgatggaggatgcccacctggatgccatcctgatcctgggggaggcctttgccagtgatgagccctttgattttggcacccagagcaccacagagaagatccacaacctgatccctgtgatgctgcggcaccggctggtgcccccacctgaggagacctacagcctgcacaggaagatgggcggcagcttcctgatctgcagcaagctgaaggcccgcttcccctgcaaggccatgtttgaggaggcctacagcaactactgcaagaggcaggcccagcagtag

SEQ ID NO: 203423 - DNA, 1788 bp, Artificial Sequence
  derived and/or modified sequence
atgttcctgggcaaggtgcagggccaggacaagcatgaggagtactttgctgagaactttggaggccctgagggggagttccacttctctgtgccccacgccgccggggccagcacagacttcagcagcgccagcgccccagaccagagcgccccacccagcctgggccacgcccacagcgagggccctgccccagcctacgtggccagcggccccttccgggaggccggcttccctggccaggccagcagccccctgggccgggccaacggccgcctgtttgccaacccccgggacagcttcagcgccatgggcttccagaggcgcttcttccaccaggaccagagccctgtgggcggcctgacagctgaggacatcgagaaggcccggcaggccaaggcccggcctgagaacaagcagcacaagcagaccctgtctgagcacgcccgggagaggaaggtgcctgtgaccagaattggccgcctggccaactttggaggcctggccgtgggcctgggctttggagccctggccgaggtggccaagaagagcctgcggtctgaggaccccagcggcaagaaggctgtgctgggcagcagccccttcctgtctgaggccaatgctgagagaattgtgaggaccctgtgcaaggtgagaggagctgccctgaagctgggccagatgctgagcatccaggatgatgccttcatcaacccccacctggccaagatctttgagcgggtgcggcagagcgctgacttcatgcccctgaagcagatgatgaagaccctgaacaatgacctgggccccaactggagggacaagctggagtactttgaggagcggccctttgctgctgccagcatcggccaggtgcacctggccaggatgaagggcggccgggaggtggccatgaagatccagtacccaggagtggcccagagcatcaacagtgatgtgaacaacctgatggctgtgctgaacatgagcaacatgctgcctgagggcctcttccctgagcacctgattgatgtgctgcggcgggagctggccctggagtgtgactaccagcgggaggccgcctgtgccaggaagttccgggacctgctgaagggccaccccttcttctacgtgcctgagatcgtggatgagctgtgcagcccccacgtgctgaccacagagctggtgtctggcttccccctggaccaggccgagggcctgagccaggagatcagaaatgagatctgctacaacatcctggtgctgtgcctgcgggagctgtttgagttccacttcatgcagacagaccccaactggagcaacttcttctatgacccccagcagcacaaggtggccctgctggactttggagccacccgggagtatgaccgctccttcacagacctgtacatccagatcatccgggctgctgctgaccgggaccgggagaccgtgcgggccaagagcattgagatgaagttcctgaccggctatgaggtgaaggtgatggaggatgcccacctggatgccatcctgatcctgggggaggcctttgccagtgatgagccctttgattttggcacccagagcaccacagagaagatccacaacctgatccctgtgatgctgcggcaccggctggtgcccccacctgaggagacctacagcctgcacaggaagatgggcggcagcttcctgatctgcagcaagctgaaggcccgcttcccctgcaaggccatgtttgaggaggcctacagcaactactgcaagaggcaggcccagcagtag

SEQ ID NO: 203424 - DNA, 1797 bp, Artificial Sequence
  derived and/or modified sequence
atggccgcccgggccctgcagagcacagctgtggagcagatcggcatgttcctgggcaaggtgcagggccaggacaagcatgaggagtactttgctgaaaattttggaggccctgagggggagttccacttcagcagcgccagcgccccagaccagagcgccccacccagcctgggccacgcccacagcgagggccctgccccagcctacgtggccagcggccccttccgggaggccggcttccctggccaggccagcagccccctgggccgggccaacggccgcctgtttgccaacccccgggacagcttcagcgccatgggcttccagaggcgcttcttccaccaggaccagagccctgtgggcggcctgacagcagaagatattgagaaggcccggcaggccaaggcccggcctgagaacaagcagcacaagcagaccctgtctgaacatgcccgggagaggaaggtgcctgtgacccgcatcggccgcctggccaactttggaggcctggccgtgggcctgggctttggagccctggccgaggtggccaagaagagcctgcggtctgaggaccccagcggcaagaaggctgtgctgggcagcagccccttcctgtctgaggccaatgctgagcgcatcgtgaggaccctgtgcaaggtgcggggggccgccctgaagctgggccagatgctgagcatccaggatgatgccttcatcaacccccacctggccaagatctttgagcgggtgcggcagagcgctgacttcatgcccctgaagcagatgatgaagaccctgaacaatgacctgggccccaactggagggacaagctggagtactttgaggagcggccctttgctgctgccagcatcggccaggtgcacctggccaggatgaagggcggccgggaggtggccatgaagatccagtacccaggagtggcccagagcatcaacagtgatgtgaacaacctgatggctgtgctgaacatgagcaacatgctgcctgagggcctcttccctgagcacctgattgatgtgctgcggcgggagctggccctggagtgtgactaccagcgggaggccgcctgtgccaggaagttccgggacctgctgaagggccaccccttcttctacgtgcctgagatcgtggatgagctgtgcagcccccacgtgctgaccacagagctggtgtctggcttccccctggaccaggccgagggcctgagccaggagatcagaaatgagatctgctacaacatcctggtgctgtgcctgcgggagctgtttgagttccacttcatgcagacagaccccaactggagcaacttcttctatgacccccagcagcacaaggtggccctgctggactttggagccacccgggagtatgacaggagcttcacagacctgtacatccagatcatccgggctgctgctgaccgggaccgggagaccgtgcgggccaagagcattgagatgaagttcctgaccggctatgaggtgaaggtgatggaggatgcccacctggatgccatcctgatcctgggggaggcctttgccagtgatgagccctttgattttggcacccagagcaccacagagaagatccacaacctgatccctgtgatgctgcggcaccggctggtgcccccacctgaggagacctacagcctgcacaggaagatgggcggcagcttcctgatctgcagcaagctgaaggcccgcttcccctgcaaggccatgtttgaggaggcctacagcaactactgcaagaggcaggcccagcagtag

SEQ ID NO: 203425 - DNA, 966 bp, Artificial Sequence
  derived and/or modified sequence
atgctgagcatccaggatgatgccttcatcaacccccacctggccaagatctttgagcgggtgcggcagagcgctgacttcatgcccctgaagcagatgatgtacccaggagtggcccagagcatcaacagtgatgtgaacaacctgatggctgtgctgaacatgagcaacatgctgcctgagggcctcttccctgagcacctgattgatgtgctgcggcgggagctggccctggagtgtgactaccagcgggaggccgcctgtgccaggaagttccgggacctgctgaagggccaccccttcttctacgtgcctgagatcgtggatgagctgtgcagcccccacgtgctgaccacagagctggtgtctggcttccccctggaccaggccgagggcctgagccaggagatcagaaatgagatctgctacaacatcctggtgctgtgcctgcgggagctgtttgagttccacttcatgcagacagaccccaactggagcaacttcttctatgacccccagcagcacaaggtggccctgctggactttggagccacccgggagtatgaccgctccttcacagacctgtacatccagatcatccgggctgctgctgaccgggaccgggagaccgtgcgggccaagagcattgagatgaagttcctgaccggctatgaggtgaaggtgatggaggatgcccacctggatgccatcctgatcctgggggaggcctttgccagtgatgagccctttgattttggcacccagagcaccacagagaagatccacaacctgatccctgtgatgctgcggcaccggctggtgcccccacctgaggagacctacagcctgcacaggaagatgggcggcagcttcctgatctgcagcaagctgaaggcccgcttcccctgcaaggccatgtttgaggaggcctacagcaactactgcaagaggcaggcccagcagtag

SEQ ID NO: 203426 - DNA, 1107 bp, Artificial Sequence
  derived and/or modified sequence
atgctgagcatccaggatgatgccttcatcaacccccacctggccaagatctttgagcgggtgcggcagagcgctgacttcatgcccctgaagcagatgatgaagaccctgaacaatgacctgggccccaactggagggacaagctggagtactttgaggagcggccctttgctgctgccagcatcggccaggtgcacctggccaggatgaagggcggccgggaggtggccatgaagatccagtacccaggagtggcccagagcatcaacagtgatgtgaacaacctgatggctgtgctgaacatgagcaacatgctgcctgagggcctcttccctgagcacctgattgatgtgctgcggcgggagctggccctggagtgtgactaccagcgggaggccgcctgtgccaggaagttccgggacctgctgaagggccaccccttcttctacgtgcctgagatcgtggatgagctgtgcagcccccacgtgctgaccacagagctggtgtctggcttccccctggaccaggccgagggcctgagccaggagatcagaaatgagatctgctacaacatcctggtgctgtgcctgcgggagctgtttgagttccacttcatgcagacagaccccaactggagcaacttcttctatgacccccagcagcacaaggtggccctgctggactttggagccacccgggagtatgacaggagcttcacagacctgtacatccagatcatccgggctgctgctgaccgggaccgggagaccgtgcgggccaagagcattgagatgaagttcctgaccggctatgaggtgaaggtgatggaggatgcccacctggatgccatcctgatcctgggggaggcctttgccagtgatgagccctttgattttggcacccagagcaccacagagaagatccacaacctgatccctgtgatgctgcggcaccggctggtgcccccacctgaggagacctacagcctgcacaggaagatgggcggcagcttcctgatctgcagcaagctgaaggcccgcttcccctgcaaggccatgtttgaggaggcctacagcaactactgcaagaggcaggcccagcagtag

SEQ ID NO: 203427 - DNA, 1479 bp, Artificial Sequence
  derived and/or modified sequence
atgggcttccagcggcggttcttccaccaggaccagagccccgtggggggcctaacagctgaagatatagagaaagcccggcaggctaaagctcggcccgagaacaagcagcacaagcagaccctgtcagagcacgctcgggaacgaaaggtgccagtcacacgaattgggaggctggccaatttcggtggcctggctgtggggctcggctttggcgctttggccgaagtggccaaaaagtctctgcgcagcgaggacccatctggaaagaaagcggtcctcggctcttcacccttcttgagcgaagcgaacgccgagcgaatagtccggaccctgtgtaaggtgcggggtgccgctctcaaactggggcagatgcttagtatacaggacgacgcattcatcaatccacacctggctaagattttcgagcgggtgcgtcagtctgccgattttatgcccctgaaacagatgatgaaaactttgaacaatgaccttgggcccaactggcgtgataagcttgagtattttgaggagaggcctttcgctgcggcctctatagggcaggtccacttagccagaatgaaggggggcagggaagtcgcaatgaagatccagtaccctggcgtggcacagagtataaatagtgacgtcaacaacctgatggctgtcctcaacatgtctaacatgctgcctgaaggtctcttcccagaacatctaattgacgtgctccgcagagaactggctctagagtgcgattaccagcgcgaggcggcatgcgcaagaaagttcagggacctgctgaagggccacccgttcttctacgtgccggaaattgttgatgagttatgttcacctcatgtcctgaccactgagctggttagcggtttcccgcttgaccaggcagagggactgtcccaggagattcggaatgaaatttgttacaacatcctcgttctctgcctccgcgaattgtttgagtttcacttcatgcagacggacccaaactggtccaattttttctatgatcctcagcagcataaggtcgcccttctagatttcggagctaccagagagtatgataggagcttcacagatctgtacatccagattatccgggcagcggctgatagagatcgggagaccgtgagggctaaatctatcgaaatgaagttcctcactggctatgaggtcaaggtaatggaagacgcacacctggacgccatcctgatccttggagaggccttcgcgtcggatgagcccttcgatttcggcactcagtctacgacagaaaaaatccacaatctcatcccggtcatgctgcgccacaggctggtgccaccaccagaagaaacctatagcttgcatcggaagatgggcgggagtttcctgatttgcagcaaattgaaggctcgttttccttgcaaggcaatgtttgaggaagcatatagtaactattgcaagaggcaggcgcagcagtag

SEQ ID NO: 203428 - DNA, 1719 bp, Artificial Sequence
  derived and/or modified sequence
atggccgccatcctgggcgacaccatcatggtggccaagggcctggtgaagctaacccaggcagcagttgaaactcatttgcagcaccttggaataggtggcgagctgataatgggccccgccccagcttatgttgcttccgggccgttcagggaggcgggatttcctggccaggcttcttctcctctgggaagagcaaacggccgactctttgctaatcctcgagacagcttctctgcaatgggattccaaagaaggttctttcatcaagatcaaagtcctgtgggcggcttgaccgctgaagacatcgagaaggctcggcaggccaaggcgagacccgagaacaagcaacacaaacaaacgctgagcgaacacgcccgggaacgtaaagttccagttacgcgtattggacggctggccaactttggaggtctcgcagttggattgggcttcggcgctctggctgaagtggcaaaaaaatctctgcgatctgaagatccttccggcaagaaggccgtattgggttcctccccttttttgagtgaagctaacgctgagcggatcgtaagaacattatgcaaggtgcgcggcgccgctttaaagctgggccagatgctgagtatacaagacgatgcttttatcaacccccatctcgccaagatattcgaacgagtgaggcagtcagccgatttcatgccgcttaagcaaatgatgaaaactctcaataacgacctgggccctaattggagggacaaactggagtattttgaggaaaggccgttcgccgcagctagcatcggccaggtgcatcttgcacggatgaaagggggtagggaggtggctatgaagatccagtatccgggcgtggcgcagagcattaattccgatgtgaataacctgatggccgttttaaacatgagcaacatgttacccgagggactgttccctgagcatctaatagacgttctgcgtcgcgagctggctctggaatgtgactaccaacgcgaggctgcttgcgctcgcaagttcagagatctgctcaaaggacatccgttcttctatgtgcctgaaattgtggacgaactgtgttcaccccacgtccttacgaccgagctagttagcgggttccctctggatcaggctgagggactgtcccaggagatccgcaacgaaatctgctataatatcctagtcctgtgtctgagggaactcttcgaattccactttatgcagaccgacccaaactggtctaattttttctacgatcctcagcaacataaggtggctttgttggatttcggagctaccagagagtatgatcggagctttactgatctgtacatccagataattagagccgcagccgatcgcgaccgcgaaaccgtgcgggccaagtctatcgagatgaagttcctgacaggatatgaggtgaaagtcatggaggatgcacacctggatgcgattctcattctgggagaagcttttgccagcgacgaaccatttgatttcggaacacagtccactaccgaaaagattcataatcttatacccgtgatgctccgccaccggctcgtccccccccccgaggagacgtacagcctgcatcgcaaaatgggtggtagcttcctgatttgcagcaagctaaaggcaagatttccttgtaaagcaatgtttgaagaagcgtattcaaattactgcaagcgccaggcacagcaatag

SEQ ID NO: 203429 - DNA, 1944 bp, Artificial Sequence
  derived and/or modified sequence
atggccgccatcctgggcgacaccatcatggtggccaagggcctggtcaagcttacccaagccgctgtggagactcacctacaacacttgggaattggtggcgaactaattatggccgccagagctctccagtcaactgctgtggaacagatcggaatgttcctgggcaaggtgcagggacaggataagcacgaggagtacttcgcagaaaacttcggtggacctgaaggggaatttcatttctctgtacctcacgccgccggcgcaagtaccgatttttcatccgcttcggccccagaccaatctgccccaccctcgctgggtcatgcccattcagaaggccctgcgcctgcatacgtggcgtctggtccattcagggaggccggcttccctggacaggcctcttctccactgggacgggccaatggtaggctctttgcaaaccccagagatagcttttccgctatgggctttcagcgccggttcttccaccaggatcagtcccctgtcggaggtttgaccgcagaagacatcgagaaggcaagacaggctaaagccaggccagagaataaacaacacaagcagaccttgagtgagcacgcccgcgaaagaaaggttccagtcaccaggataggcagactagccaacttcggagggcttgcagtgggcctcggtttcggcgcactcgccgaagtggccaagaaatcgctgcgatccgaagacccgtcaggaaagaaggctgtactgggtagctcccccttcctgagcgaagcaaacgctgagaggattgtgaggaccctgtgtaaggtgagaggcgcagcgttgaagctcgggcagatgctctctattcaggacgacgcctttataaacccacacctggccaagattttcgaacgcgtaagacagagtgctgatttcatgccactgaagcagatgatgaagactctgaacaacgacctgggccccaattggcgcgacaagttggaatacttcgaggagcggccattcgcggcagcttcaataggccaggtccatttggctcggatgaaaggggggcgcgaggttgctatgaaaatccagtatccaggcgtagcacagagtatcaacagcgatgttaacaacctgatggcagtgctgaatatgtccaacatgttacctgagggcctattccctgaacacctaatcgacgtgttacgccgagagttggccctggaatgcgactaccagagggaggccgcctgtgcccgcaagtttcgcgacctgctcaaggggcatccatttttctacgtgcctgagatcgtggatgagctgtgttcgcctcacgttctgaccacggagctcgtcagtgggtttcccttggaccaggctgaaggcctatcccaagaaattaggaacgaaatctgctacaacatcctcgtgctgtgcttgcgcgagttgtttgagtttcacttcatgcagactgatccaaattggtcgaacttcttctacgatcctcagcaacacaaggtcgctctcctggactttggagcaacaagagaatatgatcgcagtttcaccgacctctacatacagataattagagctgctgcggaccgagaccgggagacggtgcgagcaaaatctatagaaatgaaattcctgaccggctatgaggtgaaggttatggaggacgcccacctggacgccatccttatactgggggaggcctttgcttcggatgaaccgtttgatttcggcacacagtcaactaccgagaagattcataatctaataccggtgatgcttcgacacagacttgtgcctcctccagaagagacctactctcttcatcgaaaaatggggggtagcttcttaatctgctcgaaactgaaggcgagattcccttgcaaggctatgtttgaagaggcatactccaattactgtaaacggcaagcacagcaatag

SEQ ID NO: 203430 - DNA, 1788 bp, Artificial Sequence
  derived and/or modified sequence
atgttcctgggcaaggtgcagggccaggacaagcacgaggagtacttcgcagagaacttcggaggcccggaaggagagttccacttctcagtaccgcacgcagctggggcctccacggattttagctccgcgagtgccccagaccagagtgcccctccaagtcttgggcatgcgcatagtgagggcccggccccagcctacgtcgcttctggcccctttcgggaggcagggttcccgggacaggcatctagtccactcggtcgtgccaatggacgcttgttcgctaacccgcgagactccttcagcgcaatgggcttccagaggcggttttttcaccaagaccagtctccagtgggcgggctcaccgcggaggatatcgaaaaggctaggcaggcaaaagcccgtcccgagaacaagcagcacaagcagaccctgtccgagcatgccagagagcgcaaggtaccggttactcggatcgggcgcctggcaaattttggcggtcttgccgtcggacttggatttggagccctggcagaggtggccaagaaatctctccggagcgaggatccgtccggcaagaaagcagtactaggtagctctccgtttctgtccgaggctaatgccgaacgcatagttaggacactttgcaaggtgaggggagccgcccttaaactcgggcaaatgctgtctatacaggacgacgcttttatcaatccgcatttagccaagatcttcgagcgtgtccgacagtcagcggatttcatgcccctcaagcagatgatgaaaacgctgaacaatgaccttggccccaattggcgggacaagctcgaatacttcgaagagcggccctttgcagccgcgagcataggccaggttcacctagctcgcatgaagggcggaagggaggtggctatgaaaatccagtaccccggcgtggcccaaagcatcaactccgatgtgaataatctgatggcagtactcaatatgagtaacatgctaccagagggtctgtttcctgaacatctgatcgatgtgctgcgtcgcgagctggccttggagtgcgattaccagcgtgaggcagcctgtgctagaaagtttcgagatctgcttaaggggcacccattcttctacgtgcctgaaattgtggacgaactttgcagcccacacgtactaaccacagaactggtttctgggtttcctctggaccaggccgaggggctttctcaggagatcagaaatgagatatgctacaacatcttagtcctctgcctgagagagcttttcgaattccacttcatgcaaacggaccctaattggtcaaactttttttatgacccccagcagcataaagtggcgctgcttgacttcggcgcaaccagagagtacgaccgctcatttactgacctatatatacaaatcatacgggcagccgcagaccgagatagagaaaccgtaagggcaaagtcaatcgagatgaaatttctgaccggatatgaggtgaaagtaatggaagacgcacacctagacgctatcttgatcctcggagaagcctttgcctccgacgaaccctttgatttcggtactcagagtaccacggaaaaaatacacaatctgataccagttatgttacggcaccgtttagttcctcccccagaagagacatattctctgcacaggaagatgggcgggagtttcctcatatgctctaaactgaaagcgcggtttccttgcaaggcaatgtttgaggaagcatattctaactactgtaagcgccaagctcaacagtag

SEQ ID NO: 203431 - DNA, 1944 bp, Artificial Sequence
  derived and/or modified sequence
atggccgccatcctgggcgacaccatcatggtggccaagggcctggtgaagctgactcaggccgccgttgagacacacttacagcatcttggaattggtggcgaattgatcatggcagcacgagcgctgcagtcaaccgccgtggagcagattgggatgtttctggggaaagtccaaggtcaagataagcatgaggaatatttcgcagaaaacttcggggggcccgagggtgagttccacttcagcgttcctcacgccgctggagcctcaaccgactttagttccgcgtccgcccccgaccagtcagccccgccctccctcggtcacgcccactcagaaggtccggcaccggcctatgttgcgtccgggccgtttagggaggcaggttttcctggccaagcgtcatccccgcttggacgggccaatgggagactcttcgccaaccctcgcgacagcttctccgcaatggggttccaacggcggttcttccaccaggaccagtctcccgtgggaggcctgactgccgaagatatagagaaggctaggcaggcgaaagctagaccagaaaacaaacaacataagcagacgctgtccgagcatgctagagaacgcaaggtaccagtgacccggattggaagactggccaactttggaggtctggctgtaggcctcggcttcggggcgttggccgaggtagctaaaaagagtctgaggagcgaggacccttccggcaaaaaggctgtgctgggaagcagtcctttcctctccgaagctaatgctgagcgtattgtcagaactctgtgtaaggtgcgcggtgccgcgcttaagctgggacagatgctttcaatacaggatgacgcttttatcaatcctcacttagctaaaattttcgagagggtcagacagtccgctgattttatgcctttaaagcagatgatgaagacactgaacaatgatctgggcccaaactggcgcgacaagcttgaatactttgaagaacgccctttcgccgccgcctcgatcggacaggtccatctggcgcggatgaaagggggaagggaggtcgccatgaaaatccagtatcctggggtggcccagagcatcaacagcgatgtcaacaatttaatggctgtcctgaatatgagcaatatgttgcctgagggtcttttcccggaacacctcatcgatgtccttcgaagggagttggcactggagtgtgattaccaaagggaggccgcatgcgctcgtaagtttcgggatctgttgaaaggtcacccctttttctatgtgcctgaaatagtggacgagctttgtagcccccacgtcctcacaactgaattggtttctggattccctctagatcaggctgaagggctttctcaagagattaggaatgaaatatgctataatatactggttctgtgccttcgcgagttgtttgagttccactttatgcagacggatccgaactggtcgaacttcttttacgatccacaacagcataaggtcgccctgttggattttggagccactcgggagtatgatcgatcatttacagatctttatattcagatcatacgggcagctgctgatcgtgatcgtgagacagttagagcaaaatctatcgaaatgaaattcctcacaggatatgaggtgaaagtgatggaggacgcacaccttgacgctattcttatcttaggcgaagcattcgcatccgacgagcccttcgattttggcactcagagtacaactgagaagatccacaatttgatccctgtcatgctgcgccatcgactggtgcctccccccgaggaaacctactccctccatcggaaaatgggtgggtcattcttaatttgttccaagcttaaagcccggttcccctgtaaagcaatgtttgaagaggcctattcaaactattgcaaacgacaggcacagcagtag

SEQ ID NO: 203432 - DNA, 1797 bp, Artificial Sequence
  derived and/or modified sequence
atggccgcccgggccctgcagagcaccgccgtggagcagatcggcatgtttttaggtaaggtgcagggccaggacaaacatgaagaatactttgccgaaaatttcggggggccagaaggggaattccatttctccagtgcaagcgctccagaccaatcagctcccccttcccttggccacgcccatagtgagggcccagccccagcctatgttgcctcggggccattccgagaggccggcttccctgggcaggcaagctcaccactgggccgtgcaaatggccgcttgttcgcaaatccaagggactcttttagtgcgatggggttccagcgcaggttcttccaccaggaccaaagccccgtcggcggactgacagccgaggacattgagaaagcacgccaggcaaaagctcgcccggaaaataaacagcataaacagactctcagcgaacacgcccgggagagaaaagtcccagtcacccgaattggtagactagctaattttgggggactcgctgttggccttggcttcggcgcgttggccgaagtggctaaaaagagcctacggagtgaggacccttctgggaagaaagccgtccttggttcatcacctttcctttccgaagcgaacgcggagagaatcgtacgtaccttgtgcaaggtgagaggggctgcgcttaagcttgggcagatgctcagtatccaggatgacgcgtttattaatccccacctggctaaaatatttgaacgcgtccgccagtctgccgactttatgccgctgaagcagatgatgaagacgctaaacaatgatctgggtccaaactggagggataagttagagtactttgaagaacggccctttgctgccgccagcataggacaggttcatctggccaggatgaagggagggcgcgaagtggctatgaagattcaatacccgggcgtggcccagagcattaattccgatgtgaataatctgatggctgtgctgaatatgtcgaatatgttgcctgagggcttgtttccagaacacttaatcgacgtgcttcgcagggagctcgctctggagtgcgactaccaacgggaggcagcatgtgcccggaagttcagggacctccttaagggccacccgttcttctacgtgcccgaaattgtggacgaactgtgctcaccccacgtgctgactactgaacttgtatcaggatttccgctggatcaggcggagggcttgtcccaggaaattaggaacgaaatttgctataacattttggtgttatgtcttcgtgaactgttcgaattccactttatgcagacggacccaaactggagtaattttttctatgaccctcagcagcacaaggtggcactcctggactttggagctacgcgggaatatgaccgaagctttactgacttatacatccagattattagggcggccgctgatcgcgatcgcgaaactgtaagagcgaagagcatcgagatgaaattcctcacagggtacgaagtaaaggtcatggaagatgctcacctggacgctatcctcatcctgggggaggcttttgcttctgacgaacccttcgatttcggtacgcagtcaaccactgagaaaattcataacttgatccccgtcatgctgagacatcgcttggtcccaccccccgaggagacatattcgcttcataggaagatgggtggctccttccttatctgctctaaactgaaagctcgctttccatgtaaggctatgtttgaagaagcgtacagtaactactgtaagcggcaggcccagcagtag

SEQ ID NO: 203433 - DNA, 966 bp, Artificial Sequence
  derived and/or modified sequence
atgctgagcatccaggacgacgccttcatcaacccccacctggccaagatcttcgaaagagtgagacagtcagccgacttcatgcccttaaagcagatgatgtaccccggcgtagcgcaatcgattaattccgatgtgaacaacctgatggcggttctcaacatgtcaaacatgctgcctgaggggctgtttcctgaacacctcatcgacgtactccggagggaactggcattagaatgcgactatcaacgggaggccgcctgtgcaagaaaattccgagatctgctcaagggtcaccccttcttctatgtccccgaaatcgtggacgagctgtgcagccctcatgttctaactacagagttggtctccgggtttcccctcgaccaggctgagggcctgtctcaggagatccggaacgagatctgctacaacatcttggtcctgtgcttaagagagctgtttgagtttcactttatgcagacggaccccaattggtcgaatttcttttacgatcctcagcaacataaagtagctttgctggatttcggcgctaccagggagtacgataggtcctttacagacctgtacatccaaattattcgggccgcagcagacagggatcgcgagacagtgagggcaaaatctattgagatgaaattcctcacaggctatgaggtgaaagtaatggaggatgcacatctggacgctattcttatcctgggcgaggctttcgccagtgatgagccgttcgactttggcactcaatctacaaccgagaaaattcacaacctaatcccggtcatgcttaggcacagactcgtgccacctcccgaagaaacatactctctgcaccgtaaaatgggcggatcatttctgatttgctccaagctcaaagcaaggtttccttgcaaggccatgtttgaggaggcatatagcaattactgtaaacgccaggctcagcagtag

SEQ ID NO: 203434 - DNA, 1107 bp, Artificial Sequence
  derived and/or modified sequence
atgctgagcatccaggacgacgccttcatcaacccccacctggccaagatctttgagcgagtccgtcagtctgccgacttcatgcctcttaagcagatgatgaagacattaaacaacgatctgggccccaactggcgcgacaagttggagtattttgaggaacggccatttgcggctgcctccatcggacaggtgcatcttgcaaggatgaagggcggaagagaagtcgcaatgaaaattcagtaccctggggtagcccagtccatcaattccgatgtcaataacctaatggctgtcttgaacatgtctaatatgttacccgagggtctttttcctgaacacctcatcgacgtattgcgcagagagctcgcactcgagtgcgactaccagagggaagctgcctgcgcccgtaagtttcgcgatctgctcaaaggccatccatttttctacgttcctgagattgttgacgagctgtgctccccccatgttctgacaaccgaacttgtatcaggttttccgctcgatcaggcagagggactttcacaggagataagaaacgaaatttgctataacatcctcgttttgtgtctccgagagctgttcgaattccactttatgcaaacggatccaaactggtccaatttcttttatgacccgcagcagcacaaagtagccctcctggattttggagccacccgtgagtacgatcgctctttcactgatctgtacatccaaatcattcgcgccgcagcagatagagatagggagacagtccgggcaaagtccatcgaaatgaagttcctgactggatacgaagtcaaagtgatggaggatgcccacctggacgcgattctgatcttgggcgaggcatttgccagcgacgagccctttgacttcggtacccaatccacaacagagaaaatacataacctgattccagtgatgctgaggcatagacttgtgcctcctcccgaggagacttacagcctgcatagaaaaatgggtggcagcttcctcatttgttctaagctcaaggccaggttcccatgcaaagctatgtttgaggaagcctacagcaattattgcaagcggcaggctcagcaatag

SEQ ID NO: 203435 - DNA, 1479 bp, Artificial Sequence
  derived and/or modified sequence
atgggtttccaaagaaggttcttccatcaggatcagtccccagtcggcggactcacagccgaagatatcgagaaggccaggcaagcaaaagcgagaccagagaacaagcaacataaacaaaccctgtccgagcatgcccgagagagaaaagtgccagtgactaggatcggcaggctcgccaattttggcggactagcggtcggacttggattcggagctttggcggaagtggcaaagaaatcattacgaagtgaagatcccagcggcaagaaggccgtgctcggatccagtcctttccttagtgaagccaatgctgaacgcattgttagaactttatgcaaggttaggggagccgctctgaagctgggtcagatgctcagcatccaggatgatgcctttataaacccacacctcgccaaaatctttgagagagtgcggcagtccgccgacttcatgccactgaagcagatgatgaaaacgctcaataatgatctcgggccaaattggagggacaaactcgagtattttgaggaacgacctttcgcagccgcttcaatcggacaggttcacttggctcggatgaaaggcggaagagaagttgctatgaagatccagtatcccggagtcgcccagagtattaattcagatgtgaacaacctgatggcggtgcttaacatgtctaatatgctgcccgagggactgttccctgaacacttaatcgatgtgctgagacgcgaattggccctcgagtgtgactatcaaagagaagccgcatgtgctcgcaagtttagggacctgctgaagggccaccccttcttttatgtccccgagattgttgacgagttgtgttctccccacgttttgacaactgagctcgtaagtgggtttcctctggaccaggccgaggggctgagtcaagaaatccgcaatgaaatctgctataatatcttggtgctgtgcttgcgggagctgtttgaatttcatttcatgcagaccgacccaaattggagtaacttcttttatgatccacagcagcacaaagttgccctgctcgattttggtgctactcgggagtatgataggtcgtttacggatctgtacattcaaatcatcagagccgcagccgatagagaccgggaaacagtccgggctaagtccatcgagatgaaatttcttacagggtatgaagtaaaagttatggaggacgcccacctggatgcaatccttatcctgggcgaagcctttgcctcggacgaacctttcgattttgggactcagtccaccaccgaaaaaattcataacttgatacccgtcatgctcaggcataggctagtccccccacccgaggagacatattccctgcatcggaagatgggcggtagtttcttgatctgcagcaaactgaaggctaggttcccctgcaaagccatgttcgaggaggcgtattcaaactactgcaagcgacaggcccagcaatag

SEQ ID NO: 203436 - DNA, 1719 bp, Artificial Sequence
  derived and/or modified sequence
atggctgccatactcggggataccatcatggtagccaaaggtctggttaagctgacacaggccgcagtggaaacccacctgcagcacctcggcatcggcggtgagctgatcatgggcccagcccctgcatatgtggcgagtggccctttcagggaagccggttttcctggtcaggcttcatcacctctgggccgagccaacgggaggctgttcgctaacccacgcgactcctttagtgccatgggctttcagcggcgtttctttcaccaagaccaaagccctgtcggagggttgactgctgaggacatcgagaaggcaaggcaggctaaagctaggcccgagaacaagcagcataagcagaccttgagcgagcatgccagagagagaaaggtccccgtcactaggattggcaggctcgcaaatttcggcggtctggctgtgggtcttggattcggcgctttggcagaagtagctaaaaaatcgctcaggtctgaggacccttctggcaagaaggctgtgctgggcagttcaccttttctctccgaggccaacgcagaaaggatagtgagaacactctgcaaagtacggggtgcagccctgaagctcgggcagatgctgagcattcaggacgatgctttcatcaacccacatcttgccaaaatttttgaacgggtgcggcaaagcgctgattttatgcccctgaaacaaatgatgaagactctgaataatgatctggggccaaattggcgtgacaagctagaatacttcgaggagcgtccttttgccgctgcttctatagggcaggttcacctggctagaatgaagggagggcgtgaagtcgccatgaagatccagtatcctggcgttgcccaaagtataaacagcgatgtgaataacctgatggctgtacttaacatgtccaacatgctaccagagggtcttttccctgagcatctgattgacgtcctgcggcgagagctcgcccttgaatgcgactaccaaagggaagctgcctgtgcccgaaaattccgggacctgctgaaggggcaccctttcttttatgtccccgaaatcgtcgacgagctttgtagtccccacgtccttaccaccgaacttgtgagcgggttccccctggaccaggccgaagggcttagtcaagaaattcgcaacgaaatatgctacaacatattagtcctctgtctgagggaactatttgagttccacttcatgcaaactgatccaaattggtccaattttttctacgacccacagcagcataaagtggccttgctcgacttcggtgctactcgggaatacgataggtcttttacagatctgtacattcaaattattcgcgctgcagccgacagggatcgtgagaccgtcagggcaaagtctatagagatgaaattcttgacgggctacgaggtcaaagtgatggaagacgcccacctggacgccatcctcatactgggggaagcgttcgcatcagatgagccttttgactttggcacacagtcaacaacagagaaaatacacaacctgatcccagtgatgctgaggcatcgccttgtgccgcctccagaggagacatattcgttgcatcgaaaaatgggagggagttttctgatctgcagcaaacttaaggcacgctttccctgcaaagctatgtttgaggaggcttattccaactactgtaaaaggcaggcccagcagtag

SEQ ID NO: 203437 - DNA, 1944 bp, Artificial Sequence
  derived and/or modified sequence
atggctgccattctcggcgatactatcatggtggccaagggcctcgtcaagctgacgcaggccgcagtagagacacatctgcagcacctggggattgggggagagctcattatggccgctcgggctctgcagagtacggcggtggagcaaattgggatgttcctcggcaaggtgcagggccaggataaacacgaggaatattttgccgaaaactttggtgggccagagggagaatttcacttctctgtcccgcatgctgccggtgcatcaactgatttctcatcagccagcgcacctgatcaatctgcaccacccagcctggggcacgctcatagtgaaggtcctgcacccgcttacgtggcgtccggaccatttcgggaggctggatttcctggccaggcctcctctccactgggcagggccaatggcaggttattcgccaacccgagggacagcttttctgccatgggattccagcggcgtttcttccatcaggatcaaagtcccgtaggagggctcacagcggaagatatcgagaaagctagacaggcaaaggcccgacctgagaataaacagcacaaacagaccttgagcgagcatgccagggagaggaaagtccctgtgactagaatcgggagactcgccaactttggtgggctggcagtaggccttgggttcggcgctctggccgaggtggccaaaaaatcccttagaagtgaggacccttcggggaaaaaggccgtactggggagtagcccatttctgagtgaggccaacgctgagcggatcgtccgcactctctgcaaggtgcgcggagcagctctaaaactagggcaaatgctctccattcaagatgacgctttcatcaatcctcatcttgcaaagatattcgagcgggtacgacagagtgccgactttatgcctctcaagcaaatgatgaaaacactgaataatgacttaggccctaactggagagataagctggagtacttcgaagagcggccattcgccgcagcttctattggacaggtgcacctcgctagaatgaaggggggaagggaagtggccatgaaaatacagtatccgggagttgcccagtctattaatagcgatgttaataacctcatggctgtgctgaacatgtctaacatgctaccggagggtctgttcccagaacatctgatcgacgttcttagacgcgagttagcgctagaatgcgattatcagcgagaggccgcttgcgccagaaaatttagagatttgctcaagggccaccctttcttctatgtccctgagattgtcgacgagctttgtagtccgcacgtccttaccacggaactggtctctggctttcccctggaccaggccgaagggttaagtcaagagattcggaatgaaatctgctataacatacttgtactgtgtttgagagaactgtttgagttccactttatgcagaccgatccaaattggagcaattttttctatgatccgcagcaacataaggtggccctgcttgattttggcgcaacaagggagtacgatcggagcttcacagatctgtacatccagattatccgggctgctgcagatagggaccgagaaacggtgcgcgctaagtctatagagatgaagttcctgaccggttacgaggttaaagtcatggaagatgcacacttggacgcgattctgatcttaggcgaagcattcgcatcggatgagccttttgatttcggtacacagtccacaactgagaaaatccataacttgatccctgtgatgctcagacatcgtctggtgcctccaccggaagagacatattctctgcacaggaagatggggggaagtttcctcatctgttccaaactgaaggctaggtttccatgtaaggccatgtttgaagaagcctacagcaactactgcaagcgccaggcccaacagtag

SEQ ID NO: 203438 - DNA, 1788 bp, Artificial Sequence
  derived and/or modified sequence
atgttcctgggtaaggtgcagggacaggataagcacgaagaatactttgctgaaaacttcggcggaccggagggggagtttcatttctctgtacctcacgctgccggtgctagtactgacttctctagcgcctccgcaccggatcagtctgccccaccctccctgggccacgcacattcagagggacccgctcccgcttacgttgcctctggcccttttcgagaagcaggattccccggacaggcctctagtcctttagggagggccaacggaagactattcgcaaaccctagggattcattcagcgccatgggctttcagcgtaggttttttcaccaggatcaatctcctgtggggggactaacagccgaggacattgaaaaggcaagacaagccaaagctcgaccggagaataagcagcataaacagacgctgagcgagcatgcaagggagaggaaggtacccgttacgcgaatcggtcgtttggccaacttcggcggattagccgtcgggttagggtttggtgccctggctgaagtagctaagaagtcgctgagatctgaggacccatccggtaagaaggcagtcctgggatccagtccgttcctctccgaagcaaatgccgagagaattgtcagaacgctctgcaaggtgagaggtgcagctttgaagctggggcagatgctctctattcaggatgacgcttttatcaacccacatcttgccaagatatttgaacgcgtgcggcaatcagctgatttcatgcctctcaaacagatgatgaaaaccctcaataatgacttaggaccaaattggagagataagctggagtacttcgaggagaggccgttcgccgctgcctccatcggccaggtgcatctggctagaatgaagggcggtagagaggtcgcaatgaagatacagtatccgggagtggctcagtcgatcaactcagacgtgaacaatctcatggccgtgctcaacatgagcaatatgttgcccgagggcttgtttcctgagcacctgattgacgtcctgcggagagagttggccctcgagtgtgattatcagagggaggctgcatgcgcccgaaaatttcgtgacctcttgaagggccacccattcttctacgtgccggaaatcgtagatgaactttgttcacctcatgtactcacaactgagctggtgtcagggtttcctttggatcaggctgaaggcctgtcccaagagatcagaaatgagatctgttacaacatcctggtgctgtgcttaagggagttgtttgaatttcactttatgcaaactgaccctaattggagtaattttttttacgatccccaacagcacaaggtcgctctcttagactttggagccaccagggaatacgaccgaagtttcactgatctgtatatccagatcatccgtgctgccgctgatcgcgaccgggagactgtcagagcaaagagcatcgagatgaagttcctgacggggtacgaggttaaagtaatggaggatgcacatctcgatgcaatcctcattctaggggaggctttcgcctcagatgaaccattcgatttcggaactcaaagcaccaccgaaaagatccacaacctgatcccggtcatgctgcgtcatcgtttggttccaccccctgaggagacatacagtctccacaggaaaatggggggatcgttccttatctgcagtaagctgaaagctcgctttccttgcaaagcgatgttcgaggaagcctacagtaattattgcaaaagacaggcacagcagtag

SEQ ID NO: 203439 - DNA, 1944 bp, Artificial Sequence
  derived and/or modified sequence
atggcggctatcctgggtgacacaatcatggtggcgaagggcctggtgaaattgacccaggctgcagttgagactcatctccagcatctgggaattgggggagaactgatcatggccgctcgggctctgcagagcaccgccgtagaacagatcggaatgttcttggggaaggtgcagggccaagataagcatgaagaatattttgctgaaaactttggtggcccagaaggagaatttcacttcagtgtcccccatgcggcaggtgccagcactgatttcagttctgcgtccgctcctgaccaaagcgcccctcctagtctgggacacgcgcactccgaaggacctgctcccgcttacgtggcctctggccctttccgcgaggccggattcccaggtcaggcatcaagcccactgggcagggccaacggacgattgtttgctaacccacgggatagtttcagcgcgatgggcttccagcgcagattctttcatcaggaccagagcccggttggcggactcacagcagaggacatcgaaaaggccaggcaggccaaggccagacccgaaaataagcaacataagcagaccttgagcgagcacgctagggagcggaaagtcccagtgacccgcattggcagactggccaatttcggtgggttagccgtgggcctcgggtttggcgctctcgccgaagtagcaaagaagagtctgcgttccgaagaccctagtggtaaaaaagcagtccttgggagcagcccgttcctttccgaggccaatgcggaacggatcgtgcgaacgctgtgcaaggtgcggggagcagctctcaagttaggacaaatgctgagcattcaagatgacgcattcatcaatccacatctggctaaaatcttcgagcgagtgcggcagtcagctgactttatgcctctcaaacagatgatgaaaaccttaaataatgatctgggtccaaactggcgcgataagttagaatacttcgaggagcgccctttcgctgctgcgtccattggccaggtacatctggccaggatgaaggggggtagggaggtggccatgaaaattcagtaccccggagtcgcacagagtatcaacagtgacgtgaataacctgatggcagttctgaatatgagcaacatgcttcccgaaggattgttccccgaacacttgatcgatgttttacgacgggaactggccttggagtgcgactaccagagggaggcagcctgcgcaagaaagttccgcgaccttctgaagggacatccttttttctacgttccagaaattgtggacgaattgtgttcaccgcacgttctgacaactgaattagtgtctggcttccccttggatcaggccgaggggctctcgcaggaaatcagaaacgaaatttgttacaatattcttgttttatgcctccgggaactcttcgagttccacttcatgcaaacagaccccaattggagcaatttcttctatgatcctcagcagcataaggtggcattgctggactttggagcaaccagagaatatgataggtcctttacagatctgtatatccagatcattcgagcagccgctgacagggatagggagacagtgagggcaaaatcgatcgagatgaaattccttacgggctacgaggtcaaggtgatggaagacgcgcacctagacgcaatactcatattgggggaagccttcgccagtgacgaaccgtttgatttcgggacacaaagtacaaccgagaaaatacacaatcttatcccagtgatgcttagacacaggttagtaccaccacccgaggaaacctattccttgcaccgcaagatgggtgggtccttcctgatttgttctaagttgaaagcacgcttcccctgtaaggccatgtttgaagaggcttacagcaactattgtaagagacaggcccaacaatag

SEQ ID NO: 203440 - DNA, 1797 bp, Artificial Sequence
  derived and/or modified sequence
atggctgcacgcgctttgcaatccaccgctgtggagcaaataggaatgttcttgggtaaggtccagggccaggataagcacgaggaatactttgcagagaatttcggtgggccagagggcgagtttcattttagctctgcctctgcccctgatcagagcgcaccaccctccctcggtcacgcacattccgagggacccgctcccgcttatgtggcatccggcccttttcgggaagctggattccccggtcaagccagcagcccattaggccgagcgaacggacgattattcgcaaatccacgggactccttctcggccatgggattccagagacgattcttccaccaggaccagtccccagtgggaggcctgactgccgaggacatcgagaaggcacgacaagccaaggcgcgtccagagaataaacaacacaagcagacactctcagaacacgcacgcgaacgtaaggtgcccgtaacacgaatcggcagattggccaactttggcggactcgccgtgggcctgggtttcggggctctggcagaagttgccaagaaaagtctccggtctgaagatccaagcggtaaaaaagcagtcctcgggtccagcccattcctgtccgaggcaaatgccgagagaatcgtgagaactttgtgtaaggtccgcggagctgcactcaagctgggccagatgctgagcattcaggacgacgcgtttatcaatccgcaccttgctaagattttcgaaagagttcgccagtcggcggattttatgcctctgaagcaaatgatgaagaccttgaataacgacttaggaccaaactggagggataagctggagtacttcgaagaacggccattcgcggctgcctctattggccaggtgcatttggctcgaatgaagggtgggagggaggtcgcaatgaaaattcagtatccaggcgttgcccaaagtatcaatagtgacgtgaataatctgatggccgtgctgaatatgagtaacatgctccctgaaggcctgtttcctgagcacctgatcgacgtcctgaggagggaacttgctttggaatgcgactaccagagggaggccgcatgcgccagaaaattccgcgacttactgaaaggccatccctttttttatgtgcctgagattgtggacgagctatgctcaccacacgtcctgaccaccgaactggtaagcggcttcccactcgatcaggccgaaggcctgagccaggaaatccggaacgagatttgttacaacatcctggtgttgtgcctcagggagttattcgaatttcattttatgcagacagatcccaattggagtaatttcttctatgatccacagcagcacaaggtggccctgcttgactttggtgctacccgcgagtacgaccggtcatttacggatctgtacattcaaattattcgggctgccgcagaccgggaccgcgaaactgttagagccaaatccattgagatgaaatttcttacaggctacgaagtgaaagttatggaagacgcgcatctggatgcaattttaattctcggcgaggcttttgcttccgatgaaccgtttgattttggcactcagtcaactacggagaagatccacaatctcatacccgtcatgttgcggcatcggctggtgccgccacctgaagaaacatattcactgcacagaaaaatgggaggctctttcttaatttgttccaaattgaaagcaaggttcccgtgtaaggctatgtttgaagaggcctacagcaattattgtaagcgccaggcacaacagtag

SEQ ID NO: 203441 - DNA, 966 bp, Artificial Sequence
  derived and/or modified sequence
atgttatcaatccaggatgatgcatttatcaatccgcatctggcgaaaatcttcgagcgtgttcgtcagagtgccgacttcatgccactgaagcagatgatgtaccccggagtggcccagtcgataaactctgacgtcaataatttaatggcggtactcaacatgtcgaacatgctcccagagggactctttccagagcatctgattgacgtactgagacgcgaactagcccttgagtgcgactaccagcgggaagctgcatgtgccagaaaattccgggaccttttgaaaggacatcctttcttctatgtacccgaaattgtcgacgagctgtgctctccacatgtcctgacaacagaacttgtttctggctttccgcttgatcaagccgagggacttagtcaggagatacggaacgaaatctgttacaatatactagttctgtgtctacgggaactgtttgaatttcacttcatgcagacagatcccaactggagcaacttcttctacgatccccagcagcataaggtggccctgcttgattttggcgctaccagggaatatgatcgttccttcaccgatctttacatccaaatcattcgagccgctgccgaccgtgatagggagactgtcagagccaaatctatcgagatgaagtttcttacaggctatgaagtcaaagttatggaagacgcgcacctggatgctatcctgattctcggagaggcttttgccagcgatgagcccttcgatttcgggacacaaagtacgactgagaagattcacaacctgattcctgtcatgctcagacatagattggtgcctccacccgaggagacctattctcttcaccggaagatggggggatcattcttaatatgtagtaagttgaaggcccgtttcccgtgcaaagctatgttcgaggaagcgtactctaattactgcaagaggcaggcccagcaatag

SEQ ID NO: 203442 - DNA, 1107 bp, Artificial Sequence
  derived and/or modified sequence
atgttaagtatccaggacgacgcttttatcaatccccatttggcgaagattttcgagcgggtgcggcagtctgctgactttatgcctctgaagcagatgatgaaaaccttgaataatgatctgggacccaattggagagacaagcttgaatatttcgaagagcgaccgtttgctgccgcatcaattggccaggtacatcttgcgcgtatgaaaggtggaagagaagttgctatgaagatacagtacccaggcgtggcgcagagcatcaattctgatgttaacaatctgatggctgtgctcaacatgtcgaatatgcttcccgaaggactgtttccggagcacctgattgatgtgttacgccgagagctcgcactcgagtgtgattaccagagggaggccgcttgcgccagaaagttcagagatctgctgaagggtcatccttttttttatgtacctgagatcgtggacgaattatgttcaccacatgtcttgacaacagagcttgtgagcggcttcccgctggatcaggctgaaggcttgtctcaggagattaggaatgaaatttgctataacatactggtgctgtgtttaagagagctgtttgagtttcatttcatgcagactgaccctaactggagtaatttcttctatgaccctcaacagcataaagtggctcttctagacttcggagcaacccgggagtatgaccggagttttactgacctgtatatacagataattagagccgctgccgatagggaccgagagacagttcgggctaagtccattgaaatgaagtttttaaccggatacgaagtgaaggtcatggaagacgcccaccttgatgctatcctaatcctaggagaggccttcgcctccgatgagccctttgatttcgggactcagtccaccaccgagaagatccacaatttaattccagttatgctgcgtcaccggttggtgccacctccggaggaaacctatagcctacaccggaaaatgggcggttcattcctgatctgctccaaattgaaagcacgctttccatgcaaagccatgttcgaagaagcctattccaactattgcaaaaggcaagcccagcagtag

SEQ ID NO: 203443 - DNA, 2660 bp, Artificial Sequence
  derived and/or modified sequence
agatccggagcgcgtggcgggcgtcagcgcggtggccagcgcgcagaggcgggcgcggaggcggctagaaggtgaccgcggatcccagcttcctgcagccagccctgaaggatggctgccatattgggagacaccatcatggtggctaaaggccttgtcaagctgacccaggcggccgtggaaacccacctgcagcctccgctcccgaccagtcagcgcccccatccctgggtcatgcccacagcgagggcccagctcctgcctacgtggccagtggaccctttagagaagccgggttccccggccaggcctcctcccctctgggcagggccaacgggaggctctttgcaaaccccagagactcattctctgccatgggctttcagcgaaggttcttccaccaggaccaatcccctgttgggggcctcacagccgaggacattgagaaggcccggcaggctaaggctcgccccgagaacaagcagcacaaacagacgctcagcgagcatgcccgggagcggaaggtgcctgtgacgaggattggccggctggccaacttcggaggtctggccgtgggcctgggcttcggggcactggcagaggtcgccaagaagagcctgcgctccgaggacccctcagggaagaaggccgtgctgggttccagtcctttcctgtccgaggccaatgcagagcggatcgtgcgcacgctctgcaaggtgcgtggtgcggcactcaagctgggccagatgctgagcatccaggatgatgcctttatcaacccccacctggctaagatcttcgagcgggtgcggcagagcgcggacttcatgccactgaagcagatgatgaaaactctcaacaacgacctgggccccaactggcgggacaagttggaatacttcgaggagcggcccttcgccgccgcatccattgggcaggtgcacttggcccgaatgaagggcggccgcgaggtggccatgaagatccagtaccctggcgtggcccagagcatcaacagtgatgtcaacaacctcatggccgtgttgaacatgagcaacatgcttccagaaggcctgttccccgagcacctgatcgacgtgctgaggcgggagctggccctggagtgtgactaccagcgagaggccgcctgtgcccgcaagttcagggacctgctgaagggccaccccttcttctatgtgcctgagattgtggatgagctctgcagcccacatgtgctgaccacagagctggtgtctggcttccccctggaccaggccgaagggctcagccaggagattcggaacgagatctgctacaacatcctggttctgtgcctgagggagctgttcgagttccacttcatgcaaacagaccccaactggtccaacttcttctatgacccccagcagcacaaggtggctcttttggattttggggcaacgcgggaatatgacagatccttcaccgacctctacattcagatcatcagggctgctgccgacagggacagggagactgtgcgggcgaaatccatagagatgaagttcctcaccggctacgaggtcaaggtcatggaagacgcccacttggatgccatcctcatcctgggggaggccttcgcctctgatgagccttttgattttggcactcagagcaccaccgagaagatccacaacctgattcccgtcatgctgaggcaccgtctcgtccccccacccgaggaaacctactccctgcacaggaagatggggggctccttcctcatctgctccaagctgaaggcccgcttcccctgcaaggccatgttcgaggaggcctacagcaactactgcaagaggcaggcccagcagtagggctgcgggccacgcccaggccggctccgcgggaactctctccctcagacaggccaaaaaccagtagcgaggtcgtggtgatgctctttttaactcctttgcccaataaggggggtggctgcctggagccccgtagccagcgctttccacggtttctgttgctaaatggttgtagggtgagaagtgcaagaatgaagatgaagccccactgctcggtcagtctgcctccgtgtgtcctctgaaataagcagatgaagatgaaagggcaactttgttttcttctttttcctgatgtgaatgttaagcagaagggagagagtccttactcccttccaatctctgttcagtgcaaaacccagaaacatgaacagatacgattgtgggattttatcatctgtgtagtaggtgtgtgtatgtgtttctagagtgagatttgtgttttctgcccttttcctctccagccgatgggctggagctgggagaggtgctgagctaacagtgccaacaagtgctccttaagcctgcgaggcccaggcctgtggggctggttctcacctttgacagctgaatgttcctaaagaactgctgccccacagtgagggtgggagcagcggaacagggaatgccagacacaggctcgctgctgctggaaggcggggtgggacttccttcctctgtccggagaggcacaggtgtcaccagttccagccaaaggctcctcacaggcgctgtgaatttttgtacaagtcttgtaattatcgaatcaacaacttgtttcaatttaataaaaatgctcatgggaagtgc

SEQ ID NO: 203444 - DNA, 2642 bp, Artificial Sequence
  derived and/or modified sequence
aaacagatccggagcgcgtggcgggcgtcagcgcggtggccagcgcgcagaggcgggcgcggaggcggctagaaggtgaccgcggatcccagcttcctgcagccagccctgaaggatggctgccatattgggagacaccatcatggtggctaaaggccttgtcaagctgacccaggcggccgtggaaacccacctgcagcacttgggcatcggaggggagctgatcatgggcccagctcctgcctacgtggccagtggaccctttagagaagccgggttccccggccaggcctcctcccctctgggcagggccaacgggaggctctttgcaaaccccagagactcattctctgccatgggctttcagcgaaggttcttccaccaggaccaatcccctgttgggggcctcacagccgaggacattgagaaggcccggcaggctaaggctcgccccgagaacaagcagcacaaacagacgctcagcgagcatgcccgggagcggaaggtgcctgtgacgaggattggccggctggccaacttcggaggtctggccgtgggcctgggcttcggggcactggcagaggtcgccaagaagagcctgcgctccgaggacccctcagggaagaaggccgtgctgggttccagtcctttcctgtccgaggccaatgcagagcggatcgtgcgcacgctctgcaaggtgcgtggtgcggcactcaagctgggccagatgctgagcatccaggatgatgcctttatcaacccccacctggctaagatcttcgagcgggtgcggcagagcgcggacttcatgccactgaagcagatgatgaaaactctcaacaacgacctgggccccaactggcgggacaagttggaatacttcgaggagcggcccttcgccgccgcatccattgggcaggtgcacttggcccgaatgaagggcggccgcgaggtggccatgaagatccagtaccctggcgtggcccagagcatcaacagtgatgtcaacaacctcatggccgtgttgaacatgagcaacatgcttccagaaggcctgttccccgagcacctgatcgacgtgctgaggcgggagctggccctggagtgtgactaccagcgagaggccgcctgtgcccgcaagttcagggacctgctgaagggccaccccttcttctatgtgcctgagattgtggatgagctctgcagcccacatgtgctgaccacagagctggtgtctggcttccccctggaccaggccgaagggctcagccaggagattcggaacgagatctgctacaacatcctggttctgtgcctgagggagctgttcgagttccacttcatgcaaacagaccccaactggtccaacttcttctatgacccccagcagcacaaggtggctcttttggattttggggcaacgcgggaatatgacagatccttcaccgacctctacattcagatcatcagggctgctgccgacagggacagggagactgtgcgggcgaaatccatagagatgaagttcctcaccggctacgaggtcaaggtcatggaagacgcccacttggatgccatcctcatcctgggggaggccttcgcctctgatgagccttttgattttggcactcagagcaccaccgagaagatccacaacctgattcccgtcatgctgaggcaccgtctcgtccccccacccgaggaaacctactccctgcacaggaagatggggggctccttcctcatctgctccaagctgaaggcccgcttcccctgcaaggccatgttcgaggaggcctacagcaactactgcaagaggcaggcccagcagtagggctgcgggccacgcccaggccggctccgcgggaactctctccctcagacaggccaaaaaccagtagcgaggtcgtggtgatgctctttttaactcctttgcccaataaggggggtggctgcctggagccccgtagccagcgctttccacggtttctgttgctaaatggttgtagggtgagaagtgcaagaatgaagatgaagccccactgctcggtcagtctgcctccgtgtgtcctctgaaataagcagatgaagatgaaagggcaactttgttttcttctttttcctgatgtgaatgttaagcagaagggagagagtccttactcccttccaatctctgttcagtgcaaaacccagaaacatgaacagatacgattgtgggattttatcatctgtgtagtaggtgtgtgtatgtgtttctagagtgagatttgtgttttctgcccttttcctctccagccgatgggctggagctgggagaggtgctgagctaacagtgccaacaagtgctccttaagcctgcgaggcccaggcctgtggggctggttctcacctttgacagctgaatgttcctaaagaactgctgccccacagtgagggtgggagcagcggaacagggaatgccagacacaggctcgctgctgctggaaggcggggtgggacttccttcctctgtccggagaggcacaggtgtcaccagttccagccaaaggctcctcacaggcgctgtgaatttttgtacaagtcttgtaattatcgaatcaacaacttgtttcaatttaataaaaatgctcatgggaagtgct

SEQ ID NO: 203445 - DNA, 2872 bp, Artificial Sequence
  derived and/or modified sequence
gttggtaaacagatccggagcgcgtggcgggcgtcagcgcggtggccagcgcgcagaggcgggcgcggaggcggctagaaggtgaccgcggatcccagcttcctgcagccagccctgaaggatggctgccatattgggagacaccatcatggtggctaaaggccttgtcaagctgacccaggcggccgtggaaacccacctgcagcacttgggcatcggaggggagctgatcatggcggccagggccctgcagtccacggctgtggagcagattggcatgttcttggggaaggtgcagggtcaggataaacatgaagaatattttgctgagaacttcggcggcccagaaggggagttccacttctcagtcccgcatgcagccggagcctccacagacttctcttcagcctccgctcccgaccagtcagcgcccccatccctgggtcatgcccacagcgagggcccagctcctgcctacgtggccagtggaccctttagagaagccgggttccccggccaggcctcctcccctctgggcagggccaacgggaggctctttgcaaaccccagagactcattctctgccatgggctttcagcgaaggttcttccaccaggaccaatcccctgttgggggcctcacagccgaggacattgagaaggcccggcaggctaaggctcgccccgagaacaagcagcacaaacagacgctcagcgagcatgcccgggagcggaaggtgcctgtgacgaggattggccggctggccaacttcggaggtctggccgtgggcctgggcttcggggcactggcagaggtcgccaagaagagcctgcgctccgaggacccctcagggaagaaggccgtgctgggttccagtcctttcctgtccgaggccaatgcagagcggatcgtgcgcacgctctgcaaggtgcgtggtgcggcactcaagctgggccagatgctgagcatccaggatgatgcctttatcaacccccacctggctaagatcttcgagcgggtgcggcagagcgcggacttcatgccactgaagcagatgatgaaaactctcaacaacgacctgggccccaactggcgggacaagttggaatacttcgaggagcggcccttcgccgccgcatccattgggcaggtgcacttggcccgaatgaagggcggccgcgaggtggccatgaagatccagtaccctggcgtggcccagagcatcaacagtgatgtcaacaacctcatggccgtgttgaacatgagcaacatgcttccagaaggcctgttccccgagcacctgatcgacgtgctgaggcgggagctggccctggagtgtgactaccagcgagaggccgcctgtgcccgcaagttcagggacctgctgaagggccaccccttcttctatgtgcctgagattgtggatgagctctgcagcccacatgtgctgaccacagagctggtgtctggcttccccctggaccaggccgaagggctcagccaggagattcggaacgagatctgctacaacatcctggttctgtgcctgagggagctgttcgagttccacttcatgcaaacagaccccaactggtccaacttcttctatgacccccagcagcacaaggtggctcttttggattttggggcaacgcgggaatatgacagatccttcaccgacctctacattcagatcatcagggctgctgccgacagggacagggagactgtgcgggcgaaatccatagagatgaagttcctcaccggctacgaggtcaaggtcatggaagacgcccacttggatgccatcctcatcctgggggaggccttcgcctctgatgagccttttgattttggcactcagagcaccaccgagaagatccacaacctgattcccgtcatgctgaggcaccgtctcgtccccccacccgaggaaacctactccctgcacaggaagatggggggctccttcctcatctgctccaagctgaaggcccgcttcccctgcaaggccatgttcgaggaggcctacagcaactactgcaagaggcaggcccagcagtagggctgcgggccacgcccaggccggctccgcgggaactctctccctcagacaggccaaaaaccagtagcgaggtcgtggtgatgctctttttaactcctttgcccaataaggggggtggctgcctggagccccgtagccagcgctttccacggtttctgttgctaaatggttgtagggtgagaagtgcaagaatgaagatgaagccccactgctcggtcagtctgcctccgtgtgtcctctgaaataagcagatgaagatgaaagggcaactttgttttcttctttttcctgatgtgaatgttaagcagaagggagagagtccttactcccttccaatctctgttcagtgcaaaacccagaaacatgaacagatacgattgtgggattttatcatctgtgtagtaggtgtgtgtatgtgtttctagagtgagatttgtgttttctgcccttttcctctccagccgatgggctggagctgggagaggtgctgagctaacagtgccaacaagtgctccttaagcctgcgaggcccaggcctgtggggctggttctcacctttgacagctgaatgttcctaaagaactgctgccccacagtgagggtgggagcagcggaacagggaatgccagacacaggctcgctgctgctggaaggcggggtgggacttccttcctctgtccggagaggcacaggtgtcaccagttccagccaaaggctcctcacaggcgctgtgaatttttgtacaagtcttgtaattatcgaatcaacaacttgtttcaatttaataaaaatgctcatgggaagtgc

SEQ ID NO: 203446 - DNA, 2743 bp, Artificial Sequence
  derived and/or modified sequence
gagttggtaaacagatccggagcgcgtggcgggcgtcagcgcggtggccagcgcgcagaggcgggcgcggaggcggctagaaggtgaccgcggatcccagcttcctgcagccagggccctgcagtccacggctgtggagcagattggcatgttcttggggaaggtgcagggtcaggataaacatgaagaatattttgctgagaacttcggcggcccagaaggggagttccacttctcagtcccgcatgcagccggagcctccacagacttctcttcagcctccgctcccgaccagtcagcgcccccatccctgggtcatgcccacagcgagggcccagctcctgcctacgtggccagtggaccctttagagaagccgggttccccggccaggcctcctcccctctgggcagggccaacgggaggctctttgcaaaccccagagactcattctctgccatgggctttcagcgaaggttcttccaccaggaccaatcccctgttgggggcctcacagccgaggacattgagaaggcccggcaggctaaggctcgccccgagaacaagcagcacaaacagacgctcagcgagcatgcccgggagcggaaggtgcctgtgacgaggattggccggctggccaacttcggaggtctggccgtgggcctgggcttcggggcactggcagaggtcgccaagaagagcctgcgctccgaggacccctcagggaagaaggccgtgctgggttccagtcctttcctgtccgaggccaatgcagagcggatcgtgcgcacgctctgcaaggtgcgtggtgcggcactcaagctgggccagatgctgagcatccaggatgatgcctttatcaacccccacctggctaagatcttcgagcgggtgcggcagagcgcggacttcatgccactgaagcagatgatgaaaactctcaacaacgacctgggccccaactggcgggacaagttggaatacttcgaggagcggcccttcgccgccgcatccattgggcaggtgcacttggcccgaatgaagggcggccgcgaggtggccatgaagatccagtaccctggcgtggcccagagcatcaacagtgatgtcaacaacctcatggccgtgttgaacatgagcaacatgcttccagaaggcctgttccccgagcacctgatcgacgtgctgaggcgggagctggccctggagtgtgactaccagcgagaggccgcctgtgcccgcaagttcagggacctgctgaagggccaccccttcttctatgtgcctgagattgtggatgagctctgcagcccacatgtgctgaccacagagctggtgtctggcttccccctggaccaggccgaagggctcagccaggagattcggaacgagatctgctacaacatcctggttctgtgcctgagggagctgttcgagttccacttcatgcaaacagaccccaactggtccaacttcttctatgacccccagcagcacaaggtggctcttttggattttggggcaacgcgggaatatgacagatccttcaccgacctctacattcagatcatcagggctgctgccgacagggacagggagactgtgcgggcgaaatccatagagatgaagttcctcaccggctacgaggtcaaggtcatggaagacgcccacttggatgccatcctcatcctgggggaggccttcgcctctgatgagccttttgattttggcactcagagcaccaccgagaagatccacaacctgattcccgtcatgctgaggcaccgtctcgtccccccacccgaggaaacctactccctgcacaggaagatggggggctccttcctcatctgctccaagctgaaggcccgcttcccctgcaaggccatgttcgaggaggcctacagcaactactgcaagaggcaggcccagcagtagggctgcgggccacgcccaggccggctccgcgggaactctctccctcagacaggccaaaaaccagtagcgaggtcgtggtgatgctctttttaactcctttgcccaataaggggggtggctgcctggagccccgtagccagcgctttccacggtttctgttgctaaatggttgtagggtgagaagtgcaagaatgaagatgaagccccactgctcggtcagtctgcctccgtgtgtcctctgaaataagcagatgaagatgaaagggcaactttgttttcttctttttcctgatgtgaatgttaagcagaagggagagagtccttactcccttccaatctctgttcagtgcaaaacccagaaacatgaacagatacgattgtgggattttatcatctgtgtagtaggtgtgtgtatgtgtttctagagtgagatttgtgttttctgcccttttcctctccagccgatgggctggagctgggagaggtgctgagctaacagtgccaacaagtgctccttaagcctgcgaggcccaggcctgtggggctggttctcacctttgacagctgaatgttcctaaagaactgctgccccacagtgagggtgggagcagcggaacagggaatgccagacacaggctcgctgctgctggaaggcggggtgggacttccttcctctgtccggagaggcacaggtgtcaccagttccagccaaaggctcctcacaggcgctgtgaatttttgtacaagtcttgtaattatcgaatcaacaacttgtttcaatttaataaaaatgctcatgggaagtgc

SEQ ID NO: 203447 - DNA, 5523 bp, Artificial Sequence
  derived and/or modified sequence
cttggaggtccccagagagcagggagacaaatgaacccagaacacaaatggcaaagaagaaaaatgagagaatttgtaaaagacagcattcgaacatgccgaacaagagcagggtactggtgttcaaacacctgtatctcccccgtgtaacccgtcaactaatatctttccatatttgctccagatttgtctttagaaataaaacccacgttctgaagtcctgtttgtatgtggccccagtcctgttgcctccgcctcctgtcctgaagtcgatttctgcccttctcatctatggttagttttgttttgtatgttggcatgttttcttaactttacagaaatggtatcatactgtacatatttgataattttttaaaatattgcattctggaggcatgtataaatgtagctccagttcatttattttatttattttttgagatggagttttgctcttgtcacccaggctagagtgcaatggcgtgatgttggctcactgcaacctctgcctcctgggttcaagcaattctcctgtctcaatttcctgagtagctgggattacagttgcccgccaccatgcctggctaattttgtattttagtagagacggggtttcaccacgttagccaggctggtctcaaactcctgactgcaggtgatccacgcaccttggcctccaaaagtgctgggattacaggcgtgagccaccgtgcccagcccagttattttaactattgtatagtgttccattgtatgagttctactgtttatatgctattgatcgacctgtaggggttttgcagtgtttctgtattacagctgtgctgcagtgagcatcccatcacattgtgtggatttgaggaagtattggaattcccccaattgactggacattcccaattaccctccaagtatgtgtctgtttatccttccatccgcaatctgagagttccccaactctataatacttggtgtcatcagacttttcatcttgtctgattggatgggtgtcatttcctttaggttttataattatcttttcatatgtgtattggctgtacaaggttccttctctgttcattattattaatttttttagacagagtctcgcgctgtcgcccaggctggagtgcagcagcgtgatcttggctcactgcaagctccgcctcccgggttcatgccattctcctgcctcagcctcctgagtagctgggattacaggtgcctgccatcacgcccggctagtttttttgtattttgagtagagatggggtttcaccgtgttagccaggagggtctcgatctcctgacctcgtgatccacccgcctcggcctcccaaagtgctgggattacaggtgtgagtcactgcgcccagcccaagtttccttctctgttacttgttcatatcctctgcccatttttcacttggattttttgtcttacggatatttaagcctcttaaaatatatattctggagagatgctaatctttgattaattatatgcattgcaaatgtctggtacattgtggcttgcctctcttccctgcctttaggagtgttttgctggacccaagtaatttttaaatgttaatgttattaaatctatcagttttttgcttgtatggcttatgccattgaatcttgttttaagagatccttccctaccctcaaggttttctaaatttttattttcataataagatttttagttcatctgaaatgtatttttatgattgtatttagtagggacctaattttgtttttctttgtaaccaggtgtcccagcactgtttactgaacagtctctcctttctcgctggtctgtagaactctcctgacatataccaagtttccataagtgggtggatgggttcctgagctctctactgttaatagaacttgctctctcgcaggccaatgcctcaccaggtgattgaagcagagaaacttaggtggtgaaaggagaagatggggcctgtcctgagagtttctgttcctgagatgctagaggcagaggtttccagaaccacaagacagacccaagagggctgtgttggcaaaacaaatggcagagtggagctggccagaggcatctgtgcgtggcgactccaagagagcacccgactccagatggcgacactgcaggatggagcggggcatgcctgcagacaggtgtcagagacggggtcttgctgtattgcccaggctagatttgaactcctggcctgaagtaatcctcccaccttggcctcccaaagttctgggactacagaccattcgtatatatcttctttggagaaatgtgtggtgcaatcttggttcactgcaacttccacctcctgagttccagcaattctccagtctcagcctctcgagtagctgggattacaggcatgtgccaccatgcctggccatcttcgctcttgagcacctgtgtcatgatggcgtctcactcttgttgcccaggctggagtgcaatggtgcgatttggctcactgtggcctctgcctcccgggttcaagcgattctcctgcctcagcctcccataccagttcaactttttcagattccacgtgagggagtgacggggcaaatctgcgtgctgctggtggcggtgcctcccagggctgctcggcggggacgccgagggctgcacccgagctccatcccgtgttggctgcgcgccctccaaaaccccggctgtcagcgactgcgggcacctgcacgccgacgagaccggcgggcggacagcgactccgccctgaaggatggctgccatattgggagacaccatcatggtggctaaaggccttgtcaagctgacccaggcggccgtggaaacccacctgcagcacttgggcatcggaggggagctgatcatggcggccagggccctgcagtccacggctgtggagcagattggcatgttcttggggaaggtgcagggtcaggataaacatgaagaatattttgctgagaacttcggcggcccagaaggggagttccacttctcagtcccgcatgcagccggagcctccacagacttctcttcagcctccgctcccgaccagtcagcgcccccatccctgggtcatgcccacagcgagggcccagctcctgcctacgtggccagtggaccctttagagaagccgggttccccggccaggcctcctcccctctgggcagggccaacgggaggctctttgcaaaccccagagactcattctctgccatgggctttcagcgaaggttcttccaccaggaccaatcccctgttgggggcctcacagccgaggacattgagaaggcccggcaggctaaggctcgccccgagaacaagcagcacaaacagacgctcagcgagcatgcccgggagcggaaggtgcctgtgacgaggattggccggctggccaacttcggaggtctggccgtgggcctgggcttcggggcactggcagaggtcgccaagaagagcctgcgctccgaggacccctcagggaagaaggccgtgctgggttccagtcctttcctgtccgaggccaatgcagagcggatcgtgcgcacgctctgcaaggtgcgtggtgcggcactcaagctgggccagatgctgagcatccaggatgatgcctttatcaacccccacctggctaagatcttcgagcgggtgcggcagagcgcggacttcatgccactgaagcagatgatgaaaactctcaacaacgacctgggccccaactggcgggacaagttggaatacttcgaggagcggcccttcgccgccgcatccattgggcaggtgcacttggcccgaatgaagggcggccgcgaggtggccatgaagatccagtaccctggcgtggcccagagcatcaacagtgatgtcaacaacctcatggccgtgttgaacatgagcaacatgcttccagaaggcctgttccccgagcacctgatcgacgtgctgaggcgggagctggccctggagtgtgactaccagcgagaggccgcctgtgcccgcaagttcagggacctgctgaagggccaccccttcttctatgtgcctgagattgtggatgagctctgcagcccacatgtgctgaccacagagctggtgtctggcttccccctggaccaggccgaagggctcagccaggagattcggaacgagatctgctacaacatcctggttctgtgcctgagggagctgttcgagttccacttcatgcaaacagaccccaactggtccaacttcttctatgacccccagcagcacaaggtggctcttttggattttggggcaacgcgggaatatgacagatccttcaccgacctctacattcagatcatcagggctgctgccgacagggacagggagactgtgcgggcgaaatccatagagatgaagttcctcaccggctacgaggtcaaggtcatggaagacgcccacttggatgccatcctcatcctgggggaggccttcgcctctgatgagccttttgattttggcactcagagcaccaccgagaagatccacaacctgattcccgtcatgctgaggcaccgtctcgtccccccacccgaggaaacctactccctgcacaggaagatggggggctccttcctcatctgctccaagctgaaggcccgcttcccctgcaaggccatgttcgaggaggcctacagcaactactgcaagaggcaggcccagcagtagggctgcgggccacgcccaggccggctccgcgggaactctctccctcagacaggccaaaaaccagtagcgaggtcgtggtgatgctctttttaactcctttgcccaataaggggggtggctgcctggagccccgtagccagcgctttccacggtttctgttgctaaatggttgtagggtgagaagtgcaagaatgaagatgaagccccactgctcggtcagtctgcctccgtgtgtcctctgaaataagcagatgaagatgaaagggcaactttgttttcttctttttcctgatgtgaatgttaagcagaagggagagagtccttactcccttccaatctctgttcagtgcaaaacccagaaacatgaacagatacgattgtgggattttatcatctgtgtagtaggtgtgtgtatgtgtttctagagtgagatttgtgttttctgcccttttcctctccagccgatgggctggagctgggagaggtgctgagctaacagtgccaacaagtgctccttaagcctgcgaggcccaggcctgtggggctggttctcacctttgacagctgaatgttcctaaagaactgctgccccacagtgagggtgggagcagcggaacagggaatgccagacacaggctcgctgctgctggaaggcggggtgggacttccttcctctgtccggagaggcacaggtgtcaccagttccagccaaaggctcctcacaggcgctgtgaatttttgtacaagtcttgtaattatcgaatcaacaacttgtttcaatttaataaaaatgctcatgggaagtgct

SEQ ID NO: 203448 - DNA, 2337 bp, Artificial Sequence
  derived and/or modified sequence
agatccggagcgcgtggcgggcgtcagcgcggtggccagcgcgcagaggcgggcgcggaggcggctagaaggtgaccgcggatcccagcttcctgcagccagcccttcttgcattctcttcatgtgacagcgcagcttccccgcgagtttcgctggccgcgagcctcaggccttgtcaagctgacccaggcggccgtggaaacccacctgcagcacttgggcatcggaggggagctgatcatggcggccagggccctgcagtccacggctgtggagcagattggcatgttcttggggaaggtgcagggtcaggataaacatgaagaatattttgctgagaacttcggcggcccagaaggggagttccacttctcttcagcctccgctcccgaccagtcagcgcccccatccctgggtcatgcccacagcgagggcccagctcctgcctacgtggccagtggaccctttagagaagccgggttccccggccaggcctcctcccctctgggcagggccaacgggaggctctttgcaaaccccagagactcattctctgccatgggctttcagcgaaggttcttccaccaggaccaatcccctgttgggggcctcacagccgaggacattgagaaggcccggcaggctaaggctcgccccgagaacaagcagcacaaacagacgctcagcgagcatgcccgggagcggaaggtgcctgtgacgaggattggccggctggccaacttcggaggtctggccgtgggcctgggcttcggggcactggcagaggtcgccaagaagagcctgcgctccgaggacccctcagggaagaaggccgtgctgggttccagtcctttcctgtccgaggccaatgcagagcggatcgtgcgcacgctctgcaaggtgcgtggtgcggcactcaagctgggccagatgctgagcatccaggatgatgcctttatcaacccccacctggctaagatcttcgagcgggtgcggcagagcgcggacttcatgccactgaagcagatgatgaaaactctcaacaacgacctgggccccaactggcgggacaagttggaatacttcgaggagcggcccttcgccgccgcatccattgggcaggtgcacttggcccgaatgaagggcggccgcgaggtggccatgaagatccagtaccctggcgtggcccagagcatcaacagtgatgtcaacaacctcatggccgtgttgaacatgagcaacatgcttccagaaggcctgttccccgagcacctgatcgacgtgctgaggcgggagctggccctggagtgtgactaccagcgagaggccgcctgtgcccgcaagttcagggacctgctgaagggccaccccttcttctatgtgcctgagattgtggatgagctctgcagcccacatgtgctgaccacagagctggtgtctggcttccccctggaccaggccgaagggctcagccaggagattcggaacgagatctgctacaacatcctggttctgtgcctgagggagctgttcgagttccacttcatgcaaacagaccccaactggtccaacttcttctatgacccccagcagcacaaggtggctcttttggattttggggcaacgcgggaatatgacagatccttcaccgacctctacattcagatcatcagggctgctgccgacagggacagggagactgtgcgggcgaaatccatagagatgaagttcctcaccggctacgaggtcaaggtcatggaagacgcccacttggatgccatcctcatcctgggggaggccttcgcctctgatgagccttttgattttggcactcagagcaccaccgagaagatccacaacctgattcccgtcatgctgaggcaccgtctcgtccccccacccgaggaaacctactccctgcacaggaagatggggggctccttcctcatctgctccaagctgaaggcccgcttcccctgcaaggccatgttcgaggaggcctacagcaactactgcaagaggcaggcccagcagtagggctgcgggccacgcccaggccggctccgcgggaactctctccctcagacaggccaaaaaccagtagcgaggtcgtggtgatgctctttttaactcctttgcccaataaggggggtggctgcctggagccccgtagccagcgctttccacggtttctgttgctaaatggttgtagggtgagaagtgcaagaatgaagatgaagccccactgctcggtcagtctgcctccgtgtgtcctctgaaataagcagatgaagatgaaagggcaactttgttttcttctttttcctgatgtgaatg

SEQ ID NO: 203449 - DNA, 1236 bp, Artificial Sequence
  derived and/or modified sequence
atgcccgggagcggaaggtgcctgtgacgaggattggccggctggccaacttcggaggtctggccgtgggcctgggcttcggggcactggcagaggtcgccaagaagagcctgcgctccgaggacccctcagggaagaaggccgtgctgggttccagtcctttcctgtccgaggccaatgcagagcggatcgtgcgcacgctctgcaaggtgcgtggtgcggcactcaagctgggccagatgctgagcatccaggatgatgcctttatcaacccccacctggctaagatcttcgagcgggtgcggcagagcgcggacttcatgccactgaagcagatgatgtaccctggcgtggcccagagcatcaacagtgatgtcaacaacctcatggccgtgttgaacatgagcaacatgcttccagaaggcctgttccccgagcacctgatcgacgtgctgaggcgggagctggccctggagtgtgactaccagcgagaggccgcctgtgcccgcaagttcagggacctgctgaagggccaccccttcttctatgtgcctgagattgtggatgagctctgcagcccacatgtgctgaccacagagctggtgtctggcttccccctggaccaggccgaagggctcagccaggagattcggaacgagatctgctacaacatcctggttctgtgcctgagggagctgttcgagttccacttcatgcaaacagaccccaactggtccaacttcttctatgacccccagcagcacaaggtggctcttttggattttggggcaacgcgggaatatgacagatccttcaccgacctctacattcagatcatcagggctgctgccgacagggacagggagactgtgcgggcgaaatccatagagatgaagttcctcaccggctacgaggtcaaggtcatggaagacgcccacttggatgccatcctcatcctgggggaggccttcgcctctgatgagccttttgattttggcactcagagcaccaccgagaagatccacaacctgattcccgtcatgctgaggcaccgtctcgtccccccacccgaggaaacctactccctgcacaggaagatggggggctccttcctcatctgctccaagctgaaggcccgcttcccctgcaaggccatgttcgaggaggcctacagcaactactgcaagaggcaggcccagcagtagggctgcgggccacgcccaggccggctccgcg

SEQ ID NO: 203450 - DNA, 2007 bp, Artificial Sequence
  derived and/or modified sequence
aaacagatccggagcgcgtggcgggcgtcagcgcggtggccagcgcgcagaggcgggcgcggaggcggctagaaggtgaccgcggatcccagcttcctgcagccaggtctggccgtgggcctgggcttcggggcactggcagaggtcgccaagaagagcctgcgctccgaggacccctcagggaagaaggccgtgctgggttccagtcctttcctgtccgaggccaatgcagagcggatcgtgcgcacgctctgcaaggtgcgtggtgcggcactcaagctgggccagatgctgagcatccaggatgatgcctttatcaacccccacctggctaagatcttcgagcgggtgcggcagagcgcggacttcatgccactgaagcagatgatgaaaactctcaacaacgacctgggccccaactggcgggacaagttggaatacttcgaggagcggcccttcgccgccgcatccattgggcaggtgcacttggcccgaatgaagggcggccgcgaggtggccatgaagatccagtaccctggcgtggcccagagcatcaacagtgatgtcaacaacctcatggccgtgttgaacatgagcaacatgcttccagaaggcctgttccccgagcacctgatcgacgtgctgaggcgggagctggccctggagtgtgactaccagcgagaggccgcctgtgcccgcaagttcagggacctgctgaagggccaccccttcttctatgtgcctgagattgtggatgagctctgcagcccacatgtgctgaccacagagctggtgtctggcttccccctggaccaggccgaagggctcagccaggagattcggaacgagatctgctacaacatcctggttctgtgcctgagggagctgttcgagttccacttcatgcaaacagaccccaactggtccaacttcttctatgacccccagcagcacaaggtggctcttttggattttggggcaacgcgggaatatgacagatccttcaccgacctctacattcagatcatcagggctgctgccgacagggacagggagactgtgcgggcgaaatccatagagatgaagttcctcaccggctacgaggtcaaggtcatggaagacgcccacttggatgccatcctcatcctgggggaggccttcgcctctgatgagccttttgattttggcactcagagcaccaccgagaagatccacaacctgattcccgtcatgctgaggcaccgtctcgtccccccacccgaggaaacctactccctgcacaggaagatggggggctccttcctcatctgctccaagctgaaggcccgcttcccctgcaaggccatgttcgaggaggcctacagcaactactgcaagaggcaggcccagcagtagggctgcgggccacgcccaggccggctccgcgggaactctctccctcagacaggccaaaaaccagtagcgaggtcgtggtgatgctctttttaactcctttgcccaataaggggggtggctgcctggagccccgtagccagcgctttccacggtttctgttgctaaatggttgtagggtgagaagtgcaagaatgaagatgaagccccactgctcggtcagtctgcctccgtgtgtcctctgaaataagcagatgaagatgaaagggcaactttgttttcttctttttcctgatgtgaatgttaagcagaagggagagagtccttactcccttccaatctctgttcagtgcaaaacccagaaacatgaacagatacgattgtgggattttatcatctgtgtagtaggtgtgtgtatgtgtttctagagtgagatttgtgttttctgcccttttcctctccagccgatgggctggagctgggagaggtgctgagctaacagtgccaacaagtgctccttaagcctgcgaggcccaggcctgtggggctggttctcacctttgacagctgaatgttcctaaagaactgctgccccacagtgagggtgggagcagc

SEQ ID NO: 203451 - DNA, 1479 bp, Artificial Sequence
  derived and/or modified sequence
atgggcttccagagaagattcttccaccaggaccagagccccgtgggcggcctgaccgccgaggacatcgagaaggccagacaggccaaggccagacccgagaacaagcagcacaagcagaccctgagcgagcacgccagagagagaaaggtgcccgtgaccagaatcggcagactggccaacttcggcggcctggccgtgggcctgggcttcggcgccctggccgaggtggccaagaagagcctgagaagcgaggaccccagcggcaagaaggccgtgctgggcagcagccccttcctgagcgaggccaacgccgagagaatcgtgagaaccctgtgcaaggtgagaggcgccgccctgaagctgggccagatgctgagcatccaggacgacgccttcatcaacccccacctggccaagatcttcgagagagtgagacagagcgccgacttcatgcccctgaagcagatgatgaagaccctgaacaacgacctgggccccaactggagagacaagctggagtacttcgaggagagacccttcgccgccgccagcatcggccaggtgcacctggccagaatgaagggcggcagagaggtggccatgaagatccagtaccccggcgtggcccagagcatcaacagcgacgtgaacaacctgatggccgtgctgaacatgagcaacatgctgcccgagggcctgttccccgagcacctgatcgacgtgctgagaagagagctggccctggagtgcgactaccagagagaggccgcctgcgccagaaagttcagagacctgctgaagggccaccccttcttctacgtgcccgagatcgtggacgagctgtgcagcccccacgtgctgaccaccgagctggtgagcggcttccccctggaccaggccgagggcctgagccaggagatcagaaacgagatctgctacaacatcctggtgctgtgcctgagagagctgttcgagttccacttcatgcagaccgaccccaactggagcaacttcttctacgacccccagcagcacaaggtggccctgctggacttcggcgccaccagagagtacgacagaagcttcaccgacctgtacatccagatcatcagagccgccgccgacagagacagagagaccgtgagagccaagagcatcgagatgaagttcctgaccggctacgaggtgaaggtgatggaggacgcccacctggacgccatcctgatcctgggcgaggccttcgccagcgacgagcccttcgacttcggcacccagagcaccaccgagaagatccacaacctgatccccgtgatgctgagacacagactggtgcccccccccgaggagacctacagcctgcacagaaagatgggcggcagcttcctgatctgcagcaagctgaaggccagattcccctgcaaggccatgttcgaggaggcctacagcaactactgcaagagacaggcccagcagtag

SEQ ID NO: 203452 - DNA, 1719 bp, Artificial Sequence
  derived and/or modified sequence
atggccgccatcctgggcgacaccatcatggtggccaagggcctggtgaagctgacccaggccgccgtggagacccacctgcagcacctgggcatcggcggcgagctgatcatgggccccgcccccgcctacgtggccagcggccccttcagagaggccggcttccccggccaggccagcagccccctgggcagagccaacggcagactgttcgccaaccccagagacagcttcagcgccatgggcttccagagaagattcttccaccaggaccagagccccgtgggcggcctgaccgccgaggacatcgagaaggccagacaggccaaggccagacccgagaacaagcagcacaagcagaccctgagcgagcacgccagagagagaaaggtgcccgtgaccagaatcggcagactggccaacttcggcggcctggccgtgggcctgggcttcggcgccctggccgaggtggccaagaagagcctgagaagcgaggaccccagcggcaagaaggccgtgctgggcagcagccccttcctgagcgaggccaacgccgagagaatcgtgagaaccctgtgcaaggtgagaggcgccgccctgaagctgggccagatgctgagcatccaggacgacgccttcatcaacccccacctggccaagatcttcgagagagtgagacagagcgccgacttcatgcccctgaagcagatgatgaagaccctgaacaacgacctgggccccaactggagagacaagctggagtacttcgaggagagacccttcgccgccgccagcatcggccaggtgcacctggccagaatgaagggcggcagagaggtggccatgaagatccagtaccccggcgtggcccagagcatcaacagcgacgtgaacaacctgatggccgtgctgaacatgagcaacatgctgcccgagggcctgttccccgagcacctgatcgacgtgctgagaagagagctggccctggagtgcgactaccagagagaggccgcctgcgccagaaagttcagagacctgctgaagggccaccccttcttctacgtgcccgagatcgtggacgagctgtgcagcccccacgtgctgaccaccgagctggtgagcggcttccccctggaccaggccgagggcctgagccaggagatcagaaacgagatctgctacaacatcctggtgctgtgcctgagagagctgttcgagttccacttcatgcagaccgaccccaactggagcaacttcttctacgacccccagcagcacaaggtggccctgctggacttcggcgccaccagagagtacgacagaagcttcaccgacctgtacatccagatcatcagagccgccgccgacagagacagagagaccgtgagagccaagagcatcgagatgaagttcctgaccggctacgaggtgaaggtgatggaggacgcccacctggacgccatcctgatcctgggcgaggccttcgccagcgacgagcccttcgacttcggcacccagagcaccaccgagaagatccacaacctgatccccgtgatgctgagacacagactggtgcccccccccgaggagacctacagcctgcacagaaagatgggcggcagcttcctgatctgcagcaagctgaaggccagattcccctgcaaggccatgttcgaggaggcctacagcaactactgcaagagacaggcccagcagtag

SEQ ID NO: 203453 - DNA, 1944 bp, Artificial Sequence
  derived and/or modified sequence
atggccgccatcctgggcgacaccatcatggtggccaagggcctggtgaagctgacccaggccgccgtggagacccacctgcagcacctgggcatcggcggcgagctgatcatggccgccagagccctgcagagcaccgccgtggagcagatcggcatgttcctgggcaaggtgcagggccaggacaagcacgaggagtacttcgccgagaacttcggcggccccgagggcgagttccacttcagcgtgccccacgccgccggcgccagcaccgacttcagcagcgccagcgcccccgaccagagcgccccccccagcctgggccacgcccacagcgagggccccgcccccgcctacgtggccagcggccccttcagagaggccggcttccccggccaggccagcagccccctgggcagagccaacggcagactgttcgccaaccccagagacagcttcagcgccatgggcttccagagaagattcttccaccaggaccagagccccgtgggcggcctgaccgccgaggacatcgagaaggccagacaggccaaggccagacccgagaacaagcagcacaagcagaccctgagcgagcacgccagagagagaaaggtgcccgtgaccagaatcggcagactggccaacttcggcggcctggccgtgggcctgggcttcggcgccctggccgaggtggccaagaagagcctgagaagcgaggaccccagcggcaagaaggccgtgctgggcagcagccccttcctgagcgaggccaacgccgagagaatcgtgagaaccctgtgcaaggtgagaggcgccgccctgaagctgggccagatgctgagcatccaggacgacgccttcatcaacccccacctggccaagatcttcgagagagtgagacagagcgccgacttcatgcccctgaagcagatgatgaagaccctgaacaacgacctgggccccaactggagagacaagctggagtacttcgaggagagacccttcgccgccgccagcatcggccaggtgcacctggccagaatgaagggcggcagagaggtggccatgaagatccagtaccccggcgtggcccagagcatcaacagcgacgtgaacaacctgatggccgtgctgaacatgagcaacatgctgcccgagggcctgttccccgagcacctgatcgacgtgctgagaagagagctggccctggagtgcgactaccagagagaggccgcctgcgccagaaagttcagagacctgctgaagggccaccccttcttctacgtgcccgagatcgtggacgagctgtgcagcccccacgtgctgaccaccgagctggtgagcggcttccccctggaccaggccgagggcctgagccaggagatcagaaacgagatctgctacaacatcctggtgctgtgcctgagagagctgttcgagttccacttcatgcagaccgaccccaactggagcaacttcttctacgacccccagcagcacaaggtggccctgctggacttcggcgccaccagagagtacgacagaagcttcaccgacctgtacatccagatcatcagagccgccgccgacagagacagagagaccgtgagagccaagagcatcgagatgaagttcctgaccggctacgaggtgaaggtgatggaggacgcccacctggacgccatcctgatcctgggcgaggccttcgccagcgacgagcccttcgacttcggcacccagagcaccaccgagaagatccacaacctgatccccgtgatgctgagacacagactggtgcccccccccgaggagacctacagcctgcacagaaagatgggcggcagcttcctgatctgcagcaagctgaaggccagattcccctgcaaggccatgttcgaggaggcctacagcaactactgcaagagacaggcccagcagtag

SEQ ID NO: 203454 - DNA, 1788 bp, Artificial Sequence
  derived and/or modified sequence
atgttcctgggcaaggtgcagggccaggacaagcacgaggagtacttcgccgagaacttcggcggccccgagggcgagttccacttcagcgtgccccacgccgccggcgccagcaccgacttcagcagcgccagcgcccccgaccagagcgccccccccagcctgggccacgcccacagcgagggccccgcccccgcctacgtggccagcggccccttcagagaggccggcttccccggccaggccagcagccccctgggcagagccaacggcagactgttcgccaaccccagagacagcttcagcgccatgggcttccagagaagattcttccaccaggaccagagccccgtgggcggcctgaccgccgaggacatcgagaaggccagacaggccaaggccagacccgagaacaagcagcacaagcagaccctgagcgagcacgccagagagagaaaggtgcccgtgaccagaatcggcagactggccaacttcggcggcctggccgtgggcctgggcttcggcgccctggccgaggtggccaagaagagcctgagaagcgaggaccccagcggcaagaaggccgtgctgggcagcagccccttcctgagcgaggccaacgccgagagaatcgtgagaaccctgtgcaaggtgagaggcgccgccctgaagctgggccagatgctgagcatccaggacgacgccttcatcaacccccacctggccaagatcttcgagagagtgagacagagcgccgacttcatgcccctgaagcagatgatgaagaccctgaacaacgacctgggccccaactggagagacaagctggagtacttcgaggagagacccttcgccgccgccagcatcggccaggtgcacctggccagaatgaagggcggcagagaggtggccatgaagatccagtaccccggcgtggcccagagcatcaacagcgacgtgaacaacctgatggccgtgctgaacatgagcaacatgctgcccgagggcctgttccccgagcacctgatcgacgtgctgagaagagagctggccctggagtgcgactaccagagagaggccgcctgcgccagaaagttcagagacctgctgaagggccaccccttcttctacgtgcccgagatcgtggacgagctgtgcagcccccacgtgctgaccaccgagctggtgagcggcttccccctggaccaggccgagggcctgagccaggagatcagaaacgagatctgctacaacatcctggtgctgtgcctgagagagctgttcgagttccacttcatgcagaccgaccccaactggagcaacttcttctacgacccccagcagcacaaggtggccctgctggacttcggcgccaccagagagtacgacagaagcttcaccgacctgtacatccagatcatcagagccgccgccgacagagacagagagaccgtgagagccaagagcatcgagatgaagttcctgaccggctacgaggtgaaggtgatggaggacgcccacctggacgccatcctgatcctgggcgaggccttcgccagcgacgagcccttcgacttcggcacccagagcaccaccgagaagatccacaacctgatccccgtgatgctgagacacagactggtgcccccccccgaggagacctacagcctgcacagaaagatgggcggcagcttcctgatctgcagcaagctgaaggccagattcccctgcaaggccatgttcgaggaggcctacagcaactactgcaagagacaggcccagcagtag

SEQ ID NO: 203455 - DNA, 1797 bp, Artificial Sequence
  derived and/or modified sequence
atggccgccagagccctgcagagcaccgccgtggagcagatcggcatgttcctgggcaaggtgcagggccaggacaagcacgaggagtacttcgccgagaacttcggcggccccgagggcgagttccacttcagcagcgccagcgcccccgaccagagcgccccccccagcctgggccacgcccacagcgagggccccgcccccgcctacgtggccagcggccccttcagagaggccggcttccccggccaggccagcagccccctgggcagagccaacggcagactgttcgccaaccccagagacagcttcagcgccatgggcttccagagaagattcttccaccaggaccagagccccgtgggcggcctgaccgccgaggacatcgagaaggccagacaggccaaggccagacccgagaacaagcagcacaagcagaccctgagcgagcacgccagagagagaaaggtgcccgtgaccagaatcggcagactggccaacttcggcggcctggccgtgggcctgggcttcggcgccctggccgaggtggccaagaagagcctgagaagcgaggaccccagcggcaagaaggccgtgctgggcagcagccccttcctgagcgaggccaacgccgagagaatcgtgagaaccctgtgcaaggtgagaggcgccgccctgaagctgggccagatgctgagcatccaggacgacgccttcatcaacccccacctggccaagatcttcgagagagtgagacagagcgccgacttcatgcccctgaagcagatgatgaagaccctgaacaacgacctgggccccaactggagagacaagctggagtacttcgaggagagacccttcgccgccgccagcatcggccaggtgcacctggccagaatgaagggcggcagagaggtggccatgaagatccagtaccccggcgtggcccagagcatcaacagcgacgtgaacaacctgatggccgtgctgaacatgagcaacatgctgcccgagggcctgttccccgagcacctgatcgacgtgctgagaagagagctggccctggagtgcgactaccagagagaggccgcctgcgccagaaagttcagagacctgctgaagggccaccccttcttctacgtgcccgagatcgtggacgagctgtgcagcccccacgtgctgaccaccgagctggtgagcggcttccccctggaccaggccgagggcctgagccaggagatcagaaacgagatctgctacaacatcctggtgctgtgcctgagagagctgttcgagttccacttcatgcagaccgaccccaactggagcaacttcttctacgacccccagcagcacaaggtggccctgctggacttcggcgccaccagagagtacgacagaagcttcaccgacctgtacatccagatcatcagagccgccgccgacagagacagagagaccgtgagagccaagagcatcgagatgaagttcctgaccggctacgaggtgaaggtgatggaggacgcccacctggacgccatcctgatcctgggcgaggccttcgccagcgacgagcccttcgacttcggcacccagagcaccaccgagaagatccacaacctgatccccgtgatgctgagacacagactggtgcccccccccgaggagacctacagcctgcacagaaagatgggcggcagcttcctgatctgcagcaagctgaaggccagattcccctgcaaggccatgttcgaggaggcctacagcaactactgcaagagacaggcccagcagtag

SEQ ID NO: 203456 - DNA, 966 bp, Artificial Sequence
  derived and/or modified sequence
atgctgagcatccaggacgacgccttcatcaacccccacctggccaagatcttcgagagagtgagacagagcgccgacttcatgcccctgaagcagatgatgtaccccggcgtggcccagagcatcaacagcgacgtgaacaacctgatggccgtgctgaacatgagcaacatgctgcccgagggcctgttccccgagcacctgatcgacgtgctgagaagagagctggccctggagtgcgactaccagagagaggccgcctgcgccagaaagttcagagacctgctgaagggccaccccttcttctacgtgcccgagatcgtggacgagctgtgcagcccccacgtgctgaccaccgagctggtgagcggcttccccctggaccaggccgagggcctgagccaggagatcagaaacgagatctgctacaacatcctggtgctgtgcctgagagagctgttcgagttccacttcatgcagaccgaccccaactggagcaacttcttctacgacccccagcagcacaaggtggccctgctggacttcggcgccaccagagagtacgacagaagcttcaccgacctgtacatccagatcatcagagccgccgccgacagagacagagagaccgtgagagccaagagcatcgagatgaagttcctgaccggctacgaggtgaaggtgatggaggacgcccacctggacgccatcctgatcctgggcgaggccttcgccagcgacgagcccttcgacttcggcacccagagcaccaccgagaagatccacaacctgatccccgtgatgctgagacacagactggtgcccccccccgaggagacctacagcctgcacagaaagatgggcggcagcttcctgatctgcagcaagctgaaggccagattcccctgcaaggccatgttcgaggaggcctacagcaactactgcaagagacaggcccagcagtag

SEQ ID NO: 203457 - DNA, 1107 bp, Artificial Sequence
  derived and/or modified sequence
atgctgagcatccaggacgacgccttcatcaacccccacctggccaagatcttcgagagagtgagacagagcgccgacttcatgcccctgaagcagatgatgaagaccctgaacaacgacctgggccccaactggagagacaagctggagtacttcgaggagagacccttcgccgccgccagcatcggccaggtgcacctggccagaatgaagggcggcagagaggtggccatgaagatccagtaccccggcgtggcccagagcatcaacagcgacgtgaacaacctgatggccgtgctgaacatgagcaacatgctgcccgagggcctgttccccgagcacctgatcgacgtgctgagaagagagctggccctggagtgcgactaccagagagaggccgcctgcgccagaaagttcagagacctgctgaagggccaccccttcttctacgtgcccgagatcgtggacgagctgtgcagcccccacgtgctgaccaccgagctggtgagcggcttccccctggaccaggccgagggcctgagccaggagatcagaaacgagatctgctacaacatcctggtgctgtgcctgagagagctgttcgagttccacttcatgcagaccgaccccaactggagcaacttcttctacgacccccagcagcacaaggtggccctgctggacttcggcgccaccagagagtacgacagaagcttcaccgacctgtacatccagatcatcagagccgccgccgacagagacagagagaccgtgagagccaagagcatcgagatgaagttcctgaccggctacgaggtgaaggtgatggaggacgcccacctggacgccatcctgatcctgggcgaggccttcgccagcgacgagcccttcgacttcggcacccagagcaccaccgagaagatccacaacctgatccccgtgatgctgagacacagactggtgcccccccccgaggagacctacagcctgcacagaaagatgggcggcagcttcctgatctgcagcaagctgaaggccagattcccctgcaaggccatgttcgaggaggcctacagcaactactgcaagagacaggcccagcagtag

SEQ ID NO: 203458 - protein, 410 aa, Artificial Sequence
  derived and/or modified sequence
MGDKGTRVFKKASPNGKLTVYLGKRDFVDHIDLVDPVDGVVLVDPEYLKERRVYVTLTCAFRYGREDLDVLGLTFRKDLFVANVQSFPPAPEDKKPLTRLQERLIKKLGEHAYPFTFEIPPNLPCSVTLQPGPEDTGKACGVDYEVKAFCAENLEEKIHKRNSVRLVIRKVQYAPERPGPQPTAETTRQFLMSDKPLHLEASLDKEIYYHGEPISVNVHVTNNTNKTVKKIKISVRQYADICLFNTAQYKCPVAMEEADDTVAPSSTFCKVYTLTPFLANNREKRGLALDGKLKHEDTNLASSTLLREGANREILGIIVSYKVKVKLVVSRGGDVAVELPFTLMHPKPKEEPPHREVPENETPVDTNLIELDTNDDDIVFEDFARQRLKGMKDDKEEEEDGTGSPQLNNR

SEQ ID NO: 203459 - DNA, 1233 bp, Artificial Sequence
  derived and/or modified sequence
atgggagataagggcacacgggtgttcaagaaggcatcaccaaatggaaaactcacggtgtatctcggcaagagggatttcgtggatcacatcgatctagttgacccagttgacggagttgtcctggtcgatcccgagtacctgaaggagagacgtgtgtatgtcactctgacgtgtgctttccgctacggtcgcgaggacttagatgtcctaggtttgacttttcggaaggacctctttgtggccaacgttcagagcttccccccagccccagaagataagaagcccctgacacgcctgcaggagaggttaatcaagaagttgggagaacatgcttacccattcaccttcgaaattccgcctaatctgccctgttctgtgaccttacagcccggaccggaggatactggcaaggcttgtggcgtggactacgaagtgaaggccttttgtgcggaaaacttagaagaaaagattcacaagagaaattcagtccggctggtgatcaggaaggtacagtacgctccagaacgcccgggccctcaacccacagccgagacaaccagacaatttctgatgtcagataaacctttacaccttgaagccagtctggataaggagatctactatcacggcgaacctatctccgtgaacgtccacgtgactaacaacacaaataagacagtcaaaaagattaaaatcagcgtgcgccagtacgccgacatttgtcttttcaacactgctcagtataaatgtccggtggctatggaggaggcagatgatacagtggctccctcatccactttctgcaaggtgtatactctcacgccgtttttggccaacaacagggagaagcgcggcctggccctggacggtaaactcaaacatgaggacaccaatctggcatcttctacccttttacgtgaaggtgccaaccgtgagatcctgggaatcatcgtgtcttacaaggtgaaagtgaaactcgttgtttctagaggcggagatgtggcggtggagctcccctttactctgatgcaccccaagccgaaggaagagcccccccaccgcgaggtgccagaaaacgaaacgccggtggacacgaacctaatcgagttggataccaacgatgatgacattgttttcgaagacttcgcaaggcagcgcctgaaggggatgaaggatgataaggaggaggaagaggatggcactggttcaccccagctgaacaataggtag

SEQ ID NO: 203460 - DNA, 1233 bp, Artificial Sequence
  derived and/or modified sequence
atgggagacaagggcaccagggtcttcaagaaggccagccccaacgggaagctgactgtgtacctgggcaagagggactttgtggaccacatcgacctggtggaccctgtggatggagtggtgctggtggaccctgagtacctgaaggagaggagagtgtatgtgaccctgacctgtgccttccgctatggccgggaggacctggatgtgctgggcctgaccttcaggaaggacctgtttgtggccaacgtgcagagcttccccccagcccctgaggacaagaagcccctgacccggctgcaggagcggctcatcaagaagctgggggagcacgcctaccccttcacctttgagatcccccccaacctgccctgcagcgtgaccctgcagcccggccctgaggacaccgggaaggcctgtggggtggactatgaggtgaaggccttctgtgccgagaacctggaggagaagatccacaagagaaattctgtgcggctggtgatcaggaaggtgcagtatgcccctgagcggcccggcccccagcccacagctgagaccacccggcagttcctgatgtctgacaagcccctgcacctggaggccagcctggacaaggagatctactaccacggggagcccatctctgtgaatgtgcacgtgaccaacaacaccaacaagacagtgaagaagatcaagatctctgtgcggcagtatgctgacatctgcctcttcaacacagcccagtacaagtgccctgtggccatggaggaggctgatgacacagtggcccccagcagcaccttctgcaaggtgtacaccctgacccccttcctggccaacaaccgggagaagaggggcctggccctggatggcaagctgaagcatgaggacaccaacctggccagcagcaccctgctgcgggagggcgccaaccgggagatcctgggcatcatcgtgtcctacaaggtgaaggtgaagctggtggtgtccagaggaggagatgtggccgtggagctgcccttcaccctgatgcaccccaagcccaaggaggagcccccccaccgggaggtgcctgaaaatgagacccctgtggacaccaacctgattgagctggacaccaatgatgatgacatcgtgtttgaagattttgcccggcagaggctgaagggcatgaaggatgacaaggaggaggaggaggatggcaccggcagcccccagctgaacaacagatag

SEQ ID NO: 203461 - DNA, 1233 bp, Artificial Sequence
  derived and/or modified sequence
atgggcgacaagggcacccgggtgttcaagaaggccagccccaacgggaaattaacggtttacctcggaaaacgagacttcgtggaccacattgacctggtcgacccggttgacggagtggtgctagtcgaccccgagtacctaaaggagcgtagggtgtacgttacgttaacatgtgccttccgctacggccgggaggatctggacgtgctcggcctaactttccgaaaagacctctttgttgcaaacgtacaatcatttcctcccgcaccagaggacaagaagccgctgacacgcctgcaggagaggctgatcaagaagcttggagaacacgcttatcctttcacattcgagatcccacccaacttgccctgctcagtgaccctccagccaggccctgaagatacaggaaaggcatgtggcgtcgattatgaagtcaaagccttctgtgccgaaaatctggaagaaaagatccacaaacgcaattccgtccggctggtgattcgaaaggtgcagtacgcacccgagcggccaggccctcagccaactgccgagacaacccggcagtttctgatgtccgacaaaccactccacttagaggctagcctggacaaggagatttattatcatggagagcccattagcgtcaatgttcatgtcaccaacaacactaataagactgtgaagaagataaaaatctcggtacgccaatatgcggacatttgcctgttcaatacagcacagtacaaatgccctgtggcaatggaagaagctgacgataccgtagccccatccagtactttctgtaaggtgtatacactgaccccattcctcgccaacaatcgcgaaaaaagaggcctggctcttgatggcaaactgaaacacgaggacacaaatctggcttcctctacactcctccgcgagggcgctaatcgggagatactgggtatcatagtctcctacaaagtgaaagtcaaactggtagtgtcgcgtgggggggacgttgccgtagagcttcctttcactctgatgcatcctaaacccaaggaagagcctcctcatagagaagtgcccgagaacgagacccccgtggacaccaacctgattgagttagatactaatgatgacgacattgtttttgaggatttcgcccgtcagaggctgaaaggtatgaaagacgacaaagaagaagaagaggatggtaccggctctcctcaattgaataaccgctag

SEQ ID NO: 203462 - DNA, 1233 bp, Artificial Sequence
  derived and/or modified sequence
atgggcgacaaggggacccgggtgtttaagaaagcctcccctaacggtaagctgaccgtctatctcggtaaaagggattttgtcgatcacatcgacttagtggatcccgtcgatggcgtagtcttggtggatccggaatacctcaaagaacgcagagtgtacgtgacattgacgtgcgctttccgatatggacgagaggatctggatgtgctgggtctaacgttcaggaaggatctctttgtggccaatgtccagagttttccacccgcacccgaagataagaagcctttaacgcggcttcaggaacgattaatcaagaaactaggtgagcatgcctacccttttacattcgaaatcccccctaacctaccctgttctgtgaccctgcaaccaggacccgaggacacgggaaaggcctgtggggtggattatgaagtgaaagccttctgtgctgagaacctggaggaaaagatccacaaaagaaacagcgttcgactggttatccggaaggtgcaatatgctccggagcggcctggaccacagcccacagcagagacgaccaggcagttcctgatgagtgacaagcccctacacctcgaagcaagcctggacaaagaaatctactaccacggcgaaccaatttcggtcaacgttcacgtgaccaacaatactaataaaacagtcaagaaaataaagatttcggtgcgtcagtacgccgacatctgcctgtttaataccgctcagtataagtgtccagtggcaatggaggaggcggatgacacagttgcgcctagcagcaccttctgtaaggtgtacaccctgacaccctttctcgccaacaatagggaaaagagggggttggccctcgacggaaagttaaaacatgaagatacaaacttagcaagttccaccctcctgcgcgagggcgcaaatcgcgaaatactgggaattattgtgtcatacaaagtgaaggtgaagctcgttgtgtcacggggtggggacgttgctgtcgaactgccattcacactgatgcaccccaaacccaaggaggagcctccccatcgcgaggtcccggaaaacgagactccagtggacacaaatctcatagaactagatactaacgacgatgacatcgtgttcgaggactttgctcgacagaggctgaagggcatgaaggatgataaggaggaggaagaggatggcactggttctccgcagcttaataatcgctag

SEQ ID NO: 203463 - DNA, 1895 bp, Artificial Sequence
  derived and/or modified sequence
gggagccgggagcgggctggcccgcgctcctcctgctggctggggattttccagcctgggcgctgacgccgcggacctccctgcgaccgtcgcggaccatgggcgacaaagggacccgagtgttcaagaaggccagtccaaatggaaagctcaccgtctacctgggaaagcgggactttgtggaccacatcgacctcgtggaccctgtggatggtgtggtcctggtggatcctgagtatctcaaagagcggagagtctatgtgacgctgacctgcgccttccgctatggccgggaggacctggatgtcctgggcctgacctttcgcaaggacctgtttgtggccaacgtacagtcgttcccaccggcccccgaggacaagaagcccctgacgcggctgcaggaacgcctcatcaagaagctgggcgagcacgcttaccctttcacctttgagatccctccaaaccttccatgttctgtgacactgcagccggggcccgaagacacggggaaggcttgcggtgtggactatgaagtcaaagccttctgcgcggagaatttggaggagaagatccacaagcggaattctgtgcgtctggtcatccggaaggttcagtatgccccagagaggcctggcccccagcccacagccgagaccaccaggcagttcctcatgtcggacaagcccttgcacctagaagcctctctggataaggagatctattaccatggagaacccatcagcgtcaacgtccacgtcaccaacaacaccaacaagacggtgaagaagatcaagatctcagtgcgccagtatgcagacatctgccttttcaacacagctcagtacaagtgccctgttgccatggaagaggctgatgacactgtggcacccagctcgacgttctgcaaggtctacacactgacccccttcctagccaataaccgagagaagcggggcctcgccttggacgggaagctcaagcacgaagacacgaacttggcctctagcaccctgttgagggaaggtgccaaccgtgagatcctggggatcattgtttcctacaaagtgaaagtgaagctggtggtgtctcggggcggcgacgtggccgtggaactgcccttcaccctaatgcaccccaagcccaaagaggaacccccgcatcgggaagttccagagaacgagacgccagtagataccaatctcatagaacttgacacaaatgatgacgacattgtatttgaggactttgctcgccagagactgaaaggcatgaaggatgacaaggaggaagaggaggatggtaccggctctccacagctcaacaacagatagacgggccggccctgcctccacgtggctccggctccactctcgtgcactcggatgcttactcgtcttcttcctgttctggtttcttttcccctttgttcttccagtttctaccagggggccccgtgggcttccagatcacggtgatgaacctctggcctcaggattggccccacatcaccacgccaacaggaccacagcgcactggctccaccccatctctgccatctccactcccctccttttcatgctgtctcccagaaaagctgccagggctctggccttggaattggacttgagatggggagcagacaggggaggatggggaatgtgggacacggtgtggtgggcatgagggcttggaggggtggggatgagggctcaagacacgagagaagatgtccacggtcccaggtggttaacaaagttctggcagctaaaagatgaccgcgttgaaggccacctccttctggctgggaggggcagaactgtggacagattctcaatgcctttttgaagttctgacccaccaaagaccttctgccttcaccctcctccccacctgat

SEQ ID NO: 203464 - DNA, 1233 bp, Artificial Sequence
  derived and/or modified sequence
atgggcgacaagggcaccagagtgttcaagaaggccagccccaacggcaagctgaccgtgtacctgggcaagagagacttcgtggaccacatcgacctggtggaccccgtggacggcgtggtgctggtggaccccgagtacctgaaggagagaagagtgtacgtgaccctgacctgcgccttcagatacggcagagaggacctggacgtgctgggcctgaccttcagaaaggacctgttcgtggccaacgtgcagagcttcccccccgcccccgaggacaagaagcccctgaccagactgcaggagagactgatcaagaagctgggcgagcacgcctaccccttcaccttcgagatcccccccaacctgccctgcagcgtgaccctgcagcccggccccgaggacaccggcaaggcctgcggcgtggactacgaggtgaaggccttctgcgccgagaacctggaggagaagatccacaagagaaacagcgtgagactggtgatcagaaaggtgcagtacgcccccgagagacccggcccccagcccaccgccgagaccaccagacagttcctgatgagcgacaagcccctgcacctggaggccagcctggacaaggagatctactaccacggcgagcccatcagcgtgaacgtgcacgtgaccaacaacaccaacaagaccgtgaagaagatcaagatcagcgtgagacagtacgccgacatctgcctgttcaacaccgcccagtacaagtgccccgtggccatggaggaggccgacgacaccgtggcccccagcagcaccttctgcaaggtgtacaccctgacccccttcctggccaacaacagagagaagagaggcctggccctggacggcaagctgaagcacgaggacaccaacctggccagcagcaccctgctgagagagggcgccaacagagagatcctgggcatcatcgtgagctacaaggtgaaggtgaagctggtggtgagcagaggcggcgacgtggccgtggagctgcccttcaccctgatgcaccccaagcccaaggaggagcccccccacagagaggtgcccgagaacgagacccccgtggacaccaacctgatcgagctggacaccaacgacgacgacatcgtgttcgaggacttcgccagacagagactgaagggcatgaaggacgacaaggaggaggaggaggacggcaccggcagcccccagctgaacaacagatag

SEQ ID NO: 203465 - protein, 1549 aa, Artificial Sequence
  derived and/or modified sequence
MSLSFCGNNISSYNINDGVLQNSCFVDALNLVPHVFLLFITFPILFIGWGSQSSKVQIHHNTWLHFPGHNLRWILTFALLFVHVCEIAEGIVSDSRRESRHLHLFMPAVMGFVATTTSIVYYHNIETSNFPKLLLALFLYWVMAFITKTIKLVKYCQSGLDISNLRFCITGMMVILNGLLMAVEINVIRVRRYVFFMNPQKVKPPEDLQDLGVRFLQPFVNLLSKATYWWMNTLIISAHKKPIDLKAIGKLPIAMRAVTNYVCLKDAYEEQKKKVADHPNRTPSIWLAMYRAFGRPILLSSTFRYLADLLGFAGPLCISGIVQRVNETQNGTNNTTGISETLSSKEFLENAYVLAVLLFLALILQRTFLQASYYVTIETGINLRGALLAMIYNKILRLSTSNLSMGEMTLGQINNLVAIETNQLMWFLFLCPNLWAMPVQIIMGVILLYNLLGSSALVGAAVIVLLAPIQYFIATKLAEAQKSTLDYSTERLKKTNEILKGIKLLKLYAWEHIFCKSVEETRMKELSSLKTFALYTSLSIFMNAAIPIAAVLATFVTHAYASGNNLKPAEAFASLSLFHILVTPLFLLSTVVRFAVKAIISVQKLNEFLLSDEIGDDSWRTGESSLPFESCKKHTGVQPKTINRKQPGRYHLDSYEQSTRRLRPAETEDIAIKVTNGYFSWGSGLATLSNIDIRIPTGQLTMIVGQVGCGKSSLLLAILGEMQTLEGKVHWSNVNESEPSFEATRSRNRYSVAYAAQKPWLLNATVEENITFGSPFNKQRYKAVTDACSLQPDIDLLPFGDQTEIGERGINLSGGQRQRICVARALYQNTNIVFLDDPFSALDIHLSDHLMQEGILKFLQDDKRTLVLVTHKLQYLTHADWIIAMKDGSVLREGTLKDIQTKDVELYEHWKTLMNRQDQELEKDMEADQTTLERKTLRRAMYSREAKAQMEDEDEEEEEEEDEDDNMSTVMRLRTKMPWKTCWRYLTSGGFFLLILMIFSKLLKHSVIVAIDYWLATWTSEYSINNTGKADQTYYVAGFSILCGAGIFLCLVTSLTVEWMGLTAAKNLHHNLLNKIILGPIRFFDTTPLGLILNRFSADTNIIDQHIPPTLESLTRSTLLCLSAIGMISYATPVFLVALLPLGVAFYFIQKYFRVASKDLQELDDSTQLPLLCHFSETAEGLTTIRAFRHETRFKQRMLELTDTNNIAYLFLSAANRWLEVRTDYLGACIVLTASIASISGSSNSGLVGLGLLYALTITNYLNWVVRNLADLEVQMGAVKKVNSFLTMESENYEGTMDPSQVPEHWPQEGEIKIHDLCVRYENNLKPVLKHVKAYIKPGQKVGICGRTGSGKSSLSLAFFRMVDIFDGKIVIDGIDISKLPLHTLRSRLSIILQDPILFSGSIRFNLDPECKCTDDRLWEALEIAQLKNMVKSLPGGLDAVVTEGGENFSVGQRQLFCLARAFVRKSSILIMDEATASIDMATENILQKVVMTAFADRTVVTIAHRVHTILTADLVIVMKRGNILEYDTPESLLAQENGVFASFVRADM

SEQ ID NO: 203466 - protein, 149 aa, Artificial Sequence
  derived and/or modified sequence
MSLSFCGNNISSYNINDGVLQNSCFVDALNLVPHVFLLFITFPILFIGWGSQSSKVQIHHNTWLHFPGHNLRWILTFALLFVHVCEIAEGIVSDSRRESRHLHLFMPAVMGFVATTTSIVYYHNIETSNFPKLLLGFSHHESKSCYQHS

SEQ ID NO: 203467 - DNA, 4650 bp, Artificial Sequence
  derived and/or modified sequence
atgtcactgtcgttttgcggtaacaacattagtagctacaatatcaatgacggagtgttgcagaacagctgcttcgtggatgcactgaacctcgtgcctcacgtatttttactgttcataacattccctatcctgttcataggatggggatcccagtcaagtaaagtgcagatccaccacaacacatggctgcacttccccggtcacaacctgcgatggattcttacctttgccttgttgtttgtgcatgtttgcgagattgccgaagggattgtgtctgattcccgtagggagtcccgccacctgcatctcttcatgcccgccgttatgggctttgtggccaccaccaccagcatcgtatactaccataacatcgagacctcaaacttccccaagctgctactggcactcttcctgtattgggtgatggccttcatcactaagacgatcaagctggtcaagtactgccagtccggcctggatatttctaatcttaggttctgcatcactggcatgatggttattctgaacgggctgctcatggcagtagaaattaatgtgatcagggtgagaaggtatgtttttttcatgaacccccagaaggttaagccccccgaagatttacaagacctgggggttcggtttctccagccgttcgtgaatctgttgtccaaagcaacctattggtggatgaacacactcattatctccgcccacaagaaaccgatagatttaaaagccataggcaagctcccaattgctatgagggctgtgacgaattacgtgtgcttgaaggatgcctacgaggagcagaaaaaaaaggttgccgaccaccctaatcgcaccccttctatatggctcgctatgtacagggctttcggacggccaatcctgctgagctcaaccttcagataccttgcggacttacttgggttcgccgggccactgtgcatatccggtatagtccaacgcgttaatgagacacagaatgggaccaacaacacaacagggatttctgaaaccctgagctcaaaggagttcctagagaacgcatatgtcctggcagtgttgctttttttagctcttatcttacagcggacctttctgcaagcaagctattatgtgactattgaaacaggtataaaccttaggggagctctactcgccatgatatataacaagatcctgcgactctctacctcaaacctttctatgggcgagatgaccctgggacagattaacaatctggtagctattgaaacgaatcagctcatgtggtttctttttttgtgcccaaatttgtgggctatgccagtgcaaataatcatgggcgtgatactcctctataatttactaggctcctctgcgctagtgggggcagccgtgattgtgctcctggcacctattcagtacttcatcgccactaagctagccgaagcccaaaaaagtacgttagactacagcacagagaggctcaaaaagactaacgagatcttaaagggaattaaactgcttaaactctacgcatgggaacacatcttttgcaaatccgtggaagaaactcgaatgaaagaactctcttcccttaagacctttgccctgtatacaagccttagcatattcatgaatgccgctattccaatcgcagccgttcttgccacttttgtaactcatgcctatgcctccgggaacaatttgaagccagccgaagcatttgcctcactgagcctatttcatatcttagtgactcccctgtttctgctgtcgaccgttgttcgctttgctgtcaaagcaattatctccgtgcagaaactaaatgaatttcttttgtcggatgagattggcgacgattcatggcgaacgggcgaaagtagcctgcccttcgaaagttgtaagaagcacactggcgtgcagcccaaaactatcaaccgtaagcagccaggcaggtaccacctggattcatacgaacagtcaaccaggcgcctcaggcctgctgaaaccgaggacatagccatcaaagtgacaaacgggtactttagctggggctcgggccttgctacgctttctaacattgacattcgaatacctaccggacaattgactatgatcgtgggccaagtgggatgcgggaagtcatccttgttgctcgcaattctgggggagatgcagactctagaggggaaggtgcactggagcaatgttaatgaatcagaacctagctttgaagccaccagaagccgaaacaggtactctgtggcctacgctgcacagaaaccttggttgctgaacgccaccgtcgaggaaaatatcacattcggaagcccgtttaacaaacagcggtataaggcagtcacagatgcctgcagtctgcagcccgatattgaccttttgccttttggggatcaaaccgaaatcggggagagggggattaacttgtccggagggcagcgacagcgcatctgcgtggcccgcgcactctaccagaataccaatatcgtgtttctggacgatccattttctgcactggacatccatctctcagatcacttgatgcaggagggcattttgaaattccttcaggatgacaaaaggacactcgtactggtcactcataaattacaatatttgacacacgcagactggattatcgcaatgaaggatggatccgtgctcagggagggcactctgaaagacatccagactaaagatgtggaactgtacgagcactggaagacgctgatgaacagacaggaccaggagctggagaaagacatggaagcagatcagaccacattagaacggaaaacgctcagacgtgccatgtacagccgagaagccaaggctcaaatggaggatgaagacgaggaagaagaggaagaggaggatgaggacgacaacatgtctactgtaatgcggctcaggacaaaaatgccttggaaaacgtgttggcggtatttaacctccggggggttttttcttctgatcctaatgattttctccaaacttttgaaacactcagtgatagtggccattgattattggctggccacttggaccagcgagtactctattaacaatacaggaaaggctgatcagacctattatgttgccggcttcagcatcctatgcggcgcaggcatctttctatgcctggtcaccagtcttaccgtggaatggatgggcctgaccgcggcaaaaaacctccatcacaacctgttgaataagatcattctgggacccatccgcttcttcgatacaactcccctgggcctcatactcaacaggttctctgccgatacgaatataatcgatcagcatatccccccaactctcgaaagtcttacaaggagcaccctgctgtgtctctctgcgataggcatgattagctacgccacaccagttttcctcgtggctctgctcccgcttggtgtggctttctatttcattcaaaaatactttagagtagccagcaaagatctgcaggaactcgatgactcgacccaactgccactactttgccacttttctgagacagccgagggcctgactacgattcgagcctttcgtcacgaaaccagattcaagcaacgcatgctcgagctgacagatacaaacaacattgcctacctatttttgtctgccgcaaaccgatggcttgaggtgaggactgactacctcggggcgtgtatcgttctaaccgcctccattgcctctatcagtggatcatcaaacagcgggttagttggactggggttgctgtacgccttgactattacaaattatctgaactgggtggtacggaacttagccgatctggaggtccagatgggcgccgttaagaaggtcaacagcttcctaacgatggaaagcgaaaactatgaaggtactatggaccccagtcaggtaccggaacactggccccaggaaggggagatcaagatacacgatttgtgtgtccggtacgaaaacaatctgaagcctgtgctcaaacatgtgaaggcttacatcaaacctgggcaaaaggtggggatttgtggcaggacaggaagtgggaaatcttcccttagtttagcctttttccgtatggtggacatttttgatggcaagatcgttattgatggaatagacattagtaagctgcctttacacaccttgcggagccgcctgagcattatccttcaggatcctatcctgttctcgggttcaattaggtttaatcttgaccccgaatgcaagtgcacagatgatcggctttgggaagcgttggagattgcacaactcaaaaatatggtcaagtccctgcccggcgggttggacgccgtggtcacggagggaggcgaaaacttctccgtgggtcagcggcagctgttctgtcttgcccgcgctttcgttaggaagtccagtatcctcatcatggatgaggctaccgcttccatcgatatggccacggagaacatccttcagaaggtagttatgaccgcattcgccgacaggactgttgtgaccattgcccacagagttcacactattctcacggccgatctagtgatcgtgatgaaacggggcaatattcttgaatacgacaccccagagtccctgctggcgcaggagaatggtgtattcgcctctttcgtgcgagccgatatgtag

SEQ ID NO: 203468 - DNA, 4650 bp, Artificial Sequence
  derived and/or modified sequence
atgagcctgtccttctgtggcaacaacatcagcagctacaacatcaatgatggagtgctgcagaacagctgctttgtggatgccctgaacctggtgccccacgtgttcctgctcttcatcaccttccccatcctcttcatcggctggggcagccagagcagcaaggtgcagatccaccacaacacctggctgcacttccctggccacaacctgcgctggatcctgacctttgccctgctgtttgtgcacgtgtgtgaaattgctgagggcatcgtgtctgacagccggcgggagagccgccacctgcacctgttcatgcctgctgtgatgggctttgtggccaccaccaccagcatcgtgtactaccacaacatcgagaccagcaacttccccaagctgctgctggccctcttcctgtactgggtgatggccttcatcaccaagaccatcaagctggtgaagtactgccagagcggcctggacatcagcaacctgcgcttctgcatcaccggcatgatggtgatcctgaatggcctgctgatggctgtggagatcaacgtcatccgggtgagaagatatgtgttcttcatgaacccccagaaggtgaagcccccagaggacctgcaggacctgggcgtgcgcttcctgcagccctttgtgaacctgctgagcaaggccacctactggtggatgaacaccctcatcatcagcgcccacaagaagcccatcgacctgaaggccatcggcaagctgcccatcgccatgagagctgtgaccaactacgtgtgcctgaaggatgcctatgaggagcagaagaagaaggtggccgaccaccccaacagaacacccagcatctggctggccatgtaccgggccttcggccggcccatcctgctgagcagcaccttccgctacctggccgacctgctgggctttgctggccccctgtgcatctctggaattgtgcagagggtgaatgagacccagaatggcaccaacaacaccaccggcatcagcgagaccctgagcagcaaggagttcctggagaatgcctacgtgctggccgtgctgctcttcctggccctgatcctgcagaggaccttcctgcaggccagctactacgtgaccattgaaacaggcatcaacctgcggggggccctgctggccatgatctacaacaagatcctgcggctgagcaccagcaacctgtccatgggagagatgaccctgggccagatcaacaacctggtggccatcgagaccaaccagctgatgtggttcctgttcctgtgccccaacctgtgggccatgcctgtgcagatcatcatgggcgtcatcctgctgtacaacctgctgggcagcagcgccctggtgggcgctgctgtgattgtgctgctggcccccatccagtacttcatcgccaccaagctggccgaggcccagaagagcaccctggactacagcacagagcggctgaagaagaccaatgagatcctgaagggcatcaagctgctgaagctgtatgcctgggagcacatcttctgcaagtctgtggaggagaccaggatgaaggagctgagcagcctgaagacctttgccctgtacaccagcctgagcatcttcatgaatgctgccatccccatcgctgctgtgctggccacctttgtgacccacgcctatgccagcggcaacaacctgaagccagctgaggcctttgccagcctgagcctcttccacatcctggtgacccccctcttcctgctgagcacagtggtgcgctttgctgtgaaggccatcatctctgtgcagaagctgaatgagttcctgctgagtgatgaaattggagatgacagctggaggactggagagagcagcctgccctttgagagctgcaagaagcacactggagtgcagcccaagaccatcaacaggaagcagcccggccgctaccacctggacagctatgagcagagcacccggcggctgcggcctgctgagacagaggacatcgccatcaaggtgaccaacggctacttctcctggggcagcggcctggccaccctgagcaacatcgacatccgcatccccaccggccagctgaccatgattgtgggccaggtgggctgcggcaagagcagcctgctgctggccatcctgggggagatgcagaccctggagggcaaggtgcactggagcaatgtgaatgaaagtgagcccagctttgaggccaccaggagcaggaaccgctacagcgtggcctatgctgcccagaagccctggctgctgaatgccaccgtggaggagaacatcaccttcggcagccccttcaacaagcagcgctacaaggctgtgacagatgcctgcagcctgcagcctgacatcgacctgctgccctttggagaccagacagaaattggagagcggggcatcaacctgagcggcggccagaggcagaggatctgtgtggcccgggccctgtaccagaacaccaacatcgtgttcctggatgaccccttcagcgccctggacatccacctgagtgaccacctgatgcaggagggcatcctgaagttcctgcaggatgacaagaggaccctggtgctggtgacccacaagctgcagtacctgacccatgctgactggatcatcgccatgaaggatggctctgtgctgcgggagggcaccctgaaggacatccagaccaaggatgtggagctgtatgagcactggaagaccctgatgaaccggcaggaccaggagctggagaaggacatggaggccgaccagaccaccctggagaggaagaccctgcggcgggccatgtacagccgggaggccaaggcccagatggaggatgaagatgaggaggaggaggaggaggaggatgaagatgacaacatgagcacagtgatgaggctgcggaccaagatgccctggaagacctgctggagatacctgaccagcggcggcttcttcctgctgatcctgatgatcttcagcaagctgctgaagcacagcgtcatcgtggccatcgactactggctggccacctggaccagcgagtacagcatcaacaacacaggcaaggctgaccagacctactacgtggccggcttcagcatcctgtgtggggccggcatcttcctgtgcctggtgaccagcctgactgtggagtggatgggcctgacagctgccaagaacctgcaccacaacctgctgaacaagatcatcctgggccccatccgcttctttgacaccacccccctgggcctcatcctgaaccgcttctctgctgacaccaacatcatcgaccagcacatcccccccaccctggagagcctgaccaggagcaccctgctgtgcctgagcgccatcggcatgatctcctatgccacccctgtgttcctggtggccctgctgcccctgggcgtggccttctacttcatccagaagtacttccgggtggccagcaaggacctgcaggagctggatgacagcacccagctgcccctgctgtgccacttcagcgagacagctgagggcctgaccaccatccgggccttcagacatgagacccgcttcaagcagaggatgctggagctgacagacaccaacaacatcgcctacctgttcctgtctgctgccaaccgctggctggaggtgaggacagactacctgggcgcctgcatcgtgctgacagccagcatcgccagcatcagcggcagcagcaacagcggcctggtgggcctgggcctgctgtatgccctgaccatcaccaactacctgaactgggtggtgaggaacctggccgacctggaggtgcagatgggcgctgtgaagaaggtgaacagcttcctgaccatggagagtgaaaattatgagggcaccatggaccccagccaggtgcctgagcactggccccaggagggggagatcaagatccatgacctgtgtgtgcgctatgagaacaacctgaagcctgtgctgaagcacgtgaaggcctacatcaagccaggccagaaggtgggcatctgtggccgcacaggcagcggcaagagcagcctgagcctggccttcttcaggatggtggacatctttgatggcaagatcgtgattgatggcatcgacatcagcaagctgcccctgcacaccctgcggagccggctgagcatcatcctgcaggaccccatcctcttcagcggcagcatccgcttcaacctggaccctgagtgcaagtgcacagatgaccggctgtgggaggccctggagatcgcccagctgaagaacatggtgaagagcctgcccggcggcctggatgctgtggtgacagaaggaggagagaacttctctgtgggccagaggcagctgttctgcctggcccgggcctttgtgaggaagagcagcatcctgatcatggatgaggccacagccagcattgacatggccacagagaacatcctgcagaaggtggtgatgacagcctttgctgacagaacagtggtgaccatcgcccaccgggtgcacaccatcctgacagctgacctggtgattgtgatgaagaggggcaacatcctggagtatgacaccccagagagcctgctggcccaggagaatggagtgtttgccagctttgtgcgggctgacatgtag

SEQ ID NO: 203469 - DNA, 4650 bp, Artificial Sequence
  derived and/or modified sequence
atgagcctgagcttctgcggcaacaacatcagcagctacaacatcaatgatggtgtacttcagaatagttgtttcgtggatgcgctcaatcttgtaccccacgtattcctactcttcattaccttccccatcctcttcattgggtggggttctcagagcagcaaggtccagatacaccataatacgtggctccactttcccggtcacaaccttcgctggattctcacatttgccctactgtttgtgcacgtctgtgagatcgcagagggaattgtctctgacagtcgacgtgagagccgccatctccacttatttatgcccgcagtgatgggattcgtggctacaacaacaagtatcgtgtattatcataacatcgaaacctctaattttcccaagctcctgttggctctcttcctgtactgggttatggcctttataaccaaaacgattaagttagtgaaatattgccagtctggcctcgacataagcaacctgcgtttctgtatcaccggaatgatggttattctgaacgggctgcttatggcagtagagatcaatgttattagggtgcgtcggtatgtcttcttcatgaacccacagaaagtcaagccccctgaggatctgcaggatttaggggtgcgtttccttcagcccttcgtgaacctgttgtctaaggctacatactggtggatgaacacactgatcatatccgcacataagaagccaatcgatctgaaagcaattggaaagcttcctattgctatgcgggccgttaccaactatgtgtgcctgaaggacgcttacgaggaacagaaaaagaaagtagccgaccacccaaacagaacccctagtatttggctcgcgatgtaccgcgcttttggccgtcccatcttgctttcatctacattcagatatctcgccgacctactgggtttcgcagggccactctgcatctcaggcatcgtgcagagggttaacgaaacccaaaatggcacaaacaataccactggcattagcgagaccctaagcagcaaagaatttctggagaacgcctacgtgcttgccgtgctcctgttcctcgccctgatccttcaacgcacttttctgcaggcgagttattatgtgaccattgagaccggcatcaatctaaggggcgcattattggcaatgatatataacaagattctcaggctgagtacaagcaacttatccatgggggaaatgaccctgggacagatcaataatctcgttgcgatcgagactaaccaattaatgtggttcctgttcttgtgcccaaacctttgggccatgccggtgcagatcattatgggggttatactcttgtataacctgcttggttcgtccgctttggtgggagcagccgtcatcgttctcttagccccgatacagtattttattgctaccaagctggccgaggctcagaagtcaacactcgattactctaccgaacgactcaagaagaccaatgagatcctcaagggcatcaagcttctgaaactgtacgcgtgggagcacatcttttgtaaatccgtggaagaaacgaggatgaaggaactgagtagtttgaagacattcgccctgtataccagtttatcaatctttatgaacgccgccatcccaatcgctgcagttctggcaacatttgtgactcacgcgtacgcctccggaaacaaccttaagcccgctgaggcgttcgcgagccttagtctctttcacatcctcgtgacccccctcttcctactctccacggtggtgaggttcgccgttaaggctatcatctctgtccagaagcttaacgagttcttgctgagtgacgagattggcgacgatagctggcgcaccggcgagtcttccctgccatttgagtcatgtaaaaagcataccggtgtgcagccgaagacaattaaccgtaaacagcccgggcggtatcatcttgattcttacgagcagtccacacgcagactcaggcccgccgagaccgaagacatcgcgattaaggtcaccaacggttacttctcatggggaagcgggctggctactcttagcaatatcgacatccggatcccaaccggtcaactgacaatgatcgtcgggcaggtcggctgcggtaagtcctccctgctccttgcaatacttggcgagatgcagaccctggaggggaaagtgcactggtctaacgtgaacgagagcgagccatcatttgaggccacacgctccagaaaccgttatagtgtggcttacgcggctcagaaaccatggctgctcaacgctacggttgaggagaacattactttcggttccccatttaataaacagagatacaaagccgttacggacgcctgctcgctgcagcctgacattgatcttctaccattcggcgatcagactgagatcggtgagagggggatcaacctgtccggggggcaaaggcagagaatctgcgtggcacgcgcactctaccagaataccaatatagtgtttcttgacgaccctttctccgccctggatattcacctatccgaccacctgatgcaggaaggtatcctaaagtttcttcaggacgataaacgcacccttgtgttggtgactcacaaactgcagtacctcacccacgccgattggatcatcgccatgaaggacggatccgtgctgagggagggcactctcaaagatatccaaacgaaggacgtcgagctgtatgagcactggaaaaccctcatgaaccgccaggatcaggaactcgagaaggacatggaggccgaccaaacaacgctggaacggaagactctgagacgcgctatgtatagtagagaggctaaagctcaaatggaagacgaagatgaagaggaggaggaggaggaggacgaggacgataacatgtccacagtaatgcgcctaaggactaagatgccctggaagacgtgttggaggtatctgacctctggcggattcttccttttgatactcatgattttctccaaactattgaaacactcagtgatcgtggccattgactactggctggccacgtggacaagcgaatactctataaacaacaccgggaaagctgaccagacttattatgtcgccggattttctatactgtgcggagcggggatatttctttgtctggtgacttctcttaccgtggagtggatgggattaactgccgctaaaaacctgcatcacaatctgctaaataagatcatcttgggccccatccggttcttcgacacaactccactgggactcatactgaaccgcttttctgcggataccaacattattgaccagcacatcccccccacgcttgaatctctgacaagaagcactctgctttgtttaagcgccataggcatgatttcatatgcaacacccgtttttttggtagccctgctgcctttaggcgtggcgttctatttcatacagaaatatttcagagtcgcctctaaagacctgcaggagctggacgacagcactcagctcccccttctttgtcacttctccgaaactgctgaaggacttacaacaatccgcgcctttaggcacgagacacggttcaagcagagaatgctggaactgactgacacaaacaacatcgcctacttatttttgtctgcagccaacagatggctcgaagttagaactgattacttgggcgcgtgcattgtgctcaccgcgagcatagcatccatctccgggtcctccaactccgggctagtgggtctaggccttctgtatgccctgacaattacgaactacttgaactgggttgtgcggaacctggctgacttggaagttcagatgggagctgtgaaaaaggtaaactctttcttgactatggaatccgagaactatgaaggcactatggatccatctcaggttccggagcactggccgcaggagggtgagatcaaaatccacgacttatgtgtaaggtatgagaataatctcaaacctgttctgaagcacgtcaaggcttacattaaacctgggcagaaggtgggaatctgcgggagaacaggtagcggaaagtcttctctgtctttagcattttttcgaatggtcgatatttttgacggcaaaattgtgattgacggcatcgatatctctaagctgccactgcatactctccggagccgcctgtctataatcctccaagacccaattctgttctccggttccatccggtttaacctggatccggagtgtaagtgtactgacgaccgactgtgggaggcactcgagatagcacagctgaaaaacatggtaaagtcactgcccgggggcttggacgctgtggtcaccgaggggggcgaaaattttagcgtgggacagagacaacttttctgtcttgctcgggcctttgtccgcaagagcagtatactcatcatggatgaggcgactgcctcaatcgatatggccactgagaatatactgcagaaggtcgttatgactgctttcgccgataggacggttgtaacaattgcccatagggtccatactattctaaccgctgacttagtgattgtaatgaaaagaggtaatattcttgaatatgatactcctgaaagtctgcttgctcaagaaaacggcgtgtttgccagttttgttcgcgctgatatgtag

SEQ ID NO: 203470 - DNA, 4650 bp, Artificial Sequence
  derived and/or modified sequence
atgtcgctgagtttttgcggcaataacatctcctcttacaacattaatgatggtgtgttacagaactcatgcttcgtcgacgcgttgaacctagttcctcacgtcttcctattatttattacatttcccattctgttcatcggatggggttcccaatctagtaaagttcagattcaccataacacatggctgcattttcccggacataacctccgctggattctcactttcgcccttcttttcgtccatgtgtgtgagatagctgagggcatcgtctctgattccaggcgggagtctcgccacctccacctgttcatgcccgctgtaatggggttcgtcgccactactacctcgatcgtttattaccacaatattgagacatctaacttcccgaagctgctccttgcgttgtttctttattgggtcatggctttcataactaaaaccatcaagctggtgaagtattgtcagagcggattggatatcagtaatctccgcttttgtatcaccgggatgatggtgattttaaatggtcttctgatggcagtcgagattaatgtgattcgcgtgcggaggtacgtgttttttatgaacccacagaaagttaagccacctgaagaccttcaggatttaggcgtgcggtttctgcaacccttcgttaacttgctgagtaaggccacctactggtggatgaacacactcatcatctccgcccacaagaagccgatcgacctgaaagcaataggcaagctgcctatagcgatgagggcagtgactaattacgtgtgtcttaaggacgcatatgaggagcagaaaaagaaggttgccgaccacccaaaccgcactccttcaatctggctggcaatgtacagggccttcggtcgccctatactgctttcgagcacgtttcggtacctggcagacttattaggattcgccggtccactttgcattagtgggatagtgcagagggtgaatgagacccagaatggtacaaataacaccacaggtatcagcgagacgctatcttcaaaagaattccttgaaaatgcatacgtcctcgctgtcctgctattcctcgcactgattctgcagcgaacatttctgcaggcatcttactacgtgacaattgaaacaggcatcaatcttcgtggcgcacttttggccatgatttataacaagatactccgcctcagtacatctaacctcagcatgggagagatgacactcggacagatcaacaacctggtggctatagaaaccaaccaactgatgtggttcttattcctatgcccaaacctctgggcaatgccagtgcagattatcatgggtgtcatcctgttatataatttgctgggtagcagcgccctggtgggggcagctgtcattgtgcttttggctccaattcagtacttcatcgccaccaagctcgccgaggcgcagaaatcaactctggattacagcacagagcgactcaaaaagacaaacgaaattttaaagggtataaagttgctgaaactctatgcctgggagcacatcttctgcaagtccgtcgaagagacaaggatgaaagagctgtcctctctcaagaccttcgcactctatacttccctgtccatcttcatgaatgccgctatcccaatcgcagctgtgctcgccacttttgtgacgcacgcgtacgcctccggaaataacctgaagcccgcagaggcctttgcctcattgagcctgtttcacattctcgtaacccctctgtttctcctgagtacagtggttagatttgctgtcaaagctattatttccgtacagaagttaaacgagttcctgctctccgatgagatcggcgacgacagttggagaactggagaaagctcactgcctttcgagtcctgcaagaaacacacaggcgtgcagccgaagaccattaatagaaagcaacctggccgttatcacttggatagctacgagcagtctactcgccgtttgcgcccagccgagacagaagacattgctatcaaggtgactaatggctatttctcatggggcagcggacttgcaactctgagcaacatcgatatacggatacccacaggtcagctgaccatgattgtcggtcaggtgggttgcggaaaatcgtctctgttattagcgatcctcggcgaaatgcaaaccctggaggggaaggtgcactggagcaacgtcaacgagtcagaaccttcattcgaagccacccgctccagaaatcgatacagtgttgcttatgcagcccagaaaccttggctcttaaacgctaccgtggaggagaatatcacatttgggtccccatttaataagcaaaggtataaagccgttacagatgcatgtagtttgcagcctgacatcgatttgcttccatttggcgatcagaccgaaattggggagcggggaataaatctgtcgggagggcagcgacaacgcatctgtgtagccagagcgttgtaccaaaacactaacattgtatttttagatgatccttttagtgccttggacattcatctgagtgaccatttgatgcaggagggaatactaaagtttctccaggatgataagcgcacgctggtgctggtgacccacaagcttcaatacctgacacatgccgactggataatcgcgatgaaggatggcagcgtgctccgggaaggcacactgaaggacattcaaaccaaagatgttgaactgtacgaacattggaagactctgatgaacagacaagatcaggaactggaaaaagatatggaggcagaccaaaccaccctcgaacggaagaccctgcggagggccatgtattcccgggaagccaaggctcagatggaagatgaagacgaagaagaggaggaggaggaggatgaggatgataatatgtccactgtgatgcgtttacgcaccaagatgccgtggaaaacttgctggcgttacctgacgagtggcggttttttccttctgatactaatgatcttttctaagttgctcaagcattccgtcatagttgcgattgattattggctggctacctggacatcggaatatagtataaataatactggcaaggctgaccagacttactacgtggccggattttctatcttgtgcggcgcaggcattttcctgtgcctcgtgacctccctgacagtggagtggatgggactgacggctgccaagaatctgcatcacaacctgctaaataagataatcctaggtccgattaggtttttcgacaccacgcccctcggacttatcctcaacaggttcagtgcggacacaaatatcatcgaccaacatataccccctactttggagtctttgactaggagcacgcttctttgtctgagtgcgatcggcatgattagctatgctacccctgtattcctcgttgctctcctcccgttaggtgttgcattctacttcatccagaaatactttagagtagctagtaaagatctgcaggaactggacgatagtacacagctgcctctcttgtgccacttcagcgagactgctgaaggactgacaacaatccgagcctttagacacgagacaaggttcaaacaacggatgctggaactgaccgatacaaacaatattgcttacctctttctttcagccgctaaccggtggttggaagtgagaacagactatctgggggcatgcatagtgctcaccgcttctatcgcctctatttccggctccagcaacagcggtctggtgggactgggtctactgtacgctctgactatcacaaattacttgaattgggtggttcgcaatttggcagacttggaggtccagatgggtgcggtgaagaaagtgaacagttttttaaccatggagtcagagaattacgaaggcacaatggatccatctcaagtccccgaacactggccacaggagggtgagattaagatacatgacctgtgcgtgcgttacgaaaacaatctgaagcccgtcctgaaacacgtaaaggcatatatcaaacccggacagaaggtcggtatctgcggtaggaccgggtccggcaaaagtagcctttcgttggccttttttcgtatggtcgatatttttgatggaaagatagtcattgatggaatcgatatcagtaagctgccattgcacactctgcgctcgagattaagtattatactgcaggacccgatcctgttctctgggtcaataagattcaatctggatcccgagtgcaagtgcaccgatgatcgtctgtgggaggccctcgagatcgcccagctaaaaaatatggtgaagagcctgcctggcggactggacgcagtggttacagagggaggtgagaatttctctgtcgggcagaggcaattgttttgcttggcccgtgcttttgtgcggaaatcaagcatactgatcatggacgaggccacagcatcaatcgatatggctaccgaaaatatactgcaaaaggtagtgatgaccgcttttgcggatcgcacagtggttactattgctcaccgggtgcataccatcctgacagctgacttagtcattgtgatgaagcgcggtaatatccttgagtatgatacaccggagtcattgttggctcaggagaacggagtgttcgcaagtttcgttagagcggatatgtag

SEQ ID NO: 203471 - DNA, 8293 bp, Artificial Sequence
  derived and/or modified sequence
atgagcctttcattttgtggtaacaacatttcttcatataatatcaacgatggtgtactacaaaattcctgctttgtggatgccctcaacctggtccctcatgtctttctgttgtttatcacttttccaatattgtttattgggtgggggagccaaagctcaaaagtacaaattcaccacaacacatggcttcattttccgggacataacctgagatggattcttacattcgctctcctgtttgtgcatgtctgtgaaatagcagaaggcattgtttcagactcgcggcgggaatcaaggcacctccacctctttatgccagccgtgatgggattcgttgccactacaacatcgatagtgtattatcataatatcgaaacatcaaattttcctaaattacttttagccctgttcctgtattgggtaatggcctttattacaaaaacaataaaattggttaagtactgtcagtctggcttggacatatcaaacctgcgtttctgcatcacaggcatgatggtcatcttgaatgggctcttgatggctgtggagatcaatgtcattcgagtcaggagatatgtatttttcatgaatcctcagaaagtaaagcctcctgaagacctccaggatctgggagtgagatttcttcaaccatttgtgaatttgctgtcaaaagcaacatactggtggatgaacacacttattatatctgctcacaaaaagcctattgatctgaaggcaattggaaaattgccaatagcaatgagagcagtaacaaattatgtttgcctgaaagatgcatatgaagaacaaaagaaaaaagttgcagatcatccaaatcggactccatctatatggcttgcaatgtacagagcttttgggcgaccaattctacttagtagcacattccgctatctggctgatttactgggttttgctggacctctttgtatttctggaatagttcagcgtgtgaatgaaacccagaatgggacaaataacacaactggaatttcagaaaccctctcatcaaaggaatttcttgaaaacgcttacgttctagcagttcttctcttcttggctcttattctgcaaaggacatttttgcaggcttcctactatgtaaccatagagactggcattaacctccgtggagctctgctggccatgatttataataaaatccttaggctctctacgtctaacttatccatgggggagatgactctggggcagatcaacaacttagtcgccattgaaactaatcaactcatgtggtttttgttcctgtgtcctaatctatgggctatgcctgttcagatcataatgggcgtgattctgctctataatttacttggatcaagtgcattggtcggtgcagctgtcattgtgctccttgcgccaattcagtactttattgctacaaagttggcagaggctcagaaaagtacacttgattattccactgagagactcaagaaaacaaatgaaatattgaaaggcatcaaacttctaaaattgtatgcctgggaacacattttctgcaaaagtgtggaggaaacaagaatgaaagaactatctagtctcaaaacctttgcactatatacatcactctccatcttcatgaatgcagcaattcccatagcagctgttcttgctacatttgtgacccatgcgtatgccagtggaaacaatctgaaacctgcagaggcctttgcttcactgtctctcttccatatcctggtcacaccactgttcctgctctccacggtggtcagatttgcagtcaaagccatcataagtgttcaaaagctgaatgagtttctcttgagtgatgagattggtgacgacagttggcgaactggtgaaagttcgcttccttttgagtcctgtaagaagcacactggagttcagccaaaaactataaacaggaaacagcctggaagatatcacctggacagctatgagcaatcaacacggcgtctacgtcccgcagaaacagaggacattgcaataaaggtcacaaatggatacttttcatggggcagtggtttagctacattatccaatatagatattcgaattccaacaggtcagttaaccatgattgtgggccaagtaggatgtgggaagtcctctcttctccttgccatcctcggtgagatgcagacattggaaggaaaagttcactggagcaatgtaaatgaatctgagccttcttttgaagcaaccagaagtaggaacaggtactctgtggcatatgcagctcaaaagccttggctattaaatgctacagtagaagaaaatattacttttggaagtccttttaacaaacagaggtacaaagctgtcacagatgcctgttctcttcagccagatattgacttattaccatttggagatcaaactgaaattggagagaggggcatcaacctgagtgggggacagaggcagagaatctgtgtggcacgagcgctgtatcaaaacaccaacattgtctttttggatgatccattctcagccctggacattcacttgagtgatcatttaatgcaggaggggattttgaaattcctgcaagatgacaaaaggacactcgttcttgtgactcacaaattacagtatctgacgcatgctgactggatcatagccatgaaagatggaagtgtcctaagagaaggaactttgaaggacattcaaaccaaagatgttgagctttatgaacactggaaaacacttatgaatcggcaagatcaagaattagaaaaggatatggaagctgaccaaactactttagagaggaaaactctccgacgggccatgtattcaagagaagccaaagcccagatggaggacgaagacgaagaggaagaagaggaggaagatgaggatgataacatgtccactgtaatgaggctcaggactaaaatgccatggaaaacctgctggcgctacctgacatctggaggattcttcctgctcatcctgatgattttctctaagcttttgaagcattcggtcattgtagctatagactattggctggccacatggacatcggagtacagtataaacaatactggaaaagctgatcagacctactatgtggctggctttagcatactctgtggagcaggcattttcctttgccttgttacatccctcactgtagaatggatgggtctcacagctgccaaaaatcttcaccacaaccttctcaataagataatccttggaccaataaggttttttgataccacacccctgggactgattctcaatcgcttttcagctgatactaatatcattgatcagcacatccctccaaccttggaatctctaactcgctcaacactgctctgcctgtctgccattgggatgatttcttatgctactcctgtgttcctggttgctctcctgccccttggtgttgccttttattttatccagaaatactttcgggttgcctctaaggacctccaggaacttgacgatagtacccagctccctctgctctgtcacttctcagaaacagcagaaggactcaccaccattcgggcctttaggcatgaaaccagatttaaacaacgtatgctggaactgacggatacaaacaacattgcctacttatttctctcagctgccaacagatggctggaggtcaggacggattatctgggagcttgcattgtcctcactgcatctatagcatccattagtgggtcttcgaattctggattggtaggcttgggtcttctgtatgcacttacgataaccaattatttgaattgggttgtgaggaacttggctgacctggaggtccagatgggtgcagtgaagaaggtgaacagtttcctgactatggagtcagagaactatgaaggcacaatggatccttctcaagttccagaacattggccacaagaaggggagatcaagatacatgatctgtgtgtcagatatgaaaataatctgaaacctgttcttaagcacgtcaaggcttacatcaaacctggacaaaaggtgggcatatgtggtcgcactggcagtgggaaatcatcgttatctctggctttcttcagaatggttgatatatttgatggaaaaattgtcattgatgggatagacatttccaaattaccactgcacacactacgttctagactttcaatcattctgcaggatccaatactattcagtggttccattagatttaatttagatccagagtgcaaatgcacagatgacagactctgggaagccttagaaattgctcagctgaagaatatggtcaaatctctacctggaggtctagatgcggttgtcactgaaggtggggagaattttagcgttggacagagacagctattttgccttgccagggcctttgtccgcaaaagcagcattcttattatggatgaggcaacagcttccattgacatggccacagagaatattttgcaaaaagtagtaatgacagcctttgcagaccggaccgtggtgacaatagctcatcgagtacacactattctgacggcagacctggttattgtgatgaagcgaggaaatattttagaatatgacactccagaaagcctcttggctcaggaaaatggagtatttgcttcttttgttcgcgcagacatgtgaaggagtgtcttaaaacaatacatgtatttaaaataatgcagtcataacctaattaatggatcatcagcttgacctctgtaaagtggcatcttaaaacttttacagatttttgcacaaaaagtggacatttatttttcctgtttttaaaacagtttttcaagatattattgcttaatatgttcattattgatgtttttatagtgatccagccactctagctttaagaatagctaggttgtattaaaacatgtaagctactttaagtgataaatcaatagctaaagttttctcctaactttaagtctggtaaatatctctcaggaatggaagtgtcaatgagtagtcagtattactatactcttgtttgtaagaatatattttccttattgttggagtctccagaggttattggaaggaataaaaaaggacatgttttctaacgaaactctcaaattcattatctacttcatgagaatttatttgtattcattaacattagtaatacctatttttcttaagagccttcttttttcccttttgtttcttgtcaccaagaagttatcacacttatacttattctataaggccaaagccttatctagaaagatcatgaagagtttggatatttttaaaactatactcgaattttcattttttcctgtcctgtaaagagagaattcttaagatatcaggcataatgtatgtaccttttccagactgaagttcaaagaatgattaggttcaatctttcagtggcaggccagctaaactttctatagtttaatgattagctgtggttatgatcttgagccctaacatgccacattactcaagatttacacaggcaagtgacttcatttggcactgctaataatggcaggtgaacattcctctcaggtgtgagatatttcctatgaaacagtccactggcaggctggagatatcttacactttgaagttatatatatataaaacaagtgtctatttctagctgaaagagtttacctcttctagacatttatgcccaatggtgtcacacatgatcatttgctcctgctctaattttaatgtgcatacaaaaaatataccaaaaatgttattgtaattttaatgagcatgtaaagagtgtatcaaaaattgatgggatattagtgttaggttttgcttaaatgaaaattaataaattcaaaaatactaaaagtcaccttctttgtcacgttagcaaccagtttctactattctgtgcccatccagtgtcaatatcattgatttctttttcatatgaagatccacatgcattgtaagattgtgaagatatataaaattgatgaattaagagaaattatgccactttcctatagtttctgtgttctgtttattgtatggtgtattcactcttggaaaatatgtaatagttgtgtatccagaatatgtgtcttcacctgaatatttaatctttatatttacaaaaaaataagttccacaagatggacaaaaatggtccatgatatttagcttaaattgtaaccttttgttgtgtatataaaacttccttggaagaaaataaccttattgttttcttaaagctaaacagaataggattggtactcattaattatgtcttgcaaatattttctaaaaattcaaccactctcctaaaatggtgtttaaatattttgtagggcagaatatgcatattgcctgttagcaagtaataattcattctcatagagaaatgggtttttacccatggaagtaatcttttttttttcttttttttttttaattttttttttaatatactttaagttttagggtacatgtgcacattgtgcaggttagttacatatatatacatgtgccatgctggtgcgctgcacccactaactcgtcatctagcattaggtatatctcccaatgctatccctccccactccccccaccccaccacagtccccagagtgtgatattccccttcctgtgtccatgtgatctcattgttcaattcccacctatgagtgagaatatgcggtgtttggttttttgttcttgcgatagtttactgagaatgatggtttccagtttcatccatgtccctacaaaggacatgaactcatcattttgtatggctgcatagtattccatggtgtatatgtgccacattttcttaatccagtctatcattgttggacatttgggttggttccaagtctttgctattgtgaataatgccgcaataaacatacgtgtgcatgtgtctttatagcagcatgatttatagtcatttgggtatatacccagtaatgggatggctgggtcaaatggtatttctagttctagatccctgaggaatcgccacactgacttccacaatggttaaactaaagagcttctgcacagcaaaagaaactaccatcagagtgaacaggcaacctacaacatgggagaaaattttcgcaacctactcatctgacaaagggctaatatccagaatctacaatgaactcaaacaaatttacaagaaaaaaacaaacaaccccatcaaaaagtgggtgaaggacatgaacagacacttctcaaaagaagacatttatgcagccaaaaaacacatgaaaaaatgctcatcatcactggccatcagagaaatgcaaatcaaaaccactatgagatatcatctcacaccagttagaatggcaatcattaaaaagtcaggaaacaacaggtgctggagaggatgtggagaaataggaacacttttacactgttggtgggactgtaaactagttcaaccattgtggaagtaatcttttaatgatattttcttattatattgctacaggcaacatcagtagaagcctatctagttacactaaactaaagatcacattcaccattcttacagccaagtggttgctggtcccctcataacttttagttacttaagttgagtaaatgtctaattgtttacaaactaaattgactaaataaggtcaaggataatgtttttcattgattaaccatttattatacatataatctattgaatataaaaagattcaccttgaaataatatttgactatataggtacatatctgtaaaagatgaccaccttaactaaatcagattttacatttataaattttatatttaattagtcaaatcaatttttaaatcataactccttaatctcataagaagcaataaatgcataaagcattatattaaaataccagggttacttatgtcattgacagggaaaagactttgtataaacaattatgcaccatctatttttgtactcttactcatgatccatttaaaagtctactcagctctagattagataccagaagaccctctaagtaactgataactgagattcgggaccatgtcttgtttgccattgtgcccttggaatttaatacaagtgcctaacccacagtagggttgattgattcactgattagttttactgccatgtgcctataactataggttattctctttccttttctatgttgtgtttattctatttattctctacaatatataaaatgtatttgttctctacaataaatgtgtttattctctacaatatataaaaacatattggactactattacataattaaattactcttt

SEQ ID NO: 203472 - DNA, 4650 bp, Artificial Sequence
  derived and/or modified sequence
atgagcctgagcttctgcggcaacaacatcagcagctacaacatcaacgacggcgtgctgcagaacagctgcttcgtggacgccctgaacctggtgccccacgtgttcctgctgttcatcaccttccccatcctgttcatcggctggggcagccagagcagcaaggtgcagatccaccacaacacctggctgcacttccccggccacaacctgagatggatcctgaccttcgccctgctgttcgtgcacgtgtgcgagatcgccgagggcatcgtgagcgacagcagaagagagagcagacacctgcacctgttcatgcccgccgtgatgggcttcgtggccaccaccaccagcatcgtgtactaccacaacatcgagaccagcaacttccccaagctgctgctggccctgttcctgtactgggtgatggccttcatcaccaagaccatcaagctggtgaagtactgccagagcggcctggacatcagcaacctgagattctgcatcaccggcatgatggtgatcctgaacggcctgctgatggccgtggagatcaacgtgatcagagtgagaagatacgtgttcttcatgaacccccagaaggtgaagccccccgaggacctgcaggacctgggcgtgagattcctgcagcccttcgtgaacctgctgagcaaggccacctactggtggatgaacaccctgatcatcagcgcccacaagaagcccatcgacctgaaggccatcggcaagctgcccatcgccatgagagccgtgaccaactacgtgtgcctgaaggacgcctacgaggagcagaagaagaaggtggccgaccaccccaacagaacccccagcatctggctggccatgtacagagccttcggcagacccatcctgctgagcagcaccttcagatacctggccgacctgctgggcttcgccggccccctgtgcatcagcggcatcgtgcagagagtgaacgagacccagaacggcaccaacaacaccaccggcatcagcgagaccctgagcagcaaggagttcctggagaacgcctacgtgctggccgtgctgctgttcctggccctgatcctgcagagaaccttcctgcaggccagctactacgtgaccatcgagaccggcatcaacctgagaggcgccctgctggccatgatctacaacaagatcctgagactgagcaccagcaacctgagcatgggcgagatgaccctgggccagatcaacaacctggtggccatcgagaccaaccagctgatgtggttcctgttcctgtgccccaacctgtgggccatgcccgtgcagatcatcatgggcgtgatcctgctgtacaacctgctgggcagcagcgccctggtgggcgccgccgtgatcgtgctgctggcccccatccagtacttcatcgccaccaagctggccgaggcccagaagagcaccctggactacagcaccgagagactgaagaagaccaacgagatcctgaagggcatcaagctgctgaagctgtacgcctgggagcacatcttctgcaagagcgtggaggagaccagaatgaaggagctgagcagcctgaagaccttcgccctgtacaccagcctgagcatcttcatgaacgccgccatccccatcgccgccgtgctggccaccttcgtgacccacgcctacgccagcggcaacaacctgaagcccgccgaggccttcgccagcctgagcctgttccacatcctggtgacccccctgttcctgctgagcaccgtggtgagattcgccgtgaaggccatcatcagcgtgcagaagctgaacgagttcctgctgagcgacgagatcggcgacgacagctggagaaccggcgagagcagcctgcccttcgagagctgcaagaagcacaccggcgtgcagcccaagaccatcaacagaaagcagcccggcagataccacctggacagctacgagcagagcaccagaagactgagacccgccgagaccgaggacatcgccatcaaggtgaccaacggctacttcagctggggcagcggcctggccaccctgagcaacatcgacatcagaatccccaccggccagctgaccatgatcgtgggccaggtgggctgcggcaagagcagcctgctgctggccatcctgggcgagatgcagaccctggagggcaaggtgcactggagcaacgtgaacgagagcgagcccagcttcgaggccaccagaagcagaaacagatacagcgtggcctacgccgcccagaagccctggctgctgaacgccaccgtggaggagaacatcaccttcggcagccccttcaacaagcagagatacaaggccgtgaccgacgcctgcagcctgcagcccgacatcgacctgctgcccttcggcgaccagaccgagatcggcgagagaggcatcaacctgagcggcggccagagacagagaatctgcgtggccagagccctgtaccagaacaccaacatcgtgttcctggacgaccccttcagcgccctggacatccacctgagcgaccacctgatgcaggagggcatcctgaagttcctgcaggacgacaagagaaccctggtgctggtgacccacaagctgcagtacctgacccacgccgactggatcatcgccatgaaggacggcagcgtgctgagagagggcaccctgaaggacatccagaccaaggacgtggagctgtacgagcactggaagaccctgatgaacagacaggaccaggagctggagaaggacatggaggccgaccagaccaccctggagagaaagaccctgagaagagccatgtacagcagagaggccaaggcccagatggaggacgaggacgaggaggaggaggaggaggaggacgaggacgacaacatgagcaccgtgatgagactgagaaccaagatgccctggaagacctgctggagatacctgaccagcggcggcttcttcctgctgatcctgatgatcttcagcaagctgctgaagcacagcgtgatcgtggccatcgactactggctggccacctggaccagcgagtacagcatcaacaacaccggcaaggccgaccagacctactacgtggccggcttcagcatcctgtgcggcgccggcatcttcctgtgcctggtgaccagcctgaccgtggagtggatgggcctgaccgccgccaagaacctgcaccacaacctgctgaacaagatcatcctgggccccatcagattcttcgacaccacccccctgggcctgatcctgaacagattcagcgccgacaccaacatcatcgaccagcacatcccccccaccctggagagcctgaccagaagcaccctgctgtgcctgagcgccatcggcatgatcagctacgccacccccgtgttcctggtggccctgctgcccctgggcgtggccttctacttcatccagaagtacttcagagtggccagcaaggacctgcaggagctggacgacagcacccagctgcccctgctgtgccacttcagcgagaccgccgagggcctgaccaccatcagagccttcagacacgagaccagattcaagcagagaatgctggagctgaccgacaccaacaacatcgcctacctgttcctgagcgccgccaacagatggctggaggtgagaaccgactacctgggcgcctgcatcgtgctgaccgccagcatcgccagcatcagcggcagcagcaacagcggcctggtgggcctgggcctgctgtacgccctgaccatcaccaactacctgaactgggtggtgagaaacctggccgacctggaggtgcagatgggcgccgtgaagaaggtgaacagcttcctgaccatggagagcgagaactacgagggcaccatggaccccagccaggtgcccgagcactggccccaggagggcgagatcaagatccacgacctgtgcgtgagatacgagaacaacctgaagcccgtgctgaagcacgtgaaggcctacatcaagcccggccagaaggtgggcatctgcggcagaaccggcagcggcaagagcagcctgagcctggccttcttcagaatggtggacatcttcgacggcaagatcgtgatcgacggcatcgacatcagcaagctgcccctgcacaccctgagaagcagactgagcatcatcctgcaggaccccatcctgttcagcggcagcatcagattcaacctggaccccgagtgcaagtgcaccgacgacagactgtgggaggccctggagatcgcccagctgaagaacatggtgaagagcctgcccggcggcctggacgccgtggtgaccgagggcggcgagaacttcagcgtgggccagagacagctgttctgcctggccagagccttcgtgagaaagagcagcatcctgatcatggacgaggccaccgccagcatcgacatggccaccgagaacatcctgcagaaggtggtgatgaccgccttcgccgacagaaccgtggtgaccatcgcccacagagtgcacaccatcctgaccgccgacctggtgatcgtgatgaagagaggcaacatcctggagtacgacacccccgagagcctgctggcccaggagaacggcgtgttcgccagcttcgtgagagccgacatgtag

SEQ ID NO: 203473 - protein, 316 aa, Artificial Sequence
  derived and/or modified sequence
MATFVELSTKAKMPIVGLGTWKSPLGKVKEAVKVAIDAGYRHIDCAYVYQNEHEVGEAIQEKIQEKAVKREDLFIVSKLWPTFFERPLVRKAFEKTLKDLKLSYLDVYLIHWPQGFKSGDDLFPKDDKGNAIGGKATFLDAWEAMEELVDEGLVKALGVSNFSHFQIEKLLNKPGLKYKPVTNQVECHPYLTQEKLIQYCHSKGITVTAYSPLGSPDRPWAKPEDPSLLEDPKIKEIAAKHKKTAAQVLIRFHIQRNVIVIPKSVTPARIVENIQVFDFKLSDEEMATILSFNRNWRACNVLQSSHLEDYPFNAEY

SEQ ID NO: 203474 - DNA, 951 bp, Artificial Sequence
  derived and/or modified sequence
atggccaccttcgtggagctgagcaccaaggccaagatgcccatcgtgggcctgggcacctggaagagccccctgggcaaggtgaaggaggccgtgaaggtggccatcgacgccggctacagacacatcgactgcgcctacgtgtaccagaacgagcacgaggtgggcgaggccatccaggagaagatccaggagaaggccgtgaagagagaggacctgttcatcgtgagcaagctgtggcccaccttcttcgagagacccctggtgagaaaggccttcgagaagaccctgaaggacctgaagctgagctacctggacgtgtacctgatccactggccccagggcttcaagagcggcgacgacctgttccccaaggacgacaagggcaacgccatcggcggcaaggccaccttcctggacgcctgggaggccatggaggagctggtggacgagggcctggtgaaggccctgggcgtgagcaacttcagccacttccagatcgagaagctgctgaacaagcccggcctgaagtacaagcccgtgaccaaccaggtggagtgccacccctacctgacccaggagaagctgatccagtactgccacagcaagggcatcaccgtgaccgcctacagccccctgggcagccccgacagaccctgggccaagcccgaggaccccagcctgctggaggaccccaagatcaaggagatcgccgccaagcacaagaagaccgccgcccaggtgctgatcagattccacatccagagaaacgtgatcgtgatccccaagagcgtgacccccgccagaatcgtggagaacatccaggtgttcgacttcaagctgagcgacgaggagatggccaccatcctgagcttcaacagaaactggagagcctgcaacgtgctgcagagcagccacctggaggactaccccttcaacgccgagtactag

SEQ ID NO: 203475 - DNA, 1590 bp, Artificial Sequence
  derived and/or modified sequence
acagtagctcacacctgtaatcccagcactttggaaggccgaggtgggcggatcacctgagctcaggagtttgagaccagcctgtctctactaacaatataaaaattagctgggagtcacggtgggcgcctgtaatcccagctactcgggaggctgaggcaggagaattgcttgaacccaggagacagaggttgtagtgagctgagatcgcaccactgcactctagccttggcaacagtgcaagactgtctcaaaaacagcaacagagagcaggacgtgagacttctacctgctcactcagaatcatttctgcaccaaccatggccacgtttgtggagctcagtaccaaagccaagatgcccattgtgggcctgggcacttggaagtctcctcttggcaaagtgaaagaagcagtgaaggtggccattgatgcaggatatcggcacattgactgtgcctatgtctatcagaatgaacatgaagtgggggaagccatccaagagaagatccaagagaaggctgtgaagcgggaggacctgttcatcgtcagcaagttgtggcccactttctttgagagaccccttgtgaggaaagcctttgagaagaccctcaaggacctgaagctgagctatctggacgtctatcttattcactggccacagggattcaagtctggggatgaccttttccccaaagatgataaaggtaatgccatcggtggaaaagcaacgttcttggatgcctgggaggccatggaggagctggtggatgaggggctggtgaaagcccttggggtctccaatttcagccacttccagatcgagaagctcttgaacaaacctggactgaaatataaaccagtgactaaccaggttgagtgtcacccatacctcacacaggagaaactgatccagtactgccactccaagggcatcaccgttacggcctacagccccctgggctctccggatagaccttgggccaagccagaagacccttccctgctggaggatcccaagattaaggagattgctgcaaagcacaaaaaaaccgcagcccaggttctgatccgtttccatatccagaggaatgtgattgtcatccccaagtctgtgacaccagcacgcattgttgagaacattcaggtctttgactttaaattgagtgatgaggagatggcaaccatactcagcttcaacagaaactggagggcctgtaacgtgttgcaatcctctcatttggaagactatcccttcaatgcagaatattgaggttgaatctcctggtgagattatacaggagattctctttcttcgctgaagtgtgactacctccactcatgtcccattttagccaagcttatttaagatcacagtgaacttagtcctgttatagacgagaatcgaggtgctgttttagacatttatttctgtatgttcaactaggatcagaatatcacagaaaagcatggcttgaataaggaaatgacaattttttccacttatctgatcagaacaaatgtttattaagcatcagaaactctgccaacactgaggatgtaaagatcaataaaaaaaataataatcataa

SEQ ID NO: 203476 - DNA, 951 bp, Artificial Sequence
  derived and/or modified sequence
atggctacttttgttgagttaagtacaaaggctaagatgcccattgtggggctcggaacttggaaaagccccctgggcaaagtaaaagaagccgtcaaagtggcaatcgatgccggctaccggcatattgattgtgcctatgtgtatcagaatgaacatgaggttggggaagccatacaggaaaagattcaggagaaagctgtgaagcgagaggatctgttcatcgtgtcaaagttatggccaacctttttcgaacggccactggtgcggaaggcatttgaaaagactctgaaagacctgaaattaagttaccttgacgtctatttgattcactggccgcagggcttcaagagtggcgacgaccttttcccaaaggatgacaaaggaaacgctatcggaggaaaagctacgtttttagacgcctgggaagctatggaggagttggtcgacgaaggattggtgaaggcattgggagtcagtaacttcagtcactttcagattgaaaagctacttaacaagccggggctgaagtataagcccgtgacaaatcaggtggagtgccatccctatctcacccaggagaagttgattcagtactgccattccaaagggattacagtgaccgcctactcacctctaggcagccctgatagaccttgggccaagccggaggaccccagcctactcgaggaccccaagatcaaagagatcgcggccaagcataagaaaacagccgcccaggtcttgattcgcttccacattcagcgaaatgtgatagtcattccaaagagcgtgaccccagcccggattgttgaaaatatccaggtgttcgattttaagctcagtgacgaagagatggccactatcctgagctttaatagaaactggagggcgtgcaacgtgcttcagtctagtcatctggaagactatccctttaatgccgaatactag

SEQ ID NO: 203477 - DNA, 951 bp, Artificial Sequence
  derived and/or modified sequence
atggccacctttgtggagctgagcaccaaggccaagatgcccatcgtgggcctgggcacctggaagagccccctgggcaaggtgaaggaggccgtgaaggtggccattgatgctggctaccgccacatcgactgtgcctacgtgtaccagaatgaacatgaggtgggggaggccatccaggagaagatccaggagaaggctgtgaagagagaagatctcttcatcgtgtccaagctgtggcccaccttctttgagcggcccctggtgaggaaggcctttgagaagaccctgaaggacctgaagctgagctacctggatgtgtacctgatccactggccccagggcttcaagtctggagatgacctcttccccaaggatgacaagggaaatgccatcggcggcaaggccaccttcctggatgcctgggaggccatggaggagctggtggatgagggcctggtgaaggccctgggcgtgagcaacttcagccacttccagatcgagaagctgctgaacaagccaggcctgaagtacaagcctgtgaccaaccaggtggagtgccacccctacctgacccaggagaagctgatccagtactgccacagcaagggcatcaccgtgacagcctacagccccctgggcagcccagaccggccctgggccaagccagaggaccccagcctgctggaggaccccaagatcaaggagattgctgccaagcacaagaagacagctgcccaggtgctgatccgcttccacatccagagaaatgtgattgtcatccccaagtctgtgaccccagcccgcatcgtggagaacatccaggtgtttgacttcaagctgagtgatgaggagatggccaccatcctgtccttcaacagaaactggagggcctgcaatgtgctgcagagcagccacctggaggactaccccttcaatgctgagtactag

SEQ ID NO: 203478 - DNA, 951 bp, Artificial Sequence
  derived and/or modified sequence
atggccaccttcgtggagctgagcaccaaggccaagatgcccatcgtaggactgggcacatggaaatcaccactgggaaaggtgaaagaggcagtgaaagttgcaattgacgcgggttatcggcatatcgattgtgcctatgtttaccagaatgagcatgaggtgggtgaagcaatccaggagaagatacaggagaaagctgtgaagagggaggatctctttatcgtctcaaaactatggcccacgttcttcgaacgtccacttgtccgtaaggcgtttgagaaaacattgaaggatctgaagttgagctacctggacgtgtacctcatccactggccccaggggttcaagtcaggcgatgatctgttccctaaggatgacaaaggcaacgcaatcggtgggaaagccactttcctggacgcatgggaagccatggaggaactggtagatgagggactggtaaaagcactgggcgtgtctaactttagtcatttccaaattgagaagttgctcaataaacccggcctgaagtacaaaccagtcactaatcaggtcgagtgccatccatatctgactcaagagaagctcatccaatactgtcactctaaggggatcactgtgacagcctactcccctttggggagcccggacagaccgtgggcgaagcctgaggacccaagtctgctggaagacccaaaaataaaagaaatcgccgccaagcataagaagaccgctgcacaggtcctgattagatttcacatacagaggaacgtgattgttattcccaagtcagtgacccccgcacgtattgtcgaaaatatacaggtcttcgactttaagctgagcgatgaggaaatggcaacaattctgtctttcaaccgcaattggcgggcatgtaatgtgcttcagtcatctcacctggaggattaccctttcaatgccgagtattag

SEQ ID NO: 203479 - DNA, 951 bp, Artificial Sequence
  derived and/or modified sequence
atggcaacattcgtggagcttagcaccaaggctaaaatgcctattgttgggctcggaacctggaagtcaccattgggcaaggtgaaggaagccgttaaagttgcaatcgatgccggatatcggcacatagattgcgcgtacgtgtaccagaatgagcacgaggtgggggaagccattcaggagaaaatacaggagaaagccgtgaaacgcgaggatcttttcatcgtgagcaaactttggcctacgtttttcgagcggccattggtcagaaaagcttttgagaaaacacttaaggatctcaagctctcttatctcgacgtgtatctaatccactggccacaagggttcaaatccggagacgacttgtttcccaaggatgacaaggggaatgcgatcgggggaaaagctacatttttggacgcatgggaggccatggaagagctcgttgacgaagggctggtgaaggcgttgggagtgtccaactttagtcacttccagatagagaaacttcttaataaacccggattgaagtacaaacccgttaccaatcaggtcgagtgtcacccctacctgacccaagagaagctgattcagtattgccacagtaaggggataaccgtaaccgcatactctccgctggggagccctgacagaccatgggccaagccggaggatccatctctcttagaagatcctaagattaaggagatagccgctaagcataagaagactgccgctcaggtcttgatcaggtttcacatacagaggaatgttattgtgatccccaagtctgtgacaccggctagaatcgtggagaacattcaggtgttcgactttaagctgagtgacgaggaaatggctacaattcttagcttcaaccgcaattggcgcgcttgcaatgttctgcagagcagtcacctggaggattatccatttaacgcagagtactag

SEQ ID NO: 203480 - protein, 172 aa, Artificial Sequence
  derived and/or modified sequence
MASGPHSTATAAAAASSAAPSAGGSSSGTTTTTTTTTGGILIGDRLYSEVSLTIDHSLIPEERLSPTPSMQDGLDLPSETDLRILGCELIQAAGILLRLPQVAMATGQVLFHRFFYSKSFVKHSFEIVAMACINLASKIEEAPRRIRDVINVFHHLRQLRGKSDQLHLPKPG

SEQ ID NO: 203481 - protein, 526 aa, Artificial Sequence
  derived and/or modified sequence
MASGPHSTATAAAAASSAAPSAGGSSSGTTTTTTTTTGGILIGDRLYSEVSLTIDHSLIPEERLSPTPSMQDGLDLPSETDLRILGCELIQAAGILLRLPQVAMATGQVLFHRFFYSKSFVKHSFEIVAMACINLASKIEEAPRRIRDVINVFHHLRQLRGKRTPSPLILDQNYINTKNQVIKAERRVLKELGFCVHVKHPHKIIVMYLQVLECERNQTLVQTAWNYMNDSLRTNVFVRFQPETIACACIYLAARALQIPLPTRPHWFLLFGTTEEEIQEICIETLRLYTRKKPNYELLEKEVEKRKVALQEAKLKAKGLNPDGTPALSTLGGFSPASKPSSPREVKAEEKSPISINVKTVKKEPEDRQQASKSPYNGVRKDSKRSRNSRSASRSRSRTRSRSRSHTPRRHYNNRRSRSGTYSSRSRSRSRSHSESPRRHHNHGSPHLKAKHTRDDLKSSNRHGHKRKKSRSRSQSKSRDHSDAAKKHRHERGHHRDRRERSRSFERSHKSKHHGGSRSGHGRHRR

SEQ ID NO: 203482 - DNA, 1581 bp, Artificial Sequence
  derived and/or modified sequence
atggcatctgggccacacagtacagccacggctgccgcagccgcctcgagtgccgcacctagcgccggaggaagttcttccgggaccactactacaactaccacaactactggtggtattcttattggtgaccggctgtacagtgaggtgtccctcaccattgatcactcacttatccccgaggaacgactcagccctacacctagtatgcaggatgggctggaccttccatccgaaacggatctgcgaatcctgggatgtgagctgattcaggccgcgggaattctgttgcgcctcccccaagtcgccatggccaccggccaagtcctcttccatcgatttttctacagcaaaagcttcgtcaagcacagttttgagatagttgctatggcttgcattaacttggcctccaaaatagaagaggccccaaggcgcatacgagacgtgattaatgtgttccatcatctgaggcagctgaggggaaaacggacaccatctccactgatcctggaccagaactacattaacaccaaaaaccaggttataaaggctgagagacgcgtgctgaaggagctgggcttttgtgttcatgtgaagcaccctcacaagataatagtcatgtaccttcaggtgttggagtgtgagcggaatcagacactggtgcagacagcgtggaattacatgaacgactcactacggaccaacgttttcgtccgatttcaaccagagacgattgcgtgcgcatgcatttatcttgccgctcgagcattgcagatcccactacccactagacctcactggttcctactgtttgggacaaccgaggaggaaattcaagagatatgcattgagactctgaggctctatacgagaaaaaagccaaactacgagctgcttgagaaagaagtcgaaaaacgtaaggtagctctgcaggaagccaagctgaaggctaaagggctcaacccggacggcacacccgcccttagcaccctgggaggcttttcccctgcctccaagccctctagtcctagagaagtaaaagctgaggaaaagtctcctatctcaatcaacgtaaagacggttaaaaaagaaccagaggacaggcagcaagcctcaaagagtccatacaatggcgttagaaaagattcaaagcggtcacggaacagccgatcagcttcccgctcacgcagccgaaccagaagtcgctcccgatcgcacactcctagacgacactataacaacaggcggtcccgaagtggcacctattctagtcgatcacggtcaaggagcagatcgcactcggaatctccccgtcgccatcacaatcacgggagccctcatctgaaagcaaagcacacccgggatgatttaaagtcctcaaacagacacggccataagcgcaagaagtcacggtcccggtcccagtctaaatcccgcgaccactcagatgccgctaagaagcacaggcacgagcgcggacaccaccgagaccgtcgcgaacgttctaggtctttcgagcgcagccataaaagcaaacatcacggggggtcgagatctggccacgggaggcacagacgctag

SEQ ID NO: 203483 - DNA, 1581 bp, Artificial Sequence
  derived and/or modified sequence
atggccagcggcccccacagcacagccacagctgctgctgctgccagcagcgctgcccccagcgctgggggcagcagcagcggcaccaccaccaccaccaccaccaccactggaggcatcctgattggagaccggctgtacagcgaggtgtccctgaccatcgaccacagcctcatccctgaggagcggctgagccccacccccagcatgcaggacggcctggacctgcccagcgagacagacctgcgcatcctgggctgtgagctgatccaggccgccggcatcctgctgcggctgccccaggtggccatggccaccggccaggtgctcttccaccgcttcttctacagcaagagctttgtgaagcacagctttgaaattgtggccatggcctgcatcaacctggccagcaagattgaggaggccccccggcgcatcagagatgtgatcaacgtgttccaccacctgcggcagctgcggggcaagaggacccccagccccctcatcctggaccagaactacatcaacaccaagaaccaggtgatcaaggccgagcggcgggtgctgaaggagctgggcttctgtgtgcacgtgaagcacccccacaagatcatcgtgatgtacctgcaggtgctggagtgtgagaggaaccagaccctggtgcagacagcctggaactacatgaatgacagcctgcggaccaacgtgtttgtgcgcttccagcctgagaccatcgcctgtgcctgcatctacctggccgcccgggccctgcagatccccctgcccacccggccccactggttcctgctgtttggcaccacagaggaggagatccaggagatctgcatcgagaccctgcggctgtacaccaggaagaagcccaactatgagctgctggagaaggaggtggagaagaggaaggtggccctgcaggaggccaagctgaaggccaagggcctgaacccagatggcaccccagccctgagcaccctgggcggcttcagccctgccagcaagcccagcagcccccgggaggtgaaggccgaggagaagagccccatcagcatcaacgtgaagacagtgaagaaggagcctgaggaccggcagcaggccagcaagagcccctacaatggagtgaggaaggacagcaagaggagcaggaacagccgcagcgccagccgcagccgcagcaggaccaggagccgcagccgcagccacaccccaagaagacactacaacaacagaagaagccgcagcggcacctacagcagccgcagccgcagccgcagccgcagccacagcgagagcccccggcggcaccacaaccacggcagcccccacctgaaggccaagcacaccagagatgacctgaagagcagcaacagacatggccacaagaggaagaagagccgcagccgcagccagagcaagagccgggaccacagtgatgctgccaagaagcacagacatgagcggggccaccaccgggaccggcgggagaggagccgcagctttgagaggagccacaagagcaagcaccacggcggcagccgcagcggccacggccgccacagaagatag

SEQ ID NO: 203484 - DNA, 1581 bp, Artificial Sequence
  derived and/or modified sequence
atggccagcggcccccacagcaccgccaccgccgccgccgccgccagtagcgctgccccaagcgccggggggagcagttccgggaccaccactaccactacaaccacaactggggggattcttataggggatagactgtattctgaggtgtccctgaccatagatcatagtctgatccccgaagagcgtctctcccctactccctctatgcaggatggcctcgatctcccctccgagaccgatctccgcattctgggatgtgagctgattcaggcagctggaattcttctgcggctaccccaagtagccatggcaacgggccaggtcttatttcacaggtttttttactcaaagagcttcgtgaagcactccttcgaaatcgtggcaatggcttgcataaatcttgccagtaaaatagaagaggcccctcggaggatcagggatgtaatcaacgtatttcaccacctcaggcagctacgcggaaagcggacaccatcccctttgatcctagaccaaaactacatcaatactaagaatcaggtgatcaaagcagaacggagggtgcttaaggaactcggcttctgtgtacatgtaaaacaccctcacaaaatcatcgtgatgtacttgcaggtcctggaatgtgaacgtaatcagacactggtgcaaacggcctggaattacatgaatgacagcttgaggaccaacgtttttgtcaggtttcagcccgagactattgcctgcgcctgcatctaccttgccgcaagagccctacagatcccacttcctacaaggcctcactggttcctacttttcggcaccaccgaagaggaaatccaagagatttgcatcgaaactctgcggttatacacgaggaaaaagccgaactacgagctgcttgagaaagaagtggagaagcgaaaagttgccctccaggaggccaagcttaaagccaagggacttaatccagacgggactcctgccttaagcacgctagggggtttttctcctgcttcaaaaccttctagtccacgggaagttaaggccgaggagaagagccctatttctatcaacgttaagactgtgaagaaggagcctgaagaccgccaacaggcctcgaaatccccatataatggggtgagaaaagatagtaagcggtcccggaatagcaggtcggcaagtcgctcccggtcccgaacccgtagtcggagtcggtctcacacaccaagaaggcattacaacaatcgccggtcgcggtctggaacctactcctcccgctctcgatcccgatcccgctctcacagcgaatcaccacgccggcatcataaccatggttccccccatctgaaagctaaacacactcgcgatgatctgaagagctcaaatcggcacggtcacaagcgtaagaagtctcgtagccgatctcagagcaaaagccgtgaccatagtgatgccgcaaagaaacatcggcacgagaggggccatcatcgagatagacgagaacgttccagatctttcgagcggtcacacaagtccaagcaccacggagggtctcggagcggccacggtagacatagacgttag

SEQ ID NO: 203485 - DNA, 1581 bp, Artificial Sequence
  derived and/or modified sequence
atggccagtggccctcattccaccgcgactgctgctgccgctgcttcttcagctgcacctagcgctggtggctcctcaagcggtactactaccaccaccacgaccaccacgggcggaatcttaatcggtgatcggctgtattccgaggtgtctttaacaattgaccacagcttaattccagaagaaaggctgtcacctactccctcaatgcaggacggcctggatttaccatcggagactgacctcagaatattgggctgcgagctgatacaggctgcaggcattctgcttcgccttccgcaggtggccatggcaaccggccaggtgcttttccataggtttttttactcgaaaagttttgtgaaacacagcttcgaaatagtggcgatggcttgcataaatctcgcctcaaagatcgaggaagcaccaagacgaattcgagacgtaatcaacgtgttccatcatctccgtcagctgcggggaaagcgtactccttccccattgatactcgaccaaaattatataaatacaaagaaccaggtgataaaagccgagcgacgggtgctcaaagagctggggttctgtgtccatgttaaacacccccacaagattatcgttatgtacctgcaagttctggaatgcgaacgcaatcagacactcgttcagacagcttggaattacatgaatgattccctgagaaccaatgtgttcgtgcgcttccaaccggagaccattgcatgtgcttgcatctacctagcagcccgtgccttgcaaatccccctgcccacaaggccccactggttcctactgtttgggactactgaggaggaaattcaagagatttgtatcgagacactgaggctctacacccgcaaaaagcccaactatgagctcctggaaaaggaggtggaaaaaaggaaggtggcattgcaggaggccaagctcaaagccaaaggccttaaccctgatggcacaccagctctttccacactgggtggattcagccccgcttcgaagccttcttcgcctcgcgaggtcaaagctgaggaaaaatcccccatttcaattaatgtgaagaccgtaaaaaaagaacccgaggatcggcaacaggcctctaaatcaccgtacaatggggtgcgcaaggattcaaaacgcagtaggaactcccgctccgccagccgatccaggtcccggaccaggagccgctctcggtcccacactccacggcgacattacaacaacagaaggtcacggtccggcacctattcatccagatcacgcagtcggagtcgaagtcactcagagtcacctcgcaggcaccacaaccacggctctccccatctgaaggcaaaacatacccgggatgaccttaagagttcgaataggcatggacataaacggaagaaatctagatccagaagtcagagtaagtcccgcgatcactctgatgccgcaaaaaagcacagacatgaacgcggtcaccatcgggatcgacgggaacgaagccgctcttttgaacggtcccacaagagtaagcaccacggcggttcacgcagcggtcacggcaggcataggcggtag

SEQ ID NO: 203486 - DNA, 2388 bp, Artificial Sequence
  derived and/or modified sequence
acgcggcgtgaagcggcccagaacccggcggtcacgggaatatccgtcgcgccgagaacgctggttagtcttgtttcgggttccggctgcgttgggcttgcgtgcggctcgctaagactatggcgtccgggcctcattcgacagctactgctgccgcagccgcctcatcggccgccccaagcgcgggcggctccagctccgggacgacgaccacgacgacgaccacgacgggagggatcctgatcggcgatcgcctgtactcggaagtttcacttaccatcgaccactctctgattccggaggagaggctctcgcccaccccatccatgcaggatgggctcgacctgcccagtgagacggacttacgcatcctgggctgcgagctcatccaggccgccggcattctcctccggctgccgcaggtggcgatggcaacggggcaggtgttgtttcatcgttttttctactccaaatctttcgtcaaacacagtttcgagattgttgctatggcttgtattaatcttgcatcaaaaatcgaagaagcacctagaagaataagagatgtgattaatgtattccaccacctccgccagttaagaggaaaaaggactccaagccccctgatccttgatcagaactacattaacaccaaaaatcaagttatcaaagcagagaggagggtgctaaaggagttgggattttgtgttcatgtcaagcatcctcataagatcattgttatgtatttacaagtcttagaatgtgaacgtaatcaaaccctggttcaaactgcctggaattacatgaatgacagtcttcgaaccaatgtgtttgttcgatttcaaccagagactatagcatgtgcttgcatctaccttgcagctagagcacttcagattccgttgccaactcgtccccattggtttcttctttttggtactacagaagaggaaatccaggaaatctgcatagaaacacttaggctttataccagaaaaaagccaaactatgaattactggaaaaagaagtagaaaaaagaaaagtagccttacaagaagccaaattaaaagcaaagggattgaatccggatggaactccagccctttcaaccctgggtggattttctccagcctccaagccatcatcaccaagagaagtaaaagctgaagagaaatcaccaatctccattaatgtgaagacagtcaaaaaagaacctgaggatagacaacaggcttccaaaagcccttacaatggtgtaagaaaagacagcaagagaagtagaaatagcagaagtgcaagtcgatcgaggtcaagaacacgatcacgttctagatcacatactccaagaagacactataataataggcggagtcgatctggaacatacagctcgagatcaagaagcaggtcccgcagtcacagtgaaagccctcgaagacatcataatcatggttctcctcaccttaaggccaagcataccagagatgatttaaaaagttcaaacagacatggtcataaaaggaaaaaatctcgttctcgatctcagagcaagtctcgggatcactcagatgcagccaagaaacacaggcatgaaaggggacatcatagggacaggcgtgaacgatctcgctcctttgagaggtcccataaaagcaagcaccatggtggcagtcgctcaggacatggcaggcacaggcgctgactttctcttcctttgagcctgcatcagttcttggttttgcctatctacagtgtgatgtatggactcaatcaaaaacattaaacgcaaactgattaggatttgatttcttgaaaccctctaggtctctagaacactgaggacagtttcttttgaaaagaactatgttaatttttttgcacattaaaatgccctagcagtatctaattaaaaaccatggtcaggttcaattgtactttattatagttgtgtattgtttattgctataagaactggagcgtgaattctgtaaaaatgtatcttatttttatacagataaaattgcagacactgttctatttaagtggttatttgtttaaatgatggtgaatactttcttaacactggtttgtctgcatgtgtaaagatttttacaaggaaataaaatacaaatcttgttttttctaaactgcttcaaataccttatttaaataaattattaaaaaggaaaattttaatagcaaaatggctgtactggttttctgacaaacttattctttcctccattagatggtagtttgagattattaaaatgcaattcttaactgcattgtgagctattgtaagtcttcactgtatatatggaaaaagtaaatgggagtcgcccaacaatgtgacattaaatgttatattttagcactaaaccaaaaaa

SEQ ID NO: 203487 - DNA, 1581 bp, Artificial Sequence
  derived and/or modified sequence
atggccagcggcccccacagcaccgccaccgccgccgccgccgccagcagcgccgcccccagcgccggcggcagcagcagcggcaccaccaccaccaccaccaccaccaccggcggcatcctgatcggcgacagactgtacagcgaggtgagcctgaccatcgaccacagcctgatccccgaggagagactgagccccacccccagcatgcaggacggcctggacctgcccagcgagaccgacctgagaatcctgggctgcgagctgatccaggccgccggcatcctgctgagactgccccaggtggccatggccaccggccaggtgctgttccacagattcttctacagcaagagcttcgtgaagcacagcttcgagatcgtggccatggcctgcatcaacctggccagcaagatcgaggaggcccccagaagaatcagagacgtgatcaacgtgttccaccacctgagacagctgagaggcaagagaacccccagccccctgatcctggaccagaactacatcaacaccaagaaccaggtgatcaaggccgagagaagagtgctgaaggagctgggcttctgcgtgcacgtgaagcacccccacaagatcatcgtgatgtacctgcaggtgctggagtgcgagagaaaccagaccctggtgcagaccgcctggaactacatgaacgacagcctgagaaccaacgtgttcgtgagattccagcccgagaccatcgcctgcgcctgcatctacctggccgccagagccctgcagatccccctgcccaccagaccccactggttcctgctgttcggcaccaccgaggaggagatccaggagatctgcatcgagaccctgagactgtacaccagaaagaagcccaactacgagctgctggagaaggaggtggagaagagaaaggtggccctgcaggaggccaagctgaaggccaagggcctgaaccccgacggcacccccgccctgagcaccctgggcggcttcagccccgccagcaagcccagcagccccagagaggtgaaggccgaggagaagagccccatcagcatcaacgtgaagaccgtgaagaaggagcccgaggacagacagcaggccagcaagagcccctacaacggcgtgagaaaggacagcaagagaagcagaaacagcagaagcgccagcagaagcagaagcagaaccagaagcagaagcagaagccacacccccagaagacactacaacaacagaagaagcagaagcggcacctacagcagcagaagcagaagcagaagcagaagccacagcgagagccccagaagacaccacaaccacggcagcccccacctgaaggccaagcacaccagagacgacctgaagagcagcaacagacacggccacaagagaaagaagagcagaagcagaagccagagcaagagcagagaccacagcgacgccgccaagaagcacagacacgagagaggccaccacagagacagaagagagagaagcagaagcttcgagagaagccacaagagcaagcaccacggcggcagcagaagcggccacggcagacacagaagatag

SEQ ID NO: 203488 - protein, 560 aa, Artificial Sequence
  derived and/or modified sequence
MEFRQEEFRKLAGRALGKLHRLLEKRQEGAETLELSADGRPVTTQTRDPPVVDCTCFGLPRRYIIAIMSGLGFCISFGIRCNLGVAIVSMVNNSTTHRGGHVVVQKAQFSWDPETVGLIHGSFFWGYIVTQIPGGFICQKFAANRVFGFAIVATSTLNMLIPSAARVHYGCVIFVRILQGLVEGVTYPACHGIWSKWAPPLERSRLATTAFCGSYAGAVVAMPLAGVLVQYSGWSSVFYVYGSFGIFWYLFWLLVSYESPALHPSISEEERKYIEDAIGESAKLMNPLTKFSTPWRRFFTSMPVYAIIVANFCRSWTFYLLLISQPAYFEEVFGFEISKVGLVSALPHLVMTIIVPIGGQIADFLRSRRIMSTTNVRKLMNCGGFGMEATLLLVVGYSHSKGVAISFLVLAVGFSGFAISGFNVNHLDIAPRYASILMGISNGVGTLSGMVCPIIVGAMTKHKTREEWQYVFLIASLVHYGGVIFYGVFASGEKQPWAEPEEMSEEKCGFVGHDQLAGSDDSEMEDEAEPPGAPPAPPPSYGATHSTFQPPRPPPPVRDY

SEQ ID NO: 203489 - protein, 548 aa, Artificial Sequence
  derived and/or modified sequence
MGSQLALAGLLEKRQEGAETLELSADGRPVTTQTRDPPVVDCTCFGLPRRYIIAIMSGLGFCISFGIRCNLGVAIVSMVNNSTTHRGGHVVVQKAQFSWDPETVGLIHGSFFWGYIVTQIPGGFICQKFAANRVFGFAIVATSTLNMLIPSAARVHYGCVIFVRILQGLVEGVTYPACHGIWSKWAPPLERSRLATTAFCGSYAGAVVAMPLAGVLVQYSGWSSVFYVYGSFGIFWYLFWLLVSYESPALHPSISEEERKYIEDAIGESAKLMNPLTKFSTPWRRFFTSMPVYAIIVANFCRSWTFYLLLISQPAYFEEVFGFEISKVGLVSALPHLVMTIIVPIGGQIADFLRSRRIMSTTNVRKLMNCGGFGMEATLLLVVGYSHSKGVAISFLVLAVGFSGFAISGFNVNHLDIAPRYASILMGISNGVGTLSGMVCPIIVGAMTKHKTREEWQYVFLIASLVHYGGVIFYGVFASGEKQPWAEPEEMSEEKCGFVGHDQLAGSDDSEMEDEAEPPGAPPAPPPSYGATHSTFQPPRPPPPVRDY

SEQ ID NO: 203490 - DNA, 1683 bp, Artificial Sequence
  derived and/or modified sequence
atggaattccggcaggaggaattcagaaaattggccggtagggctctcgggaagcttcataggctgcttgaaaagaggcaggaaggcgcagagactctggagctcagtgcggacggcagaccagtcacaacgcagacacgggacccacccgttgtagattgtacctgttttggtctgccacgcaggtatatcattgcaatcatgagcggactggggttctgcatctcctttgggattagatgcaacttgggagtggcaatcgtgtccatggtcaacaactccaccacacatcgagggggacacgtggtggtccagaaggcacagttttcatgggaccccgagactgtggggctaatccacggttcattcttttggggctacatagtgactcagatccctggcgggtttatctgtcaaaaattcgcagccaatagagttttcggttttgcaatcgttgcaacaagcaccctcaatatgctcatccccagtgctgctcgagtgcactatggatgtgtgattttcgttagaattctgcaggggcttgtggagggtgttacgtatccagcatgccatggtatctggtccaaatgggcaccaccactcgaaagatcacgcttggccaccactgccttctgcgggtcttacgcgggggccgtggtcgctatgcctttggccggagttttggtgcaatattccgggtggtcttcagtgttttacgtctacggaagttttggcatattttggtatcttttctggcttctggtgagctacgaaagccctgcgttgcacccttccatatcagaggaagagcgtaaatacatcgaagatgccattggcgaatcggctaaactgatgaacccactcaccaagttctctaccccctggcgaaggttcttcaccagtatgcctgtgtatgccatcatcgtcgcgaatttttgccgttcatggacattctacctccttcttatatcccagccagcctactttgaagaagtatttggattcgagatttcaaaagtcggcctggttagcgcacttccccaccttgtcatgaccataattgtgccaatcggcgggcagatcgccgatttcttaagatcccgcagaattatgtcaaccacaaacgtgcgcaaactgatgaattgtggcgggttcgggatggaggctacattactgctggttgtggggtattcccatagcaagggagtcgctataagcttccttgtgctggccgtggggttctcaggctttgccatttccggattcaatgttaatcacctggatatagctcctaggtatgcaagtatacttatgggcatttccaatggtgtggggaccctgtctggaatggtgtgcccgatcatcgtgggcgccatgacaaaacataagacccgcgaggaatggcagtacgtgttcctcatagcttcgctggtgcactacggcggggtgatcttttatggagtgttcgcttctggcgagaaacagccatgggctgagcctgaggaaatgtcagaggaaaagtgtgggttcgtcggtcatgatcagttggcaggctctgatgacagcgagatggaagacgaggcagaacctcctggggccccacccgcaccccctccgagctatggggctacccactctacattccagccaccccgtccaccgcccccggtccgcgactactag

SEQ ID NO: 203491 - DNA, 1647 bp, Artificial Sequence
  derived and/or modified sequence
atgggttctcagctggcacttgccggacttctagaaaaaaggcaggagggggccgagactttggagctgtcagccgacggaaggccagtaacaactcagacccgggacccccctgtcgtggattgtacctgctttgggctgccccggcgctacatcatcgcaataatgagtggtcttggtttctgcataagcttcggaatccgctgtaacctgggggtcgccattgttagcatggtcaacaactctacaacccatagaggagggcacgtcgttgttcaaaaagcacagttctcatgggaccccgagaccgtaggactgatccatgggagcttcttttggggttacattgtgacacagattcccgggggatttatctgccagaagtttgccgccaatcgggttttcgggtttgccatcgtggctacctcaacacttaatatgttgattccttccgccgcacgcgttcactacgggtgtgttatctttgtgagaatcctccaaggactagtcgagggagtgacctacccagcttgtcatggtatttggtcaaagtgggcccctcccctggaaaggtctagacttgcgactaccgccttttgtggatcctatgccggagctgtggtggctatgcccctcgctggagtcttagtccagtatagcgggtggagctcagtgttctacgtttacgggtccttcggcatcttctggtacctcttttggctgctggtgtcatatgagtcccctgcgctgcacccaagcatcagtgaggaggagcgcaagtatattgaggatgccataggagagagcgcaaaacttatgaacccattaaccaagttcagcactccctggaggcgtttctttactagtatgcccgtctacgctattatcgtcgctaatttctgtcgaagttggaccttctacctcctccttatcagccagcccgcctattttgaagaagtattcgggttcgagatatcaaaagtggggctggtgagtgcactgccgcacctggtgatgactattattgtgccgatcggtggccaaatcgcagatttcctgcgatcacgacggattatgtccacgactaatgtgcgaaagttgatgaactgcggcggatttggcatggaagcgacgctgcttctggtggtcgggtactcgcattctaagggcgtggccatatcttttctggtgttggctgtgggattcagcggttttgccatctctgggttcaatgtgaatcaccttgatatcgctcccaggtatgcctctattctcatgggcatctcgaacggggtcggcacgctcagcggcatggtgtgccccatcatagtcggggcaatgacaaaacacaagactcgggaagaatggcagtacgtgttcctgatcgcctctttggtacactatgggggcgtcatcttctatggtgtctttgcctcaggagagaaacaaccctgggccgagcctgaagaaatgagtgaagaaaagtgtggcttcgtgggccatgatcagctggcgggctcagatgactcagaaatggaagatgaggcagagccaccaggtgccccgcctgctcctcccccttcttatggagcaactcattctacattccagcccccgcgtccccctccgcccgtaagagattattag

SEQ ID NO: 203492 - DNA, 1683 bp, Artificial Sequence
  derived and/or modified sequence
atggagttccggcaggaggagttcaggaagctggccggccgggccctgggcaagctgcaccggctgctggagaagaggcaggagggcgctgagaccctggagctgtctgcagatggccggcctgtgaccacccagacccgggacccccctgtggtggactgcacctgcttcggcctgccccggcgctacatcatcgccatcatgagcggcctgggcttctgcatcagctttggcatccgctgcaacctgggcgtggccatcgtgtccatggtgaacaacagcaccacccacagaggaggccacgtggtggtgcagaaggcccagttctcctgggaccctgagaccgtgggcctcatccacggcagcttcttctggggctacatcgtgacccagatccctgggggcttcatctgccagaagtttgctgccaacagagtgtttggatttgccatcgtggccaccagcaccctgaacatgctgatccccagcgctgcccgggtgcactacggctgtgtgatctttgtgcgcatcctgcagggcctggtggagggcgtgacctacccagcctgccacggcatctggagcaagtgggccccacccctggagaggagccggctggccaccacagccttctgtggcagctatgctggagctgtggtggccatgcccctggccggcgtgctggtgcagtacagcggctggagcagcgtcttctacgtgtatggcagctttggcatcttctggtacctgttctggctgctggtgtcctatgagagccctgccctgcaccccagcatcagcgaggaggagaggaagtacattgaagatgccatcggggagagcgccaagctgatgaaccccctgaccaagttcagcaccccctggaggcgcttcttcacctccatgcctgtgtatgccatcatcgtggccaacttctgccgctcctggaccttctacctgctgctgatcagccagcctgcctactttgaggaggtgtttggatttgagatcagcaaggtgggcctggtgtctgccctgccccacctggtgatgaccatcatcgtgcccatcggcggccagattgctgacttcctgcggagccgccgcatcatgagcaccaccaacgtgaggaagctgatgaactgtggcggcttcggcatggaggccaccctgctgctggtggtgggctacagccacagcaaaggagtggccatctccttcctggtgctggccgtgggcttcagcggctttgccatcagcggcttcaacgtgaaccacctggacatcgcccccaggtatgccagcatcctgatgggcatcagcaatggagtgggcaccctgagcggcatggtgtgccccatcatcgtgggcgccatgaccaagcacaagacccgggaggagtggcagtatgtgttcctgattgccagcctggtgcactacggcggcgtcatcttctacggcgtgtttgccagcggggagaagcagccctgggccgagcctgaggagatgtctgaggagaagtgtggctttgtgggccatgaccagctggccggcagtgatgacagcgagatggaggatgaggccgagcccccaggggcccccccagcccccccacccagctatggagccacccacagcaccttccagccccccaggcctcctcctcctgtgcgggactactag

SEQ ID NO: 203493 - DNA, 1647 bp, Artificial Sequence
  derived and/or modified sequence
atgggcagccagctggccctggccggcctgctggagaagaggcaggagggcgctgagaccctggagctgtctgcagatggccggcctgtgaccacccagacccgggacccccctgtggtggactgcacctgcttcggcctgccccggcgctacatcatcgccatcatgagcggcctgggcttctgcatcagctttggcatccgctgcaacctgggcgtggccatcgtgtccatggtgaacaacagcaccacccacagaggaggccacgtggtggtgcagaaggcccagttctcctgggaccctgagaccgtgggcctcatccacggcagcttcttctggggctacatcgtgacccagatccctgggggcttcatctgccagaagtttgctgccaacagagtgtttggatttgccatcgtggccaccagcaccctgaacatgctgatccccagcgctgcccgggtgcactacggctgtgtgatctttgtgcgcatcctgcagggcctggtggagggcgtgacctacccagcctgccacggcatctggagcaagtgggccccacccctggagaggagccggctggccaccacagccttctgtggcagctatgctggagctgtggtggccatgcccctggccggcgtgctggtgcagtacagcggctggagcagcgtcttctacgtgtatggcagctttggcatcttctggtacctgttctggctgctggtgtcctatgagagccctgccctgcaccccagcatcagcgaggaggagaggaagtacattgaagatgccatcggggagagcgccaagctgatgaaccccctgaccaagttcagcaccccctggaggcgcttcttcacctccatgcctgtgtatgccatcatcgtggccaacttctgccgctcctggaccttctacctgctgctgatcagccagcctgcctactttgaggaggtgtttggatttgagatcagcaaggtgggcctggtgtctgccctgccccacctggtgatgaccatcatcgtgcccatcggcggccagattgctgacttcctgcggagccgccgcatcatgagcaccaccaacgtgaggaagctgatgaactgtggcggcttcggcatggaggccaccctgctgctggtggtgggctacagccacagcaaaggagtggccatctccttcctggtgctggccgtgggcttcagcggctttgccatcagcggcttcaacgtgaaccacctggacatcgcccccaggtatgccagcatcctgatgggcatcagcaatggagtgggcaccctgagcggcatggtgtgccccatcatcgtgggcgccatgaccaagcacaagacccgggaggagtggcagtatgtgttcctgattgccagcctggtgcactacggcggcgtcatcttctacggcgtgtttgccagcggggagaagcagccctgggccgagcctgaggagatgtctgaggagaagtgtggctttgtgggccatgaccagctggccggcagtgatgacagcgagatggaggatgaggccgagcccccaggggcccccccagcccccccacccagctatggagccacccacagcaccttccagccccccaggcctcctcctcctgtgcgggactactag

SEQ ID NO: 203494 - DNA, 1683 bp, Artificial Sequence
  derived and/or modified sequence
atggagttccggcaggaggagttccggaagctggccggccgggccctcgggaagcttcatcgccttctggaaaaaagacaggagggggcagagacattggagctgagcgccgatgggagaccagttacaactcagacccgtgacccccccgtagtagattgcacatgcttcggtcttccacgccgatacataattgccataatgtccggcctgggcttctgcatcagttttggaatccgatgtaatttaggggtagcgatcgtgagcatggttaataattccacaacccatcggggcggccacgtggtagtgcaaaaggcccagttcagctgggacccagagacagtcggacttattcacggatcattcttctgggggtacatcgtgacccagatccccgggggattcatctgtcagaagttcgctgctaaccgcgtgttcggctttgccattgtcgctacatcaactcttaatatgttgattccctccgccgcccgggtgcattacgggtgtgtcatctttgtgcgtattctgcaggggcttgtggaaggcgtgacttatcccgcctgtcatggcatctggagtaagtgggctcctcccctcgagaggtctcgccttgccacgactgctttctgcggctcatacgctggcgcggtggtcgcaatgcccctcgcaggcgtgcttgttcagtattcaggatggtccagtgtgttctacgtctacggctcgttcggcatcttctggtacctcttttggctgctcgtcagctacgagtcccccgctctgcatccttcaatctcggaggaggaaaggaaatatatagaggatgcaatcggcgagtctgcgaaactaatgaatcctctgaccaaatttagtacaccctggaggcgcttctttacgagtatgccggtctacgccattattgttgcgaacttttgccgcagttggacattctatttacttctgattagccaacccgcctacttcgaggaggtgttcgggtttgaaatcagcaaggttggcctggtgagtgccctgccccacctggtaatgaccatcatagtgccgatcgggggccagattgctgattttctgaggagtaggcgaatcatgtccaccacaaatgttcgcaagctgatgaactgcggcggatttggcatggaggccacattactcctcgtggtcgggtactcgcattctaagggggtggcaattagtttcttagtgttagccgtggggttcagtggctttgctattagcggctttaacgtgaatcacctggacatcgcgccccggtacgcttccattcttatgggtatctccaacggtgtgggcactctaagcggaatggtttgccccataattgtgggagccatgaccaagcacaaaacacgggaggagtggcagtatgtatttctgattgcctccctagtgcactatggcggagtgatcttttatggggtattcgctagcggagagaaacagccctgggccgagcctgaagaaatgtcagaagagaagtgcgggtttgtgggacatgaccagctcgccgggagtgacgactcggaaatggaggatgaagccgaaccacccggcgcccccccagctccccccccctcatacggcgcgacccattcaactttccagccaccacgcccccccccccccgttagggattactag

SEQ ID NO: 203495 - DNA, 1647 bp, Artificial Sequence
  derived and/or modified sequence
atgggcagccagctggccctggccggcctgctggagaagcggcaggaaggggcggagacccttgaactgagcgctgatggccggcccgtaaccacacaaactagggaccctcccgtggtcgactgtacgtgtttcgggctgccacggcggtatatcattgcgatcatgtctggtctgggtttttgcattagcttcggcattcgctgtaatcttggcgtggccatcgtgagtatggtgaacaatagtaccactcatcgcggtggccacgtcgttgtccaaaaggcccaattttcgtgggacccggaaaccgtggggctcattcacggaagttttttttggggatatattgttactcagattcctgggggttttatctgtcaaaaattcgccgccaatcgagtatttggcttcgccatagtagccacgagtactctgaacatgcttattccaagcgccgctcgggtgcattacggctgcgtgattttcgttagaattctccagggcctagtggagggcgtcacctatcctgcttgccacggcatctggtctaaatgggctccacccctggaaaggtccagacttgcaacaactgccttttgcggcagctacgcgggtgccgtcgttgctatgccactcgcaggagtgctggtgcaatatagcggatggagtagcgtgttttatgtgtacggaagcttcggcattttctggtatctgttctggttactggttagctatgaaagccccgccctccacccatcgattagcgaggaggagcggaagtatatcgaagatgcaatcggggaatccgcaaagctaatgaaccctttaacaaagttctcaacaccctggaggcgattctttacgtccatgcctgtatacgcaatcatcgtggcgaatttctgtaggtcttggaccttctatttgcttttaatttctcagccagcctattttgaagaggtctttggatttgagatcagcaaggtgggtctagtttccgctctgcctcatttagtcatgaccatcattgttcccattggcggtcagatcgccgacttccttcgctcccggcggatcatgtcgaccactaacgtgcggaagttgatgaactgtgggggatttgggatggaggcaaccttactgctcgtcgtgggctactctcacagcaaaggggtggccatctcttttctggttctcgcagtcggatttagcggcttcgccatcagcggattcaacgttaaccacctggatatagctcctaggtacgcctcaatcttaatgggtattagcaacggagtggggacattgagcggaatggtctgcccaattattgtgggggccatgacgaagcataagacacgcgaagaatggcagtatgtctttctgatcgcttctctcgtccattatggtggagtgatcttctacggggtattcgcctcaggtgaaaagcagccctgggccgaaccggaggagatgagtgaagagaaatgtggcttcgttgggcacgaccaattggcaggatccgacgacagcgagatggaggacgaggcggagccacctggcgctccaccggcaccaccaccgtcttatggcgcaactcacagcacattccaacctcctaggccacccccccccgtgagagactattag

SEQ ID NO: 203496 - DNA, 1683 bp, Artificial Sequence
  derived and/or modified sequence
atggagtttcggcaggaagagttccgcaagcttgctggtcgagccctgggtaagttacaccgcctactcgaaaaacgtcaagagggggctgaaactctggagttgtctgcggacggtagaccagtaaccacacagacaagagacccacccgtggtggactgtacatgcttcggccttccaaggcgctacattatcgcaatcatgagtgggctcggattctgcataagcttcggcatcaggtgcaatctgggagtggccattgtatctatggtcaacaattccactacccatagggggggacacgtcgtagtgcagaaagctcaatttagttgggatcctgagactgtgggactcattcacggctcctttttctgggggtacatagtgactcagatccctggaggatttatttgccagaaattcgcagccaaccgcgtatttggatttgcaatcgtggccacctctaccttgaacatgctcataccttcagcagccagggtgcattatgggtgtgtaatcttcgtacgcatattgcaaggcctagttgagggagtcacctatcctgcttgccacgggatttggagcaaatgggctcctcccctggagcgcagtcggttggccaccacggcattttgtggaagttacgccggtgccgtggtcgctatgccccttgccggtgtccttgtgcagtattccggctggtcctcggtgttttacgtatatggctcgtttgggatcttttggtatttgttctggctgctggttagctacgaatcacctgcgcttcatccatccatctccgaggaggaaagaaagtatatcgaggatgccattggtgaatcggccaaactgatgaatccgctgacaaaattctctacaccttggaggaggtttttcacatctatgcctgtttatgcaataattgtggccaatttctgccgctcgtggacgttctacctcttattgatttcccagcctgcctactttgaggaggtgtttggcttcgagatctccaaggtcgggctggtaagcgccctgcctcacttagttatgactatcatcgtgccgattgggggtcagattgcggattttcttaggtctcggagaattatgtctacaactaacgtcagaaaactgatgaattgcggcggttttgggatggaagctactcttctgctggtggtagggtattctcattctaaaggtgtggcgatttcctttctagtgctggccgtcggtttttctgggttcgccatctctggcttcaacgtaaatcatcttgacatcgcaccccgttatgcaagtatactgatgggtatctctaatggtgtgggaactcttagcggaatggtctgccccatcattgttggggctatgactaagcacaaaacacgggaagagtggcagtatgtcttcctcatcgcctctttagtacactatggcggagtaattttttacggtgtattcgcgagcggtgagaaacagccctgggcggaacctgaggaaatgtccgaggagaagtgtgggtttgtcggacacgaccaactcgctggaagcgatgatagtgagatggaggacgaagccgagccacctggcgcacctccagcaccaccaccatcctacggtgccactcattcaaccttccagccccctaggccaccaccgccagtacgagactattag

SEQ ID NO: 203497 - DNA, 1647 bp, Artificial Sequence
  derived and/or modified sequence
atgggaagtcaacttgccttggctggccttctcgaaaaacggcaggaaggagctgaaaccctggagctaagcgctgacggtagaccagtgaccacccaaacgagagacccccctgtggtcgattgtacttgctttggtctccccagacgatatatcattgccattatgagcggcctgggtttctgtatatctttcggtatccgctgtaatctcggcgttgccattgtgagtatggtgaacaacagtactacacacaggggcggtcacgtggtagtgcagaaagcacaatttagttgggatcccgagaccgtggggcttatccatggctcgtttttctgggggtacatcgtaacccagatcccaggcggattcatctgccagaaattcgcagccaatcgggttttcggttttgctatagtggccacatccactttgaatatgttaatcccgtctgccgcaagagttcattacggatgcgtgatatttgtcaggattctgcagggactggtggaaggtgttacttacccggcttgtcacggcatttggagcaagtgggcccctcccctcgagagatctaggcttgcgacgacagccttttgcggctcctacgccggtgccgtagttgctatgccattggcaggtgtgctggtgcaatactcaggctggagctctgttttctacgtgtacggcagcttcgggatcttttggtatttattctggctgttggtgtcctacgagagtccagctcttcacccttcaatctctgaggaggagcgaaaatatattgaagacgcgataggtgaaagtgccaaattgatgaatccgctgactaaattcagcaccccttggcgccgattcttcacctctatgccagtttacgcgatcatcgttgccaacttttgccgttcctggacattttacttactactgatctcccagccagcttacttcgaggaagtgttcggattcgagatcagtaaagtagggctcgtgagcgcactaccccatctggtaatgactattattgtgcctatcggcggacagatcgcggattttctccgcagtcgaaggattatgtcaacaaccaatgtccgaaaactcatgaattgcggcggatttggaatggaggctacgctgttgctggtggtgggttactcccacagcaagggggtcgccattagctttttggtgcttgcggtgggattcagcggatttgccatctccggattcaacgtgaatcacctggacattgcgcctagatacgcttctatactgatgggaatctccaacggagttggcacgttaagcggaatggtgtgtcctataatcgtcggcgcaatgaccaaacacaagaccagggaagagtggcagtacgtgttcctgattgccagcctcgtgcactacggtggtgttattttttatggtgtgtttgcctccggtgagaaacagccctgggctgaaccagaggagatgtcagaagagaaatgtgggttcgtgggacacgaccagctggctgggagcgatgatagcgagatggaggacgaggccgagcccccaggtgcaccacccgcaccacctccttcttatggggctacacattcaactttccagccccctcggcctccccctccggttcgggattactag

SEQ ID NO: 203498 - DNA, 2975 bp, Artificial Sequence
  derived and/or modified sequence
tgtgacagcccccgggccgcctgcacttgcagcctccttccccccgagcggagctgcggggccggccgggccggggctggaccccgggaacccggacgcggccgcccgggcccgcgggcggggggatcggcgggggggacccgcggggtgaccggcggcaggagccgccaccatggagttccgccaggaggagtttcggaagctagcgggtcgtgctctcgggaagctgcaccgccttctggagaagcggcaggaaggcgcggagacgctggagctgagtgcggatgggcgcccggtgaccacgcagacccgggacccgccggtggtggactgcacctgcttcggcctccctcgccgctacattatcgccatcatgagtggtctgggcttctgcatcagctttggcatccgctgcaacctgggcgtggccatcgtctccatggtcaataacagcacgacccaccgcgggggccacgtggtggtgcagaaagcccagttcagctgggatccagagactgtcggcctcatacacggctcctttttctggggctacattgtcactcagattccaggaggatttatctgtcaaaaatttgcagccaacagagttttcggctttgctattgtggcaacatccactctaaacatgctgatcccctcagctgcccgcgtccactatggctgtgtcatcttcgtgaggatcctgcaggggttggtagagggggtcacataccccgcctgccatgggatctggagcaaatgggccccacccttagaacggagtcgcctggcgacgacagccttttgtggttcctatgctggggcggtggtcgcgatgcccctcgccggggtccttgtgcagtactcaggatggagctctgttttctacgtctacggcagcttcgggatcttctggtacctgttctggctgctcgtctcctacgagtcccccgcgctgcaccccagcatctcggaggaggagcgcaagtacatcgaggacgccatcggagagagcgcgaaactcatgaaccccctcacgaagtttagcactccctggcggcgcttcttcacgtctatgccagtctatgccatcatcgtggccaacttctgccgcagctggacgttctacctgctgctcatctcccagcccgcctacttcgaagaagtgttcggcttcgagatcagcaaggtaggcctggtgtccgcgctgccccacctggtcatgaccatcatcgtgcccatcggcggccagatcgcggacttcctgcggagccgccgcatcatgtccaccaccaacgtgcgcaagttgatgaactgcggaggcttcggcatggaagccacgctgctgttggtggtcggctactcgcactccaagggcgtggccatctccttcctggtcctagccgtgggcttcagcggcttcgccatctctgggttcaacgtgaaccacctggacatagccccgcgctacgccagcatcctcatgggcatctccaacggcgtgggcacactgtcgggcatggtgtgccccatcatcgtgggggccatgactaagcacaagactcgggaggagtggcagtacgtgttcctaattgcctccctggtgcactatggaggtgtcatcttctacggggtctttgcttctggagagaagcagccgtgggcagagcctgaggagatgagcgaggagaagtgtggcttcgttggccatgaccagctggctggcagtgacgacagcgaaatggaggatgaggctgagcccccgggggcaccccctgcacccccgccctcctatggggccacacacagcacatttcagccccccaggcccccaccccctgtccgggactactgaccatgtgcctcccactgaatggcagtttccaggacctccattccactcatctctggcctgagtgacagtgtcaaggaaccctgctcctctctgtcctgcctcaggcctaagaagcactctcccttgttcccagtgctgtcaaatcctctttccttcccaattgcctctcaggggtagtgaagctgcagactgacagtttcaaggatacccaaattcccctaaaggttccctctccacccgttctgcctcagtggtttcaaatctctcctttcagggctttatttgaatggacagttcgacctcttactctctcttgtggttttgaggcacccacaccccccgctttcctttatctccagggactctcaggctaacctttgagatcactcagctcccatctcctttcagaaaaattcaaggtcctcctctagaagtttcaaatctctcccaactctgttctgcatcttccagattggtttaaccaattactcgtccccgccattccagggattgattctcaccagcgtttctgatggaaaatggcggtttcaagtccccgattccgtgcccacttcacatctcccctaccagcagattctgcgaaagcaccaaatttctcaagaccctcttctccctagcttagcataatgtctggggaaacaaccaaaatcgcaattttaacaatatgcctctctacccccgtgcactttttctgacatggttttcaggtctaaatagtggctgctccagtccatgaactcaaaggtttgaagctaccaccattgaactcccccatggtggtttcatgatgccccctccccaattcctcgcactttattctcctgggtggtttcgaactaccctgtttctcagtggccatttgttgtgtccctcaggggcttaatgactcaaaatctgggatccttcccctctcagacacccctctttcagcttagaatttggggaacctatagagaagtcacagaatcccatgaaagggaatggggcaggagccaggggtgttttttcccagtgcagggttgtgtctttgtgtctctgtctctgtgactgtaaatcctgccctgccccactcccaataaaagctttggtgtataggctc

SEQ ID NO: 203499 - DNA, 2237 bp, Artificial Sequence
  derived and/or modified sequence
gaactcagagcgcggacagatcccagaggagcagagaaataacacaatggggagactatggggtcgcagctggcactggcgggccttctggagaagcggcaggaaggcgcggagacgctggagctgagtgcggatgggcgcccggtgaccacgcagacccgggacccgccggtggtggactgcacctgcttcggcctccctcgccgctacattatcgccatcatgagtggtctgggcttctgcatcagctttggcatccgctgcaacctgggcgtggccatcgtctccatggtcaataacagcacgacccaccgcgggggccacgtggtggtgcagaaagcccagttcagctgggatccagagactgtcggcctcatacacggctcctttttctggggctacattgtcactcagattccaggaggatttatctgtcaaaaatttgcagccaacagagttttcggctttgctattgtggcaacatccactctaaacatgctgatcccctcagctgcccgcgtccactatggctgtgtcatcttcgtgaggatcctgcaggggttggtagagggggtcacataccccgcctgccatgggatctggagcaaatgggccccacccttagaacggagtcgcctggcgacgacagccttttgtggttcctatgctggggcggtggtcgcgatgcccctcgccggggtccttgtgcagtactcaggatggagctctgttttctacgtctacggcagcttcgggatcttctggtacctgttctggctgctcgtctcctacgagtcccccgcgctgcaccccagcatctcggaggaggagcgcaagtacatcgaggacgccatcggagagagcgcgaaactcatgaaccccctcacgaagtttagcactccctggcggcgcttcttcacgtctatgccagtctatgccatcatcgtggccaacttctgccgcagctggacgttctacctgctgctcatctcccagcccgcctacttcgaagaagtgttcggcttcgagatcagcaaggtaggcctggtgtccgcgctgccccacctggtcatgaccatcatcgtgcccatcggcggccagatcgcggacttcctgcggagccgccgcatcatgtccaccaccaacgtgcgcaagttgatgaactgcggaggcttcggcatggaagccacgctgctgttggtggtcggctactcgcactccaagggcgtggccatctccttcctggtcctagccgtgggcttcagcggcttcgccatctctgggttcaacgtgaaccacctggacatagccccgcgctacgccagcatcctcatgggcatctccaacggcgtgggcacactgtcgggcatggtgtgccccatcatcgtgggggccatgactaagcacaagactcgggaggagtggcagtacgtgttcctaattgcctccctggtgcactatggaggtgtcatcttctacggggtctttgcttctggagagaagcagccgtgggcagagcctgaggagatgagcgaggagaagtgtggcttcgttggccatgaccagctggctggcagtgacgacagcgaaatggaggatgaggctgagcccccgggggcaccccctgcacccccgccctcctatggggccacacacagcacatttcagccccccaggcccccaccccctgtccgggactactgaccatgtgcctcccactgaatggcagtttccaggacctccattccactcatctctggcctgagtgacagtgtcaaggaaccctgctcctctctgtcctgcctcaggcctaagaagcactctcccttgttcccagtgctgtcaaatcctctttccttcccaattgcctctcaggggtagtgaagctgcagactgacagtttcaaggatacccaaattcccctaaaggttccctctccacccgttctgcctcagtggtttcaaatctctcctttcagggctttatttgaatggacagttcgacctcttactctctcttgtggttttgaggcacccacaccccccgctttcctttatctccagggactctcaggctaacctttgagatcactcagctcccatctcctttcagaaaaattcaaggtcctcctctagaagtttcaaatctctcccaactctgttctgcatcttccagattggtttaaccaattactcgtccccgccattccagggattgattctcaccagcgtttctga

SEQ ID NO: 203500 - DNA, 1683 bp, Artificial Sequence
  derived and/or modified sequence
atggagttcagacaggaggagttcagaaagctggccggcagagccctgggcaagctgcacagactgctggagaagagacaggagggcgccgagaccctggagctgagcgccgacggcagacccgtgaccacccagaccagagacccccccgtggtggactgcacctgcttcggcctgcccagaagatacatcatcgccatcatgagcggcctgggcttctgcatcagcttcggcatcagatgcaacctgggcgtggccatcgtgagcatggtgaacaacagcaccacccacagaggcggccacgtggtggtgcagaaggcccagttcagctgggaccccgagaccgtgggcctgatccacggcagcttcttctggggctacatcgtgacccagatccccggcggcttcatctgccagaagttcgccgccaacagagtgttcggcttcgccatcgtggccaccagcaccctgaacatgctgatccccagcgccgccagagtgcactacggctgcgtgatcttcgtgagaatcctgcagggcctggtggagggcgtgacctaccccgcctgccacggcatctggagcaagtgggccccccccctggagagaagcagactggccaccaccgccttctgcggcagctacgccggcgccgtggtggccatgcccctggccggcgtgctggtgcagtacagcggctggagcagcgtgttctacgtgtacggcagcttcggcatcttctggtacctgttctggctgctggtgagctacgagagccccgccctgcaccccagcatcagcgaggaggagagaaagtacatcgaggacgccatcggcgagagcgccaagctgatgaaccccctgaccaagttcagcaccccctggagaagattcttcaccagcatgcccgtgtacgccatcatcgtggccaacttctgcagaagctggaccttctacctgctgctgatcagccagcccgcctacttcgaggaggtgttcggcttcgagatcagcaaggtgggcctggtgagcgccctgccccacctggtgatgaccatcatcgtgcccatcggcggccagatcgccgacttcctgagaagcagaagaatcatgagcaccaccaacgtgagaaagctgatgaactgcggcggcttcggcatggaggccaccctgctgctggtggtgggctacagccacagcaagggcgtggccatcagcttcctggtgctggccgtgggcttcagcggcttcgccatcagcggcttcaacgtgaaccacctggacatcgcccccagatacgccagcatcctgatgggcatcagcaacggcgtgggcaccctgagcggcatggtgtgccccatcatcgtgggcgccatgaccaagcacaagaccagagaggagtggcagtacgtgttcctgatcgccagcctggtgcactacggcggcgtgatcttctacggcgtgttcgccagcggcgagaagcagccctgggccgagcccgaggagatgagcgaggagaagtgcggcttcgtgggccacgaccagctggccggcagcgacgacagcgagatggaggacgaggccgagccccccggcgccccccccgcccccccccccagctacggcgccacccacagcaccttccagccccccagaccccccccccccgtgagagactactag

SEQ ID NO: 203501 - DNA, 1647 bp, Artificial Sequence
  derived and/or modified sequence
atgggcagccagctggccctggccggcctgctggagaagagacaggagggcgccgagaccctggagctgagcgccgacggcagacccgtgaccacccagaccagagacccccccgtggtggactgcacctgcttcggcctgcccagaagatacatcatcgccatcatgagcggcctgggcttctgcatcagcttcggcatcagatgcaacctgggcgtggccatcgtgagcatggtgaacaacagcaccacccacagaggcggccacgtggtggtgcagaaggcccagttcagctgggaccccgagaccgtgggcctgatccacggcagcttcttctggggctacatcgtgacccagatccccggcggcttcatctgccagaagttcgccgccaacagagtgttcggcttcgccatcgtggccaccagcaccctgaacatgctgatccccagcgccgccagagtgcactacggctgcgtgatcttcgtgagaatcctgcagggcctggtggagggcgtgacctaccccgcctgccacggcatctggagcaagtgggccccccccctggagagaagcagactggccaccaccgccttctgcggcagctacgccggcgccgtggtggccatgcccctggccggcgtgctggtgcagtacagcggctggagcagcgtgttctacgtgtacggcagcttcggcatcttctggtacctgttctggctgctggtgagctacgagagccccgccctgcaccccagcatcagcgaggaggagagaaagtacatcgaggacgccatcggcgagagcgccaagctgatgaaccccctgaccaagttcagcaccccctggagaagattcttcaccagcatgcccgtgtacgccatcatcgtggccaacttctgcagaagctggaccttctacctgctgctgatcagccagcccgcctacttcgaggaggtgttcggcttcgagatcagcaaggtgggcctggtgagcgccctgccccacctggtgatgaccatcatcgtgcccatcggcggccagatcgccgacttcctgagaagcagaagaatcatgagcaccaccaacgtgagaaagctgatgaactgcggcggcttcggcatggaggccaccctgctgctggtggtgggctacagccacagcaagggcgtggccatcagcttcctggtgctggccgtgggcttcagcggcttcgccatcagcggcttcaacgtgaaccacctggacatcgcccccagatacgccagcatcctgatgggcatcagcaacggcgtgggcaccctgagcggcatggtgtgccccatcatcgtgggcgccatgaccaagcacaagaccagagaggagtggcagtacgtgttcctgatcgccagcctggtgcactacggcggcgtgatcttctacggcgtgttcgccagcggcgagaagcagccctgggccgagcccgaggagatgagcgaggagaagtgcggcttcgtgggccacgaccagctggccggcagcgacgacagcgagatggaggacgaggccgagccccccggcgccccccccgcccccccccccagctacggcgccacccacagcaccttccagccccccagaccccccccccccgtgagagactactag

SEQ ID NO: 203502 - protein, 582 aa, Artificial Sequence
  derived and/or modified sequence
MSIETLLEAARFLEWQAQQQQRAREEQERLRLEQEREQEQKKANSLARLAHTLPVEEPRMEAPPLPLSPPAPPPAPPPPLATPAPLTVIPIPVVTNSPQPLPPPPPLPAAAQPLPLAPRQPALVGAPGLSIKEPAPLPSRPQVPTPAPLLPDSKATIPPNGSPKPLQPLPTPVLTIAPHPGVQPQLAPQQPPPPTLGTLKLAPAEEVKSSEQKKRPGGIGTREVHNKLEKNRRAHLKECFETLKRNIPNVDDKKTSNLSVLRTALRYIQSLKRKEKEYEHEMERLAREKIATQQRLAELKHELSQWMDVLEIDRVLRQTGQPEDDQASTSTASEGEDNIDEDMEEDRAGLGPPKLSHRPQPELLKSTLPPPSTTPAPLPPHPHPHPHSVALPPAHLPVQQQQPQQKTPLPAPPPPPAAPAQTLVPAPAHLVATAGGGSTVIAHTATTHASVIQTVNHVLQGPGGKHIAHIAPSAPSPAVQLAPATPPIGHITVHPATLNHVAHLGSQLPLYPQPVAVSHIAHTLSHQQVNGTAGLGPPATVMAKPAVGAQVVHHPQLVGQTVLNPVTMVTMPSFPVSTLKLA

SEQ ID NO: 203503 - DNA, 4865 bp, Artificial Sequence
  derived and/or modified sequence
gcagtgccgccttttttttttttttgcatcccatttttttaaatttgcaattttatattttgcaaatattttgagagacattgatttttctccccgtgctcccccgttcttccctgcggagtgcgctgcgccgcccagccctgtcgccccccggaggtgatccctccctcctgcctgcccgccagcctgacctgtgcccggctcgcgggccgcagcctcggccccggcgcgcccccggcagctctcggcgcgatgagcatagagacgctactggaggcggcccgcttcctggaatggcaagcgcagcaacaacagagagcacgtgaggagcaggagcggcttcgcttggagcaggagcgagagcaggaacagaagaaggccaatagcctggccaggctggcacatacccttcctgtggaggaaccccgcatggaggcgccacccctgcctctgtctccaccggctcccccgccggcacccccaccaccacttgccacccctgccccactgactgtcatccctatccctgtggtgaccaactcccctcagcctctacccccacccccacccttgcccgcggcagcccagcctctgcccctggcgcctcgtcagccggccctggttggcgcccccggactcagcattaaggagcctgcccccctgcccagcaggccgcaggtgcccacccctgctcccctactgccggactcgaaggccaccattccacccaatggcagccccaagcctttgcagcccctccccacgcctgtcctgaccatagcgccacaccctggagtccagcctcagctggccccccagcagccgcccccacccacgctggggaccctgaagttggcaccagctgaagaagtcaaatccagtgaacagaagaagaggcccggggggatcggaaccagagaagtccacaacaaattggagaagaacaggagggcccatctgaaagagtgctttgagaccctgaagcggaacatccccaacgtggatgacaagaagacgtccaatctgagcgtgctgcggacggcgctgcggtacatccagtccctgaagaggaaggagaaggaatatgagcatgaaatggagcggctggcacgtgagaagattgccacgcagcagcggctggcagagctcaagcacgagctgagccagtggatggacgtactggagattgaccgcgtgctgcggcagacgggccagcccgaggatgaccaggcctccacctccaccgcctctgagggtgaggacaacatagacgaggatatggaggaggaccgggcgggcctgggcccacctaagctgagccatcgtccccagccggagctgctgaagtccaccctgccaccccccagcaccacccctgcgcctctgcctccacacccacaccctcacccccactccgtggccctacctcctgcccacctccccgtgcagcagcagcagccacagcagaagacccctctgccagcccctcctcccccaccggctgcccctgcccagacactggtgccagctccagcccatctggtggcgacggctgggggtggctccacggtcatcgcccacacagccaccactcacgcttcagtcatccagactgtgaaccacgttctgcaggggccaggcggcaagcacatcgcccacatcgccccctcggcccccagccctgcggtgcaactggcgcctgccacaccccccattgggcacatcactgtgcaccctgccaccctcaaccatgtggcccacctgggctcccagctgcccttgtacccgcagcccgtggcagtgagccacatcgcccacaccctctcgcaccagcaagtcaacggcacggccggcctggggcccccggctactgtcatggcaaagccggccgtgggggctcaggtggtgcaccacccccagctggtgggccagaccgtgctcaaccctgtgaccatggtcaccatgccctccttcccagtcagcacactcaagctggcttgaggacgaggccactcagaggcccccagtggggacagggagggggacctgtcccccactctctcacccaccagctccacacattccagccaggcccaggccagcccccccacccacccccaggcctcctaggggaagggggtgcaaagactctgagccaagggagggaagggccaccctgctgcactaggacttggtaagatgactctgagaaaatgcgagactctgatggaatgtgccacctgtccggcccagtgccagctccagtgccgctcctgcttcccctccctaccctcggaaatcagtgcgatgtggacgtcacgctccctgacttctcccccgccctgccccgccttcgtgtgctgctgctgctattgctgtctggtgaggtggcccaggcccccggctttcctccggagcctcatgttctcttcccaggcctttggaggggaaatggggaaagcagaactgaagccacttggcccagaaagctgcggattggggtgataaggggccttgctctgagcacaggtgacagatcataggaagtggctggtctggagtcccacccggacaggtggggcctcagcctggggctctctgacccggttgcagtcactgtgattcgttaccgtagatactacttaaaatgattctctaccaacaataaaccaaacccagccactgccaagcttcctgtgccctcaccccaatccctgccactgggctctggacctcaggagggcaggctgaggtggggaaggagggacttggctgtccttccccttccccgtcccctgcagcctgggtctggatgggaggagagccactgggcccctgtccccagtccccagtccccagccctgggcttggctcttggcttccagaaggcagcaaagaggggcgctgtcctgcgttcagcccctgatctctgacctctgctgagtgctgggcactgctccaagggacaggtgggcctggcggcctgtgggtttgggtgcctcctgcagtttgggagacatggaccagcatctggtcttgtttccaggagcatagaagccacatcgttgagacatcaggaaggtaaaaacccagcggcttagccaagccctaagcctgtccccagaccaaccctgggacctatacagaacagagggccagagctagggctgctgcttctgctccagcccctttgcctctgtcctcccatcccctcaacaccctgcttctcccggggacgcttttgagtgggccctgcccggggagctgcagagcagcagcacctttctctgagaagaggtccttggttgggtcaaggacagggctgagcgtggaagggggaggagtcaggggctctgtgttaggatgcggctttctctgcctctgggcagcctgctttggcctttccttgtatgtgggtgtttattacaagtggctttgtgtcagacacgctcggctccccacctggacacacactcaccagtggcctttcagtgtagcgggaggaagccggtgtccctggatgtgaagctcacactgatgggctggggcaggggcctgggccggcgagggggccggggggaggggacagagctgaggatttcctggagtgccctgcaggcacagaggaggtcagcaaaggtcttgaatagattttctctggaaataaagaatccttagatgcctaaaaattcccttcctgttccctcctggtcctggacacctcccaggggactgttccttatttctctctcctggtgtgggtaaagggacagttacaaaccaggtcaccatcctcagaggctgagccctgtacccaccccagcacagccacctccgccagaccccgtggctctgggagagccagctttgctattcccattgtgacagcgatggcaggcctgacccacggggcagttagagcagcctcgtggagctcgcccctcccctcagcctgcccacctctccctgcatcctgaggccagtggcccccgggcctgcacagatacctcatcatccacccgctgcccctccccgtccctgtcccccagcatcgggggcctgcaaatctagtgccgaatgactatgtccagattggtgacgatgggtgttgctgtttttcttgtcgtttgtgaacgctgtgatgctgtgtgcccaagtgggcagtcaccacccagcccttccttgggcgtctcccccagagtgctgtcgggaccacatctgtcctcaccctgtgggaccgcctggccctccctccctagcccttccagcctgggacacacacacacacacacacacacacacacgcacgcacacgcacacatcttacctctcatgcgtgttttaccttttgatgttcagagtggctcactggctgggagtccttacctcggggagagggggaggttggttccttggggggccaaagaaggcagggaatgcctggagggtaactggggggccaccatgaccccttctctctccagaaacagctgcttctccccccatcccagggtcccacccccaacccccagaggtggcccttgtttacagtgaggactcggccactgtgtctctgtttcctgaaatataaactgtagcgaccccagactgtagagatttttatgtgtttggatacatctgctgtgtggaaaaaaaaaaaaactacaaaaaccctaattttgtacatactgtatttttactattgaactgtattctagtggctgttcatgctccaagactttagttaccgagacatgaatactatccatgtaataagcacttgcctggaataaaatataaaactgaaataaacctgcactgaaacctgagatggagctgccaaaaaaaaaaaaaaaaaaaaaaaa

SEQ ID NO: 203504 - DNA, 1749 bp, Artificial Sequence
  derived and/or modified sequence
atgagcattgagactctgctggaagctgcccgatttctggagtggcaggctcagcagcagcaacgagcccgcgaagaacaagaacgcctgcggcttgaacaggagagggaacaagagcagaagaaggcaaactctctggctcgactggctcacactttaccggttgaggaaccccggatggaagctccaccactgcctctgtctcctcccgcccctcccccggccccgcctccccctctagctactccggctcccctaacagttataccaatcccggtagtgaccaattcccctcagccattgcctccacctcccccgctgccagcggcagctcaaccattgcctctggctccacgccagcctgctctggtgggggcccctggcctcagcataaaggaaccagcaccgttgccttctcggccacaggtgcccacaccggcaccactccttccagattcaaaggccacaattccacctaacggctcacctaaacctcttcagccactccccacccccgtcctcaccatcgcaccccacccgggagtccaacctcagctcgcaccgcaacagcctcccccacccacactcggaaccttgaagctggccccggccgaggaagtcaagtccagtgagcagaagaagagacctggcggaattggcactagagaagtgcacaataagctggagaaaaatcgaagagcacatctcaaggaatgttttgaaacccttaagcggaatattccaaacgtagacgataagaagactagcaatctttccgtcctgcgcacggccctgagatacatccaatctcttaagcgcaaggaaaaggaatacgaacacgagatggagaggcttgcccgagaaaagattgcgacccaacaacgcctggctgaacttaagcacgaactgtctcaatggatggacgtgctggaaatcgaccgggtgctgaggcagacggggcaacccgaagacgatcaggcttcaacttccaccgctagtgaaggcgaagacaacatcgacgaagacatggaagaggacagagcaggcctggggcctccaaagctctctcataggccgcagccggagcttctgaagagcacactcccccccccatcaacaacccccgctccactgcctccccatccccatccgcaccctcactccgtggcactgcctcccgcgcaccttccagtacagcaacagcagccacaacagaaaaccccactgccagcacccccgcctccccctgccgctccagcacaaactcttgtccccgctcccgctcaccttgtggctaccgcaggtgggggtagcaccgttattgcccacactgcaactacccatgcctctgtgatccagaccgtaaaccacgtattacaggggccaggtggtaaacatatagcacatattgcaccaagcgcaccatcccctgctgtacagctggcacccgcgacccctcccatcgggcatatcacagttcatcccgcaacacttaaccacgtcgcccatctgggctcacaactgcctctttatccccagccagtggcagtgtcccatatcgcccacacactgtcccatcagcaggtgaatgggacagcgggattgggcccccctgctactgtgatggccaaaccggctgtgggcgcccaggttgtccaccatccccagctggttgggcaaacagtgttgaatccagttactatggtgactatgccttccttcccggtgtccactcttaaactggcttag

SEQ ID NO: 203505 - DNA, 1749 bp, Artificial Sequence
  derived and/or modified sequence
atgtctattgaaaccctcctggaagctgccaggttcctcgagtggcaagctcagcagcagcagcgcgccagggaagaacaggaacgtctgcggttagaacaagaaagagagcaggagcaaaagaaggccaattcactcgcccgtctcgctcacacacttcccgtggaggaaccacggatggaggcaccacccctaccgcttagcccccctgcaccccctcccgccccacctcctccactggcaactcctgcaccattgaccgttattcccattcctgtggtgaccaactctcctcagccgttacccccaccgccccctctgccagccgcagctcagcccctgccacttgctccccgacagcccgccctggtgggcgctcccgggcttagcatcaaggaacctgctcccctcccttcccggccacaggtacccacacctgcaccactgttgcccgatagtaaggccacaattccccctaatggatctcccaaaccactacagcctctccccaccccagtgcttaccattgccccacaccccggtgtgcaaccccagctcgcgccccagcagccccctcctccgactctgggcaccctcaagctcgctcctgcagaggaggtgaaaagctccgagcagaagaagagacctgggggcataggaacccgggaggtgcacaacaaattggagaagaacagacgcgcccatctgaaggaatgttttgagacgttaaaaaggaacattcccaatgtcgatgataagaagaccagtaatctctccgtgttaaggaccgccttgagatacattcagagtctgaagcgcaaggaaaaagaatacgagcatgaaatggaacgccttgctagggaaaaaatcgccacccagcaaaggctggcagaactcaagcacgagctcagccagtggatggatgtgctcgaaatagatagagtgctccggcaaactggacagcccgaagacgatcaagccagcacctccactgcttccgaaggtgaggataatattgatgaagacatggaggaggacagggcgggactggggcctcctaagctttcccacaggccgcaacccgagctactgaagtctactctgcccccgccatccaccacacctgcgcccttgcccccacaccctcatccccacccccatagcgtggccctgccacctgcacacttacccgtgcagcagcagcaaccccagcagaagacccccctccctgccccgcctcccccgcccgccgcccccgctcaaactctggtgcccgcaccagctcacctggtggcaaccgcagggggaggctctaccgtgattgctcataccgcaactacccatgcatccgtcatccagaccgtcaaccacgtgctccagggccctgggggtaagcatatcgcccacattgctccatcagcgccatcccccgccgtgcagctggctccggcaacgccaccgattgggcatatcacggtccatcctgcaacgctgaaccacgttgcgcatcttggctcccagttgccactgtaccctcagcctgttgccgtgagtcacattgcccacactctcagccaccagcaggtgaacggaaccgcagggctgggccctccggcaaccgttatggcaaaacccgcggtgggcgcccaggtcgtccaccatccacagctcgtgggccagacagtgctgaatccagtaacaatggtgacgatgcccagttttccagtgtctaccctaaaactggcctag

SEQ ID NO: 203506 - DNA, 1749 bp, Artificial Sequence
  derived and/or modified sequence
atgagcattgagaccctgctggaggccgcccgcttcctggagtggcaggcccagcagcagcagagggcccgggaggagcaggagcggctgcggctggagcaggagcgggagcaggagcagaagaaggccaacagcctggcccggctggcccacaccctgcctgtggaggagcccaggatggaggccccacccctgcccctgagccccccagcccctcctccagcccctcctccacccctggccaccccagcccccctgaccgtcatccccatccctgtggtgaccaacagcccccagcccctgcccccacctccacccctgcctgctgctgcccagcccctgcccctggccccccggcagcctgccctggtgggcgcccctggcctgagcatcaaggagcccgcccccctgcccagccggccccaggtgcccaccccagcccccctgctgcctgacagcaaggccaccatcccccccaacggcagccccaagcccctgcagcccctgcccacccctgtgctgaccatcgccccccaccctggggtgcagccccagctggccccccagcagcccccaccacccaccctgggcaccctgaagctggccccagctgaggaggtgaagagcagcgagcagaagaagaggcctgggggcatcggcacccgggaggtgcacaacaagctggagaagaacagaagagcccacctgaaggagtgctttgagaccctgaagaggaacatccccaacgtggatgacaagaagaccagcaacctgtctgtgctgaggacagccctgcgctacatccagagcctgaagaggaaggagaaggagtatgagcacgagatggagcggctggcccgggagaagatcgccacccagcagaggctggccgagctgaagcatgagctgagccagtggatggatgtgctggagattgacagagtgctgcggcagacaggccagccagaagatgaccaggccagcaccagcacagccagcgagggggaggacaacattgatgaggacatggaggaggaccgggccggcctgggcccccccaagctgagccaccggccccagcctgagctgctgaagagcaccctgcccccacccagcaccaccccagcccccctgcccccccacccccacccccacccccacagcgtggccctgcccccagcccacctgcctgtgcagcagcagcagccccagcagaagacccccctgcctgcccctcctcctcctcctgctgccccagcccagaccctggtgcctgccccagcccacctggtggccacagctgggggcggcagcacagtgattgcccacacagccaccacccacgccagcgtcatccagacagtgaaccacgtgctgcagggccctgggggcaagcacatcgcccacatcgcccccagcgcccccagccctgctgtgcagctggccccagccaccccacccatcggccacatcaccgtgcacccagccaccctgaaccacgtggcccacctgggcagccagctgcccctgtacccccagcctgtggccgtgagccacatcgcccacaccctgagccaccagcaggtgaatggaacagctggcctgggccccccagccaccgtgatggccaagccagctgtgggcgcccaggtggtgcaccacccccagctggtgggccagacagtgctgaaccctgtgaccatggtgaccatgcccagcttccctgtgtccaccctgaagctggcctag

SEQ ID NO: 203507 - DNA, 4996 bp, Artificial Sequence
  derived and/or modified sequence
cggcggccgggggcagcgcggctccttcccttgttgtgtgtgtcggtgcctcctcgccatcttgttgcaaagccctttcttgtcggcgggactcccgggggccgcggggcgggaggcatcggaagggaggtagagagggaggggaagaagggaggcagtgccgccttttttttttttttgcatcccatttttttaaatttgcaattttatattttgcaaatattttgagagacattgatttttctccccgtgctcccccgttcttccctgcggagtgcgctgcgccgcccagccctgtcgccccccggaggtgatccctccctcctgcctgcccgccagcctgacctgtgcccggctcgcgggccgcagcctcggccccggcgcgcccccggcagctctcggcgcgatgagcatagagacgctactggaggcggcccgcttcctggaatggcaagcgcagcaacaacagagagcacgtgaggagcaggagcggcttcgcttggagcaggagcgagagcaggaacagaagaaggccaatagcctggccaggctggcacatacccttcctgtggaggaaccccgcatggaggcgccacccctgcctctgtctccaccggctcccccgccggcacccccaccaccacttgccacccctgccccactgactgtcatccctatccctgtggtgaccaactcccctcagcctctacccccacccccacccttgcccgcggcagcccagcctctgcccctggcgcctcgtcagccggccctggttggcgcccccggactcagcattaaggagcctgcccccctgcccagcaggccgcaggtgcccacccctgctcccctactgccggactcgaaggccaccattccacccaatggcagccccaagcctttgcagcccctccccacgcctgtcctgaccatagcgccacaccctggagtccagcctcagctggccccccagcagccgcccccacccacgctggggaccctgaagttggcaccagctgaagaagtcaaatccagtgaacagaagaagaggcccggggggatcggaaccagagaagtccacaacaaattggagaagaacaggagggcccatctgaaagagtgctttgagaccctgaagcggaacatccccaacgtggatgacaagaagacgtccaatctgagcgtgctgcggacggcgctgcggtacatccagtccctgaagaggaaggagaaggaatatgagcatgaaatggagcggctggcacgtgagaagattgccacgcagcagcggctggcagagctcaagcacgagctgagccagtggatggacgtactggagattgaccgcgtgctgcggcagacgggccagcccgaggatgaccaggcctccacctccaccgcctctgagggtgaggacaacatagacgaggatatggaggaggaccgggcgggcctgggcccacctaagctgagccatcgtccccagccggagctgctgaagtccaccctgccaccccccagcaccacccctgcgcctctgcctccacacccacaccctcacccccactccgtggccctacctcctgcccacctccccgtgcagcagcagcagccacagcagaagacccctctgccagcccctcctcccccaccggctgcccctgcccagacactggtgccagctccagcccatctggtggcgacggctgggggtggctccacggtcatcgcccacacagccaccactcacgcttcagtcatccagactgtgaaccacgttctgcaggggccaggcggcaagcacatcgcccacatcgccccctcggcccccagccctgcggtgcaactggcgcctgccacaccccccattgggcacatcactgtgcaccctgccaccctcaaccatgtggcccacctgggctcccagctgcccttgtacccgcagcccgtggcagtgagccacatcgcccacaccctctcgcaccagcaagtcaacggcacggccggcctggggcccccggctactgtcatggcaaagccggccgtgggggctcaggtggtgcaccacccccagctggtgggccagaccgtgctcaaccctgtgaccatggtcaccatgccctccttcccagtcagcacactcaagctggcttgaggacgaggccactcagaggcccccagtggggacagggagggggacctgtcccccactctctcacccaccagctccacacattccagccaggcccaggccagcccccccacccacccccaggcctcctaggggaagggggtgcaaagactctgagccaagggagggaagggccaccctgctgcactaggacttggtaagatgactctgagaaaatgcgagactctgatggaatgtgccacctgtccggcccagtgccagctccagtgccgctcctgcttcccctccctaccctcggaaatcagtgcgatgtggacgtcacgctccctgacttctcccccgccctgccccgccttcgtgtgctgctgctgctattgctgtctggtgaggtggcccaggcccccggctttcctccggagcctcatgttctcttcccaggcctttggaggggaaatggggaaagcagaactgaagccacttggcccagaaagctgcggattggggtgataaggggccttgctctgagcacaggtgacagatcataggaagtggctggtctggagtcccacccggacaggtggggcctcagcctggggctctctgacccggttgcagtcactgtgattcgttaccgtagatactacttaaaatgattctctaccaacaataaaccaaacccagccactgccaagcttcctgtgccctcaccccaatccctgccactgggctctggacctcaggagggcaggctgaggtggggaaggagggacttggctgtccttccccttccccgtcccctgcagcctgggtctggatgggaggagagccactgggcccctgtccccagtccccagtccccagccctgggcttggctcttggcttccagaaggcagcaaagaggggcgctgtcctgcgttcagcccctgatctctgacctctgctgagtgctgggcactgctccaagggacaggtgggcctggcggcctgtgggtttgggtgcctcctgcagtttgggagacatggaccagcatctggtcttgtttccaggagcatagaagccacatcgttgagacatcaggaaggtaaaaacccagcggcttagccaagccctaagcctgtccccagaccaaccctgggacctatacagaacagagggccagagctagggctgctgcttctgctccagcccctttgcctctgtcctcccatcccctcaacaccctgcttctcccggggacgcttttgagtgggccctgcccggggagctgcagagcagcagcacctttctctgagaagaggtccttggttgggtcaaggacagggctgagcgtggaagggggaggagtcaggggctctgtgttaggatgcggctttctctgcctctgggcagcctgctttggcctttccttgtatgtgggtgtttattacaagtggctttgtgtcagacacgctcggctccccacctggacacacactcaccagtggcctttcagtgtagcgggaggaagccggtgtccctggatgtgaagctcacactgatgggctggggcaggggcctgggccggcgagggggccggggggaggggacagagctgaggatttcctggagtgccctgcaggcacagaggaggtcagcaaaggtcttgaatagattttctctggaaataaagaatccttagatgcctaaaaattcccttcctgttccctcctggtcctggacacctcccaggggactgttccttatttctctctcctggtgtgggtaaagggacagttacaaaccaggtcaccatcctcagaggctgagccctgtacccaccccagcacagccacctccgccagaccccgtggctctgggagagccagctttgctattcccattgtgacagcgatggcaggcctgacccacggggcagttagagcagcctcgtggagctcgcccctcccctcagcctgcccacctctccctgcatcctgaggccagtggcccccgggcctgcacagatacctcatcatccacccgctgcccctccccgtccctgtcccccagcatcgggggcctgcaaatctagtgccgaatgactatgtccagattggtgacgatgggtgttgctgtttttcttgtcgtttgtgaacgctgtgatgctgtgtgcccaagtgggcagtcaccacccagcccttccttgggcgtctcccccagagtgctgtcgggaccacatctgtcctcaccctgtgggaccgcctggccctccctccctagcccttccagcctgggacacacacacacacacacacacacacacacgcacgcacacgcacacatcttacctctcatgcgtgttttaccttttgatgttcagagtggctcactggctgggagtccttacctcggggagagggggaggttggttccttggggggccaaagaaggcagggaatgcctggagggtaactggggggccaccatgaccccttctctctccagaaacagctgcttctccccccatcccagggtcccacccccaacccccagaggtggcccttgtttacagtgaggactcggccactgtgtctctgtttcctgaaatataaactgtagcgaccccagactgtagagatttttatgtgtttggatacatctgctgtgtggaaaaaaaaaaaaactacaaaaaccctaattttgtacatactgtatttttactattgaactgtattctagtggctgttcatgctccaagactttagttaccgagacatgaatactatccatgtaataagcacttgcctggaataaaatataaaactgaaataaacctgcactgaaacctgagatggagctgcca

SEQ ID NO: 203508 - DNA, 2438 bp, Artificial Sequence
  derived and/or modified sequence
atcttgttgcaaagccctttcttgtcggcgggactcccgggggccgcggggcgggaggcatcggaagggaggtagagagggaggggaagaagggaggcagtgccgccttttttttttttttgcatcccatttttttaaatttgcaattttatattttgcaaatattttgagagacattgatttttctccccgtgctcccccgttcttccctgcggagtgcgctgcgccgcccagccctgtcgccccccggaggtgatccctccctcctgcctgcccgccagcctgacctgtgcccggctcgcgggccgcagcctcggccccggcgcgcccccggcagctctcggcgcgatgagcatagagacgctactggaggcggcccgcttcctggaatggcaagcgcagcaacaacagagagcacgtgaggagcaggagcggcttcgcttggagcaggagcgagagcaggaacagaagaaggccaatagcctggccaggctggcacatacccttcctgtggaggaaccccgcatggaggcgccacccctgcctctgtctccaccggctcccccgccggcacccccaccaccacttgccacccctgccccactgactgtcatccctatccctgtggtgaccaactcccctcagcctctacccccacccccacccttgcccgcggcagcccagcctctgcccctggcgcctcgtcagccggccctggttggcgcccccggactcagcattaaggagcctgcccccctgcccagcaggccgcaggtgcccacccctgctcccctactgccggactcgaaggccaccattccacccaatggcagccccaagcctttgcagcccctccccacgcctgtcctgaccatagcgccacaccctggagtccagcctcagctggccccccagcagccgcccccacccacgctggggaccctgaagttggcaccagctgaagaagtcaaatccagtgaacagaagaagaggcccggggggatcggaaccagagaagtccacaacaaattggagaagaacaggagggcccatctgaaagagtgctttgagaccctgaagcggaacatccccaacgtggatgacaagaagacgtccaatctgagcgtgctgcggacggcgctgcggtacatccagtccctgaagaggaaggagaaggaatatgagcatgaaatggagcggctggcacgtgagaagattgccacgcagcagcggctggcagagctcaagcacgagctgagccagtggatggacgtactggagattgaccgcgtgctgcggcagacgggccagcccgaggatgaccaggcctccacctccaccgcctctgagggtgaggacaacatagacgaggatatggaggaggaccgggcgggcctgggcccacctaagctgagccatcgtccccagccggagctgctgaagtccaccctgccaccccccagcaccacccctgcgcctctgcctccacacccacaccctcacccccactccgtggccctacctcctgcccacctccccgtgcagcagcagcagccacagcagaagacccctctgccagcccctcctcccccaccggctgcccctgcccagacactggtgccagctccagcccatctggtggcgacggctgggggtggctccacggtcatcgcccacacagccaccactcacgcttcagtcatccagactgtgaaccacgttctgcaggggccaggcggcaagcacatcgcccacatcgccccctcggcccccagccctgcggtgcaactggcgcctgccacaccccccattgggcacatcactgtgcaccctgccaccctcaaccatgtggcccacctgggctcccagctgcccttgtacccgcagcccgtggcagtgagccacatcgcccacaccctctcgcaccagcaagtcaacggcacggccggcctggggcccccggctactgtcatggcaaagccggccgtgggggctcaggtggtgcaccacccccagctggtgggccagaccgtgctcaaccctgtgaccatggtcaccatgccctccttcccagtcagcacactcaagctggcttgaggacgaggccactcagaggcccccagtggggacagggagggggacctgtcccccactctctcacccaccagctccacacattccagccagccctgccccgccttcgtgtgctgctgctgctattgctgtctggtgaggtggcccaggcccccggctttcctccggagcctcatgttctcttcccaggcctttggaggggaaatggggaaagcagaactgaagccacttggcccagaaagctgcggattggggtgataaggggccttgctctgagcacaggtgacagatcataggaagtggctggtctggagtcccacccggacaggtggggcctcagcctg

SEQ ID NO: 203509 - DNA, 1749 bp, Artificial Sequence
  derived and/or modified sequence
atgagcatcgagaccctgctggaggccgcccggttcctggagtggcaggcacagcagcagcagcgcgcccgagaggagcaagaacgcctgaggctggagcaggagagggagcaagagcagaaaaaagccaattcgttggctaggctcgcccataccctgccagtcgaggaacctaggatggaagctccaccgctcccccttagccctcccgcaccacccccagcgccccctcctcctcttgccactccagcaccactgactgttattccaatacctgtagtgaccaattccccccagcccctccctccacctcctccgctgccagctgcggcccagcccttgcccctggcaccccggcagcctgctctggtgggcgcaccaggtctctctattaaggaacccgccccactcccaagtaggcctcaggtgcccactccagcgcccctgttaccggactcaaaggccactatcccaccaaatggcagtcctaaacctctgcagccattgcccactcctgtgctcactatcgccccccacccaggagtgcaaccccagttggccccgcagcaacctccgccacccaccttgggaacactcaagttagcccctgctgaagaagtgaaatcttccgagcaaaagaaacgccccggcgggattggaacaagggaggtgcataacaaacttgaaaagaatcggagggctcacttgaaagagtgcttcgaaacgctgaaacgtaatattccaaatgtggacgacaagaagacatctaatctttccgtcctgcgcacagcccttcgatatattcagtcccttaagagaaaagagaaggagtatgagcacgaaatggaaagactggcaagagagaaaatcgccacacagcaaagactggccgaactcaaacatgagttatcacagtggatggatgttttggaaatcgatagggtgcttagacagaccggacagcctgaagatgatcaggcttctacatcaacagcctctgaaggtgaagataacatagacgaggacatggaggaggacagagccgggttagggccgccgaaactgtcacatagaccccagcccgagctcttgaagtccacactacctccaccaagcactactccagcacctctacctcctcacccccacccacacccacactcagtcgcgttgccccctgcgcacttacccgtacaacagcagcagccacagcagaagaccccacttccagcccccccccccccacccgcggccccagctcagacactggtcccggcacctgctcacctcgttgctacggcaggaggtggttcgactgtgattgcccacacagccactacccacgccagtgtaatccagactgtgaaccacgttctccagggcccaggcggaaagcacattgcacatattgcaccttccgcaccttcacctgccgttcagttagcccccgcgaccccaccgataggacacatcaccgttcatcccgccacactcaatcacgtggctcatctgggttcccaactccccttataccctcaaccggtggcagttagccatatcgctcacacccttagtcaccagcaagtgaatggaaccgctggactggggccccccgctacagtgatggcaaagccagccgtcggggctcaagtcgttcatcatccacagctggtgggccagacagtactgaaccctgtgacaatggtgacgatgccttccttccccgtgtcaaccttaaagctggcctag

SEQ ID NO: 203510 - DNA, 1749 bp, Artificial Sequence
  derived and/or modified sequence
atgagcatcgagaccctgctggaggccgcccggttcctggagtggcaggcccaacagcagcaaagagctcgagaagaacaagaacggctccggctcgagcaggaacgcgaacaggagcaaaagaaggcaaactctctcgcccggttagcccacacgctccccgtcgaggaacctcgaatggaggcacccccactccccctctcccctcctgctccacccccagctccgcccccacctttggctactcctgccccactcactgtaatccctatacccgttgtgaccaactccccccagccacttccacccccaccccccctaccagcggccgctcagcctctgcctctggccccgaggcaacccgcactggtgggcgcacccgggttgtccatcaaagagccagcccctttgccctcgcgcccacaagtgccaaccccagcccctctgctgcctgacagcaaagcaacaatacccccaaatggtagccctaagcccttacagcctttacccacgcctgtgctgacgattgccccacaccctggcgtccagccgcagctggccccccagcagccccccccacctaccctgggcacattgaagctggcgcccgcagaggaggtgaagtccagcgaacagaaaaaacgacccggcggcataggcaccagagaggttcacaacaaactggagaaaaaccgaagggcccacctcaaggagtgttttgaaaccctcaaaaggaatatacctaatgtcgacgataagaaaacatccaaccttagtgtcttacgcaccgctctgcggtatattcagtcattgaaacgtaaggaaaaagagtatgaacatgaaatggaacgattggcacgcgagaagatcgctacccagcaacggctggctgaattaaaacacgaactgtcacaatggatggacgtgctggagatcgaccgcgtcctgagacagaccgggcagccagaagacgatcaggccagcacttccactgccagcgagggcgaggacaatatagatgaagatatggaggaagatcgcgccggtctgggtcctcccaaactgtcgcatagaccgcaacccgaactgctgaagagcaccctgcccccaccatctactacccccgctcctctgccaccgcatcctcaccctcacccacacagcgtggccctcccacccgcgcacttgcccgtacaacagcaacagccccagcagaagactcctttaccagcccctccccccccccctgcagcccccgcccaaaccctggtgccagcgcctgcccatctggtcgccaccgctgggggggggtctacagtgatcgctcataccgctacaacgcatgctagtgttatccagactgtgaaccacgtactgcagggcccaggtggcaagcacatcgcccatatcgcaccctcagcccctagtcctgctgtgcagctggcacctgcgacaccgcccatcgggcacatcactgttcacccggccacacttaatcacgtggcgcacctggggagtcagctgccattgtaccctcaacctgttgcggtctcgcacattgctcatacgctatcacaccaacaggtaaatggtactgccggcctgggcccacctgcaaccgtgatggcaaaaccagccgtgggggcgcaggttgtgcaccatcctcagctagtgggccagacggtgctgaatccggtgacaatggtgaccatgccgagctttcctgtgagcactcttaagctggcctag

SEQ ID NO: 203511 - DNA, 1749 bp, Artificial Sequence
  derived and/or modified sequence
atgagcatcgagaccttgttggaggcagccagattcctggagtggcaggcccagcagcaacagagggccagagaggaacaagagagactgcgactcgagcaggaacgagagcaagaacagaagaaagccaactccctggcgcgactcgcccataccctgcctgttgaggagcccagaatggaagctccccctctcccattgagtccaccagcccctccgcctgctcccccacctcctctggcaaccccagcgccactgaccgtgatcccaatcccagttgtgaccaacagccctcagcctttaccacccccacccccactgccggcagccgcacaacctctgcccttggcacctcgccagccagctttggtgggtgcccctggcctatctattaaggagcctgctccgctgccttcccgccctcaggtgcccactcctgctccattgctgccggactccaaagccactattccccctaacggaagtcctaaacccctgcagcccctcccaactcctgttctgactattgctccacatcccggtgtccagccacaactcgctcctcaacaacccccacctcccacattgggaacgcttaagttggcccctgccgaggaagtgaagtcatctgagcagaagaagaggcccggtggcatcggtactagggaagttcataataaattagaaaaaaatcgcagggcccacttgaaggagtgctttgaaaccctcaaaagaaacatccctaacgtagatgataagaaaacaagcaacttgtctgtgctccgaactgccctccgctacatccagtcactaaagcgaaaagagaaagagtacgaacatgagatggaaaggctggccagagagaaaatcgcaactcagcaaaggctggcggagctcaagcacgagctctcacagtggatggatgtcctcgagatcgatagggttctccgacaaacgggacagcctgaggatgatcaggcgtctacctctacagctagcgagggcgaggacaatatcgacgaggacatggaagaggatcgggcaggtttggggccacccaagttatcccatcgcccacaaccggagctgttgaaaagtacattgcccccacccagcactactccagccccattgccgcctcacccacaccctcaccctcatagcgtggctctgccccctgctcacctccctgtccaacagcaacagccacagcagaaaacccctctgccagctcccccacccccacctgccgctcctgctcagaccctcgtccccgctcccgcacacttagtggccacagcgggtggcggtagtactgtgattgcccacacagcaactacacacgccagcgtgattcagactgtgaatcatgtgttgcaggggccagggggaaagcacatcgcacacattgccccatcggccccttctccggcagtgcagctggcaccagcaacgcctccgataggccacatcaccgtgcatcctgcaacactgaaccatgtggcgcacctgggttcacagctgccactgtatccccagcccgtggccgtgtcccatatagcccacacattgtctcaccaacaggtgaacggcacagctgggctaggtcctcccgctaccgtgatggcaaagccagccgtgggcgcacaggtagtacatcacccacaattagtagggcaaactgttttgaacccggtgacaatggtaactatgccctcatttcctgtctctaccctcaagctggcctag

SEQ ID NO: 203512 - DNA, 1749 bp, Artificial Sequence
  derived and/or modified sequence
atgtccatcgaaaccctgcttgaggcagcacgctttctggagtggcaggcacagcagcagcaaagggccagagaggagcaggagaggctaagactggagcaagagagagagcaggaacagaaaaaggcgaactctctcgccagactcgctcacactcttcccgtggaggagcccagaatggaggcgcctccgctgcctctgagtccgccagctcctccccctgcaccacccccacctctggccacaccagctcccctcaccgtcatacccatcccagtggtcaccaatagtccacaacctctcccgccacctccaccactccccgcagccgcacagcccctacccctcgcccctaggcaacccgcactggtcggagcgccagggctatcaataaaagaaccagccccactgccttcccggcctcaggtacctacacccgcacctttgcttcccgactcaaaagctaccatcccaccaaacggctcaccgaaacctcttcagcctcttccgacgcccgttctgaccatagctcctcaccccggtgtgcaacctcagcttgcgccacagcagcccccacctcctactttgggcaccttaaagctagcacccgctgaggaggtgaaaagcagtgaacagaaaaaacgccctggaggtatcggcaccagagaagtacataacaagctcgagaaaaacaggagggctcacttaaaagaatgctttgaaacattaaaaaggaacatccctaacgtagacgacaagaagacatctaatctgtctgtcctgagaactgctttgcgctatatccagagcctcaaacgcaaagagaaggaatacgagcacgagatggagagactggcacgtgaaaaaatcgccactcagcagaggcttgcggaacttaagcacgagcttagccagtggatggacgtcctcgagatagacagagtcctgaggcaaaccggacagcccgaagatgatcaagccagtacgtccacagcttctgagggtgaagataatatcgacgaagatatggaggaggacagagctggtctcggccctccgaaactgtcgcatagaccgcagccagagctgttgaaaagtaccctccctcctccatcgactacgcctgcccctctccctccgcatccacacccgcaccctcattctgtggcactgcctcccgcacacctgccagtgcaacagcaacaacctcaacaaaaaactccattgccggcaccgcctccgccaccagccgcaccagcccagacattggtgcccgcaccagcccacttggttgcaaccgctgggggtggatccactgttatcgctcatactgctaccacacatgccagcgtgattcaaactgtcaatcatgttctccagggcccagggggaaagcacattgctcatattgcccctagcgccccatcacctgccgtccaactcgccccagcgaccccacctatcggacacattaccgtgcacccagcgacacttaaccacgtcgcgcacctgggctcacagctccctttgtatccccagcctgtggcggtgtcccatattgctcacactctatcacaccagcaggtcaacggaacggcagggttgggcccacccgcaactgtgatggcaaagcctgctgtgggggctcaagtggtccaccacccccagctggtcggtcagaccgttctgaatccggtgaccatggtgaccatgccctccttccccgtgagtacacttaagctggcctag

SEQ ID NO: 203513 - DNA, 1749 bp, Artificial Sequence
  derived and/or modified sequence
atgagcatcgagaccctgctggaggccgccagattcctggagtggcaggcccagcagcagcagagagccagagaggagcaggagagactgagactggagcaggagagagagcaggagcagaagaaggccaacagcctggccagactggcccacaccctgcccgtggaggagcccagaatggaggccccccccctgcccctgagcccccccgcccccccccccgccccccccccccccctggccacccccgcccccctgaccgtgatccccatccccgtggtgaccaacagcccccagcccctgcccccccccccccccctgcccgccgccgcccagcccctgcccctggcccccagacagcccgccctggtgggcgcccccggcctgagcatcaaggagcccgcccccctgcccagcagaccccaggtgcccacccccgcccccctgctgcccgacagcaaggccaccatcccccccaacggcagccccaagcccctgcagcccctgcccacccccgtgctgaccatcgccccccaccccggcgtgcagccccagctggccccccagcagccccccccccccaccctgggcaccctgaagctggcccccgccgaggaggtgaagagcagcgagcagaagaagagacccggcggcatcggcaccagagaggtgcacaacaagctggagaagaacagaagagcccacctgaaggagtgcttcgagaccctgaagagaaacatccccaacgtggacgacaagaagaccagcaacctgagcgtgctgagaaccgccctgagatacatccagagcctgaagagaaaggagaaggagtacgagcacgagatggagagactggccagagagaagatcgccacccagcagagactggccgagctgaagcacgagctgagccagtggatggacgtgctggagatcgacagagtgctgagacagaccggccagcccgaggacgaccaggccagcaccagcaccgccagcgagggcgaggacaacatcgacgaggacatggaggaggacagagccggcctgggcccccccaagctgagccacagaccccagcccgagctgctgaagagcaccctgcccccccccagcaccacccccgcccccctgcccccccacccccacccccacccccacagcgtggccctgccccccgcccacctgcccgtgcagcagcagcagccccagcagaagacccccctgcccgcccccccccccccccccgccgcccccgcccagaccctggtgcccgcccccgcccacctggtggccaccgccggcggcggcagcaccgtgatcgcccacaccgccaccacccacgccagcgtgatccagaccgtgaaccacgtgctgcagggccccggcggcaagcacatcgcccacatcgcccccagcgcccccagccccgccgtgcagctggcccccgccaccccccccatcggccacatcaccgtgcaccccgccaccctgaaccacgtggcccacctgggcagccagctgcccctgtacccccagcccgtggccgtgagccacatcgcccacaccctgagccaccagcaggtgaacggcaccgccggcctgggcccccccgccaccgtgatggccaagcccgccgtgggcgcccaggtggtgcaccacccccagctggtgggccagaccgtgctgaaccccgtgaccatggtgaccatgcccagcttccccgtgagcaccctgaagctggcctag

SEQ ID NO: 203514 - protein, 318 aa, Artificial Sequence
  derived and/or modified sequence
MAAAAVSGALGRAGWRLLQLRCLPVARCRQALVPRAFHASAVGLRSSDEQKQQPPNSFSQQHSETQGAEKPDPESSHSPPRYTDQGGEEEEDYESEEQLQHRILTAALEFVPAHGWTAEAIAEGAQSLGLSSAAASMFGKDGSELILHFVTQCNTRLTRVLEEEQKLVQLGQAEKRKTDQFLRDAVETRLRMLIPYIEHWPRALSILMLPHNIPSSLSLLTSMVDDMWHYAGDQSTDFNWYTRRAMLAAIYNTTELVMMQDSSPDFEDTWRFLENRVNDAMNMGHTAKQVKSTGEALVQGLMGAAVTLKNLTGLNQRR

SEQ ID NO: 203515 - DNA, 957 bp, Artificial Sequence
  derived and/or modified sequence
atggccgccgccgcagtatccggagccctgggtcgcgccggatggcgtctgctacagctgaggtgtctacccgttgctaggtgccggcaggccttagttcccagagcctttcacgcaagtgccgtgggactgagatcctcggacgagcagaaacagcagccccccaactctttctcacagcagcactccgaaacacagggggctgaaaagcccgaccctgaatcgtcacactcccccccgcgatatacagatcaaggaggagaagaagaggaggactatgagagtgaagagcagctccaacacagaatcttgaccgccgcactggaatttgttcccgcccatggctggaccgcggaggctatcgctgaaggtgcccagtccctcggcctctcctcagctgcggccagcatgtttggaaaggatgggtctgagctcattctccactttgtgacacaatgcaatactcggttaactcgagtgttggaggaagaacaaaaacttgtgcagctggggcaggctgaaaaacgcaagactgaccagttcctgcgcgatgcggtggaaacacggctcaggatgttgattccttacatcgagcactggccacgcgcactcagtattctcatgctgccccacaatattccaagttcactgagcctcctcacgagtatggtcgacgacatgtggcattacgcaggtgaccaatccacagactttaactggtacacaagacgtgcaatgctcgccgctatttacaacactaccgaactcgtcatgatgcaggatagtagccccgacttcgaggacacgtggcgctttttagagaatcgagtgaatgatgcgatgaatatgggtcacactgcgaagcaggtgaagtccacaggagaagctttagtgcagggccttatgggggccgcggtcactctaaagaatttgacgggtctgaaccagaggagatag

SEQ ID NO: 203516 - DNA, 957 bp, Artificial Sequence
  derived and/or modified sequence
atggctgctgctgctgtgtctggggccctgggccgggccggctggaggctgctgcagctgcgctgcctgcctgtggcccgctgccggcaggccctggtgccccgggccttccacgccagcgctgtgggcctgcggagcagtgatgagcagaagcagcagccccccaacagcttcagccagcagcacagcgagacccagggcgctgagaagccagaccctgagagcagccacagccccccacgctacacagaccagggcggggaggaggaggaggactatgaaagtgaggagcagctgcagcaccgcatcctgacagctgccctggagtttgtgcctgcccacggctggacagctgaggccatcgccgagggcgcccagagcctgggcctgagcagcgctgctgcctccatgtttgggaaggatggcagcgagctgatcctgcactttgtgacccagtgcaacacccggctgaccagggtgctggaggaggagcagaagctggtgcagctgggccaggccgagaagaggaagacagaccagttcctgagagatgctgtggagacccggctgaggatgctgatcccctacatcgagcactggccccgggccctgagcatcctgatgctgccccacaacatccccagcagcctgagcctgctgacctccatggtggatgacatgtggcactacgccggggaccagagcacagacttcaactggtacacccggcgggccatgctggccgccatctacaacaccacagagctggtgatgatgcaggacagcagcccagactttgaggacacctggaggttcctggagaacagagtgaatgatgccatgaacatgggccacacagccaagcaggtgaagagcactggagaggccctggtgcagggcctgatgggcgctgctgtgaccctgaagaacctgaccggcctgaaccagaggaggtag

SEQ ID NO: 203517 - DNA, 957 bp, Artificial Sequence
  derived and/or modified sequence
atggccgccgccgccgtgagcggcgccctgggccgggccggctggcggctgctgcaattgcgatgtctgcccgtggcgcgctgtcgacaggctctggtaccacgcgccttccacgccagtgccgtgggactgagatccagtgacgaacagaagcagcaaccccctaacagctttagccaacagcactccgagacgcagggcgccgagaaacctgatcctgaatcctcgcactccccgccccgatacacagatcagggcggagaggaggaagaggattatgaatctgaggagcagctgcagcatagaatcctgaccgcggccttggagtttgtgcccgctcatgggtggaccgcggaagcgatcgcggagggcgcccaatccctgggcctgtccagtgccgcagctagtatgttcgggaaggatggatcagagcttattctccacttcgttacgcaatgtaataccagacttactagagtactggaggaagaacagaagttagtgcagttagggcaggctgaaaagcgaaagacagatcagtttctgagagatgccgtggagacgcgccttaggatgctcatcccctacatcgagcactggccccgtgcgctctccatcttgatgcttcctcacaacatcccatcaagtctgtctttgctgacgtctatggtggatgacatgtggcactatgctggcgaccaatccactgatttcaattggtatactcgccgcgctatgctagctgccatttataatactaccgaacttgtgatgatgcaggactcgtctccggattttgaggacacatggcgttttttggaaaatcgcgttaacgacgccatgaacatgggacatacagctaaacaggttaaaagtacaggcgaagctctcgtccaggggctaatgggggccgcagtcaccttgaagaatctgaccggcctgaaccagcgacgctag

SEQ ID NO: 203518 - DNA, 957 bp, Artificial Sequence
  derived and/or modified sequence
atggccgctgctgcagtctccggggcactaggccgagcaggatggcggctcctgcagctgcgctgtctacctgtggctagatgccggcaggctctggtgccacgggcatttcacgccagcgccgtcgggttacgaagctccgacgaacagaagcagcagccacctaactcattcagtcagcagcactccgagacccagggcgcagaaaagcccgaccctgaatcttcccattcccctcctaggtatactgaccagggaggggaggaagaagaagactatgaaagcgaggaacagttgcaacacagaattcttacagcagctttggagttcgtacccgctcacggatggacagcagaagccattgcggaaggcgctcaatctttgggcctgtctagtgcagctgcttccatgttcggaaaggatggctctgagcttattctgcactttgtcacgcagtgcaacacgaggctaacgcgggtgctggaagaggaacagaagctagtacaactcggacaggctgaaaagagaaagaccgaccaattcttgagagatgccgttgaaaccagactgcggatgttgattccgtacatcgagcattggccacgggctctctctatactcatgctgccacacaatattccttcttcgctgtctttactcaccagcatggttgatgacatgtggcactatgccggtgatcaatccactgacttcaactggtacactaggcgggcaatgctggcggcaatctataatactacagaactggtcatgatgcaagactcctctcctgactttgaagacacatggaggtttctggagaatcgcgtaaatgacgcaatgaacatgggccacacagccaaacaggtgaaatccacaggggaagctctggtccaaggactaatgggagccgcagtgaccctgaagaatttaaccgggctgaaccagcgcagatag

SEQ ID NO: 203519 - DNA, 1615 bp, Artificial Sequence
  derived and/or modified sequence
cgtgcccgcttccaaaatggcggcggcggcggtatctggtgcgcttggccgggcgggctggaggctcctgcagctgcgatgcctgcccgtggcccgttgccgacaagccctggtgccgcgtgccttccatgcttcagctgtggggctaaggtcttcagatgagcagaagcagcagcctcccaactcattttctcagcagcattctgagacacagggggcagaaaaacctgatccagagtcttctcattcaccccccaggtatacagaccagggcggcgaggaggaggaggactatgaaagtgaggagcagttgcagcaccgcatcctgacggcagcccttgagtttgtgcccgcccacgggtggacagcagaggcgattgcagaaggagcccagtctctgggtctctccagtgcagcagccagcatgttcgggaaggatggcagtgagctaatactgcattttgtgacccagtgcaatacccggctcacacgtgtgctagaagaggagcagaagctggtacagttgggccaggcggagaagaggaagacagaccagttcctgagggatgcagtggaaaccagactgagaatgctgatcccatacattgagcactggccccgggccctcagcatcctcatgctccctcacaacatcccgtccagcctgagcctgctcaccagcatggtggatgacatgtggcattacgctggggaccagtccactgattttaactggtacacccgccgagccatgctggctgccatctacaacacaacagagctggtgatgatgcaggactcctctccagactttgaggacacttggcgcttcctggaaaaccgggttaatgatgcaatgaacatgggccacactgccaagcaggtaaagtccacaggagaggcactggtgcaaggactcatgggtgcagcagtgacgctcaagaacttgacaggtctaaaccagcgtcggtgagaggaaggggtataagctacaatgcctagaagagaatgagcggacagattgaaagagctttgaaaagtataaggtgccatccacataacctggtgttcacgagaacacactaaaggactcctgagtcactaccacagccacctggaaaccacaaggcatttgatgctaccgttctggtcagggattgggctgcttcttcagttcctaataccagaccaagcctcctgatgcctttctgcactgcaactgtgtgattgaaaaatgagatgttcatccaagcagtcaagccacagaaacccagcatgtccctgtcacaatctcatgggcaccttgatcatgtcttaaccttcccttaaccttggggctcccaagccagagtcaaggtctgacgccacctcaaggtgacagctcatctccagcacagcacaggcgtgtgcacacagaggtgttccttgcagccccctccctctcaggtgtcctgagatgctgttcctgggagccccctcagaaaactgcctcacctgagacaagtgcctgctggacagaggtgtgattccaggcctggtgtcacatgacaccagcatgcattgcaggattattagtgtattttgagtctgtaaaaataataaatatgtttgaagt

SEQ ID NO: 203520 - DNA, 957 bp, Artificial Sequence
  derived and/or modified sequence
atggccgccgccgccgtgagcggcgccctgggcagagccggctggagactgctgcagctgagatgcctgcccgtggccagatgcagacaggccctggtgcccagagccttccacgccagcgccgtgggcctgagaagcagcgacgagcagaagcagcagccccccaacagcttcagccagcagcacagcgagacccagggcgccgagaagcccgaccccgagagcagccacagcccccccagatacaccgaccagggcggcgaggaggaggaggactacgagagcgaggagcagctgcagcacagaatcctgaccgccgccctggagttcgtgcccgcccacggctggaccgccgaggccatcgccgagggcgcccagagcctgggcctgagcagcgccgccgccagcatgttcggcaaggacggcagcgagctgatcctgcacttcgtgacccagtgcaacaccagactgaccagagtgctggaggaggagcagaagctggtgcagctgggccaggccgagaagagaaagaccgaccagttcctgagagacgccgtggagaccagactgagaatgctgatcccctacatcgagcactggcccagagccctgagcatcctgatgctgccccacaacatccccagcagcctgagcctgctgaccagcatggtggacgacatgtggcactacgccggcgaccagagcaccgacttcaactggtacaccagaagagccatgctggccgccatctacaacaccaccgagctggtgatgatgcaggacagcagccccgacttcgaggacacctggagattcctggagaacagagtgaacgacgccatgaacatgggccacaccgccaagcaggtgaagagcaccggcgaggccctggtgcagggcctgatgggcgccgccgtgaccctgaagaacctgaccggcctgaaccagagaagatag

SEQ ID NO: 203521 - protein, 312 aa, Artificial Sequence
  derived and/or modified sequence
MADFGISAGQFVAVVWDKSSPVEALKGLVDKLQALTGNEGRVSVENIKQLLQSAHKESSFDIILSGLVPGSTTLHSAEILAEIARILRPGGCLFLKEPVETAVDNNSKVKTASKLCSALTLSGLVEVKELQREPLTPEEVQSVREHLGHESDNLLFVQITGKKPNFEVGSSRQLKLSITKKSSPSVKPAVDPAAAKLWTLSANDMEDDSMDLIDSDELLDPEDLKKPDPASLRAASCGEGKKRKACKNCTCGLAEELEKEKSREQMSSQPKSACGNCYLGDAFRCASCPYLGMPAFKPGEKVLLSDSNLHDA

SEQ ID NO: 203522 - DNA, 939 bp, Artificial Sequence
  derived and/or modified sequence
atggccgacttcggcatcagcgccggccagttcgtggccgtggtgtgggacaagagcagccccgtggaggccctgaagggcctggtggacaagctgcaggccctgaccggcaacgagggcagagtgagcgtggagaacatcaagcagctgctgcagagcgcccacaaggagagcagcttcgacatcatcctgagcggcctggtgcccggcagcaccaccctgcacagcgccgagatcctggccgagatcgccagaatcctgagacccggcggctgcctgttcctgaaggagcccgtggagaccgccgtggacaacaacagcaaggtgaagaccgccagcaagctgtgcagcgccctgaccctgagcggcctggtggaggtgaaggagctgcagagagagcccctgacccccgaggaggtgcagagcgtgagagagcacctgggccacgagagcgacaacctgctgttcgtgcagatcaccggcaagaagcccaacttcgaggtgggcagcagcagacagctgaagctgagcatcaccaagaagagcagccccagcgtgaagcccgccgtggaccccgccgccgccaagctgtggaccctgagcgccaacgacatggaggacgacagcatggacctgatcgacagcgacgagctgctggaccccgaggacctgaagaagcccgaccccgccagcctgagagccgccagctgcggcgagggcaagaagagaaaggcctgcaagaactgcacctgcggcctggccgaggagctggagaaggagaagagcagagagcagatgagcagccagcccaagagcgcctgcggcaactgctacctgggcgacgccttcagatgcgccagctgcccctacctgggcatgcccgccttcaagcccggcgagaaggtgctgctgagcgacagcaacctgcacgacgcctag

SEQ ID NO: 203523 - DNA, 939 bp, Artificial Sequence
  derived and/or modified sequence
atggccgactttggtataagcgccggtcagtttgttgccgtggtctgggacaaatccagccctgtggaagccctgaagggtctggtggacaagttacaggctctgacaggcaatgagggtcgggtctcagtcgagaacattaaacaacttttacagtcggcgcacaaggagtccagctttgacatcatcctgtcgggattagttcctgggtctaccactctccacagcgccgaaatcctcgctgaaatcgctagaattttgaggccaggcggatgcctcttcctgaaagagccagtggagaccgcagtagataacaacagcaaggtcaaaaccgcctcgaagttatgttctgcccttactctgtctggactggtggaagtgaaggagttgcaaagggaacccctgacaccagaggaggttcagagcgtgagagagcatctaggacacgaatccgacaatcttttgtttgttcagatcacaggaaaaaagcctaactttgaggtggggagctctcgacagctgaagctgtcaataactaaaaagtcttctccctcagtgaaacctgctgtggatcccgctgcagccaaactgtggactctctccgcgaatgacatggaagacgactctatggatctcatagacagtgacgaactgctggatcctgaagacctcaagaagccagatccagcctcactgcgggcagctagctgtggggagggaaagaagcggaaggcatgtaagaattgcacctgtggcctcgctgaagagctggaaaaggagaagtctagagaacaaatgtcgtcacagcccaaatcagcatgtggaaattgctatctcggagacgccttccgctgtgcaagttgcccatacctcggaatgccagccttcaagccaggagagaaggtgctcttgtccgatagcaatctccacgacgcctag

SEQ ID NO: 203524 - DNA, 939 bp, Artificial Sequence
  derived and/or modified sequence
atggctgactttggcatctctgctggccagtttgtggccgtggtgtgggacaagagcagccctgtggaggccctgaagggcctggtggacaagctgcaggccctgactggaaatgaaggccgggtgtctgtggagaacatcaagcagctgctgcagagcgcccacaaggagagcagctttgacatcatcctgagcggcctggtgcccggcagcaccaccctgcacagcgctgagatcctggccgagatcgcccgcatcctgcggcctgggggctgcctcttcctgaaggagcctgtggagacagctgtggacaacaacagcaaggtgaagacagccagcaagctgtgcagcgccctgaccctgagcggcctggtggaggtgaaggagctgcagcgggagcccctgaccccagaggaggtgcagagcgtgcgggagcacctgggccatgaaagtgacaacctgctgtttgtgcagatcaccgggaagaagcccaactttgaggtgggcagcagccggcagctgaagctgagcatcaccaagaagagcagccccagcgtgaagccagctgtggaccctgctgctgccaagctgtggaccctgagcgccaatgacatggaggatgacagcatggacctgattgacagtgatgagctgctggaccctgaggacctgaagaagccagaccctgccagcctgcgggccgccagctgtggggagggcaagaagaggaaggcctgcaagaactgcacctgtggcctggccgaggagctggagaaggagaagagccgggagcagatgagcagccagcccaagagcgcctgtggcaactgctacctgggagatgccttccgctgtgccagctgcccctacctgggcatgcctgccttcaagccaggagagaaggtgctgctgagtgacagcaacctgcatgatgcctag

SEQ ID NO: 203525 - DNA, 2181 bp, Artificial Sequence
  derived and/or modified sequence
cagataccgccgccgccgccattttggaagcgggcacgtcgcccacggcgacgcgaccggtagctacgggaccacggccctaaggagggcggaagtcgtcgctccgtggagcctcctcctctcgcgagaggcgcaaggcgtggagtcgacggctggagagaagccgggagcgagcccaggcggcagtcttgattcccttttggccagcagtttttaggtctgtcagtactgcactgcaagaatggcagattttgggatctctgctggccagtttgtggcagtggtctgggataagtcatccccagtggaggctctgaaaggtctggtggataagcttcaagcgttaaccggcaatgagggccgcgtgtctgtggaaaacatcaagcagctgttgcaatctgcccacaaagaatccagctttgacattattttgtcaggtttagtcccaggaagcaccactctgcacagtgctgagattttggctgaaatcgcccggatccttcggcctggtggatgtctttttctgaaggagccagtagagacagctgtagataacaatagcaaagtgaagacagcatctaagctgtgttcagccctgactctttctggtcttgtggaagtgaaagagctgcagcgggagcccctaacccctgaggaagtacagtctgttcgagaacaccttggtcatgaaagtgacaacctgctgtttgttcagatcacaggcaaaaaaccaaactttgaagtgggttcttctaggcagcttaagctttccatcaccaagaagtcttctccttcagtgaaacctgctgtggaccctgctgctgccaagctgtggaccctctcagccaacgatatggaggacgacagcatggatctcattgactcagatgagctgctggatccagaagatttgaagaagccagatccagcttccctgcgggctgcttcttgtggggaagggaaaaagaggaaggcctgtaagaactgcacctgtggccttgccgaagaactggaaaaagagaagtcaagggaacagatgagctcccaacccaagtcagcttgtggaaactgctacctgggcgatgccttccgctgtgccagctgcccctaccttgggatgccagccttcaaacctggggaaaaggtgcttctgagtgatagcaatcttcatgatgcctaggaggttcctgacatgggacccatctgctcctccagccaactcctgtccctcacatcccaccatggtggctcctcccacctcctctggatttgttcactctgagatctgtttgcagagtgggtgcttagcagacagagtgaagctggctggggggcacagtggtgtgtagtgctgctgtgtatcaaaagaccaaggtattatgggacctggtttcagaatgggatgggtttcttcacctcatgttaagagaagggagtgtgtcctgaagaagcccttcttctgatgttaaaatgctgaccagaacgctcttgagcccaggcatcgttgagcattaacactctgtgacagagctgcagacccctgccttgagtctcatctcagcaatgctgccaccctcttgtctttcagagttgttagtttactccattctttgtgacacgagtcaagtggctcacaacctcctcagggcaccagaggactcactcactggttgctgtgatgatatccagtgtccctctgcccccttccatccccaaccacatttgactgtagcattgcatctgtgtcctgttgtcatttatgttaaccttcaggtattaaacttgctgcatatcttgacatatcttgagattctgcatgtcttgtaaagagaggggatgtgcatttgtgtgtgatgttggatagtcatccacgctcagtttggaccattggaggaacttagtgtcacgcacaaatggggctattcctacgcttagaatagggcttgtctgcccactttagaagagtccaggttggtgagcatttagagggaagcagggcagaactctgaacgacaatacgtctctctgagcagagacccctttgttcttgttatccacccatatggacttggaatcaatcttgccaaatatttggagagattgtgtggatttaagagacctggatttttatattttaccagtaaataaaagttttcattgatatctgtccttgaaacttga

SEQ ID NO: 203526 - DNA, 939 bp, Artificial Sequence
  derived and/or modified sequence
atggccgacttcggcatcagcgccggccagttcgtggccgtggtgtgggacaagagcagccctgtcgaagccctcaaaggattggtggacaagctccaggctctcaccggaaatgaaggccgagtctcagtagagaatattaagcagctgctgcagtctgcccataaggagagtagctttgatattatactgtccggcctcgtgcccggtagcaccacgctgcattcggccgaaatcctcgctgagatcgcgcggatcttaagaccaggcggatgcctgttcctgaaagagcccgttgagactgccgtcgataataacagcaaggttaagactgcctctaaattatgcagcgccctcacattatccggactcgtggaagtgaaagagcttcagcgagagcccctgactcccgaggaagttcagagcgtgcgcgaacatttagggcatgagtccgataacttgctgttcgttcagattacagggaaaaagcccaatttcgaggtgggttcctctagacagctaaaattaagcataacgaagaagtccagccccagtgtgaagcccgctgtggaccccgccgctgcaaagctatggactctgagcgcaaatgacatggaggatgactctatggacctgatcgatagcgacgagttactcgatccggaagacctgaaaaaaccggacccagccagcttacgcgccgcctcatgtggcgagggtaaaaagaggaaggcgtgcaagaactgcacctgtggactagctgaggagttggaaaaagagaagtctagggagcagatgtccagccaacctaagtccgcctgtggaaattgttatttgggggacgccttccggtgcgcaagttgcccttatctcggcatgcccgcctttaagccgggggagaaagtgctcttgagcgactcaaacctgcacgatgcctag

SEQ ID NO: 203527 - DNA, 939 bp, Artificial Sequence
  derived and/or modified sequence
atggcagacttcgggatctccgctggccagttcgtggccgtagtatgggacaaatcatcaccagtggaagccctgaagggtctggttgacaaactccaagccctaacaggtaatgaaggacgggtgtcagtggaaaatataaaacagctgctgcagtctgcacacaaggaatcctcctttgacatcatactgagtggcctggtgccaggcagtactacattgcactcagcggagatccttgcggaaattgccaggatcctaaggccgggaggctgcctgttcctgaaggaacccgtggaaaccgccgtcgataacaacagcaaggtgaagaccgcctccaagttgtgctctgcccttacattgtcgggtcttgtagaggtcaaagagctacagcgggagccactcacacccgaagaagtgcagagcgtccgagagcaccttggccacgagagtgacaacctcctcttcgtacagatcactgggaaaaaacctaattttgaagtcggctcctcccggcagctcaagttgtctattactaaaaaatcgagcccttctgtaaagcccgctgttgacccagccgcagccaagctatggaccttgagcgccaacgatatggaggacgattcaatggatcttatagattccgacgaattattggatccagaggatcttaagaagccggaccctgctagtcttagagccgctagttgcggtgaaggtaagaaaaggaaagcatgtaaaaattgcacttgtggtcttgcagaagagctggaaaaggaaaaaagccgagagcagatgtctagtcagcctaagtccgcttgcgggaattgctatctaggagacgccttcaggtgtgcatcctgcccttaccttggcatgcccgcattcaagcccggagaaaaggtgctactgtctgactctaatttgcatgacgcgtag

SEQ ID NO: 203528 - protein, 296 aa, Artificial Sequence
  derived and/or modified sequence
MARCERLRGAALRDVLGRAQGVLFDCDGVLWNGERAVPGAPELLERLARAGKAALFVSNNSRRARPELALRFARLGFGGLRAEQLFSSALCAARLLRQRLPGPPDAPGAVFVLGGEGLRAELRAAGLRLAGDPSAGDGAAPRVRAVLVGYDEHFSFAKLREACAHLRDPECLLVATDRDPWHPLSDGSRTPGTGSLAAAVETASGRQALVVGKPSPYMFECITENFSIDPARTLMVGDRLETDILFGHRCGMTTVLTLTGVSRLEEAQAYLAAGQHDLVPHYYVESIADLTEGLED

SEQ ID NO: 203529 - protein, 79 aa, Artificial Sequence
  derived and/or modified sequence
MFECITENFSIDPARTLMVGDRLETDILFGHRCGMTTVLTLTGVSRLEEAQAYLAAGQHDLVPHYYVESIADLTEGLED

SEQ ID NO: 203530 - DNA, 891 bp, Artificial Sequence
  derived and/or modified sequence
atggccagatgcgagagactgagaggcgccgccctgagagacgtgctgggcagagcccagggcgtgctgttcgactgcgacggcgtgctgtggaacggcgagagagccgtgcccggcgcccccgagctgctggagagactggccagagccggcaaggccgccctgttcgtgagcaacaacagcagaagagccagacccgagctggccctgagattcgccagactgggcttcggcggcctgagagccgagcagctgttcagcagcgccctgtgcgccgccagactgctgagacagagactgcccggcccccccgacgcccccggcgccgtgttcgtgctgggcggcgagggcctgagagccgagctgagagccgccggcctgagactggccggcgaccccagcgccggcgacggcgccgcccccagagtgagagccgtgctggtgggctacgacgagcacttcagcttcgccaagctgagagaggcctgcgcccacctgagagaccccgagtgcctgctggtggccaccgacagagacccctggcaccccctgagcgacggcagcagaacccccggcaccggcagcctggccgccgccgtggagaccgccagcggcagacaggccctggtggtgggcaagcccagcccctacatgttcgagtgcatcaccgagaacttcagcatcgaccccgccagaaccctgatggtgggcgacagactggagaccgacatcctgttcggccacagatgcggcatgaccaccgtgctgaccctgaccggcgtgagcagactggaggaggcccaggcctacctggccgccggccagcacgacctggtgccccactactacgtggagagcatcgccgacctgaccgagggcctggaggactag

SEQ ID NO: 203531 - DNA, 240 bp, Artificial Sequence
  derived and/or modified sequence
atgttcgagtgcatcaccgagaacttcagcatcgaccccgccagaaccctgatggtgggcgacagactggagaccgacatcctgttcggccacagatgcggcatgaccaccgtgctgaccctgaccggcgtgagcagactggaggaggcccaggcctacctggccgccggccagcacgacctggtgccccactactacgtggagagcatcgccgacctgaccgagggcctggaggactag

SEQ ID NO: 203532 - DNA, 891 bp, Artificial Sequence
  derived and/or modified sequence
atggcaagatgcgagcggctgcggggggctgccctccgggacgtactggggcgcgcccagggggttcttttcgactgcgacggtgtactgtggaacggcgagcgggctgtccctggggccccagagctgctcgagcgcctggctcgtgctggtaaggcagccctattcgtcagtaataacagtcgccgtgctcgcccagagttagctcttcgatttgcccgtctaggcttcggcggcctcagagctgaacagctgttcagcagtgctctctgcgcggcacggctgttgcggcagagactaccaggccctccagacgctcccggggctgtgttcgttctcgggggtgaggggctcagagctgaattacgcgcggccggcctgagactggctggagacccttctgctggcgatggtgcagctcccagagtgcgcgcagttctcgtcggatatgacgaacactttagctttgctaagctcagggaggcctgtgctcacctgcgtgaccctgaatgtctgttggtggcaactgaccgcgacccctggcacccactcagcgatggctccaggactccagggaccgggtctcttgcagcggccgtggagacagcgtcaggaagacaggcactcgtcgtggggaaaccctctccttacatgttcgagtgcatcactgagaatttctcaatcgacccagcccgaactctgatggttggggaccggttggaaacagatatcctgttcggccaccgttgcggaatgaccaccgttttgactctcacaggcgtcagccgacttgaagaggctcaagcatacctggctgccggccagcatgatttagtcccccactactacgtagaaagcattgcagacctcactgagggactcgaggactag

SEQ ID NO: 203533 - DNA, 240 bp, Artificial Sequence
  derived and/or modified sequence
atgtttgagtgtattaccgagaatttcagtattgatccagccaggacgttaatggttggagatcggctggagaccgacattttgtttgggcatcgctgtggtatgacgacagtgttgaccctcaccggagtctcccgtctggaggaagcccaggcctatcttgctgcaggccagcacgacttagtgccccattattacgttgagtccatcgccgacctgactgagggcctggaggattag

SEQ ID NO: 203534 - DNA, 891 bp, Artificial Sequence
  derived and/or modified sequence
atggcccgctgtgagcggctgcggggggccgccctgagagatgtgctgggccgggcccagggcgtgctgtttgactgtgatggagtgctgtggaatggagagagagctgtgcctggggcccctgagctgctggagcggctggcccgggccggcaaggccgccctgtttgtgagcaacaacagccggcgggcccggcctgagctggccctgcgctttgcccggctgggctttggaggcctgcgggcagagcagctgttcagcagcgccctgtgtgccgcccggctgctgcggcagaggctgcccggccccccagatgcccctggagctgtgtttgtgctgggcggggagggcctgcgggcagagctgcgggctgctggcctgcggctggccggggaccccagcgctggagatggagctgccccccgggtgcgggctgtgctggtgggctatgatgagcacttctcctttgccaagctgcgggaggcctgtgcccacctgcgggaccctgagtgcctgctggtggccacagaccgggacccctggcaccccctgagtgatggcagcaggaccccaggcaccggcagcctggccgctgctgtggagacagccagcggccggcaggccctggtggtgggcaagcccagcccctacatgtttgagtgcatcacagagaacttcagcattgatcctgcccggaccctgatggtgggggaccggctggagacagacatcctgtttggccaccgctgtggcatgaccaccgtgctgaccctgactggagtgtcccggctggaggaggcccaggcctacctggccgccggccagcacgacctggtgccccactactacgtggagagcattgctgacctgacagagggcctggaggactag

SEQ ID NO: 203535 - DNA, 240 bp, Artificial Sequence
  derived and/or modified sequence
atgtttgagtgcatcacagagaacttcagcattgatcctgcccggaccctgatggtgggggaccggctggagacagacatcctgtttggccaccgctgtggcatgaccaccgtgctgaccctgactggagtgtcccggctggaggaggcccaggcctacctggccgccggccagcacgacctggtgccccactactacgtggagagcattgctgacctgacagagggcctggaggactag

SEQ ID NO: 203536 - DNA, 891 bp, Artificial Sequence
  derived and/or modified sequence
atggcccggtgcgagcggctgcggggcgccgccctgcgggacgtgctaggacgcgcacagggcgtgctgttcgattgtgacggggtcctctggaacggagaacgggccgtcccgggtgctcctgagttgcttgagcggcttgcccgcgccgggaaagcagcgctatttgtatccaacaactcccgccgggctagacccgagctggcactcagattcgccagattgggttttggcggcctccgcgctgaacagctcttcagctcagctctgtgtgcagccagactgctgagacagagactcccagggcctccagacgccccaggtgctgtatttgtactcggcggagagggactgagggctgaactgcgcgccgcaggacttcgtctggccggggacccctctgccggcgacggcgcggcaccaagggtccgcgcagtgctcgtaggatacgacgaacatttcagtttcgcaaagctccgggaggcttgtgcccacctgagggatcctgagtgcctcttggtcgctaccgatagggacccttggcacccactgtccgatggatcgcgcaccccaggcaccggctccctggctgcggccgtggagaccgctagtggtagacaggccctcgtcgtgggtaagccgtctccctacatgttcgaatgtatcacagagaatttctcaatcgaccctgctcgaacactcatggtgggagatcggcttgagacagacattctgttcggacaccgttgcgggatgacgaccgtgttgacactgaccggagtcagcagactggaggaggcacaggcttatttggctgccggtcagcatgacctcgtgccacactactacgtcgagagtatcgccgatctgacagaggggctggaagactag

SEQ ID NO: 203537 - DNA, 240 bp, Artificial Sequence
  derived and/or modified sequence
atgttcgagtgcatcaccgagaacttcagcatcgaccccgcccggaccctcatggtaggcgaccgccttgagacggacatcttgtttgggcatcggtgcggcatgactacagttttgactctcactggtgtgtcccgattagaggaagcgcaagcttacttggctgctggacagcatgacttagtcccacattactacgtcgagagcatcgcggacttaacagaaggcctcgaagattag

SEQ ID NO: 203538 - DNA, 891 bp, Artificial Sequence
  derived and/or modified sequence
atggcccgttgtgagaggctcagaggagcagcgctacgggacgtactagggagggctcagggagtgctgtttgactgcgacggggtgctgtggaacggtgaaagggcagtgcctggagcacctgagttgcttgagagactcgccagggccggaaaggctgctcttttcgtgagtaacaatagtaggcgcgcacgaccagagttggcccttcgattcgcacgcctgggctttggaggtttacgcgctgaacagctgttcagtagcgcactgtgcgcagcccgtctcctgcgccagcggctccctggacctcctgacgccccaggcgctgtcttcgtgttagggggagaggggctcagggccgaactgcgggctgcgggtctaaggctggctggggatccttctgcgggtgacggcgctgctccaagggtgcgtgccgttcttgtcggctatgatgaacatttttcattcgccaagctgagagaagcctgtgcccacttgcgggatcctgaatgtctcttggtcgcgacggacagagatccatggcaccctctgagcgatggtagtaggactccaggtactggcagcctggctgccgcagtggaaactgccagtggccgacaggcactcgtcgtgggtaaaccctctccttacatgttcgagtgcataacagagaattttagcattgatcctgcccgtaccttgatggttggggaccggctagagacggatattctgtttggacacaggtgcggaatgacaacagtgctgaccctgacaggggttagccgtttggaagaagcccaggcatacctcgcggcaggccaacatgacttggtcccacattattacgtagagagcatcgccgacctaacagagggtcttgaggattag

SEQ ID NO: 203539 - DNA, 240 bp, Artificial Sequence
  derived and/or modified sequence
atgtttgagtgtataaccgagaactttagtatcgaccctgcccgtaccttgatggtgggcgatcgcttggaaaccgatattctatttggacatcggtgcggtatgactacagtactcacgctgaccggcgtgtctcgcctcgaggaagcccaggcttacctagctgccggacagcacgatcttgtaccacattactacgtcgagagtatcgcggacctcactgaggggctcgaggactag

SEQ ID NO: 203540 - DNA, 2010 bp, Artificial Sequence
  derived and/or modified sequence
gcgcgccgtgcccgcggagagagcgcggcgcgggaggccggcggccggccggctgcatggcgcgctgcgagaggctgcgcggagcggccctgcgcgacgtgctgggccgggcgcagggggtcctgttcgactgtgacggggtgctgtggaacggcgagcgcgccgtgccgggcgccccggagctgctggagcggctggcgcgggccggcaaggcggctctgtttgtgagcaacaacagccggcgcgcgcggcccgagctggccctgcgcttcgcgcgcctcggcttcggggggctgcgcgccgagcagctcttcagctccgcgctgtgcgccgcgcgcctgctgcgccagcgcctgcccgggcctccggacgcgccgggcgccgtgttcgtgctgggcggcgaggggctgcgcgccgagctgcgcgccgcggggctgcgcctggccggggacccgagcgcgggggacggcgcggccccgcgcgtgcgcgccgtgcttgtgggctacgacgagcacttctccttcgccaagctgagggaggcgtgcgcgcacctgcgcgaccccgagtgcctactcgtggccaccgaccgtgacccatggcacccgctgagcgacggcagccggacccctggcaccgggagcctggccgctgcagtggagacagcctcgggacgccaggccctggtggtgggcaagcccagcccctacatgttcgagtgcatcacggagaacttcagcatcgaccccgcacgcacgcttatggtgggtgaccgcctggagaccgacatcctctttggccaccgctgcggcatgaccactgtgctcacgctcacaggagtctcccgcctagaagaggcccaggcctacctagcggccggccagcacgacctcgtgccccattactatgtggagagcatcgcagacttgacagaggggttggaggactgagcccactgcacctgcagccacaggcccacccctccccactccctgatcccgtaggtggaggcgatgggtcacgagccatgttaagcacaaccggctccttggtccagttctgcaccggggtggggctgggacccggggaaggtttgagggcccttgcaaccccctcccagcagtggctgggcactctttgctgccccagaagctggtcccctatggattcatcttggcctgacccagccaggtggccttatttcttccctgtcacctcccctccttgaaatctgggccctggtgcctgctgaagattccctctatccctgagtacttagtcttctcccccttccctggggcttctagagctctctctgcccctcaggtcctggcccttgggtccttgtcaaccagaggtctagggaaccacaacccttattgtcctgggtggaccaatccaaaggctaagtgatagtgactcatcaatgttgggtcctgtggggtaccagtttaggttcctaagtaatagtgaccctttcacgtcctggagcccgagtggaccaatcggaagcctaagtgacgatgaccctcgcatgtcctaggtccctgggtggacccatcaggaccccaagtgatagtgacccagtggtcttttagatcctcagtagaacagtccagaagcctgagagacagtggccccttgataatctgggtctcacgggaccagctaggggtccaggtttcagtcagtaaataagagtggtccacgtcctaaagacacctctcctttacaaagacttgtgatgctctggggcttctgtggccaagccccaccctttcctggtcatggtacccgtacagcgttgatggccacagctcgaaggggggctttcgtgtccccctgtgcggtcagtgttttcagtaccacctctctcccgtgcccacttggctatttacttatttatttattgtgtgccagtgatggtgggtgggggctgggccttccccgccacctccacccctgttgtgacctgtccttccgtacttaataaagtgcgcgtgggagtgttca

SEQ ID NO: 203541 - DNA, 1571 bp, Artificial Sequence
  derived and/or modified sequence
atcactttcccgggggacgcggactgggtcagaggtgcgaacatttctgtgccccgctgtgttccaaaggggctgtgccagtttctaacgccagccgcgtgaattcctgcagcagtaaccacaactgctatttgttaagtgctgttccatttacaaagcacttgcccctgtgttgcccagcgcccgtttggaggcaccgggagcctggccgctgcagtggagacagcctcgggacgccaggccctggtggtgggcaagcccagcccctacatgttcgagtgcatcacggagaacttcagcatcgaccccgcacgcacgcttatggtgggtgaccgcctggagaccgacatcctctttggccaccgctgcggcatgaccactgtgctcacgctcacaggagtctcccgcctagaagaggcccaggcctacctagcggccggccagcacgacctcgtgccccattactatgtggagagcatcgcagacttgacagaggggttggaggactgagcccactgcacctgcagccacaggcccacccctccccactccctgatcccgtaggtggaggcgatgggtcacgagccatgttaagcacaaccggctccttggtccagttctgcaccggggtggggctgggacccggggaaggtttgagggcccttgcaaccccctcccagcagtggctgggcactctttgctgccccagaagctggtcccctatggattcatcttggcctgacccagccaggtggccttatttcttccctgtcacctcccctccttgaaatctgggccctggtgcctgctgaagattccctctatccctgagtacttagtcttctcccccttccctggggcttctagagctctctctgcccctcaggtcctggcccttgggtccttgtcaaccagaggtctagggaaccacaacccttattgtcctgggtggaccaatccaaaggctaagtgatagtgactcatcaatgttgggtcctgtggggtaccagtttaggttcctaagtaatagtgaccctttcacgtcctggagcccgagtggaccaatcggaagcctaagtgacgatgaccctcgcatgtcctaggtccctgggtggacccatcaggaccccaagtgatagtgacccagtggtcttttagatcctcagtagaacagtccagaagcctgagagacagtggccccttgataatctgggtctcacgggaccagctaggggtccaggtttcagtcagtaaataagagtggtccacgtcctaaagacacctctcctttacaaagacttgtgatgctctggggcttctgtggccaagccccaccctttcctggtcatggtacccgtacagcgttgatggccacagctcgaaggggggctttcgtgtccccctgtgcggtcagtgttttcagtaccacctctctcccgtgcccacttggctatttacttatttatttattgtgtgccagtgatggtgggtgggggctgggccttccccgccacctccacccctgttgtgacctgtccttccgtacttaataaagtgcgcgtgggagtgtt

SEQ ID NO: 203542 - protein, 205 aa, Artificial Sequence
  derived and/or modified sequence
FQSVESSTRKLDHINICSSNFPKRSFALVTQAGVQWHNLDSLQSPPPGFKRFPCLSLPSSWDCREVADFQLSVDSLLEKDNDHSRPDIQVQAKRLAEKLRCDTVVSEISTGQRTVNFKINRELLTKTVLQQVIEDGSKYGLKSELFSGLPQKKIVVEFSSPNVAKKFHVGHLRSTIIGNFIANLKEALGHQVIRINYLGDWGMQF

SEQ ID NO: 203543 - protein, 578 aa, Artificial Sequence
  derived and/or modified sequence
MACGFRRAIACQLSRVLNLPPENLITSISAVPISQKEEVADFQLSVDSLLEKDNDHSRPDIQVQAKRLAEKLRCDTVVSEISTGQRTVNFKINRELLTKTVLQQVIEDGSKYGLKSELFSGLPQKKIVVEFSSPNVAKKFHVGHLRSTIIGNFIANLKEALGHQVIRINYLGDWGMQFGLLGTGFQLFGYEEKLQSNPLQHLFEVYVQVNKEAADDKSVAKAAQEFFQRLELGDVQALSLWQKFRDLSIEEYIRVYKRLGVYFDEYSGESFYREKSQEVLKLLESKGLLLKTIKGTAVVDLSGNGDPSSICTVMRSDGTSLYATRDLAAAIDRMDKYNFDTMIYVTDKGQKKHFQQVFQMLKIMGYDWAERCQHVPFGVVQGMKTRRGDVTFLEDVLNEIQLRMLQNMASIKTTKELKNPQETAERVGLAALIIQDFKGLLLSDYKFSWDRVFQSRGDTGVFLQYTHARLHSLEETFGCGYLNDFNTACLQEPQSVSILQHLLRFDEVLYKSSQDFQPRHIVSYLLTLSHLAAVAHKTLQIKDSPPEVAGARLHLFKAVRSVLANGMKLLGITPVCRM

SEQ ID NO: 203544 - protein, 206 aa, Artificial Sequence
  derived and/or modified sequence
  misc_feature (1)..(1): Xaa can be any naturally occurring amino acid
XFQSVESSTRKLDHINICSSNFPKRSFALVTQAGVQWHNLDSLQSPPPGFKRFPCLSLPSSWDCREVADFQLSVDSLLEKDNDHSRPDIQVQAKRLAEKLRCDTVVSEISTGQRTVNFKINRELLTKTVLQQVIEDGSKYGLKSELFSGLPQKKIVVEFSSPNVAKKFHVGHLRSTIIGNFIANLKEALGHQVIRINYLGDWGMQF

SEQ ID NO: 203545 - DNA, 1737 bp, Artificial Sequence
  derived and/or modified sequence
atggcttgtggtttcaggcgagccatagcttgccagttgtccagagtcctgaacctccccccggagaacctcattaccagcatcagcgcggtccccatctcgcagaaagaggaagtcgccgactttcagttatctgtggattccctgctggagaaggacaatgaccattctcgtccagatatacaggtgcaggcgaaacgcctcgccgaaaagcttcggtgcgacaccgtggtgtccgagatctctacgggccagaggacggtaaattttaagatcaatcgcgagctcttaactaaaaccgtgctgcagcaagtgattgaggacggttcaaaatacggcctcaagtctgaactgttttctggcttgccacagaaaaagatcgtcgtggaatttagctcacctaatgttgcaaagaagttccatgtggggcacttgagaagcacaatcattggtaacttcatagctaacctgaaggaagcacttggacaccaggtcatcagaataaattacctgggggactgggggatgcagttcggccttctcggcacaggctttcagctgttcggctacgaagaaaagctgcagtccaatccactgcagcatctgttcgaggtttacgttcaagtaaacaaggaggccgcagatgacaagagtgtcgccaaggcagcccaagagttctttcaaaggctggagctgggtgacgtgcaggcccttagcctttggcaaaaatttcgggaccttagcatcgaagaatatatacgtgtttacaagcgattaggcgtgtactttgacgaatattcaggggaaagcttttacagagaaaagtcccaggaagtactcaaactgctagagtcaaagggactgctgttaaagacaattaaaggaacggccgtagtggacctgagcggcaacggggatccgtcctctatctgtacggtgatgcggtctgacggcacctctttgtacgccactagggatttggccgcggcaattgatcggatggacaaatataacttcgacaccatgatctatgtcaccgataagggtcagaaaaagcatttccaacaggtttttcaaatgctgaagataatgggctatgactgggcggagcgttgccagcatgttccgttcggagtggtgcagggtatgaaaacacgtcgcggggatgtgacttttttggaggatgtgttgaatgaaatccaactgcgaatgttgcagaacatggcttccatcaaaaccacgaaggagctgaaaaacccccaggagactgctgagcgggtgggattagccgccttaatcattcaggattttaagggtctcctgttgagcgactataaattctcatgggatcgggtgtttcagagtcggggtgatacgggtgtcttcctacagtatacccacgccaggttacactctctggaagagacgttcggctgcggctatctgaacgatttcaatacggcatgtctacaagagccccagtccgtgagcattttacagcatctccttaggtttgatgaggttttatacaagagcagccaggacttccagccgcgccatatcgttagttaccttcttactctgagtcacctggcggcagtggcacataaaactttgcagattaaggacagtccaccagaggttgccggcgccaggctccatctgttcaaagcggtcaggagcgtgcttgccaatggcatgaagctgctcgggataacaccagtctgtaggatgtag

SEQ ID NO: 203546 - DNA, 1737 bp, Artificial Sequence
  derived and/or modified sequence
atggcctgtggcttccggcgggccatcgcctgccagctgagccgggtgctgaacctgcccccagagaacctgatcaccagcatctctgctgtgcccatcagccagaaggaggaggtggccgacttccagctgtctgtggacagcctgctggagaaggacaatgaccacagcaggccagacatccaggtgcaggccaagaggctggccgagaagctgcgctgtgacacagtggtgtctgagatcagcacaggccagaggacagtgaacttcaagatcaaccgggagctgctgaccaagacagtgctgcagcaggtgattgaagatggcagcaaatatggcctgaagtctgagctgttcagcggcctgccccagaagaagatcgtggtggagttcagcagccccaacgtggccaagaagttccacgtgggccacctgcggagcaccatcatcggcaacttcatcgccaacctgaaggaggccctgggccaccaggtgatccgcatcaactacctgggggactggggcatgcagtttggcctgctgggcaccggcttccagctgtttggctatgaggagaagctgcagagcaaccccctgcagcacctgtttgaggtgtatgtgcaggtgaacaaggaggccgcagatgacaagtctgtggccaaggccgcccaggagttcttccagaggctggagctgggagatgtgcaggccctgagcctgtggcagaagttccgggacctgagcattgaggagtacatccgggtgtacaagaggctgggcgtgtactttgatgagtacagcggggagagcttctaccgggagaagagccaggaggtgctgaagctgctggagagcaagggcctgctgctgaagaccatcaagggcacagctgtggtggacctgtctggaaatggagaccccagcagcatctgcaccgtgatgagaagtgatggcaccagcctgtatgccacccgggacctggccgccgccatcgacaggatggacaagtacaactttgacaccatgatctacgtgacagacaagggccagaagaagcacttccagcaggtgttccagatgctgaagatcatgggctatgactgggccgagcgctgccagcacgtgccctttggagtggtgcagggcatgaagaccaggagaggagatgtgaccttcctggaggatgtgctgaatgagatccagctgaggatgctgcagaacatggccagcatcaagaccaccaaggagctgaagaacccccaggagacagctgagcgggtgggcctggccgccctgatcatccaggacttcaagggcctgctgctgagtgactacaagttctcctgggacagagtcttccagagcagaggagacacaggagtcttcctgcagtacacccacgcccggctgcacagcctggaggagaccttcggctgcggctacctgaatgacttcaacacagcctgcctgcaggagccccagagcgtgtccatcctgcagcacctgctgcgctttgatgaggtgctgtacaagagcagccaggacttccagcccaggcacatcgtgtcctacctgctgaccctgagccacctggccgctgtggcccacaagaccctgcagatcaaggacagccccccagaggtggccggggcccggctgcacctgttcaaggctgtgcgctctgtgctggccaacggcatgaagctgctgggcatcacccctgtgtgcaggatgtag

SEQ ID NO: 203547 - DNA, 1737 bp, Artificial Sequence
  derived and/or modified sequence
atggcctgcggcttccggcgggccatcgcctgccagctgagccgggttttaaatctacctccagagaacctcattacaagcattagcgccgtacccattagtcagaaagaggaagtggcggattttcagttatcagtggatagcttgctcgagaaggataacgaccatagcagacctgatatacaagttcaggccaagaggctggcggagaagcttcggtgcgacacggtggtatccgagatcagtacaggacaacgcactgtcaactttaaaattaaccgagaactgctgactaagacagtgctgcaacaagtaatcgaggatgggagcaagtatggcctaaagagtgaacttttcagcggcctgccgcagaagaaaattgttgtggagttcagcagtccgaacgtcgccaagaaattccacgtcggacatctgaggtccaccatcataggaaatttcatcgctaacctgaaagaggccttgggtcatcaagtgatacggattaactatctcggcgactggggcatgcaatttggccttttgggaactggcttccaactttttggatacgaggagaaactccagtccaaccccctccagcatctctttgaagtgtacgtgcaggtgaataaggaggccgcggatgacaaatccgtcgctaaagccgcccaggaatttttccagaggctggagctcggcgacgtacaggccttgagcctttggcagaaatttagggatcttagcattgaggagtacatcagggtctataaaagactcggagtgtactttgacgagtattcaggggagagcttttatagagagaaatcccaagaagtcctgaagctactggagagtaagggcctgctactaaaaaccatcaagggaacggccgtggtagacctgtcaggcaatggggacccatcaagcatatgtaccgtcatgaggagtgatggaacttctttgtacgcgaccagagatctagcggccgcaattgatcggatggataagtataacttcgacactatgatctacgtcactgataaggggcaaaaaaagcatttccagcaggttttccagatgctgaagataatgggctatgactgggcggagcgatgtcagcatgtgcccttcggagtcgtccaggggatgaagactaggcggggtgatgttacctttttagaagatgtgttgaacgaaatccaacttcggatgctacagaacatggcttccattaaaacaaccaaagaactgaaaaatccacaagaaacagcagaacgggtcggcttggctgcgttgatcatccaggattttaaggggctgctgttgagtgactacaaattctcatgggatcgcgtcttccagtcccgaggcgatacaggcgttttcctacagtatacacatgcccgcttgcatagtctggaggagaccttcgggtgtggatacttgaatgatttcaacaccgcgtgcctccaggaaccacagtctgtatctatcctgcaacacctcctgagatttgacgaggtcctctacaagtcatcccaggactttcagcccaggcatatcgtgtcctacttgttaaccctgagccacctcgcagcagttgcacacaaaaccctgcagatcaaagactccccccctgaggtggccggcgcaaggcttcatctgtttaaggccgtgagaagcgttctcgcgaatggaatgaagctactgggcattacgccagtgtgtcggatgtag

SEQ ID NO: 203548 - DNA, 1737 bp, Artificial Sequence
  derived and/or modified sequence
atggcctgtggctttcgccgagcgattgcctgccagctctctcgcgtgctgaacctcccacccgaaaatctaataacttcgattagcgccgtgccaatttcacagaaggaggaggtcgcagatttccaactcagcgtcgactctctactggagaaagacaatgaccactccaggcccgacatccaggtccaggccaagaggctcgccgagaagctgcggtgcgacacagtcgtgtctgagatctctaccggacagcgcactgtgaacttcaaaatcaatcgagagctgctgactaaaactgtacttcagcaagtcatcgaggacgggtccaagtacggtctgaagtcagagctgttttccggactccctcagaaaaaaatagtggtggagttctcttccccaaatgtagcaaagaagttccacgttggacacctgcgctccaccataatagggaacttcattgccaatctgaaagaggccctggggcaccaggtgattagaattaattatctgggcgattggggcatgcagttcggattgctaggaaccggtttccagctcttcgggtacgaggagaagctacagtcaaaccccctgcagcatctcttcgaggtgtacgtgcaggtcaataaggaggctgccgacgacaagagtgtcgctaaagcggcacaggagttcttccagaggctggagctgggggatgtgcaggctctgagcctctggcaaaaattcagggacctctcaatcgaggaatacatacgagtgtacaaacgcctcggcgtgtacttcgatgaatattctggagagagcttttacagagagaagtcacaggaagtgttgaagctcctggaatctaagggcctgctgctcaaaaccatcaagggtactgctgtagtggatctaagtggtaatggagatccaagcagcatttgtacggtgatgcgaagcgatggcacatctctttacgccactcgcgacctcgcagcagctatagatagaatggataaatacaacttcgacacaatgatctacgtcacggacaaaggccagaaaaaacacttccaacaggttttccagatgctgaagatcatgggatatgattgggccgagaggtgccagcacgtgccgtttggggtcgtccagggcatgaagacccgcaggggggatgtgacatttttagaagacgtgctgaacgagattcaactgcggatgttgcagaatatggccagcatcaagacaacaaaagagctcaagaatcctcaagagaccgccgaaagagtgggcttagcagccctgatcatccaggatttcaaaggcttgttgctgagtgactacaaattcagctgggatcgcgtgttccagagccgtggtgacacaggagtttttttgcagtacacccatgcaagattgcatagcctggaggagacgttcggttgtggatacctgaacgactttaataccgcctgcctccaagagccacagagtgtgagtattttacagcatctcctgagatttgatgaggtgttgtataaatcatcacaagatttccaaccacgccatattgtgtcttatctgctaactctttctcatctggccgcagtagctcataaaactcttcaaataaaggacagcccacccgaggttgccggagctcggcttcatttgtttaaggcggtgaggtctgtgctggcaaacggcatgaagctgttgggcatcacccccgtttgccgtatgtag

SEQ ID NO: 203549 - DNA, 1949 bp, Artificial Sequence
  derived and/or modified sequence
ataaggaggtggggcgaggccggaactggcggactgcggcgcacttccgtagaggtggacatggcgtgcggctttcgccgcgctattgcttgccagctttccagagtgttgaatcttccaccagaaaacttgatcacatcaatatctgcagttccaatttcccaaaaagaagtttcgctcttgtcacccaggctggagtgcagtggcacaatcttgactcgctgcagtctccacctccaggattcaagcgattcccctgcctcagtctcccaagcagctgggattgtagagaagtagctgattttcagctttctgtggattctttattggaaaaagacaatgaccattcaagaccagatattcaagttcaagccaagagactagcagagaagctaagatgtgatacagtggtgagtgaaatcagtactggtcaaaggactgtaaatttcaaaataaacagagagctcttaacaaagacagtgctacaacaagtaattgaagatggctcaaaatatggattaaaaagtgaacttttctctggacttccccagaagaagattgtggttgaattcagttcacctaatgttgccaaaaaatttcatgttggacatttgcgttctaccatcataggaaattttatagcaaatctcaaagaagctttaggacatcaagtaataagaataaattaccttggcgattggggcatgcagtttggtcttctgggaactggcttccagctgtttggctatgaggaaaaactgcagtccaatcctctacagcatctctttgaagtttatgtacaagttaataaagaagcagcagatgataaaagtgtagcaaaagcagcacaggagttcttccaacgattggaactgggcgatgtgcaagcactttcactgtggcaaaaatttcgggacttgagcattgaagagtacattcgggtttacaagcgtctgggagtatattttgatgaatattcaggagaatcattttatcgtgaaaaatctcaagaggtcttaaagttgctggagagtaaaggactcctactgaaaacaataaaaggaacggctgtagtagatctctctgggaatggcgacccctcctcaatttgtactgtaatgcgaagtgatgggacttctctctatgcaaccagagatcttgcagctgctatagatcgaatggacaagtataattttgatacaatgatatatgtgacagataaaggacaaaaaaagcattttcagcaagtattccaaatgctgaagatcatgggatatgactgggcagaaaggtgccagcacgtgccctttggagtagtacagggaatgaagactcgaagaggagatgtcactttcctggaagatgttttaaatgagattcaattaaggatgctacagaacatggcttcaattaagacaactaaagaactcaagaacccacaagagactgcagagagggtcgggctcgcagcactcattattcaggacttcaaaggtttactcttatctgactacaagttcagctgggatcgtgttttccagagtcgcggggacacaggagtcttcctacagtacacacacgcccgcctccacagtttggaagagacttttggatgtgggtacctgaatgacttcaacactgcttgtttacaagagccacagtctgtttcaattcttcagcatcttctcaggttcgacgaggtgctttataaatcatctcaggactttcaacccaggcatatcgtcagttaccttctaactttaagtcatcttgcagctgtggcacacaaaacactacaaataaaagatagtcctcctgaagtggctggggccagacttcatcttttcaaagctgtccgttctgtcctagccaatggaatgaaacttcttggaataacacctgtatgtaggatgtaatttccattaaaatggcttttaaaatgtcaagtg

SEQ ID NO: 203550 - DNA, 1818 bp, Artificial Sequence
  derived and/or modified sequence
cgaggccggaactggcggactgcggcgcacttccgtagaggtggacatggcgtgcggctttcgccgcgctattgcttgccagctttccagagtgttgaatcttccaccagaaaacttgatcacatcaatatctgcagttccaatttcccaaaaagaagaagtagctgattttcagctttctgtggattctttattggaaaaagacaatgaccattcaagaccagatattcaagttcaagccaagagactagcagagaagctaagatgtgatacagtggtgagtgaaatcagtactggtcaaaggactgtaaatttcaaaataaacagagagctcttaacaaagacagtgctacaacaagtaattgaagatggctcaaaatatggattaaaaagtgaacttttctctggacttccccagaagaagattgtggttgaattcagttcacctaatgttgccaaaaaatttcatgttggacatttgcgttctaccatcataggaaattttatagcaaatctcaaagaagctttaggacatcaagtaataagaataaattaccttggcgattggggcatgcagtttggtcttctgggaactggcttccagctgtttggctatgaggaaaaactgcagtccaatcctctacagcatctctttgaagtttatgtacaagttaataaagaagcagcagatgataaaagtgtagcaaaagcagcacaggagttcttccaacgattggaactgggcgatgtgcaagcactttcactgtggcaaaaatttcgggacttgagcattgaagagtacattcgggtttacaagcgtctgggagtatattttgatgaatattcaggagaatcattttatcgtgaaaaatctcaagaggtcttaaagttgctggagagtaaaggactcctactgaaaacaataaaaggaacggctgtagtagatctctctgggaatggcgacccctcctcaatttgtactgtaatgcgaagtgatgggacttctctctatgcaaccagagatcttgcagctgctatagatcgaatggacaagtataattttgatacaatgatatatgtgacagataaaggacaaaaaaagcattttcagcaagtattccaaatgctgaagatcatgggatatgactgggcagaaaggtgccagcacgtgccctttggagtagtacagggaatgaagactcgaagaggagatgtcactttcctggaagatgttttaaatgagattcaattaaggatgctacagaacatggcttcaattaagacaactaaagaactcaagaacccacaagagactgcagagagggtcgggctcgcagcactcattattcaggacttcaaaggtttactcttatctgactacaagttcagctgggatcgtgttttccagagtcgcggggacacaggagtcttcctacagtacacacacgcccgcctccacagtttggaagagacttttggatgtgggtacctgaatgacttcaacactgcttgtttacaagagccacagtctgtttcaattcttcagcatcttctcaggttcgacgaggtgctttataaatcatctcaggactttcaacccaggcatatcgtcagttaccttctaactttaagtcatcttgcagctgtggcacacaaaacactacaaataaaagatagtcctcctgaagtggctggggccagacttcatcttttcaaagctgtccgttctgtcctagccaatggaatgaaacttcttggaataacacctgtatgtaggatgtaatttccattaaaatggcttttaaaatgtcaagtgaa

SEQ ID NO: 203551 - DNA, 1737 bp, Artificial Sequence
  derived and/or modified sequence
atggcctgcggcttcagaagagccatcgcctgccagctgagcagagtgctgaacctgccccccgagaacctgatcaccagcatcagcgccgtgcccatcagccagaaggaggaggtggccgacttccagctgagcgtggacagcctgctggagaaggacaacgaccacagcagacccgacatccaggtgcaggccaagagactggccgagaagctgagatgcgacaccgtggtgagcgagatcagcaccggccagagaaccgtgaacttcaagatcaacagagagctgctgaccaagaccgtgctgcagcaggtgatcgaggacggcagcaagtacggcctgaagagcgagctgttcagcggcctgccccagaagaagatcgtggtggagttcagcagccccaacgtggccaagaagttccacgtgggccacctgagaagcaccatcatcggcaacttcatcgccaacctgaaggaggccctgggccaccaggtgatcagaatcaactacctgggcgactggggcatgcagttcggcctgctgggcaccggcttccagctgttcggctacgaggagaagctgcagagcaaccccctgcagcacctgttcgaggtgtacgtgcaggtgaacaaggaggccgccgacgacaagagcgtggccaaggccgcccaggagttcttccagagactggagctgggcgacgtgcaggccctgagcctgtggcagaagttcagagacctgagcatcgaggagtacatcagagtgtacaagagactgggcgtgtacttcgacgagtacagcggcgagagcttctacagagagaagagccaggaggtgctgaagctgctggagagcaagggcctgctgctgaagaccatcaagggcaccgccgtggtggacctgagcggcaacggcgaccccagcagcatctgcaccgtgatgagaagcgacggcaccagcctgtacgccaccagagacctggccgccgccatcgacagaatggacaagtacaacttcgacaccatgatctacgtgaccgacaagggccagaagaagcacttccagcaggtgttccagatgctgaagatcatgggctacgactgggccgagagatgccagcacgtgcccttcggcgtggtgcagggcatgaagaccagaagaggcgacgtgaccttcctggaggacgtgctgaacgagatccagctgagaatgctgcagaacatggccagcatcaagaccaccaaggagctgaagaacccccaggagaccgccgagagagtgggcctggccgccctgatcatccaggacttcaagggcctgctgctgagcgactacaagttcagctgggacagagtgttccagagcagaggcgacaccggcgtgttcctgcagtacacccacgccagactgcacagcctggaggagaccttcggctgcggctacctgaacgacttcaacaccgcctgcctgcaggagccccagagcgtgagcatcctgcagcacctgctgagattcgacgaggtgctgtacaagagcagccaggacttccagcccagacacatcgtgagctacctgctgaccctgagccacctggccgccgtggcccacaagaccctgcagatcaaggacagcccccccgaggtggccggcgccagactgcacctgttcaaggccgtgagaagcgtgctggccaacggcatgaagctgctgggcatcacccccgtgtgcagaatgtag

SEQ ID NO: 203552 - protein, 549 aa, Artificial Sequence
  derived and/or modified sequence
MKPTSGPEEARRPASDIRVFASNCSMHGLGHVFGPGSLSLRRGMWAAAVVLSVATFLYQVAERVRYYREFHHQTALDERESHRLIFPAVTLCNINPLRRSRLTPNDLHWAGSALLGLDPAEHAAFLRALGRPPAPPGFMPSPTFDMAQLYARAGHSLDDMLLDCRFRGQPCGPENFTTIFTRMGKCYTFNSGADGAELLTTTRGGMGNGLDIMLDVQQEEYLPVWRDNEETPFEVGIRVQIHSQEEPPIIDQLGLGVSPGYQTFVSCQQQQLSFLPPPWGDCSSASLNPNYEPEPSDPLGSPSPSPSPPYTLMGCRLACETRYVARKCGCRMVYMPGDVPVCSPQQYKNCAHPAIDAMLRKDSCACPNPCASTRYAKELSMVRIPSRAAARFLARKLNRSEAYIAENVLALDIFFEALNYETVEQKKAYEMSELLGDIGGQMGLFIGASLLTILEILDYLCEVFRDKVLGYFWNRQHSQRHSSTNLLQEGLGSHRTQVPHLSLGPSTLLCSEDLPPLPVPSPRLSPPPTAPATLSHSSRPAVCVLGAPP

SEQ ID NO: 203553 - DNA, 1650 bp, Artificial Sequence
  derived and/or modified sequence
atgaagcctactagtggcccggaggaagctaggcggcctgcctcagatatccgggtgttcgcctcaaactgttccatgcatggactcggccatgtcttcggtccaggatccctatccctacggaggggtatgtgggccgcagccgtcgtgctaagtgtcgccacatttctgtatcaggtggcagagagggtgcggtattatcgcgagttccaccaccaaactgcgctagatgagcgggaatcccacaggctcatcttccccgcagtgactctgtgtaatatcaatccgctgcggcgatcacgcttaacccccaatgatctgcactgggccggctcagccttgttgggcctagaccccgctgagcatgcggcattcctacgggcactcggtcgcccgccggcaccgcctggattcatgcctagcccaacttttgacatggcacaactctatgctagagccgggcacagccttgacgacatgttgttggattgtagattccgcggccaaccctgcgggcctgagaattttaccactatcttcacacgcatgggcaaatgttatacctttaactctggagccgatggggccgagctgttgacaactactcggggggggatgggcaacggcctggacataatgttagacgtgcagcaggaagagtatctgcccgtgtggcgagacaacgaggagacccctttcgaagtcgggatccgggtgcagatccatagtcaggaagagcctccaatcattgaccaattgggactaggcgtctcccccggataccagacatttgtgagctgccaacagcaacagctgtcatttctcccaccgccttggggagattgcagttcagcttccctcaatcctaactatgaacccgagccgagtgaccctctcggcagcccatcaccctcgccatcccctccttacacgctcatgggctgtcgactggcctgtgagactcggtatgtagccaggaagtgtggctgtcgaatggtatatatgcccggtgacgtccctgtctgctccccacaacaatataagaactgcgcacaccccgcaattgacgcaatgttgcgtaaagattcttgtgcatgtcctaacccctgtgcatctacacggtacgctaaagagctgagtatggtgcggataccgtctcgggccgctgcccgttttctggctagaaaactgaaccgctcagaggcctatatagccgagaacgtccttgccctagacatattcttcgaggccctcaactacgaaaccgtcgagcagaaaaaggcgtatgagatgtcggaactcctcggagacatcgggggacaaatgggtctcttcatcggagcctccctgctcacaatcctggaaatcctggactacctttgcgaagtttttcgggataaagtgttagggtacttctggaatcgacaacacagccagagacacagctcgacaaatttactccaggaaggattgggctcacatcgtacccaggtgccacacctgtccctggggccttctaccttactgtgcagcgaggacctcccccccctaccagtgcctagccccagactatccccacctcccacagctcctgccaccctcagccatagcagcagacctgccgtctgcgtcttgggtgcacccccatag

SEQ ID NO: 203554 - DNA, 1650 bp, Artificial Sequence
  derived and/or modified sequence
atgaagcccaccagcggccctgaggaggcccggcggcctgccagtgacatccgggtgtttgccagcaactgcagcatgcacggcctgggccacgtgtttggacctggcagcctgagcctgcggcggggcatgtgggccgctgctgtggtgctgtctgtggccaccttcctgtaccaggtggccgagcgggtgcgctactaccgggagttccaccaccagacagccctggatgagcgggagagccacaggctcatcttccctgctgtgaccctgtgcaacatcaaccccctgcggcgcagccggctgaccccaaatgacctgcactgggccggcagcgccctgctgggcctggaccctgctgagcacgccgccttcctgcgggccctgggccggcccccagcccctcctggcttcatgcccagccccacctttgacatggcccagctgtatgcccgggccggccacagcctggatgacatgctgctggactgccgcttccggggccagccctgtggccctgagaacttcaccaccatcttcaccaggatgggcaagtgctacaccttcaacagcggggctgatggagctgagctgctgaccaccacccggggcggcatgggaaatggcctggacatcatgctggatgtgcagcaggaggagtacctgcctgtgtggagggacaatgaggagaccccatttgaggtgggcatccgggtgcagatccacagccaggaggagccccccatcatcgaccagctgggcctgggcgtgtccccaggctaccagacctttgtgtcctgccagcagcagcagctgtccttcctgcccccaccctggggagactgcagcagcgccagcctgaaccccaactatgagcctgagcccagcgaccccctgggcagccccagccccagccccagccccccctacaccctgatgggctgccgcctggcctgtgagaccaggtatgtggccaggaaatgtggctgcaggatggtgtacatgcctggagatgtgcctgtgtgcagcccccagcagtacaagaactgtgcccacccagccattgatgccatgctgaggaaggacagctgtgcctgccccaacccctgtgccagcaccaggtatgccaaggagctgtccatggtgcgcatccccagcagagctgctgcccgcttcctggccaggaagctgaacagaagtgaggcctacatcgccgagaatgtgctggccctggacatcttctttgaggccctgaactatgagaccgtggagcagaagaaggcctatgagatgtctgagctgctgggggacatcggcggccagatgggcctcttcatcggggccagcctgctgaccatcctggagatcctggactacctgtgtgaggtgttccgggacaaggtgctgggctacttctggaaccggcagcacagccagaggcacagcagcaccaacctgctgcaggagggcctgggcagccacaggacccaggtgccccacctgagcctgggccccagcaccctgctgtgcagcgaggacctgccccccctgcctgtgcccagcccccggctgagccccccacccacagccccagccaccctgagccacagcagcaggcctgctgtgtgtgtgctgggcgccccaccctag

SEQ ID NO: 203555 - DNA, 1718 bp, Artificial Sequence
  derived and/or modified sequence
atgaagcccacctcaggcccagaggaggcccggcggccagcctcggacatccgcgtgttcgccagcaactgctcgatgcacgggctgggccacgtcttcgggccaggcagcctgagcctgcgccgggggatgtgggcagcggccgtggtcctgtcagtggccaccttcctctaccaggtggctgagagggtgcgctactacagggagttccaccaccagactgccctggatgagcgagaaagccaccggctcatcttcccggctgtcaccctgtgcaacatcaacccactgcgccgctcgcgcctaacgcccaacgacctgcactgggctgggtctgcgctgctgggcctggatcccgcagagcacgccgccttcctgcgcgccctgggccggccccctgcaccgcccggcttcatgcccagtcccacctttgacatggcgcaactctatgcccgtgctgggcactccctggatgacatgctgctggactgtcgcttccgtggccaaccttgtgggcctgagaacttcaccacgatcttcacccggatgggaaagtgctacacatttaactctggcgctgatggggcagagctgctcaccactactaggggtggcatgggcaatgggctggacatcatgctggacgtgcagcaggaggaatatctacctgtgtggagggacaatgaggagaccccgtttgaggtggggatccgagtgcagatccacagccaggaggagccgcccatcatcgatcagctgggcttgggggtgtccccgggctaccagacctttgtttcttgccagcagcagcagctgagcttcctgccaccgccctggggcgattgcagttcagcatctctgaaccccaactatgagccagagccctctgatcccctaggctcccccagccccagccccagccctccctatacccttatggggtgtcgcctggcctgcgaaacccgctacgtggctcggaagtgcggctgccgaatggtgtacatgccaggcgacgtgccagtgtgcagcccccagcagtacaagaactgtgcccacccggccatagatgccatgcttcgcaaggactcgtgcgcctgccccaacccgtgcgccagcacgcgctacgccaaggagctctccatggtgcggatcccgagccgcgccgccgcgcgcttcctggcccggaagctcaaccgcagcgaggcctacatcgcggagaacgtgctggccctggacatcttctttgaggccctcaactatgagaccgtggagcagaagaaggcctatgagatgtcagagctgcttggtgacattgggggccagatggggctgttcatcggggccagcctgctcaccatcctcgagatcctagactacctctgtgaggtgttccgagacaaggtcctgggatatttctggaaccgacagcactcccaaaggcactccagcaccaatctgcttcaggaagggctgggcagccatcgaacccaagttccccacctcagcctgggccccagcactctgctctgttccgaagacctcccacccctccctgtgccgtcaccaagactctctccgcctcccaccgcacctgctaccttgtcacacagctctagacctgctgtctgtgtcctcggagccccgccctgacatcctggacatgcctagcctgcacgtagcttttccgtcttcaccccaaataaagtcctaatgcatca

SEQ ID NO: 203556 - DNA, 1650 bp, Artificial Sequence
  derived and/or modified sequence
atgaagcccaccagcggccccgaggaggcccggcggcccgccagcgatatacgtgtgtttgcgagtaactgttccatgcacggacttggccacgtattcgggcccgggtccctgagtctcagacgtggcatgtgggcagccgcagtggttctctctgtagccacatttctgtaccaggtagctgaacgcgtgcggtattatcgcgaattccatcatcagaccgcactggatgaaagggaatcccaccgactaatattcccggctgttacactctgcaacattaatcccttgagacggtccaggctgacccccaatgacttgcattgggctggaagcgcattgctcgggttggatccagccgagcacgccgcttttctgcgcgctctgggaaggccacccgctccaccagggtttatgcctagtcctacattcgatatggcccagttgtacgcacgggcagggcacagtctggacgatatgcttctggactgcaggtttagggggcagccctgtgggccagagaatttcactactatttttacacgcatgggtaaatgttatacattcaactcaggcgcagacggcgccgaactgctaactaccactcgtggcggaatggggaatggtctggacataatgttagacgtacaacaggaggagtatctgcccgtgtggagggataatgaagaaacacccttcgaggtgggaatcagagtgcagatacattcccaggaagaaccgccaatcattgaccaacttgggctgggtgttagccctggatatcaaacgttcgtctcatgccagcagcaacagctcagtttcctacctccaccttggggcgattgcagttctgcttctttgaaccctaactatgaacctgagccctccgacccattgggaagcccaagtccctcccccagcccaccatatactctgatgggctgtcggctcgcttgtgaaacaaggtacgtagcgcgtaaatgtggctgccgcatggtctatatgccgggtgatgtgccagtctgttctccacagcaatacaagaactgtgcacatccagctatcgatgccatgctgcggaaagactcatgcgcttgcccaaatccatgtgcatccacccgatacgccaaagagttatctatggtccggatcccgagtagagccgcggcccgctttctcgcgagaaaattgaatcgcagcgaagcatacatagcagaaaacgtgctggccctcgatatctttttcgaggccctcaactacgaaaccgtggagcagaaaaaggcatacgagatgtcagagctcctcggagatattggcggccaaatgggcctatttatcggggcctctctgcttacaatactcgaaatcctggattacctgtgtgaggtctttcgggacaaggtgttgggctatttttggaatcgtcagcatagccagcgacattcttctactaatctgcttcaggaaggcttaggaagccatcgcacccaggtcccgcaccttagcctggggccatctactctgctgtgctccgaagacctgcccccactcccagtaccctctcccagactgtctcctccgcctactgcccctgcaacactttcccattctagtcggcccgccgtgtgtgttctcggggctccgccctag

SEQ ID NO: 203557 - DNA, 1650 bp, Artificial Sequence
  derived and/or modified sequence
atgaagcccacatccggcccagaggaagcaaggaggcctgccagcgatatcagagttttcgctagcaactgctcgatgcatggacttggccatgtctttggtccaggctctctcagcctcaggagaggcatgtgggcagccgctgtggtgcttagcgttgctacattcctttatcaagtcgccgagagggtcaggtactacagggagttccaccatcagactgctttggacgagagagagtcacaccgtcttatcttcccagcagtgactctctgcaatattaaccccttgcggagatctcggctgacacccaatgacctccactgggctggtagcgcccttctggggctggaccccgctgagcacgctgccttcttgagggctctgggtaggccgcctgcgccaccaggatttatgccatctcccaccttcgacatggcacagttgtatgccagagcaggccattccctagatgatatgcttctcgattgccggtttcgcggtcagccctgcgggcctgagaattttaccacaattttcacccgaatgggcaaatgttataccttcaattcaggagcagatggcgctgagctcctcacaacaactagagggggaatgggaaatggactggacattatgcttgatgtgcaacaggaggagtacttacccgtctggagagacaatgaggagactccatttgaggtgggaattagagttcaaatccacagccaggaggaaccaccaattatcgaccaacttggactaggagtgagccccggataccaaaccttcgtttcctgccagcaacagcagctatccttcctgcctccaccctggggggactgctcaagcgcaagcctcaatccgaactacgagcctgaaccaagtgatccactgggttcccctagtccctctccctcccctccttataccctcatgggctgtcgactggcctgtgagactagatacgtggctaggaaatgtggatgtagaatggtgtacatgccaggtgatgtgcctgtgtgttctccccagcagtacaaaaactgtgcccaccctgcgatcgacgccatgctgcggaaggactcatgtgcctgtcctaacccgtgcgctagcaccaggtacgccaaggagctgtctatggtccgcataccgtcccgagcggcagctcgcttcctggcccgaaaacttaatcgcagcgaagcttacatcgctgagaacgtgcttgctcttgatatcttcttcgaagccttaaactatgagacggttgaacagaagaaggcttacgagatgtccgagctgctcggcgacattggcggtcagatggggctgttcatcggggctagcctgttaactatcctggaaattctggattacctttgcgaagttttcagggacaaggtactggggtacttttggaatcggcagcactctcagcgtcacagctccactaatctcttgcaggaaggactgggcagccacagaacccaggttccccatctgtcactgggaccctcaactttgctctgcagtgaagatttacctcctctcccagtgccatccccccgacttagtcctcccccaaccgcgccagctacactgagtcattccagccgccctgccgtgtgtgtgctgggagccccaccatag

SEQ ID NO: 203558 - DNA, 1650 bp, Artificial Sequence
  derived and/or modified sequence
atgaagcccaccagcggccccgaggaggccagaagacccgccagcgacatcagagtgttcgccagcaactgcagcatgcacggcctgggccacgtgttcggccccggcagcctgagcctgagaagaggcatgtgggccgccgccgtggtgctgagcgtggccaccttcctgtaccaggtggccgagagagtgagatactacagagagttccaccaccagaccgccctggacgagagagagagccacagactgatcttccccgccgtgaccctgtgcaacatcaaccccctgagaagaagcagactgacccccaacgacctgcactgggccggcagcgccctgctgggcctggaccccgccgagcacgccgccttcctgagagccctgggcagaccccccgccccccccggcttcatgcccagccccaccttcgacatggcccagctgtacgccagagccggccacagcctggacgacatgctgctggactgcagattcagaggccagccctgcggccccgagaacttcaccaccatcttcaccagaatgggcaagtgctacaccttcaacagcggcgccgacggcgccgagctgctgaccaccaccagaggcggcatgggcaacggcctggacatcatgctggacgtgcagcaggaggagtacctgcccgtgtggagagacaacgaggagacccccttcgaggtgggcatcagagtgcagatccacagccaggaggagccccccatcatcgaccagctgggcctgggcgtgagccccggctaccagaccttcgtgagctgccagcagcagcagctgagcttcctgccccccccctggggcgactgcagcagcgccagcctgaaccccaactacgagcccgagcccagcgaccccctgggcagccccagccccagccccagccccccctacaccctgatgggctgcagactggcctgcgagaccagatacgtggccagaaagtgcggctgcagaatggtgtacatgcccggcgacgtgcccgtgtgcagcccccagcagtacaagaactgcgcccaccccgccatcgacgccatgctgagaaaggacagctgcgcctgccccaacccctgcgccagcaccagatacgccaaggagctgagcatggtgagaatccccagcagagccgccgccagattcctggccagaaagctgaacagaagcgaggcctacatcgccgagaacgtgctggccctggacatcttcttcgaggccctgaactacgagaccgtggagcagaagaaggcctacgagatgagcgagctgctgggcgacatcggcggccagatgggcctgttcatcggcgccagcctgctgaccatcctggagatcctggactacctgtgcgaggtgttcagagacaaggtgctgggctacttctggaacagacagcacagccagagacacagcagcaccaacctgctgcaggagggcctgggcagccacagaacccaggtgccccacctgagcctgggccccagcaccctgctgtgcagcgaggacctgccccccctgcccgtgcccagccccagactgagccccccccccaccgcccccgccaccctgagccacagcagcagacccgccgtgtgcgtgctgggcgcccccccctag

SEQ ID NO: 203559 - protein, 543 aa, Artificial Sequence
  derived and/or modified sequence
MKPTSGPEEARRPASDIRVFASNCSMHGLGHVFGPGSLSLRRGMWAAAVVLSVATFLYQVAERVRYYREFHHQTALDERESHRLIFPAVTLCNINPLRRSRLTPNDLHWAGSALLGLDPAEHAAFLRALGRPPAPPGFMPSPTFDMAQLYARAGHSLDDMLLDCRFRGQPCGPENFTTIFTRMGKCYTFNSGADGAELLTTTRGGMGNGLDIMLDVQQEEYLPVWRDNEETPFEVGIRVQIHSQEEPPIIDQLGLGVSPGYQTFVSCQQQQLSFLPPPWGDCSSASLNPNYEPEPSDPLGSPSPSPSPPYTLMGCRLACETRYVARKCGCRMVYMPGDVPVCSPQQYKNCAHPAIDAMLRKDSCACPNPCASTRYAKELSMVRIPSRAAARFLARKLNRSEAYIAENVLALDIFFEALNYETVEQKKAYEMSELLGDIGGQMGLFIGASLLTILEILDYLCEVFRDKVLGYFWNRQHSQRHSSTNLTSHPSLCRHQDSLRLPPHLLPCHTALDLLSVSSEPRPDILDMPSLHVAFPSSPQIKS

SEQ ID NO: 203560 - DNA, 1632 bp, Artificial Sequence
  derived and/or modified sequence
atgaaacccacatcagggcctgaggaggctagacgcccagccagtgacatccgcgtctttgctagcaactgttcaatgcacggcctgggtcacgtatttggaccgggtagcctaagtctacgccgcggtatgtgggcagctgctgtcgtcctctccgttgcaacatttctttaccaagtggccgaaagggtccgatattacagggagtttcaccaccagaccgcactggacgagcgggaatcccacagactgatctttccggccgtgaccctctgtaacatcaaccctcttcggcggagccggttgactcccaatgatcttcattgggccggctccgccctgctcgggctcgatccggcagaacacgcagcctttctgagggccctggggcgaccccctgcgccccccggctttatgccttctcctacctttgacatggcgcagctctatgcccgcgcaggtcacagcctcgatgatatgttactagactgtcggtttcggggccagccctgtggaccagaaaactttactactatattcaccaggatggggaaatgctatactttcaattccggcgccgacggagctgagctgcttacaaccaccaggggcgggatggggaatggccttgacatcatgctagacgtccagcaggaggaatacttgcccgtgtggagagataacgaggaaacaccatttgaagtgggcattcgcgtccaaatccatagccaggaggagccacccatcatagaccagttgggtttaggggtgagcccaggttatcagactttcgtgagctgtcagcaacagcagctcagctttctacctcctccttggggagactgctccagtgcctcccttaatccgaactatgaacccgaaccaagcgacccgcttgggtctcctagcccctctccaagccctccatacacgttgatgggttgccgtctcgcgtgcgagacaagatacgtagcccgcaagtgcggctgcaggatggtgtacatgcctggcgacgtcccagtgtgctctccacagcagtacaaaaactgtgcacacccagcgattgatgccatgttgcgcaaggactcttgcgcatgtcccaacccctgcgcctctacgagatatgctaaagaactctctatggtcagaatcccttctagagccgctgcccgctttctggcccgtaaacttaacagatcagaagcatacattgcagaaaatgtactggcactggacattttttttgaagcgcttaattacgaaacagtcgaacagaagaaggcctatgagatgtcagagctgctgggcgacataggggggcaaatggggctgtttataggagcaagtctcctgactatccttgaaatcctggactatttgtgtgaggtgttcagggacaaagtcctgggctatttctggaatcgacagcactcccaaagacattcttcaacaaacttaacctcccacccatcactatgccgccaccaggattccctgagactccctccccacctactgccgtgccacaccgccctggatcttctgagcgtgagctccgagccaaggcctgatatcctcgatatgccttcactccatgtggctttcccaagttcaccacaaatcaagtcttag

SEQ ID NO: 203561 - DNA, 1632 bp, Artificial Sequence
  derived and/or modified sequence
atgaagcccaccagcggccctgaggaggcccggcggcctgccagtgacatccgggtgtttgccagcaactgcagcatgcacggcctgggccacgtgtttggacctggcagcctgagcctgcggcggggcatgtgggccgctgctgtggtgctgtctgtggccaccttcctgtaccaggtggccgagcgggtgcgctactaccgggagttccaccaccagacagccctggatgagcgggagagccacaggctcatcttccctgctgtgaccctgtgcaacatcaaccccctgcggcgcagccggctgaccccaaatgacctgcactgggccggcagcgccctgctgggcctggaccctgctgagcacgccgccttcctgcgggccctgggccggcccccagcccctcctggcttcatgcccagccccacctttgacatggcccagctgtatgcccgggccggccacagcctggatgacatgctgctggactgccgcttccggggccagccctgtggccctgagaacttcaccaccatcttcaccaggatgggcaagtgctacaccttcaacagcggggctgatggagctgagctgctgaccaccacccggggcggcatgggaaatggcctggacatcatgctggatgtgcagcaggaggagtacctgcctgtgtggagggacaatgaggagaccccatttgaggtgggcatccgggtgcagatccacagccaggaggagccccccatcatcgaccagctgggcctgggcgtgtccccaggctaccagacctttgtgtcctgccagcagcagcagctgtccttcctgcccccaccctggggagactgcagcagcgccagcctgaaccccaactatgagcctgagcccagcgaccccctgggcagccccagccccagccccagccccccctacaccctgatgggctgccgcctggcctgtgagaccaggtatgtggccaggaaatgtggctgcaggatggtgtacatgcctggagatgtgcctgtgtgcagcccccagcagtacaagaactgtgcccacccagccattgatgccatgctgaggaaggacagctgtgcctgccccaacccctgtgccagcaccaggtatgccaaggagctgtccatggtgcgcatccccagcagagctgctgcccgcttcctggccaggaagctgaacagaagtgaggcctacatcgccgagaatgtgctggccctggacatcttctttgaggccctgaactatgagaccgtggagcagaagaaggcctatgagatgtctgagctgctgggggacatcggcggccagatgggcctcttcatcggggccagcctgctgaccatcctggagatcctggactacctgtgtgaggtgttccgggacaaggtgctgggctacttctggaaccggcagcacagccagaggcacagcagcaccaacctgaccagccaccccagcctgtgccgccaccaggacagcctgcggctgcccccccacctgctgccctgccacacagccctggacctgctgtctgtgtcctctgagcccaggccagacatcctggacatgcccagcctgcacgtggccttccccagcagcccccagatcaagagctag

SEQ ID NO: 203562 - DNA, 2232 bp, Artificial Sequence
  derived and/or modified sequence
tacaggggttgcaactgggagcctagggggccccaaggcatctccaggcccaatctacctctgggcttttctcaagctctccctaggattactgcggtttcctcctggcgcctctcgtcttggacagccatgcccccctccatgctgcactaatggctcagcctggggccctagggacctctcctaccccccagactgctctgtcggccccctttcccccctactgctgaaacccaatcctctgcagcagcgccggctcagcaccgccggctcagcaccgctccgcagcccctgcctgccacggtcagctacgtcccacctggtctgctgcggagtccccagcccagtgcctagcccagtggagccaccgcctgttcctcgggaaggaacagtgggacctgaccggccagatcacctcctccaatcctgccaggctagtgcctccctgccttccaaccttggctgtctcccaccctctcttctcctctccttgcctggcctcctgaatcctatcttagcctccttagccccctgactgactctctctcgcttcttccaagcctctgtagctggttccgctcctgggttctggccatgaagcccacctcaggcccagaggaggcccggcggccagcctcggacatccgcgtgttcgccagcaactgctcgatgcacgggctgggccacgtcttcgggccaggcagcctgagcctgcgccgggggatgtgggcagcggccgtggtcctgtcagtggccaccttcctctaccaggtggctgagagggtgcgctactacagggagttccaccaccagactgccctggatgagcgagaaagccaccggctcatcttcccggctgtcaccctgtgcaacatcaacccactgcgccgctcgcgcctaacgcccaacgacctgcactgggctgggtctgcgctgctgggcctggatcccgcagagcacgccgccttcctgcgcgccctgggccggccccctgcaccgcccggcttcatgcccagtcccacctttgacatggcgcaactctatgcccgtgctgggcactccctggatgacatgctgctggactgtcgcttccgtggccaaccttgtgggcctgagaacttcaccacgatcttcacccggatgggaaagtgctacacatttaactctggcgctgatggggcagagctgctcaccactactaggggtggcatgggcaatgggctggacatcatgctggacgtgcagcaggaggaatatctacctgtgtggagggacaatgaggagaccccgtttgaggtggggatccgagtgcagatccacagccaggaggagccgcccatcatcgatcagctgggcttgggggtgtccccgggctaccagacctttgtttcttgccagcagcagcagctgagcttcctgccaccgccctggggcgattgcagttcagcatctctgaaccccaactatgagccagagccctctgatcccctaggctcccccagccccagccccagccctccctatacccttatggggtgtcgcctggcctgcgaaacccgctacgtggctcggaagtgcggctgccgaatggtgtacatgccaggcgacgtgccagtgtgcagcccccagcagtacaagaactgtgcccacccggccatagatgccatgcttcgcaaggactcgtgcgcctgccccaacccgtgcgccagcacgcgctacgccaaggagctctccatggtgcggatcccgagccgcgccgccgcgcgcttcctggcccggaagctcaaccgcagcgaggcctacatcgcggagaacgtgctggccctggacatcttctttgaggccctcaactatgagaccgtggagcagaagaaggcctatgagatgtcagagctgcttggtgacattgggggccagatggggctgttcatcggggccagcctgctcaccatcctcgagatcctagactacctctgtgaggtgttccgagacaaggtcctgggatatttctggaaccgacagcactcccaaaggcactccagcaccaatctgacctcccacccctccctgtgccgtcaccaagactctctccgcctcccaccgcacctgctaccttgtcacacagctctagacctgctgtctgtgtcctcggagccccgccctgacatcctggacatgcctagcctgcacgtagcttttccgtcttcaccccaaataaagtcctaatgcatc

SEQ ID NO: 203563 - DNA, 1632 bp, Artificial Sequence
  derived and/or modified sequence
atgaagcccaccagcggccccgaggaggcccggcggcccgccagcgatattcgggtgtttgcctcaaactgttctatgcacggcctcggtcacgtgtttggcccggggtccctctccctgcgccgcggaatgtgggctgctgccgtggtcctgtccgttgcaacgtttctctaccaagttgccgaacgggtgcggtactacagggagttccatcaccagaccgctctggacgagagagaatctcatcggctgatcttcccagctgtgactctgtgtaacataaatccactccgcagaagcaggcttacgcctaatgatctccattgggctggatctgctctcctgggtctagatccagctgaacatgctgcctttttgcgagccctgggacgcccaccagctcctcctggcttcatgccctcccccacttttgacatggcccagctttatgctcgggctggacatagcttagacgatatgctgctggattgccgattcagggggcagccatgtggacccgagaatttcaccacgatctttacccgcatgggaaagtgctacactttcaattctggcgcagatggcgccgaattgctcactacaaccagaggcggcatgggtaacggtctagacatcatgctggatgtccagcaggaggaatacctgccagtctggagagataatgaggagaccccgttcgaagtggggatccgggtgcagatccactcccaggaagagcctcctatcatcgaccagctggggttgggcgtttctccggggtaccagacgttcgtgtcttgccagcagcagcagctgagttttttgccccccccgtggggagattgttcatccgctagtcttaacccaaactatgagcctgagccctcagatccgctgggaagtccatctccgtccccgtcccctccttacactctgatgggttgtagactggcctgcgagacccgatacgtggccagaaaatgcggatgccgaatggtgtacatgcccggggatgtgcccgtctgttcaccccagcagtacaagaattgtgcacacccagccatcgacgcaatgctgagaaaggattcatgtgcctgtcccaatccttgcgcctcgacccggtatgccaaggagctcagcatggtccggatcccctcccgggccgcagcccggtttctggccaggaaacttaacagatctgaggcatacattgccgagaacgtacttgctctggatattttcttcgaagcactcaactacgaaactgtggagcagaagaaagcgtacgaaatgagtgaactgctcggcgatataggaggacagatgggattgtttataggtgcctccctgcttactatcctggagatcttggactatctatgcgaagtgtttcgtgataaggtcctgggctacttctggaacagacagcacagccagcgacattcctccacgaacttaacgtcccacccgtccctgtgcaggcaccaagattccctgaggctacctcctcacctgttaccctgtcacacagctctcgatttattgtctgttagctccgaaccaaggcccgatatcctggacatgccctctctccacgtcgccttccccagttcacctcagatcaagagttag

SEQ ID NO: 203564 - DNA, 1632 bp, Artificial Sequence
  derived and/or modified sequence
atgaaaccaactagcggcccagaggaagcaagaagaccagcctctgatattcgggtgtttgcaagtaattgtagtatgcatggcttggggcatgtcttcggaccgggtagcctgtcactaagacgcggaatgtgggcggcagcggtcgtgctttcggtggctacctttctgtatcaagttgctgagagggtcagatactatcgggagtttcaccatcagacagctctggatgaaagagaaagccaccggctaattttccctgccgtcacattgtgcaacatcaaccccctgcggagaagtaggctgactcctaatgatttgcactgggcaggctctgccctgctgggcttggacccagctgagcacgccgcattcctccgagcattggggagacctcctgcaccgcctgggtttatgcctagtccaactttcgacatggctcagttgtacgccagggccggacactccctggacgacatgctcctcgactgccggtttcgcggacagccttgcgggccagagaattttaccactattttcactagaatggggaaatgttacacctttaactcaggtgccgacggggctgagctcttgacaactacacgaggcggaatgggtaatggactcgatattatgcttgatgtgcagcaggaggagtacctgcccgtttggcgagacaacgaagagacacctttcgaggttgggatccgagtgcagatccactcgcaggaggagcctccaattattgaccagctcggtctcggggtatccccgggatatcagacctttgtgagctgtcagcagcagcagctgagtttcctcccaccaccttggggagattgctcttccgcctctctcaacccgaattatgagcccgaacccagtgacccgttgggttccccatccccctccccttcccctccttacaccctcatgggctgccgcctggcttgtgagactagatacgtggccagaaagtgcggatgtaggatggtgtacatgccaggcgacgtcccagtatgcagtccacaacagtacaagaactgtgcacatcccgcaatcgatgccatgctccgcaaggactcttgcgcatgccccaatccctgtgcatccacaagatacgcaaaggagctgtctatggttcggatcccttccagagccgctgccaggtttctagcacggaaactcaaccggtcagaagcctatatagcggaaaatgttttagcgcttgatattttctttgaggccttgaactacgagacagtggagcaaaaaaaggcatacgagatgtcagagttactgggggatattggcggacaaatgggactttttattggagcaagcttactgacgattctggagatcctggattacttgtgtgaggttttccgggacaaagtcttgggctatttctggaaccggcagcactctcaacgccactcaagcacaaacttgaccagccacccctccttatgccgtcaccaagattctctgcgtctgccacctcaccttctaccatgtcataccgcgctggaccttctgtcggtttcctctgaacccaggcctgatattctagatatgccttcccttcacgtggcctttccatcttccccacaaattaagtcttag

SEQ ID NO: 203565 - DNA, 1632 bp, Artificial Sequence
  derived and/or modified sequence
atgaagcccaccagcggccccgaggaggccagaagacccgccagcgacatcagagtgttcgccagcaactgcagcatgcacggcctgggccacgtgttcggccccggcagcctgagcctgagaagaggcatgtgggccgccgccgtggtgctgagcgtggccaccttcctgtaccaggtggccgagagagtgagatactacagagagttccaccaccagaccgccctggacgagagagagagccacagactgatcttccccgccgtgaccctgtgcaacatcaaccccctgagaagaagcagactgacccccaacgacctgcactgggccggcagcgccctgctgggcctggaccccgccgagcacgccgccttcctgagagccctgggcagaccccccgccccccccggcttcatgcccagccccaccttcgacatggcccagctgtacgccagagccggccacagcctggacgacatgctgctggactgcagattcagaggccagccctgcggccccgagaacttcaccaccatcttcaccagaatgggcaagtgctacaccttcaacagcggcgccgacggcgccgagctgctgaccaccaccagaggcggcatgggcaacggcctggacatcatgctggacgtgcagcaggaggagtacctgcccgtgtggagagacaacgaggagacccccttcgaggtgggcatcagagtgcagatccacagccaggaggagccccccatcatcgaccagctgggcctgggcgtgagccccggctaccagaccttcgtgagctgccagcagcagcagctgagcttcctgccccccccctggggcgactgcagcagcgccagcctgaaccccaactacgagcccgagcccagcgaccccctgggcagccccagccccagccccagccccccctacaccctgatgggctgcagactggcctgcgagaccagatacgtggccagaaagtgcggctgcagaatggtgtacatgcccggcgacgtgcccgtgtgcagcccccagcagtacaagaactgcgcccaccccgccatcgacgccatgctgagaaaggacagctgcgcctgccccaacccctgcgccagcaccagatacgccaaggagctgagcatggtgagaatccccagcagagccgccgccagattcctggccagaaagctgaacagaagcgaggcctacatcgccgagaacgtgctggccctggacatcttcttcgaggccctgaactacgagaccgtggagcagaagaaggcctacgagatgagcgagctgctgggcgacatcggcggccagatgggcctgttcatcggcgccagcctgctgaccatcctggagatcctggactacctgtgcgaggtgttcagagacaaggtgctgggctacttctggaacagacagcacagccagagacacagcagcaccaacctgaccagccaccccagcctgtgcagacaccaggacagcctgagactgcccccccacctgctgccctgccacaccgccctggacctgctgagcgtgagcagcgagcccagacccgacatcctggacatgcccagcctgcacgtggccttccccagcagcccccagatcaagagctag

SEQ ID NO: 203566 - DNA, 1362 bp, Artificial Sequence
  derived and/or modified sequence
atggtgtcgatttttaatttagatggtatggaacaccacgttaggacctgcattcctaaagtggagttagtccctgcaggcaagccattctactgcctgagttcggaggacctgcggaacacacactgttgctatacagactattgtaacaggatcgaccttcgcgtgccttccggacacctgaaagaacctgagcacccgtctatgtggggccccgtagaactggtggggattatagcagggccagtcttcctcctattcctgatcataataatagtcttcctcgtgataaactatcaccagcgcgtttaccacaacaggcagaggttggatatggaggaccctagctgcgagatgtgcctgtccaaagacaagactctacaagatttagtctacgacctgtccacatctggttcaggttctggtcttccactcttcgtccaaagaaccgtggcccgtacaattgtgctccaggagattatcggaaaggggcgctttggcgaagtgtggcgcggtcggtggagaggcggcgacgtggccgttaaaatcttctcatctcgggaggaacgttcgtggtttcgcgaggccgagatctaccagacagtgatgcttcgacatgagaacattctgggattcatcgccgctgacaataaggataacggtacctggactcagctgtggttagtaagtgattaccacgagcacggcagcctttttgattacctcaaccgatatactgtcactattgagggcatgatcaagctcgcactgtccgccgcttccgggcttgcccacctccatatggaaattgttggaacacagggaaaaccgggcatcgcccaccgtgatctgaaatcaaagaatatcctggtgaagaaaaatggtatgtgtgcgatcgcagacctaggcctggctgtccgacacgatgccgtcacagatactatcgacatcgctcctaatcagcgtgtgggaacaaaacggtacatggccccggaggtcctcgacgagaccatcaacatgaagcactttgacagttttaaatgtgccgacatctatgctctagggctcgtgtactgggaaattgctagaaggtgcaacagcggcggcgtgcacgaagaataccagctcccttattatgatctcgtcccaagcgacccttctattgaagaaatgcgcaaagtggtgtgcgaccaaaaactccgcccaaatattccaaactggtggcagtcttatgaagccctcagagtgatgggcaagatgatgcgcgagtgctggtatgccaatggggcggccagattgaccgcgcttaggatcaaaaaaaccttgagccagctgtccgttcaggaggacgtaaaaatctag

SEQ ID NO: 203567 - DNA, 1362 bp, Artificial Sequence
  derived and/or modified sequence
atggtgtccatcttcaacctggatggcatggagcaccacgtgaggacctgcatccccaaggtggagctggtgcctgctgggaagcccttctactgcctgagcagcgaggacctgaggaacacccactgctgctacacagactactgcaacagaattgacctgcgggtgcccagcggccacctgaaggagcctgagcaccccagcatgtggggccctgtggagctggtgggcatcatcgccggccctgtgttcctgctcttcctgatcatcatcatcgtgttcctggtgatcaactaccaccagagggtgtaccacaaccggcagaggctggacatggaggaccccagctgtgagatgtgcctgagcaaggacaagaccctgcaggacctggtgtatgacctgagcaccagcggcagcggcagcggcctgcccctgtttgtgcagaggacagtggcccggaccatcgtgctgcaggagatcatcggcaagggccgctttggagaggtgtggaggggccgctggagaggaggagatgtggccgtgaagatcttcagcagccgggaggagaggtcctggttccgggaggccgagatctaccagacagtgatgctgcggcatgagaacatcctgggcttcatcgctgctgacaacaaggacaatggcacctggacccagctgtggctggtgtctgactaccatgaacatggcagcctgtttgactacctgaaccgctacacagtgaccatcgagggcatgatcaagctggccctgtctgctgccagcggcctggcccacctgcacatggagatcgtgggcacccagggcaagccaggcatcgcccaccgggacctgaagagcaagaacatcctggtgaagaagaatggcatgtgtgccatcgctgacctgggcctggccgtgagacatgatgctgtgacagacaccattgatattgcccccaaccagagggtgggcaccaagcgctacatggcccctgaggtgctggatgagaccatcaacatgaagcactttgacagcttcaagtgtgccgacatctatgccctgggcctggtgtactgggagatcgcccggcgctgcaacagcggaggagtgcatgaggagtaccagctgccctactatgacctggtgcccagcgaccccagcattgaggagatgaggaaggtggtgtgtgaccagaagctgcggcccaacatccccaactggtggcagagctatgaggccctgcgggtgatgggcaagatgatgagggagtgctggtacgccaacggggccgcccggctgacagccctgcgcatcaagaagaccctgagccagctgtctgtgcaggaggatgtgaagatctag

SEQ ID NO: 203568 - DNA, 1362 bp, Artificial Sequence
  derived and/or modified sequence
atggtgagcatcttcaacctggacggcatggagcaccacgtgcggacctgcatacccaaagtcgagctggtgccggcaggtaaacctttttattgtctgtcctccgaggatttgcgaaatactcattgctgctacacagattactgtaacaggatcgacttgagggtgccctccggacaccttaaggaaccagaacatccctcaatgtggggacccgtggagttggtgggaatcatcgctggacctgtgttcctgctgtttttaatcattattatcgtgtttctggtaataaactaccatcagcgtgtttatcataacagacagcgattggacatggaagatccttcctgtgagatgtgtctgtccaaggataagaccctgcaggatcttgtctatgatcttagtacttccggctccgggagcggactgcctttgttcgtacagcgtaccgtcgcccgaactatagtcttgcaagagatcatcggcaaggggcggttcggggaggtatggcgaggccggtggagagggggcgacgtggcagtgaagatcttttccagccgagaggagagatcatggtttcgggaggctgagatctatcaaactgtgatgctgcggcacgagaatatactggggttcattgcggccgataacaaagacaatggaacatggacacagctgtggctggtgtctgattatcatgaacacggctccctgtttgattatttgaacagatataccgttacaattgaaggcatgattaagctcgccctcagcgccgcctcaggattggcccacttgcatatggagatcgtcggaacacagggcaagccaggaattgcccaccgggacctaaagtctaaaaatattctcgtgaaaaagaacgggatgtgcgcaatagcagacctcggactggctgttcgtcacgacgctgttacagatacaatcgacattgctccaaaccagcgggtcggcaccaaaaggtacatggccccggaggtgttagatgagacaatcaatatgaaacatttcgactcctttaaatgtgctgatatctacgcgctgggattggtttactgggaaattgctcgacgatgtaatagcggcggtgtgcacgaggaatatcagctgccctattacgatttagtgccaagcgatccctccattgaggagatgcgcaaagtggtctgtgaccagaagctgagaccgaatatccccaactggtggcagagctacgaggctctgagagtgatgggaaaaatgatgcgggagtgttggtacgcgaacggagccgctaggctgaccgccctgcgcatcaaaaagacgctttcccagttgtccgtgcaggaagatgttaaaatctag

SEQ ID NO: 203569 - DNA, 1362 bp, Artificial Sequence
  derived and/or modified sequence
atggtgagtatctttaatctggatggaatggaacaccatgtgcgcacatgtattcctaaggttgagctcgtcccagcaggaaagcccttctattgcctgtcctcggaggatctgagaaacacacattgctgctacaccgattattgcaataggattgacctgagagtaccctcagggcacctgaaagagcccgagcacccatccatgtgggggcctgtggaactcgtcggcataatcgcgggaccagtcttcctgctttttctgattatcattattgtcttcctcgtgattaactaccatcagcgcgtttaccacaacaggcagagattggatatggaagatccttcttgtgaaatgtgcctgagcaaggataagacactacaggatctggtctatgacctgtccacgtccggaagcggcagcgggctgcccctcttcgtgcagaggaccgtcgctcgcacaattgtgctgcaggagatcatcggaaaagggaggttcggcgaagtgtggagggggagatggagaggtggtgacgttgcagtgaagattttcagctcacgcgaggagaggtcctggtttcgcgaagctgagatctatcagacagtcatgctccgccacgagaatattctcggcttcatcgccgcagacaacaaggataatggaacatggacacaactctggctggtgtcagactatcacgagcacgggtctctgtttgactatctcaatcggtatacagtaacgattgaaggcatgataaaactggctcttagcgcggcaagcggattagcgcatctgcacatggaaatagtcggtacccagggtaagccaggtattgcccaccgcgacctgaaatctaaaaatatcctggttaagaaaaatggcatgtgcgcaatcgcagatttgggcctggctgttcgtcacgatgctgtgactgatacaattgatatcgcgccaaaccaacgggtgggcaccaagcgttacatggccccagaggtactcgatgagacaataaatatgaagcatttcgactccttcaaatgcgcggatatctacgcgctgggcctagtgtactgggagatcgctcggaggtgtaactctggcggtgtgcacgaggagtatcagctcccatattacgatctggttccctctgacccctctatcgaagaaatgcgtaaggtggtgtgcgatcaaaagctgagacccaacattcccaactggtggcagtcctatgaggccctgcgagtcatgggcaagatgatgcgggaatgttggtacgccaacggggcagccagactgacagcactgcggatcaaaaaaactttatcccagttaagtgtgcaggaagatgtgaaaatttag

SEQ ID NO: 203570 - DNA, 1362 bp, Artificial Sequence
  derived and/or modified sequence
atggtgagcatcttcaacctggacggcatggagcaccacgtgagaacctgcatccccaaggtggagctggtgcccgccggcaagcccttctactgcctgagcagcgaggacctgagaaacacccactgctgctacaccgactactgcaacagaatcgacctgagagtgcccagcggccacctgaaggagcccgagcaccccagcatgtggggccccgtggagctggtgggcatcatcgccggccccgtgttcctgctgttcctgatcatcatcatcgtgttcctggtgatcaactaccaccagagagtgtaccacaacagacagagactggacatggaggaccccagctgcgagatgtgcctgagcaaggacaagaccctgcaggacctggtgtacgacctgagcaccagcggcagcggcagcggcctgcccctgttcgtgcagagaaccgtggccagaaccatcgtgctgcaggagatcatcggcaagggcagattcggcgaggtgtggagaggcagatggagaggcggcgacgtggccgtgaagatcttcagcagcagagaggagagaagctggttcagagaggccgagatctaccagaccgtgatgctgagacacgagaacatcctgggcttcatcgccgccgacaacaaggacaacggcacctggacccagctgtggctggtgagcgactaccacgagcacggcagcctgttcgactacctgaacagatacaccgtgaccatcgagggcatgatcaagctggccctgagcgccgccagcggcctggcccacctgcacatggagatcgtgggcacccagggcaagcccggcatcgcccacagagacctgaagagcaagaacatcctggtgaagaagaacggcatgtgcgccatcgccgacctgggcctggccgtgagacacgacgccgtgaccgacaccatcgacatcgcccccaaccagagagtgggcaccaagagatacatggcccccgaggtgctggacgagaccatcaacatgaagcacttcgacagcttcaagtgcgccgacatctacgccctgggcctggtgtactgggagatcgccagaagatgcaacagcggcggcgtgcacgaggagtaccagctgccctactacgacctggtgcccagcgaccccagcatcgaggagatgagaaaggtggtgtgcgaccagaagctgagacccaacatccccaactggtggcagagctacgaggccctgagagtgatgggcaagatgatgagagagtgctggtacgccaacggcgccgccagactgaccgccctgagaatcaagaagaccctgagccagctgagcgtgcaggaggacgtgaagatctag

SEQ ID NO: 203571 - protein, 546 aa, Artificial Sequence
  derived and/or modified sequence
MAESAGASSFFPLVVLLLAGSGGSGPRGVQALLCACTSCLQANYTCETDGACMVSIFNLDGMEHHVRTCIPKVELVPAGKPFYCLSSEDLRNTHCCYTDYCNRIDLRVPSGHLKEPEHPSMWGPVELVGIIAGPVFLLFLIIIIVFLVINYHQRVYHNRQRLDMEDPSCEMCLSKDKTLQDLVYDLSTSGSGSGLPLFVQRTVARTIVLQEIIGKGRFGEVWRGRWRGGDVAVKIFSSREERSWFREAEIYQTVMLRHENILGFIAADNKADCSFLTLPWEVVMVSAAPKLRSLRLQYKGGRGRARFLFPLNNGTWTQLWLVSDYHEHGSLFDYLNRYTVTIEGMIKLALSAASGLAHLHMEIVGTQGKPGIAHRDLKSKNILVKKNGMCAIADLGLAVRHDAVTDTIDIAPNQRVGTKRYMAPEVLDETINMKHFDSFKCADIYALGLVYWEIARRCNSGGVHEEYQLPYYDLVPSDPSIEEMRKVVCDQKLRPNIPNWWQSYEALRVMGKMMRECWYANGAARLTALRIKKTLSQLSVQEDVKI

SEQ ID NO: 203572 - DNA, 1641 bp, Artificial Sequence
  derived and/or modified sequence
atggccgagagcgccggcgcaagttcattcttccccctggtggtactccttttagcgggcagtggcggctcaggccctaggggtgtgcaggcactgttatgtgcctgtacaagctgcctgcaagccaactatacctgcgaaacggacggtgcctgtatggtcagcattttcaaccttgatggcatggagcatcacgtgaggacatgcatacctaaggtagagctggtccccgccggcaaaccattttactgcctgagtagcgaggatcttcgcaatacccattgctgctacacagactactgcaacaggatagacctgagagtgccaagcggacacctaaaagaacctgaacatccatccatgtggggacctgtggagctggtgggaatcatcgctggcccagtatttctcctttttctgattatcatcatcgttttcttggtgattaactaccatcagcgcgtgtaccataaccggcagcggctggatatggaagatccgtcttgcgagatgtgcctgtctaaagataagactctgcaagatctcgtatacgatctgtcgaccagcgggtccggtagcggactgccactatttgttcagcgcaccgtggctaggacaatagtcctgcaggaaattattggaaagggaagattcggcgaagtctggagaggtcgctggcgtggcggagatgtagcagttaaaatattctcctctagagaggagcgtagttggtttagggaagctgagatttaccaaactgtgatgctgcgccacgagaacattttggggttcatcgcagccgataacaaggctgactgctcatttttaaccctcccctgggaggtagtcatggtctcggctgcccccaagctgaggtccttacggcttcagtacaagggcgggcgtggccgcgctcggtttttattcccactgaataatggaacttggactcagctgtggcttgtcagcgattatcacgagcacggctctttgttcgattacttgaacaggtacacagtaactatcgaaggaatgatcaagctggccctctccgccgcatctgggctggcccacctgcatatggagattgtcggcacacaaggaaagcctggcatcgcccatagggatctgaagagcaagaatatccttgtgaaaaagaatgggatgtgcgccattgctgatctaggattagccgtgaggcacgacgccgtgacagacacgatcgacatcgcccctaatcagcgcgtggggactaagcgttacatggctcctgaagtgctcgatgagaccatcaacatgaagcactttgactctttcaaatgcgcagatatctatgccctgggattggtttactgggagatcgcacggcgatgcaatagtggaggcgttcacgaggagtaccagctgccatactacgatttggttccttctgatccttctattgaagagatgaggaaagtagtgtgcgatcagaaattgaggcctaacattcccaactggtggcagtcctacgaggctctaagggtgatgggcaagatgatgcgagaatgttggtacgcaaacggcgctgcgcggcttaccgcactgaggattaagaagaccctgagccagctgtccgtacaggaagacgtgaagatttag

SEQ ID NO: 203573 - DNA, 1641 bp, Artificial Sequence
  derived and/or modified sequence
atggccgagagcgctggggccagcagcttcttccccctggtggtgctgctgctggccggcagcggcggcagcggcccccggggcgtgcaggccctgctgtgtgcctgcaccagctgcctgcaggccaactacacctgtgaaacagatggagcctgcatggtgtccatcttcaacctggatggcatggagcaccacgtgaggacctgcatccccaaggtggagctggtgcctgctgggaagcccttctactgcctgagcagcgaggacctgaggaacacccactgctgctacacagactactgcaacagaattgacctgcgggtgcccagcggccacctgaaggagcctgagcaccccagcatgtggggccctgtggagctggtgggcatcatcgccggccctgtgttcctgctcttcctgatcatcatcatcgtgttcctggtgatcaactaccaccagagggtgtaccacaaccggcagaggctggacatggaggaccccagctgtgagatgtgcctgagcaaggacaagaccctgcaggacctggtgtatgacctgagcaccagcggcagcggcagcggcctgcccctgtttgtgcagaggacagtggcccggaccatcgtgctgcaggagatcatcggcaagggccgctttggagaggtgtggaggggccgctggagaggaggagatgtggccgtgaagatcttcagcagccgggaggagaggtcctggttccgggaggccgagatctaccagacagtgatgctgcggcatgagaacatcctgggcttcatcgctgctgacaacaaggctgactgcagcttcctgaccctgccctgggaggtggtgatggtgtctgctgcccccaagctgcggagcctgcggctgcagtacaagggcggccggggccgggcccgcttcctgttccccctgaacaacggcacctggacccagctgtggctggtgtctgactaccacgagcacggcagcctgtttgactacctgaaccgctacacagtgaccatcgagggcatgatcaagctggccctgtctgctgccagcggcctggcccacctgcacatggagatcgtgggcacccagggcaagccaggcatcgcccaccgggacctgaagagcaagaacatcctggtgaagaagaatggcatgtgtgccatcgctgacctgggcctggccgtgagacatgatgctgtgacagacaccatcgacatcgcccccaaccagagggtgggcaccaagcgctacatggcccctgaggtgctggatgagaccatcaacatgaagcactttgacagcttcaagtgtgccgacatctatgccctgggcctggtgtactgggagatcgcccggcgctgcaacagcggcggcgtgcatgaggagtaccagctgccctactatgacctggtgcccagcgaccccagcattgaggagatgaggaaggtggtgtgtgaccagaagctgcggcccaacatccccaactggtggcagagctatgaggccctgcgggtgatgggcaagatgatgagggagtgctggtacgccaatggagctgcccggctgacagccctgcgcatcaagaagaccctgagccagctgtctgtgcaggaggatgtgaagatctag

SEQ ID NO: 203574 - DNA, 1641 bp, Artificial Sequence
  derived and/or modified sequence
atggccgagagcgccggcgccagcagcttcttccccctggtggtgctgttgttggcgggctctggcggttcaggcccccgcggggtgcaggcccttctgtgcgcttgcacatcctgtcttcaggccaattacacttgtgagacagacggggcttgcatggtgtctatattcaaccttgacggcatggagcaccacgtcagaacctgcatcccaaaggtggagctggtgccggctggaaaacccttttactgcctcagcagcgaggatttacgcaacacgcactgctgttatactgactactgcaaccgcatcgacttgcgcgtgccttccgggcacctcaaggaaccagagcacccgagcatgtggggaccagtggaactagtggggattatcgcaggacctgtgttcctgctgttcctcattataatcatagtgttcctggtcataaactaccaccagcgagtataccacaatcgccagcggttagatatggaagaccccagctgtgaaatgtgcttaagcaaagataaaactctccaggacttagtgtacgacctgtccactagtgggtcgggcagcggactacccctgtttgtacagaggaccgtggcccggacgatcgtgctccaggagattatcggcaaaggccgatttggcgaggtatggaggggtaggtggcgaggtggagacgttgccgttaaaattttctccagcagagaggaaagaagctggttcagggaggcagaaatatatcagaccgttatgctgcggcatgaaaatattctgggcttcatagccgccgacaacaaggccgattgcagttttctaacactgccatgggaagtcgtaatggtaagcgctgctccaaaactgcggagtcttaggctccagtacaaaggcggaaggggaagagcgaggttcctttttccactgaacaatggcacttggacgcagttgtggttggtgtcagactaccatgaacatggtagcttgtttgactacctgaaccgatatactgtcactattgaagggatgattaagctggcattgtctgccgcctcgggactggcgcatttacatatggaaattgtggggactcaaggaaaacccggcatagcccaccgggacctgaagtccaagaatatcctggttaaaaaaaacggcatgtgcgcaattgccgacttaggtctggccgtgagacatgacgcagtgactgataccattgatattgcccccaatcagcgcgtgggcaccaaacggtatatggcccccgaggtgttagatgaaaccataaatatgaagcatttcgactcatttaagtgtgccgacatctacgctctgggcctcgtatattgggaaatcgctagacgctgtaactccggaggagttcacgaggagtatcagctgccttattatgatcttgttccgtccgatccatcgattgaggaaatgcggaaagtggtatgtgatcaaaaactgcgtccaaacatccccaactggtggcagtcctatgaggcattaagggttatggggaagatgatgcgcgaatgttggtatgccaatggcgccgcccgcctgaccgccttacggatcaagaagaccctaagccagttgtctgtgcaggaggacgtcaagatctag

SEQ ID NO: 203575 - DNA, 1641 bp, Artificial Sequence
  derived and/or modified sequence
atggccgagagcgcaggagcttcatcctttttcccgttggtcgtcctgcttctggctggcagcggagggtctggccctcggggagtgcaggcgttgctctgtgcgtgcacttcatgcttacaagccaactacacttgtgagaccgacggtgcctgcatggtgtccatatttaatctcgatgggatggaacatcacgtgcgcacctgcattcccaaggtcgaactggtgcctgccggtaaacccttttactgtctgtccagcgaagacctcaggaacacacactgctgttatacagactactgcaaccggattgatctgcgggtgcctagcggccatctgaaggagccagagcacccttctatgtggggcccagtggagctcgtgggcataattgcgggacccgttttccttctttttttgattatcattattgtattccttgtaatcaactaccaccagagggtttaccacaataggcaacggctggacatggaagatccttcttgtgagatgtgtctgtctaaagacaaaacgctgcaagatctagtctatgacctgagtacgtccggcagcggcagtggcctgcctctcttcgtacaacgaacggttgcaaggacaatagtgctccaggagattatcggaaaaggtcgattcggggaggtgtggagaggtagatggagggggggtgacgtggccgtaaaaatttttagtagccgggaggagagaagctggttccgagaagcagagatctatcagaccgtaatgcttaggcacgagaatatcctgggcttcatcgctgctgacaacaaagctgactgcagtttccttaccctgccctgggaagttgtgatggtgagcgctgctcccaagttaaggagcttgagactccagtacaagggtggaagaggcagggctagattcttgttccccctgaataacggaacatggacacagttatggttggtaagcgattaccatgagcacggtagcctcttcgactatctgaacaggtataccgtgaccatagaaggtatgataaagctggcgctgtcagcagcaagtgggctcgcacaccttcatatggagatcgtcggcacccaggggaagcctggcatcgctcatcgggatctgaagagcaaaaatatcttggtcaaaaaaaatggtatgtgcgccattgctgaccttggcctggctgttagacacgacgccgtcactgacacgatagatattgcacccaatcagcgtgtcgggaccaagcgctatatggccccagaagtactggacgaaacaataaatatgaagcactttgactcattcaagtgtgccgacatatatgccctgggtttggtctattgggagatcgcacggaggtgcaatagtggcggagtccacgaggagtaccaattgccatattatgatctcgtgccatcagacccaagcattgaggagatgcgaaaggttgtgtgtgatcagaaattgaggcccaacatcccgaactggtggcagtcctacgaagcgctacgcgtaatgggtaagatgatgagggagtgttggtacgcaaacggtgctgcacgcttgacagccttgcgcatcaaaaagaccctgtctcagttatccgtccaagaggatgtcaaaatatag

SEQ ID NO: 203576 - DNA, 1641 bp, Artificial Sequence
  derived and/or modified sequence
atggccgagagcgccggcgccagcagcttcttccccctggtggtgctgctgctggccggcagcggcggcagcggccccagaggcgtgcaggccctgctgtgcgcctgcaccagctgcctgcaggccaactacacctgcgagaccgacggcgcctgcatggtgagcatcttcaacctggacggcatggagcaccacgtgagaacctgcatccccaaggtggagctggtgcccgccggcaagcccttctactgcctgagcagcgaggacctgagaaacacccactgctgctacaccgactactgcaacagaatcgacctgagagtgcccagcggccacctgaaggagcccgagcaccccagcatgtggggccccgtggagctggtgggcatcatcgccggccccgtgttcctgctgttcctgatcatcatcatcgtgttcctggtgatcaactaccaccagagagtgtaccacaacagacagagactggacatggaggaccccagctgcgagatgtgcctgagcaaggacaagaccctgcaggacctggtgtacgacctgagcaccagcggcagcggcagcggcctgcccctgttcgtgcagagaaccgtggccagaaccatcgtgctgcaggagatcatcggcaagggcagattcggcgaggtgtggagaggcagatggagaggcggcgacgtggccgtgaagatcttcagcagcagagaggagagaagctggttcagagaggccgagatctaccagaccgtgatgctgagacacgagaacatcctgggcttcatcgccgccgacaacaaggccgactgcagcttcctgaccctgccctgggaggtggtgatggtgagcgccgcccccaagctgagaagcctgagactgcagtacaagggcggcagaggcagagccagattcctgttccccctgaacaacggcacctggacccagctgtggctggtgagcgactaccacgagcacggcagcctgttcgactacctgaacagatacaccgtgaccatcgagggcatgatcaagctggccctgagcgccgccagcggcctggcccacctgcacatggagatcgtgggcacccagggcaagcccggcatcgcccacagagacctgaagagcaagaacatcctggtgaagaagaacggcatgtgcgccatcgccgacctgggcctggccgtgagacacgacgccgtgaccgacaccatcgacatcgcccccaaccagagagtgggcaccaagagatacatggcccccgaggtgctggacgagaccatcaacatgaagcacttcgacagcttcaagtgcgccgacatctacgccctgggcctggtgtactgggagatcgccagaagatgcaacagcggcggcgtgcacgaggagtaccagctgccctactacgacctggtgcccagcgaccccagcatcgaggagatgagaaaggtggtgtgcgaccagaagctgagacccaacatccccaactggtggcagagctacgaggccctgagagtgatgggcaagatgatgagagagtgctggtacgccaacggcgccgccagactgaccgccctgagaatcaagaagaccctgagccagctgagcgtgcaggaggacgtgaagatctag

SEQ ID NO: 203577 - DNA, 1791 bp, Artificial Sequence
  derived and/or modified sequence
gcgctgctgggctgcggcggcggcggcggcggcggtggttactatggcggagtcggccggagcctcctccttcttcccccttgttgtcctcctgctcgccggcagcggcgggtccgggccccggggggtccaggctctgctgtgtgcgtgcaccagctgcctccaggccaactacacgtgtgagacagatggggcctgcatggtttccattttcaatctggatgggatggagcaccatgtgcgcacctgcatccccaaagtggagctggtccctgccgggaagcccttctactgcctgagctcggaggacctgcgcaacacccactgctgctacactgactactgcaacaggatcgacttgagggtgcccagtggtcacctcaaggagcctgagcacccgtccatgtggggcccggtggagctggtaggcatcatcgccggcccggtgttcctcctgttcctcatcatcatcattgttttccttgtcattaactatcatcagcgtgtctatcacaaccgccagagactggacatggaagatccctcatgtgagatgtgtctctccaaagacaagacgctccaggatcttgtctacgatctctccacctcagggtctggctcagggttacccctctttgtccagcgcacagtggcccgaaccatcgttttacaagagattattggcaagggtcggtttggggaagtatggcggggccgctggaggggtggtgatgtggctgtgaaaatattctcttctcgtgaagaacggtcttggttcagggaagcagagatataccagacggtcatgctgcgccatgaaaacatccttggatttattgctgctgacaataaagcagactgctcattcctcacattgccatgggaagttgtaatggtctctgctgcccccaagctgaggagccttagactccaatacaagggaggaaggggaagagcaagatttttattcccactgaataatggcacctggacacagctgtggcttgtttctgactatcatgagcacgggtccctgtttgattatctgaaccggtacacagtgacaattgaggggatgattaagctggccttgtctgctgctagtgggctggcacacctgcacatggagatcgtgggcacccaagggaagcctggaattgctcatcgagacttaaagtcaaagaacattctggtgaagaaaaatggcatgtgtgccatagcagacctgggcctggctgtccgtcatgatgcagtcactgacaccattgacattgccccgaatcagagggtggggaccaaacgatacatggcccctgaagtacttgatgaaaccattaatatgaaacactttgactcctttaaatgtgctgatatttatgccctcgggcttgtatattgggagattgctcgaagatgcaattctggaggagtccatgaagaatatcagctgccatattacgacttagtgccctctgacccttccattgaggaaatgcgaaaggttgtatgtgatcagaagctgcgtcccaacatccccaactggtggcagagttatgaggcactgcgggtgatggggaagatgatgcgagagtgttggtatgccaacggcgcagcccgcctgacggccctgcgcatcaagaagaccctctcccagctcagcgtgcaggaagacgtgaagatctaactgctccctctctccacacggagctcctggcagcgagaactacgcacagctgccgcgttgagcgtacgatggaggcctacctctcgtttctgcccagccctctgtgg

SEQ ID NO: 203578 - protein, 521 aa, Artificial Sequence
  derived and/or modified sequence
MDTESQYSGYSYKSGHSRSSRKHRDRRDRHRSKSRDGGRGDKSVTIQAPGEPLLDNESTRGDERDDNWGETTTVVTGTSEHSISHDDLTRIAKDMEDSVPLDCSRHLGVAAGATLALLSFLTPLAFLLLPPLLWREELEPCGTACEGLFISVAFKLLILLLGSWALFFRRPKASLPRVFVLRALLMVLVFLLVVSYWLFYGVRILDARERSYQGVVQFAVSLVDALLFVHYLAVVLLELRQLQPQFTLKVVRSTDGASRFYNVGHLSIQRVAVWILEKYYHDFPVYNPALLNLPKSVLAKKVSGFKVYSLGEENSTNNSTGQSRAVIAAAARRRDNSHNEYYYEEAEHERRVRKRRARLVVAVEEAFTHIKRLQEEEQKNPREVMDPREAAQAIFASMARAMQKYLRTTKQQPYHTMESILQHLEFCITHDMTPKAFLERYLAAGPTIQYHKERWLAKQWTLVSEEPVTNGLKDGIVFLLKRQDFSLVVSTKKVPFFKLSEEFVDPKSHKFVMRLQSETSV

SEQ ID NO: 203579 - DNA, 1566 bp, Artificial Sequence
  derived and/or modified sequence
atggacaccgagagccagtacagcggctacagctacaagagcggccacagcagaagcagcagaaagcacagagacagaagagacagacacagaagcaagagcagagacggcggcagaggcgacaagagcgtgaccatccaggcccccggcgagcccctgctggacaacgagagcaccagaggcgacgagagagacgacaactggggcgagaccaccaccgtggtgaccggcaccagcgagcacagcatcagccacgacgacctgaccagaatcgccaaggacatggaggacagcgtgcccctggactgcagcagacacctgggcgtggccgccggcgccaccctggccctgctgagcttcctgacccccctggccttcctgctgctgccccccctgctgtggagagaggagctggagccctgcggcaccgcctgcgagggcctgttcatcagcgtggccttcaagctgctgatcctgctgctgggcagctgggccctgttcttcagaagacccaaggccagcctgcccagagtgttcgtgctgagagccctgctgatggtgctggtgttcctgctggtggtgagctactggctgttctacggcgtgagaatcctggacgccagagagagaagctaccagggcgtggtgcagttcgccgtgagcctggtggacgccctgctgttcgtgcactacctggccgtggtgctgctggagctgagacagctgcagccccagttcaccctgaaggtggtgagaagcaccgacggcgccagcagattctacaacgtgggccacctgagcatccagagagtggccgtgtggatcctggagaagtactaccacgacttccccgtgtacaaccccgccctgctgaacctgcccaagagcgtgctggccaagaaggtgagcggcttcaaggtgtacagcctgggcgaggagaacagcaccaacaacagcaccggccagagcagagccgtgatcgccgccgccgccagaagaagagacaacagccacaacgagtactactacgaggaggccgagcacgagagaagagtgagaaagagaagagccagactggtggtggccgtggaggaggccttcacccacatcaagagactgcaggaggaggagcagaagaaccccagagaggtgatggaccccagagaggccgcccaggccatcttcgccagcatggccagagccatgcagaagtacctgagaaccaccaagcagcagccctaccacaccatggagagcatcctgcagcacctggagttctgcatcacccacgacatgacccccaaggccttcctggagagatacctggccgccggccccaccatccagtaccacaaggagagatggctggccaagcagtggaccctggtgagcgaggagcccgtgaccaacggcctgaaggacggcatcgtgttcctgctgaagagacaggacttcagcctggtggtgagcaccaagaaggtgcccttcttcaagctgagcgaggagttcgtggaccccaagagccacaagttcgtgatgagactgcagagcgagaccagcgtgtag

SEQ ID NO: 203580 - DNA, 1566 bp, Artificial Sequence
  derived and/or modified sequence
atggatactgagagccagtattctggatactcctacaagtccggtcactcacgatcttctcgcaaacaccgcgatcgaagggatcgccaccggtcgaagtcacgtgacggcggccggggagataagagcgtgacgattcaagcacctggagagccactcctcgataatgagagcacccgcggggatgagagagatgataattggggtgagactacaacggttgttactggcacttctgagcatagcatcagtcatgatgatctgactaggattgccaaagacatggaggattcagtgcccctggattgcagtagacatctcggcgttgccgccggagctacactcgcactcctgtcctttctgaccccactcgcattcctattgttaccccccctgctgtggcgggaagaactggagccttgcggtactgcatgcgaggggctttttatatctgtcgctttcaaattgcttatcctgttgctcggtagttgggcacttttttttagacgccctaaggctagcctgccaagagttttcgtgctcagggcactgttgatggtgctagtgtttctgcttgtggtttcgtattggttgttctacggagtgaggatcttggatgcaagggaacggtcttaccagggagtggtgcagtttgcagtgagtttggttgacgctctgctgttcgtccactacttagcagtagtgctgttagagctcagacagctgcagcctcagttcacattgaaggtggttcggtcgaccgacggcgccagccgattctataatgttgggcaccttagtattcagcgcgtagccgtatggatattggagaagtattatcacgacttccccgtgtacaaccccgctctccttaacctgcccaagtctgttttggcgaagaaggtgtcaggctttaaggtctattctctcggggaggaaaattcaaccaataattccacgggtcaaagccgggccgtgatcgccgctgctgcccgccgacgggacaactcccacaacgaatattattatgaagaagccgaacacgagagacgtgttaggaagcgtcgcgcccggctggtcgtagccgttgaagaagcattcacacacataaagcgcttgcaggaagaggaacagaagaatcctagagaagtcatggatcccagagaggccgctcaggcgattttcgcatctatggctagagcgatgcagaagtatttgagaaccaccaaacagcagccttatcatacaatggagtccattctgcagcatctggagttttgtataacacatgacatgacaccaaaggcattcctggaaaggtacctagccgcaggtcccacaattcagtaccataaggagcgctggctcgccaagcagtggacactcgtctcggaggagcccgtgaccaacggtttaaaggacggcatcgtcttcctgctcaagcgtcaggacttcagtctggtagtgtcgacaaaaaaggtgcccttctttaaacttagcgaagagttcgttgacccgaagtcgcacaaattcgtgatgcggctccagtcagaaacatcagtgtag

SEQ ID NO: 203581 - DNA, 1566 bp, Artificial Sequence
  derived and/or modified sequence
atggacacagagagccagtacagcggctacagctacaagagcggccacagccgcagcagcaggaagcaccgggaccggcgggacagacacaggagcaagagcagagatggcggccgcggggacaagtctgtgaccatccaggcccctggagagcccctgctggacaatgaaagcaccagaggagatgaaagagatgacaactggggcgagaccaccaccgtggtgacaggcaccagcgagcacagcatcagccatgatgacctgaccagaattgccaaggacatggaggacagcgtgcccctggactgcagccgccacctgggcgtggccgccggggccaccctggccctgctgtccttcctgacccccctggccttcctgctgctgccccccctgctgtggagggaggagctggagccctgtggcacagcctgtgagggcctcttcatctctgtggccttcaagctgctgatcctgctgctgggctcctgggccctcttcttcagaagacccaaggccagcctgccccgggtgtttgtgctgcgggccctgctgatggtgctggtgttcctgctggtggtgtcctactggctgttctacggcgtgcgcatcctggatgcccgggagaggagctaccagggcgtggtgcagtttgctgtgtccctggtggatgccctgctgtttgtgcactacctggccgtggtgctgctggagctgcggcagctgcagccccagttcaccctgaaggtggtgcgcagcacagatggagccagccgcttctacaacgtgggccacctgagcatccagagggtggccgtgtggatcctggagaagtactaccatgacttccctgtgtacaacccagccctgctgaacctgcccaagtctgtgctggccaagaaggtgtctggcttcaaggtgtacagcctgggggaggagaacagcaccaacaacagcacaggccagagcagagctgtgattgctgctgctgccaggagaagagacaacagccacaatgagtactactatgaggaggccgagcacgagcggcgggtgaggaagagaagagcccggctggtggtggccgtggaggaggccttcacccacatcaagaggctgcaggaggaggagcagaagaacccccgggaggtgatggacccccgggaggccgcccaggccatctttgcctccatggcccgggccatgcagaagtacctgcggaccaccaagcagcagccctaccacaccatggagagcatcctgcagcacctggagttctgcatcacccatgacatgacccccaaggccttcctggagcgctacctggccgccggccccaccatccagtaccacaaggagcgctggctggccaagcagtggaccctggtgtctgaggagcctgtgaccaacggcctgaaggatggcatcgtgttcctgctgaagaggcaggacttcagcctggtggtgtccaccaagaaggtgcccttcttcaagctgtctgaggagtttgtggaccccaagagccacaagtttgtgatgaggctgcagagcgagacctctgtgtag

SEQ ID NO: 203582 - DNA, 1566 bp, Artificial Sequence
  derived and/or modified sequence
atggacaccgagagccagtacagcggctacagctacaagagcggccattcccggagctctcgaaaacaccgagatcgtagggaccggcacagatcgaaatcacgtgacggaggcagaggcgacaagagcgttacaatccaagctccaggtgagccactcctggataacgagagcactagaggagacgagagagacgacaattggggggagacaactacggtggtaacagggacatcggagcattcaatttctcatgatgacttaacacgaatcgcaaaggatatggaagattctgtgcccctcgattgctctcgtcacctcggggtcgctgcgggggctactctcgctttgttgagcttcctgactccgctggccttccttttgttgcccccactgttgtggcgcgaggagctcgagccatgcggtacagcatgcgagggtctctttatttccgtggcattcaagctgttaatactgcttctgggaagctgggcgcttttctttcgacgaccgaaggccagtctccctcgtgtgttcgtcctcagggcccttctgatggtgttagtcttcctcctcgtagttagctattggctgttctatggtgttcgcattttggatgctagagagcgctcctatcaaggcgtcgtgcagttcgccgtctcactggttgacgctctgctctttgttcattatctggccgtcgttctcttggagttaaggcaactgcagcctcaattcacattgaaggtcgtccgctccaccgatggcgctagcaggttttacaatgttggacacctgagcatccaaagagtagccgtgtggattctcgagaagtattatcacgatttccctgtctataacccagctttgctaaacctgcccaagtctgtcttggccaaaaaggtatcagggtttaaggtgtactcactaggcgaagagaattccaccaataattcaacaggccagtctagagccgtgattgcagctgccgcacgtagaagggataactcccacaacgaatattactacgaggaggccgagcacgagcgcagagttcgtaaacggcgcgccaggttggttgtagctgttgaggaggcctttacacacattaaacgactccaggaagaagagcagaagaatccacgtgaagtcatggacccccgggaagctgcacaggccatattcgcgtccatggctcgagctatgcagaagtatctccggacaaccaaacagcagccatatcacaccatggagagcatactgcagcatctggaattctgtatcacgcacgacatgacaccgaaggctttcctcgaacgatacctcgccgctggccccactatccagtatcacaaggagcggtggctcgccaagcagtggacgctcgtgagcgaggagcccgtaactaatggccttaaggacggcattgtattcctacttaagaggcaggacttctccctagtcgtctccacaaagaaggttcccttctttaaactctctgaggagttcgtggaccccaaaagccacaagttcgtgatgaggctgcagtctgaaactagcgtttag

SEQ ID NO: 203583 - DNA, 1566 bp, Artificial Sequence
  derived and/or modified sequence
atggatactgagtctcagtactcaggctactcctataagagcggtcactcacgctctagcagaaaacacagggatcggcgagaccggcacagaagtaaatctagagatggcggtaggggggataaaagcgtgacaattcaggcgccaggcgaacccctgttagacaatgaatcaactcggggagacgagcgggacgataactggggtgagaccacaacagtagtgactggtacttcggagcattccatcagccacgacgatttgacacgtatcgcgaaggacatggaagactcagtgcctctcgactgttccaggcatttgggggtagcagccggtgccacattagccctcctcagctttttgacccccctggcttttcttctcttacctccactcctttggcgcgaagagcttgagccttgcggtactgcatgcgagggactcttcatatcagtcgccttcaagctgctgattttgctactcggaagttgggctctattctttcgcaggcctaaggccagtctgcctagggtattcgtgctgagggctctgctgatggttttggtgttcctgctggttgtctcctactggctgttctacggagtgcgaatactggacgctcgcgaaaggagctatcagggagtagtgcagttcgcggtgtcactcgtggacgcgctgctattcgttcactacctggctgtggtgctcctagagttgcgccaactccagcctcagtttacactgaaggtcgtgagatcaacagacggcgcttccagattctacaacgtcggacatctgagcatacaacgggtggctgtgtggatactcgagaagtattatcacgatttccccgtatataaccccgcactcctgaacctccccaagagcgtgcttgcgaaaaaggtgagtggcttcaaggtttactccctaggagaagagaacagcacgaacaactccaccggccagtccagggcagttatagcagctgccgcaaggcgcagagacaactcgcataatgagtactattacgaggaggccgagcacgaacgcagagttaggaagaggagagcgaggctggtcgtggctgtggaggaggcgtttacccatatcaaacggctacaggaggaggagcagaagaatcctagggaagttatggatccgcgagaagcagcacaggctatcttcgcctctatggctagagccatgcagaaatatctgcgcaccacaaagcagcaaccttaccacaccatggagagcatacttcagcatctagagttttgcattactcatgacatgaccccaaaggcttttttagaaagatacctcgctgctggccctacaatccagtaccacaaggaacgttggctcgcaaagcaatggacgttggtgtcggaggagcctgtgacaaatggacttaaggacggaattgtattcctgctcaaacgacaggacttttctttggtggtctctacaaagaaggtgccattcttcaagctaagtgaagagtttgtagacccaaaatcacacaaatttgtaatgcgccttcagtcagaaactagcgtgtag

SEQ ID NO: 203584 - DNA, 5340 bp, Artificial Sequence
  derived and/or modified sequence
gattcctgatccttgattccttgatccttggtcccgccatgggagcctgagcgccccctattcccccctggcccccagcccccggggccttgagggggaagaggcagcggtctgggacggagcagggggtgaccagactcaagaacccccccctcaacatcccccatcgcgcgcgctgcctgtccaggagcgccgagttcggagcgacccggagcgctgcggatacaaaggcgacgggccgagcggggcgcccgcggagcccacccggcagttcgcagcggcgggagcgtcgctggattttctctgagacaagcccacccgtccagcaaaatagagtccctcagggtgacagttgacttcctgaaggtgcctcttggcctaaagaagccggtgctgaaggaggtggctgtggggccccccaagaggccccagcctgcggccctggagcgctacaaggcgcggcgttcagacgccatggacaccgagtcccagtactcgggctattcctacaagtcgggccactcccgcagctcccgcaagcacagggaccgccgggaccgacaccgctctaagagtcgagatgggggccgaggggacaagtcggtgacaatccaggctcccggggagcccctgctggacaatgagtccacacgaggggatgagcgggatgacaactggggggaaacgacgacagtagtaacgggcacctcagagcacagcatctcccatgatgacctcacacgcatcgccaaggacatggaggacagtgtccctctggactgctcccgtcacctgggtgtggcagcgggggccaccctggcactgctgtctttcctcacgcctctggccttcctgctgctgcccccactgctgtggcgggaggagctggagccttgcgggacggcctgcgagggcctcttcatctctgtcgccttcaagctgctcatcctgctactgggcagctgggctctgttcttccgccggcccaaggcctcgctgccccgcgtctttgtgctgcgtgccctgcttatggtgctggttttcctgctcgtggtctcctactggctcttctatggtgtgcgcatcctggatgctcgggagcgcagctaccagggcgtggtgcagttcgccgtgtcgctggtggacgcccttcttttcgtgcactacctggccgtggtcctgctggagctgcgccagctccagcctcagttcacgctcaaggtcgtgcgctccaccgacggcgccagccgcttctacaacgttggccatctcagcatccagcgcgtggcagtgtggatcctggagaagtattaccatgacttccctgtctacaaccctgccctcctcaacctgcccaagtccgtcctggccaagaaagtgtctggcttcaaggtgtattccctcggagaggaaaacagcaccaacaactccactggccagtctcgggctgtgattgcagcggcagctcggaggcgggacaacagtcacaatgagtactactatgaggaggctgagcatgagcgaagggtgcgcaagaggagggccaggcttgtagtggcggtggaggaggccttcactcacattaagcggctgcaggaagaggagcagaaaaaccccagggaggtgatggacccccgggaggcagcccaagccatctttgcatccatggcccgtgccatgcagaagtaccttcggaccaccaagcagcagccctaccacaccatggagagcatcctgcagcaccttgaattctgcatcacgcatgacatgacgcccaaggccttcttggagcgatacttggcggctggacctaccatccagtaccacaaggaacgctggctggccaaacagtggacattggtgagcgaggagccggtgaccaacggcctcaaggatggcatcgttttcctcttaaaacgccaggacttcagcctggtggtcagcaccaagaaggtcccattcttcaaactctccgaggaatttgtggatcccaagtcacacaagtttgtcatgaggctgcagtctgagacctcagtgtgactgtgcaacagcagggggagtgggaaactctggggggtcctgagggggtgggagggggcttggttctcaggcccagccacattcctgccacccttcttcttcttgctcttttttttttacttgaattaacgcacccccaccttctctcctcgcttcttccttattttaccccatgtgaacctggagagaccatcctgctgtcaacagtacctgggaaggactcccacctcaccaacaacttttgtattactctaggccctgcaggaatcagtgcctctctccctcttctttccctagtcttttcccagattacagtctctcctgaaagggcacagggccctgctgattgtactttcccctcctgagccccgactcacaaatccaagttcttaaaacatttctcttcagtggcccaacagggtttctctggggcacatggacatgactccagagagccacagtgccaaactcctccagggcagcaactggccctcctgtccctcaccccagccacaacaaaccctgggttctagggcagggatactcctgccacacagcccgagttagaaatctccttgctaggagcatttgcttccacatatatttagagcaaagaaggatcccatccttttcccagaaatctccacctaatgtttttggtttgtatggtcacgtgaccataggcaaccacgtggaaaccctctgtgaccacttttccagggacttaggggaaggtacctttcttccaatgtgtcttcctaggcagcccctgaggaggagggctgaatagatccctgaggttttggagagacccccatcactgactcctgctccctaaccctaccctcactttcgtccccgctcttcccagtgaaggatggtatgtagactcctgtacagacatagtggcttgcagaccctgacccagcccctgtggtcttagacaaatgtttttatttttgtcaccagccacccctgtcctgccgccttctctcgactccagagacctgttgcctcatctcttttggggaagagccggcagctcctcctcatcccctgccttaagtccagttctttgcctcaggggtctcgtttccttggccttccagggtccccaccccttttctccctgcctgattctctgagctctgggctccgtctgtattgggttgaggggcaaggattactgccttttgtaggtacttcacccctcaccccattttagcttccatagtctttgcaccaaatccaaattcttgataatttagatctcattttgagcaaaatttgctggccctctaataaatattttcaatataaatctgagcctttgactcagacatttttgccaaggagagtagaattaggaagtacccatatacatccagccaggatccacatggaggacctttctgatggctgcaatgactaggccattcctctgagtaactcacagtgtccttttgtaggcccttcttttccctgaaagactggttggtacttaccttgcagagcacatcctgggataagatccccagtgtctcccctgggaggctccccctctgtgtagcaccagccctgggaatgatggagcctagtgatcggggtttctcctgctgtcctttctgcaaaagttcacttgtttacccaccgcatgctagagaggagctcattggccaatgcttaccttgtccccaaaggggtgggttgtggagctcacttaggcagggcctctggctggggccagggttatgagataggcctgtatgaaatatgtcctgttctgggggtctgtctcttttcttctcttcaaaaactttgtgtcagagagtcccttctgagtcacataaatacctcactatcctggaaaacagggcctggatggtgactggggtcattgcctttgtggacaggatggagtgtggtgtggtctgaggagcaggttggggtgggggagagggaaaggatttgggatcttagttgctgccctaggttaggggctggggagtgtttattttaagatcctgccatgtttttaatcactgtgatttttttttcattcccctttcctaaaaaaaattttttgcctccaactctctaagcactaagggctgtgcctgagaatggtagcattttggtcttttgcttcagaactgtggtatctttgtcttttttcattattattattattattattattattattactattgttttttaaaatgtcaggatgaattgtcagacatatggccatgtgtttgtcctctgcttctcccctgtgggaagttgtctccatgctgtgaactgctgtggggtgtgcagctgactcagtccctctgagcagtttccccactgtgtctgtcccatcatgcgctggatctgctcattctcctgctgtgggggtatgcccacctcttacccccttgacaccatagggctgctgtggctgggcctcaccagcactgtcttttgtgtgactcatggcatcctcgttcatccccaccgtgcctagcaggccttccttttcaccacctcggaacgcttgcctttcctccctccacaacaggacgctgtgcctcagtccttcacctacctcgccactctgccactgtccccattggtcctttctcctaaactggtctttgtgctctctttgttttttcttatttccctcttgtctctcattttttcttcccattcccctcccatttcagcccttaacttttctctttcccatctccactcagtattccaatggcaaaccctgatgatgtaacacctgcgatgagacatcggactctccggaactttctcatctgacacgtctttttcccagggttcgtacttctcctccattggtcccaggctaactcccctgttcctctgtggtgtctgtcagtccgtctgtcttctctttcctctgcccttcccacagggcagtatctgctgatggattcagtcctggtgtgtgattgttgtgatttgttcttccgtgcgcaaaaggaagagggctttttgagtcccttccaagtgagattgtaaatgtagaattttccactgttggatctagattttttttccttttttttgggggggtggggttacagagctgagaccttgtgcatgcatgtagaaaattgtaaaatgtaaattttttttaatatataaaaagcttgtttctacagtttgcagtggatctaaacattacggcaattttaggatttttttcttaaacataggaactaaaactgtacaaattttttttatataaaataaagacatttgacttttgtgggggca

SEQ ID NO: 203585 - protein, 1494 aa, Artificial Sequence
  derived and/or modified sequence
MYSEWRSLHLVIQNDQGHTSVLHSYPESVGREVANAVVRPLGQVLGTPSVAGSENLLKTDKEVKWTMEVICYGLTLPLDGETVKYCVDVYTDWIMALVLPKDSIPLPVIKEPNQYVQTILKHLQNLFVPRQEQGSSQIRLCLQVLRAIQKLARESSLMARETWEVLLLFLLQINDILLAPPTVQGGIAENLAEKLIGVLFEVWLLACTRCFPTPPYWKTAKEMVANWRHHPAVVEQWSKVICALTSRLLRFTYGPSFPAFKVPDEDASLIPPEMDNECVAQTWFRFLHMLSNPVDLSNPAIISSTPKFQEQFLNVSGMPQELNQYPCLKHLPQIFFRAMRGISCLVDAFLGISRPRSDSAPPTPVNRLSMPQSAAVSTTPPHNRRHRAVTVNKATMKTSTVSTAHASKVQHQTSSTSPLSSPNQTSSEPRPLPAPRRPKVNSILNLFGSWLFDAAFVHCKLHNGINRDSSMTAITTQASMEFRRKGSQMSTDTMVSNPMFDASEFPDNYEAGRAEACGTLCRIFCSKKTGEEILPAYLSRFYMLLIQGLQINDYVCHPVLASVILNSPPLFCCDLKGIDVVVPYFISALETILPDRELSKFKSYVNPTELRRSSINILLSLLPLPHHFGTVKSEVVLEGKFSNDDSSSYDKPITFLSLKLRLVNILIGALQTETDPNNTQMILGAMLNIVQDSALLEAIGCQMEMGGGENNLKSHSRTNSGISSASGGSTEPTTPDSERPAQALLRDYALNTDSAAGLLIRSIHLVTQRLNSQWRQDMSISLAALELLSGLAKVKVMVDSGDRKRAISSVCTYIVYQCSRPAPLHSRDLHSMIVAAFQCLCVWLTEHPDMLDEKDCLKEVLEIVELGISGSKSKNNEQEVKYKGDKEPNPASMRVKDAAEATLTCIMQLLGAFPSPSGPASPCSLVNETTLIKYSRLPTINKHSFRYFVLDNSVILAMLEQPLGNEQNDFFPSVTVLVRGMSGRLAWAQQLCLLPRGAKANQKLFVPEPRPVPKNDVGFKYSVKHRPFPEEVDKIPFVKADLSIPDLHEIVTEELEERHEKLRSGMAQQIAYEIHLEQQSEEELQKRSFPDPVTDCKPPPPAQEFQTARLFLSHFGFLSLEALKEPANSRLPPHLIALDSTIPGFFDDIGYLDLLPCRPFDTVFIFYMKPGQKTNQEILKNVESSRTVQPHFLEFLLSLGWSVDVGRHPGWTGHVSTSWSINCCDDGEGSQQEVISSEDIGASIFNGQKKVLYYADALTEIAFVVPSPVESLTDSLESNISDQDSDSNMDLMPGILKQPSLTLELFPNHTDNLNSSQRLSPSSRMRKLPQGRPVPPLGPETRVSVVWVERYDDIENFPLSELMTEISTGVETTANSSTSLRSTTLEKEVPVIFIHPLNTGLFRIKIQGATGKFNMVIPLVDGMIVSRRALGFLVRQTVINICRRKRLESDSYSPPHVRRKQKITDIVNKYRNKQLEPEFYTSLFQEVGLKNCSS

SEQ ID NO: 203586 - protein, 963 aa, Artificial Sequence
  derived and/or modified sequence
MYSEWRSLHLVIQNDQGHTSVLHSYPESVGREVANAVVRPLGQVLGTPSVAGSENLLKTDKEVKWTMEVICYGLTLPLDGETVKYCVDVYTDWIMALVLPKDSIPLPVIKEPNQYVQTILKHLQNLFVPRQEQGSSQIRLCLQVLRAIQKLARESSLMARETWEVLLLFLLQINDILLAPPTVQGGIAENLAEKLIGVLFEVWLLACTRCFPTPPYWKTAKEMVANWRHHPAVVEQWSKVICALTSRLLRFTYGPSFPAFKVPDEDASLIPPEMDNECVAQTWFRFLHMLSNPVDLSNPAIISSTPKFQEQFLNVSGMPQELNQYPCLKHLPQIFFRAMRGISCLVDAFLGISRPRSDSAPPTPVNRLSMPQSAAVSTTPPHNRRHRAVTVNKATMKTSTVSTAHASKVQHQTSSTSPLSSPNQTSSEPRPLPAPRRPKVNSILNLFGSWLFDAAFVHCKLHNGINRDSSMTAITTQASMEFRRKGSQMSTDTMVSNPMFDASEFPDNYEAGRAEACGTLCRIFCSKKTGEEILPAYLSRFYMLLIQGLQINDYVCHPVLASVILNSPPLFCCDLKGIDVVVPYFISALETILPDRELSKFKSYVNPTELRRSSINILLSLLPLPHHFGTVKSEVVLEGKFSNDDSSSYDKPITFLSLKLRLVNILIGALQTETDPNNTQMILGAMLNIVQDSALLEAIGCQMEMGGGENNLKSHSRTNSGISSASGGSTEPTTPDSERPAQALLRDYALNTDSAAGLLIRSIHLVTQRLNSQWRQDMSISLAALELLSGLAKVKVMVDSGDRKRAISSVCTYIVYQCSRPAPLHSRDLHSMIVAAFQCLCVWLTEHPDMLDEKDCLKEVLEIVELGISGSKSKNNEQEVKYKGDKEPNPASMRVKDAAEATLTCIMQLLGAFPSPSGPASPCSLVNETTLIKYSRLPTINKQLEPEFYTSLFQEVGLKNCSS

SEQ ID NO: 203587 - DNA, 4485 bp, Artificial Sequence
  derived and/or modified sequence
atgtacagcgagtggagaagcctgcacctggtgatccagaacgaccagggccacaccagcgtgctgcacagctaccccgagagcgtgggcagagaggtggccaacgccgtggtgagacccctgggccaggtgctgggcacccccagcgtggccggcagcgagaacctgctgaagaccgacaaggaggtgaagtggaccatggaggtgatctgctacggcctgaccctgcccctggacggcgagaccgtgaagtactgcgtggacgtgtacaccgactggatcatggccctggtgctgcccaaggacagcatccccctgcccgtgatcaaggagcccaaccagtacgtgcagaccatcctgaagcacctgcagaacctgttcgtgcccagacaggagcagggcagcagccagatcagactgtgcctgcaggtgctgagagccatccagaagctggccagagagagcagcctgatggccagagagacctgggaggtgctgctgctgttcctgctgcagatcaacgacatcctgctggccccccccaccgtgcagggcggcatcgccgagaacctggccgagaagctgatcggcgtgctgttcgaggtgtggctgctggcctgcaccagatgcttccccacccccccctactggaagaccgccaaggagatggtggccaactggagacaccaccccgccgtggtggagcagtggagcaaggtgatctgcgccctgaccagcagactgctgagattcacctacggccccagcttccccgccttcaaggtgcccgacgaggacgccagcctgatcccccccgagatggacaacgagtgcgtggcccagacctggttcagattcctgcacatgctgagcaaccccgtggacctgagcaaccccgccatcatcagcagcacccccaagttccaggagcagttcctgaacgtgagcggcatgccccaggagctgaaccagtacccctgcctgaagcacctgccccagatcttcttcagagccatgagaggcatcagctgcctggtggacgccttcctgggcatcagcagacccagaagcgacagcgccccccccacccccgtgaacagactgagcatgccccagagcgccgccgtgagcaccacccccccccacaacagaagacacagagccgtgaccgtgaacaaggccaccatgaagaccagcaccgtgagcaccgcccacgccagcaaggtgcagcaccagaccagcagcaccagccccctgagcagccccaaccagaccagcagcgagcccagacccctgcccgcccccagaagacccaaggtgaacagcatcctgaacctgttcggcagctggctgttcgacgccgccttcgtgcactgcaagctgcacaacggcatcaacagagacagcagcatgaccgccatcaccacccaggccagcatggagttcagaagaaagggcagccagatgagcaccgacaccatggtgagcaaccccatgttcgacgccagcgagttccccgacaactacgaggccggcagagccgaggcctgcggcaccctgtgcagaatcttctgcagcaagaagaccggcgaggagatcctgcccgcctacctgagcagattctacatgctgctgatccagggcctgcagatcaacgactacgtgtgccaccccgtgctggccagcgtgatcctgaacagcccccccctgttctgctgcgacctgaagggcatcgacgtggtggtgccctacttcatcagcgccctggagaccatcctgcccgacagagagctgagcaagttcaagagctacgtgaaccccaccgagctgagaagaagcagcatcaacatcctgctgagcctgctgcccctgccccaccacttcggcaccgtgaagagcgaggtggtgctggagggcaagttcagcaacgacgacagcagcagctacgacaagcccatcaccttcctgagcctgaagctgagactggtgaacatcctgatcggcgccctgcagaccgagaccgaccccaacaacacccagatgatcctgggcgccatgctgaacatcgtgcaggacagcgccctgctggaggccatcggctgccagatggagatgggcggcggcgagaacaacctgaagagccacagcagaaccaacagcggcatcagcagcgccagcggcggcagcaccgagcccaccacccccgacagcgagagacccgcccaggccctgctgagagactacgccctgaacaccgacagcgccgccggcctgctgatcagaagcatccacctggtgacccagagactgaacagccagtggagacaggacatgagcatcagcctggccgccctggagctgctgagcggcctggccaaggtgaaggtgatggtggacagcggcgacagaaagagagccatcagcagcgtgtgcacctacatcgtgtaccagtgcagcagacccgcccccctgcacagcagagacctgcacagcatgatcgtggccgccttccagtgcctgtgcgtgtggctgaccgagcaccccgacatgctggacgagaaggactgcctgaaggaggtgctggagatcgtggagctgggcatcagcggcagcaagagcaagaacaacgagcaggaggtgaagtacaagggcgacaaggagcccaaccccgccagcatgagagtgaaggacgccgccgaggccaccctgacctgcatcatgcagctgctgggcgccttccccagccccagcggccccgccagcccctgcagcctggtgaacgagaccaccctgatcaagtacagcagactgcccaccatcaacaagcacagcttcagatacttcgtgctggacaacagcgtgatcctggccatgctggagcagcccctgggcaacgagcagaacgacttcttccccagcgtgaccgtgctggtgagaggcatgagcggcagactggcctgggcccagcagctgtgcctgctgcccagaggcgccaaggccaaccagaagctgttcgtgcccgagcccagacccgtgcccaagaacgacgtgggcttcaagtacagcgtgaagcacagacccttccccgaggaggtggacaagatccccttcgtgaaggccgacctgagcatccccgacctgcacgagatcgtgaccgaggagctggaggagagacacgagaagctgagaagcggcatggcccagcagatcgcctacgagatccacctggagcagcagagcgaggaggagctgcagaagagaagcttccccgaccccgtgaccgactgcaagccccccccccccgcccaggagttccagaccgccagactgttcctgagccacttcggcttcctgagcctggaggccctgaaggagcccgccaacagcagactgcccccccacctgatcgccctggacagcaccatccccggcttcttcgacgacatcggctacctggacctgctgccctgcagacccttcgacaccgtgttcatcttctacatgaagcccggccagaagaccaaccaggagatcctgaagaacgtggagagcagcagaaccgtgcagccccacttcctggagttcctgctgagcctgggctggagcgtggacgtgggcagacaccccggctggaccggccacgtgagcaccagctggagcatcaactgctgcgacgacggcgagggcagccagcaggaggtgatcagcagcgaggacatcggcgccagcatcttcaacggccagaagaaggtgctgtactacgccgacgccctgaccgagatcgccttcgtggtgcccagccccgtggagagcctgaccgacagcctggagagcaacatcagcgaccaggacagcgacagcaacatggacctgatgcccggcatcctgaagcagcccagcctgaccctggagctgttccccaaccacaccgacaacctgaacagcagccagagactgagccccagcagcagaatgagaaagctgccccagggcagacccgtgccccccctgggccccgagaccagagtgagcgtggtgtgggtggagagatacgacgacatcgagaacttccccctgagcgagctgatgaccgagatcagcaccggcgtggagaccaccgccaacagcagcaccagcctgagaagcaccaccctggagaaggaggtgcccgtgatcttcatccaccccctgaacaccggcctgttcagaatcaagatccagggcgccaccggcaagttcaacatggtgatccccctggtggacggcatgatcgtgagcagaagagccctgggcttcctggtgagacagaccgtgatcaacatctgcagaagaaagagactggagagcgacagctacagccccccccacgtgagaagaaagcagaagatcaccgacatcgtgaacaagtacagaaacaagcagctggagcccgagttctacaccagcctgttccaggaggtgggcctgaagaactgcagcagctag

SEQ ID NO: 203588 - DNA, 2892 bp, Artificial Sequence
  derived and/or modified sequence
atgtacagcgagtggagaagcctgcacctggtgatccagaacgaccagggccacaccagcgtgctgcacagctaccccgagagcgtgggcagagaggtggccaacgccgtggtgagacccctgggccaggtgctgggcacccccagcgtggccggcagcgagaacctgctgaagaccgacaaggaggtgaagtggaccatggaggtgatctgctacggcctgaccctgcccctggacggcgagaccgtgaagtactgcgtggacgtgtacaccgactggatcatggccctggtgctgcccaaggacagcatccccctgcccgtgatcaaggagcccaaccagtacgtgcagaccatcctgaagcacctgcagaacctgttcgtgcccagacaggagcagggcagcagccagatcagactgtgcctgcaggtgctgagagccatccagaagctggccagagagagcagcctgatggccagagagacctgggaggtgctgctgctgttcctgctgcagatcaacgacatcctgctggccccccccaccgtgcagggcggcatcgccgagaacctggccgagaagctgatcggcgtgctgttcgaggtgtggctgctggcctgcaccagatgcttccccacccccccctactggaagaccgccaaggagatggtggccaactggagacaccaccccgccgtggtggagcagtggagcaaggtgatctgcgccctgaccagcagactgctgagattcacctacggccccagcttccccgccttcaaggtgcccgacgaggacgccagcctgatcccccccgagatggacaacgagtgcgtggcccagacctggttcagattcctgcacatgctgagcaaccccgtggacctgagcaaccccgccatcatcagcagcacccccaagttccaggagcagttcctgaacgtgagcggcatgccccaggagctgaaccagtacccctgcctgaagcacctgccccagatcttcttcagagccatgagaggcatcagctgcctggtggacgccttcctgggcatcagcagacccagaagcgacagcgccccccccacccccgtgaacagactgagcatgccccagagcgccgccgtgagcaccacccccccccacaacagaagacacagagccgtgaccgtgaacaaggccaccatgaagaccagcaccgtgagcaccgcccacgccagcaaggtgcagcaccagaccagcagcaccagccccctgagcagccccaaccagaccagcagcgagcccagacccctgcccgcccccagaagacccaaggtgaacagcatcctgaacctgttcggcagctggctgttcgacgccgccttcgtgcactgcaagctgcacaacggcatcaacagagacagcagcatgaccgccatcaccacccaggccagcatggagttcagaagaaagggcagccagatgagcaccgacaccatggtgagcaaccccatgttcgacgccagcgagttccccgacaactacgaggccggcagagccgaggcctgcggcaccctgtgcagaatcttctgcagcaagaagaccggcgaggagatcctgcccgcctacctgagcagattctacatgctgctgatccagggcctgcagatcaacgactacgtgtgccaccccgtgctggccagcgtgatcctgaacagcccccccctgttctgctgcgacctgaagggcatcgacgtggtggtgccctacttcatcagcgccctggagaccatcctgcccgacagagagctgagcaagttcaagagctacgtgaaccccaccgagctgagaagaagcagcatcaacatcctgctgagcctgctgcccctgccccaccacttcggcaccgtgaagagcgaggtggtgctggagggcaagttcagcaacgacgacagcagcagctacgacaagcccatcaccttcctgagcctgaagctgagactggtgaacatcctgatcggcgccctgcagaccgagaccgaccccaacaacacccagatgatcctgggcgccatgctgaacatcgtgcaggacagcgccctgctggaggccatcggctgccagatggagatgggcggcggcgagaacaacctgaagagccacagcagaaccaacagcggcatcagcagcgccagcggcggcagcaccgagcccaccacccccgacagcgagagacccgcccaggccctgctgagagactacgccctgaacaccgacagcgccgccggcctgctgatcagaagcatccacctggtgacccagagactgaacagccagtggagacaggacatgagcatcagcctggccgccctggagctgctgagcggcctggccaaggtgaaggtgatggtggacagcggcgacagaaagagagccatcagcagcgtgtgcacctacatcgtgtaccagtgcagcagacccgcccccctgcacagcagagacctgcacagcatgatcgtggccgccttccagtgcctgtgcgtgtggctgaccgagcaccccgacatgctggacgagaaggactgcctgaaggaggtgctggagatcgtggagctgggcatcagcggcagcaagagcaagaacaacgagcaggaggtgaagtacaagggcgacaaggagcccaaccccgccagcatgagagtgaaggacgccgccgaggccaccctgacctgcatcatgcagctgctgggcgccttccccagccccagcggccccgccagcccctgcagcctggtgaacgagaccaccctgatcaagtacagcagactgcccaccatcaacaagcagctggagcccgagttctacaccagcctgttccaggaggtgggcctgaagaactgcagcagctag

SEQ ID NO: 203589 - DNA, 1434 bp, Artificial Sequence
  derived and/or modified sequence
atgtacagcgagtggagaagcctgcacctggtgatccagaacgaccagggccacaccagcgtgctgcacagctaccccgagagcgtgggcagagaggtggccaacgccgtggtgagacccctgggccaggtgctgggcacccccagcgtggccggcagcgagaacctgctgaagaccgacaaggaggtgaagtggaccatggaggtgatctgctacggcctgaccctgcccctggacggcgagaccgtgaagtactgcgtggacgtgtacaccgactggatcatggccctggtgctgcccaaggacagcatccccctgcccgtgatcaaggagcccaaccagtacgtgcagaccatcctgaagcacctgcagaacctgttcgtgcccagacaggagcagggcagcagccagatcagactgtgcctgcaggtgctgagagccatccagaagctggccagagagagcagcctgatggccagagagacctgggaggtgctgctgctgttcctgctgcagatcaacgacatcctgctggccccccccaccgtgcagggcggcatcgccgagaacctggccgagaagctgatcggcgtgctgttcgaggtgtggctgctggcctgcaccagatgcttccccacccccccctactggaagaccgccaaggagatggtggccaactggagacaccaccccgccgtggtggagcagtggagcaaggtgatctgcgccctgaccagcagactgctgagattcacctacggccccagcttccccgccttcaaggtgcccgacgaggacgccagcctgatcccccccgagatggacaacgagtgcgtggcccagacctggttcagattcctgcacatgctgagcaaccccgtggacctgagcaaccccgccatcatcagcagcacccccaagttccaggagcagttcctgaacgtgagcggcatgccccaggagctgaaccagtacccctgcctgaagcacctgccccagatcttcttcagagccatgagaggcatcagctgcctggtggacgccttcctgggcatcagcagacccagaagcgacagcgccccccccacccccgtgaacagactgagcatgccccagagcgccgccgtgagcaccacccccccccacaacagaagacacagagccgtgaccgtgaacaaggccaccatgaagaccagcaccgtgagcaccgcccacgccagcaaggtgcagcaccagaccagcagcaccagccccctgagcagccccaaccagaccagcagcgagcccagacccctgcccgcccccagaagacccaaggtgaacagcatcctgaacctgttcggcagctggctgttcgacgccgccttcgtgcactgcaagctgcacaacggcatcaacagagacagcagcatgaccgacttcacctgcttctag

SEQ ID NO: 203590 - DNA, 4485 bp, Artificial Sequence
  derived and/or modified sequence
atgtatagtgaatggagatcactccacttggtgattcagaacgaccagggccatacgtccgtgttgcactcataccccgagtccgtgggtcgtgaagttgctaatgcggtagtacgaccacttggacaggtcctgggtaccccgagcgttgctggcagcgagaatttgttgaaaacagacaaggaggttaagtggaccatggaggtgatctgctacggcctgacacttccactggacggagaaaccgtgaagtattgcgtcgatgtgtataccgactggattatggcactggtattgcctaaggattctattccattgcccgtgatcaaggagcctaaccagtatgtgcagactatcctgaagcaccttcaaaatctgtttgtccctcgtcaggagcaaggatcttcccagatccgactctgcctacaggtgcttcgtgctatacaaaagttggcgcgagaatcaagtctgatggcccgggagacctgggaggtactactgctgttcctgctgcagattaatgacatcttgctcgccccccccaccgtgcaaggtggtatcgcggaaaacctcgcggaaaagttgataggagtgctgtttgaggtgtggctgcttgcctgtacaaggtgcttcccaacgcccccctactggaaaaccgccaaggaaatggttgccaactggagacaccacccagcagttgtggagcagtggtccaaggtcatctgcgctctgacatccagacttctgagattcacctatggaccctcctttccggccttcaaggtgcccgatgaagacgcttctttaatcccacctgagatggataacgaatgcgtcgcacagacttggtttcgtttcctgcacatgctgagtaatccagttgatctgtcaaacccggccattatctcttcgacaccgaagtttcaggagcagtttttaaacgtgtccggaatgcctcaggaattaaaccagtatccatgcctgaaacacctacctcagattttctttagggccatgcgagggatcagctgtctagttgatgccttcttgggaatctccaggcctagaagcgactccgccccaccaacaccggtcaacagactgagcatgcctcagagtgcagccgtgagcactacccccccacataacagaaggcacagagcagtgaccgtgaataaagctactatgaaaacaagcacagtctcaactgctcacgcgagcaaagtacaacaccagacatctagcacatcaccgttgagtagtccaaaccaaaccagcagcgagcctaggcctctgccggctcccaggagacccaaggttaatagtatcctaaacctcttcggatcctggctcttcgatgcggcgttcgtccattgcaaactgcacaacgggatcaacagagatagtagcatgaccgcaatcaccacccaggccagtatggaattcaggagaaaggggtcccagatgagcacagatactatggtgagcaatccaatgttcgacgcctctgagtttccagataattacgaagctgggcgggccgaagcatgtggcaccttatgtcgcatcttctgtagcaagaagacaggtgaagaaatcctgccagcttacctaagccgcttttatatgctcttaattcaggggctacagatcaatgactacgtctgtcacccagtgcttgcctctgtgattctaaatagccctccccttttctgctgtgacctgaagggcatcgacgttgttgtgccttacttcattagtgccctggaaaccattctgccggaccgggagctcagtaagtttaaatcatatgtgaacccgaccgaacttagacgtagctccatcaatattcttctgtccctcctgccactgccccaccacttcggaacggttaagagtgaggtggtgctggaaggtaaattctcaaacgacgactcatcttcatatgacaagccaattacatttctctctctaaaactgcgcctagtaaatatcctgataggcgctttgcaaacagagacagaccccaataatactcagatgatcctcggggctatgctgaacatcgttcaggattccgcactgcttgaagctatcggctgtcagatggaaatgggaggcggcgagaataacttgaagtcccatagccgtaccaactctgggatttcctccgcatcaggaggctctactgaacccaccactccagacagtgaaaggcccgctcaagccttacttagggattatgctctcaataccgattctgccgcaggccttttaattcgatcaatccacctagttacacagaggctcaacagtcagtggcgtcaagacatgagcatctcactggcagcgttggagctgctgtcaggtctggcaaaagttaaagtgatggtggactcaggggaccgtaaacgcgctatctcaagcgtgtgcacatacattgtgtaccaatgtagccgccccgccccactccacagtcgcgatctgcacagcatgatagtggccgccttccagtgcttatgcgtctggctcaccgaacatcctgacatgttggacgagaaggattgtcttaaggaagtgttggagattgtggagctggggattagcggctcaaaaagcaaaaacaacgagcaggaggttaaatacaagggggacaaggagcctaacccagcatccatgcgcgtgaaagacgccgcagaggctacactgacgtgcataatgcagctgttgggagcttttccctcgcctagtggccccgccagcccttgctcactagtgaatgagacaaccttgattaaatactccagattgccaacaatcaataagcacagttttcgatatttcgttctggataactctgtgatcctcgcgatgctggaacagcccctggggaatgaacagaatgatttcttccctagcgtaactgtgttagtcagagggatgtccgggcgactcgcctgggctcagcagctctgtctgctgccccgcggtgccaaggcaaaccagaaattgtttgtgcctgaacccagaccagttccaaaaaacgatgtcggtttcaagtactctgttaagcatagaccttttcccgaagaggttgacaagatcccatttgtgaaggccgatctaagcatcccagatctgcacgaaatagtcactgaagagctggaggagcgtcacgagaagctgcgctccggcatggctcaacagattgcctacgaaatccacttagaacaacagagcgaagaagagttacaaaaaagatctttccccgatcctgtgacagactgtaagccccccccccctgctcaggagttccagactgcaagacttttcttaagtcactttggcttcctgagtcttgaagctctgaaggaaccagccaattcccggctgcccccccaccttattgcccttgattctacgattccagggttctttgacgatatcggttacctggatctactgccctgccgcccatttgataccgttttcatattttacatgaaaccaggtcagaagacaaaccaagagatcctgaaaaatgtggaatccagtcgtaccgtgcagccacatttcctggaattcctgctgtcccttggctggtccgtagacgtaggccggcatccaggatggacaggacatgtttccacatcgtggtcaatcaattgttgcgatgacggagaaggatctcaacaggaggtgatttctagcgaggacatcggtgccagcatctttaatggacagaagaaggtgctgtattacgccgatgctcttactgaaatagcattcgtggtgcccagccctgtggagtcactgacagatagtttggagagtaatatcagtgaccaagactccgactcaaatatggaccttatgccgggcattctcaagcaaccatcactgacactggagctcttccccaaccataccgacaatctgaacagcagtcaaagactcagcccctctagtagaatgcgcaaactgccacagggcaggccggtgccaccactcgggcccgagacaagggtgtcagttgtgtgggtggagcgatacgacgatatagaaaattttcctctgtccgaactgatgaccgaaatcagcaccggggtggagaccaccgccaatagttctacttctctccgaagcaccaccctcgaaaaagaagtacctgtgatcttcattcacccactgaacacagggctgtttcgtattaaaatccagggagccacagggaagttcaacatggtgatacctctcgtcgacggtatgatcgtctcaagaagggcactaggttttctcgtacgccagactgtcattaacatctgcagacggaaacgccttgaaagtgacagctactcgccaccccacgtgcggagaaagcagaaaatcacggacattgtaaacaagtatagaaacaagcaactggaaccagagttctacacatccctcttccaggaggtgggtctcaagaattgtagctcttag

SEQ ID NO: 203591 - DNA, 2892 bp, Artificial Sequence
  derived and/or modified sequence
atgtacagtgaatggcggtcattacacctggtgatacaaaacgaccagggacatacttctgtgttgcactcataccccgaaagtgtcggacgtgaagtggctaacgccgtggttcggcccttgggccaggtgctgggcaccccctccgtggccgggtccgaaaacctgctcaagacagataaagaggtcaagtggaccatggaggtaatctgctacggcctgacactgcccctcgacggagaaactgtgaagtactgtgtcgatgtgtacaccgattggatcatggcactagtgctccccaaagatagcatcccactccctgttatcaaggagcccaatcaatacgtgcagaccatcctgaagcatctccaaaatctgtttgtgcctcgccaggaacagggcagttctcagataagattgtgtctccaggtgttgagagccatccagaagctcgcccgtgaatctagcctgatggcccgggaaacatgggaagtgctactactgtttctcctgcagattaatgatatccttctcgcccctccgactgtccaaggtggaattgcagaaaatttggccgaaaaactcattggcgtcctctttgaagtttggctactggcttgcacaaggtgtttccctacaccgccatattggaagacagctaaggaaatggttgcgaattggaggcatcatcccgccgtggtggaacagtggtcgaaggtgatttgcgccctcacatcccgtcttctgcggttcacatacggtccctcgttccccgcctttaaagtgccagacgaagacgctagcctcattcctcccgaaatggacaatgaatgtgttgcccagacttggttccgcttcttgcacatgctgagcaatccagtggacctctctaacccagcaattatctcttccactcctaagttccaggaacagttccttaacgttagtggcatgcctcaggagttaaatcaatacccatgcctcaaacacctaccccagatcttcttcagagcaatgaggggtatcagttgtctagtggacgcctttctggggatctcgaggcctcgctcagattctgcacccccaacccctgtcaatcggctctccatgccccagagtgccgccgtctccacaaccccaccccacaaccgacgccacagagccgtgaccgtcaataaagcaacgatgaagacatcaacagtgtcaacggcacacgcatctaaagtgcagcatcagacttcctccacttcacccctgtctagtcccaaccaaacaagtagcgagcccagacctttgccggcccctcggagaccaaaggttaactccatcttgaatctttttgggtcctggctcttcgatgccgctttcgtgcattgcaaattgcacaacgggatcaacagggattcttccatgacagctatcaccacgcaggctagcatggaattccgtcgtaaggggtcgcagatgagcaccgacacaatggtctcaaaccctatgttcgatgcaagcgaatttcctgataattatgaggcaggcagagccgaggcatgcggcactttatgcaggatcttctgtagcaaaaagacgggcgaggaaatcttacccgcctatctaagcagattttacatgttgctgattcagggcctccagatcaatgattacgtgtgtcatccagtgttggccagtgtaatcctgaattctcctccccttttctgttgtgatctgaagggtatcgacgtggtggtcccctactttatctctgctctcgaaaccattttaccagaccgagagctatcaaagtttaagtcttacgttaacccaaccgaactcaggaggtccagcattaatattcttctgtctcttttgcctcttcctcatcacttcggaaccgtgaagtcagaagtggttttggaaggaaaattttccaatgatgatagctcttcgtacgataagccaatcacattcctgtccctgaagttaagactggtgaatattctgatcggggcgctgcaaacagagaccgatcccaacaacacacagatgattctgggagctatgctgaacatcgtgcaagattcagctctgttggaggctattggctgtcagatggaaatgggaggcggcgagaataatctgaaaagccattcaaggacgaattctggaatctcttccgccagtggggggtctaccgagcccacaactcctgacagcgagaggccagctcaagcccttctcagagattacgccctcaacacggactcggccgctggcttattgataaggagcatccatctggtgacccagaggctgaactctcagtggagacaagacatgtccatctctctcgcagccctggagctgttgtccggcctcgccaaggtgaaagttatggtggactctggcgatagaaaacgcgctatatcctctgtgtgtacatacatagtctatcagtgctccagaccagcaccgttacatagccgcgacctccactcaatgatcgttgccgctttccaatgtctgtgtgtttggctgactgagcacccagacatgctggacgagaaagactgcctgaaagaggtcctcgaaatcgtggagctgggtatcagcgggtctaagtctaaaaacaacgagcaggaagtgaaatacaagggagacaaggagcctaaccccgcatccatgcgcgtaaaagacgcggccgaggccactcttacctgtattatgcaactgttaggcgctttcccttctccgagcgggcctgcctcaccatgttccctggtgaacgaaaccacgctgatcaagtatagtcgcctgcctaccatcaacaagcaactggagccagagttctacacctcattgttccaagaggtggggctaaagaattgttctagttag

SEQ ID NO: 203592 - DNA, 4485 bp, Artificial Sequence
  derived and/or modified sequence
atgtatagcgaatggcgtagcctacacctcgtgattcagaatgaccagggccacacttccgtgttacacagctacccagagagcgtgggccgggaggtcgctaatgcagttgtcaggcctcttggtcaggtattaggcactccttctgtggcaggatctgaaaaccttctgaagactgacaaggaggtcaagtggacaatggaagtaatctgttatggcctgacactgcccctcgatggggagactgtaaagtactgcgtggatgtctataccgattggatcatggctcttgtgcttccaaaagatagcatacctctgcccgtgattaaggaaccaaaccagtacgtacagaccatcctcaagcatctccagaacttattcgtgccgcgccaagagcaaggcagctcgcaaatccggctgtgtctgcaagtgctcagagctatacagaaactggctagggaaagctctctgatggcccgcgagacctgggaggtgctgctactgtttcttcttcagatcaacgatatactcctggctcccccaactgtgcagggaggcatcgcagaaaacttagctgaaaaacttatcggagtcctatttgaagtctggcttctggcgtgtacacgctgcttccctactccaccttattggaaaacggctaaagagatggtggccaattggcgacaccaccccgcagtcgtggaacagtggtcaaaggtcatctgcgctctaacctcccgtttgcttaggttcacatatggcccgagtttccctgcgtttaaggttcctgacgaggacgcatccttaattccccctgagatggataacgagtgtgttgcccaaacctggttccgcttcctgcacatgctctctaacccggtggacctcagtaatcccgctatcatctcttccactcccaaattccaggagcagttcttaaacgtttccggcatgccccaggagctcaatcagtacccttgtttgaaacatctgccccagattttcttcagagccatgaggggaatctcttgcctggtggacgctttcctgggaatctcaaggccacgaagcgattcggctccgcccacccccgtgaaccgactgagtatgccccagtctgcagcggtctccactacacctccacataacagacgccacagggctgtaacagtgaataaagccacaatgaaaacttccactgtttccacagcacacgcttctaaggttcaacatcagacttcttctactagccctctgtctagtcctaaccagaccagctcagaacctagacctctcccagcgccgcggagaccaaaggtgaactcaatcctcaacctgtttggcagttggctttttgacgcagcctttgtgcactgcaaactgcataacggtatcaaccgggacagcagtatgaccgcaattacgacacaagcatcaatggaattcagaagaaagggctcgcagatgagcaccgacaccatggtgagcaatcccatgttcgacgcatccgagtttcctgataattatgaagccggccgcgccgaggcgtgtggcaccctatgccgtattttttgctccaagaaaaccggagaggagattttgcccgcctacctgtctcggttttacatgctattgattcaagggttgcagatcaatgattacgtttgccatccagtactggcttccgtgatcctgaatagcccgccactgttctgttgcgatctgaagggcattgacgtcgtggtgccgtatttcatttccgcactggagactatccttcccgatcgggaactgtccaaattcaagtcttatgtaaatcctactgagctgcggagatcgtcaataaacatcttactcagcctgctgccgcttccccaccatttcggaactgttaaatccgaagttgtgttggagggcaaattttctaatgacgatagctcgtcctatgataaaccaattactttcctgagcctgaaactccggctagtgaacatcttgatcggagctctccaaacagagacggatcctaataacacccagatgatcctgggcgccatgttgaacatcgtccaagattctgctctgctcgaggcaattgggtgccagatggaaatgggtggtggggagaataacctaaagagtcacagccgaacaaactctggtatttccagcgcgagcggaggcagcactgaacctactactccggattcagagaggccagcccaggccctgctgcgcgattatgcactgaataccgacagtgcagcaggcctcctgattcgatcaatacacttggtgacccagaggttaaacagtcagtggagacaagacatgagcataagtttggccgccctggagctgctctccggcttggccaaagtcaaagttatggttgacagcggcgatcggaagagggccatcagcagtgtgtgtacctacatcgtctatcagtgtagtaggcccgcgcctctccactcgagagacctgcattctatgatcgtcgctgctttccagtgcctgtgcgtctggttgacagaacaccccgatatgctggatgaaaaagactgtttgaaggaagttctggaaatagtggaactgggcatcagcggatccaaatcaaagaacaacgaacaggaagttaagtacaagggggataaagaaccgaatcctgcatcaatgagagtgaaagacgccgccgaggctactcttacatgtattatgcaactgttgggtgcattcccttctccaagcggacctgcctcaccatgttctctagtcaatgagaccacgctgattaagtatagtagattgcctacgatcaacaaacatagcttcaggtatttcgtcttggataacagcgtgattttggccatgctggagcagcccctaggtaatgagcagaatgattttttccctagcgtgactgtgctagtgaggggaatgtcaggccgactggcctgggcacagcagctgtgtcttctgcctcggggtgcgaaagccaaccaaaagttgttcgttcccgaaccccggcctgtccctaagaatgatgtggggtttaagtatagcgtcaaacatcggccctttcccgaagaagtagacaaaatcccattcgtgaaggccgatttgtcgatccccgatctgcacgagattgttaccgaagagcttgaggagcgacacgaaaagctgcgttccgggatggcccagcagattgcatacgaaattcacctcgaacagcagagtgaagaagaactgcaaaagaggtcatttcctgatcccgtaacagactgcaagcctccacctcccgcacaggagttccaaacagcccggctgttcctttctcatttcggttttctcagtctggaggccctgaaagagcccgctaattcccggttaccaccgcacctgatcgctctggattccaccattccaggtttttttgatgatataggctatcttgatctcctgccatgtaggccgtttgatacagtgtttattttttacatgaaacctggccaaaagactaaccaagagatacttaaaaacgtggaatccagcagaaccgtgcagccacatttcctggaattcctgctgagcctgggctggtccgtggacgtgggtagacatcctggctggactgggcatgtctctacttcctggtccattaattgttgcgatgacggagagggttctcagcaggaagtgattagcagtgaggatatcggcgcatcaatttttaatggacagaaaaaagtgttgtactacgctgacgctctgactgagatagcgtttgtcgttcctagtccggtggagagcctgaccgattctctggaaagcaacatatccgaccaggattccgatagcaacatggatctaatgcccggcatccttaaacaaccaagtctgacgctggagctttttcccaatcacaccgacaatctgaatagcagtcagcgtctgtcaccaagttcgagaatgagaaaattgccacaaggccggcccgtgcccccacttggtcccgaaacgagagtcagcgtggtatgggtcgagcggtatgacgatattgagaatttcccactatctgagcttatgaccgaaatctccacgggagttgagacgactgccaactctagcacatccctaagatccacaaccctggagaaagaagtgccggtcatatttattcacccgttaaatacaggcctgttcaggatcaagattcaaggggctactggaaaatttaacatggtgattccactcgtggacggaatgatcgtgtcccggagggctctgggctttctggtgagacagactgttatcaacatctgtcggcgcaaacggctggagagcgactcctactctccgcctcacgttaggcggaagcagaagatcactgacatcgttaataagtacaggaacaagcaattggaacctgagttctacacgtcgctcttccaggaggttggcttgaaaaattgctctagctag

SEQ ID NO: 203593 - DNA, 1434 bp, Artificial Sequence
  derived and/or modified sequence
atgtacagtgagtggcgaagtctccatctggttattcagaatgaccagggtcacacgtccgtgcttcatagttatcccgagtcggtgggcagagaagttgccaatgccgttgtaaggcctcttggacaggtgctgggaaccccctcagtagctggtagtgagaacctcctaaagacagataaggaagtgaaatggaccatggaagtgatatgctacggtcttacattgcctttagatggcgagactgtgaagtattgcgtagatgtgtatactgattggataatggccttagtccttcctaaggatagcatccccctgccggtcattaaggagccgaatcagtacgttcagaccatcctgaaacacctccaaaacctatttgtgcccagacaggagcagggatcatcccaaattcgactgtgccttcaggttcttagggctattcagaagttggcaagagaaagcagccttatggcaagggagacctgggaagtactgctccttttcctcctgcaaatcaacgatatattattggcgccccctaccgtgcagggcggcatcgccgaaaatctggccgagaagttgatcggagtcctttttgaggtctggttattagcttgtactcgctgtttccccaccccaccctattggaaaaccgctaaggagatggtagccaactggaggcatcacccagctgtcgtagagcagtggtcaaaagtgatttgtgctctgacatcaaggctcttgaggtttacatacggaccatcgttcccagcgtttaaagttccagatgaagacgcatcattaatcccgcccgagatggataatgagtgcgtggctcagacatggttcagatttttgcacatgctctccaatcccgtcgacctttcaaatcctgctattataagcagcactcccaaatttcaggagcagttcctcaacgtgagcggtatgccccaagaactcaatcaatacccatgccttaagcacctaccacaaatattcttccgcgcaatgcgtgggatttcttgccttgtcgacgccttcctaggcatctctcgaccccgaagcgacagcgctccccccactcctgtaaaccggctctcaatgcctcagtctgctgccgtgagtaccacacctcctcataaccgacggcatcgggctgtgacagtcaataaagcaacaatgaaaacgtccaccgtgagcacggcccacgcctcaaaggtacaacaccaaacatcgagcactagcccgctcagcagtccaaatcagacctcttccgagccccgccccctaccagcgcctagaaggccaaaagtcaactccatattgaacttgtttggctcatggctgtttgatgccgctttcgtgcattgcaagctgcacaatgggattaacagggacagttccatgaccgatttcacctgcttctag

SEQ ID NO: 203594 - DNA, 4485 bp, Artificial Sequence
  derived and/or modified sequence
atgtacagcgagtggaggagcctgcacctggtgatccagaatgaccagggccacacctctgtgctgcacagctacccagagagcgtgggccgggaggtggccaatgctgtggtgcggcccctgggccaggtgctgggcaccccatctgtggccggcagcgagaacctgctgaagacagacaaggaggtgaagtggaccatggaggtgatctgctacggcctgaccctgcccctggatggagagaccgtgaagtactgtgtggatgtgtacacagactggatcatggccctggtgctgcccaaggacagcatccccctgcctgtgatcaaggagcccaaccagtatgtgcagaccatcctgaagcacctgcagaacctgtttgtgccccggcaggagcagggcagcagccagatccggctgtgcctgcaggtgctgcgggccatccagaagctggcccgggagagcagcctgatggcccgggagacctgggaggtgctgctgctcttcctgctgcagatcaatgacatcctgctggccccacccaccgtgcagggcggcattgctgagaacctggccgagaagctgattggagtgctgtttgaggtgtggctgctggcctgcacccgctgcttccccaccccaccctactggaagacagccaaggagatggtggccaactggaggcaccaccctgctgtggtggagcagtggagcaaggtgatctgtgccctgaccagccggctgctgcgcttcacctacggccccagcttccctgccttcaaggtgcctgatgaagatgccagcctcatccccccagagatggacaatgaatgtgtggcccagacctggttccgcttcctgcacatgctgagcaaccctgtggacctgagcaacccagccatcatcagcagcacccccaagttccaggagcagttcctgaatgtgtctggcatgccccaggagctgaaccagtacccctgcctgaagcacctgccccagatcttcttccgggccatgaggggcatcagctgcctggtggatgccttcctgggcatcagccggcccaggagtgacagcgccccacccacccctgtgaaccggctgtccatgccccagagcgctgctgtgtccaccaccccaccccacaacagaagacacagagctgtgacagtgaacaaggccaccatgaagaccagcacagtgtccacagcccacgccagcaaggtgcagcaccagaccagcagcaccagccccctgagcagccccaaccagaccagcagcgagccccggcccctgcctgccccccggcggcccaaggtgaacagcatcctgaacctgtttggctcctggctgtttgatgctgcctttgtgcactgcaagctgcacaacggcatcaacagagacagctccatgacagccatcaccacccaggcctccatggagttccggaggaagggcagccagatgagcacagacaccatggtgagcaaccccatgtttgatgccagcgagttcccagacaactatgaagctggccgggcagaggcctgtggcaccctgtgccgcatcttctgcagcaagaagacaggagaggagatcctgcctgcctacctgagccgcttctacatgctgctgatccagggcctgcagatcaatgactatgtgtgccaccctgtgctggccagcgtcatcctgaacagccccccactcttctgctgtgacctgaagggcattgatgtggtggtgccctacttcatcagcgccctggagaccatcctgcctgaccgggagctgagcaagttcaagagctatgtgaaccccacagagctgcggcgcagcagcatcaacatcctgctgagcctgctgcccctgccccaccacttcggcaccgtgaagtctgaggtggtgctggagggcaagttcagcaatgatgacagcagcagctatgacaagcccatcaccttcctgagcctgaagctgcggctggtgaacatcctgattggagccctgcagacagaaacagaccccaacaacacccagatgatcctgggcgccatgctgaacatcgtgcaggacagcgccctgctggaggccatcggctgccagatggagatgggcggcggggagaacaacctgaagagccacagcaggaccaacagcggcatcagcagcgccagcggcggcagcacagagcccaccaccccagattctgagaggcctgcccaggccctgctgcgggactatgccctgaacacagacagcgctgctggcctgctgatccgcagcatccacctggtgacccagaggctgaacagccagtggaggcaggacatgagcatcagcctggccgccctggagctgctgagcggcctggccaaggtgaaggtgatggtggacagcggggacaggaagagggccatcagctctgtgtgcacctacatcgtgtaccagtgcagcaggcctgcccccctgcacagccgggacctgcacagcatgattgtggccgccttccagtgcctgtgtgtgtggctgacagagcacccagacatgctggatgagaaggactgcctgaaggaggtgctggagatcgtggagctgggcatcagcggcagcaagagcaagaacaatgagcaggaggtgaagtacaagggggacaaggagcccaacccagcctccatgagggtgaaggatgctgctgaggccaccctgacctgcatcatgcagctgctgggcgccttccccagccccagcggccctgccagcccctgcagcctggtgaatgagaccaccctcatcaagtacagccggctgcccaccatcaacaagcacagcttccgctactttgtgctggacaacagcgtcatcctggccatgctggagcagcccctgggcaatgagcagaatgacttcttccccagcgtgacagtgctggtgcggggcatgagcggccgcctggcctgggcccagcagctgtgcctgctgcccaggggggccaaggccaaccagaagctgtttgtgcctgagcccaggcctgtgcccaagaatgatgtgggcttcaagtacagcgtgaagcaccggcccttccctgaggaggtggacaagatcccctttgtgaaggctgacctgagcatcccagacctgcacgagatcgtgacagaggagctggaggagagacatgagaagctgcggagcggcatggcccagcagatcgcctatgagatccacctggagcagcagagcgaggaggagctgcagaagaggagcttcccagaccctgtgacagactgcaagcccccacctccagcccaggagttccagacagcccggctcttcctgagccacttcggcttcctgagcctggaggccctgaaggagcccgccaacagccggctgcccccccacctgattgccctggacagcaccatccctggcttctttgatgacatcggctacctggacctgctgccctgccggccctttgacaccgtcttcatcttctacatgaagccaggccagaagaccaaccaggagatcctgaagaatgtggagagcagcaggacagtgcagccccacttcctggagttcctgctgagcctgggctggagcgtggatgtgggccgccaccctggctggacaggccacgtgtccacctcctggagcatcaactgctgtgatgatggagagggcagccagcaggaggtgatcagcagcgaggacatcggggccagcatcttcaacggccagaagaaggtgctgtactatgcagatgccctgacagaaattgcctttgtggtgcccagccctgtggagagcctgacagacagcctggagagcaacatcagtgaccaggacagcgacagcaacatggacctgatgcctggcatcctgaagcagcccagcctgaccctggagctgttccccaaccacacagacaacctgaacagcagccagaggctgagccccagcagcaggatgaggaagctgccccagggccggcctgtgccccccctgggccctgagaccagggtgtctgtggtgtgggtggagagatatgatgacatcgagaacttccccctgtctgagctgatgacagagatcagcactggagtggagaccacagccaacagcagcaccagcctgcggagcaccaccctggagaaggaggtgcctgtgatcttcatccaccccctgaacacaggcctcttccgcatcaagatccagggcgccaccgggaagttcaacatggtgatccccctggtggatggcatgattgtgtccagaagagccctgggcttcctggtgcggcagaccgtcatcaacatctgcaggaggaagaggctggagagtgacagctacagccccccccacgtgcggaggaagcagaagatcacagacatcgtgaacaagtacagaaacaagcagctggagcctgagttctacaccagcctcttccaggaggtgggcctgaagaactgcagcagctag

SEQ ID NO: 203595 - DNA, 2892 bp, Artificial Sequence
  derived and/or modified sequence
atgtacagcgagtggaggagcctgcacctggtgatccagaatgaccagggccacacctctgtgctgcacagctacccagagagcgtgggccgggaggtggccaatgctgtggtgcggcccctgggccaggtgctgggcaccccatctgtggccggcagcgagaacctgctgaagacagacaaggaggtgaagtggaccatggaggtgatctgctacggcctgaccctgcccctggatggagagaccgtgaagtactgtgtggatgtgtacacagactggatcatggccctggtgctgcccaaggacagcatccccctgcctgtgatcaaggagcccaaccagtatgtgcagaccatcctgaagcacctgcagaacctgtttgtgccccggcaggagcagggcagcagccagatccggctgtgcctgcaggtgctgcgggccatccagaagctggcccgggagagcagcctgatggcccgggagacctgggaggtgctgctgctcttcctgctgcagatcaatgacatcctgctggccccacccaccgtgcagggcggcattgctgagaacctggccgagaagctgattggagtgctgtttgaggtgtggctgctggcctgcacccgctgcttccccaccccaccctactggaagacagccaaggagatggtggccaactggaggcaccaccctgctgtggtggagcagtggagcaaggtgatctgtgccctgaccagccggctgctgcgcttcacctacggccccagcttccctgccttcaaggtgcctgatgaagatgccagcctcatccccccagagatggacaatgaatgtgtggcccagacctggttccgcttcctgcacatgctgagcaaccctgtggacctgagcaacccagccatcatcagcagcacccccaagttccaggagcagttcctgaatgtgtctggcatgccccaggagctgaaccagtacccctgcctgaagcacctgccccagatcttcttccgggccatgaggggcatcagctgcctggtggatgccttcctgggcatcagccggcccaggagtgacagcgccccacccacccctgtgaaccggctgtccatgccccagagcgctgctgtgtccaccaccccaccccacaacagaagacacagagctgtgacagtgaacaaggccaccatgaagaccagcacagtgtccacagcccacgccagcaaggtgcagcaccagaccagcagcaccagccccctgagcagccccaaccagaccagcagcgagccccggcccctgcctgccccccggcggcccaaggtgaacagcatcctgaacctgtttggctcctggctgtttgatgctgcctttgtgcactgcaagctgcacaacggcatcaacagagacagctccatgacagccatcaccacccaggcctccatggagttccggaggaagggcagccagatgagcacagacaccatggtgagcaaccccatgtttgatgccagcgagttcccagacaactatgaagctggccgggcagaggcctgtggcaccctgtgccgcatcttctgcagcaagaagacaggagaggagatcctgcctgcctacctgagccgcttctacatgctgctgatccagggcctgcagatcaatgactatgtgtgccaccctgtgctggccagcgtcatcctgaacagccccccactcttctgctgtgacctgaagggcattgatgtggtggtgccctacttcatcagcgccctggagaccatcctgcctgaccgggagctgagcaagttcaagagctatgtgaaccccacagagctgcggcgcagcagcatcaacatcctgctgagcctgctgcccctgccccaccacttcggcaccgtgaagtctgaggtggtgctggagggcaagttcagcaatgatgacagcagcagctatgacaagcccatcaccttcctgagcctgaagctgcggctggtgaacatcctgattggagccctgcagacagaaacagaccccaacaacacccagatgatcctgggcgccatgctgaacatcgtgcaggacagcgccctgctggaggccatcggctgccagatggagatgggcggcggggagaacaacctgaagagccacagcaggaccaacagcggcatcagcagcgccagcggcggcagcacagagcccaccaccccagattctgagaggcctgcccaggccctgctgcgggactatgccctgaacacagacagcgctgctggcctgctgatccgcagcatccacctggtgacccagaggctgaacagccagtggaggcaggacatgagcatcagcctggccgccctggagctgctgagcggcctggccaaggtgaaggtgatggtggacagcggggacaggaagagggccatcagctctgtgtgcacctacatcgtgtaccagtgcagcaggcctgcccccctgcacagccgggacctgcacagcatgattgtggccgccttccagtgcctgtgtgtgtggctgacagagcacccagacatgctggatgagaaggactgcctgaaggaggtgctggagatcgtggagctgggcatcagcggcagcaagagcaagaacaatgagcaggaggtgaagtacaagggggacaaggagcccaacccagcctccatgagggtgaaggatgctgctgaggccaccctgacctgcatcatgcagctgctgggcgccttccccagccccagcggccctgccagcccctgcagcctggtgaatgagaccaccctcatcaagtacagccggctgcccaccatcaacaagcagctggagcctgagttctacaccagcctcttccaggaggtgggcctgaagaactgcagcagctag

SEQ ID NO: 203596 - DNA, 1434 bp, Artificial Sequence
  derived and/or modified sequence
atgtacagcgagtggaggagcctgcacctggtgatccagaatgaccagggccacacctctgtgctgcacagctacccagagagcgtgggccgggaggtggccaatgctgtggtgcggcccctgggccaggtgctgggcaccccatctgtggccggcagcgagaacctgctgaagacagacaaggaggtgaagtggaccatggaggtgatctgctacggcctgaccctgcccctggatggagagaccgtgaagtactgtgtggatgtgtacacagactggatcatggccctggtgctgcccaaggacagcatccccctgcctgtgatcaaggagcccaaccagtatgtgcagaccatcctgaagcacctgcagaacctgtttgtgccccggcaggagcagggcagcagccagatccggctgtgcctgcaggtgctgcgggccatccagaagctggcccgggagagcagcctgatggcccgggagacctgggaggtgctgctgctcttcctgctgcagatcaatgacatcctgctggccccacccaccgtgcagggcggcattgctgagaacctggccgagaagctgattggagtgctgtttgaggtgtggctgctggcctgcacccgctgcttccccaccccaccctactggaagacagccaaggagatggtggccaactggaggcaccaccctgctgtggtggagcagtggagcaaggtgatctgtgccctgaccagccggctgctgcgcttcacctacggccccagcttccctgccttcaaggtgcctgatgaagatgccagcctcatccccccagagatggacaatgaatgtgtggcccagacctggttccgcttcctgcacatgctgagcaaccctgtggacctgagcaacccagccatcatcagcagcacccccaagttccaggagcagttcctgaatgtgtctggcatgccccaggagctgaaccagtacccctgcctgaagcacctgccccagatcttcttccgggccatgaggggcatcagctgcctggtggatgccttcctgggcatcagccggcccaggagtgacagcgccccacccacccctgtgaaccggctgtccatgccccagagcgctgctgtgtccaccaccccaccccacaacagaagacacagagctgtgacagtgaacaaggccaccatgaagaccagcacagtgtccacagcccacgccagcaaggtgcagcaccagaccagcagcaccagccccctgagcagccccaaccagaccagcagcgagccccggcccctgcctgccccccggcggcccaaggtgaacagcatcctgaacctgtttggctcctggctgtttgatgctgcctttgtgcactgcaagctgcacaacggcatcaacagagacagctccatgacagacttcacctgcttctag

SEQ ID NO: 203597 - DNA, 4485 bp, Artificial Sequence
  derived and/or modified sequence
atgtacagcgagtggcggagcctgcacctggtgatccagaacgaccagggtcatacttcagtgcttcactcgtaccctgaatcggtgggaagggaggtggctaacgccgtggtgcgaccattggggcaggttctaggaacaccctctgtagccggatccgaaaatctgctcaagacagacaaggaagtgaagtggaccatggaggtaatttgctacggcctgacattgcctctcgacggtgaaactgttaagtattgcgtagatgtgtacacagactggatcatggcccttgtattgcccaaggatagcattccgcttccagttatcaaggaacctaatcagtatgtgcagacgatcctgaagcacctgcaaaatctctttgtccctcgacaggaacaaggtagcagccagatccggctgtgtctccaggtattacgggctattcagaaacttgccagagagtcgagcctcatggcccgggagacatgggaggtgctcctgctctttctactacagatcaatgatatccttctcgcacccccaactgtgcagggcggaatcgccgagaatctcgccgagaagttgataggcgtgctgtttgaagtttggctgttggcgtgcactagatgtttcccaactcccccgtattggaagacggccaaggagatggtggccaactggcgccatcaccccgctgtggtcgagcagtggtcaaaagtcatttgcgcgctgacaagtcggctgctgcgctttacctacggtccgtcattccctgccttcaaagttcctgacgaagacgcttcactgattccccccgagatggacaacgagtgtgtggctcaaacttggtttcgctttctccatatgctttctaatcctgtggatctgtccaatccagccatcataagcagtactcctaaattccaagagcagttcctcaacgtgtccgggatgccccaggaactgaatcaatacccgtgtctcaagcatttaccccagatcttctttagagccatgaggggcatttcttgtctggtagacgcatttctggggatatccagacccagaagcgactccgccccacccacccccgtgaataggctttcaatgccccagagtgctgctgtgtctaccactccacctcataaccgtagacacagagcagtcaccgtcaacaaagcgaccatgaaaactagcacggtgagcacggcccacgccagcaaagtacaacatcaaacgagcagcacaagcccactaagttcaccgaaccagacatcttcggagcctcgtccacttcccgctcctaggcgtccgaaggtgaattccatcctcaacctgttcggcagttggcttttcgatgccgcattcgtgcattgcaaactgcacaatggtattaatagagactccagcatgacagccatcactacccaggcgtcgatggagtttcgcagaaaaggtagtcagatgagcaccgatacaatggtgagtaatcccatgttcgacgcgagtgaatttcctgacaactatgaggccgggcgggctgaagcttgtggtacactttgcagaatcttttgctctaagaagacaggggaagaaatcctgcccgcatatttgagccgtttttacatgctacttatccagggacttcagatcaatgactatgtgtgtcacccagttctggcctctgtgatccttaattccccaccgcttttttgctgcgacctaaaaggcattgacgtggtcgtcccttacttcattagcgcactcgagacaatactgccagaccgggagttaagtaagtttaaatcatacgttaaccccactgaactgcggaggtccagcatcaacattcttctaagcctgcttccactcccccaccattttggtactgtgaagtcagaggtggtccttgaagggaagttctcaaacgacgatagctcctcctatgacaaaccaatcacgtttctctctctcaaactcaggctggtgaatatactcataggagcccttcagacagagactgatccaaacaacactcagatgattctgggggcgatgctgaatattgttcaggattctgctttgctggaagctattgggtgtcagatggaaatggggggaggagaaaataacctcaaaagtcactctcgcaccaactcgggcatatcatccgcatcaggtgggtccacagaacctacgacacccgacagtgaaagacccgcccaggcccttctgagagattatgcacttaacacagactccgccgctgggctcctcatcaggtccatccacttggtgacccagaggctgaactctcaatggcgccaggacatgtccattagcctcgccgcactggagttattaagcggactggcaaaagtcaaggttatggtcgacagcggagacaggaaaagggcgatcagttccgtctgtacctatattgtctatcagtgttctaggccagcacccctgcattccagggatctgcactctatgatcgtagccgcttttcaatgtctgtgcgtgtggctgacagaacaccccgatatgcttgacgaaaaggattgtctcaaggaagtcctggaaattgtggagctcggcatcagtggatcaaaaagcaagaataacgagcaggaagtgaaatataagggagataaagaacctaacccagcatcaatgcgcgtcaaagacgccgcagaagctactctgacctgcatcatgcagttgctgggagcattcccctccccttccgggcccgctagtccttgctcccttgtcaacgaaactaccctgatcaagtattcaaggttacccaccatcaacaagcacagctttcgctacttcgtactagacaactcagtgatccttgccatgcttgaacagcctctgggcaacgagcagaacgatttcttccctagcgtgaccgtgttggtccgagggatgagcggacgtctagcctgggctcaacaactttgtttgttgccgagaggggccaaggctaatcaaaagctcttcgtgccagaaccgcgacctgtccccaaaaatgacgtgggtttcaagtactctgttaagcataggccgtttccagaggaagtggacaagatcccttttgtgaaggcagatctgtccattccggacctgcatgagattgtcaccgaggaactagaggagcgacacgagaaactgagaagcggtatggctcagcagatcgcctacgaaatccacctggaacagcaatccgaggaggagctgcaaaagcgttcctttcccgaccccgtgacagactgcaaaccccccccccccgctcaggaattccaaactgcccgtctctttctgtctcactttggctttctttccctggaagcgctgaaggaacccgccaactctaggttgcccccacatctgatagctctggactccactatcccagggttctttgatgatatcggataccttgacctgctcccatgtcgtccattcgacacggttttcatcttttatatgaagccaggtcaaaaaactaaccaggagatcctgaagaatgttgagtcgtcccgaactgtccagccacacttcctcgaatttctgctctcactgggttggagcgtggacgtaggccgacatcccggatggacagggcacgtgagtacttcttggtccatcaactgttgtgacgatggagaagggagtcagcaggaggtgatctcttctgaagacatcggagcgtctatttttaatggacagaagaaggtcctgtattacgccgacgcgctcaccgaaatcgcttttgttgtgccctcccccgtagagagtcttacggactcgctggaaagcaatatctcagaccaagactccgattccaacatggacttaatgccaggtattctgaagcagccaagtttaacactcgagctgttccctaatcacactgacaatttgaactcttcacagcggctctccccgtctagtaggatgagaaaactgccacaaggcaggcccgtgccgcctctggggccagagaccagggtgagcgtggtgtgggtggagcgatacgatgatatcgaaaattttcccctttcagagttgatgacagagatatcaacaggcgtagagaccactgccaatagctcaacatcccttcggtcaaccacacttgagaaggaggtccctgtcattttcattcatcccctgaacaccgggctgtttcgtataaaaattcagggcgctactggaaagttcaacatggtgattccactcgttgacggcatgattgtcagccgaagggccttgggctttctcgtgagacagacagttatcaacatttgtagacgcaagcgactggaatccgactcttattcaccaccgcatgtgaggagaaagcagaagatcaccgatatcgtcaacaaatatcggaacaagcagcttgagcctgagttttacaccagcctgtttcaggaggtgggattaaaaaattgcagttcatag

SEQ ID NO: 203598 - DNA, 2892 bp, Artificial Sequence
  derived and/or modified sequence
atgtacagcgagtggcggagcctgcacctggtgatccagaacgaccagggacatacatccgtcctgcatagttatcccgagagcgtcggaagggaagtggcaaacgccgtggttcgccctctcggccaggttctgggtacgccctcggtggcaggctccgagaatttgctgaaaactgataaagaggtgaaatggacgatggaagtgatatgctacggcttgaccctgccccttgatggagagacggtgaagtactgcgtggacgtgtatactgattggatcatggccctagtcctgccgaaggactccatccctctcccagtgatcaaggagcctaatcagtacgtgcagactattctgaagcatctgcagaacctgtttgttccccgccaggagcaaggctcttcacagatacgtctgtgcctgcaggtactgagagccatccagaaactggccagagaaagcagcctgatggcacgcgaaacttgggaagttctcttattgttcttgctccagattaatgacattttattagccccacctacagtacaaggtggaatcgctgagaatctcgccgaaaagctgatcggagttctgtttgaagtgtggctactggcctgtactcgatgtttccccactcccccatactggaagactgccaaggagatggtcgcgaactggcgccaccatcccgcggtggtggagcagtggtccaaggtgatttgcgccctgaccagtcgtctgctgcgtttcacatacggcccttccttccctgcctttaaagttcccgacgaggacgcttccctcatccctccagagatggacaacgaatgtgtagcccagacttggtttaggtttctccatatgctgtccaacccggttgatctgtctaaccccgccatcatctcctctactccaaaatttcaggaacagttccttaatgtatctgggatgccacaggagctgaaccagtacccgtgcttgaagcacctgccacagatcttttttcgcgccatgagaggcatctcctgcctcgttgatgccttcctcgggatctcacgcccgcgatccgactccgcacctcctacccccgtgaataggctttccatgcctcaaagcgcggcagttagcacaactccacctcacaacagacgccatcgtgcagtgactgtaaacaaggccactatgaaaacttcaaccgtatccactgctcacgcttctaaagttcagcatcagacttccagtacaagcccgttatcatcccccaaccagaccagcagtgagcctcggcccctccccgccccacgccgtccaaaagtgaattcaattctgaatctgttcgggtcatggctgttcgacgctgcctttgttcactgcaagctccacaatgggattaatagggatagcagcatgactgcgattacaacccaagcaagtatggaattcaggcggaagggatcacaaatgagtaccgataccatggtctctaatccgatgttcgacgctagtgagtttcccgacaactacgaggccggacgagcagaagcttgcgggaccctgtgtagaatcttttgttcgaaaaagacaggggaagagatactcccagcttacctatcccgcttctatatgctactcattcagggactccagattaacgattatgtgtgccacccggtactcgctagcgtgattctgaatagccctcctttgttctgttgcgacttaaaaggaatcgatgtggtggtgccttattttatttcagccctggaaaccatattacccgaccgcgaactgtctaagttcaagagttacgtaaatcctacggagctgaggcgttccagcatcaatatcctgctgagtcttttgccactccctcatcattttggcaccgtaaaatcagaagtggtgctagagggcaaatttagtaatgacgactcctcatcctacgacaagccgatcacattcctctcattaaaacttcgcttggtgaacatcctgattggggccctgcaaacagagaccgatcctaataacacgcagatgatcctcggggccatgctcaacatcgtacaggatagtgccctgctcgaggcaatcggctgccaaatggaaatgggcggtggcgaaaataacctcaagtcacattcccgaacaaacagcggcatctcatcagcctccggcggatccacagagccgaccacccctgattcggaacgccccgcccaggccctgctgcgcgattacgccttgaatactgactcagctgctggcctgcttataaggtctatacatctggttacacaacgtctaaactctcagtggaggcaggatatgagtatctctctcgcagcgctggagttgctctctggcctggccaaagtcaaagtaatggtggactccggcgacagaaaacgagctattagcagtgtttgtacatacattgtgtatcagtgttctagaccagctcctcttcacagccgcgatctgcattcaatgatcgtagctgcttttcagtgcctgtgcgtctggctgaccgaacatccagacatgctagacgaaaaagattgcctgaaagaagtgctggaaatagtcgaactcgggatttcagggagcaagtctaagaataacgagcaagaggtgaagtataagggggataaggaaccgaatccggccagcatgagagtgaaggacgccgctgaagctacgctgacatgtatcatgcagcttctgggggcattccctagtccctcaggtccagctagtccttgttcactggtaaacgagaccacgttgattaagtattctcgcctgccaactatcaacaagcagctggagccagagttctatacaagtctgttccaggaggttgggctgaagaattgcagcagctag

SEQ ID NO: 203599 - DNA, 4485 bp, Artificial Sequence
  derived and/or modified sequence
atgtacagcgagtggcggagcctgcacctggtgatccagaacgaccagggtcatacttccgtgctccacagctatcctgagagcgtgggacgggaggtggccaatgcagtcgttcgcccattgggacaggtgctcggtacgcccagtgtggccggttccgaaaacttgctgaaaaccgataaagaggtgaaatggacaatggaggtgatctgttacggacttactctgcctcttgacggcgagactgtgaagtattgtgtcgacgtttacacggactggatcatggcactggtattgcctaaggatagtatcccactccccgtgattaaggaacccaatcagtatgtgcagactatcttaaagcaccttcagaatctttttgtgcctagacaggagcagggctccagccagatacgcctgtgtctgcaagtattacgcgccattcagaaactggcgagagaatctagtctgatggcaagggaaacctgggaagttctgttgttgttcttgctccagattaacgacatcctcctcgctccaccgacggtgcagggaggcatagctgaaaatctggcagagaagctcataggcgttttattcgaagtctggttacttgcgtgtacgaggtgctttccgactccgccttattggaagacggctaaagaaatggttgctaattggcgccaccaccccgccgtagtcgaacagtggtctaaggttatttgtgccttaacaagccgcctgttgcggtttacatatggtcctagcttccccgcctttaaagttcctgacgaggacgcctcgctgatcccccctgagatggataacgagtgtgtcgcacaaacttggttcagattccttcatatgctgagtaatcccgtggacttgagcaatccagcaataatatcaagcactcctaagttccaagaacagtttctgaatgtgagcggcatgccccaggaacttaatcagtacccctgcctgaagcacctgccacaaatcttcttcagggccatgagggggatcagttgtttggtggacgcctttctgggcatatctaggccaaggtccgattcagctccaccaacacctgtcaaccggctttccatgcctcaatccgccgcagtcagcactacaccccctcataaccgtcgccatcgggccgtgacagtcaacaaggctactatgaaaaccagtacagtcagcacagctcacgcctcaaaggtgcaacatcagaccagtagtacgagccctctctctagcccgaaccagacaagcagtgagccccgccctctcccagcccctagacgcccaaaggttaatagcattctgaatctatttggctcctggctgttcgatgcagccttcgtgcattgcaaacttcacaatgggatcaatcgtgatagctcaatgaccgccatcactactcaagccagcatggaattccggaggaaaggaagccagatgtcaaccgatacaatggtaagcaatcccatgtttgatgcttccgagtttcccgataactacgaagccggccgagcggaggcttgcggaaccctttgccgtatcttctgctccaaaaaaacaggcgaggagattctcccagcctacctgagcaggttctacatgcttcttattcagggattacagatcaacgattatgtttgtcatccagtgctggcgtccgtcatcctgaacagcccaccactcttctgttgcgacctcaagggcattgacgtcgttgtcccatattttatctcagcacttgagacaatccttcctgatagggagctctccaagttcaagtcctacgtcaacccaactgagctgagaagaagcagtatcaacattctgctgagcttgttacccttgccgcatcatttcggaacagtgaagtcagaagtcgtcctggagggaaagttctcgaacgacgacagctcctcatacgataaacctatcacttttctgtcgctcaaactgagactggtgaacatcctaattggcgcgttgcagacggaaacagaccctaataacacccagatgatcctgggtgctatgctaaatattgtgcaggattcggcgctgcttgaagctatcggatgccagatggaaatgggcggcggcgagaataaccttaagagccacagccgcacgaattccggaatttcgtctgcttcaggcggctctaccgagcccaccaccccagatagcgaacgccctgctcaggcactgctgcgggattacgcccttaataccgatagtgcagcaggcttattgatccgtagtatccatctagtgactcaaaggctcaatagtcagtggaggcaggacatgagcattagcctggccgccttggaactgttaagtgggcttgctaaggtgaaggtcatggtggactctggggataggaaacgagctattagtagcgtgtgcacttatatcgtgtaccaatgttctagacccgcccctctgcatagtcgggatctgcactcgatgatcgtggcggcatttcaatgtctatgcgtctggctgacggaacaccccgatatgctggatgagaaggattgtctgaaagaagtccttgaaatcgtagagcttggcatcagtggatccaagtcgaaaaataatgaacaagaagtgaagtataagggggacaaggagcccaaccccgcaagtatgagggttaaagatgctgctgaggccactcttacatgtattatgcagctcttgggcgccttcccatcaccaagcggccccgcgtcaccttgctccctcgtgaacgagacaacgctgataaagtattcccggcttcctactattaacaaacatagctttcggtactttgtactggataatagtgtgatccttgctatgttagaacaacctttgggcaacgaacagaacgactttttcccttcagttaccgtgctcgtcaggggcatgagcggtagactcgcttgggcccaacagttgtgcttgttaccaagaggagccaaagccaatcaaaaactattcgtaccggagccccgacctgttcccaaaaacgatgtcgggttcaaatattcagttaagcaccgacctttccctgaggaagtggataaaataccgttcgtcaaggccgatctgagcatcccggacttacacgagattgtgaccgaagaactggaggaaagacatgagaagctgaggtccggaatggcccaacagatagcatacgagatccacctggaacagcaaagcgaggaagagctgcagaaacgttccttccctgacccggtgacagattgtaaacctcctccgcccgcccaggaattccagaccgccaggctgttcctgtctcattttggctttctgagtctggaggcactcaaggaacctgcaaactctcggcttcctccgcacctgatcgctctggactcaactataccgggcttctttgacgacatcgggtacttggatcttctgccttgccggccatttgacactgtcttcatcttctacatgaagccaggccaaaagactaaccaggaaattttgaaaaacgtggagtcttctagaaccgtccaaccgcacttcctggaattcctgctgagcctgggctggtcggtggacgtgggaaggcatcccgggtggacggggcatgtcagtacgagctggtccataaattgctgcgacgacggagaaggaagccaacaggaggtgattagttcagaagatattggcgcctccatttttaatgggcagaagaaggtgttatattatgcggacgcccttactgagatcgcattcgtggtgccatcccccgtggagtctctgactgattccctcgagagcaacatcagtgaccaggactctgactcgaacatggatctcatgccgggcatcctgaagcaaccctccctcactttggagctgttccccaaccacaccgacaacctgaattctagccagcggcttagtcccagtagccgaatgagaaagctgccccagggcagacccgtccccccccttggccctgaaacgagggtttctgtggtgtgggttgagcgatatgacgacatcgagaactttcctctgagcgagttaatgactgagatcagtaccggcgtggaaacaacagctaactccagcactagcctacggtctacaaccctggaaaaggaggtgcccgtcattttcatccacccactcaatacaggtttgttcagaataaagatccagggggctacgggtaaattcaacatggtgattcccctggtggatggtatgattgtgagccgccgcgctttgggctttctcgtccggcagacagtgatcaacatttgcaggcggaaacgccttgaatctgacagctattcgccccctcacgtgcggcgcaagcagaaaatcaccgacatcgttaacaaatatcgcaacaaacagctggagccagagttttacacctcgttgtttcaggaggtaggactaaagaattgtagcagttag

SEQ ID NO: 203600 - DNA, 1434 bp, Artificial Sequence
  derived and/or modified sequence
atgtacagcgagtggcggagcctgcacctggtgatccagaacgaccaggggcacacctccgtcctacatagttatccggagagtgtaggtcgagaggttgccaacgctgttgttcgccccttgggccaggtgctggggacccctagtgtagccggctctgaaaatctgctgaagacggataaggaggtgaagtggaccatggaagtgatctgttacggccttacgcttccgctggatggcgagaccgtcaagtattgcgtggatgtgtataccgattggataatggctctggtcctgccgaaggattccatccccctccccgtcattaaggaaccaaaccagtacgtccagaccatactgaaacacctgcagaatttgttcgtcccacgtcaggagcaaggttcaagccaaattcgactctgtttacaggttctccgggcaatccagaaattagccagggaatccagccttatggcccgcgaaacctgggaagtgctcctgctgtttctcctacagataaatgacattctccttgcacctcctactgtgcaggggggcatcgccgagaacttggccgagaaactcattggtgtgttgttcgaggtctggctgctggcatgcacaagatgctttcctacccctccctattggaaaactgcgaaagaaatggtcgccaattggagacaccacccggctgtggtggaacaatggtcaaaagttatctgtgcacttacatctaggctcctgcggttcacgtacgggccaagcttcccagcctttaaggtccccgacgaggacgcctctctcatccctcctgagatggataatgaatgcgtggctcaaacttggtttaggttcctacatatgctcagtaaccctgttgacctgagtaaccccgccattatcagttctacgcctaagtttcaggagcagttcttgaatgtcagcgggatgccccaggagttaaaccaatacccgtgcttgaaacatctacctcagatattctttcgggccatgaggggtatttcttgcctcgtggatgccttcctgggcatctccagaccccgttctgactccgcccccccgacacccgtgaatcggcttagtatgcctcagtcggcagccgttagcacaacacccccccataatcgacgtcacagggctgttaccgtgaacaaagccacaatgaagacttccacagtctccaccgcacacgcttcaaaagttcagcatcagacatcctccaccagtccccttagcagtccaaaccaaacatctagcgaaccccgcccgctgccagcacctcgcaggccaaaagtgaactctattctgaacctgtttggatcctggctgttcgatgccgcgttcgtgcactgcaagctgcataacggaattaatagagacagttcgatgactgattttacatgcttctag

SEQ ID NO: 203601 - DNA, 4485 bp, Artificial Sequence
  derived and/or modified sequence
atgtacagcgaatggcgctctctccacttggtgatccagaacgaccaaggtcacacctcggtgttgcattcctatcccgagagtgtggggcgtgaagtggcgaacgccgtggtccgcccactgggccaggtgctgggtaccccaagtgtggctggctccgaaaacctcctcaagactgataaagaagtaaaatggactatggaggtcatttgctatggtttaacccttcctctggacggtgagacagtgaaatattgtgttgatgtctataccgactggattatggccctggtgctccccaaggattcaattcccctgccagtgatcaaagagcctaatcagtatgtgcagacgatcctgaagcaccttcagaacttattcgtcccaaggcaggaacaggggtcctcacagattcgcctctgcctgcaggttctcagagccatccaaaaactggctcgagagtccagtctgatggcccgagaaacatgggaggtgcttctgctctttctgctgcagattaatgacatcttgttagccccacctaccgtgcaggggggtatcgctgaaaatctggccgagaagttgattggggttctattcgaggtttggctcttggcttgcactaggtgtttccccacaccaccgtattggaagaccgctaaagagatggttgcaaactggcggcatcacccagcagttgtggaacaatggtccaaagtcatttgtgccctgacaagcagactgttgagattcacatacggcccatcatttccagccttcaaagtgcccgatgaggacgcctccctcatccccccagagatggacaatgaatgtgtggcccagacctggttccggtttcttcacatgctgtccaatccggtggatctgtcaaatccagcgatcatcagttcaactcccaagttccaggagcaatttttgaacgtgagtggcatgccgcaggaactgaatcaatatccctgcctcaagcacctcccccagatctttttccgggctatgcggggtatttcctgcctggtcgacgcatttcttgggattagtcgccctagaagtgatagtgcaccgcctacccctgtaaacaggctatctatgccccagtccgccgcagtcagcactactccccctcataaccgtcgtcaccgcgctgttacagtgaataaagcgacgatgaagaccagcaccgtctccactgcccacgctagcaaggtgcagcaccaaacttcctcaacatctccgctgtccagcccaaaccaaacctcatccgagccgagaccacttcctgcacctaggcggcctaaagtaaattccatattgaatctattcggtagctggctgttcgacgcagcatttgtccactgcaaactccacaatggcatcaatcgggactcttctatgacggccatcaccacacaggccagcatggaattcagacggaagggaagtcagatgtcaacagacacgatggtgtccaatcccatgtttgatgcgtctgagtttcctgacaactatgaagctggtcgcgctgaagcgtgtgggacattgtgcagaatcttctgctccaagaaaaccggcgaagaaattctccctgcctatttgtcaaggttttacatgctgctaattcagggtctccagataaacgattacgtttgtcatcccgttttggcctctgtcattctgaactcccctcccctcttctgttgtgacctgaagggtattgatgtggtcgtgccatacttcatctcagcgctggagaccatcctgccagatagggagttatcaaaatttaaaagttatgtgaacccaaccgagctcaggcgttcttccataaacattctgctaagtctgctccctttgcctcaccactttggaactgtgaaatctgaggtggtgctggaggggaaattttccaacgacgatagtagctcctacgacaagccaatcacctttctaagccttaaactgagacttgtcaatattctgatcggtgctctgcaaaccgagacggaccctaataacacccagatgatcctgggagcaatgctcaacatcgtacaggatagtgctctgctagaggccatcgggtgtcagatggagatgggaggaggagagaacaacctgaaatctcactccagaacgaattccgggattagtagtgccagtggcggttccacagagccaaccaccccggattcagagagacccgctcaggccttgctgcgggattatgcactgaacacggatagcgctgccggtctcctgattagaagtatacaccttgtgactcagaggttaaacagtcagtggcgtcaagatatgagcatttccctggcagctctggagctcctgtctgggcttgccaaagtcaaggtcatggtcgattcaggggaccggaagcgcgctatctcatctgtctgtacctacatcgtgtatcaatgcagtcgccctgccccactgcattcccgcgacttacatagcatgatagtcgccgcttttcagtgtctgtgtgtttggctcaccgaacacccggacatgttggatgagaaggactgcctcaaggaagtcctcgagatagttgaattgggcatctccgggtccaagtcgaaaaataatgagcaagaggtgaagtataagggagacaaagagcccaaccctgcctcaatgagagtaaaagacgcagcagaagccaccctgacctgcattatgcagctcctcggagcctttcctagtccttctggccctgcctcgccgtgttccctggttaacgaaaccactctcatcaagtattcaaggctgccaactataaacaagcatagtttcaggtattttgtcctggacaactcagtcattctcgcaatgctggagcaacctctgggaaacgaacagaatgacttctttccaagcgtgacggtgctggtcagggggatgtcaggcaggttagcctgggcccaacaactgtgcctgcttccgcgaggagcaaaagctaaccagaagctgtttgttccagaaccgagacccgtaccaaaaaatgacgtcgggtttaaatattccgtgaagcatcgcccttttccagaggaagtcgataaaattccattcgtgaaggcagatctgagcatcccagacctgcatgagatcgtgaccgaagagttggaggaaagacatgagaagttgcgcagcgggatggctcagcaaatagcctatgagattcatctggagcaacagtccgaagaggaacttcagaaaagaagtttcccagatccagtgacggactgtaaaccccctccgccagcgcaagagtttcagactgccaggctatttttaagccatttcggctttctctctttagaggccctgaaggagcccgcaaactctagactccccccacatttgatcgcattagattcaaccatacctggtttttttgacgatatcgggtatctggaccttcttccttgtcgcccattcgacacagtctttatcttctatatgaaacctggccagaaaacaaaccaagaaatccttaaaaatgtggaaagttctcgaacagttcagcctcatttcctggagttcttgttgagcttaggctggagcgtggatgtcgggcgacatccaggctggactggacacgtgtcaaccagttggagcataaattgttgtgacgacggcgaaggatcccagcaggaggttatttcttctgaggacatcggggcatctatattcaacgggcagaaaaaggttctatattatgccgacgccctgacagagatagcctttgtcgtccccagccccgtcgaaagcttaacggactctttggaatctaacatcagcgatcaggattccgattccaatatggacctgatgcccggaattcttaaacagccgtccctaaccctcgagctttttcccaaccataccgataacctgaactcaagccagcggctgtcaccaagtagcaggatgaggaagctcccccagggtcgccctgtacccccattgggccctgagaccagagtgagtgtagtgtgggtcgagaggtacgacgatatcgaaaacttcccactgtccgaactcatgaccgagatcagcacgggtgtggaaacaactgctaatagtagcacctcgctaaggtcaaccactctcgagaaagaggttcccgttattttcattcatccactgaacacaggactgttccggattaagattcaaggtgcaaccgggaagtttaatatggtcatccctctggtggatggcatgatagtgtctcgcagagccctaggcttccttgtacgccagacagtcataaacatctgcagacggaagagactcgagtccgactcatactcaccaccccacgtgcgtagaaaacaaaaaatcactgacatagtaaacaaatatcgtaataagcagctagagcccgagttctatacgtcactttttcaagaggtgggtcttaaaaattgctcttcttag

SEQ ID NO: 203602 - DNA, 2892 bp, Artificial Sequence
  derived and/or modified sequence
atgtatagcgagtggcggagcctgcacttggtgattcagaatgaccaaggccacaccagtgttctgcactcgtacccagaatcagtcggacgggaggtcgctaatgcggtggttcgtccactcggccaggtgctgggcacaccttcagttgcaggatcagaaaatttactgaaaaccgacaaagaggttaaatggacaatggaagtcatctgctatggcctgacactaccactggacggcgaaaccgtgaaatattgcgtggatgtatatacagactggattatggccctggtgctgccgaaagatagcattccattacccgtcataaaggaacccaatcaatacgtccagacaatcctgaagcacctgcaaaacctcttcgtgcctcgtcaggagcagggatctagtcagatccgcctatgtctccaggtgttacgagccatccagaaactggctcgcgaatctagcttgatggccagggaaacctgggaggtgttgttattgtttttgctccagatcaacgacattttactcgctcctcctaccgtgcaggggggaattgctgaaaacctagccgagaagctgatcggtgtgcttttcgaggtctggctgttggcatgcactcgttgctttcctactccgccttattggaaaaccgccaaagaaatggtggctaactggcggcaccatcctgccgttgtcgagcagtggagcaaagtcatatgcgcactgacctcaagacttttaagatttacctatggcccttccttccctgcctttaaggtgccagacgaagatgcctcactgattccacccgaaatggataacgaatgtgtggcccaaacctggtttcgatttcttcatatgctgtccaacccagtcgacctctccaaccccgcaatcatttcatccacgccaaaattccaggagcaatttctgaacgtgtccggaatgcctcaggaactgaaccaatatccttgcttgaagcacctgccccaaatttttttcagagccatgcgagggataagttgtctcgtggacgcatttctgggaatttcacgaccgaggagcgatagtgcccctcctactcccgtcaatcgtctgtcgatgcctcagagcgccgctgtgagcaccacccctccccataatagaagacatagggctgtgaccgttaataaggcaacaatgaagaccagtacagtaagtaccgcccacgcttcgaaggtgcagcaccaaacgtcttccaccagccccctgagctctcctaaccagacctcttcggagccacggccactccccgctcctcggcgtcctaaagtgaatagtatactgaacctcttcggtagctggctgtttgatgcggcatttgtccattgcaagcttcataatggaatcaaccgggatagctccatgacagccataacgacccaggcttctatggaatttcgacgcaaaggcagtcaaatgtctactgacaccatggtgagtaacccaatgtttgacgcttccgagtttcccgataactacgaggcaggcagggctgaggcctgtgggaccctgtgccgaatcttctgctccaagaagactggagaggaaatccttcctgcttatctctcacgcttctacatgctgctaatccaaggattgcagattaatgactatgtctgtcacccagtcctggccagtgtgatcctcaactcccctcccctgttttgctgcgatctaaaaggcatagacgtcgtggtcccctacttcattagtgccctagagaccattcttcccgaccgggagctctcaaaatttaagagctacgtcaaccctacagaactgcgccgatcgagcatcaatattttgctgtccctcctacccctcccgcatcactttgggaccgtgaaaagtgaggtggtgctggagggaaaattctccaatgatgattcctcctcatacgacaagcccattacttttctatctcttaaactgagacttgtgaacattttaatcggggcacttcagacggagacagacccaaataatacacagatgatcttaggcgctatgctgaacattgtgcaggacagcgccctgctggaagccatcggctgccagatggagatgggaggcggtgaaaataaccttaaatcacactcacggaccaactcaggcatttcttcagcatcaggagggagcaccgaacccacaactccagattccgaacgacctgcccaggccctgctgagggattacgcactcaataccgactcagcggctgggcttttaatacgatcaattcatctggtgactcagcgtctgaattcacaatggcgccaggatatgtcaatttcacttgctgctttagaattactgagtgggctcgcaaaagtcaaagttatggtagactctggtgataggaagagggctatttcttctgtctgtacctatatcgtctaccagtgctcacggcctgccccactccatagcagagatctgcactcaatgatcgtcgctgcttttcagtgtctatgtgtgtggctcacagaacacccagacatgcttgacgaaaaggattgtctgaaggaggtactcgaaatcgttgagctgggaatttctggttccaaatctaaaaacaacgaacaggaggttaagtataaaggcgacaaggagcccaatcctgcatccatgcgcgttaaggacgccgctgaggctacgctgacgtgtataatgcagctcctgggcgcttttccgagtcctagcgggcctgcctctccctgctccctcgtgaacgagacgaccctcattaaatattcgcgtctgccaaccatcaataagcaactcgagccagaattttatacttcgcttttccaagaagtaggtctcaagaactgcagcagctag

SEQ ID NO: 203603 - DNA, 4485 bp, Artificial Sequence
  derived and/or modified sequence
atgtatagcgaatggcgcagccttcatctggtcatacagaacgaccagggacatactagcgtcctgcacagctatcctgaatcagtggggcgagaagtcgccaatgccgtggtgagaccattgggccaggtgctgggcacaccaagcgttgctgggagcgagaacctgctgaagacagataaagaagtgaagtggacaatggaggtgatatgctacggtctgacacttcctttagatggggagacagttaagtactgtgtggatgtgtacaccgactggattatggcccttgttctgccgaaggactctatccccctccccgtgattaaggaacccaaccaatatgtgcaaaccatcttgaaacacctgcagaacctcttcgtgcccaggcaggaacaaggatcatcacagattaggctgtgtctgcaggtgctcagggcgatacagaagcttgcacgtgagtcatctctgatggcaagagagacttgggaggtgctgctgctgttcctgctccagatcaatgatattctccttgccccacccacagtgcagggcggtatagcggagaacttagcggagaagcttattggtgtgttatttgaggtttggttgttggcttgcactcgctgtttccctactcctccgtactggaagaccgccaaagagatggtcgccaactggcggcaccatcccgctgtggttgagcagtggagtaaagttatttgtgccctgacatcccgcctactacggtttacctatggcccaagttttcctgcttttaaagtgcccgatgaagatgcctcactgattccaccggaaatggataacgaatgtgttgctcagacctggtttcgcttcctgcacatgttgtcgaaccccgtcgacctttcaaatccagcaattattagctcaactccaaagtttcaggagcagtttctcaacgttagtggcatgccccaggaactcaatcagtacccttgtctcaaacacctacctcaaatatttttcagggcaatgcgcggaatctcctgccttgtcgatgccttcctcggaatatcccggcctcggtcagactcagcacccccaacccctgtgaacaggctttctatgcctcagtccgctgccgtttccaccacccctccacacaaccggcgacaccgggcagtgaccgttaataaggcaaccatgaagacctctactgtgtcaacagcccatgctagtaaagttcagcaccagacatccagcactagtccattgagttctccgaatcagacttccagtgagccccgacctcttcctgccccacgacggcctaaggtgaattctattttaaatttattcggcagttggttatttgacgccgctttcgtccattgcaagctgcacaatggcattaatagagattcatctatgacggctattacaacccaggcaagcatggagtttagacgcaagggatcacagatgtccactgataccatggtttctaaccctatgtttgacgcctcggagttccccgataattatgaggctggaagggctgaggcatgtggcacactctgtcgcatcttctgttccaaaaaaaccggagaagagatcttgcctgcatacctgagtaggttttatatgctcctcattcaaggactccagatcaacgattacgtatgccatcccgttctcgcaagtgttattcttaactcgccaccactgttctgttgcgatctgaaggggatagacgtggtagtgccttatttcatatccgctctggagacaatcttgccagatcgcgagctcagcaagtttaagtcttatgtaaacccaaccgagctgcgcaggtctagtattaatattctcctctctctccttccgttaccgcatcatttcggaaccgtgaagagtgaggtcgtgcttgagggaaaattcagcaacgacgattcaagctcatatgacaaacccatcaccttcctcagcctgaaacttaggctggtgaacattctcataggggctttgcagacggaaacagatcccaacaatacccagatgatactcggggcaatgttgaatatcgttcaggactcagcactccttgaagcaatcggctgtcagatggagatgggcggtggagaaaataatctaaagagccattcgcgtacaaattcgggcatttctagtgctagcggcggtagcaccgaaccaacaacaccagattctgaacggccagcccaggccctcctgagggactacgcactgaacactgacagcgccgctggcctgctaatccggagtattcatctggtcacacagagacttaactcccagtggaggcaggatatgtcaatctccctcgctgccctggaactgttgtctggcctggccaaagttaaagtgatggtagacagtggggatagaaagcgagcaataagttcagtgtgcacctatattgtttaccagtgctctagacctgcacccctccactctcgggacctgcacagcatgatcgtggctgcatttcagtgcctttgcgtgtggcttacagagcaccccgatatgttagacgagaaagactgcctaaaagaggtgctggagatcgtggaactcgggataagcggttccaaatcaaagaacaacgagcaggaggtaaagtataagggggacaaggaacccaatccagctagcatgcgcgtcaaggacgcagcagaggcaactctgacttgcataatgcagcttctgggcgcttttccatcaccctcaggacccgcatcaccatgcagcttggtgaacgagaccaccttgattaaatactcccgcctgcctactattaataaacattctttcagatacttcgtgctggataacagcgttattctagccatgttagaacagcccctcggcaacgaacagaatgatttcttccccagcgtgaccgtgcttgtccgcggaatgagtgggaggctggcctgggctcagcagctctgcctgctcccacgtggcgcaaaggcgaaccagaagctgttcgtcccagaacccagacctgtgcccaagaatgatgtgggctttaaatacagcgtcaaacataggcccttccctgaggaggttgataaaataccattcgtgaaggcagaccttagcataccagatctgcatgagatcgtgacagaggaactcgaggagagacacgaaaaactgcgctctgggatggcccagcaaatcgcctacgagatccatttggagcaacaatctgaggaagaattgcagaagcggtcctttcctgaccctgtcacagattgcaaacccccaccacccgcacaggagttccagactgctaggctgttcctgtctcatttcgggtttctttcacttgaagctctaaaggagccggcaaacagcagactgcctccgcacctgattgccctggatagcaccatccccggtttttttgatgacatcggctacctcgacctcctcccctgccggcctttcgatacagtctttatcttttacatgaagccaggccagaagactaatcaggagatccttaagaacgtggagtcatcgagaacagtccagccgcacttcctcgagttcctgttatccttaggctggagcgttgatgtgggtcgccacccgggatggacaggccacgttagcacctcttggtcaattaactgctgcgacgatggagagggatcgcagcaagaggtgataagctctgaggacattggagcctcgatttttaatgggcaaaaaaaggtgctgtattacgctgatgcattaaccgagatcgcctttgtagtaccttcccctgtggagagcctgacagacagcttagaaagtaatatctcagaccaagatagtgatagcaatatggatttgatgcccggaattctgaagcaaccaagtcttactttagagctgttcccaaaccacacagataacctcaattcttcacaacgcctatctcccagctcccgaatgaggaagctgccccagggtcggcctgtgcctcctttgggcccagaaacccgggtgtctgttgtctgggtcgaaagatacgacgacattgaaaactttccattgtcggagttgatgactgaaatctcaacgggtgtcgaaaccactgccaactcatctacctctctgagaagtactacgctcgagaaagaggttcccgtcatctttattcatcctctgaatacaggattgtttagaattaaaatccagggagcgaccggaaagtttaacatggtgatccctctagtcgacggaatgatcgtgagccggagggcgttgggctttctggtcaggcaaacagtgatcaacatctgcaggcgcaagcggttggagagcgacagctatagtccacctcatgtgaggcggaagcagaagataactgatatcgtgaacaagtaccgcaataagcagttggagcctgagttttacacatctctctttcaggaagtgggcctcaagaactgttcttcatag

SEQ ID NO: 203604 - DNA, 1434 bp, Artificial Sequence
  derived and/or modified sequence
atgtactcagagtggcggagcctgcacctcgtcatccagaatgaccaaggacatacctcggtactacactcttatcccgagtccgtggggagagaggtcgccaatgctgttgttcggcctcttgggcaggttctgggaaccccttccgtggccggatcagagaacctgctaaaaacagataaggaggtaaagtggaccatggaggtgatttgctacggcctgaccctccctttagacggggaaacggtcaaatactgtgtggatgtctacaccgactggattatggcgctcgtgctcccaaaggatagtatcccgttgcccgttattaaggagccaaatcagtatgtccagactatactcaagcacttacagaatttgtttgtgccccgtcaggaacaagggtcgagccagatcagactctgtctgcaagtactcagagctattcagaaactggctagagagtctagtctcatggcacgggaaacatgggaagtgctcctcttgttcctgctgcagataaatgatattctgctggcgcctcccacagtacaaggtggcatcgccgagaatctggccgagaaacttattggagtgctctttgaagtgtggctgctggcatgcacaagatgcttccctactcccccttactggaagactgcaaaagaaatggtcgccaactggcggcatcaccctgccgtcgtggaacagtggtctaaagtgatctgtgcgctcacatcccggttactgcgttttacctatgggccatcattccctgcctttaaagtgccagatgaggatgcctctctaataccgccagagatggataacgagtgtgtggcgcaaacttggttccgtttcctgcacatgttgtcaaatcctgtcgaccttagtaaccccgcaataatctcttctacacctaagtttcaggaacagttcctgaatgtaagcggcatgccacaagaacttaaccagtatccctgcctgaagcatcttccccagatttttttcagggcaatgcgtgggatttcttgtttagttgatgcgttccttgggattagcagacccagatctgactctgccccaccaactcccgtcaatcggctgtccatgccgcagtctgccgcagtgagcacaaccccgccacataatagacgtcatcgagctgtcaccgtcaacaaggcaacaatgaaaacatccactgtgagtacagcgcacgctagtaaggtccagcaccaaacttcctctacatcacccctgtccagtcctaaccagaccagcagcgaaccaaggccgctgcctgctccacgaaggccaaaagtgaactccatactcaacttattcggatcctggctcttcgatgccgcttttgtgcactgtaaactccacaacggtataaatagagatagtagcatgacggacttcacctgtttttag

SEQ ID NO: 203605 - DNA, 8661 bp, Artificial Sequence
  derived and/or modified sequence
gagttatttgacgccgccgcccctggcagtcggaagttgcctgagcagatcccagccggctggctcgagtggccttcgtcgtcccttggcgccctgggagagtcgctgacgggtggactgacggaccgcctgaggacggccggccagggcggtgaaagcgccagccctatggcgcgggtcgcgtgaggcggaaggccgaggacggccggcggcggcgcccgccccggcgatgcgggccccgcccgtcgcctcaggtgccatttggattgtactttagtggcacgatgtactctgagtggaggtcactgcatttggtgattcagaatgatcaaggccataccagtgtgctgcacagctatccagagagcgttggacgagaggtggcaaatgctgtagtccgtcctcttgggcaggtgttaggtaccccttcagtggctggtagtgagaatttgttaaaaactgacaaagaagtaaaatggaccatggaagtaatttgctatggactgacccttccattggatggagagactgtaaaatattgcgttgatgtatatacagactggattatggctttagtgttgccaaaagattctattccattgccagttattaaagagcctaatcaatatgttcaaactatactaaaacacctacagaatctttttgtaccaagacaggaacagggttccagtcagattcgactatgcttacaggtcctgagagccattcagaaactggcccgtgagtcatctctcatggcccgagaaacttgggaagtcttactgttgtttcttctgcagattaacgacatacttctggccccaccaactgttcaaggtggcattgctgagaatctagcagagaagttgattggtgttctctttgaggtgtggttactagcttgtactcggtgcttcccaacacctccttattggaaaacagccaaggagatggtggctaactggaggcatcacccagcagtggtggagcagtggagcaaggtcatttgtgcactcacttccagattgctacgctttacatatggtccttcatttcctgcatttaaagttcccgatgaagatgccagtctgatccctccagaaatggataatgagtgtgttgcacagacatggtttcgctttttacacatgttaagtaatcctgtggatttgagtaacccagctattataagctctactcccaaatttcaggaacagttcttgaatgtgagcggaatgccgcaagaattgaatcagtatccctgccttaaacatctgcctcaaatattttttcgtgccatgcgtggaatcagctgtctggtggatgcattcttaggtatttctagaccccgatcagacagtgctcccccaacacccgtgaatagattaagtatgcctcaaagtgctgctgtcagtaccacccccccacataaccggaggcaccgggctgttactgtgaataaggccaccatgaagacaagcacagttagtactgctcatgcctctaaagttcagcaccagacgtcctccacctctcctctgtcaagtccaaatcagactagttcagaaccccggccactgcctgcccctcggagaccaaaggttaacagcatcttgaatctctttggatcatggttatttgatgcagcatttgttcactgtaaacttcataatgggataaacagagacagcagcatgactgccattacaacacaagctagcatggagtttcgacggaaagggtcacaaatgtccacagacaccatggtttccaatcctatgtttgatgcaagtgaatttcctgataactatgaagcaggaagagctgaggcttgtgggacactgtgtaggattttttgtagcaagaagactggagaagagattctgccagcttatttatccagattttacatgcttttaattcaaggtttgcagataaatgattatgtgtgccatcctgtcttggccagcgttattctaaactctcctcctttgttctgctgtgacttgaaagggattgatgttgtggttccttactttatttcagctcttgaaaccattttgcctgacagagaactctcaaaattcaaaagctatgtaaatccaacagaattgcgaagatcctccattaatatcctgctttctttgttgcccctccctcatcattttggcacagtcaaatctgaggtggtcctggaaggaaagtttagtaacgatgacagctcttcttatgataaaccaataacttttctgtccctgaagttgagacttgtgaatatattaataggtgccttgcaaactgaaacggaccccaacaacacccaaatgatattaggggcaatgttaaatattgttcaagattcagcacttttggaagccattggttgccagatggagatgggtggtggagaaaataacctgaagagtcatagtcgcaccaatagtggtattagttcagcaagtggtggaagcacggagcccacgactcccgatagtgagagacctgctcaagctctcttaagagattatgctcttaatacagattcagctgctgggctcctgattcgcagcattcatctcgtcacccaaagactcaactcccagtggcgccaagacatgagcatatcactggcagctctagagctcctctctggccttgcaaaggtaaaagtgatggttgactcaggagaccggaagcgagccatcagttctgtgtgcacctacattgtttatcagtgtagtcggccagctcctttacactccagggatctgcactccatgatagtggcagcttttcagtgtctctgtgtctggctgacagagcaccctgatatgcttgatgaaaaggactgccttaaggaagtactggagattgtggaactgggtatctcaggaagtaagtccaagaacaatgagcaagaggtcaagtacaaaggagataaggagccaaaccctgcatctatgagggtaaaggatgctgctgaagccaccctaacatgcattatgcagttgctcggcgcatttccttcacctagtggtcctgcctctccttgtagtcttgtgaatgagaccactttgattaaatactccaggctgccaaccataaacaagcatagtttccggtactttgtcttggataacagtgtcatcctggcaatgctggaacaacctcttggaaatgagcagaatgattttttcccctctgtcactgtgctggtccggggaatgtctggaagacttgcttgggcacaacagctttgtcttttacccagaggagcaaaagcaaatcagaagctttttgtacctgaacctcgcccagttcctaaaaatgacgttggatttaaatattctgtgaaacatcggccatttcctgaagaggtggacaagattccttttgtgaaagcagatctcagcattccagatttgcatgaaatagtcactgaagaattagaagagagacacgaaaaattaaggagtggcatggcccagcagattgcttatgaaatacaccttgagcaacagagtgaggaggaattgcagaagagaagttttcctgacccagttacggattgcaagcccccgcctcctgcccaggaattccaaacagcccgcctttttctctcacactttggatttttgtccttagaagcactgaaggaacctgcaaatagtcgtctacctcctcaccttattgcacttgattccacgatacctggattttttgatgacattgggtatctggatctcttgccatgtcgtccttttgacacagtttttattttctatatgaagccaggtcagaaaacgaaccaagagattttaaagaatgtggagtcttccagaactgttcagccacatttcctagaatttttgctttcccttggctggtcagtagatgtgggcagacaccctggttggactgggcatgtttctaccagttggtctattaattgttgtgatgatggtgaaggatctcaacaagaagtgatttcctctgaagatattggagctagcattttcaatggacagaagaaggtgctgtattatgctgatgcccttacagaaattgcttttgtggttccttctcctgtggagtccttaactgattcattggaaagtaacatctcggaccaagatagtgattcaaatatggatcttatgccaggaattctgaaacagccatccctgacacttgagcttttccccaatcatacagacaatcttaattcctcacagaggctcagtcccagttccagaatgaggaagctgcctcagggtcgccctgttcctccccttggacctgagacaagagtttctgtagtctgggtggaacgctatgatgatatagaaaactttcccctctcagagctgatgacagagatcagtactggtgtggaaactactgcaaatagtagcacttcactgagatctacaactcttgaaaaagaagttcctgtcatcttcatccaccctttaaacactggattattccggataaaaattcaaggagccactggaaaatttaatatggtcatccctcttgtggatgggatgattgtcagcaggcgagctcttggctttctggtgaggcagactgtaattaacatttgtagaagaaagagactggaaagtgactcctacagtcccccccatgtccgccggaaacagaaaatcaccgacattgtcaacaagtaccggaacaagcagctggagccagagttttatacttcacttttccaggaggttggactcaagaactgcagttcttagaccactgaatttctaagactgttgaactccagtttgggaactataacacagcagaacagtttgataggtgatcactgtaaaaataaaaacaaatcactcccaagagcttactgtttaatcaccagaatagaagaaacacattataacccatttgatagaagactttgggctatctagtgaaatgggctcccagacacaatcacactcctgctgataatgatgatatacattttagccataaactttcttttaaaagtgacaattttagttaaacataagccttttgaggagaaaggcttttatgcatctcagttaaacacgtgcattggtagtatcaacaaatttgcaatatagaagttgaagatagttttttacctcactttttaggaggttgtattcaaaattaaaatctcagaatcttacaggacatttaaagactcatgttgatagcatggaggagaaggaaagaagtcacagccttctactcagttgtaggtcttcttgtcatccagctgtcacactgacaaaaagaaaagatgatacatgttttttgctcagataagaagcctgacattaaaagatgtcatatttttttctccacatttcaaaaagttgtccttctcatcactgcacagatctgtctgaaagcctcagtttctgagtgacccaggaacagatcagaaatggagcatggccttgtcctttaatggggatgcaaataaagtttgtggggttaaaagttataagacagcagtgataccccactctctccattattgtccagcggggtgacataatgacaggttaaatatttgtgattcattgattaaatattatttaaagaaatgtaaattcacaataagggttgaaaattatttggtttcatccattgtctcttatttcaggaccaagcagcaaactgcagtagtttgtgaaggattctaatatggggttcaggaatagcctctcaacgctactaattcagatctctcccagagaactactggatttcctcataattgacaaacatgagtgaccacctctttgggtggctactgttagaaatggctgttgtcatgttttctggactttgccagccaacagatccctgccaggttttggaaatacttctattacctcgctgctacttttctgcagggataaaacttttgaggtggccagacccagaacatccaaggattcctgttacagtgctacagtatacactgctcatttatcctattctcatgtgctttcttctttagtaagattattttaagaaaataagtgatatttaaagtccaaagaggaatgatcacagttgtataaggggtgttttcccacttgaactctgatgtcagtcgactgtgggtcagagctacaaccatctgtttggtttgatgttttggtggtttacttacggagtggggatagtgtgagacctaattccctgtgcaaatgtctcttattccagaaatgtgcattttgtcatctataagcaagaaatatgggcatagcagctcttggtttaaagtttgccataacctgttcatgtttgttttaagctcaggtaaagataacctcctctttctatgactccagtttccattcaggttatagtattattcaatagttgattttctttttaagctgggcaataaattgatgtttccagatggtaacatgggagagggcatataggataaagatgagcaaattctaccctaaaaatgttctagtagttcacaggaagaagatgaggtttaataactttcaaggtaattctagattgacattttgaggggaaaatgggctcttgttctagttgaagtgagcagagaaggctataaattaatatgtaacttacagcattccagaggttaaaaataactgatgcagatgtacttcttcagtgtgattcttcagatcaaacttttacttttggcatagttaatttcagaaaaatgtgctgtatgtgtgtgtgtatgagggttggtcttgctgatccttcagttagctctaaattctggcaactccttgtaattccaatgtatttgatacatgaacaatcatgttgaatgcatttgtgatctgggagacttcctcgtcttccagggaaggaaggatgtgcagcccctgaaggcatgaaactcccagtgtgtacggagccagtggaatatgggatacccataccttaccaggcgctggttccttctgctcacaataacatctgcccaaagagggagtgggaagaacgcttagctctttcactagtatggatttgagttcatggtcactatttttacccacctgcctttgttaaaaatcactttgagtagaatagcactggaggaacatatttagcacctaatattaatatttagtagtccattgataaatttgccagcatatgttctagcctctggggggaaaccaggaccacttttgtctgtggcttaaacagttcagttgctatatctgttgggtatgccgggggtggatgagtgtggcattccgtgaagaggaaggtggtaagtaaggtttcccttctactgccttcttaagttgcaggagggagcttttctcctcccctctggttgggagcactgaggacagtgaggagggcttttaccttgttaatcctttccttatttagctagctttcctttttgtctagggcttcctcttgagaccctcttccatccattgggcctttgaaaggactaatcagacacacacacacacacacacacacacacacacactcgcatactcatgcacattttccttcatttccagatcctttatttcagagcagcccattttcctctggattcattgatgaatacaagtacccacacctttggccagtaatgtcagttacctgctgcaggttctgtgtatgaggccttcatgaacggttaccttctccatacactagggaagcatttgtcagactctgcagactgggttctagagaggcagagtctttaagagtattcatttcttctggaaggtggagctttacccaaagtggaagttagccttgctcaaagatgtgttttgtggtaggtggtaaaaataaataaataaataaataataaaaaaagaaacatgtattggaggtaatttgacactgctgctggcagtagttctctattcaccattttaaagcccattcaggttctctcttcctgaaaagaactgattgctgtgtttacatgaaatgacattggagtcagatggtctgttttaaagatttccatgacagcctcttttcctgagttggagagattggaggtggtctatccgtacgatgtggaatcaaacggtgggtttcttagtagctaaagaagccatgtacttctagtgtgtttctcagaatatcaactcatgttcttcagatgcttttctttttttaatggtgagggaaaaggtataatttgggattccacagtgccttgcatatagtaggcgcccagtaaatacttgttgaagcaaaccaagtttcccaagtcctcatctcttatagtgaccaagacatctttctcctctgaagggcttggcagttgtggctaaaaaataagcagtatcattatttgcttgaaatcatatatacagtttgtatgaatttcagtatgttgccaagacatgattttttcttattgtattttctgtaaatatttctggcactgaactgtaaagtaaaggcaaagtgtaaatatgaaggcgtgcccgtgccccttgcctcctgtgtttcatcttcgtcggttagggaagaaggtccagaggtttgtttgtatttatgccgatcctttgtccagaagaagcccatggaatattgaatgtaatacatttagtcaattaaattttaaggagattcttatctaat

SEQ ID NO: 203606 - DNA, 3149 bp, Artificial Sequence
  derived and/or modified sequence
agtcggaagttgcctgagcagatcccagccggctggctcgagtggccttcgtcgtcccttggcgccctgggagagtcgctgacgggtggactgacggaccgcctgaggacggccggccagggcggtgaaagcgccagccctatggcgcgggtcgcgtgaggcggaaggccgaggacggccggcggcggcgcccgccccggcgatgcgggccccgcccgtcgcctcaggtgccatttggattgtactttagtggcacgatgtactctgagtggaggtcactgcatttggtgattcagaatgatcaaggccataccagtgtgctgcacagctatccagagagcgttggacgagaggtggcaaatgctgtagtccgtcctcttgggcaggtgttaggtaccccttcagtggctggtagtgagaatttgttaaaaactgacaaagaagtaaaatggaccatggaagtaatttgctatggactgacccttccattggatggagagactgtaaaatattgcgttgatgtatatacagactggattatggctttagtgttgccaaaagattctattccattgccagttattaaagagcctaatcaatatgttcaaactatactaaaacacctacagaatctttttgtaccaagacaggaacagggttccagtcagattcgactatgcttacaggtcctgagagccattcagaaactggcccgtgagtcatctctcatggcccgagaaacttgggaagtcttactgttgtttcttctgcagattaacgacatacttctggccccaccaactgttcaaggtggcattgctgagaatctagcagagaagttgattggtgttctctttgaggtgtggttactagcttgtactcggtgcttcccaacacctccttattggaaaacagccaaggagatggtggctaactggaggcatcacccagcagtggtggagcagtggagcaaggtcatttgtgcactcacttccagattgctacgctttacatatggtccttcatttcctgcatttaaagttcccgatgaagatgccagtctgatccctccagaaatggataatgagtgtgttgcacagacatggtttcgctttttacacatgttaagtaatcctgtggatttgagtaacccagctattataagctctactcccaaatttcaggaacagttcttgaatgtgagcggaatgccgcaagaattgaatcagtatccctgccttaaacatctgcctcaaatattttttcgtgccatgcgtggaatcagctgtctggtggatgcattcttaggtatttctagaccccgatcagacagtgctcccccaacacccgtgaatagattaagtatgcctcaaagtgctgctgtcagtaccacccccccacataaccggaggcaccgggctgttactgtgaataaggccaccatgaagacaagcacagttagtactgctcatgcctctaaagttcagcaccagacgtcctccacctctcctctgtcaagtccaaatcagactagttcagaaccccggccactgcctgcccctcggagaccaaaggttaacagcatcttgaatctctttggatcatggttatttgatgcagcatttgttcactgtaaacttcataatgggataaacagagacagcagcatgactgccattacaacacaagctagcatggagtttcgacggaaagggtcacaaatgtccacagacaccatggtttccaatcctatgtttgatgcaagtgaatttcctgataactatgaagcaggaagagctgaggcttgtgggacactgtgtaggattttttgtagcaagaagactggagaagagattctgccagcttatttatccagattttacatgcttttaattcaaggtttgcagataaatgattatgtgtgccatcctgtcttggccagcgttattctaaactctcctcctttgttctgctgtgacttgaaagggattgatgttgtggttccttactttatttcagctcttgaaaccattttgcctgacagagaactctcaaaattcaaaagctatgtaaatccaacagaattgcgaagatcctccattaatatcctgctttctttgttgcccctccctcatcattttggcacagtcaaatctgaggtggtcctggaaggaaagtttagtaacgatgacagctcttcttatgataaaccaataacttttctgtccctgaagttgagacttgtgaatatattaataggtgccttgcaaactgaaacggaccccaacaacacccaaatgatattaggggcaatgttaaatattgttcaagattcagcacttttggaagccattggttgccagatggagatgggtggtggagaaaataacctgaagagtcatagtcgcaccaatagtggtattagttcagcaagtggtggaagcacggagcccacgactcccgatagtgagagacctgctcaagctctcttaagagattatgctcttaatacagattcagctgctgggctcctgattcgcagcattcatctcgtcacccaaagactcaactcccagtggcgccaagacatgagcatatcactggcagctctagagctcctctctggccttgcaaaggtaaaagtgatggttgactcaggagaccggaagcgagccatcagttctgtgtgcacctacattgtttatcagtgtagtcggccagctcctttacactccagggatctgcactccatgatagtggcagcttttcagtgtctctgtgtctggctgacagagcaccctgatatgcttgatgaaaaggactgccttaaggaagtactggagattgtggaactgggtatctcaggaagtaagtccaagaacaatgagcaagaggtcaagtacaaaggagataaggagccaaaccctgcatctatgagggtaaaggatgctgctgaagccaccctaacatgcattatgcagttgctcggcgcatttccttcacctagtggtcctgcctctccttgtagtcttgtgaatgagaccactttgattaaatactccaggctgccaaccataaacaagcagctggagccagagttttatacttcacttttccaggaggttggactcaagaactgcagttcttag

SEQ ID NO: 203607 - DNA, 8435 bp, Artificial Sequence
  derived and/or modified sequence
cttggcgccctgggagagtcgctgacgggtgccatttggattgtactttagtggcacgatgtactctgagtggaggtcactgcatttggtgattcagaatgatcaaggccataccagtgtgctgcacagctatccagagagcgttggacgagaggtggcaaatgctgtagtccgtcctcttgggcaggtgttaggtaccccttcagtggctggtagtgagaatttgttaaaaactgacaaagaagtaaaatggaccatggaagtaatttgctatggactgacccttccattggatggagagactgtaaaatattgcgttgatgtatatacagactggattatggctttagtgttgccaaaagattctattccattgccagttattaaagagcctaatcaatatgttcaaactatactaaaacacctacagaatctttttgtaccaagacaggaacagggttccagtcagattcgactatgcttacaggtcctgagagccattcagaaactggcccgtgagtcatctctcatggcccgagaaacttgggaagtcttactgttgtttcttctgcagattaacgacatacttctggccccaccaactgttcaaggtggcattgctgagaatctagcagagaagttgattggtgttctctttgaggtgtggttactagcttgtactcggtgcttcccaacacctccttattggaaaacagccaaggagatggtggctaactggaggcatcacccagcagtggtggagcagtggagcaaggtcatttgtgcactcacttccagattgctacgctttacatatggtccttcatttcctgcatttaaagttcccgatgaagatgccagtctgatccctccagaaatggataatgagtgtgttgcacagacatggtttcgctttttacacatgttaagtaatcctgtggatttgagtaacccagctattataagctctactcccaaatttcaggaacagttcttgaatgtgagcggaatgccgcaagaattgaatcagtatccctgccttaaacatctgcctcaaatattttttcgtgccatgcgtggaatcagctgtctggtggatgcattcttaggtatttctagaccccgatcagacagtgctcccccaacacccgtgaatagattaagtatgcctcaaagtgctgctgtcagtaccacccccccacataaccggaggcaccgggctgttactgtgaataaggccaccatgaagacaagcacagttagtactgctcatgcctctaaagttcagcaccagacgtcctccacctctcctctgtcaagtccaaatcagactagttcagaaccccggccactgcctgcccctcggagaccaaaggttaacagcatcttgaatctctttggatcatggttatttgatgcagcatttgttcactgtaaacttcataatgggataaacagagacagcagcatgactgccattacaacacaagctagcatggagtttcgacggaaagggtcacaaatgtccacagacaccatggtttccaatcctatgtttgatgcaagtgaatttcctgataactatgaagcaggaagagctgaggcttgtgggacactgtgtaggattttttgtagcaagaagactggagaagagattctgccagcttatttatccagattttacatgcttttaattcaaggtttgcagataaatgattatgtgtgccatcctgtcttggccagcgttattctaaactctcctcctttgttctgctgtgacttgaaagggattgatgttgtggttccttactttatttcagctcttgaaaccattttgcctgacagagaactctcaaaattcaaaagctatgtaaatccaacagaattgcgaagatcctccattaatatcctgctttctttgttgcccctccctcatcattttggcacagtcaaatctgaggtggtcctggaaggaaagtttagtaacgatgacagctcttcttatgataaaccaataacttttctgtccctgaagttgagacttgtgaatatattaataggtgccttgcaaactgaaacggaccccaacaacacccaaatgatattaggggcaatgttaaatattgttcaagattcagcacttttggaagccattggttgccagatggagatgggtggtggagaaaataacctgaagagtcatagtcgcaccaatagtggtattagttcagcaagtggtggaagcacggagcccacgactcccgatagtgagagacctgctcaagctctcttaagagattatgctcttaatacagattcagctgctgggctcctgattcgcagcattcatctcgtcacccaaagactcaactcccagtggcgccaagacatgagcatatcactggcagctctagagctcctctctggccttgcaaaggtaaaagtgatggttgactcaggagaccggaagcgagccatcagttctgtgtgcacctacattgtttatcagtgtagtcggccagctcctttacactccagggatctgcactccatgatagtggcagcttttcagtgtctctgtgtctggctgacagagcaccctgatatgcttgatgaaaaggactgccttaaggaagtactggagattgtggaactgggtatctcaggaagtaagtccaagaacaatgagcaagaggtcaagtacaaaggagataaggagccaaaccctgcatctatgagggtaaaggatgctgctgaagccaccctaacatgcattatgcagttgctcggcgcatttccttcacctagtggtcctgcctctccttgtagtcttgtgaatgagaccactttgattaaatactccaggctgccaaccataaacaagcatagtttccggtactttgtcttggataacagtgtcatcctggcaatgctggaacaacctcttggaaatgagcagaatgattttttcccctctgtcactgtgctggtccggggaatgtctggaagacttgcttgggcacaacagctttgtcttttacccagaggagcaaaagcaaatcagaagctttttgtacctgaacctcgcccagttcctaaaaatgacgttggatttaaatattctgtgaaacatcggccatttcctgaagaggtggacaagattccttttgtgaaagcagatctcagcattccagatttgcatgaaatagtcactgaagaattagaagagagacacgaaaaattaaggagtggcatggcccagcagattgcttatgaaatacaccttgagcaacagagtgaggaggaattgcagaagagaagttttcctgacccagttacggattgcaagcccccgcctcctgcccaggaattccaaacagcccgcctttttctctcacactttggatttttgtccttagaagcactgaaggaacctgcaaatagtcgtctacctcctcaccttattgcacttgattccacgatacctggattttttgatgacattgggtatctggatctcttgccatgtcgtccttttgacacagtttttattttctatatgaagccaggtcagaaaacgaaccaagagattttaaagaatgtggagtcttccagaactgttcagccacatttcctagaatttttgctttcccttggctggtcagtagatgtgggcagacaccctggttggactgggcatgtttctaccagttggtctattaattgttgtgatgatggtgaaggatctcaacaagaagtgatttcctctgaagatattggagctagcattttcaatggacagaagaaggtgctgtattatgctgatgcccttacagaaattgcttttgtggttccttctcctgtggagtccttaactgattcattggaaagtaacatctcggaccaagatagtgattcaaatatggatcttatgccaggaattctgaaacagccatccctgacacttgagcttttccccaatcatacagacaatcttaattcctcacagaggctcagtcccagttccagaatgaggaagctgcctcagggtcgccctgttcctccccttggacctgagacaagagtttctgtagtctgggtggaacgctatgatgatatagaaaactttcccctctcagagctgatgacagagatcagtactggtgtggaaactactgcaaatagtagcacttcactgagatctacaactcttgaaaaagaagttcctgtcatcttcatccaccctttaaacactggattattccggataaaaattcaaggagccactggaaaatttaatatggtcatccctcttgtggatgggatgattgtcagcaggcgagctcttggctttctggtgaggcagactgtaattaacatttgtagaagaaagagactggaaagtgactcctacagtcccccccatgtccgccggaaacagaaaatcaccgacattgtcaacaagtaccggaacaagcagctggagccagagttttatacttcacttttccaggaggttggactcaagaactgcagttcttagaccactgaatttctaagactgttgaactccagtttgggaactataacacagcagaacagtttgataggtgatcactgtaaaaataaaaacaaatcactcccaagagcttactgtttaatcaccagaatagaagaaacacattataacccatttgatagaagactttgggctatctagtgaaatgggctcccagacacaatcacactcctgctgataatgatgatatacattttagccataaactttcttttaaaagtgacaattttagttaaacataagccttttgaggagaaaggcttttatgcatctcagttaaacacgtgcattggtagtatcaacaaatttgcaatatagaagttgaagatagttttttacctcactttttaggaggttgtattcaaaattaaaatctcagaatcttacaggacatttaaagactcatgttgatagcatggaggagaaggaaagaagtcacagccttctactcagttgtaggtcttcttgtcatccagctgtcacactgacaaaaagaaaagatgatacatgttttttgctcagataagaagcctgacattaaaagatgtcatatttttttctccacatttcaaaaagttgtccttctcatcactgcacagatctgtctgaaagcctcagtttctgagtgacccaggaacagatcagaaatggagcatggccttgtcctttaatggggatgcaaataaagtttgtggggttaaaagttataagacagcagtgataccccactctctccattattgtccagcggggtgacataatgacaggttaaatatttgtgattcattgattaaatattatttaaagaaatgtaaattcacaataagggttgaaaattatttggtttcatccattgtctcttatttcaggaccaagcagcaaactgcagtagtttgtgaaggattctaatatggggttcaggaatagcctctcaacgctactaattcagatctctcccagagaactactggatttcctcataattgacaaacatgagtgaccacctctttgggtggctactgttagaaatggctgttgtcatgttttctggactttgccagccaacagatccctgccaggttttggaaatacttctattacctcgctgctacttttctgcagggataaaacttttgaggtggccagacccagaacatccaaggattcctgttacagtgctacagtatacactgctcatttatcctattctcatgtgctttcttctttagtaagattattttaagaaaataagtgatatttaaagtccaaagaggaatgatcacagttgtataaggggtgttttcccacttgaactctgatgtcagtcgactgtgggtcagagctacaaccatctgtttggtttgatgttttggtggtttacttacggagtggggatagtgtgagacctaattccctgtgcaaatgtctcttattccagaaatgtgcattttgtcatctataagcaagaaatatgggcatagcagctcttggtttaaagtttgccataacctgttcatgtttgttttaagctcaggtaaagataacctcctctttctatgactccagtttccattcaggttatagtattattcaatagttgattttctttttaagctgggcaataaattgatgtttccagatggtaacatgggagagggcatataggataaagatgagcaaattctaccctaaaaatgttctagtagttcacaggaagaagatgaggtttaataactttcaaggtaattctagattgacattttgaggggaaaatgggctcttgttctagttgaagtgagcagagaaggctataaattaatatgtaacttacagcattccagaggttaaaaataactgatgcagatgtacttcttcagtgtgattcttcagatcaaacttttacttttggcatagttaatttcagaaaaatgtgctgtatgtgtgtgtgtatgagggttggtcttgctgatccttcagttagctctaaattctggcaactccttgtaattccaatgtatttgatacatgaacaatcatgttgaatgcatttgtgatctgggagacttcctcgtcttccagggaaggaaggatgtgcagcccctgaaggcatgaaactcccagtgtgtacggagccagtggaatatgggatacccataccttaccaggcgctggttccttctgctcacaataacatctgcccaaagagggagtgggaagaacgcttagctctttcactagtatggatttgagttcatggtcactatttttacccacctgcctttgttaaaaatcactttgagtagaatagcactggaggaacatatttagcacctaatattaatatttagtagtccattgataaatttgccagcatatgttctagcctctggggggaaaccaggaccacttttgtctgtggcttaaacagttcagttgctatatctgttgggtatgccgggggtggatgagtgtggcattccgtgaagaggaaggtggtaagtaaggtttcccttctactgccttcttaagttgcaggagggagcttttctcctcccctctggttgggagcactgaggacagtgaggagggcttttaccttgttaatcctttccttatttagctagctttcctttttgtctagggcttcctcttgagaccctcttccatccattgggcctttgaaaggactaatcagacacacacacacacacacacacacacacacacactcgcatactcatgcacattttccttcatttccagatcctttatttcagagcagcccattttcctctggattcattgatgaatacaagtacccacacctttggccagtaatgtcagttacctgctgcaggttctgtgtatgaggccttcatgaacggttaccttctccatacactagggaagcatttgtcagactctgcagactgggttctagagaggcagagtctttaagagtattcatttcttctggaaggtggagctttacccaaagtggaagttagccttgctcaaagatgtgttttgtggtaggtggtaaaaataaataaataaataaataataaaaaaagaaacatgtattggaggtaatttgacactgctgctggcagtagttctctattcaccattttaaagcccattcaggttctctcttcctgaaaagaactgattgctgtgtttacatgaaatgacattggagtcagatggtctgttttaaagatttccatgacagcctcttttcctgagttggagagattggaggtggtctatccgtacgatgtggaatcaaacggtgggtttcttagtagctaaagaagccatgtacttctagtgtgtttctcagaatatcaactcatgttcttcagatgcttttctttttttaatggtgagggaaaaggtataatttgggattccacagtgccttgcatatagtaggcgcccagtaaatacttgttgaagcaaaccaagtttcccaagtcctcatctcttatagtgaccaagacatctttctcctctgaagggcttggcagttgtggctaaaaaataagcagtatcattatttgcttgaaatcatatatacagtttgtatgaatttcagtatgttgccaagacatgattttttcttattgtattttctgtaaatatttctggcactgaactgtaaagtaaaggcaaagtgtaaatatgaaggcgtgcccgtgccccttgcctcctgtgtttcatcttcgtcggttagggaagaaggtccagaggtttgtttgtatttatgccgatcctttgtccagaagaagcccatggaatattgaatgtaatacatttagtcaattaaattttaaggagattcttatctaat

SEQ ID NO: 203608 - DNA, 1727 bp, Artificial Sequence
  derived and/or modified sequence
agttgcctgagcagatcccagccggctggctcgagtggccttcgtcgtcccttggcgccctgggagagtcgctgacgggtggactgacggaccgcctgaggacggccggccagggcggtgaaagcgccagccctatggcgcgggtcgcgtgaggcggaaggccgaggacggccggcggcggcgcccgccccggcgatgcgggccccgcccgtcgcctcaggtgccatttggattgtactttagtggcacgatgtactctgagtggaggtcactgcatttggtgattcagaatgatcaaggccataccagtgtgctgcacagctatccagagagcgttggacgagaggtggcaaatgctgtagtccgtcctcttgggcaggtgttaggtaccccttcagtggctggtagtgagaatttgttaaaaactgacaaagaagtaaaatggaccatggaagtaatttgctatggactgacccttccattggatggagagactgtaaaatattgcgttgatgtatatacagactggattatggctttagtgttgccaaaagattctattccattgccagttattaaagagcctaatcaatatgttcaaactatactaaaacacctacagaatctttttgtaccaagacaggaacagggttccagtcagattcgactatgcttacaggtcctgagagccattcagaaactggcccgtgagtcatctctcatggcccgagaaacttgggaagtcttactgttgtttcttctgcagattaacgacatacttctggccccaccaactgttcaaggtggcattgctgagaatctagcagagaagttgattggtgttctctttgaggtgtggttactagcttgtactcggtgcttcccaacacctccttattggaaaacagccaaggagatggtggctaactggaggcatcacccagcagtggtggagcagtggagcaaggtcatttgtgcactcacttccagattgctacgctttacatatggtccttcatttcctgcatttaaagttcccgatgaagatgccagtctgatccctccagaaatggataatgagtgtgttgcacagacatggtttcgctttttacacatgttaagtaatcctgtggatttgagtaacccagctattataagctctactcccaaatttcaggaacagttcttgaatgtgagcggaatgccgcaagaattgaatcagtatccctgccttaaacatctgcctcaaatattttttcgtgccatgcgtggaatcagctgtctggtggatgcattcttaggtatttctagaccccgatcagacagtgctcccccaacacccgtgaatagattaagtatgcctcaaagtgctgctgtcagtaccacccccccacataaccggaggcaccgggctgttactgtgaataaggccaccatgaagacaagcacagttagtactgctcatgcctctaaagttcagcaccagacgtcctccacctctcctctgtcaagtccaaatcagactagttcagaaccccggccactgcctgcccctcggagaccaaaggttaacagcatcttgaatctctttggatcatggttatttgatgcagcatttgttcactgtaaacttcataatgggataaacagagacagcagcatgactgattttacatgcttttaattcaaggtttgcagataaatgattatgtgtgccatcctgtctt

SEQ ID NO: 203609 - protein, 1429 aa, Artificial Sequence
  derived and/or modified sequence
MTNPWEEKVCKMAQTSLLQGKQFYCREWVFHKLQHCLQEKSNCCNSAVNAPSLVMNSGNNASGVSGKGAAWGVLLVGGPGSGKTALCTELLWPSSPASLQRGLHRQALAFHFCKAQDSDTLCVGGFIRGLVAQICRSGLLQGYEDKLRDPAVQSLLQPGECERNPAEAFKRCVLLPLLGMKPPQQSLYLLVDSVDEGCNITEGEQTSTSLSGTVAALLAGHHEFFPPWLLLLCSARKQSKAVTKMFTGFRKISLDDLRKAYIVKDVQQYILHRLDQEEALRQHLTKETAEMLNQLHIKSSGCFLYLERVLDGVVENFIMLREIRDIPGTLNGLYLWLCQRLFVRKQFAKVQPILNVILAACRPLTITELYHAVWTKNMSLTLEDFQRKLDILSKLLVDGLGNTKILFHYSFAEWLLDVKHCTQKYLCNAAEGHRMLAMSYTCQAKNLTPLEAQEFALHLINSNLQLETAELALWMIWNGTPVRDSLSTLIPKEQEVLQLLVKAGAHVNSEDDRTSCIVRQALEREDSIRTLLDNGASVNQCDSNGRTLLANAAYSGSLDVVNLLVSRGADLEIEDAHGHTPLTLAARQGHTKVVNCLIGCGANINHTDQDGWTALRSAAWGGHTEVVSALLYAGVKVDCADADSRTALRAAAWGGHEDIVLNLLQHGAEVNKADNEGRTALIAAAYMGHREIVEHLLDHGAEVNHEDVDGRTALSVAALCVPASKGHASVVSLLIDRGAEVDHCDKDGMTPLLVAAYEGHVDVVDLLLEGGADVDHTDNNGRTPLLAAASMGHASVVNTLLFWGAAVDSIDSEGRTVLSIASAQGNVEVVRTLLDRGLDENHRDDAGWTPLHMAAFEGHRLICEALIEQGARTNEIDNDGRIPFILASQEGHYDCVQILLENKSNIDQRGYDGRNALRVAALEGHRDIVELLFSHGADVNCKDADGRPTLYILALENQLTMAEYFLENGANVEASDAEGRTALHVSCWQGHMEMVQVLIAYHADVNAADNEKRSALQSAAWQGHVKVVQLLIEHGAVVDHTCNQGATALCIAAQEGHIDVVQVLLEHGADPNHADQFGRTAMRVAAKNGHSQIIKLLEKYGASSLNGCSPSPVHTMEQKPLQSLSSKVQSLTIKSNSSGSTGGGDMQPSLRGLPNGPTHAFSSPSESPDSTVDRQKSSLSNNSLKSSKNSSLRTTSSTATAQTVPIDSFHNLSFTEQIQQHSLPRSRSRQSIVSPSSTTQSLGQSHNSPSSEFEWSQVKPSLKSTKASKGGKSENSAKSGSAGKKAKQSNSSQPKVLEYEMTQFDRRGPIAKSGTAAPPKQMPAESQCKIMIPSAQQEIGRSQQQFLIHQQSGEQKKRNGIMTNPNYHLQSNQVFLGRVSVPRTMQDRGHQEVLEGYPSSETELSLKQALKLQIEGSDPSFNYKKETPL

SEQ ID NO: 203610 - DNA, 70 bp, Artificial Sequence
  derived and/or modified sequence
aatggaatcaacatcgaacggaaaaaaacggaattatcgaatggaatcgaagagaatcatcgaatggacc

SEQ ID NO: 203611 - DNA, 89 bp, Artificial Sequence
  derived and/or modified sequence
aatggaatcaacatcaaacggaaaaaaacggaattatcgaatggaatcgaagagaatcatcgaatggacccaggctggtcttgaactcc

SEQ ID NO: 203612 - DNA, 4290 bp, Artificial Sequence
  derived and/or modified sequence
atgaccaacccctgggaggagaaggtgtgcaagatggcccagaccagcctgctgcagggcaagcagttctactgcagagagtgggtgttccacaagctgcagcactgcctgcaggagaagagcaactgctgcaacagcgccgtgaacgcccccagcctggtgatgaacagcggcaacaacgccagcggcgtgagcggcaagggcgccgcctggggcgtgctgctggtgggcggccccggcagcggcaagaccgccctgtgcaccgagctgctgtggcccagcagccccgccagcctgcagagaggcctgcacagacaggccctggccttccacttctgcaaggcccaggacagcgacaccctgtgcgtgggcggcttcatcagaggcctggtggcccagatctgcagaagcggcctgctgcagggctacgaggacaagctgagagaccccgccgtgcagagcctgctgcagcccggcgagtgcgagagaaaccccgccgaggccttcaagagatgcgtgctgctgcccctgctgggcatgaagcccccccagcagagcctgtacctgctggtggacagcgtggacgagggctgcaacatcaccgagggcgagcagaccagcaccagcctgagcggcaccgtggccgccctgctggccggccaccacgagttcttccccccctggctgctgctgctgtgcagcgccagaaagcagagcaaggccgtgaccaagatgttcaccggcttcagaaagatcagcctggacgacctgagaaaggcctacatcgtgaaggacgtgcagcagtacatcctgcacagactggaccaggaggaggccctgagacagcacctgaccaaggagaccgccgagatgctgaaccagctgcacatcaagagcagcggctgcttcctgtacctggagagagtgctggacggcgtggtggagaacttcatcatgctgagagagatcagagacatccccggcaccctgaacggcctgtacctgtggctgtgccagagactgttcgtgagaaagcagttcgccaaggtgcagcccatcctgaacgtgatcctggccgcctgcagacccctgaccatcaccgagctgtaccacgccgtgtggaccaagaacatgagcctgaccctggaggacttccagagaaagctggacatcctgagcaagctgctggtggacggcctgggcaacaccaagatcctgttccactacagcttcgccgagtggctgctggacgtgaagcactgcacccagaagtacctgtgcaacgccgccgagggccacagaatgctggccatgagctacacctgccaggccaagaacctgacccccctggaggcccaggagttcgccctgcacctgatcaacagcaacctgcagctggagaccgccgagctggccctgtggatgatctggaacggcacccccgtgagagacagcctgagcaccctgatccccaaggagcaggaggtgctgcagctgctggtgaaggccggcgcccacgtgaacagcgaggacgacagaaccagctgcatcgtgagacaggccctggagagagaggacagcatcagaaccctgctggacaacggcgccagcgtgaaccagtgcgacagcaacggcagaaccctgctggccaacgccgcctacagcggcagcctggacgtggtgaacctgctggtgagcagaggcgccgacctggagatcgaggacgcccacggccacacccccctgaccctggccgccagacagggccacaccaaggtggtgaactgcctgatcggctgcggcgccaacatcaaccacaccgaccaggacggctggaccgccctgagaagcgccgcctggggcggccacaccgaggtggtgagcgccctgctgtacgccggcgtgaaggtggactgcgccgacgccgacagcagaaccgccctgagagccgccgcctggggcggccacgaggacatcgtgctgaacctgctgcagcacggcgccgaggtgaacaaggccgacaacgagggcagaaccgccctgatcgccgccgcctacatgggccacagagagatcgtggagcacctgctggaccacggcgccgaggtgaaccacgaggacgtggacggcagaaccgccctgagcgtggccgccctgtgcgtgcccgccagcaagggccacgccagcgtggtgagcctgctgatcgacagaggcgccgaggtggaccactgcgacaaggacggcatgacccccctgctggtggccgcctacgagggccacgtggacgtggtggacctgctgctggagggcggcgccgacgtggaccacaccgacaacaacggcagaacccccctgctggccgccgccagcatgggccacgccagcgtggtgaacaccctgctgttctggggcgccgccgtggacagcatcgacagcgagggcagaaccgtgctgagcatcgccagcgcccagggcaacgtggaggtggtgagaaccctgctggacagaggcctggacgagaaccacagagacgacgccggctggacccccctgcacatggccgccttcgagggccacagactgatctgcgaggccctgatcgagcagggcgccagaaccaacgagatcgacaacgacggcagaatccccttcatcctggccagccaggagggccactacgactgcgtgcagatcctgctggagaacaagagcaacatcgaccagagaggctacgacggcagaaacgccctgagagtggccgccctggagggccacagagacatcgtggagctgctgttcagccacggcgccgacgtgaactgcaaggacgccgacggcagacccaccctgtacatcctggccctggagaaccagctgaccatggccgagtacttcctggagaacggcgccaacgtggaggccagcgacgccgagggcagaaccgccctgcacgtgagctgctggcagggccacatggagatggtgcaggtgctgatcgcctaccacgccgacgtgaacgccgccgacaacgagaagagaagcgccctgcagagcgccgcctggcagggccacgtgaaggtggtgcagctgctgatcgagcacggcgccgtggtggaccacacctgcaaccagggcgccaccgccctgtgcatcgccgcccaggagggccacatcgacgtggtgcaggtgctgctggagcacggcgccgaccccaaccacgccgaccagttcggcagaaccgccatgagagtggccgccaagaacggccacagccagatcatcaagctgctggagaagtacggcgccagcagcctgaacggctgcagccccagccccgtgcacaccatggagcagaagcccctgcagagcctgagcagcaaggtgcagagcctgaccatcaagagcaacagcagcggcagcaccggcggcggcgacatgcagcccagcctgagaggcctgcccaacggccccacccacgccttcagcagccccagcgagagccccgacagcaccgtggacagacagaagagcagcctgagcaacaacagcctgaagagcagcaagaacagcagcctgagaaccaccagcagcaccgccaccgcccagaccgtgcccatcgacagcttccacaacctgagcttcaccgagcagatccagcagcacagcctgcccagaagcagaagcagacagagcatcgtgagccccagcagcaccacccagagcctgggccagagccacaacagccccagcagcgagttcgagtggagccaggtgaagcccagcctgaagagcaccaaggccagcaagggcggcaagagcgagaacagcgccaagagcggcagcgccggcaagaaggccaagcagagcaacagcagccagcccaaggtgctggagtacgagatgacccagttcgacagaagaggccccatcgccaagagcggcaccgccgccccccccaagcagatgcccgccgagagccagtgcaagatcatgatccccagcgcccagcaggagatcggcagaagccagcagcagttcctgatccaccagcagagcggcgagcagaagaagagaaacggcatcatgaccaaccccaactaccacctgcagagcaaccaggtgttcctgggcagagtgagcgtgcccagaaccatgcaggacagaggccaccaggaggtgctggagggctaccccagcagcgagaccgagctgagcctgaagcaggccctgaagctgcagatcgagggcagcgaccccagcttcaactacaagaaggagacccccctgtag

SEQ ID NO: 203613 - DNA, 4290 bp, Artificial Sequence
  derived and/or modified sequence
atgacgaacccatgggaagaaaaggtatgtaaaatggcccagacctctttattgcaaggcaagcaattttactgccgagaatgggtgtttcacaagttgcaacattgcctgcaagagaagtctaattgttgcaactcagcagtgaatgctccttcccttgttatgaattcaggaaacaatgcgtcgggtgtttcagggaagggcgccgcctggggcgtgctgctggtaggcggccccggttcaggaaagactgccctgtgtaccgaactgttatggcccagttctcccgcatcactgcagcgggggctccatcgccaggcactcgcatttcacttttgcaaggcccaggattctgacacactctgcgttggtggcttcattagggggctggtagctcagatttgccggtcaggactgctccagggatacgaggacaaactgcgagatcccgcagtgcagagcctgctgcagcccggcgagtgcgaaagaaacccggctgaagcctttaagcgatgtgtgctgctcccactgctcggcatgaagcctccccagcagtcactgtacctactggtggactcagtagatgaaggatgcaatataactgaaggagagcaaacatcaacttccctttccggaacagttgctgccctcctggccggccaccatgagttctttccaccctggctgcttttactctgctccgcccgcaagcagtcgaaggctgtgacaaagatgtttactggattcagaaaaatttctttggacgacctgcgcaaagcatacatcgtgaaagacgttcagcagtacattctgcaccggctcgaccaggaagaggccctgcgccaacatctaacaaaagagactgcagaaatgttgaaccagctgcacattaagtcatcggggtgctttctgtacctcgaacgggtcttagatggcgtcgttgagaattttatcatgctgagagagatacgggacatccccggtaccctaaatggattgtacttgtggttgtgtcagagattatttgttcggaagcaatttgcaaaagttcagcctattctaaatgtgattctggcagcctgcaggccgctgaccatcaccgaactgtaccatgcggtctggacaaaaaacatgtcacttacgctggaggatttccagcgcaaactggacattctgtcgaagcttctggtcgacggtttggggaacacgaagatactgttccactacagcttcgctgagtggctcctggacgtaaagcactgtactcagaagtacctctgcaacgccgcagagggccataggatgctcgctatgtcttacacgtgtcaggctaagaatctgacgccactggaggcgcaggaattcgctttacacttaatcaactcaaacctccagctcgaaaccgccgagttggcactgtggatgatctggaacggcactcccgtgagggactctctctctaccctgatccccaaggaacaggaggtccttcaactgctcgtaaaagcaggcgcacatgtgaacagcgaggacgacaggacttcctgcatcgtgcggcaggcactcgagagggaggattctattcggacactcttggacaatggggcaagcgtgaatcagtgtgactctaacggccgtacgctgctagccaatgccgcttactcagggagcctcgacgtagtcaatttgctggtctccaggggggcagatttggaaattgaggatgctcatggccatacacccctcacccttgccgcacggcaggggcatactaaggtcgtgaattgtctcattggatgcggggccaatattaatcacaccgaccaggatggatggacggcgttgcggtctgcagcctggggtggtcataccgaggttgtgtccgcacttctgtatgccggtgtcaaggtagactgtgccgacgccgattcgcggacggctcttcgcgccgctgcctggggcggccatgaggatattgttttgaacctgctccagcatggagccgaggtcaacaaggcagacaacgagggacggactgccctgatcgcagccgcatatatggggcaccgtgaaatcgttgagcacctgctggatcatggcgccgaggttaaccacgaggacgtagatggccggacagccttatcagtggccgccttgtgcgttccagcatcaaagggccacgcaagtgtggtgagcttactcatagaccgtggcgctgaggtggatcattgtgataaggacggcatgacccccctgctcgtggccgcctacgagggccatgtggacgtagtggacctgctgctcgagggaggagctgacgtcgaccatactgacaacaacgggaggactcccctgttggccgcagcatccatgggccatgctagcgtagtgaatactctactcttttggggcgccgctgtggacagcatcgacagcgaggggcggaccgttctctctattgcttccgcgcaaggcaacgtggaagtggtgagaactctcctggatagagggctcgacgaaaaccatagggatgacgcggggtggacccccctacacatggctgcattcgagggccacaggctaatctgtgaggccctcatcgagcaaggcgctagaacgaatgagattgacaatgatggccggattccttttatcctggccagtcaggaggggcactacgattgtgtccagattctgctggagaacaagtccaacatcgatcaacgcggctacgatggacggaatgcactgagagtggccgcgctcgaggggcatcgggatatcgtggagctcttgttctcacatggcgcggatgtgaattgcaaagacgccgatggtcggcccacgctctacatcttagctctggagaaccagcttaccatggcggagtacttcctggaaaacggcgctaacgtggaggcaagcgacgcagagggacggaccgcgctgcacgtcagttgttggcagggacatatggaaatggtccaggtgttgattgcctaccacgcggacgtgaacgcggcggataacgaaaagaggagtgcccttcaatcagccgcatggcagggacatgtgaaggtggtccagctacttattgagcacggcgcggttgtggatcacacatgcaatcagggcgctacagctctgtgcatcgccgcacaggagggccatatagacgttgtacaagttcttcttgagcacggtgccgatcctaatcatgcagaccaatttggcagaacagccatgcgtgtggccgccaaaaacgggcattctcagataataaagctccttgagaagtacggggcaagttcacttaatggctgcagtcccagcccagtgcacacgatggagcagaagcctctccagtcactgtcatcgaaggtccaaagtttaacaatcaagtcgaattcatctggctcaacaggcggcggcgatatgcagccctccctgcgggggctgcccaacgggcctactcatgccttttcctcaccgagtgagtctcctgactctaccgtggatagacagaaaagctccctgtccaataatagccttaaatcttccaagaactcgtcactgagaactacatcatccacagctactgcacagaccgtcccaatcgacagcttccacaacctcagcttcaccgaacagatccaacaacattcgctaccacggagccggagcaggcagtccattgtttccccctcttctacgacccagagtttgggacagtcacataattcaccatcctccgagtttgagtggtcacaggtgaaaccttctctgaaatccaccaaggcgtccaaaggcgggaaatccgaaaactccgccaagtctggatctgccgggaaaaaggctaaacagtccaatagcagccaaccaaaagtgctcgagtatgagatgacacagttcgacagacggggcccgatagccaagtctggcacagctgctccccccaagcagatgcccgccgagtcacagtgtaaaatcatgatacccagcgcccaacaggagatcggccgttctcagcagcaattccttatccaccagcagtctggcgagcagaagaagcgtaatggtattatgaccaaccccaactatcacctgcagtctaatcaggtttttttagggagggtgtctgtcccgcgaacaatgcaggaccgagggcaccaggaggtactcgagggatacccatctagtgagaccgagctgagtctcaagcaggccctcaagctgcaaatcgagggcagtgacccttcctttaattacaagaaggagacaccgctgtag

SEQ ID NO: 203614 - DNA, 4290 bp, Artificial Sequence
  derived and/or modified sequence
atgaccaacccctgggaggagaaggtgtgcaagatggcccagaccagcctgctgcagggcaagcagttctactgccgggagtgggtgttccacaagctgcagcactgcctgcaggagaagagcaactgctgcaacagcgctgtgaatgcccccagcctggtgatgaacagcggcaacaatgccagcggcgtgtctggaaaaggagctgcctggggcgtgctgctggtgggcggccctggcagcggcaagacagccctgtgcacagagctgctgtggcccagcagccctgccagcctgcagaggggcctgcaccggcaggccctggccttccacttctgcaaggcccaggacagcgacaccctgtgtgtgggcggcttcatccggggcctggtggcccagatctgccgcagcggcctgctgcagggctatgaggacaagctgcgggaccctgctgtgcagagcctgctgcagcccggggagtgtgaaagaaatcctgctgaggccttcaagagatgtgtgctgctgcccctgctgggcatgaagccaccccagcagagcctgtacctgctggtggacagcgtggatgagggctgcaacatcacagaaggagagcagaccagcaccagcctgtctggaacagtggccgccctgctggccggccaccacgagttcttccccccctggctgctgctgctgtgcagcgccaggaagcagagcaaggctgtgaccaagatgttcaccggcttcaggaagatcagcctggatgacctgaggaaggcctacatcgtgaaggatgtgcagcagtacatcctgcaccggctggaccaggaggaggccctgcggcagcacctgaccaaggagacagctgagatgctgaaccagctgcacatcaagagcagcggctgcttcctgtacctggagcgggtgctggatggagtggtggagaacttcatcatgctgcgggagatccgggacatccctggcaccctgaatggcctgtacctgtggctgtgccagaggctgtttgtgaggaagcagtttgccaaggtgcagcccatcctgaatgtcatcctggccgcctgccggcccctgaccatcacagagctgtaccacgctgtgtggaccaagaacatgagcctgaccctggaggacttccagaggaagctggacatcctgagcaagctgctggtggatggcctgggcaacaccaagatcctcttccactacagctttgctgagtggctgctggatgtgaagcactgcacccagaagtacctgtgcaatgctgctgagggccacaggatgctggccatgagctacacctgccaggccaagaacctgacccccctggaggcccaggagtttgccctgcacctgatcaacagcaacctgcagctggagacagctgagctggccctgtggatgatctggaatggcacccctgtgcgggacagcctgagcaccctcatccccaaggagcaggaggtgctgcagctgctggtgaaggccggggcccacgtgaacagtgaagatgacaggaccagctgcatcgtgcggcaggccctggagagagaagattccatccgcaccctgctggacaacggggcctctgtgaaccagtgtgacagcaatggccgcaccctgctggccaatgctgcctacagcggcagcctggatgtggtgaacctgctggtgtccagaggagctgacctggagattgaagatgcccacggccacacccccctgaccctggccgcccggcagggccacaccaaggtggtgaactgcctgattggctgtggggccaacatcaaccacacagaccaggacggctggacagccctgcggtctgctgcctggggcggccacacagaggtggtgtctgccctgctgtatgccggcgtgaaggtggactgtgctgatgctgacagcaggacagccctgcgggctgctgcctggggcggccatgaagatattgtgctgaacctgctgcagcacggggctgaggtgaacaaggctgacaatgaaggccgcacagccctgattgctgctgcctacatgggccaccgggagatcgtggagcacctgctggaccatggagctgaggtgaaccatgaagatgtggatggccgcacagccctgtctgtggccgccctgtgtgtgcctgccagcaaaggacatgcctctgtggtgtccctgctgattgacagaggagctgaggtggaccactgtgacaaggatggcatgacccccctgctggtggccgcctatgagggccacgtggatgtggtggacctgctgctggagggcggcgcagatgtggaccacacagacaacaacggccgcacccccctgctggccgccgcctccatgggccacgcctctgtggtgaacaccctgctcttctggggcgctgctgtggacagcattgacagcgagggccgcacagtgctgagcatcgccagcgcccagggcaatgtggaggtggtgaggaccctgctggaccggggcctggatgagaaccacagagatgatgctggctggacccccctgcacatggccgcctttgagggccacaggctcatctgtgaggccctgattgagcagggcgcccggaccaatgaaattgacaatgatggccgcatccccttcatcctggccagccaggagggccactatgactgtgtgcagatcctgctggagaacaagagcaacatcgaccagaggggctatgatggaagaaatgccctgcgggtggccgccctggagggccaccgggacatcgtggagctgctcttcagccatggagcagatgtgaactgcaaggatgctgatggccggcccaccctgtacatcctggccctggagaaccagctgaccatggccgagtacttcctggagaatggagccaacgtggaggccagtgatgctgagggccgcacagccctgcacgtgtcctgctggcagggccacatggagatggtgcaggtgctgattgcctaccacgcagatgtgaatgctgctgacaatgagaagaggtctgccctgcagagcgctgcctggcagggccacgtgaaggtggtgcagctgctgattgagcacggggctgtggtggaccacacctgcaaccagggcgccacagccctgtgcatcgccgcccaggagggccacattgatgtggtgcaggtgctgctggagcacggggctgaccccaaccacgccgaccagtttggaagaacagccatgagggtggccgccaagaatggccacagccagatcatcaagctgctggagaagtacggggccagcagcctgaatggctgcagccccagccctgtgcacaccatggagcagaagcccctgcagagcctgagcagcaaggtgcagagcctgaccatcaagagcaacagcagcggcagcactggaggaggagacatgcagcccagcctgcggggcctgcccaacggccccacccacgccttcagcagccccagcgagagcccagacagcacagtggaccggcagaagagcagcctgagcaacaacagcctgaagagcagcaagaacagcagcctgcggaccaccagcagcacagccacagcccagacagtgcccatcgacagcttccacaacctgtccttcacagagcagatccagcagcacagcctgcccaggagccgcagccggcagagcatcgtgagccccagcagcaccacccagagcctgggccagagccacaacagccccagcagcgagtttgagtggagccaggtgaagcccagcctgaagagcaccaaggccagcaaaggaggcaagtctgagaacagcgccaagagcggcagcgctgggaagaaggccaagcagagcaacagcagccagcccaaggtgctggagtatgagatgacccagtttgaccggcggggccccatcgccaagtctggaacagctgccccacccaagcagatgcctgctgagagccagtgcaagatcatgatccccagcgcccagcaggagatcggccgcagccagcagcagttcctgatccaccagcagagcggggagcagaagaagagaaatggcatcatgaccaaccccaactaccacctgcagagcaaccaggtgttcctgggccgggtgtctgtgcccaggaccatgcaggaccggggccaccaggaggtgctggagggctaccccagcagcgagacagagctgagcctgaagcaggccctgaagctgcagatcgagggcagtgaccccagcttcaactacaagaaggagacccccctgtag

SEQ ID NO: 203615 - DNA, 4290 bp, Artificial Sequence
  derived and/or modified sequence
atgaccaacccctgggaggagaaggtgtgcaagatggcccagacctctctcctgcagggtaagcagttttattgccgtgagtgggttttccacaagcttcagcactgcttgcaggaaaagtctaattgctgcaacagcgccgtcaacgcccctagcctcgtcatgaatagcggaaataacgcctctggcgtcagcggtaagggcgcagcctggggtgttctcctggtgggtggacccggaagtgggaagacggccctctgcaccgagttgctctggccctcgtccccagcaagccttcagagaggactgcaccgccaggctcttgccttccacttctgtaaggcacaggattcggacactctttgtgtgggtggatttatccgcggcctggtggctcaaatctgcagatctggtctactgcaaggttatgaggataagttacgagatccggccgtacagagccttctacagccaggcgaatgtgagcggaacccggcagaagccttcaagcgctgtgttttgctgccactcttgggcatgaagccaccccagcagtccttgtatctgctcgtcgactcagtagacgaaggctgcaacatcacagaaggtgaacagactagtacaagcctgagcggaactgtggccgctttgcttgcggggcaccacgaatttttccctccttggctgctcttgctttgctctgcaagaaagcaatctaaggcggtgactaaaatgtttacaggatttcgcaaaatctcgcttgacgacctccgtaaggcctacatagtgaaagacgtccaacagtatatcttacaccggctggatcaggaggaggctctgagacaacatttgacaaaagagacggctgaaatgctgaatcagctgcatataaagtcttccgggtgcttcttgtatctggagagggtgttggacggggtcgtggagaacttcatcatgctgcgcgagattagagatatccccggcactttgaatgggctgtatttgtggctctgccagcgcctttttgtgcgcaaacagttcgctaaggttcagcccattttaaacgtaatcttagcagcctgcaggcctctcactattacagagttataccacgccgtctggactaagaacatgtctctgaccctggaagacttccagagaaagctggatatacttagcaagcttctcgtggatggcctgggcaataccaaaatccttttccactattcttttgcggaatggctgttggacgtgaagcattgtacacagaagtacctttgtaatgccgccgaaggacacaggatgttggccatgtcctacacctgccaggctaagaatctgacgcccctcgaggcgcaggaattcgcccttcatctgatcaacagtaatctccagctggagacagcggagctagccctttggatgatctggaatgggacccccgtacgggactcattgagtacgttaatacctaaagagcaggaggtactgcaattactggtgaaagccggtgctcacgttaactccgaggatgacaggacttcctgcatcgttaggcaggctcttgagcgggaggatagtatcaggaccctgctcgacaacggcgcaagcgtcaatcagtgcgatagcaatggccgtacactgttagcgaatgccgcttacagcgggagtctggatgtcgtgaacttgctcgtctcccgaggcgccgacctcgagattgaggatgcccacgggcacaccccccttacattggccgcgagacaggggcacaccaaggtggtgaattgcctaataggctgtggtgcgaatatcaaccatacagaccaagacggatggacagctctaaggagcgctgcctggggcggacatactgaagttgtgagcgccctgctttatgcaggcgtaaaagtggactgtgccgatgccgactcaagaaccgccctgcgtgctgctgcgtggggaggacatgaggatatcgtgctgaacctgctgcagcatggggctgaggtgaataaggcggataacgaaggtagaactgctttaattgcagccgcatatatgggacacagagagattgtggaacatttgctggaccacggcgccgaggtgaaccacgaagacgtagatgggaggactgcgctaagcgtcgccgcactgtgcgtgcccgcctcgaaggggcatgcctcagtggtctctctgctcatcgaccggggcgcagaggtggatcattgtgataaagatggcatgacacctctcttggtcgctgcatacgaagggcacgtcgacgtggtcgatctgctgttggaagggggggccgatgtggaccacacggacaacaatggtagaacgccactccttgcagccgcttctatgggacatgcttcagtggtgaatacactgctcttctggggtgctgcagtcgactcaattgacagcgaagggagaaccgtgctgtcaatagcatcagcacagggcaatgtcgaggtggtgcggacactcctagatcggggcctggacgagaaccatagggacgacgcaggatggacaccacttcacatggccgctttcgaaggccacaggttgatctgcgaagccctgattgagcagggagccagaacaaatgagatagacaatgacgggcgcatccccttcatattagcctcacaggagggccattatgattgcgtgcaaatcctgttggaaaataaaagcaacatcgaccagagggggtacgatggcagaaatgctctccgcgttgccgcactcgaaggtcatcgcgacatcgtggagttacttttttcccacggggcggatgtgaactgtaaggacgccgacggcagacctactttatacattctcgctcttgagaaccagctgaccatggccgaatactttctcgagaacggcgctaacgtggaagccagtgacgccgagggccgcactgcactgcacgtgtcatgctggcagggccacatggagatggtacaagtcctgattgcttaccacgccgacgtgaacgcggcagataacgagaaaagaagcgctctacagagtgccgcatggcaggggcatgtcaaggttgtccagctgctgatcgaacatggcgccgttgtagatcacacatgcaaccaaggagcaaccgcactttgtatcgccgcacaagagggtcacatcgatgtagttcaggtccttctggagcacggagcagatccgaatcatgctgatcagttcggccgaaccgctatgcgggtggccgccaagaacggacatagtcagatcataaaactgctggaaaagtatggcgcatcctcactgaacggctgttccccatctcccgttcacacaatggagcagaaaccgctccaaagtctgtcttcgaaagttcagagtcttaccataaagtccaattcctctggaagtacaggcggaggagacatgcagccttccctaagagggctcccaaatgggcccactcacgccttcagttccccctctgagagcccagactccaccgtggatcgacagaagtcttccctttctaacaatagcctgaaaagctctaagaactctagtctaaggaccacatcctctacggctacagctcagactgtgcccatcgactccttccacaacctgagctttacggagcagattcagcagcatagtctgcccagaagcaggagtcgtcagagcatcgtatccccttcctctacaactcagtctttgggccagtcacacaactccccctcctcagaatttgaatggtcccaggttaaaccaagccttaagagcactaaagcatcaaagggtgggaaaagcgaaaacagcgcaaagtctggttccgctggaaagaaggccaaacagagcaacagctctcagccaaaagtcttggaatatgaaatgacacagtttgaccggagaggacctatcgccaagtccggtacggcggctcctcccaagcagatgccagccgagtcccagtgtaagattatgattccttctgctcagcaggagataggtcgcagtcaacagcagttcctgatccaccagcaatctggagagcagaagaagcggaacggaatcatgactaatcccaattatcacctgcagtctaatcaagtcttcctcggcagggtgtcagtgcccaggacaatgcaggacaggggccaccaggaggtactggaggggtatccctcatctgagacagagctctccttgaagcaggccctgaagctgcaaattgagggttcagacccctcctttaattacaagaaggaaacgcctctgtag

SEQ ID NO: 203616 - DNA, 8794 bp, Artificial Sequence
  derived and/or modified sequence
agttactgccctgacggcggcggcggcggcggttggccggtgggggctggggcgagcacgaccgattctgctgggaaagctggaactggcagccgccgggggccaagaggaggatccggagctgggagcgtgccccgggcccggcggaggaggcggctgcagttggagtggagtcttgggagcgctgctggcagcgacttctcagcgaagcaagtgtctgagactgagagtccctaacagcggcagcggcggccacggcggcggctggggccgagttacttgtggaaattgttgattacccggacgtcttaaaaccaagaaacctgtgaacaggttcattaagaatctgctgtcttgaaaaatgcatattatgaatgctttgaattaagaaggtgttaacagtggttgtcatttctgccacataagagactataatctgaaacagttcctggcagttgcccagatgcctgaaactggcacgatctagtactcttgagtgatcatccttcaacgagaaatacagagctacttacatactgtacctcataccgtataaatgtaatctctctgatgccatttaatgcagtggacctcttttcagaatctaattgtcagatgcagaattaacacttggaatctggagaagcattttgtacaaattgaaagattgggttttttctttagttttccacatgtattgtctcatctctgttcttgaaacatccacaatcacataaactccagttataaccatggagttatgtgactcattaaaatttaggaaaagtgttgctgagctgtggaatcaggcgtttctccctcagttcaacaactaatacatagactgctgatcaagaataaggaaccaaataaagtcatgcacgttctgttgacagaggaactctgtggctgttgaattttactgtaactagttactctgtcttcagagtcaacttaatatacaagttatgtcataatggatggaaagacctgtgttgatgtatccagactctagcaaatgaagataaaaaacccgttatgactaatccttgggaagagaaagtctgcaaaatggctcaaaccagtttactgcaagggaagcagttttactgtagggagtgggttttccacaagcttcagcattgcctccaggagaaaagtaactgctgcaatagtgctgtcaatgcaccatcacttgtaatgaattctgggaataatgctagtggtgtctctggaaagggagctgcctggggtgtgttgttggtaggagggcctggcagtggcaagacggccctatgtactgaactcttatggccaagttcacctgcaagtttgcagagaggtttacatcgccaagctttggcctttcatttctgcaaagcccaggactctgatactttgtgtgttggagggtttattagaggtctagtagcccagatctgccgcagtggactactccaaggatatgaggacaagctaagggatccagcagtccaaagcctcttacagcctggggagtgcgagagaaacccagccgaagcatttaaaaggtgtgttctactccctcttctgggaatgaagcctccccagcaaagcctatacctgcttgttgattctgttgatgaagggtgtaacattactgaaggtgaacaaacgtctaccagcttatctgggactgttgcagcacttttagctggtcaccatgagttctttccaccatggctattgcttctctgttctgcccgaaagcagagtaaggctgttactaaaatgtttactggttttcgaaaaataagtttagatgaccttcggaaggcatatatcgtcaaggatgttcagcagtacattcttcatcgtttagatcaagaagaagctttgcgacaacacctcacaaaagaaactgcagagatgttaaatcaactgcacattaaaagcagtggatgctttctttacctagaacgagttttagatggagttgtagaaaattttattatgttaagagaaattcgtgacatcccaggaactctaaatggtttatatctctggctgtgccaaagactttttgtaagaaaacaatttgcaaaggttcagcctattttgaatgtgattcttgcagcctgccgacctttgaccataacggaattatatcacgcagtatggaccaaaaacatgtcgttaactttggaagattttcaacgcaagttagatatcctctccaaacttcttgttgatggactaggaaatacaaaaatactgtttcattatagttttgccgagtggcttctggatgtgaaacactgtactcagaagtatttatgtaatgcagcagaaggacacagaatgttggctatgagttatacctgtcaagccaagaatttaacaccattggaagcacaagaatttgcattgcacttaattaactcaaacttacaattagagacagcggagttagctctgtggatgatatggaatggtacacctgtcagagattccctttctactttgatacccaaggaacaagaagtgctacagctgttggttaaagctggggctcatgtcaacagtgaagacgatcgcacatcatgcatagttcgacaagccttagaaagagaggattccattcggacattattagataatggagcttcagtaaatcagtgtgattcaaatgggagaacattattggctaatgctgcatatagtggcagtcttgatgtagtcaatttacttgtctctaggggagcagatttagagatagaagatgctcatggacatacaccactcactctagcggctagacagggacataccaaggtggttaattgtttgattgggtgtggagcaaatattaatcatactgatcaagatggttggacagcattaagatctgctgcttggggtggccatactgaggtagtttctgcactactttatgctggcgtaaaagtggattgtgcagatgctgatagccgaacagctttgagagcagcagcatggggaggacacgaggatattgtactgaatttgctacaacatggcgctgaagtgaacaaagctgataatgaaggtagaactgctttgatagcagcagcatacatgggacatagagagattgtggaacacctactggaccatggagcagaagtaaatcatgaggatgttgatggcaggactgcactctctgtagctgcactttgtgtgcctgcaagtaaagggcacgcatcagttgttagccttttaattgatcgaggtgctgaagtagatcattgtgataaagatggcatgactccactgctggtagctgcctatgaaggacatgttgatgtggttgacttgcttctagaagggggagcagatgtagatcacacagataacaatggccgtacacccctcttagcagcagcgtctatgggtcatgcatcagttgtaaatacacttttgttttggggtgcagctgtggatagtattgatagtgaaggtaggacagtcctcagtatagcttcagcacaaggaaatgttgaggtggtacgtactctactggatagagggttagatgaaaatcacagagatgatgctggatggacacctttgcacatggcagcttttgaagggcacagattgatatgtgaagcacttattgaacaaggtgctagaacaaatgagattgacaatgatggacgaatccctttcatattagcttcacaagagggtcattatgattgtgttcaaatattactggaaaacaaatccaacattgatcaaagaggttatgatggaagaaatgcactgcgggttgctgcattagaagggcacagggacattgttgaattgctttttagccatggtgctgatgttaactgcaaagatgctgatggtcggcctacactttatatcttggccttagaaaatcagcttacaatggccgaatattttttagaaaatggtgcaaacgtagaagcaagtgatgctgaaggaaggacagcacttcatgtgtcttgttggcaaggccatatggaaatggtgcaggtcctgatagcataccatgctgacgtcaatgctgcagacaatgaaaagcgctctgctttgcagtctgcagcctggcagggccatgtaaaagtggttcagcttctgattgagcatggtgctgtagttgaccatacatgtaaccaaggtgcaactgcactctgtattgcagcccaggaagggcacattgatgttgttcaggtcttattagagcatggtgctgatccaaaccatgctgatcaatttggacgcactgctatgcgtgttgcagccaaaaatggacattctcagataattaaattattagaaaaatatggtgcatctagtttgaatggctgttccccatctcctgttcacacaatggagcaaaaacctctacagtcattgtcttcaaaagtgcagtcattaacaattaaatcaaatagctctggtagtactggtggaggggatatgcagccttcgttacgtggtttacctaatgggcctactcatgcttttagttctccttcagaatctccagattctacagttgaccggcagaagtcatcactgtcaaataattccctgaaaagctcaaaaaattcatctttgagaactacttcatctacagcaacggctcaaacagtgccaattgatagctttcataacttgtcatttacagaacaaattcagcagcattcattgccacgcagtagaagtcgacagtcaattgtttccccatcttccacaacacagtccttaggacagagtcataattcaccaagtagtgaatttgagtggagtcaagtaaagcccagtttgaagtcaactaaagcaagtaaaggggggaaatcagaaaattctgccaagtctggatcagctgggaaaaaagcgaaacaaagtaattcttcacagccaaaggttttagaatatgaaatgactcagtttgatagaagaggacctatagccaaatccgggactgctgcaccacctaaacaaatgccagcagaatctcaatgcaaaattatgataccttcagctcagcaggaaattggtcgatctcaacagcagtttcttattcaccaacaaagtggggaacagaagaagagaaatggaataatgacaaatccaaattatcatcttcagagcaaccaggtttttcttggtagggtttcagtcccacgaacaatgcaagatagagggcatcaggaagtgttggagggatacccttcctcagagacagaattaagccttaaacaagctctgaagcttcagattgaaggttctgaccctagcttcaactataaaaaggaaacaccattataaaagtttcctattctgtgaaacagaagacattgtgatggagtggttcttcagctactggatggaaacatatgcctgttgatttgctgaaaaaacaaaaaaaatgaagaatgtgatctctgcagtacagttaccttaattactgtaatgtgcctaaatagtaaggctgccttctcaatgtaaccctctgtgcttaaaaaatttcattttgtgtgctttgtattcactacacaggaataagcactttttaaaaatgcagatacatactgcagttccctgataaaagctgaaaagaaaatttgagtattttaagttaagatgtgataaaaaatgtgcatgtgccataatcaaatatatatgaaaaggcagtgttccttgtatttatttttttttctttttgtggcaaaagaaacttaaacatactgtttcagtcacattgcattgtagtgtatggcctgtttcttgtatctttaaagacgttgctcaataaaacaaatcttgcaactgttctatgttcactacaccttcagcattggataaaaatcattttctatataaatatcacattgaaatgaaaaaatgatttcttggcagtttaaaaaaaatattttatagtagtttagggagctgctttaagtagtttaaatctggattttcccagtagaattcttctcatctctggctaaacatgtcagaacaaacaaccaaccagtctgtaggcagaacaaagtcctatttcatccgctgggatacaatttcatcttccattcactttgtcattccacctctaagaagacagactatcattcctgaggcatgaaaattctcagggacaaagccatgcctcagtcacatgtgtgtgcagagagaaatgcacctgtctatctaagggtagatttttgatccctgaataattcattgactaaactgacctcttcctcctggctaaataaattaattttgctggcttctctctcagcggtttctattttgtaaattgctgcatgaccaaaatagccccactcaaaatcaattggattaattttaatggtttggttggatgaatattctggatgaatataaaatgtgctgcccttcacagatgacaccactcccctgtcaatcatagcacatgtgtactttttattgttacttaatagtgatggatttgcacttttctatcctcatactctttcctgttttcttctttgtacaattgcatgcaggagggctggatgccagggttaagagagaaattcatgacaaggaaggtaaaattggttcaaatgagcatgtgtcccacagccttagtctccttactcttaaatcagtggagctgtagcttagatgggtcgtttatatgtctggaaaagttgtcataacagtttagaagccaaggttgtggatttgatcttagaatgggcctgttaatcttatagaacccagaaattctgttcttttcatgtactgttgatgaggaatgaggaaagagaatttggagattcagcacaaaaccattgctacttctagaacaaaatctttagaatatgtcctaataacaaaggtcagtaatgtcatcttcatatatgaaggacacatgtgatacattgttcgtggaaatagaaatgtataattatgataaatgtttcacttgaatcttattgtaaggcttttcttgcttttattttttaaagtcagcaaaactcattttgtctgtcatctataagtcatagtgaggactacgagataagttgataagttcaattgatattaaggtgacatggcaatattaataactcaaatgtgaatgtttcaagtattgaattcttgtccctatgggacatttattaaataaaattaatgggactcttgcaaagtagccttaaaagtgttaatgagtctattaataaatatgaacacatactattattagaaccaactttactcatatctcaaatacagtacatttacattactgtagaggatgaagctctaatttctattacatgtaattttctttagaaagagaaccctgaaagctgccagtttttctattaactttgaattattgaaattgtatttatttaattttattgtttttacaaaattgcaccttgtgtccaaagggcgaagatatgacattgcataagggatttatgtttttcaaagagctaactgttttcatatccatactatatacacttgaagcaattggtaggaagagaacctattggaaaaatacgattttcaaaagtaagtattcctcgggatgtttttatataaattatgttttggaatagaacataaatgactttgagttaggataaggatgataggatgggtgctggagatgccctgccttgcttatttgtttctgtgggggatttaatactataaatgaaaatggcttctgctccattaaaaagtaaaaattgtcctccaaatataaaactccttaatagatatttttgaaattaaaatctttaaattttataaatcagctgttgccactacacaactatgatggcatgtgcttataacatttttataacattccgtctgtgtctattccctaaatatcatgagtttataataaggaaagtgataaaaatacagtaatgaaataaaaatctgaatgtttctaagaaaggttttggaaggaaaaatgacctgaaatcagtgcgtactgcaaagtacagccaataatttttgttctttgttttcacccccaccctcactggaattctcaccaaaaatagtttgatacttaaaaaacagaagtaaatacttttctcaatattgttttggctatgcaaatatttgttttgcttaatgtcctccatttacacttctcagcaaatgtagttgcaaacaaatgctttctttttatttttcccttggtttgaggtatgtaaatagccaaaaatgtacattgaatttcacattgtaaaagttttattttatcccttgtatgatattactcaaaaaatccctgtgtatatgaaagtgcataataaatatatttgctttacagagaagatcttgttttaattttgtccttgaaccagtagaacatgcatgatatgcatatagcataaacaactgttagttgttttaagttattatcttaaataaatcctgagcaaatgaatttggaaacattttgcaaagaagaaagtgaaatataacactgtccaaaggaaggtagaaaaacaaagatttactgtttatgtcttcctaagcctttttaaagacttaatgttcttttcccccccgtgactgattatatactatatcacaccatgtcaggttttgtgcctctgagaattgcagtaatccaataacttttgtatatgtgtgctccttgatcatcagaatattatggccatcttatggcggatattttgggagtttattgcaaacatggtcattcattttctaaataaaatttgtgtgtttcttcactcag

SEQ ID NO: 203617 - DNA, 4290 bp, Artificial Sequence
  derived and/or modified sequence
atgactaacccgtgggaagaaaaggtgtgtaagatggctcaaacatccctgctacagggcaagcagttctactgccgggagtgggtgttccataagttgcagcactgtctccaggagaaaagcaattgttgcaactccgctgttaacgcgcctagcttggtgatgaactccggtaataatgcctctggggttagcggtaagggcgcagcgtggggagtgttgttggtgggcggacccggatctggcaagacagcactgtgtaccgagctgttgtggccttccagccctgccagtctgcagcgagggctgcaccgccaagctctggcttttcatttctgtaaagcccaagacagtgacactctgtgtgtaggcggattcatccgcggattagtggcacagatatgccgttctggactcctccaaggttacgaagataagctgagggatccggcagtacagtccctgctgcaacccggagagtgcgaacgtaaccctgcagaagcctttaagagatgcgtactgctccctctccttgggatgaagccaccccagcagtccctgtatctcctggttgactctgtcgacgaggggtgtaacatcacggagggggaacaaactagcactagcctctcggggaccgtggccgcactgctcgcaggccatcatgaattttttccaccttggctgctactcctgtgctcagcaaggaaacagagtaaagcagtgaccaaaatgttcacagggtttaggaaaatatcactggatgatttgcgaaaggcctatatagtcaaggacgtgcaacagtatatcctgcatcgactagaccaagaagaggcactgaggcagcacttgacaaaggaaacagctgaaatgttgaaccagctgcacattaaatcctccggttgctttctgtacctggagagggtcctggatggcgtcgttgaaaacttcatcatgctgcgagagattcgggatataccaggtactttaaatgggctgtatctgtggttgtgccagcgactgttcgtgcggaagcagtttgcaaaggtgcagcctattctcaacgtcatactggccgcttgcaggcctttgactataactgaattataccacgctgtttggacaaaaaacatgtcacttacactggaagactttcaacgcaagctggacatcctgtcgaaactcctggtagatgggctgggcaacacgaaaattctgtttcactatagtttcgctgaatggctcctggacgtcaaacattgcacccaaaagtatctgtgcaacgcagcagagggtcatagaatgttggcaatgagttacacctgtcaggctaagaacctgacccccctggaggcacaggagtttgccttgcaccttatcaactcaaatctgcagctggaaacagccgagttagccctgtggatgatctggaatggaacgccagtgcgggatagtctgtcaacacttattcctaaggagcaggaggtactgcagctcctagtcaaggccggagcccatgtgaactctgaagacgatcgtacctcttgtattgtgcgccaggcgcttgagcgggaagatagcatccgcaccctgttagacaatggggcaagcgtgaatcagtgcgatagcaacggacgcactcttctcgccaacgccgcttactcgggctccctggatgtcgtcaaccttcttgtttcgcgaggagcagatctggagatcgaggatgcgcatggacatacaccgctcaccttggccgctcgccaaggacatactaaagtggtcaattgtctgataggctgcggcgctaacatcaaccacacagaccaggatggatggaccgccctaagatctgccgcttgggggggacatactgaggtagttagcgcgttgttgtatgccggagtcaaggtcgactgcgctgatgcggatagccgaacagccctgcgagccgcagcctgggggggtcatgaagacattgtgctgaatttgctccaacatggcgcagaagtcaacaaagcagacaacgagggtcggaccgccttaatcgcggctgcgtatatgggccatagagagattgtcgagcatctgttggatcatggggctgaggtcaatcacgaagacgttgatggtcggaccgcattatcggtggcagccctgtgcgtccctgcctccaaggggcatgctagtgtagtctcattattaattgatcgaggggcagaagtggatcattgtgacaaagacggcatgactccccttctggtggcagcgtacgaaggccacgtcgatgtggtcgaccttctgctggaaggcggtgccgatgttgatcatacagacaacaatgggcgtacacctttactggcggcagctagcatggggcatgctagtgttgtaaatacactgctgttttggggagccgcagtggattcaattgacagcgagggccgtaccgtgcttagcatcgcttcagcccaggggaacgtcgaagttgttcggacacttctggacagaggactggacgagaaccatagagatgatgcgggatggacaccccttcatatggctgctttcgaggggcaccggctgatctgtgaggcactgatcgaacagggggcaagaaccaatgaaatcgacaacgatggccgaatcccctttatccttgcaagccaggaaggccactacgattgcgttcaaattctcttagagaacaaaagcaatatcgaccaacgcggatacgatgggaggaatgcccttcgcgtcgcagccctggaagggcacagggacatcgtggaactgctgttctctcatggagcagatgtgaattgcaaagatgctgacgggagacccaccctgtacatcctggccctggagaatcagctcaccatggcggaatacttcctcgagaacggtgcaaatgtggaggccagcgatgcagagggtcgcacagctttacatgtgagctgttggcagggccacatggagatggtgcaggtgctgatagcctaccacgccgacgtgaacgctgctgacaatgagaagcggagcgccctgcaatccgcggcttggcagggccacgtcaaggtggtccaactgctcatcgagcacggggctgtggtggatcacacatgtaaccagggtgctacggccctgtgtatagccgctcaggaaggacatattgatgtggtccaggtactcttggaacatggggctgacccaaaccatgccgaccaatttggtcgcacagcgatgagggtcgcagccaaaaatggccattctcagattataaagctgctggaaaaatatggtgcatctagtttaaacgggtgcagcccatcgccagtgcacaccatggagcagaagccactacagagtctgtcctccaaagtccagtctctgacaatcaagagcaactcaagcgggagtactgggggaggagatatgcagccttcactgcggggacttccaaacggccctacacatgctttctctagtccctcggagagccccgactccaccgtagacaggcaaaaatcttccctcagtaataactctcttaagagctcgaagaattccagcctcaggacaaccagtagtactgctaccgcccaaactgtccctatagactcattccataacctgtcatttacagagcagatacagcagcatagtctgccccgaagccgtagtagacaatccatagtaagtcctagctccaccactcaaagtttaggtcagagccacaatagcccatcctccgagttcgaatggtcgcaggtgaaacccagtctgaaatccacaaaagcatctaaagggggaaagagtgagaactccgctaagtcgggttctgccggaaaaaaagcaaagcaatccaattccagccagcctaaagtgctcgagtatgagatgacacaattcgacagaagagggcctatcgccaaatccggcactgctgctcctccaaagcagatgcctgccgagagccaatgcaaaatcatgatcccatcagcccagcaggaaattggacgttcacagcaacagtttctgatccatcagcagtcgggtgaacaaaagaagcgtaacgggatcatgactaatcccaattatcacttgcaatccaatcaagtttttttgggacgtgtgtcagtgccaaggacaatgcaagaccggggacaccaggaagtgctagagggttacccatcatccgaaaccgagctgagtctgaagcaggctctcaagcttcagattgagggcagcgaccccagtttcaactacaagaaagaaacacccctgtag

SEQ ID NO: 203618 - protein, 1067 aa, Artificial Sequence
  derived and/or modified sequence
MNSMDRHIQQTNDRLQCIKQHLQNPANFHNAATELLDWCGDPRAFQRPFEQSLMGCLTVVSRVAAQQGFDLDLGYRLLAVCAANRDKFTPKSAALLSSWCEELGRLLLLRHQKSRQSDPPGKLPMQPPLSSMSSMKPTLSHSDGSFPYDSVPWQQNTNQPPGSLSVVTTVWGVTNTSQSQVLGNPMANANNPMNPGGNPMASGMTTSNPGLNSPQFAGQQQQFSAKAGPAQPYIQQSMYGRPNYPGSGGFGASYPGGPNAPAGMGIPPHTRPPADFTQPAAAAAAAAVAAAAATATATATATVAALQETQNKDINQYGPMGPTQAYNSQFMNQPGPRGPASMGGSMNPASMAAGMTPSGMSGPPMGMNQPRPPGISPFGTHGQRMPQQTYPGPRPQSLPIQNIKRPYPGEPNYGNQQYGPNSQFPTQPGQYPAPNPPRPLTSPNYPGQRMPSQPSSGQYPPPTVNMGQYYKPEQFNGQNNTFSGSSYSNYSQGNVNRPPRPVPVANYPHSPVPGNPTPPMTPGSSIPPYLSPSQDVKPPFPPDIKPNMSALPPPPANHNDELRLTFPVRDGVVLEPFRLEHNLAVSNHVFHLRPTVHQTLMWRSDLELQFKCYHHEDRQMNTNWPASVQVSVNATPLTIERGDNKTSHKPLHLKHVCQPGRNTIQITVTACCCSHLFVLQLVHRPSVRSVLQGLLKKRLLPAEHCITKIKRNFSSVAASSGNTTLNGEDGVEQTAIKVSLKCPITFRRIQLPARGHDCKHVQCFDLESYLQLNCERGTWRCPVCNKTALLEGLEVDQYMWGILNAIQHSEFEEVTIDPTCSWRPVPIKSDLHIKDDPDGIPSKRFKTMSPSQMIMPNVMEMIAALGPGPSPYPLPPPPGGTNSNDYSSQGNNYQGHGNFDFPHGNPGGTSMNDFMHGPPQLSHPPDMPNNMAALEKPLSHPMQETMPHAGSSDQPHPSIQQGLHVPHPSSQSGPPLHHSGAPPPPPSQPPRQPPQAAPSSHPHSDLTFNPSSALEGQAGAQGASDMPEPSLDLLPELTNPDELLSYLDPPDLPSNSNDDLLSLFENN

SEQ ID NO: 203619 - protein, 997 aa, Artificial Sequence
  derived and/or modified sequence
RPPPAGPQAPEGARAGSRPVQLLALLSSWCEELGRLLLLRHQKSRQSDPPGKLPMQPPLSSMSSMKPTLSHSDGSFPYDSVPWQQNTNQPPGSLSVVTTVWGVTNTSQSQVLGNPMANANNPMNPGGNPMASGMTTSNPGLNSPQFAGQQQQFSAKAGPAQPYIQQSMYGRPNYPGSGGFGASYPGGPNAPAGMGIPPHTRPPADFTQPAAAAAAAAVAAAAATATATATATVAALQETQNKDINQYGPMGPTQAYNSQFMNQPGPRGPASMGGSMNPASMAAGMTPSGMSGPPMGMNQPRPPGISPFGTHGQRMPQQTYPGPRPQSLPIQNIKRPYPGEPNYGNQQYGPNSQFPTQPGQYPAPNPPRPLTSPNYPGQRMPSQPSSGQYPPPTVNMGQYYKPEQFNGQNNTFSGSSYSNYSQGNVNRPPRPVPVANYPHSPVPGNPTPPMTPGSSIPPYLSPSQDVKPPFPPDIKPNMSALPPPPANHNDELRLTFPVRDGVVLEPFRLEHNLAVSNHVFHLRPTVHQTLMWRSDLELQFKCYHHEDRQMNTNWPASVQVSVNATPLTIERGDNKTSHKPLHLKHVCQPGRNTIQITVTACCCSHLFVLQLVHRPSVRSVLQGLLKKRLLPAEHCITKIKRNFSSVAASSGNTTLNGEDGVEQTAIKVSLKCPITFRRIQLPARGHDCKHVQCFDLESYLQLNCERGTWRCPVCNKTALLEGLEVDQYMWGILNAIQHSEFEEVTIDPTCSWRPVPIKSDLHIKDDPDGIPSKRFKTMSPSQMIMPNVMEMIAALGPGPSPYPLPPPPGGTNSNDYSSQGNNYQGHGNFDFPHGNPGGTSMNDFMHGPPQLSHPPDMPNNMAALEKPLSHPMQETMPHAGSSDQPHPSIQQGLHVPHPSSQSGPPLHHSGAPPPPPSQPPRQPPQAAPSSHPHSDLTFNPSSALEGQAGAQGASDMPEPSLDLLPELTNPDELLSYLDPPDLPSNSNDDLLSLFENN

SEQ ID NO: 203620 - protein, 220 aa, Artificial Sequence
  derived and/or modified sequence
MNSMDRHIQQTNDRLQCIKQHLQNPANFHNAATELLDWCGDPRAFQRPFEQSLMGCLTVVSRVAAQQGFDLDLGYRLLAVCAANRDKFTPKSAALLSSWCEELGRLLLLRHQKSRQSDPPGKLPMQPPLSSMSSMKPTLSHSDGSFPYDSVPWLPAYPACTPPPSQSHPNSCSLKQKQPLAFPPPLCSIWLTTLQGLLGSLSCVHFVSGWSVPREPHGLG

SEQ ID NO: 203621 - DNA, 3204 bp, Artificial Sequence
  derived and/or modified sequence
atgaacagcatggacagacacatccagcagaccaacgacagactgcagtgcatcaagcagcacctgcagaaccccgccaacttccacaacgccgccaccgagctgctggactggtgcggcgaccccagagccttccagagacccttcgagcagagcctgatgggctgcctgaccgtggtgagcagagtggccgcccagcagggcttcgacctggacctgggctacagactgctggccgtgtgcgccgccaacagagacaagttcacccccaagagcgccgccctgctgagcagctggtgcgaggagctgggcagactgctgctgctgagacaccagaagagcagacagagcgacccccccggcaagctgcccatgcagccccccctgagcagcatgagcagcatgaagcccaccctgagccacagcgacggcagcttcccctacgacagcgtgccctggcagcagaacaccaaccagccccccggcagcctgagcgtggtgaccaccgtgtggggcgtgaccaacaccagccagagccaggtgctgggcaaccccatggccaacgccaacaaccccatgaaccccggcggcaaccccatggccagcggcatgaccaccagcaaccccggcctgaacagcccccagttcgccggccagcagcagcagttcagcgccaaggccggccccgcccagccctacatccagcagagcatgtacggcagacccaactaccccggcagcggcggcttcggcgccagctaccccggcggccccaacgcccccgccggcatgggcatccccccccacaccagaccccccgccgacttcacccagcccgccgccgccgccgccgccgccgccgtggccgccgccgccgccaccgccaccgccaccgccaccgccaccgtggccgccctgcaggagacccagaacaaggacatcaaccagtacggccccatgggccccacccaggcctacaacagccagttcatgaaccagcccggccccagaggccccgccagcatgggcggcagcatgaaccccgccagcatggccgccggcatgacccccagcggcatgagcggcccccccatgggcatgaaccagcccagaccccccggcatcagccccttcggcacccacggccagagaatgccccagcagacctaccccggccccagaccccagagcctgcccatccagaacatcaagagaccctaccccggcgagcccaactacggcaaccagcagtacggccccaacagccagttccccacccagcccggccagtaccccgcccccaacccccccagacccctgaccagccccaactaccccggccagagaatgcccagccagcccagcagcggccagtaccccccccccaccgtgaacatgggccagtactacaagcccgagcagttcaacggccagaacaacaccttcagcggcagcagctacagcaactacagccagggcaacgtgaacagaccccccagacccgtgcccgtggccaactacccccacagccccgtgcccggcaaccccaccccccccatgacccccggcagcagcatccccccctacctgagccccagccaggacgtgaagccccccttcccccccgacatcaagcccaacatgagcgccctgccccccccccccgccaaccacaacgacgagctgagactgaccttccccgtgagagacggcgtggtgctggagcccttcagactggagcacaacctggccgtgagcaaccacgtgttccacctgagacccaccgtgcaccagaccctgatgtggagaagcgacctggagctgcagttcaagtgctaccaccacgaggacagacagatgaacaccaactggcccgccagcgtgcaggtgagcgtgaacgccacccccctgaccatcgagagaggcgacaacaagaccagccacaagcccctgcacctgaagcacgtgtgccagcccggcagaaacaccatccagatcaccgtgaccgcctgctgctgcagccacctgttcgtgctgcagctggtgcacagacccagcgtgagaagcgtgctgcagggcctgctgaagaagagactgctgcccgccgagcactgcatcaccaagatcaagagaaacttcagcagcgtggccgccagcagcggcaacaccaccctgaacggcgaggacggcgtggagcagaccgccatcaaggtgagcctgaagtgccccatcaccttcagaagaatccagctgcccgccagaggccacgactgcaagcacgtgcagtgcttcgacctggagagctacctgcagctgaactgcgagagaggcacctggagatgccccgtgtgcaacaagaccgccctgctggagggcctggaggtggaccagtacatgtggggcatcctgaacgccatccagcacagcgagttcgaggaggtgaccatcgaccccacctgcagctggagacccgtgcccatcaagagcgacctgcacatcaaggacgaccccgacggcatccccagcaagagattcaagaccatgagccccagccagatgatcatgcccaacgtgatggagatgatcgccgccctgggccccggccccagcccctaccccctgccccccccccccggcggcaccaacagcaacgactacagcagccagggcaacaactaccagggccacggcaacttcgacttcccccacggcaaccccggcggcaccagcatgaacgacttcatgcacggccccccccagctgagccacccccccgacatgcccaacaacatggccgccctggagaagcccctgagccaccccatgcaggagaccatgccccacgccggcagcagcgaccagccccaccccagcatccagcagggcctgcacgtgccccaccccagcagccagagcggcccccccctgcaccacagcggcgcccccccccccccccccagccagccccccagacagcccccccaggccgcccccagcagccacccccacagcgacctgaccttcaaccccagcagcgccctggagggccaggccggcgcccagggcgccagcgacatgcccgagcccagcctggacctgctgcccgagctgaccaaccccgacgagctgctgagctacctggacccccccgacctgcccagcaacagcaacgacgacctgctgagcctgttcgagaacaactag

SEQ ID NO: 203622 - DNA, 2994 bp, Artificial Sequence
  derived and/or modified sequence
agacccccccccgccggcccccaggcccccgagggcgccagagccggcagcagacccgtgcagctgctggccctgctgagcagctggtgcgaggagctgggcagactgctgctgctgagacaccagaagagcagacagagcgacccccccggcaagctgcccatgcagccccccctgagcagcatgagcagcatgaagcccaccctgagccacagcgacggcagcttcccctacgacagcgtgccctggcagcagaacaccaaccagccccccggcagcctgagcgtggtgaccaccgtgtggggcgtgaccaacaccagccagagccaggtgctgggcaaccccatggccaacgccaacaaccccatgaaccccggcggcaaccccatggccagcggcatgaccaccagcaaccccggcctgaacagcccccagttcgccggccagcagcagcagttcagcgccaaggccggccccgcccagccctacatccagcagagcatgtacggcagacccaactaccccggcagcggcggcttcggcgccagctaccccggcggccccaacgcccccgccggcatgggcatccccccccacaccagaccccccgccgacttcacccagcccgccgccgccgccgccgccgccgccgtggccgccgccgccgccaccgccaccgccaccgccaccgccaccgtggccgccctgcaggagacccagaacaaggacatcaaccagtacggccccatgggccccacccaggcctacaacagccagttcatgaaccagcccggccccagaggccccgccagcatgggcggcagcatgaaccccgccagcatggccgccggcatgacccccagcggcatgagcggcccccccatgggcatgaaccagcccagaccccccggcatcagccccttcggcacccacggccagagaatgccccagcagacctaccccggccccagaccccagagcctgcccatccagaacatcaagagaccctaccccggcgagcccaactacggcaaccagcagtacggccccaacagccagttccccacccagcccggccagtaccccgcccccaacccccccagacccctgaccagccccaactaccccggccagagaatgcccagccagcccagcagcggccagtaccccccccccaccgtgaacatgggccagtactacaagcccgagcagttcaacggccagaacaacaccttcagcggcagcagctacagcaactacagccagggcaacgtgaacagaccccccagacccgtgcccgtggccaactacccccacagccccgtgcccggcaaccccaccccccccatgacccccggcagcagcatccccccctacctgagccccagccaggacgtgaagccccccttcccccccgacatcaagcccaacatgagcgccctgccccccccccccgccaaccacaacgacgagctgagactgaccttccccgtgagagacggcgtggtgctggagcccttcagactggagcacaacctggccgtgagcaaccacgtgttccacctgagacccaccgtgcaccagaccctgatgtggagaagcgacctggagctgcagttcaagtgctaccaccacgaggacagacagatgaacaccaactggcccgccagcgtgcaggtgagcgtgaacgccacccccctgaccatcgagagaggcgacaacaagaccagccacaagcccctgcacctgaagcacgtgtgccagcccggcagaaacaccatccagatcaccgtgaccgcctgctgctgcagccacctgttcgtgctgcagctggtgcacagacccagcgtgagaagcgtgctgcagggcctgctgaagaagagactgctgcccgccgagcactgcatcaccaagatcaagagaaacttcagcagcgtggccgccagcagcggcaacaccaccctgaacggcgaggacggcgtggagcagaccgccatcaaggtgagcctgaagtgccccatcaccttcagaagaatccagctgcccgccagaggccacgactgcaagcacgtgcagtgcttcgacctggagagctacctgcagctgaactgcgagagaggcacctggagatgccccgtgtgcaacaagaccgccctgctggagggcctggaggtggaccagtacatgtggggcatcctgaacgccatccagcacagcgagttcgaggaggtgaccatcgaccccacctgcagctggagacccgtgcccatcaagagcgacctgcacatcaaggacgaccccgacggcatccccagcaagagattcaagaccatgagccccagccagatgatcatgcccaacgtgatggagatgatcgccgccctgggccccggccccagcccctaccccctgccccccccccccggcggcaccaacagcaacgactacagcagccagggcaacaactaccagggccacggcaacttcgacttcccccacggcaaccccggcggcaccagcatgaacgacttcatgcacggccccccccagctgagccacccccccgacatgcccaacaacatggccgccctggagaagcccctgagccaccccatgcaggagaccatgccccacgccggcagcagcgaccagccccaccccagcatccagcagggcctgcacgtgccccaccccagcagccagagcggcccccccctgcaccacagcggcgcccccccccccccccccagccagccccccagacagcccccccaggccgcccccagcagccacccccacagcgacctgaccttcaaccccagcagcgccctggagggccaggccggcgcccagggcgccagcgacatgcccgagcccagcctggacctgctgcccgagctgaccaaccccgacgagctgctgagctacctggacccccccgacctgcccagcaacagcaacgacgacctgctgagcctgttcgagaacaactag

SEQ ID NO: 203623 - DNA, 7546 bp, Artificial Sequence
  derived and/or modified sequence
cgggcgccggggagagcgggcggccgggcggcaggcgggcgagcagcgatcgggcggccgagcgagcgagcaacgccggcgcagcgcggtgaccccagccccagccggcgcggagcaggagccggagccgagcggatctcggcgccctcgctgcgctcctcccggcccgagcctgccctacccggcggtggcggcggcgcgtcctccagcggcggcagcggcgctcgcagcgcccggactcacggcagctgtgttctgatttcgtactactgctggggctgccacctcctcctccagacgctctcagcagacttgagtcctggtccttctgcagaggcctgagcaggaggaagaggaggaggcccgttggcgtcggaccaatgctgcaaggggtgtgaggagaggagccgctgtttttcactgagctgccataccccgaaagcaggatggagctggagtgaggtggaggggccgcaagctgctgaccggcgtgtggaacactggtggtttgcagatcactgaggctggacaacgttcatggctctcgggtagaacctagtgaaacggccagaatgaattctatggacaggcacatccagcagaccaatgaccgactgcagtgcatcaagcagcacttacagaatcctgccaacttccacaatgccgccacggagctgctggactggtgcggagacccacgggccttccagcggcccttcgagcagagcctgatgggctgtttgacggtggtcagtcgggtggcagcccagcaaggctttgacctggacctcggctacagactgctggctgtgtgtgctgcaaaccgagacaagttcaccccgaagtctgccgccttgttgtcctcctggtgcgaagagctcggccgcctgctgctgctccgacatcagaagagccgccagagcgatccccctgggaaactccccatgcagccccctctcagctccatgagctccatgaaacccactctgtcgcacagtgatgggtcgttcccctatgactctgtcccttggcagcagaacaccaaccagcctcccggctccctttccgtggtcaccacggtttggggagtaaccaacacatcccagagccaggtccttgggaaccctatggccaatgccaacaaccccatgaatccaggcggcaaccccatggcgtcgggcatgaccaccagcaacccaggcctcaactccccacagtttgcggggcagcagcagcagttctcagccaaggctggccccgctcagccctacatccagcagagcatgtatggccggcccaactaccccggcagcgggggctttggggccagttaccctgggggtcctaacgcccccgcaggcatgggcatccctccgcacaccaggccgcctgctgacttcactcagcccgcggcagccgctgcagcagcggcagtggcagcagcagcagccacagctacagccacagccacggccactgtggcagccctgcaggagacacagaacaaggatataaaccagtatggaccgatgggtcccacccaggcgtataacagccaattcatgaaccagcccgggccgcgggggcctgcctccatggggggcagcatgaaccccgcgagcatggcggctggcatgacgccctcggggatgagcggccctcccatgggcatgaaccagccccggccgcccggcatcagcccctttggcacacacgggcagcggatgccccagcagacctacccgggcccccggccccagtcccttcctattcagaacataaagaggccataccctggagagcccaactatggaaaccagcaatatggaccaaacagccagttccccacccagccaggccagtacccagcccccaaccccccgaggccactcacctcccccaactacccaggacagaggatgcccagccagccgagctccgggcagtacccgccccccacggtcaacatggggcagtattacaagccagaacagtttaatggacaaaataacacgttctcgggaagcagctacagtaactacagccaagggaatgtcaacaggcctcccaggccggttcctgtggcaaattacccccactcacctgttccagggaaccccacaccccccatgacccctgggagcagcatccctccatacctgtcccccagccaagacgtcaaaccacccttcccgcctgacatcaagccaaatatgagcgctctgccaccacccccagccaaccacaatgacgagctgcggctcacattccctgtgcgggatggcgtggtgctggagcccttccgcctggagcacaacctggcggtcagcaaccatgtgttccacctgcggcccacggtccaccagacgctgatgtggaggtctgacctggagctgcagttcaagtgctaccaccacgaggaccggcagatgaacaccaactggcccgcctcggtgcaggtcagcgtgaacgccacgcccctcaccattgagcgcggcgacaacaagacctcccacaagcccctgcacctgaagcacgtgtgccagccgggccgcaacaccatccagatcaccgtcacggcctgctgctgctcccacctcttcgtgctgcagctggtacaccggccctccgtccgctctgtgctgcaaggactcctcaagaagcgcctcctgcccgcagagcactgtatcacgaaaatcaagcggaatttcagcagcgtggctgcctcctcgggcaacacgaccctcaacggggaggatggggtggagcagacggccatcaaggtgtctctgaagtgccccatcacattccggcgcatccagctgcctgctcgaggacacgattgcaagcatgtgcagtgctttgatctggagtcatacctgcagctgaattgcgagagagggacctggaggtgtcctgtgtgcaataaaaccgctctgctggagggcctggaggtggatcagtacatgtggggaatcctgaatgccatccaacactccgagtttgaagaggtcaccatcgatcccacgtgcagctggcggccggtgcccatcaagtcggacttacacatcaaggacgaccctgatggcatcccctccaagcggttcaagaccatgagtcccagccagatgatcatgcccaatgtcatggagatgatcgcagccctgggccccggcccgtccccctatcccctcccgcctcccccagggggcaccaactccaacgactacagcagccaaggcaacaactaccaaggccatggcaactttgacttcccccacgggaaccctggagggacatccatgaatgacttcatgcacgggcccccccagctctcccaccccccggacatgcccaacaacatggccgccctcgagaaacccctcagccaccccatgcaggaaactatgccacacgctggcagctctgaccagccccacccctccatacaacaaggtttgcacgtaccacaccccagcagccagtcagggcctccattacatcacagtggggctcctcctcctcctccttcccagcctccccggcagccgccacaggccgctcccagcagccatccacacagcgacctgacctttaacccctcctcagccttagagggtcaggccggagcgcagggagcgtccgacatgccggagccttcgctggatctccttcccgaactcacaaatcctgacgagctcctgtcttatctggacccccccgacctgccgagcaatagtaacgatgacctcctgtctctatttgagaacaactgagggccacccggtcggggccatccctccacactctgcatcctaccccacctacccaacacacttttccacctgggagcctgtgccctcagaccgccccgcaccagagccacgggctgtggggcggggagccctcccccgctgcagccctctcagaacagaggggtagggagggtgcaccagtgcaccaggaaggctgtgtgggtctggagcccacgtcccacctccacacccttggcttgggcccatgcccagcgcaggcctgaagaccaccctcccgagaggaaccagcccggtaagagggcacacgctgatgcggcttcccggtccctccgcgtgtgccgattccagatgaccttccagtgtccccaaggttcttccatcttctagactgtaaccctgcctccctgcttcctggtccagagcctccctccagtgactgtggagcctgagaaggcccccgggccccagcatgggccccgagccttggaggagcactggcagttggtggcagtgagaccagcccacccaccaccacccaccacagaaaagcacaaacctctgggaaagacaacgtctctcgggggccaggggtcatcggtttgacccctgacctataagccaagataccccataaacacactcagaaagcagagaaaaaggacaagagtctgtgtttgagagggggtctgccattcctgcttggggactggtggggaagagggccaggacatcttctgagccaggacgtccctgaggctccacctccaagctcagacagggcccaggcttggggaacagagagagcaggtgtacacccaaccaaagtgattgtgcccttggttggggggcgcgggcatataacctgtcagaagcaaacaggagcggcaacttctaactttgctccaagccactctctttttaaacagcaacaatttaaagctatgaagtcacctggagaaaaggaacgttgctcttggacagcaagcaaaccatttctctccgtctgttctgtttttctcctagtccctctcctgccacctctccaagacttccgtgggacacccacttccctctgtcctagttctctttgtccaatcagatggcaagggcagtgcgtggaaaggccggggaggtgcagaaaccagagcccagggcaatggtgtctgtccagcccctccctctgtccctgtgctccaagctgcccccggctgcagcccaggccatggacatgtgcaccagtatgtacctgcaggcatgggggggaggggggcgtgtttctgggcctgccccagacactgcccttggctgccagcctaccctgcctgcactcctccaccatcacaatctcacccaaactcctgctcactcaagcaaaagcagcctctggccttccctccaccgctttgctccatctggcttaccactctccagggcctcctggggagcctgtcctgtgttcactttgtttcaggctggtctgtgccccgtgagccacatggcctagggtgatgccaggttgtcccgtcactggggtcccatctgtaaattctttgcgcccttcccggctgctgcctggggccctttcctgctctcccgtccgctgtgggtggtccccagctctcctctgtgggttttaccggaaaggtggccccagctgttgacttccagtcactgtcccagacggcacaaggttttctgtaggaaagctgccattgccccggccccttttcttcctttgtcccgttgtcgaggttttttcaaatagcgtgttgttcagtatgcaaatcaattattttaagaatcgcttttgtaaatatctttgtgaatattttagtatcgtctttgataatattcaacattttcatgacctggttatagcctttgctggtgtttttaaaatacctggactcaatgacaaagaccgagtcttctttttttttaaacaaaaacaaaaaaagcaaccagggctatttgtacagttgaaggggtgaacagaatgggcggctgtgctgggagttggaagaccgggcagcccgctatttagagccatccctcagtcagctggcagggacaagccaacgccaggtagcatgtggccacccttgcccagtgtctgtggcctggcaagtggccacgccctgtgtcagaccatctgggaattaagctccagacagacttacagatgccttccttaggagttcttgcttcttgcgttgatactttgccccagaaaggcctgggattcattctggttcttatcagggtgtgtccacactctgctcacaggtggatccacggctttccagtgcggagagtcgagatgctccctgcagcccaggccccgggcacctcctgcaaccatctctgggctcagcacctgaggcgggtttcctgggtcccctctccagcaagcctccaccagcaagctcggcccagagcttcccttccggctggctctgaaccgtgcgtggtgcctacagcctgcagtctggagacaagctcttccggagtgctctgggagccaggccagggtgtgagggaggtgcagaggcatccggggcgggagcaagccccaggttgtgacaggtgcaggtagacaacgcccataaacagagatggtcctgaactctggagagatccttccctgatcctttcggacgactacttggagccataagtaacctcagcaaaaacgaggcctctgcaagccacttttccatgccaagcatccacccggcccacaggcatgtttctgccgccactccgcaagatggacagggagccagcaggcaggcgggaagggccaagtacaggcaatcacccccatcttcttggtttgaagctttatccatgtatcatgttccgtgtagccattttattttttaagaaactgctaatactttctccctaatggaagccctgatcccccagagagctacaggtctgctcccgacgggcctcgggcctgacccgtccacacagggccgtgtcaacagcagcgactcaagggacgtgtgtacatatgtaaatgagaaatagagacgtgtcaacagatgcattcatttctcttggaatgtgtattgtttttattttgcgaaacaaaacaaaacaaaaaaaaaagcttggaactccatcacgtggaaaaactagatcctgttggttatagcatttgtgagttctccacgtctgtctctctcgctcatgtaatatactctgaccctgagtggaaaggggtttttgttctgtttttattttacctacatgtactatttagcttcagtgtactagtcctgccacctgtgtatttttagggtgctatggaaataatgaaaagaaacggggatttcagaagaaaattgtaaccaaattcatactttgtataatttttgatatcatgatcacaggtgattcacacgtacacacataaacacacccaccagtgcagcctgaagtaactcccacagaaaccatcatcgtctttgtacatcgtatgtacaatgcaatcatttcatactttaaactggtcaaaaaactaattgtgatttctagtcttgcaaagctgtatgtagttagatgatgtgacaacctctaatatttatctaataaatatgtattcagatgaaacctgtatattaggtgttcatgtggttattttgtatttaaagatcaaattatttgactattgctagacatttctatactctgttgtaacactgaggtatctcatttgcccatgttaatttttttctaaataaattgacaaaaacaaa

SEQ ID NO: 203624 - DNA, 3204 bp, Artificial Sequence
  derived and/or modified sequence
atgaatagtatggacagacacatccagcagacaaacgacaggctccagtgtataaaacagcacttacagaaccccgcgaattttcacaatgcagctaccgagctattggattggtgcggggaccccagggcattccaacgccccttcgagcagtctctgatggggtgccttacagtggtcagcagggtggcggcccagcagggttttgatctggaccttgggtatcggttactggcggtatgtgctgccaacagagataagtttaccccgaagtccgcagcactgctcagttcctggtgtgaggaacttgggcgattgctcctgttgcgccatcaaaagagtcggcagagcgatccacccggaaagcttcctatgcagcctccactgtcttccatgtctagcatgaaaccaaccctgtctcactccgacgggtctttcccttatgactccgtaccatggcagcagaatactaaccagcctccggggtccctgagtgtggtgacaacggtgtggggggtcactaatacatcccaaagccaggtacttggcaaccccatggccaacgcgaataaccccatgaacccaggggggaaccccatggcctccgggatgaccactagtaatcctgggctgaatagtccacagttcgcaggtcagcagcagcagttctccgccaaagctggacccgcccaaccatatatccagcagtctatgtacggcagacccaattaccccggttccggcggttttggagctagttatcccggcggaccgaacgcccccgccggcatgggaattccacctcacacaagacctccggctgattttacacagcccgctgctgccgctgccgcagccgctgtggccgctgctgctgcaacggcaaccgcaactgccacggccacagtggccgccctacaggagactcagaacaaggatataaatcagtatgggcccatgggtcccacccaggcctataactctcagttcatgaatcagccaggacctagaggtccagcctccatgggtggctccatgaaccccgcgtctatggccgctgggatgacgcctagcggaatgagtgggcctccaatgggaatgaatcagccccgcccacccggcatatccccgtttggaacgcacgggcagcgtatgccacagcagacctaccctgggcctaggccacagtctctccctatccaaaatattaagcggccctatccaggggagcctaattacggcaaccaacagtacggcccgaacagtcagtttcctactcaaccaggtcagtacccagctcctaatcccccgcgaccacttactagccctaactatccaggccagcgcatgccaagtcagccctctagcggccagtatcctccccctaccgtgaacatgggacagtactacaaacccgagcaattcaatggccaaaataataccttctccggctcctcatatagtaactattctcaaggcaatgtcaatagaccaccaagacctgtgccggttgccaattatcctcactctccagtcccaggcaatccaactcctcctatgacgcccggaagctcaatcccgccgtacctttctccatctcaagacgtgaaaccccctttcccacccgatattaaaccgaatatgagtgcgcttcctccaccccctgccaatcacaacgacgagctgcggctcactttccctgtgcgtgatggcgtagtgcttgaacccttcaggttggaacacaatctggcagtgtctaaccacgtattccatcttaggcctactgttcaccagacccttatgtggcgctcggatctcgaactccaatttaagtgctaccatcacgaggaccgacagatgaacacaaactggcctgccagcgtgcaagtgtctgtcaatgccacccccttaaccatcgagaggggagacaacaaaacttcccataaaccactgcatttaaagcacgtttgccaacctgggagaaacaccattcagatcaccgttactgcatgctgctgttcccacctattcgtactacagctggttcacagaccttccgtgcggtccgttcttcagggcctgctgaagaaaagactccttcctgccgagcactgtatcaccaagatcaagcgaaacttttcatcagtggctgcttcatccggaaacacgacactgaatggcgaagatggcgtggagcagacggctataaaagtctctctgaaatgccccattaccttccgtcggatacagctgcccgcaaggggccacgactgtaagcatgtccagtgttttgacctagaatcatatctccaacttaattgcgagcgtggaacttggagatgcccagtttgcaataaaacagccctcttagaaggtctagaagtggaccaatacatgtggggtatcctcaatgctattcagcacagtgagttcgaagaggttacaattgacccgacctgcagttggaggccagtgcccatcaaaagcgaccttcatatcaaagatgatcccgacggtattccgtcaaagaggttcaagaccatgtccccatctcagatgataatgcctaacgtgatggagatgatcgctgctcttggccccggtccaagcccttaccctctgccccccccaccgggaggaactaacagtaacgattattcttcacaagggaacaactaccaggggcatggaaatttcgatttcccccacggcaaccccgggggtaccagcatgaatgacttcatgcacggaccaccacaactgtctcacccccctgatatgcccaacaatatggctgccttagagaagcctctttcacaccctatgcaggaaacaatgccgcacgcaggatccagtgatcagccacaccccagcattcagcaaggtctgcatgtaccccacccctcttcacaatccggaccaccccttcatcactcaggagctccgccaccacccccctcccaacctccacgccagccccctcaggctgctccttcgtcgcatccacacagtgacctgacatttaacccaagctcagccttagagggtcaagctggagcacagggagcatccgacatgccagagccttccttggatcttctgccagaattaacaaaccccgacgagctgttgtcttatctggacccgcctgacctgccatccaacagcaacgacgacctgctgagcttattcgagaataactag

SEQ ID NO: 203625 - DNA, 6773 bp, Artificial Sequence
  derived and/or modified sequence
cggccgccgccggccgggccccaagcccccgagggcgccagggcgggatcgcgaccggtgcaacttctagccttgttgtcctcctggtgcgaagagctcggccgcctgctgctgctccgacatcagaagagccgccagagcgatccccctgggaaactccccatgcagccccctctcagctccatgagctccatgaaacccactctgtcgcacagtgatgggtcgttcccctatgactctgtcccttggcagcagaacaccaaccagcctcccggctccctttccgtggtcaccacggtttggggagtaaccaacacatcccagagccaggtccttgggaaccctatggccaatgccaacaaccccatgaatccaggcggcaaccccatggcgtcgggcatgaccaccagcaacccaggcctcaactccccacagtttgcggggcagcagcagcagttctcagccaaggctggccccgctcagccctacatccagcagagcatgtatggccggcccaactaccccggcagcgggggctttggggccagttaccctgggggtcctaacgcccccgcaggcatgggcatccctccgcacaccaggccgcctgctgacttcactcagcccgcggcagccgctgcagcagcggcagtggcagcagcagcagccacagctacagccacagccacggccactgtggcagccctgcaggagacacagaacaaggatataaaccagtatggaccgatgggtcccacccaggcgtataacagccaattcatgaaccagcccgggccgcgggggcctgcctccatggggggcagcatgaaccccgcgagcatggcggctggcatgacgccctcggggatgagcggccctcccatgggcatgaaccagccccggccgcccggcatcagcccctttggcacacacgggcagcggatgccccagcagacctacccgggcccccggccccagtcccttcctattcagaacataaagaggccataccctggagagcccaactatggaaaccagcaatatggaccaaacagccagttccccacccagccaggccagtacccagcccccaaccccccgaggccactcacctcccccaactacccaggacagaggatgcccagccagccgagctccgggcagtacccgccccccacggtcaacatggggcagtattacaagccagaacagtttaatggacaaaataacacgttctcgggaagcagctacagtaactacagccaagggaatgtcaacaggcctcccaggccggttcctgtggcaaattacccccactcacctgttccagggaaccccacaccccccatgacccctgggagcagcatccctccatacctgtcccccagccaagacgtcaaaccacccttcccgcctgacatcaagccaaatatgagcgctctgccaccacccccagccaaccacaatgacgagctgcggctcacattccctgtgcgggatggcgtggtgctggagcccttccgcctggagcacaacctggcggtcagcaaccatgtgttccacctgcggcccacggtccaccagacgctgatgtggaggtctgacctggagctgcagttcaagtgctaccaccacgaggaccggcagatgaacaccaactggcccgcctcggtgcaggtcagcgtgaacgccacgcccctcaccattgagcgcggcgacaacaagacctcccacaagcccctgcacctgaagcacgtgtgccagccgggccgcaacaccatccagatcaccgtcacggcctgctgctgctcccacctcttcgtgctgcagctggtacaccggccctccgtccgctctgtgctgcaaggactcctcaagaagcgcctcctgcccgcagagcactgtatcacgaaaatcaagcggaatttcagcagcgtggctgcctcctcgggcaacacgaccctcaacggggaggatggggtggagcagacggccatcaaggtgtctctgaagtgccccatcacattccggcgcatccagctgcctgctcgaggacacgattgcaagcatgtgcagtgctttgatctggagtcatacctgcagctgaattgcgagagagggacctggaggtgtcctgtgtgcaataaaaccgctctgctggagggcctggaggtggatcagtacatgtggggaatcctgaatgccatccaacactccgagtttgaagaggtcaccatcgatcccacgtgcagctggcggccggtgcccatcaagtcggacttacacatcaaggacgaccctgatggcatcccctccaagcggttcaagaccatgagtcccagccagatgatcatgcccaatgtcatggagatgatcgcagccctgggccccggcccgtccccctatcccctcccgcctcccccagggggcaccaactccaacgactacagcagccaaggcaacaactaccaaggccatggcaactttgacttcccccacgggaaccctggagggacatccatgaatgacttcatgcacgggcccccccagctctcccaccccccggacatgcccaacaacatggccgccctcgagaaacccctcagccaccccatgcaggaaactatgccacacgctggcagctctgaccagccccacccctccatacaacaaggtttgcacgtaccacaccccagcagccagtcagggcctccattacatcacagtggggctcctcctcctcctccttcccagcctccccggcagccgccacaggccgctcccagcagccatccacacagcgacctgacctttaacccctcctcagccttagagggtcaggccggagcgcagggagcgtccgacatgccggagccttcgctggatctccttcccgaactcacaaatcctgacgagctcctgtcttatctggacccccccgacctgccgagcaatagtaacgatgacctcctgtctctatttgagaacaactgagggccacccggtcggggccatccctccacactctgcatcctaccccacctacccaacacacttttccacctgggagcctgtgccctcagaccgccccgcaccagagccacgggctgtggggcggggagccctcccccgctgcagccctctcagaacagaggggtagggagggtgcaccagtgcaccaggaaggctgtgtgggtctggagcccacgtcccacctccacacccttggcttgggcccatgcccagcgcaggcctgaagaccaccctcccgagaggaaccagcccggtaagagggcacacgctgatgcggcttcccggtccctccgcgtgtgccgattccagatgaccttccagtgtccccaaggttcttccatcttctagactgtaaccctgcctccctgcttcctggtccagagcctccctccagtgactgtggagcctgagaaggcccccgggccccagcatgggccccgagccttggaggagcactggcagttggtggcagtgagaccagcccacccaccaccacccaccacagaaaagcacaaacctctgggaaagacaacgtctctcgggggccaggggtcatcggtttgacccctgacctataagccaagataccccataaacacactcagaaagcagagaaaaaggacaagagtctgtgtttgagagggggtctgccattcctgcttggggactggtggggaagagggccaggacatcttctgagccaggacgtccctgaggctccacctccaagctcagacagggcccaggcttggggaacagagagagcaggtgtacacccaaccaaagtgattgtgcccttggttggggggcgcgggcatataacctgtcagaagcaaacaggagcggcaacttctaactttgctccaagccactctctttttaaacagcaacaatttaaagctatgaagtcacctggagaaaaggaacgttgctcttggacagcaagcaaaccatttctctccgtctgttctgtttttctcctagtccctctcctgccacctctccaagacttccgtgggacacccacttccctctgtcctagttctctttgtccaatcagatggcaagggcagtgcgtggaaaggccggggaggtgcagaaaccagagcccagggcaatggtgtctgtccagcccctccctctgtccctgtgctccaagctgcccccggctgcagcccaggccatggacatgtgcaccagtatgtacctgcaggcatgggggggaggggggcgtgtttctgggcctgccccagacactgcccttggctgccagcctaccctgcctgcactcctccaccatcacaatctcacccaaactcctgctcactcaagcaaaagcagcctctggccttccctccaccgctttgctccatctggcttaccactctccagggcctcctggggagcctgtcctgtgttcactttgtttcaggctggtctgtgccccgtgagccacatggcctagggtgatgccaggttgtcccgtcactggggtcccatctgtaaattctttgcgcccttcccggctgctgcctggggccctttcctgctctcccgtccgctgtgggtggtccccagctctcctctgtgggttttaccggaaaggtggccccagctgttgacttccagtcactgtcccagacggcacaaggttttctgtaggaaagctgccattgccccggccccttttcttcctttgtcccgttgtcgaggttttttcaaatagcgtgttgttcagtatgcaaatcaattattttaagaatcgcttttgtaaatatctttgtgaatattttagtatcgtctttgataatattcaacattttcatgacctggttatagcctttgctggtgtttttaaaatacctggactcaatgacaaagaccgagtcttctttttttttaaacaaaaacaaaaaaagcaaccagggctatttgtacagttgaaggggtgaacagaatgggcggctgtgctgggagttggaagaccgggcagcccgctatttagagccatccctcagtcagctggcagggacaagccaacgccaggtagcatgtggccacccttgcccagtgtctgtggcctggcaagtggccacgccctgtgtcagaccatctgggaattaagctccagacagacttacagatgccttccttaggagttcttgcttcttgcgttgatactttgccccagaaaggcctgggattcattctggttcttatcagggtgtgtccacactctgctcacaggtggatccacggctttccagtgcggagagtcgagatgctccctgcagcccaggccccgggcacctcctgcaaccatctctgggctcagcacctgaggcgggtttcctgggtcccctctccagcaagcctccaccagcaagctcggcccagagcttcccttccggctggctctgaaccgtgcgtggtgcctacagcctgcagtctggagacaagctcttccggagtgctctgggagccaggccagggtgtgagggaggtgcagaggcatccggggcgggagcaagccccaggttgtgacaggtgcaggtagacaacgcccataaacagagatggtcctgaactctggagagatccttccctgatcctttcggacgactacttggagccataagtaacctcagcaaaaacgaggcctctgcaagccacttttccatgccaagcatccacccggcccacaggcatgtttctgccgccactccgcaagatggacagggagccagcaggcaggcgggaagggccaagtacaggcaatcacccccatcttcttggtttgaagctttatccatgtatcatgttccgtgtagccattttattttttaagaaactgctaatactttctccctaatggaagccctgatcccccagagagctacaggtctgctcccgacgggcctcgggcctgacccgtccacacagggccgtgtcaacagcagcgactcaagggacgtgtgtacatatgtaaatgagaaatagagacgtgtcaacagatgcattcatttctcttggaatgtgtattgtttttattttgcgaaacaaaacaaaacaaaaaaaaaagcttggaactccatcacgtggaaaaactagatcctgttggttatagcatttgtgagttctccacgtctgtctctctcgctcatgtaatatactctgaccctgagtggaaaggggtttttgttctgtttttattttacctacatgtactatttagcttcagtgtactagtcctgccacctgtgtatttttagggtgctatggaaataatgaaaagaaacggggatttcagaagaaaattgtaaccaaattcatactttgtataatttttgatatcatgatcacaggtgattcacacgtacacacataaacacacccaccagtgcagcctgaagtaactcccacagaaaccatcatcgtctttgtacatcgtatgtacaatgcaatcatttcatactttaaactggtcaaaaaactaattgtgatttctagtcttgcaaagctgtatgtagttagatgatgtgacaacctctaatatttatctaataaatatgtattcagatgaaacctgtatattaggtgttcatgtggttattttgtatttaaagatcaaattatttgactattgctagacatttctatactctgttgtaacactgaggtatctcatttgcccatgttaatttttttctaaataaattgacaaaaacaaaggtttggcg

SEQ ID NO: 203626 - DNA, 2994 bp, Artificial Sequence
  derived and/or modified sequence
agaccacccccagccggtcctcaggcccccgagggcgccagagccggttcccgtcctgttcaattgctggccctcttgagctcctggtgtgaagagctggggcgattgcttcttctccgacatcagaagagtcgacaaagcgatcctccgggaaagctccctatgcagcctcccctgagcagtatgtcttcgatgaaacctacactgtcccatagcgacggtagcttcccgtacgatagtgtgccctggcagcagaacacaaatcagccccctggtagtctgtctgttgtcactacagtttggggagtgactaacacttcccagagccaggttctggggaacccgatggcaaatgctaataaccccatgaatcctgggggcaatcccatggcaagcgggatgacaacatccaacccggggctaaactcccctcagttcgctggtcagcagcagcaattcagcgccaaggctgggcctgcccagccctatatacagcagtctatgtatggtcggccaaactatcccggaagcggtggcttcggcgcaagttaccctggtggaccaaacgctcccgcagggatggggataccgcctcacactcggcctcctgcagatttcactcaacctgccgcggcagccgccgctgcagctgtagcggccgccgccgctacggctacagccaccgctacagcgacggtggccgccctgcaagagactcaaaataaggatattaaccaatatggcccaatgggccccacccaggcttataatagccaattcatgaatcagcccggtcccagggggcccgcttctatgggaggatcaatgaaccctgcaagtatggccgctggtatgaccccgagcggcatgtcaggaccacctatgggaatgaaccagcctcgaccccctggaatcagcccttttgggacacacggccagcggatgccacagcagacctatcccgggccaagaccccagtcactccccatccagaacatcaagaggccatacccaggcgaacccaattacggcaatcagcagtacggaccgaatagtcagtttcccacccaaccaggtcagtatcccgctcctaatccaccgaggccactgacctctcctaactatccaggtcaaagaatgccctctcagccctcaagtggtcaataccctcctccgaccgtcaacatgggacagtactataagcccgaacagtttaatggtcaaaacaacacatttagcggctcctcatactccaattattcgcaggggaacgtgaatcgccccccccgaccagtcccagtggctaattacccccattccccggttcccggcaatccaacccccccgatgacacccggtagctcgataccaccctacctctcaccatcacaggatgtgaagccaccgttccctcccgacatcaagcctaacatgagcgcccttccgcctccaccagccaatcacaatgatgagttaaggctaacattccccgtacgcgatggggtggtcttggaaccattccggctagagcacaatctcgctgtgtccaatcatgtgttccatctacgccccactgttcaccagaccctcatgtggaggagtgacctcgagctgcaatttaaatgttaccaccatgaagatcgtcagatgaacactaattggcccgcaagcgttcaggtctccgtgaatgccacacccctcaccattgagcggggagacaataagactagccacaaaccactccacctgaagcacgtgtgtcagcctggacgtaataccatccagattactgttacagcttgctgctgctcacacctcttcgtgctgcagctggtgcaccggccatcggtgaggtccgtcttacagggtctccttaaaaagaggctcctgccagctgagcactgcatcacaaagatcaaacgcaatttttcttcagttgcggcctcctccggcaatactaccctcaatggtgaggacggggttgagcaaacggcaatcaaggtgagcctgaaatgccccatcacttttcgccggatacagctccctgctcgcggtcatgattgcaagcacgtacagtgcttcgatctagaatcctacctccaacttaactgcgagcgaggcacttggcggtgtcccgtgtgcaataaaactgccctgttggaaggcttggaagtggaccagtacatgtggggaatcttgaacgcaatccaacatagcgaattcgaagaggtaactatcgacccgacctgctcttggcggcctgtgccaatcaaatccgatctccatattaaagacgacccagatggcataccatccaaacgtttcaaaacaatgagcccaagccagatgattatgccgaatgtgatggaaatgattgccgccctgggccccggcccaagtccatacccgctacctccccccccaggaggaaccaactccaacgactacagcagccagggtaacaactatcagggccacggaaattttgacttcccgcatggtaatcccggcgggacatcaatgaacgattttatgcatggtcctccccagctaagccatccacccgacatgcccaacaatatggcagccctcgagaagcccctgagccaccccatgcaggagacgatgccccacgcgggctccagcgatcagcctcacccctctattcaacagggcctccacgtgccacatcctagcagccaaagtggcccccccctgcaccacagcggcgccccccctcctccacccagccagcccccaaggcagccccctcaggcagcaccttcctcccatccacatagcgatttaactttcaaccccagtagtgcacttgaggggcaggcaggcgcccagggggcttctgatatgccagagcccagcttggatctgcttcctgaacttaccaaccccgatgaactgctctcatacctggatccgcctgacctccccagtaacagcaacgatgatctattaagcctcttcgagaacaactag

SEQ ID NO: 203627 - DNA, 3204 bp, Artificial Sequence
  derived and/or modified sequence
atgaacagcatggacagacacatccagcagaccaatgaccggctgcagtgcatcaagcagcacctgcagaacccagccaacttccacaatgctgccacagagctgctggactggtgtggggacccccgggccttccagaggccctttgagcagagcctgatgggctgcctgactgtggtgtcccgggtggccgcccagcagggctttgacctggacctgggctaccgcctgctggccgtgtgtgccgccaacagagacaagttcacccccaagtctgctgccctgctgagctcctggtgtgaggagctgggccgcctgctgctgctgcggcaccagaagagccggcagagcgaccccccaggcaagctgcccatgcagccccccctgagctccatgagctccatgaagcccaccctgagccacagtgatggcagcttcccctatgacagcgtgccctggcagcagaacaccaaccagcccccaggcagcctgtctgtggtgaccaccgtgtggggcgtgaccaacaccagccagagccaggtgctgggcaaccccatggccaatgccaacaaccccatgaaccctgggggcaaccccatggccagcggcatgaccaccagcaaccctggcctgaacagcccccagtttgctggccagcagcagcagttcagcgccaaggccggccctgcccagccctacatccagcagagcatgtatggccggcccaactacccaggcagcggcggctttggagccagctacccaggcggccccaatgccccagctggcatgggcatccccccccacacccggcccccagctgacttcacccagcctgctgctgctgctgctgctgctgctgtggccgctgctgctgccacagccacagccacagccacagccaccgtggccgccctgcaggagacccagaacaaggacatcaaccagtatggccccatgggccccacccaggcctacaacagccagttcatgaaccagcccggcccccggggccctgcctccatgggcggctccatgaacccagcctccatggctgctggcatgacccccagcggcatgagcggcccccccatgggcatgaaccagccccggcccccaggcatcagccccttcggcacccacggccagaggatgccccagcagacctacccaggcccccggccccagagcctgcccatccagaacatcaagaggccctacccaggagagcccaactacggcaaccagcagtatggccccaacagccagttccccacccagcccggccagtacccagcccccaaccccccccggcccctgaccagccccaactacccaggccagaggatgcccagccagcccagcagcggccagtaccccccacccaccgtgaacatgggccagtactacaagccagagcagttcaacggccagaacaacaccttcagcggcagcagctacagcaactacagccagggcaatgtgaaccggccccccaggcctgtgcctgtggccaactacccccacagccctgtgcccggcaaccccaccccacccatgaccccaggcagcagcatccccccctacctgagccccagccaggatgtgaagccacccttccccccagacatcaagcccaacatgtctgccctgcccccacctccagccaaccacaatgatgagctgcggctgaccttccctgtgagagatggagtggtgctggagcccttccggctggagcacaacctggccgtgagcaaccacgtgttccacctgcggcccaccgtgcaccagaccctgatgtggaggagtgacctggagctgcagttcaagtgctaccaccacgaggaccggcagatgaacaccaactggccagcctctgtgcaggtgtctgtgaatgccacccccctgaccatcgagcggggggacaacaagaccagccacaagcccctgcacctgaagcacgtgtgccagcctggaagaaacaccatccagatcaccgtgacagcctgctgctgcagccacctgtttgtgctgcagctggtgcaccggcccagcgtgcgctctgtgctgcagggcctgctgaagaagaggctgctgcctgctgagcactgcatcaccaagatcaagaggaacttcagctctgtggccgccagcagcggcaacaccaccctgaatggagaagatggagtggagcagacagccatcaaggtgtccctgaagtgccccatcaccttccgccgcatccagctgcctgcccggggccatgactgcaagcacgtgcagtgctttgacctggagagctacctgcagctgaactgtgagcggggcacctggcgctgccctgtgtgcaacaagacagccctgctggagggcctggaggtggaccagtacatgtggggcatcctgaatgccatccagcacagcgagtttgaggaggtgaccatcgaccccacctgctcctggaggcctgtgcccatcaagagtgacctgcacatcaaggatgatcctgatggcatccccagcaagcgcttcaagaccatgagccccagccagatgatcatgcccaacgtgatggagatgattgctgccctgggccctggccccagcccctaccccctgcccccacctcctgggggcaccaacagcaatgactacagcagccagggcaacaactaccagggccacggcaactttgacttcccccacggcaaccctgggggcacctccatgaatgacttcatgcacggccccccccagctgagccaccccccagacatgcccaacaacatggccgccctggagaagcccctgagccaccccatgcaggagaccatgcctcatgctggcagcagtgaccagccccaccccagcatccagcagggcctgcacgtgccccaccccagcagccagagcggcccccccctgcaccacagcggggcccctcctcctccacccagccagcccccccggcagcccccccaggccgcccccagcagccacccccacagcgacctgaccttcaaccccagcagcgccctggagggccaggccggggcccagggcgccagtgacatgcctgagcccagcctggacctgctgcctgagctgaccaacccagatgagctgctgagctacctggaccccccagacctgcccagcaacagcaatgatgacctgctgagcctgtttgagaacaactag

SEQ ID NO: 203628 - DNA, 2994 bp, Artificial Sequence
  derived and/or modified sequence
cggcccccacctgctggcccccaggcccctgagggcgcccgggccggcagcaggcctgtgcagctgctggccctgctgagctcctggtgtgaggagctgggccgcctgctgctgctgcggcaccagaagagccggcagagcgaccccccaggcaagctgcccatgcagccccccctgagctccatgagctccatgaagcccaccctgagccacagtgatggcagcttcccctatgacagcgtgccctggcagcagaacaccaaccagcccccaggcagcctgtctgtggtgaccaccgtgtggggcgtgaccaacaccagccagagccaggtgctgggcaaccccatggccaatgccaacaaccccatgaaccctgggggcaaccccatggccagcggcatgaccaccagcaaccctggcctgaacagcccccagtttgctggccagcagcagcagttcagcgccaaggccggccctgcccagccctacatccagcagagcatgtatggccggcccaactacccaggcagcggcggctttggagccagctacccaggcggccccaatgccccagctggcatgggcatccccccccacacccggcccccagctgacttcacccagcctgctgctgctgctgctgctgctgctgtggccgctgctgctgccacagccacagccacagccacagccaccgtggccgccctgcaggagacccagaacaaggacatcaaccagtatggccccatgggccccacccaggcctacaacagccagttcatgaaccagcccggcccccggggccctgcctccatgggcggctccatgaacccagcctccatggctgctggcatgacccccagcggcatgagcggcccccccatgggcatgaaccagccccggcccccaggcatcagccccttcggcacccacggccagaggatgccccagcagacctacccaggcccccggccccagagcctgcccatccagaacatcaagaggccctacccaggagagcccaactacggcaaccagcagtatggccccaacagccagttccccacccagcccggccagtacccagcccccaaccccccccggcccctgaccagccccaactacccaggccagaggatgcccagccagcccagcagcggccagtaccccccacccaccgtgaacatgggccagtactacaagccagagcagttcaacggccagaacaacaccttcagcggcagcagctacagcaactacagccagggcaatgtgaaccggccccccaggcctgtgcctgtggccaactacccccacagccctgtgcccggcaaccccaccccacccatgaccccaggcagcagcatccccccctacctgagccccagccaggatgtgaagccacccttccccccagacatcaagcccaacatgtctgccctgcccccacctccagccaaccacaatgatgagctgcggctgaccttccctgtgagagatggagtggtgctggagcccttccggctggagcacaacctggccgtgagcaaccacgtgttccacctgcggcccaccgtgcaccagaccctgatgtggaggagtgacctggagctgcagttcaagtgctaccaccacgaggaccggcagatgaacaccaactggccagcctctgtgcaggtgtctgtgaatgccacccccctgaccatcgagcggggggacaacaagaccagccacaagcccctgcacctgaagcacgtgtgccagcctggaagaaacaccatccagatcaccgtgacagcctgctgctgcagccacctgtttgtgctgcagctggtgcaccggcccagcgtgcgctctgtgctgcagggcctgctgaagaagaggctgctgcctgctgagcactgcatcaccaagatcaagaggaacttcagctctgtggccgccagcagcggcaacaccaccctgaatggagaagatggagtggagcagacagccatcaaggtgtccctgaagtgccccatcaccttccgccgcatccagctgcctgcccggggccatgactgcaagcacgtgcagtgctttgacctggagagctacctgcagctgaactgtgagcggggcacctggcgctgccctgtgtgcaacaagacagccctgctggagggcctggaggtggaccagtacatgtggggcatcctgaatgccatccagcacagcgagtttgaggaggtgaccatcgaccccacctgctcctggaggcctgtgcccatcaagagtgacctgcacatcaaggatgatcctgatggcatccccagcaagcgcttcaagaccatgagccccagccagatgatcatgcccaacgtgatggagatgattgctgccctgggccctggccccagcccctaccccctgcccccacctcctgggggcaccaacagcaatgactacagcagccagggcaacaactaccagggccacggcaactttgacttcccccacggcaaccctgggggcacctccatgaatgacttcatgcacggccccccccagctgagccaccccccagacatgcccaacaacatggccgccctggagaagcccctgagccaccccatgcaggagaccatgcctcatgctggcagcagtgaccagccccaccccagcatccagcagggcctgcacgtgccccaccccagcagccagagcggcccccccctgcaccacagcggggcccctcctcctccacccagccagcccccccggcagcccccccaggccgcccccagcagccacccccacagcgacctgaccttcaaccccagcagcgccctggagggccaggccggggcccagggcgccagtgacatgcctgagcccagcctggacctgctgcctgagctgaccaacccagatgagctgctgagctacctggaccccccagacctgcccagcaacagcaatgatgacctgctgagcctgtttgagaacaactag

SEQ ID NO: 203629 - DNA, 3204 bp, Artificial Sequence
  derived and/or modified sequence
atgaacagcatggaccggcacatccagcagaccaacgaccggctgcaatgcatcaagcagcatctccagaatccagctaactttcacaacgcagcaacagagctcctggactggtgcggcgatcccagagcctttcagcgacctttcgaacagtccctcatggggtgcttgaccgtagtgagccgagtggccgcccagcaggggtttgacttggacctggggtacaggctgttagccgtgtgtgcagccaatcgagacaagtttacacctaaatccgcagccctccttagttcatggtgcgaagagttaggaagacttcttctcttacgtcaccaaaaaagtcgacagagcgaccccccaggtaaattgcccatgcagcccccgctgtcatccatgagctctatgaagcccaccctgagtcactccgatggctccttcccctacgactccgtgccttggcagcagaataccaaccaaccgcccggtagccttagcgtggtaacaacagtgtggggggtgacgaatacttctcagtctcaagtcctgggaaatcctatggcaaatgcaaacaatcccatgaaccctgggggcaaccctatggcttctggcatgaccacttccaaccctggattgaacagccctcagtttgcaggccaacagcagcagttcagcgccaaggccggcccagcacagccatatatccagcagagcatgtacgggagaccaaattacccgggatccggcggttttggagctagctaccctggggggcccaacgccccagccggtatgggtatcccaccccacactcggcctcccgccgatttcacacagccggccgccgctgccgcagctgcagccgtggcagccgccgctgcaacggcgacagctactgctacggctaccgtggccgcgttgcaggagacccagaacaaggatatcaaccagtatgggccaatgggccctacccaggcatataattcacaattcatgaaccaaccagggccccggggtcctgcttcaatgggcggcagcatgaatccggccagtatggcggccggcatgacaccctccgggatgtcagggcctcccatgggcatgaatcagccccgacccccaggcatctcccccttcgggacccatggacagagaatgccacaacaaacgtaccctggcccaagacctcagtctttacccatacagaacatcaagaggccttaccccggagagcctaattacggcaatcagcaatatggtcccaactcccagtttcctacacaacccggccaatacccagctcccaatcctccacgccccttaacatcccctaactatcccggccagaggatgccttcccaaccaagttcaggtcaataccccccacccactgtgaatatgggacaatactacaagccggaacaattcaatggtcagaacaacactttttcaggctcttcttacagtaattatagtcaaggtaatgtgaatagaccaccccgccctgtgcccgtcgccaactaccctcactcccccgttcccggtaacccaactccgcctatgactccaggctcctctattcccccgtatttgtctccaagtcaggatgtgaaaccacccttcccccccgatatcaagccgaacatgtccgctctgcccccccctccagcaaatcataatgacgaactgaggctgacttttcctgtacgcgatggtgtggtgctggaaccttttaggctggagcataacctcgccgtttcaaatcatgtgttccatcttagacccaccgtgcaccagactcttatgtggcgctctgatctggagctgcagtttaagtgctatcaccatgaggataggcagatgaatacaaattggccagcctccgtgcaggtcagcgtcaacgcaacacctctcactattgagcgcggcgacaacaaaacgtcccacaagcccctgcatctgaagcacgtgtgtcagccaggacgcaacacgattcagattaccgttacagcctgctgttgctcccatctcttcgtcctgcagcttgtacatcgcccctcggtgagatccgtactccagggcttattgaagaaaagactactgcctgcagaacattgcattaccaaaatcaaaaggaatttttcatctgtggcagcttcatcgggaaacacgacactcaatggtgaagacggtgtggagcagaccgccatcaaggtctctttgaagtgcccgatcacttttcgccggatccagctgccagcccggggccacgattgcaaacacgtgcagtgcttcgatctggaatcctacctgcagctgaactgcgaaagaggtacctggcgatgtccagtttgcaacaaaacagctcttctcgagggcctagaggtcgatcagtacatgtggggaattctgaatgctatccagcactctgaatttgaggaagtgaccatcgaccctacatgtagctggagaccagtccccatcaagtcagatctccatattaaagatgaccctgacggtatccctagcaagcgatttaaaactatgagcccgtcacaaatgataatgccaaacgtcatggagatgatcgccgccttaggtcctggtccaagcccctacccactgcccccaccccctggtggcactaatagcaatgactattctagccagggaaacaattatcagggccatgggaacttcgactttccccacggcaaccccggggggaccagcatgaatgacttcatgcatggacctccccagctgtctcatcctcccgatatgccaaataatatggcagccttggagaagccactcagtcaccccatgcaggagactatgccacacgccggctccagcgatcaacctcaccctagcatccagcaggggttgcacgttccccatccgtccagccagagtggccctccactccatcactccggagcaccccctccacctccctctcaaccaccccgacagccccctcaggccgcaccctccagccatcctcactcagacctgacatttaaccccagctctgccctggaaggacaggccggcgcacagggggcatcagacatgccagagccaagtctcgatctattacccgaactaacaaacccagacgagttactatcttatctagatccacccgacttgccttcaaatagtaatgatgacctgctgtctctgtttgagaacaactag

SEQ ID NO: 203630 - DNA, 2994 bp, Artificial Sequence
  derived and/or modified sequence
cggcccccccccgccggcccccaggcccccgagggcgcccgggccggatcccgacccgtacagctcttggctttgctgagctcctggtgtgaggagctcggcagactgttactgctgcgacaccagaaaagcaggcagtccgatccccctggtaagctgccgatgcagccacccttgagtagcatgagttctatgaaacctacactgtctcattccgatggatcgtttccgtatgatagcgtgccctggcagcaaaataccaatcagccccccgggtcactatcagtggtgactaccgtttggggggtcacgaatacatcacagtcacaggtacttggaaaccctatggccaatgccaataacccgatgaaccccggaggcaatcctatggcttcaggcatgacaacctccaaccctggactgaacagcccccaattcgccggacaacaacagcagttctccgcaaaggccggcccagcccagccctacatccagcagtctatgtacggtagaccgaactatcctggatcaggcggttttggcgctagttaccctggcgggccaaatgcacccgctggaatgggtataccgcctcacacacgcccaccagctgattttactcaaccagccgcggctgccgccgccgccgcagtggctgcggcagccgctactgcaactgcaacagcaactgccacagtcgccgctctgcaggagactcagaataaggacattaaccagtacggtccgatgggaccgactcaagcctacaactcacagtttatgaatcagcccggccctaggggccctgcaagcatgggaggctccatgaacccggctagcatggcagccgggatgacccctagcgggatgagcgggccgccgatggggatgaaccaacctagaccccctggcatcagcccctttggtactcatggtcagcggatgccccagcaaacttacccgggccccagaccacaatctctgcccattcagaatattaaaaggccctatcctggcgagcccaattacgggaatcagcagtacggccctaactcccagttcccaacacaacctggtcagtacccagcccctaatcccccaagacccctgacctctccaaattatccaggacagcggatgcccagccagccgtcctcgggtcagtatcccccccctactgtcaatatgggacagtattataagcccgaacagtttaacggacaaaacaataccttctcaggttcctcctactctaactacagccaggggaacgtaaaccggcctccacgtcccgtgcccgtcgccaattacccacactcacctgtacctggaaatcccactccaccgatgaccccaggctcaagcattccaccctacctaagcccatctcaggatgtgaaaccgcccttcccacccgatatcaaacctaacatgtccgcccttccgcctcctcccgccaatcacaatgatgaattacggttaacgttccccgttagagacggagtggtcctggaacctttccggctcgaacacaatctcgcagttagtaaccatgtttttcacttacgacctacagtgcatcagaccttaatgtggcggtctgaccttgagttgcaatttaagtgctaccaccacgaagataggcaaatgaacacgaactggcccgcgagcgtgcaggtgagcgtgaatgctactcccctaacaatcgagagaggtgacaacaagaccagtcataagcccctgcacctcaaacacgtgtgccagcctggacggaacacaatccaaataacggtgacagcatgttgttgctcacatctcttcgttctgcagctggtgcatcgcccctctgtgcggtctgtactccaggggcttctcaaaaagcgactgctgccagcagagcactgcataacgaagattaaaaggaacttcagtagcgtggccgcctcatccggcaacaccacacttaacggcgaggatggcgtggaacagacagcaataaaagtgagcctcaaatgtccgattactttcagaaggatccagctgcccgcccgcgggcacgactgcaaacatgtgcagtgcttcgatctggagagttatctgcagcttaattgcgagagaggtacctggaggtgtccagtctgtaacaagacagctttgctagaggggctggaagtagaccagtacatgtggggcattttaaatgccattcagcattctgagtttgaggaggtaaccatcgacccgacctgttcctggagacccgtgcccatcaagtcggacctgcacataaaggatgatcccgacggaattccctcgaaacgttttaaaaccatgtcgccctcccagatgatcatgcctaatgttatggagatgatcgctgcactgggacctgggccctcgccctatccactgccccctccccccggcggtaccaattctaatgactattcctcccagggtaacaattaccagggtcacgggaactttgattttcctcatggcaatcctgggggcacaagcatgaatgatttcatgcatggtcccccccaattgagccatcctcccgatatgcctaacaatatggcggcgctggagaaaccacttagtcacccgatgcaggagaccatgccgcacgcgggatcttctgaccagccgcaccccagtatccaacagggcctgcacgtcccccacccctcttctcagtccgggcccccactccaccacagcggtgcccctcctcctcctccctcccagcctcctaggcagcccccgcaagccgcaccgagttcacacccccactcagacctgacattcaatcctagctccgctctcgagggacaagctggtgcacagggggcctctgatatgcctgagccgtccttggaccttctgcctgagctgactaacccggacgagctgctctcctatctcgacccaccagatctgcctagtaactccaacgacgacctcttatctctttttgagaacaactag

SEQ ID NO: 203631 - DNA, 3204 bp, Artificial Sequence
  derived and/or modified sequence
atgaattccatggaccgacacattcaacaaacgaacgatcgcctgcagtgtataaaacaacacttacagaatcctgctaattttcacaacgctgcaacagagctgcttgactggtgtggtgaccccagggcctttcagagaccgtttgaacagagtctaatgggctgcctgactgtggtgagtcgcgtcgcagcccaacagggatttgacctcgatctgggatacagactgctcgcagtgtgtgccgctaatcgcgataagttcactccaaagagcgctgcgttactttctagctggtgtgaggagcttggcaggctcctgttgctcagacaccagaagagccggcagagcgatccaccaggaaaattgcccatgcaacccccactgtcaagcatgtcgagcatgaaacccacattgagccactcagatggttcttttccatacgatagcgtcccgtggcagcaaaataccaaccagccgccagggagtctcagcgtggtcacgactgtgtggggcgtgacgaacacctcgcaaagtcaggttctcgggaacccaatggcgaacgctaacaatcctatgaatcctggcggaaacccaatggctagcggtatgactacatccaaccccggattgaacagtccccagtttgctggccagcagcagcagttctccgctaaagcaggtccggcacagccttatatccagcagtctatgtatggaaggccaaattacccgggaagcggcggatttggtgcttcttatcccggagggccaaacgcacccgctggcatgggcatcccaccacacacccgccctcccgcagactttacacagccggcagccgcagccgcagcagctgccgtggcggcagcagctgcaacagccaccgctactgcaaccgctactgttgccgctctccaggagacccaaaataaggatatcaaccagtatgggccaatgggacctacccaggcatataactcccagttcatgaaccaacctggccctcgagggcctgcctccatgggaggcagtatgaaccccgcaagtatggccgctggcatgacgcccagcgggatgtcagggcctcctatgggcatgaaccagccacggcctcccggaatcagtccttttggaacacacggccagcgaatgccacagcaaacgtaccccggacctcgacctcagtccctgcctatccaaaacattaaaaggccatatcccggagagcccaattatgggaatcaacaatatggccctaattcccagtttcctacccagccagggcagtacccagctccaaatccacctcgcccacttacttccccaaactatcctggccagaggatgccctcccaaccttcctcaggccaataccctcctcctactgtgaatatgggccagtactacaaaccagaacagttcaacggccagaataacacattttccggttccagttacagtaactatagtcagggcaatgtgaatagaccccctcgccctgtgcccgtcgctaattacccccactctccagtgcccggtaacccaaccccccctatgactcccggtagcagcatccccccttacctttccccttcgcaagatgtgaaaccgcctttcccgccagatatcaaacccaatatgtccgccttgcctccacctcctgccaaccataacgatgagcttagactgactttcccagtgagggacggcgtggtcttggaaccctttcgcctggagcataatctggccgttagcaatcacgtgttccatctgagacctacagtgcaccagacgcttatgtggcggagcgatttggaactgcaattcaagtgctaccatcacgaagaccgacagatgaacactaattggcccgctagcgtgcaggtgtccgtgaatgccaccccgctcacaatcgaacgaggcgacaacaagacatcccacaaacccctgcatctaaagcatgtttgtcagcccggaaggaacaccatccagattactgtgaccgcatgctgctgctcccacctgttcgtactgcagctcgtgcacaggcccagtgtgaggagtgtccttcagggtttgcttaaaaagcgactgcttccggctgagcattgtatcaccaagatcaaaaggaatttctcaagtgtggcagcttcctctgggaacactaccctgaacggtgaggacggggttgagcaaaccgcgatcaaggtctcacttaagtgtcctataacctttcgcaggatacagctacctgccagaggacatgattgcaaacatgtccagtgtttcgatctggaatcctacctccagttgaattgcgaacgaggcacatggagatgtccagtgtgtaataagaccgccctgttagagggcctggaggtggatcagtacatgtggggaatcctgaacgctattcaacactccgagtttgaggaggtaaccatagaccctacatgcagttggcgcccagtaccaattaagagtgatctacacataaaggacgatccggacggtattccgagcaagcggtttaagacaatgtctccgtctcaaatgatcatgcctaatgttatggaaatgattgccgctctcggtcctggccctagcccataccctctcccccctcctccaggaggaacgaattccaatgactatagttcccagggcaacaattaccagggacacggaaacttcgatttcccacatggaaaccccggtggcacgagcatgaacgactttatgcatgggccaccccagctatcccatccccctgatatgccaaataacatggctgcccttgaaaagccactttctcacccaatgcaggaaacaatgccgcacgcagggtcgagcgaccaacctcatcctagcatccaacaggggctgcatgttccccacccttctagccaatctggccctcctctgcatcatagcggcgctccaccacccccacccagccagcctccaagacagccccctcaggctgcacccagcagtcacccacacagtgatctgacttttaaccctagctcggcactggaggggcaggcaggcgctcaaggtgcaagtgacatgcctgagcctagcttggatctcctgcctgagttaacaaaccccgatgaactcctgtcatacctggacccacccgatctgcctagcaatagtaacgatgacctcctgtctctgttcgagaataactag

SEQ ID NO: 203632 - DNA, 2994 bp, Artificial Sequence
  derived and/or modified sequence
cgtccccctcccgcagggcctcaggccccagagggggcaagggccggaagtcgcccagttcagctgctcgcgctactgtccagctggtgcgaagaattgggcagactcttgctgctgaggcaccagaagtcgcgccagagtgacccccctggtaagctgccaatgcagccacctctgagcagcatgtcatcaatgaagccaacactctctcacagcgacgggtcattcccctatgactctgtgccttggcagcagaatacgaatcagccccctggctctttatccgtcgttacaacagtctggggggtgaccaacacgtcacagtcccaggtattagggaacccaatggccaacgctaataatcctatgaatcctgggggtaaccctatggcctcaggtatgaccacaagcaacccaggactgaactcacctcagttcgcgggtcaacagcagcagtttagcgccaaggcgggtcccgctcagccatacatccagcaatcaatgtatgggaggcctaattaccctggatcaggagggttcggagcgagctaccccggtgggcctaatgcccctgctggcatgggaattcctccccatacgagacctcccgctgatttcacacagccagccgcagctgccgctgctgccgctgtcgctgctgctgccgcaactgccaccgcaaccgctacggctaccgtggctgcattgcaggagacccaaaataaagatataaatcagtacggacccatgggcccaacccaagcttataactcacagttcatgaatcagccagggcctaggggccctgcaagcatggggggaagtatgaatcctgcctctatggctgccggtatgacgccgtcaggaatgtcaggaccacctatgggaatgaatcagcccagaccacctgggatctctccctttggcacacatggccagcgaatgccccaacagacttaccccggacccagacctcagtccttgccaatccagaatattaagcgcccatacccaggggaaccgaactatggtaaccagcagtatggcccaaattcacagtttcctacccagccaggccagtatcctgcaccgaatccacctcggccactgacttcacccaattacccaggccagcgcatgcccagtcagccaagttccggtcagtaccccccaccaacagtgaacatgggccagtactataagccagaacagttcaatggccagaacaacactttttcggggtcttcctatagtaattacagccagggtaatgtgaacagaccaccgcgaccagttcccgtggcgaactatccacactccccagtcccaggcaacccaacaccacctatgacaccagggtcctccatccccccatatttatctccgagccaggacgttaaacctccctttccgcctgatatcaagccgaacatgtcagcgttaccaccacccccagccaatcataacgacgagctgaggctcacatttccggtccgagatggagtggtattggagcccttccgtctggagcacaacttagctgtgtccaaccacgtgttccacttgaggcccacagtccatcagaccctcatgtggcgaagcgatctggaactacagtttaaatgttatcaccatgaagaccggcagatgaatacaaattggcccgcttctgtacaggtgtctgtaaatgcgacccctttaacaatagaacggggagataataagaccagtcataagcccttacacctgaagcatgtgtgccagcctgggagaaacactatacagattacagtcacagcatgttgctgtagccatctatttgtgttgcaactggtacataggcctagtgttagatccgttctgcagggcctgttgaaaaagagacttctccccgctgaacactgcataactaaaatcaaaaggaatttctctagtgttgccgcttcaagcggtaataccacactgaacggtgaggacggagtagaacaaacagccatcaaggtaagcctgaagtgcccaatcacttttcgcagaatccaactacccgcacgtggccacgactgtaagcacgtccaatgcttcgacctcgagtcctacttgcagctcaattgtgagcgcggtacatggcgatgtcctgtctgcaacaagactgcccttctagagggtctagaagttgatcagtacatgtggggaattcttaacgcgattcaacactccgaattcgaagaggtgacaattgatcccacctgttcgtggagaccagtcccaattaaaagcgacctgcacattaaggatgatcctgacggaattccctccaagagattcaaaaccatgagcccttctcaaatgatcatgccaaatgtcatggagatgatcgctgcactgggacccggaccctcgccttaccccctgccgcctcctcccggtggaactaactctaacgactactcttctcaagggaacaactaccagggccatggaaacttcgattttccacacggcaaccctggcggtacatccatgaacgattttatgcacggtcccccacaactgtcccatccccctgacatgcctaacaatatggcagccttagaaaagcccttgagtcaccccatgcaggagaccatgccacacgccggatcctctgatcagccacacccatctatccaacaaggcttgcacgtgccacaccctagcagccagtcagggccaccattgcaccactctggggcaccacctcctccaccatctcagccacctcggcaaccgccacaggccgcacctagcagtcatccgcacagcgatctaacgttcaaccccagctctgcgttagaaggccaggccggtgcgcaaggggctagtgacatgccggaaccttcactggatttactgcccgaactgacaaatcccgatgaattattgagctatttggatccgcctgacttgcccagcaattctaatgatgatctcctgtctcttttcgagaataactag

SEQ ID NO: 203633 - protein, 2177 aa, Artificial Sequence
  derived and/or modified sequence
MEEILRKLQKEASGSKYKAIKESCTWALETLGGLDTIVKIPPHVLREKCLLPLQLALESKNVKLAQHALAGMQKLLSEERFVSMETDSDEKQLLNQILNAVKVTPSLNEDLQVEVMKVLLCITYTPTFDLNGSAVLKIAEVCIETYISSCHQRSINTAVRATLSQMLSDLTLQLRQRQENTIIENPDVPQDFGNQGSTVESLCDDVVSVLTVLCEKLQAAINDSQQLQLLYLECILSVLSSSSSSMHLHRRFTDLIWKNLCPALIVILGNPIHDKTITSAHTSSTSTSLESDSASPGVSDHGRGSGCSCTAPALSGPVARTIYYIAAELVRLVGSVDSMKPVLQSLYHRVLLYPPPQHRVEAIKIMKEILGSPQRLCDLAGPSSTESESRKRSISKRKSHLDLLKLIMDGMTEACIKGGIEACYAAVSCVCTLLGALDELSQGKGLSEGQVQLLLLRLEELKDGAEWSRDSMEINEADFRWQRRVLSSEHTPWESGNERSLDISISVTTDTGQTTLEGELGQTTPEDHSGNHKNSLKSPAIPEGKETLSKVLETEAVDQPDVVQRSHTVPYPDITNFLSVDCRTRSYGSRYSESNFSVDDQDLSRTEFDSCDQYSMAAEKDSGRSDVSDIGSDNCSLADEEQTPRDCLGHRSLRTAALSLKLLKNQEADQHSARLFIQSLEGLLPRLLSLSNVEEVDTALQNFASTFCSGMMHSPGFDGNSSLSFQMLMNADSLYTAAHCALLLNLKLSHGDYYRKRPTLAPGVMKDFMKQVQTSGVLMVFSQAWIEELYHQVLDRNMLGEAGYWGSPEDNSLPLITMLTDIDGLESSAIGGQLMASAATESPFAQSRRIDDSTVAGVAFARYILVGCWKNLIDTLSTPLTGRMAGSSKGLAFILGAEGIKEQNQKERDAICMSLDGLRKAARLSCALGVAANCASALAQMAAASCVQEEKEEREAQEPSDAITQVKLKVEQKLEQIGKVQGVWLHTAHVLCMEAILSVGLEMGSHNPDCWPHVFRVCEYVGTLEHNHFSDGASQPPLTISQPQKATGSAGLLGDPECEGSPPEHSPEQGRSLSTAPVVQPLSIQDLVREGSRGRASDFRGGSLMSGSSAAKVVLTLSTQADRLFEDATDKLNLMALGGFLYQLKKASQSQLFHSVTDTVDYSLAMPGEVKSTQDRKSALHLFRLGNAMLRIVRSKARPLLHVMRCWSLVAPHLVEAACHKERHVSQKAVSFIHDILTEVLTDWNEPPHFHFNEALFRPFERIMQLELCDEDVQDQVVTSIGELVEVCSTQIQSGWRPLFSALETVHGGNKSEMKEYLVGDYSMGKGQAPVFDVFEAFLNTDNIQVFANAATSYIMCLMKFVKGLGEVDCKEIGDCAPAPGAPSTDLCLPALDYLRRCSQLLAKIYKMPLKPIFLSGRLAGLPRRLQEQSASSEDGIESVLSDFDDDTGLIEVWIILLEQLTAAVSNCPRQHQPPTLDLLFELLRDVTKTPGPGFGIYAVVHLLLPVMSVWLRRSHKDHSYWDMASANFKHAIGLSCELVVEHIQSFLHSDIRYESMINTMLKDLFELLVACVAKPTETISRVGCSCIRYVLVTAGPVFTEEMWRLACCALQDAFSATLKPVKDLLGCFHSGTESFSGEGCQVRVAAPSSSPSAEAEYWRIRAMAQQVFMLDTQCSPKTPNNFDHAQSCQLIIELPPDEKPNGHTKKSVSFREIVVSLLSHQVLLQNLYDILLEEFVKGPSPGEEKTIQVPEAKLAGFLRYISMQNLAVIFDLLLDSYRTAREFDTSPGLKCLLKKVSGIGGAANLYRQSAMSFNIYFHALVCAVLTNQETITAEQVKKVLFEDDERSTDSSQQCSSEDEDIFEETAQVSPPRGKEKRQWRARMPLLSVQPVSNADWVWLVKRLHKLCMELCNNYIQMHLDLENCMEEPPIFKGDPFFILPSFQSESSTPSTGGFSGKETPSEDDRSQSREHMGESLSLKAGGGDLLLPPSPKVEKKDPSRKKEWWENAGNKIYTMAADKTISKLMTEYKKRKQQHNLSAFPKEVKVEKKGEPLGPRGQDSPLLQRPQHLMDQGQMRHSFSAGPELLRQDKRPRSGSTGSSLSVSVRDAEAQIQAWTNMVLTVLNQIQILPDQTFTALQPAVFPCISQLTCHVTDIRVRQAVREWLGRVGRVYDIIV

SEQ ID NO: 203634 - protein, 218 aa, Artificial Sequence
  derived and/or modified sequence
QVKKVLFEDDERSTDSSQQCSSEDEDIFEETAQVSPPRGKEKRQWRARMPLLSVQPVSNADWVWLVKRLHKLCMELCNNYIQMHLDLENCMEEPPIFKGDPFFILPSFQSESSTPSTGGFSGKETPSEDDRSQPRSGSTGSSLSVSVRDAEAQIQAWTNMVLTVLNQIQILPDQTFTALQPAVFPCISQLTCHVTDIRVRQAVREWLGRVGRVYDIIV

SEQ ID NO: 203635 - DNA, 6534 bp, Artificial Sequence
  derived and/or modified sequence
atggaggagatcctgagaaagctgcagaaggaggccagcggcagcaagtacaaggccatcaaggagagctgcacctgggccctggagaccctgggcggcctggacaccatcgtgaagatccccccccacgtgctgagagagaagtgcctgctgcccctgcagctggccctggagagcaagaacgtgaagctggcccagcacgccctggccggcatgcagaagctgctgagcgaggagagattcgtgagcatggagaccgacagcgacgagaagcagctgctgaaccagatcctgaacgccgtgaaggtgacccccagcctgaacgaggacctgcaggtggaggtgatgaaggtgctgctgtgcatcacctacacccccaccttcgacctgaacggcagcgccgtgctgaagatcgccgaggtgtgcatcgagacctacatcagcagctgccaccagagaagcatcaacaccgccgtgagagccaccctgagccagatgctgagcgacctgaccctgcagctgagacagagacaggagaacaccatcatcgagaaccccgacgtgccccaggacttcggcaaccagggcagcaccgtggagagcctgtgcgacgacgtggtgagcgtgctgaccgtgctgtgcgagaagctgcaggccgccatcaacgacagccagcagctgcagctgctgtacctggagtgcatcctgagcgtgctgagcagcagcagcagcagcatgcacctgcacagaagattcaccgacctgatctggaagaacctgtgccccgccctgatcgtgatcctgggcaaccccatccacgacaagaccatcaccagcgcccacaccagcagcaccagcaccagcctggagagcgacagcgccagccccggcgtgagcgaccacggcagaggcagcggctgcagctgcaccgcccccgccctgagcggccccgtggccagaaccatctactacatcgccgccgagctggtgagactggtgggcagcgtggacagcatgaagcccgtgctgcagagcctgtaccacagagtgctgctgtacccccccccccagcacagagtggaggccatcaagatcatgaaggagatcctgggcagcccccagagactgtgcgacctggccggccccagcagcaccgagagcgagagcagaaagagaagcatcagcaagagaaagagccacctggacctgctgaagctgatcatggacggcatgaccgaggcctgcatcaagggcggcatcgaggcctgctacgccgccgtgagctgcgtgtgcaccctgctgggcgccctggacgagctgagccagggcaagggcctgagcgagggccaggtgcagctgctgctgctgagactggaggagctgaaggacggcgccgagtggagcagagacagcatggagatcaacgaggccgacttcagatggcagagaagagtgctgagcagcgagcacaccccctgggagagcggcaacgagagaagcctggacatcagcatcagcgtgaccaccgacaccggccagaccaccctggagggcgagctgggccagaccacccccgaggaccacagcggcaaccacaagaacagcctgaagagccccgccatccccgagggcaaggagaccctgagcaaggtgctggagaccgaggccgtggaccagcccgacgtggtgcagagaagccacaccgtgccctaccccgacatcaccaacttcctgagcgtggactgcagaaccagaagctacggcagcagatacagcgagagcaacttcagcgtggacgaccaggacctgagcagaaccgagttcgacagctgcgaccagtacagcatggccgccgagaaggacagcggcagaagcgacgtgagcgacatcggcagcgacaactgcagcctggccgacgaggagcagacccccagagactgcctgggccacagaagcctgagaaccgccgccctgagcctgaagctgctgaagaaccaggaggccgaccagcacagcgccagactgttcatccagagcctggagggcctgctgcccagactgctgagcctgagcaacgtggaggaggtggacaccgccctgcagaacttcgccagcaccttctgcagcggcatgatgcacagccccggcttcgacggcaacagcagcctgagcttccagatgctgatgaacgccgacagcctgtacaccgccgcccactgcgccctgctgctgaacctgaagctgagccacggcgactactacagaaagagacccaccctggcccccggcgtgatgaaggacttcatgaagcaggtgcagaccagcggcgtgctgatggtgttcagccaggcctggatcgaggagctgtaccaccaggtgctggacagaaacatgctgggcgaggccggctactggggcagccccgaggacaacagcctgcccctgatcaccatgctgaccgacatcgacggcctggagagcagcgccatcggcggccagctgatggccagcgccgccaccgagagccccttcgcccagagcagaagaatcgacgacagcaccgtggccggcgtggccttcgccagatacatcctggtgggctgctggaagaacctgatcgacaccctgagcacccccctgaccggcagaatggccggcagcagcaagggcctggccttcatcctgggcgccgagggcatcaaggagcagaaccagaaggagagagacgccatctgcatgagcctggacggcctgagaaaggccgccagactgagctgcgccctgggcgtggccgccaactgcgccagcgccctggcccagatggccgccgccagctgcgtgcaggaggagaaggaggagagagaggcccaggagcccagcgacgccatcacccaggtgaagctgaaggtggagcagaagctggagcagatcggcaaggtgcagggcgtgtggctgcacaccgcccacgtgctgtgcatggaggccatcctgagcgtgggcctggagatgggcagccacaaccccgactgctggccccacgtgttcagagtgtgcgagtacgtgggcaccctggagcacaaccacttcagcgacggcgccagccagccccccctgaccatcagccagccccagaaggccaccggcagcgccggcctgctgggcgaccccgagtgcgagggcagcccccccgagcacagccccgagcagggcagaagcctgagcaccgcccccgtggtgcagcccctgagcatccaggacctggtgagagagggcagcagaggcagagccagcgacttcagaggcggcagcctgatgagcggcagcagcgccgccaaggtggtgctgaccctgagcacccaggccgacagactgttcgaggacgccaccgacaagctgaacctgatggccctgggcggcttcctgtaccagctgaagaaggccagccagagccagctgttccacagcgtgaccgacaccgtggactacagcctggccatgcccggcgaggtgaagagcacccaggacagaaagagcgccctgcacctgttcagactgggcaacgccatgctgagaatcgtgagaagcaaggccagacccctgctgcacgtgatgagatgctggagcctggtggccccccacctggtggaggccgcctgccacaaggagagacacgtgagccagaaggccgtgagcttcatccacgacatcctgaccgaggtgctgaccgactggaacgagcccccccacttccacttcaacgaggccctgttcagacccttcgagagaatcatgcagctggagctgtgcgacgaggacgtgcaggaccaggtggtgaccagcatcggcgagctggtggaggtgtgcagcacccagatccagagcggctggagacccctgttcagcgccctggagaccgtgcacggcggcaacaagagcgagatgaaggagtacctggtgggcgactacagcatgggcaagggccaggcccccgtgttcgacgtgttcgaggccttcctgaacaccgacaacatccaggtgttcgccaacgccgccaccagctacatcatgtgcctgatgaagttcgtgaagggcctgggcgaggtggactgcaaggagatcggcgactgcgcccccgcccccggcgcccccagcaccgacctgtgcctgcccgccctggactacctgagaagatgcagccagctgctggccaagatctacaagatgcccctgaagcccatcttcctgagcggcagactggccggcctgcccagaagactgcaggagcagagcgccagcagcgaggacggcatcgagagcgtgctgagcgacttcgacgacgacaccggcctgatcgaggtgtggatcatcctgctggagcagctgaccgccgccgtgagcaactgccccagacagcaccagccccccaccctggacctgctgttcgagctgctgagagacgtgaccaagacccccggccccggcttcggcatctacgccgtggtgcacctgctgctgcccgtgatgagcgtgtggctgagaagaagccacaaggaccacagctactgggacatggccagcgccaacttcaagcacgccatcggcctgagctgcgagctggtggtggagcacatccagagcttcctgcacagcgacatcagatacgagagcatgatcaacaccatgctgaaggacctgttcgagctgctggtggcctgcgtggccaagcccaccgagaccatcagcagagtgggctgcagctgcatcagatacgtgctggtgaccgccggccccgtgttcaccgaggagatgtggagactggcctgctgcgccctgcaggacgccttcagcgccaccctgaagcccgtgaaggacctgctgggctgcttccacagcggcaccgagagcttcagcggcgagggctgccaggtgagagtggccgcccccagcagcagccccagcgccgaggccgagtactggagaatcagagccatggcccagcaggtgttcatgctggacacccagtgcagccccaagacccccaacaacttcgaccacgcccagagctgccagctgatcatcgagctgccccccgacgagaagcccaacggccacaccaagaagagcgtgagcttcagagagatcgtggtgagcctgctgagccaccaggtgctgctgcagaacctgtacgacatcctgctggaggagttcgtgaagggccccagccccggcgaggagaagaccatccaggtgcccgaggccaagctggccggcttcctgagatacatcagcatgcagaacctggccgtgatcttcgacctgctgctggacagctacagaaccgccagagagttcgacaccagccccggcctgaagtgcctgctgaagaaggtgagcggcatcggcggcgccgccaacctgtacagacagagcgccatgagcttcaacatctacttccacgccctggtgtgcgccgtgctgaccaaccaggagaccatcaccgccgagcaggtgaagaaggtgctgttcgaggacgacgagagaagcaccgacagcagccagcagtgcagcagcgaggacgaggacatcttcgaggagaccgcccaggtgagcccccccagaggcaaggagaagagacagtggagagccagaatgcccctgctgagcgtgcagcccgtgagcaacgccgactgggtgtggctggtgaagagactgcacaagctgtgcatggagctgtgcaacaactacatccagatgcacctggacctggagaactgcatggaggagccccccatcttcaagggcgaccccttcttcatcctgcccagcttccagagcgagagcagcacccccagcaccggcggcttcagcggcaaggagacccccagcgaggacgacagaagccagagcagagagcacatgggcgagagcctgagcctgaaggccggcggcggcgacctgctgctgccccccagccccaaggtggagaagaaggaccccagcagaaagaaggagtggtgggagaacgccggcaacaagatctacaccatggccgccgacaagaccatcagcaagctgatgaccgagtacaagaagagaaagcagcagcacaacctgagcgccttccccaaggaggtgaaggtggagaagaagggcgagcccctgggccccagaggccaggacagccccctgctgcagagaccccagcacctgatggaccagggccagatgagacacagcttcagcgccggccccgagctgctgagacaggacaagagacccagaagcggcagcaccggcagcagcctgagcgtgagcgtgagagacgccgaggcccagatccaggcctggaccaacatggtgctgaccgtgctgaaccagatccagatcctgcccgaccagaccttcaccgccctgcagcccgccgtgttcccctgcatcagccagctgacctgccacgtgaccgacatcagagtgagacaggccgtgagagagtggctgggcagagtgggcagagtgtacgacatcatcgtgtag

SEQ ID NO: 203636 - DNA, 657 bp, Artificial Sequence
  derived and/or modified sequence
caggtgaagaaggtgctgttcgaggacgacgagagaagcaccgacagcagccagcagtgcagcagcgaggacgaggacatcttcgaggagaccgcccaggtgagcccccccagaggcaaggagaagagacagtggagagccagaatgcccctgctgagcgtgcagcccgtgagcaacgccgactgggtgtggctggtgaagagactgcacaagctgtgcatggagctgtgcaacaactacatccagatgcacctggacctggagaactgcatggaggagccccccatcttcaagggcgaccccttcttcatcctgcccagcttccagagcgagagcagcacccccagcaccggcggcttcagcggcaaggagacccccagcgaggacgacagaagccagcccagaagcggcagcaccggcagcagcctgagcgtgagcgtgagagacgccgaggcccagatccaggcctggaccaacatggtgctgaccgtgctgaaccagatccagatcctgcccgaccagaccttcaccgccctgcagcccgccgtgttcccctgcatcagccagctgacctgccacgtgaccgacatcagagtgagacaggccgtgagagagtggctgggcagagtgggcagagtgtacgacatcatcgtgtag

SEQ ID NO: 203637 - DNA, 6534 bp, Artificial Sequence
  derived and/or modified sequence
atggaggaaatactgcggaaactgcagaaggaagcctcaggaagcaagtacaaggcgatcaaggagtcttgcacttgggcattggaaactctgggcggcctcgatactatcgtgaaaataccacctcatgtcttacgcgaaaagtgtctacttcctctgcagctggccttggagtccaaaaacgttaaactggcacagcacgccctggccggaatgcagaagcttttgagtgaggaaagattcgtctctatggaaactgactcagacgagaaacagttgctgaaccaaatactcaacgcagtgaaggtcaccccatcactgaatgaagacttgcaggtagaggtcatgaaggttctgttgtgtattacttatacacccacttttgatctgaacggttctgccgtgctgaaaattgcagaggtctgtatagagacttatataagcagctgtcatcaacgaagtataaatactgcagtgcgggccactctgtctcaaatgcttagtgacttaaccttgcaattgagacagcgacaggaaaacactatcattgagaaccctgacgtgccccaggactttggcaatcaagggagcacagtggagagcctgtgcgatgacgtggtgtcagtcttgaccgtcctctgcgaaaaactccaagccgcaatcaatgactcacagcagctgcagctgttgtacctggagtgcatccttagtgtgttaagttcatcttccagcagcatgcacctgcaccgtcgtttcaccgacctgatctggaagaatctgtgccccgcgctgatcgtgattcttggcaacccaattcacgacaagacaataacgtcagcccacaccagttcaacctccaccagtcttgaatccgactcagcttctcctggggtcagtgatcatggaagaggcagtggctgttcctgcaccgctcctgccctgtcaggtccggtagctagaaccatatactatatcgcggctgagctcgtaagacttgtaggttcagtggactctatgaaaccggtactacagtcactctaccatagggtgctactatatcctcccccccagcatagggttgaggcaatcaaaattatgaaagaaatcctgggctcaccccaacgactctgcgacctggccggacccagttccacagagtctgagtcccgcaaacgtagcattagcaaacggaaatcacacttggacctgcttaagctcattatggatggaatgaccgaagcgtgtattaaaggcggaatcgaggcttgctacgccgccgtatcatgtgtgtgcaccctactgggagcgctagacgagctttctcaaggaaaggggctttctgaagggcaggtgcaacttttgcttctgaggttggaagaactcaaagacggcgctgaatggtcacgagactcgatggaaataaacgaggccgatttcaggtggcaaaggcgcgtcttatctagcgagcacaccccttgggagagtggtaatgaacgatcgctggacatttccatttctgtgacaaccgataccgggcagacaacccttgaaggtgaactcggacagactacaccagaggaccactcaggtaaccacaagaactctttgaaatcgcccgccatccccgagggtaaggagacgctatccaaggtgctcgagactgaggccgttgatcaaccggacgtggttcaaaggtctcatactgtcccataccccgatatcaccaatttcctgtctgtggattgccggacaagaagttacggctctcgatacagcgagtcaaacttctcggtcgacgatcaggacctgtccagaactgaattcgattcctgtgatcaatatagtatggccgcagagaaggactccgggagatctgatgtctccgacatcggtagcgacaattgtagccttgccgacgaggagcagacacctagagactgcctgggtcacaggtctctgcggaccgcagccctgtctctgaagctcctcaaaaaccaggaggcagaccagcatagcgctcggctgtttattcaatctctggagggcctcctgccacgcctgctatcgctaagcaatgtcgaagaagtggacactgcattacagaactttgccagcacattttgttccggtatgatgcactctccgggatttgatggtaacagcagcctgtcctttcaaatgttaatgaacgctgacagtctctacacggctgcccactgcgcattgctgctgaatctgaaattatctcacggcgattattacaggaaacggcctactctggcccctggcgtgatgaaggactttatgaaacaggtgcagaccagtggggtgcttatggtattcagccaggcttggattgaagaactctatcatcaagtgctggataggaatatgctgggtgaggccggatactggggatctccggaggacaatagcctgcccctgattacaatgctcactgacatcgacgggttagaaagctctgctatcggcggacagctgatggcctctgcagccaccgaaagcccattcgctcagagcaggaggattgatgactccactgttgccggagtcgccttcgcccgatatatcctggtcggatgttggaagaacctgatcgataccctgtctacccctttgactggccgcatggctggttcatcaaaaggtctggcctttatactgggtgccgaggggattaaagagcaaaaccaaaaagagagggatgccatctgtatgtctctcgacggactgagaaaagcagcacgcctcagttgtgccttgggcgtcgctgccaactgcgctagtgccctggcacagatggcagctgcgagctgtgtgcaggaagaaaaagaggagcgtgaggcacaggaacctagcgacgctatcacgcaggtgaagctaaaagtggagcagaaactcgagcagatcggcaaagtacagggtgtctggctgcatacagctcatgtcttgtgtatggaggctattttgagcgtgggcctggaaatgggatcccacaaccctgactgctggccccatgtcttccgagtgtgcgaatacgtgggaacattagaacacaaccactttagtgatggggcatcccaaccccccctgacaattagccagccacaaaaggccacaggaagtgctggtctgctgggggaccctgaatgcgaggggtcccccccagagcactctcccgaacagggacgctctctgagtaccgccccagtcgtgcaacccctttctattcaggatctggtccgcgaggggtcccgcggaagagctagtgactttaggggcggctcgttgatgtccggtagtagcgccgctaaagtggtgctgactctgagtacgcaggcggacagactttttgaggacgccacagataagctgaaccttatggccctgggaggattcctttaccagctgaaaaaagcatcacaatctcagctgtttcactctgtgacggacacagtggactattcccttgccatgccgggagaagtcaaatctacacaggatcggaagtcagcactccacctttttaggctgggcaatgctatgctacgtattgtgagatctaaggcccgccctctgctacatgtaatgagatgttggtccctggttgcccctcacttagtggaggccgcctgccataaggaacgacacgtcagtcagaaagctgtaagcttcatccacgatatactgaccgaagtacttacagactggaacgagccacctcattttcactttaacgaagctttgtttaggccattcgagagaataatgcagctggaactatgtgacgaggatgtgcaggatcaagttgttaccagcatcggagaactggtagaggtctgcagtactcagatccagtccgggtggagacccctgttctcagccctggagacggtccacggcggtaataaatctgaaatgaaggaatacttagtcggcgactacagcatgggaaagggtcaggctcctgtgtttgacgtgttcgaagcttttttaaatactgacaacattcaggtgttcgccaacgccgctacatcgtacattatgtgcctgatgaaattcgtgaaggggctcggcgaagttgactgtaaagagatcggcgactgtgcccccgccccaggtgcaccatctaccgacctttgtcttccagctctcgactatctccggagatgctcacagcttctagctaaaatttacaagatgccacttaaaccaatttttctgagtggacgtctggccggactccctcgcaggttacaggaacaaagtgcctcttccgaggacggcatcgaaagtgtactctcggactttgatgatgacaccgggcttatcgaggtttggattatattactcgagcagttaactgccgccgtttctaattgcccgaggcaacatcagccaccaaccctggacctgctgttcgaactgctgagagatgttaccaaaactcccggcccagggttcgggatctacgcagtagtccatctgcttctccccgtgatgagcgtttggttgcgcagaagccataaagaccactcctactgggacatggcatctgccaatttcaagcatgctatcggtctgtcttgcgagctggtggtggagcacattcaatcttttctccactctgatatacgctatgagtcgatgataaataccatgctgaaggacttattcgagctgctggtggcttgcgtcgccaagcctacagagacgatttcgagggtcgggtgttcctgcatacgatatgtgttggtgacagcaggccccgtgttcaccgaagagatgtggcgcctggcctgttgcgcgttgcaggacgcattttcagctacactaaagccagtgaaggacttgcttggctgttttcatagcggcaccgagtcattctccggggaaggctgccaggtcagggtcgccgctccgtcttcatcaccatctgcggaggctgaatattggagaatcagagcaatggcccagcaggtctttatgctagatacccagtgcagtccaaagaccccaaacaacttcgaccacgcccaatcctgccagctgatcatcgaattgccccccgatgagaaacccaacggccatactaagaagagcgtcagcttccgggaaattgtagtttccctcttgtcccaccaggtattgctgcagaatctgtatgatattttgttggaagaatttgtgaaggggcccagtcctggggaggagaagaccattcaggtaccagaggccaaactggctggatttctacgatatattagcatgcagaatctagccgttattttcgatcttctgctggactcttaccgcacggctcgggaatttgacacatcgcctggtcttaaatgtttgctgaagaaggtgagcggtataggcggagctgccaatctgtacagacagagcgcaatgagctttaacatctacttccatgccctggtgtgtgcagtcctaaccaaccaggaaacaattactgctgaacaggttaaaaaagtgctgttcgaagatgatgaacggtctacagactcctctcagcagtgctcctccgaggatgaagatatttttgaggagacagctcaggtgtcaccaccccgtggtaaggagaaacgccaatggcgcgcaaggatgcctctccttagtgtccagcccgttagcaatgcagactgggtgtggttggtcaaaagactgcataagttatgtatggagttgtgtaacaattatatacagatgcacctcgaccttgagaactgtatggaggaacctccaatattcaaaggagacccctttttcatactgccgagttttcaatccgaatctagcacaccttccaccgggggatttagcggtaaggagaccccgtctgaagacgacagaagtcagtcccgtgaacacatgggcgagtcattaagcctgaaggccggagggggagatttgctgctgccccctagtccaaaagtggagaaaaaagacccttcacgtaaaaaggagtggtgggagaacgccgggaataagatctacacaatggcagccgacaaaaccatttccaaattgatgaccgaatataagaaacggaaacagcaacacaatctctcagcatttccaaaggaggtgaaagtggaaaagaagggcgagcctctggggccaaggggacaagactccccacttttgcagaggccacagcatttgatggaccaggggcagatgaggcattccttttctgccgggcctgaattgctgcgacaggacaaacgccctcgctcaggcagtacgggctcatctctctctgtctcggtgagggacgccgaagcccaaattcaggcatggacgaacatggttctgacagttctcaatcagattcagatacttcccgatcagacgtttaccgctttgcagccagccgttttcccctgcataagccagctgacctgccacgtgaccgacatccgagtccgccaggctgtgcgggaatggctcgggcgggtgggaagagtctatgacatcatcgtatag

SEQ ID NO: 203638 - DNA, 657 bp, Artificial Sequence
  derived and/or modified sequence
caagtgaaaaaggttcttttcgaggacgacgaaagatcgacagattcgtctcaacagtgctcctctgaagacgaagacatcttcgaggaaactgcacaggtcagtcctcctcggggtaaggaaaaacgccagtggcgcgccaggatgcctttactgtcagtgcagcccgtctccaacgccgattgggtctggctcgtgaaaagactccacaaactctgtatggagctgtgtaataactatatccagatgcacttggatctggaaaactgcatggaggagcctccaattttcaagggggacccattctttatcctgccaagttttcagtccgaaagttccactccttccacaggagggttctccggcaaggaaacccctagcgaagatgaccgttcacaacctagaagcgggtctacagggtctagcttgtctgtcagcgtcagagacgccgaggctcaaatccaggcatggaccaatatggttctgactgtgcttaaccagatccagattctaccggatcagacctttaccgcacttcaaccggcagtattcccatgcatctctcagttgacttgtcatgtgacagatatcagagtcagacaggcagtaagagaatggctcggccgagtgggtcgcgtatacgatatcattgtctag

SEQ ID NO: 203639 - DNA, 14877 bp, Artificial Sequence
  derived and/or modified sequence
ccgcggcatggagcgggcgtgattcatcagcatccgcgccggggcggcatgggggcgcgcgcggcggccgcctaggcgcccagggccaggcagcggcggcttccccggcccggctcgcccgcgcttctctccctgtgggcggcggcccggcgcctggaaggtcaagatggaagaaatcctgaggaagctgcagaaggaggcgtccgggagcaagtacaaagccatcaaggagagctgcacctgggccctggaaactctaggtggtctggataccattgtcaagatccctccacatgtactgagggagaaatgcctgctgcctctccagttggctttggaatccaagaatgtgaagctggcccaacatgctttggcagggatgcagaagcttctgtcggaagagaggtttgtatccatggaaacagattctgatgagaagcagctgctcaatcagatactgaatgccgtgaaagtgacgccttcgctcaacgaggacctgcaggtggaagtgatgaaggttttactatgcatcacctacacgccaacatttgatctgaatgggagtgccgtgctgaagatcgcggaggtgtgcattgagacgtacataagcagctgtcaccagcgtagcataaacactgctgtgcgggcaactctcagtcaaatgctgagtgacttgactttacagttacgacagaggcaggagaatacgataattgaaaacccagatgtcccacaggatttcgggaatcaagggtcaacagtagagtccctctgtgatgatgttgtctctgtactcaccgtcctgtgtgagaagctgcaagccgccataaatgacagccagcagctgcagcttctctacctggagtgcatcctgtctgtgctcagcagctcctcctcctccatgcacctgcacaggcgcttcacggacctgatctggaaaaacctctgccctgctctcatcgtgatcttggggaatccaattcatgacaaaaccatcacctctgctcacaccagcagcaccagtaccagcctggagtcggactctgcgtctccgggagtgtctgaccacggccgaggatcaggctgctcctgcactgcgccggccctgagcggacctgtggctcggactatctattacatcgcagccgagctggtccggctggtggggtctgtggactccatgaagcccgtgctccagtccctctaccaccgagtgctgctctaccccccaccccagcaccgggtggaagccatcaaaataatgaaagagatacttgggagcccacagcgtctctgtgacttggcaggacccagctccactgaatcagagtccagaaaaagatcaatttcaaaaagaaagtctcatctggatctcctcaaactcatcatggatggcatgaccgaagcatgcatcaagggtggcatcgaagcttgctatgcagccgtgtcctgtgtctgcaccttgctgggtgccctggatgagctcagccaggggaagggcttgagcgaaggtcaggtgcaactgctgcttctgcgccttgaggagctgaaggatggggctgagtggagccgagattccatggagatcaatgaggctgacttccgctggcagcggcgagtgctgtcctcagaacacacgccgtgggagtcagggaacgagaggagccttgacatcagcatcagtgtcaccacagacacaggccagaccactctcgagggagagttgggtcagactacacccgaggaccattcgggaaaccacaagaacagtctcaagtcgccagccatcccagagggtaaggagacgctgagcaaagtattggaaacagaggcggtagaccagccagatgtcgtgcagagaagccacacggtcccttaccctgacataactaacttcctgtcagtagactgcaggacaaggtcctatggatctaggtatagtgagagcaattttagcgttgatgaccaagacctttctaggacagagtttgattcctgtgatcagtactctatggcagcagaaaaggactcgggcaggtccgacgtgtcagacattgggtcggacaactgttcactagccgatgaagagcagacaccccgggactgcctaggccaccggtccctgcgaactgccgccctgtctctaaaactgctgaagaaccaggaggcggatcagcacagcgccaggctgttcatacagtccctggaaggcctcctccctcggctcctgtctctctccaatgtagaggaggtggacaccgctctgcagaactttgcctctactttctgctcaggcatgatgcactctcctggctttgacgggaatagcagcctcagcttccagatgctgatgaacgcagacagcctctacacagctgcacactgcgccctgctcctcaacctgaagctctcccacggtgactactacaggaagcggccgaccctggcgccaggcgtgatgaaggacttcatgaagcaggtgcagaccagcggcgtgctgatggtcttctctcaggcctggattgaggagctctaccatcaggtgctcgacaggaacatgcttggagaggctggctattggggcagcccagaagataacagccttcccctcatcacaatgctgaccgatattgacggcttagagagcagtgccattggtggccagctgatggcctcggctgctacagagtctcctttcgcccagagcaggagaattgatgactccacagtggcaggcgtggcatttgctcgctatattctggtgggctgctggaagaacttgatcgatactttatcaaccccactgactggtcgaatggcggggagctccaaagggctggccttcattctgggagctgaaggcatcaaagagcagaaccagaaggagcgggacgccatctgcatgagcctcgacgggctgcggaaagccgcacggctgagctgcgctctaggcgttgctgctaactgcgcctcagcccttgcccagatggcagctgcctcctgtgtccaagaagaaaaagaagagagggaggcccaagaacccagtgatgccatcacacaagtgaaactaaaagtggagcagaaactggagcagattgggaaggtgcagggggtgtggctgcacactgcccacgtcttgtgcatggaggccatcctcagcgtaggcctggagatgggaagccacaacccggactgctggccacacgtgttcagggtgtgtgaatacgtgggcaccctggagcacaaccacttcagcgatggtgcctcgcagccccctctgaccatcagccagccccagaaggccactggaagcgctggcctccttggggaccccgagtgtgagggctcgccccccgagcacagcccggagcaggggcgctccctgagcacggcccctgtcgtccagcccctgtccatccaggacctcgtccgggaaggcagccggggtcgggcctccgacttccgcggcgggagcctcatgagcgggagcagcgcggccaaggtggtgctcaccctctccacgcaagccgacaggctctttgaagatgctacggataagttgaacctcatggccttgggaggttttctttaccagctgaagaaagcatcgcagtctcagcttttccattctgttacagatacagttgattactctctggcaatgccaggagaagttaaatccactcaagaccgaaaaagcgccctccacctgttccgcctggggaatgccatgctgaggattgtgcggagcaaagcacggcccctgctccacgtgatgcgctgctggagccttgtggccccacacctggtggaggctgcttgccataaggaaagacatgtgtctcagaaggctgtttccttcatccatgacatactgacagaagtcctcactgactggaatgagccacctcattttcacttcaatgaagcactcttccgacctttcgagcgcattatgcagctggaattgtgtgatgaggacgtccaagaccaggttgtcacatccattggtgagctggttgaagtgtgttccacgcagatccagtcgggatggagacccttgttcagtgccctggaaacagtgcatggcgggaacaagtcagagatgaaggagtacctggttggtgactactccatgggaaaaggccaagctccagtgtttgatgtatttgaagcttttctcaatactgacaacatccaggtctttgctaatgcagccactagctacatcatgtgccttatgaagtttgtcaaaggactgggggaggtggactgtaaagagattggagactgtgccccagcacccggagccccgtccacagacctgtgcctcccggccctggattacctcaggcgctgctctcagttattggccaaaatctacaaaatgcccttgaagccaatattccttagtgggagacttgccggcttgcctcgaagacttcaggaacagtcagccagcagtgaggatggaattgaatcagtcctgtctgattttgatgatgacaccggtctgatagaagtctggataatcctgctggagcagctgacagcggctgtgtccaattgtccacggcagcaccaaccaccaactctggatttactctttgagctgttgagagatgtgacgaaaacaccaggaccagggtttggtatctatgcagtggttcacctcctccttcctgtgatgtccgtttggctccgccggagccataaagaccattcctactgggatatggcctctgccaatttcaagcacgctattggtctgtcctgtgagctggtggtggagcacattcaaagctttctacattcagatatcaggtacgagagcatgatcaataccatgctgaaggacctctttgagttgctggtcgcctgtgtggccaagcccactgaaaccatctccagagtgggctgctcctgtattagatacgtccttgtgacagcgggccctgtgttcactgaggagatgtggaggcttgcctgctgtgccctgcaagatgcgttctctgccacactcaagccagtgaaggacctgctgggctgcttccacagcggcacggagagcttcagcggggaaggctgccaggtgcgagtggcggccccgtcctcctccccaagtgccgaggccgagtactggcgcatccgagccatggcccagcaggtgtttatgctggacacccagtgctcaccaaagacaccaaacaactttgaccacgctcagtcctgccagctcattattgagctgcctcctgatgaaaaaccaaatggacacaccaagaaaagcgtgtctttcagggaaattgtggtgagcctgctgtctcatcaggtgttactccagaacttatatgacatcttgttagaagagtttgtcaaaggcccctctcctggagaggaaaagacgatacaagtgccagaagccaagctggctggcttcctcagatacatctctatgcagaacttggcagtcatattcgacctgctgctggactcttataggactgccagggagtttgacaccagccccgggctgaagtgcctgctgaagaaagtgtctggcatcgggggcgccgccaacctctaccgccagtctgcgatgagctttaacatttatttccacgccctggtgtgtgctgttctcaccaatcaagaaaccatcacggccgagcaagtgaagaaggtcctttttgaggacgacgagagaagcacggattcttcccagcagtgttcatctgaggatgaagacatctttgaggaaaccgcccaggtcagccccccgagaggcaaggagaagagacagtggcgggcacggatgcccttgctcagcgtccagcctgtcagcaacgcagattgggtgtggctggtcaagaggctgcacaagctgtgcatggaactgtgcaacaactacatccagatgcacttggacctggagaactgtatggaggagcctcccatcttcaagggcgacccgttcttcatcctgccctccttccagtccgagtcatccaccccatccaccgggggcttctctgggaaagaaaccccttccgaggatgacagaagccagtcccgggagcacatgggcgagtccctgagcctgaaggccggtggtggggacctgctgctgccccccagccccaaagtggagaagaaggatcccagccggaagaaggagtggtgggagaatgcggggaacaaaatctacaccatggcagccgacaagaccatttcaaagttgatgaccgaatacaaaaagaggaaacagcagcacaacctgtccgcgttccccaaagaggtcaaagtggagaagaaaggagagccactgggtcccaggggccaggactccccgctgcttcagcgtccccagcacttgatggaccaagggcaaatgcggcattccttcagcgcaggccccgagctgctgcgacaggacaagaggccccgctcaggctccaccgggagctccctcagtgtctcggtgagagacgcagaagcacagatccaggcatggaccaacatggtgctaacagttctcaatcagattcagattctcccagaccagaccttcacggccctccagcccgcagtgttcccgtgcatcagtcagctgacctgtcacgtgaccgacatcagagttcgccaggctgtgagggagtggctgggcagggtgggccgtgtctatgacatcattgtgtagccgactcctgttctactctcccaccaaataacagtagtgagggttagagtcctgccaatacagctgttgcattttccccaccactagccccacttaaactactactactgtctcagagaacagtgtttcctaatgtaaaaagcctttccaaccactgatcagcattggggccatactaaggtttgtatctagatgacacaaacgatattctgattttgcacattattatagaagaatctataatccttgatatgtttctaactcttgaagtatatttcccagtgcttttgcttacagtgttgtccccaaatgggtcattttcaaggattactcatttgaaaacactatattgatccatttgatccatcatttaaaaaataaatacaattcctaaggcaatatctgctggtaagtcaagctgataaacactcagacatctagtaccagggattattaattggaggaagatttatggttatgggtctggctgggaagaagacaactataaatacatattcttgggtgtcataatcaagaaagaggtgacttctgttgtaaaataatccagaacacttcaaaattattcctaaatcattaagattttcaggtattcaccaatttccccatgtaaggtactgtgttgtacctttatttctgtatttctaaaagaagaaagttctttcctagcagggtttgaagtctgtggcttatcagcctgtgacacagagtacccagtgaaagtggctggtacgtagattgtcaagagacataagaccgaccagccaccctggctgttcttgtggtgtttgtttccatccccaaggcaaacaaggaaaggaaaggaaagaagaaaaggtgccttagtcctttgttgcacttccatttccatgccccacaattgtctgaacataaggtatagcatttggtttttaagaaaacaaaacattaagacgcaactcattttatatcaacacgcttggaggaaagggactcagggaagggagcagggagtgtggggtggggatggattatgatgaaatcattttcaatcttaaaatataatacaacaatcttgcaaaattatggtgtcagttacacaagctctagtctcaaaatgaaagtaatggagaaagacactgaaatttagaaaattttgtcgatttaaaatatttctcctatctaccaagtaaagttaccctatgtttgatgtctttgcattcagaccaatatttcaggtggatatttctaagtattactagaaaatacgtttgaaagctttatcttattatttacagtatttttatatttcttacattatcctaatgattgaaaactcctcaatcaagcttacttacacacattctacagagttatttaaggcatacattataatctcccagccccattcataatgaataagtcaccctttaaatataagacacaaattctacagtattgaaataaggatttaaaggggtatttgtaaactttgccctccttgagaaatatggaactaccttagaggttaagaggaaggcagtgttctgacttctttaggtgatctgaaaaaaacacccttatcatccagtgtaccatctagagatcaccacagaatccatttttttcccagttccacaaaacactctgtttgccttcagtttttactcactagacaataattcaagtttagaaacaggtaatcagctatttgatcttaaaaggcaatgaattgttgggatatcagtgaactatgttgtatacttttgaatttttacattttataaatggaattgaaagttggataactgctttttttaaattttccaacagaagtaacaccacagttgctttgtttctttttatagcttacctgaggttcagttcttctttgtgaacctgtgagtactccacagtttactgggggaaaaggcttcagtaaagcagaggctagaattacagtatttatacatagcaacttttcataaagtagaaaaattcaaaggaagctgtctcaatttgagaataccagctgggcacggtggctcacgcctgtaatcccagcacttactttgggaggccaaggtgggcagataacctgcggtcaggagtttgagaccaggctggacaacatggtgaaacctcgtctctactaaaaatacaaaaattagccaggtgtggtaggatgcacctgtaatcccagctacttaggaggccgagacaggagaatcgctcgaacccaggaggcggacgttgcagtgagccaagattgcaccattgcactccagactgggtgacaagagtgaaactccatctaaaaaaaaaaaaaaaaaaaagtgaatactgtatcccaaagtatgttagttgtttgtttggaaatcagcattctccccgatgctctattatgggatccaaaattcttgaacataagtttaccctgtactgtgtccaaacactgttctagttctagcctgattatgggtcccaagaataaaaggatgagtaggtgtacagagctcttgacctacaattttttaagagtgttttggtaccttcccattgtcttctctataactcagtcctaacatactctgcactcgagttaccagccatccacactgacatcagatttcaaccagaaccatcactgagtgacagcagtacttctcagaggtatttgcagcttgatgcaaagtagtctctaatgagtaggcattcaggtggttcttcccagcaggtggagaagaaagggaggagatgaagaacactgagaggggagtggcaccttcccaggctgcccagctcagtctcttgccctgttcctgtgactcagctgcccactcccccaactttgtttccctccctcccagtctctgaaagtgtcaggtgtttctctcctcacagtctcttttgcagcaacagtaagacaaaattcaaggcagccttttaaagttacgaacagttattagcatgtatttacagacctaagcagaatgagagtttatacattgtttttagttgcctgtatttatagccaaaagtatattaccttaaagttgagatctttctcttcttttcctaaattttggtaaagtgtgcttcatgaaacaaacatctggaaaactccaagtataagagaccctggactgatgatggcccagccaagtatatggagggacagagttctctctgtcattaatgaggacatcggttttcacaattgaacctcatgcactgtccacagcatctcacctagctcctgtatctcctgatctgcttttaaaaatagttagttaggctgcctttttacaccaccttctctctctccccttgtggtaattttccagccttccccatagatataaaactagaacacctttatgatttggggtctatgtaatgactgaccgataagaacccaggcagatgctaacatacttaacagctcgcattaaaatactttaaatcaggcgtgatggctcattcctgtaatctcaagcactttgggaggctaaggtgggtggatctcttgaggtcaggagttcgagaccaacctggccaacgtggtgaaaccccgtctctactaaaaatacaaaattagccgggcatggtggcagctgcctgtaatcccagctactcgggaagctgaggcaggagaattgcttgaacctgggaggtggggattgcagtcagccaagattgttctgcagcatgggtgacaaagtgagacttcgtctcaagtaaataaaactaaaatttttaaatcaaacatgacaaaaatgttaatataattcagaagtaccttgaaattgaaacatatttgtgcaatgatcattaggctttttgtccttgttgttttaaaatgaggcttatacagagtgagttgagagtcaagtagccttcgctgtgagacggtaatgcagttatataatagatacccttgactttgccagattcatcacaatactgcttatacaggaaagttttctcagaaaggaaaatccattagtatcagtcccatcaagccaaacagaatgaagacctttgatagtaatagcaagaggttacaaatagcagggaggaggcgagtagtgaatgtcactgtgattgcaaacccttacctgtattatcacacgtagtcctcacaacaaccttgtgagacaagtgttgtgttcctcattttttcagaggggaacacagacccagagaggttaagaaatttgcccaagataacaagtaaaaggcaaagttggttgcaaaagaggtgtttctgaattcaagggccatactctctctctgacaacatgctctaagtccatagagtaagcactctagtatgaaaaaaagtttcaaggaacgaggccatgaaaatgagactatttgacatctcagatctgtctgggatgttatggaggtttttaaaaataaagttgaaaaaagaaaatgaatcatgtttatacataaaaaaatcacatgtaacacatttcaagtgtttgaaaataaaaccaaaatctaaactttagtcttcaagcagacattcagtgttactttagaaaactcactgaattaggtggaaatgatggaataatactattcatggccagctattaacacagaagaacatggcagtgtgtgtctggaacggcatgcacaatttgtaaacctttttcaaatatcatttaatcaactcagaataaagtgccctgtagccaacagtgcctctttacttgcttctctgggaaatacatggtactaaattagtagcacaaagtttgggaatatgcaaaataatggataaccatttttcaaaatgtacattctctgaagaggaagcagctggttggacaggatttcttgaagagccaggtgctaagggcatcaggtcgacatccatagtaaccatgtgccataacatctacacatttccacttgttttacagacaaggtaacaggcagaaggaaaatccagagtcttgcagtaagcagatgacaaaacttcaatatgcttgggcaccacttaggtgaccccagggagatttagtgtggccttaggaaagcaaaagagcactttttattggaaatatgagcttgtcactgggaaagatttgtaaaattgatcaagaacttgatttataattatgcctcaaaaaaaaaagttctcatttagtagtggagcaatctagaaaacataccttttttgtttgtttggaagatcctctttccctggctgtattgtagtgtttgctatttgatgtggaaataactaataacttaagattttggaacagaacaccctttagatttccaaaacacaattcttatttcagggaagacagaccaaaaatatctcctgagatcattggtttctttataaattgtggtaccactccatcattgaagagaaaccactaccacaccactagcaccatacagaaccttttctctgtatctttgtacaatactacaaaggggtaccagggaggagagagtggctgaccactttagtgacaaaacagcactccactgctggtgaatcccatctaattatggtccttccacccttttcaaccaccaacaactgttcgtactgttaattcctatcctgaaggtttaaccagtggttgtctagtatcttctgtctttagaacagtggttctcaaactttagtacacatcagcatcacctggagggcctttttttaaaataagacacagattgctgggctcatggtcagagttcccagttaagtaaatcaggaaatttgtatttctaacaagtttataggtgaggccaatactgctgttttgggaactatgctttgagaaccactgccttgaaaaaatttccaacttctacctttaagatcagcctgacttatcaaacgctagagaaaaactgaatctacccttgggcagatgacttgggattggattctatacagcagtcttgctcaatcttcccagtttccagttttattataccaacaattggtttttacaagctagaagacaatgaatgtataagttctatggaacagtgagataaatctaagcttcttgtctttgtatttagaaacattgattctatggatgatcatttgtatcatgttgaccctttgacttgtactgaaggtgattttaaatttaagtatgtagtgtttgaatttcttccatccatgtcgttttaatgagatgtttccatgtcagctcctttacagccttggctcctggcttacagatttttgaatagttgtttgcttgccagttgttttacatctttcattggccaccaaaatattagccatttgagatgagatgagactacttgttgtaccttcatctttcatttaattttctggcgtaaattaacattttaatttcatatatatctgtaaagagtctacccaaaggcttcacggaaatttgcaaaatgaactaattcccttttaagcagcaggtgtgcctgtttttgacttttcagtaaatatgttgtttgtgcacatatctacatggtggagaccatattcattatttcatcttccaaataatgggaaaaatataaaagtgaatcagtgtgctttgggaattcagtgaaatcatgttaactcatatagagggggccttagtttatctcttctttactgaattaattagttttggaaattcttttaccattaaaaaaaattaaggaccatacagagaatgatttaagaaaaaacaagtcacttaaaaatcatcacctatttataaactgtattaattacacataatgcttattgattcaatgaggtttctctaaagacttctgcttaataaatatgctgacttcatttaaattagtttagactattgtaggaatggaaggaaatgattatatttactagaattagtgagatcagaaagcatatcagaatgttgatgatatcaaggagacaatctacagagtttttgcctctgtggatggaaataagggtgtttttttttggttttttttttactttagtttcccataatttttggaaattatgtgtgcatttagttcttttagtaacactgattttaaaattaaatttcaaaagtcaatctctaagagtaatttatttttgttttaccaaccagtgccaaaaaggagaggagggaatccaaaagccaatcttttgaaccaatgtgtaaaagattatgttttttcttaaagttagggaggctcgggccctgacactgccagccccagtgagcatccctggctacctcgggattatgtgcaagctgctttgtcctacatttctttcatctggttcttattgggagtgcttctctctaataaaaattgatttcccacaaaataggcaaagctgaacaaagatgaatgcttttgataagttgggtttcacttcagttgaaacaatgtgatagaatatccaggtgtggcatgatggggcaggaggaggtgcctagagggaaaagttatttttgtttcttagtgttgtgttgtggggatgggacagataagaataagatgtttattgccctaatcatgctaagagactattattcaatatgcttttcccgcttttctaagaggaataaacttagacaaattacattataaacagttcccctactactatctcccactctagataaagccagtgggtggtatgggtccttttattccttatagtattatgccaaagaatcaacttattttcattgaagattataaataaatgaagcttgttatagccataatgatttgagtcagtataccattttacctataaaatgcaaaattcatccttgcaaccccattcaccaggagccttgaagcattttgtttactccaaaggccttgtcaaggaagcataattttttgttttgccttcttatttagtcagtttggtcatatttacttaaaaaaacaaactgaaaatcacactcctttatatgttgatataactgattttatagaatctgtctgttctttgtttaacaggtctctgtaagcaagcttgcaagtgtattttgtgtacattttatctgaggtggaaatgaaaattctaaagagaaaatattttaaaagatattgtatttatgttgcttgtgttgtagaataaagattcaaatgcattaaaaatctggtacatgaaacaattgtgtttactgaataaatatatataaata

SEQ ID NO: 203640 - DNA, 6534 bp, Artificial Sequence
  derived and/or modified sequence
atggaggagatcctgaggaagctgcagaaggaggccagcggcagcaagtacaaggccatcaaggagagctgcacctgggccctggagaccctgggcggcctggacaccatcgtgaagatcccccctcatgtgctgcgggagaagtgcctgctgcccctgcagctggccctggagagcaagaatgtgaagctggcccagcacgccctggccggcatgcagaagctgctgtctgaggagagatttgtgtccatggagacagacagtgatgagaagcagctgctgaaccagatcctgaatgctgtgaaggtgacccccagcctgaatgaagacctgcaggtggaggtgatgaaggtgctgctgtgcatcacctacacccccacctttgacctgaatggatctgctgtgctgaagattgctgaggtgtgcatcgagacctacatcagcagctgccaccagaggagcatcaacacagctgtgcgggccaccctgagccagatgctgagtgacctgaccctgcagctgcggcagaggcaggagaacaccatcatcgagaacccagatgtgccccaggactttggaaaccagggcagcacagtggagagcctgtgtgatgatgtggtgtctgtgctgactgtgctgtgtgagaagctgcaggccgccatcaatgacagccagcagctgcagctgctgtacctggagtgcatcctgtctgtgctgagcagcagcagcagctccatgcacctgcaccggcgcttcacagacctgatctggaagaacctgtgcccagccctgattgtcatcctgggcaaccccatccatgacaagaccatcaccagcgcccacaccagcagcaccagcaccagcctggagagtgacagcgccagccctggggtgtctgaccacggccggggcagcggctgcagctgcacagccccagccctgagcggccctgtggcccggaccatctactacatcgctgctgagctggtgcggctggtgggctctgtggacagcatgaagcctgtgctgcagagcctgtaccaccgggtgctgctgtaccccccaccccagcaccgggtggaggccatcaagatcatgaaggagatcctgggcagcccccagaggctgtgtgacctggccggccccagcagcacagaaagtgagagcaggaagaggagcatcagcaagaggaagagccacctggacctgctgaagctgatcatggatggcatgacagaggcctgcatcaagggcggcatcgaggcctgctatgctgctgtgtcctgtgtgtgcaccctgctgggcgccctggatgagctgagccagggcaagggcctgtctgagggccaggtgcagctgctgctgctgcggctggaggagctgaaggatggagctgagtggagccgggacagcatggagatcaatgaagctgacttccgctggcagaggagagtgctgagcagcgagcacaccccctgggagagcggaaatgaaagaagcctggacatcagcatctctgtgaccacagacaccggccagaccaccctggagggggagctgggccagaccaccccagaggaccacagcggcaaccacaagaacagcctgaagagccctgccatccctgagggcaaggagaccctgagcaaggtgctggagacagaggccgtggaccagccagatgtggtgcagaggagccacacagtgccctacccagacatcaccaacttcctgtctgtggactgcaggaccaggagctatggcagccgctacagcgagagcaacttctctgtggatgaccaggacctgagcaggacagaatttgacagctgtgaccagtacagcatggctgctgagaaggacagcggccgcagtgatgtgtctgacatcggcagtgacaactgcagcctggctgatgaggagcagaccccccgggactgcctgggccacaggagcctgaggacagctgccctgagcctgaagctgctgaagaaccaggaggccgaccagcacagcgcccggctcttcatccagagcctggagggcctgctgccccggctgctgagcctgagcaatgtggaggaggtggacacagccctgcagaactttgccagcaccttctgcagcggcatgatgcacagccctggctttgatggcaacagcagcctgtccttccagatgctgatgaatgctgacagcctgtacacagctgcccactgtgccctgctgctgaacctgaagctgagccacggggactactacaggaagaggcccaccctggcccctggggtgatgaaggacttcatgaagcaggtgcagaccagcggcgtgctgatggtgttcagccaggcctggattgaggagctgtaccaccaggtgctggacaggaacatgctgggggaggccggctactggggcagccctgaggacaacagcctgcccctcatcaccatgctgacagacattgatggcctggagagcagcgccatcggcggccagctgatggccagcgctgccacagagagcccctttgcccagagcagaagaattgatgacagcacagtggccggcgtggcctttgcccgctacatcctggtgggctgctggaagaacctgattgacaccctgagcacccccctgactggaaggatggccggcagcagcaagggcctggccttcatcctgggcgctgagggcatcaaggagcagaaccagaaggagagagatgccatctgcatgagcctggatggcctgaggaaggccgcccggctgagctgtgccctgggcgtggccgccaactgtgccagcgccctggcccagatggctgctgccagctgtgtgcaggaggagaaggaggagcgggaggcccaggagcccagtgatgccatcacccaggtgaagctgaaggtggagcagaagctggagcagatcggcaaggtgcagggcgtgtggctgcacacagcccacgtgctgtgcatggaggccatcctgtctgtgggcctggagatgggcagccacaacccagactgctggccccacgtgttccgggtgtgtgaatatgtgggcaccctggagcacaaccacttcagtgatggagccagccagccccccctgaccatcagccagccccagaaggccactggatctgctggcctgctgggggaccctgaatgtgagggcagccccccagagcacagccctgagcagggccgcagcctgagcacagcccctgtggtgcagcccctgagcatccaggacctggtgcgggagggcagccggggccgggccagtgacttccggggcggcagcctgatgagcggcagcagcgctgccaaggtggtgctgaccctgagcacccaggccgaccggctgtttgaagatgccacagacaagctgaacctgatggccctgggcggcttcctgtaccagctgaagaaggccagccagagccagctgttccacagcgtgacagacacagtggactacagcctggccatgcctggagaggtgaagagcacccaggacaggaagagcgccctgcacctgttccggctgggcaatgccatgctgcgcatcgtgcgcagcaaggcccggcccctgctgcacgtgatgcgctgctggagcctggtggccccccacctggtggaggccgcctgccacaaggagcggcacgtgtcccagaaggctgtgtccttcatccatgacatcctgacagaggtgctgacagactggaatgaaccaccccacttccacttcaatgaggccctcttccggccctttgagcgcatcatgcagctggagctgtgtgatgaagatgtgcaggaccaggtggtgaccagcattggagagctggtggaggtgtgcagcacccagatccagagcggctggaggcccctcttcagcgccctggagaccgtgcatggaggcaacaagtctgagatgaaggagtacctggtgggggactacagcatgggcaagggccaggcccctgtgtttgatgtgtttgaggccttcctgaacacagacaacatccaggtgtttgccaatgctgccaccagctacatcatgtgcctgatgaagtttgtgaagggcctgggggaggtggactgcaaggagattggagactgtgccccagcccctggggcccccagcacagacctgtgcctgcctgccctggactacctgcggcgctgcagccagctgctggccaagatctacaagatgcccctgaagcccatcttcctgagcggccgcctggccggcctgccccggcggctgcaggagcagagcgccagcagtgaagatggcattgaatctgtgctgagtgactttgatgatgacaccggcctgattgaggtgtggatcatcctgctggagcagctgacagctgctgtgagcaactgcccccggcagcaccagccccccaccctggacctgctgtttgagctgctgagagatgtgaccaagaccccaggccctggcttcggcatctatgctgtggtgcacctgctgctgcctgtgatgtctgtgtggctgcggcgcagccacaaggaccacagctactgggacatggccagcgccaacttcaagcacgccatcggcctgagctgtgagctggtggtggagcacatccagagcttcctgcacagcgacatccgctatgagagcatgatcaacaccatgctgaaggacctgtttgagctgctggtggcctgtgtggccaagcccacagagaccatcagccgggtgggctgcagctgcatccgctacgtgctggtgacagctggccctgtgttcacagaggagatgtggaggctggcctgctgtgccctgcaggatgccttcagcgccaccctgaagcctgtgaaggacctgctgggctgcttccacagcggcacagagagcttctctggagagggctgccaggtgcgggtggccgcccccagcagcagccccagcgctgaggccgagtactggaggatccgggccatggcccagcaggtgttcatgctggacacccagtgcagccccaagacccccaacaactttgaccacgcccagagctgccagctgatcatcgagctgcccccagatgagaagcccaacggccacaccaagaagtctgtgtccttccgggagatcgtggtgtccctgctgagccaccaggtgctgctgcagaacctgtatgacatcctgctggaggagtttgtgaagggccccagccctggagaggagaagaccatccaggtgcctgaggccaagctggccggcttcctgcgctacatctccatgcagaacctggccgtcatctttgacctgctgctggacagctacagaacagcccgggagtttgacaccagccctggcctgaagtgcctgctgaagaaggtgtctggcatcggcggggccgccaacctgtaccggcagagcgccatgtccttcaacatctacttccacgccctggtgtgtgctgtgctgaccaaccaggagaccatcacagctgagcaggtgaagaaggtgctgtttgaagatgatgagaggagcacagacagcagccagcagtgcagcagtgaagatgaggacatctttgaggagacagcccaggtgtccccaccccggggcaaggagaagaggcagtggagggccaggatgcccctgctgtctgtgcagcctgtgtccaatgctgactgggtgtggctggtgaagaggctgcacaagctgtgcatggagctgtgcaacaactacatccagatgcacctggacctggagaactgcatggaggagccccccatcttcaagggggaccccttcttcatcctgcccagcttccagagcgagagcagcacccccagcactggaggcttcagcggcaaggagacccccagtgaagatgacaggagccagagccgggagcacatgggagagagcctgagcctgaaggccggcggcggggacctgctgctgccccccagccccaaggtggagaagaaggaccccagcaggaagaaggagtggtgggagaatgccggcaacaagatctacaccatggctgctgacaagaccatcagcaagctgatgacagagtacaagaagaggaagcagcagcacaacctgagcgccttccccaaggaggtgaaggtggagaagaagggggagcccctgggcccccggggccaggacagccccctgctgcagaggccccagcacctgatggaccagggccagatgaggcacagcttctctgctggccctgagctgctgcggcaggacaagaggcccaggagcggcagcacaggcagcagcctgtctgtgtctgtgagagatgctgaggcccagatccaggcctggaccaacatggtgctgactgtgctgaaccagatccagatcctgcctgaccagaccttcaccgccctgcagcctgctgtgttcccctgcatcagccagctgacctgccacgtgacagacatccgggtgcggcaggccgtgcgggagtggctgggccgggtgggccgggtgtatgacatcatcgtgtag

SEQ ID NO: 203641 - DNA, 657 bp, Artificial Sequence
  derived and/or modified sequence
caggtgaagaaggtgctgtttgaagatgatgagaggagcacagacagcagccagcagtgcagcagtgaagatgaggacatctttgaggagacagcccaggtgagccccccccggggcaaggagaagaggcagtggagggccaggatgcccctgctgtctgtgcagcctgtgtccaatgctgactgggtgtggctggtgaagaggctgcacaagctgtgcatggagctgtgcaacaactacatccagatgcacctggacctggagaactgcatggaggagccccccatcttcaagggggaccccttcttcatcctgcccagcttccagagcgagagcagcacccccagcactggaggcttcagcggcaaggagaccccatctgaagatgacaggagccagcccaggagcggcagcacaggcagcagcctgtctgtgtctgtgagagatgctgaggcccagatccaggcctggaccaacatggtgctgactgtgctgaaccagatccagatcctgcctgaccagaccttcaccgccctgcagcctgctgtgttcccctgcatcagccagctgacctgccacgtgacagacatccgggtgcggcaggccgtgcgggagtggctgggccgggtgggccgggtgtatgacatcatcgtgtag

SEQ ID NO: 203642 - DNA, 6534 bp, Artificial Sequence
  derived and/or modified sequence
atggaggagatcctgcggaagctgcagaaggaggccagcggcagcaaatataaggcgatcaaggaatcatgcacatgggctctggagacacttgggggactagatacaatcgtcaaaattccgccccatgtgctgagagagaaatgcctccttcctctgcagctcgcattggagtcaaagaatgtcaaactagcccagcacgcactggccgggatgcagaagcttttgtcagaggaaagattcgtaagtatggagacagattctgacgaaaagcaactccttaaccaaatattgaatgccgtgaaggtaactccttctctgaacgaggacctgcaggtcgaagttatgaaggtgctgctctgcatcacctacacccccacttttgatttgaacgggagcgctgtgctcaaaattgctgaggtatgtattgagacctatatctcgtcctgccaccagagaagcatcaacaccgccgttcgtgctacgctgtctcaaatgctttctgacttaacactgcaactccgccagcgacaggagaacacaattattgagaatccagacgtgcctcaggacttcggcaatcagggatctactgtcgagagcctgtgcgacgacgttgtgagcgtattgaccgttctgtgcgaaaaactgcaagcggctattaacgactcacagcagcttcagttgctgtatttggagtgtattctgagcgtcctgagttccagttcgagctctatgcacttgcaccggaggttcaccgacctgatctggaagaatctgtgtcctgcgcttatcgttattctgggcaacccgattcatgataaaactattacatccgcacatacatcgtccacctctaccagcctcgaatcagatagcgctagccctggcgtaagtgaccacggacggggatctggctgcagctgcacagcgcctgccttgagcggcccggtcgcaaggacgatatactatattgctgccgaactcgtacggctcgtgggaagtgtcgattcgatgaagcccgtgctccaaagtctgtaccacagagttcttctctaccctcctccgcagcaccgtgtggaggccataaaaatcatgaaggaaatcctggggagcccccagcgactatgtgatctggccggcccaagcagcactgagagcgagtccagaaagagatctatcagtaaaagaaagagccacctcgacctgttaaagttgatcatggatggcatgaccgaggcctgcatcaaaggcggaattgaagcctgttacgctgctgtatcttgtgtatgtacactgttgggagccctggacgagctgagccagggcaagggtttgagtgaagggcaggtccagctgctgctgcttcggctcgaggaactaaaggacggcgccgaatggagccgtgactcaatggagatcaatgaggccgattttcgatggcagcgcagggtgctgtcctcagaacacacgccttgggagtccgggaacgagcgctccctcgatatcagcatctccgtgaccacagacaccggccagaccacccttgaaggcgagctgggacaaacaacccctgaggatcactccggaaaccacaaaaatagtttaaagtcccctgctattccggaaggcaaggaaaccctgtctaaggttctggaaaccgaagccgtcgatcagccggacgtggtgcagagatcccacaccgtcccataccctgacattactaatttcttgagcgtggattgtcggacgaggagctatggaagtcgatactccgagagtaatttcagtgttgatgatcaggatctgagccgcaccgaattcgatagttgtgaccaatattctatggcagccgagaaagactctggcaggtctgacgtttcagatattgggagtgataactgtagtttggctgacgaggaacagactccaagggattgtctcggacaccgcagcctccggaccgcagccttgtctctgaagcttttaaagaaccaggaggccgaccagcactcagcaaggctgtttatacaaagtttagagggcctgcttccgagactgttgagcttatctaacgtggaggaagtggacactgctttgcagaattttgcttctaccttttgcagtgggatgatgcattccccaggatttgatgggaacagttccctctcctttcagatgctgatgaacgctgattcgctgtacacagccgctcattgtgctcttttgctgaacttgaagttgtctcatggagattactataggaagaggcctacgctcgcgcccggcgtcatgaaagattttatgaaacaggtgcagacgagcggggtcctgatggtgttttcccaggcctggatcgaggaactgtaccatcaggtgttggatcgtaacatgcttggcgaggctggctactgggggtctcctgaagacaactcgcttccattaataactatgctgaccgacatcgacggcctggaatcatcagccatagggggccagcttatggccagtgccgccaccgagagtcccttcgcacagtcacggaggatcgatgatagtacagtcgcaggagtggcttttgcccgctatatcctagttggctgctggaagaacctcatcgatacacttagtaccccactcacaggtcgcatggccgggtcaagcaagggcctggccttcatcctgggagccgaggggatcaaggaacaaaaccagaaggagcgtgacgccatttgcatgagtctcgatggactccggaaggctgccaggctgagttgtgccctgggagttgctgctaattgcgcttccgccctggcgcagatggccgctgcctcatgtgtgcaggaggagaaagaggaaagggaagcacaagagcccagtgacgcaatcacccaagtcaaactgaaggtggaacagaaactcgaacagatcggaaaagtgcagggcgtgtggttgcatacagcacacgttctgtgcatggaagcaatcctgtcagtcgggcttgagatggggtcccacaatccagattgttggccccatgtgtttcgtgtttgcgaatatgtaggtaccctggagcataatcacttctctgacggcgcgagccagcctccactgactattagccagccccagaaagccaccggatcagcagggttgttgggcgacccagagtgcgaaggcagcccgccagagcactcacctgaacaggggcgcagcctcagcacagccccagttgtgcagccacttagtattcaggacctggtgagagagggtagccggggccgcgcctctgacttcagaggcggcagcttgatgtccgggtcaagtgctgccaaggtggtgcttactctgtccacccaggccgatcgcctgtttgaggacgccacggacaagcttaaccttatggccctcgggggattcctgtatcagctcaaaaaagcatctcaaagccaattgtttcacagtgttacagataccgtggactacagtctggcaatgccaggagaggtgaagtccacccaggatagaaaatcggcacttcacctttttaggcttggaaatgcaatgctgagaatcgtgaggtccaaggcccgcccgctgctgcatgtgatgcgatgttggagtctcgttgcacctcatctggtagaggccgcctgtcataaagagagacacgtctcccagaaggcagtgagctttatccacgacatcttgacagaagtcctgaccgattggaacgagccaccccatttccatttcaacgaggccctttttcgcccattcgagagaatcatgcagctggaactgtgcgacgaagacgttcaagatcaagtagtgaccagcattggtgagcttgtggaagtctgctcgacccagattcagtccggatggcggccactcttttccgccctagaaacggtacatggggggaataagtccgagatgaaggagtacctcgtgggtgactacagtatggggaaaggacaagcccctgtattcgatgtgtttgaggccttcctgaatacagacaatatccaggtgttcgccaatgccgccacctcatatatcatgtgcttaatgaaattcgtgaagggactgggagaggtcgactgcaaagagatcggagactgcgcccctgctcccggcgccccttcaaccgatctttgtttgcccgcactggattaccttcggcgatgtagtcaacttctggccaagatttacaaaatgccgctcaaacctatcttcctgtccgggcgtctcgccgggctgccccgccggcttcaagagcagtctgcttcttccgaagacggaattgagtctgtcctgagcgacttcgacgatgacacaggactgatcgaagtgtggattattctgttggagcaactcacagccgctgtctccaattgtccaaggcaacatcagccaccaacactcgatctgctgttcgaactgctgcgcgacgtcactaagaccccagggcccggcttcggaatatacgccgtcgtccacttgctcctacccgtcatgtctgtgtggctgagaaggtctcacaaggaccactcttactgggacatggcctcggccaatttcaagcacgctatcggcttgagctgcgagcttgtggtggaacacatccagtccttcctccatagtgacatccgctatgagtccatgatcaatacgatgctgaaagatctatttgaacttctggtggcttgtgtcgcgaaacccaccgagactatttcacgagtgggctgcagctgtattcgatacgtcctggttacagccggcccagtgtttaccgaggagatgtggcgcttggcctgctgcgcccttcaggatgcgttctccgccacactgaagccagtcaaggacctgctggggtgctttcacagtggtacagagtcattttctggggaaggctgccaggtccgggtggcagcacctagtagtagcccaagcgccgaggccgaatactggcgtatcagagcaatggcccaacaggtttttatgctagatacccagtgcagccccaagacgcccaataattttgatcatgcacagtcttgtcagctgatcattgaactccctccagatgaaaagcccaacggtcatactaaaaaatccgtttcatttcgcgagatcgttgtctctttgctgagccatcaggtgctgctccagaatctgtacgacatcctgctggaggagtttgtgaaaggtccctccccgggcgaagagaagaccatccaagtccctgaagcaaaacttgcgggtttcctgcggtacatatccatgcagaatctggccgtgatctttgacctgctgctcgattcctatagaaccgctagggagtttgatacctcgcccgggttaaagtgcctactgaagaaggtgtcaggcatcgggggagctgctaatctttaccgacaaagcgccatgagctttaacatttactttcatgctctcgtgtgcgcagttctgactaaccaggagacgatcaccgctgaacaggtaaaaaaggtcctcttcgaggacgacgagcgttctactgactccagccagcagtgcagcagtgaggacgaggatatcttcgaagaaaccgcccaagtctcccctccccggggcaaagaaaagcggcagtggagagccagaatgccactgctctcggtgcagcctgtctcaaacgctgactgggtatggttggtgaaaaggctgcacaagctgtgcatggagctctgtaacaattacatccagatgcatctggatctcgaaaactgtatggaagagccccctattttcaaaggcgacccctttttcatcttaccctcctttcagtctgaaagctccactccttccacaggtgggttctccggaaaggaaacaccgagtgaagatgaccgaagccagtcacgggaacacatgggcgagtccctttccctcaaagccgggggcggtgatctcctgctgccaccaagcccgaaagtcgagaagaaagacccttctaggaaaaaggagtggtgggagaacgccgggaataagatctacacaatggccgccgataagaccatttccaagttgatgaccgaatacaagaagagaaaacaacagcacaatctcagcgcttttccaaaagaagtgaaggtggagaagaagggcgaaccccttgggcctcggggtcaagactctcctctgctgcagcgaccccagcatcttatggatcaaggacagatgaggcattccttttcagctggccctgaattgctgcggcaggataagagacctcgcagtggcagtaccggatcctccctcagtgtgtctgtaagagatgccgaggctcagatccaggcctggaccaacatggtactgacagtgttgaaccagatccaaatactccccgaccaaaccttcactgcactccagcccgcagtctttccctgtatctcccagctgacttgccacgtcaccgacatccgggtcaggcaagcagtccgcgagtggcttggtcgcgtgggcagagtgtacgatatcatcgtctag

SEQ ID NO: 203643 - DNA, 657 bp, Artificial Sequence
  derived and/or modified sequence
caggtgaagaaggtgctgttcgaggacgacgagcggagcaccgacagcagccagcagtgtagttccgaggacgaggacatatttgaggaaacagcccaagtaagccctcctagaggcaaagaaaagcggcagtggagagcccgtatgcctctgctgtctgtccaaccagtaagtaatgctgattgggtgtggctggtgaagagactccacaagctgtgcatggaattgtgtaacaactacatccagatgcacctggacttggagaattgtatggaagagcctcctattttcaaaggtgacccattctttattttgcctagttttcagtctgagagcagcacgccatcgactggcggcttttcagggaaagaaaccccaagcgaggacgatcggtctcaaccaagatcaggaagcacgggttccagcctcagcgtaagcgtcagggatgccgaagcacagatccaggcatggactaacatggttttgacagtgctgaatcagatacaaatactgccagatcaaactttcacagccctgcagcctgcggtgtttccctgcatcagccagctgacatgccacgtgacagatattagagtgcgccaggccgtcagagagtggctcggcagagtcggacgggtttacgatatcattgtctag

SEQ ID NO: 203644 - DNA, 6534 bp, Artificial Sequence
  derived and/or modified sequence
atggaagaaatactgcggaaactccaaaaggaggccagcgggtcaaagtataaggctattaaggaatcctgcacatgggccctcgaaactctaggcggacttgacactatcgtgaaaatcccccctcacgtactgagagagaagtgtctcctcccgctccagctcgccctagaatcaaagaatgtgaaactggcacagcacgcactagcaggcatgcagaagctgttgagcgaggaaaggttcgtgagcatggagaccgatagtgacgaaaagcaactgctgaatcagatccttaatgctgtgaaggtgactccttctctcaacgaagacctccaggtggaagtgatgaaggtcctgctttgcatcacatacacgcccactttcgatctgaatggctcagccgtccttaaaatcgccgaagtgtgtatcgaaacatacatctcttcgtgtcatcagagatctatcaatactgcagtgcgggctacgctctcccagatgttgtcagatcttacgttgcagctgcgacaacgccaagagaatactataatagagaatcccgatgtgcctcaggactttggaaaccagggatccacagtagagagtctctgcgacgacgtagtcagcgttctgacagttctgtgcgaaaaactccaagccgctataaacgactcccaacagctccaactgctgtatctggagtgtattctgagtgtcctttcatcctcttcttcctctatgcacctgcaccgaaggtttacagacttaatatggaagaacctttgccccgcactcatagtgatactgggaaatcccatccatgataagaccatcacaagtgcccacactagcagtacatcaacatccctggagtctgatagtgctagccctggtgtctcagaccacgggcgtggttccgggtgctcctgtactgctccagcactgagcggccctgtggcccgtacaatctattacattgcagccgagctagtgaggcttgtcggttctgttgatagcatgaaaccagtactgcagtcactataccatcgggtgcttctctatccacctccccaacatagggtagaagctatcaagattatgaaagaaatcctcggctccccacaaaggctttgcgatctggccggaccttcttccactgaatctgaatccaggaagcgctccattagcaagcggaagtcccacctcgacctgcttaaactcattatggacgggatgaccgaagcctgtattaaggggggaatagaggcctgctacgcagccgtctcctgtgtctgtacgctgttgggagctctggatgagctttcacagggcaaggggctatccgagggacaagtacagctgcttttgctccgcctcgaagagcttaaagacggcgcagaatggagccgtgactcaatggagatcaatgaggctgattttcgctggcagcgtcgggtgctgtcatctgagcatacaccatgggaaagcggcaatgagaggagcctcgatatttcaattagcgttactaccgataccggacagacaacactcgagggcgaactcggtcagacaacgccggaggaccatagcggaaatcacaaaaattctttaaagtctcctgctattccagaaggcaaagaaaccctgtcgaaagttctggaaaccgaggcagtggaccagcctgacgtggtccaaaggagccatactgtcccctatccagacataaccaacttcttatccgtggattgcaggacccggtcgtatggaagccgctactcagaatctaattttagcgtcgatgatcaggacctgagccgcaccgagttcgacagttgtgatcagtacagcatggccgcagaaaaagattcaggacgctccgatgtctccgatattggcagcgataactgtagcctagccgacgaggaacagacaccccgtgattgcttagggcacagatccctgagaacagccgctctgtccctcaagttgctcaaaaaccaggaggccgaccaacattctgcccgactgtttatacaatccctcgaaggcctgttgccgagactgttgtcactctccaatgtggaagaggtggacaccgcgctccaaaatttcgccagtacattctgctctggaatgatgcactccccaggcttcgacggcaattcgagcttgtcattccagatgttgatgaatgccgatagtctgtacaccgccgcacactgcgcacttttgctcaatcttaaacttagccatggtgactactatcgcaaacggccaacgcttgcacctggcgtcatgaaggattttatgaagcaggtccaaacatcaggtgtcctgatggtgttctctcaggcttggattgaagaactctaccaccaggtactggaccgtaacatgttgggtgaagcagggtattgggggagcccagaagataactcccttccgttgatcaccatgcttacagacatcgacggcttggaatccagtgcaattggtggccagttaatggcatcagcagctaccgagtctccctttgcccagagtaggcgcattgatgatagtactgttgcgggtgtggctttcgcacggtatatcctggttggttgttggaagaacctgatcgacaccctgtccacgcccctaacgggtcggatggccggtagcagcaaagggctagcatttatactgggcgcagaaggcattaaggaacagaaccagaaggaacgagatgccatctgtatgtcactggatggtctacggaaagcagctagattaagctgcgcgcttggcgtggccgcaaattgtgccagcgcactcgctcagatggcggctgcgtcgtgtgtccaagaggaaaaggaagaaagggaagcgcaagagccgagtgatgctattacacaggttaagttgaaggtagagcaaaagttagaacagattggaaaggttcagggagtgtggctgcacacagcacacgtgctgtgtatggaggcgattctctccgtgggacttgagatgggcagccacaatcccgattgctggcctcatgtgttccgcgtgtgtgagtacgtgggtaccctggaacacaaccacttcagtgacggcgcaagtcagccacccctgacaattagccagccccagaaggccacggggtccgctggcctcctgggggaccccgaatgcgagggcagccccccagagcactctcccgaacaagggagatcactaagcactgccccagtagtgcaaccactgagcatacaagatctggtacgggaggggtctcgcggtcgagcaagtgatttcaggggcggaagcctcatgagtgggtcctcagcagcaaaggttgtgctgaccctaagtacccaagctgacagactgttcgaagatgccacagataaactgaatctgatggccctgggaggatttctctaccagctgaaaaaagcaagccagtcgcagctctttcactcagtgaccgacaccgtggattattctctcgcaatgcccggagaggtgaaaagcacccaggaccggaagtccgctctccatttgtttagactaggcaacgcaatgttacgcatagtacgcagtaaggcgcgtcctttgctgcacgtcatgagatgttggtccttggtcgctcctcacctcgtggaggctgcctgccacaaagagcgccacgtttctcagaaggctgtgagtttcatacacgatatcctcaccgaagtccttacagactggaacgagccaccccacttccatttcaacgaggccttgttccgacctttcgagagaatcatgcaactcgagctgtgtgacgaggatgttcaagatcaggtagtcacttccatcggcgaattagtcgaggtgtgcagcactcagatacagtcaggttggagacctctattttccgctctggagacagtgcacggagggaacaaatcagaaatgaaggaatacctcgttggagattacagtatgggaaaaggacaggcccctgtgttcgacgtgtttgaggcctttttgaacaccgataatatacaagtgtttgccaacgccgcaacaagttacattatgtgtctaatgaaattcgtgaagggattgggggaggtggattgtaaagagatcggggactgtgctccagctcccggagccccttctactgatctgtgcctacctgctctggactacctgcgcagatgtagtcagctgctggcaaaaatatataaaatgcccctgaagcctatttttctgagtggacgtctagctgggctgcccaggcgcttgcaagagcagtctgccagctctgaagatggtattgagtccgtgctcagcgatttcgacgatgacactggcttgatcgaggtctggattatactgctagaacagctgaccgctgcagtgtcaaattgccctaggcagcatcagcctcccaccctggatctgttattcgagctgttgagagatgtcactaaaaccccgggaccgggattcggaatttatgcggtcgtgcacctactgctgcccgtcatgtctgtgtggctgcgcaggagtcataaggatcatagttactgggatatggccagcgccaattttaagcatgctattggactctcctgcgagctagtggtggaacacatccagtcatttcttcatagcgatatcaggtacgaatccatgattaacaccatgcttaaagatctatttgaacttctcgtggcctgcgtagcgaagcccaccgagaccatttctcgcgtgggatgcagctgcatccggtatgtcctcgttaccgccggtcctgtatttactgaagagatgtggcggcttgcctgttgcgccctgcaggacgcctttagtgcaacgctcaagcccgtgaaagatttattgggctgcttccactcaggcaccgagagctttagcggcgaaggttgccaagtacgtgtcgctgcaccatcatcttcaccatctgccgaagcggagtactggagaattagagcgatggcccagcaggtcttcatgttagatactcagtgctcaccgaaaacacctaacaactttgaccatgctcagagctgccagctgattattgaattaccccctgacgaaaaaccgaatggacacactaagaaatccgtgagcttccgggagatcgtcgttagcttgctatctcaccaagttttactgcaaaacttatacgacatcctcttggaagagtttgtcaagggtccctctccgggtgaagagaaaacgatacaggtgcccgaggccaagctggcaggattcctcagatacatcagtatgcagaacctggccgtgatttttgacctgctgttagactcttacaggacggcacgggaatttgacacatcaccaggactgaagtgcctacttaagaaagtgtcagggattgggggagccgctaacttatataggcagtcggcaatgtcttttaacatttactttcacgctctcgtctgtgctgtgctcaccaatcaggagacaataactgccgaacaggtgaagaaggtgctctttgaggatgatgagcgaagcactgattcgagccagcagtgcagctccgaggacgaggacatatttgaggagactgcccaggtatctcccccaagggggaaggaaaagcgacaatggagagccaggatgcccctcctgagcgtccagccagtgtctaacgcggattgggtgtggctggtcaagaggctccacaaactctgtatggagctctgtaataattatatccaaatgcatttagaccttgagaattgtatggaagaaccccctatctttaaaggtgacccattcttcatactgccatctttccaatccgaaagctccacaccatccacaggtggtttctcggggaaagagacaccatccgaggatgataggtcgcaaagtagagagcacatgggcgaatctctgtcactgaaggccggaggaggggacttacttctgcccccaagtccaaaggttgaaaaaaaggatccgagtcggaagaaagagtggtgggaaaatgcagggaataagatttacaccatggcagctgacaagaccataagcaagttgatgaccgagtacaaaaagcgcaagcagcagcacaacctgtccgccttcccgaaagaggtcaaggtggagaagaagggagagcccttggggcctaggggccaggacagtcctctgctgcagcggccacagcatctaatggaccagggacagatgcgccactcttttagcgcagggcctgagcttctcaggcaggacaaacggcctcggtctggctccaccgggtcctcactatctgttagcgtgagagatgcagaggctcaaatccaggcttggacgaacatggtcctcacagtgcttaaccagatacagattcttccggatcagacgtttaccgctttacagcctgcagtcttcccctgcattagccagctgacttgtcacgtcacggatatacgggttcgtcaagctgtgcgggagtggcttggaagggtgggtagggtatacgacatcatcgtctag

SEQ ID NO: 203645 - DNA, 657 bp, Artificial Sequence
  derived and/or modified sequence
caagtgaagaaggtcctttttgaggacgacgagagaagcacggattcttcccagcagtgttcatctgaggatgaagacatctttgaggaaaccgcccaggtcagccccccgagaggcaaggagaagagacagtggcgggcacggatgcccttgctcagcgtccagcctgtcagcaacgcagattgggtgtggctggtcaagaggctgcacaagctgtgcatggaactgtgcaacaactacatccagatgcacttggacctggagaactgtatggaggagcctcccatcttcaagggcgacccgttcttcatcctgccctccttccagtccgagtcatccaccccatccaccgggggcttctctgggaaagaaaccccttccgaggatgacagaagccagccccgctcaggctccaccgggagctccctcagtgtctcggtgagagacgcagaagcacagatccaggcatggaccaacatggtgctaacagttctcaatcagattcagattctcccagaccagaccttcacggccctccagcccgcagtgttcccgtgcatcagtcagctgacctgtcacgtgaccgacatcagagttcgccaggctgtgagggagtggctgggcagggtgggccgtgtctatgacatcattgtgtag

SEQ ID NO: 203646 - DNA, 657 bp, Artificial Sequence
  derived and/or modified sequence
caggtcaagaaagtcctttttgaggatgatgagaggagcactgatagctcccagcagtgtagcagtgaggatgaggatatttttgaggagacagctcaagtttccccccctagaggtaaggaaaagcgtcagtggcgtgccagaatgcctttactgtccgtgcagcctgttagcaatgccgattgggtttggctggttaagagactccataagctgtgcatggagctctgcaacaattatatccagatgcacctggacttggagaactgtatggaagagcccccaatctttaaaggagaccctttcttcattctcccgtcttttcagagtgaaagctccacgccgagtacaggcggattctccgggaaggagaccccatcagaggatgataggtctcaacccagatccggcagcaccgggtcaagcctgagcgtttccgtcagagacgcagaagcccagatacaggcgtggactaatatggtgttgactgttctgaaccagattcagatcctccctgatcagaccttcaccgccctgcagcctgctgtcttcccctgcataagtcaacttacttgtcacgtgacagatatccgagtgcgacaggccgtgagagagtggctgggcagggtcggccgtgtgtacgatattatcgtctag

SEQ ID NO: 203647 - protein, 719 aa, Artificial Sequence
  derived and/or modified sequence
MFGKKKKKIEISGPSNFEHRVHTGFDPQEQKFTGLPQQWHSLLADTANRPKPMVDPSCITPIQLAPMKTIVRGNKPCKETSINGLLEDFDNISVTRSNSLRKESPPTPDQGASSHGPGHAEENGFITFSQYSSESDTTADYTTEKYREKSLYGDDLDPYYRGSHAAKQNGHVMKMKHGEAYYSEVKPLKSDFARFSADYHSHLDSLSKPSEYSDLKWEYQRASSSSPLDYSFQFTPSRTAGTSGCSKESLAYSESEWGPSLDDYDRRPKSSYLNQTSPQPTMRQRSRSGSGLQEPMMPFGASAFKTHPQGHSYNSYTYPRLSEPTMCIPKVDYDRAQMVLSPPLSGSDTYPRGPAKLPQSQSKSGYSSSSHQYPSGYHKATLYHHPSLQSSSQYISTASYLSSLSLSSSTYPPPSWGSSSDQQPSRVSHEQFRAALQLVVSPGDPREYLANFIKIGEGSTGIVCIATEKHTGKQVAVKKMDLRKQQRRELLFNEVVIMRDYHHDNVVDMYSSYLVGDELWVVMEFLEGGALTDIVTHTRMNEEQIATVCLSVLRALSYLHNQGVIHRDIKSDSILLTSDGRIKLSDFGFCAQVSKEVPKRKSLVGTPYWMAPEVISRLPYGTEVDIWSLGIMVIEMIDGEPPYFNEPPLQAMRRIRDSLPPRVKDLHKVSSVLRGFLDLMLVREPSQRATAQELLGHPFLKLAGPPSCIVPLMRQYRHH

SEQ ID NO: 203648 - protein, 580 aa, Artificial Sequence
  derived and/or modified sequence
MVDPSCITPIQLAPMKTIVRGNKPCKETSINGLLEDFDNISVTRSNSLRKESPPTPDQGASSHGPGHAEENGFITFSQYSSESDTTADYTTEKYREKSLYGDDLDPYYRGSHAAKQNGHVMKMKHGEAYYSEVKPLKSDFARFSADYHSHLDSLSKPSEYSDLKWEYQRASSSSPLDYSFQFTPSRTAGTSGCSKESLAYSESEWGPSLDDYDRRPKSSYLNQTSPQPTMRQRSRSGSGLQEPMMPFGASAFKTHPQGHSYNSYTYPRLSEPTMCIPKVDYDRAQMVLSPPLSGSDTYPRGPAKLPQSQSKSGYSSSSHQYPSGYHKATLYHHPSLQSSSQYISTASYLSSLSLSSSTYPPPSWGSSSDQQPSRVSHEQFRAALQLVVSPGDPREYLANFIKIGEGSTGIVCIATEKHTGKQVAVKKMDLRKQQRRELLFNEVVIMRDYHHDNVVDMYSSYLVGDELWVVMEFLEGGALTDIVTHTRMNEEQIATVCLSVLRALSYLHNQGVIHRDIKSDSILLTSDGRVSSVLRGFLDLMLVREPSQRATAQELLGHPFLKLAGPPSCIVPLMRQYRHH

SEQ ID NO: 203649 - DNA, 2160 bp, Artificial Sequence
  derived and/or modified sequence
atgttcggcaagaagaagaagaagatcgagatcagcggccccagcaacttcgagcacagagtgcacaccggcttcgacccccaggagcagaagttcaccggcctgccccagcagtggcacagcctgctggccgacaccgccaacagacccaagcccatggtggaccccagctgcatcacccccatccagctggcccccatgaagaccatcgtgagaggcaacaagccctgcaaggagaccagcatcaacggcctgctggaggacttcgacaacatcagcgtgaccagaagcaacagcctgagaaaggagagcccccccacccccgaccagggcgccagcagccacggccccggccacgccgaggagaacggcttcatcaccttcagccagtacagcagcgagagcgacaccaccgccgactacaccaccgagaagtacagagagaagagcctgtacggcgacgacctggacccctactacagaggcagccacgccgccaagcagaacggccacgtgatgaagatgaagcacggcgaggcctactacagcgaggtgaagcccctgaagagcgacttcgccagattcagcgccgactaccacagccacctggacagcctgagcaagcccagcgagtacagcgacctgaagtgggagtaccagagagccagcagcagcagccccctggactacagcttccagttcacccccagcagaaccgccggcaccagcggctgcagcaaggagagcctggcctacagcgagagcgagtggggccccagcctggacgactacgacagaagacccaagagcagctacctgaaccagaccagcccccagcccaccatgagacagagaagcagaagcggcagcggcctgcaggagcccatgatgcccttcggcgccagcgccttcaagacccacccccagggccacagctacaacagctacacctaccccagactgagcgagcccaccatgtgcatccccaaggtggactacgacagagcccagatggtgctgagcccccccctgagcggcagcgacacctaccccagaggccccgccaagctgccccagagccagagcaagagcggctacagcagcagcagccaccagtaccccagcggctaccacaaggccaccctgtaccaccaccccagcctgcagagcagcagccagtacatcagcaccgccagctacctgagcagcctgagcctgagcagcagcacctaccccccccccagctggggcagcagcagcgaccagcagcccagcagagtgagccacgagcagttcagagccgccctgcagctggtggtgagccccggcgaccccagagagtacctggccaacttcatcaagatcggcgagggcagcaccggcatcgtgtgcatcgccaccgagaagcacaccggcaagcaggtggccgtgaagaagatggacctgagaaagcagcagagaagagagctgctgttcaacgaggtggtgatcatgagagactaccaccacgacaacgtggtggacatgtacagcagctacctggtgggcgacgagctgtgggtggtgatggagttcctggagggcggcgccctgaccgacatcgtgacccacaccagaatgaacgaggagcagatcgccaccgtgtgcctgagcgtgctgagagccctgagctacctgcacaaccagggcgtgatccacagagacatcaagagcgacagcatcctgctgaccagcgacggcagaatcaagctgagcgacttcggcttctgcgcccaggtgagcaaggaggtgcccaagagaaagagcctggtgggcaccccctactggatggcccccgaggtgatcagcagactgccctacggcaccgaggtggacatctggagcctgggcatcatggtgatcgagatgatcgacggcgagcccccctacttcaacgagccccccctgcaggccatgagaagaatcagagacagcctgccccccagagtgaaggacctgcacaaggtgagcagcgtgctgagaggcttcctggacctgatgctggtgagagagcccagccagagagccaccgcccaggagctgctgggccaccccttcctgaagctggccggcccccccagctgcatcgtgcccctgatgagacagtacagacaccactag

SEQ ID NO: 203650 - DNA, 1743 bp, Artificial Sequence
  derived and/or modified sequence
atggtggaccccagctgcatcacccccatccagctggcccccatgaagaccatcgtgagaggcaacaagccctgcaaggagaccagcatcaacggcctgctggaggacttcgacaacatcagcgtgaccagaagcaacagcctgagaaaggagagcccccccacccccgaccagggcgccagcagccacggccccggccacgccgaggagaacggcttcatcaccttcagccagtacagcagcgagagcgacaccaccgccgactacaccaccgagaagtacagagagaagagcctgtacggcgacgacctggacccctactacagaggcagccacgccgccaagcagaacggccacgtgatgaagatgaagcacggcgaggcctactacagcgaggtgaagcccctgaagagcgacttcgccagattcagcgccgactaccacagccacctggacagcctgagcaagcccagcgagtacagcgacctgaagtgggagtaccagagagccagcagcagcagccccctggactacagcttccagttcacccccagcagaaccgccggcaccagcggctgcagcaaggagagcctggcctacagcgagagcgagtggggccccagcctggacgactacgacagaagacccaagagcagctacctgaaccagaccagcccccagcccaccatgagacagagaagcagaagcggcagcggcctgcaggagcccatgatgcccttcggcgccagcgccttcaagacccacccccagggccacagctacaacagctacacctaccccagactgagcgagcccaccatgtgcatccccaaggtggactacgacagagcccagatggtgctgagcccccccctgagcggcagcgacacctaccccagaggccccgccaagctgccccagagccagagcaagagcggctacagcagcagcagccaccagtaccccagcggctaccacaaggccaccctgtaccaccaccccagcctgcagagcagcagccagtacatcagcaccgccagctacctgagcagcctgagcctgagcagcagcacctaccccccccccagctggggcagcagcagcgaccagcagcccagcagagtgagccacgagcagttcagagccgccctgcagctggtggtgagccccggcgaccccagagagtacctggccaacttcatcaagatcggcgagggcagcaccggcatcgtgtgcatcgccaccgagaagcacaccggcaagcaggtggccgtgaagaagatggacctgagaaagcagcagagaagagagctgctgttcaacgaggtggtgatcatgagagactaccaccacgacaacgtggtggacatgtacagcagctacctggtgggcgacgagctgtgggtggtgatggagttcctggagggcggcgccctgaccgacatcgtgacccacaccagaatgaacgaggagcagatcgccaccgtgtgcctgagcgtgctgagagccctgagctacctgcacaaccagggcgtgatccacagagacatcaagagcgacagcatcctgctgaccagcgacggcagagtgagcagcgtgctgagaggcttcctggacctgatgctggtgagagagcccagccagagagccaccgcccaggagctgctgggccaccccttcctgaagctggccggcccccccagctgcatcgtgcccctgatgagacagtacagacaccactag

SEQ ID NO: 203651 - DNA, 2160 bp, Artificial Sequence
  derived and/or modified sequence
atgtttggtaagaagaaaaaaaaaatagagatctccggtccttcaaacttcgagcaccgcgttcacacgggattcgacccacaggagcagaagtttacaggcttgccccagcagtggcatagcctgctggcggacactgccaatagacctaagcccatggtcgacccatcctgcatcacccctatccagcttgcccctatgaagaccatcgttcgcggaaacaagccttgcaaggagacgagcataaatggactgctggaggactttgataatatctctgtgactaggtccaacagcctccggaaggaatcacctcctacacctgaccagggcgcatcttctcacgggcccgggcacgccgaggagaatgggttcatcacattctcacagtatagttccgaatcggataccactgccgattacacaaccgagaaataccgggagaagtctctgtacggcgacgacctggatccttattatcggggaagccacgctgcgaaacagaacggccacgtcatgaagatgaagcacggagaggcatactatagtgaagtgaaacctctcaaatctgacttcgcccgtttttccgctgattaccactcacacctggatagcctgagtaaaccttctgaatacagcgatcttaaatgggagtatcaacgagccagctcaagctcccctctcgattatagtttccagtttaccccctctcggaccgcaggcacaagcggctgtagcaaggagagcctcgcctactcggagtcagagtggggcccatccttggacgattacgataggaggcccaaaagttcctacttgaaccagacgagcccacagcctacaatgagacaacgaagcagatccggctcagggctgcaggaacccatgatgcctttcggagcttctgccttcaaaacacatccccagggccatagctataacagctacacgtaccctcgcctgtctgagcccacaatgtgcatccccaaggtggattacgacagggcacagatggtgctgagccctccattgtccggaagtgacacctacccgcgtggtcccgcaaagctgccccagagtcagtccaaatctggttactcctctagttcccatcaatacccttcaggctaccacaaggccacactgtaccaccatccttccctgcagagcagtagccagtatatatcaactgcttcatacttgtcctccctttccctctcctcttccacctaccccccaccctcctggggctccagcagcgaccagcaaccatccagggtgagtcacgagcagtttagggccgcgctgcagctggtcgtttctccaggcgatccacgggaatacctcgcgaatttcatcaaaataggcgagggcagcacgggtatcgtatgcatcgccactgaaaagcatacaggcaagcaagtagccgtaaagaagatggacctgcgcaagcaacaacgccgcgagctgctttttaacgaagtggttatcatgcgcgactatcatcacgataacgttgtggatatgtatagttcatacctggttggcgacgagctgtgggtggtgatggagttcctcgagggaggggctctgactgatattgttacacacactagaatgaacgaagagcagatcgccacagtgtgcctgtccgttcttcgtgccttaagctacctccacaaccaaggggtgatccatagagatatcaaatctgactccattctcttaacttccgatggaaggattaagttgagcgattttggtttctgcgcacaggtatcaaaggaagtcccaaagcgtaaatcgctcgtagggacaccctactggatggctcccgaagtgatttcaagactgccctatgggactgaggtcgacatatggagcctgggcattatggtgatcgagatgatagacggtgagcccccctacttcaacgagccccctctgcaggcaatgaggcgcatccgtgacagcttgccaccgagagtaaaagatttacataaagtctcctctgtactacggggcttcctagatttgatgctggtgcgcgaaccttctcaacgcgctacagcacaagaactgctgggccacccgttcctgaagctggccggacctccctcgtgcattgtgccactgatgcgacaataccgccaccactag

SEQ ID NO: 203652 - DNA, 2160 bp, Artificial Sequence
  derived and/or modified sequence
atgtttggcaagaagaagaaaaagatcgagattagtggccctagtaatttcgagcaccgggtgcacactggatttgatccacaggaacagaagttcaccggcctgccacagcagtggcacagcttactggctgataccgcgaaccgcccaaaacccatggtagatcctagttgcataaccccaatccagttggcacccatgaagaccatcgtccggggcaataagccttgcaaagaaacgtccataaacggtctgctggaggactttgacaatatcagtgtcacccggagcaatagcttgcgcaaggagtcgccacctacccccgaccaaggagcgagttctcacgggcccggccacgctgaagagaatggatttattactttctcacaatatagcagtgagtcagacacgaccgccgattacactacagaaaagtatcgggagaaatcgctctatggggacgatctggacccatactacagaggtagtcatgccgctaaacagaacggacatgtgatgaaaatgaagcatggcgaggcttactacagcgaggtgaagcctctgaaatcggattttgctcgatttagcgcggattaccactctcacctggactccctcagtaagccctcagaatactctgacctgaagtgggagtatcaacgcgcctcctcctcttctccactggactatagctttcagtttaccccgtcacggacggcaggcacgtccggctgcagtaaggagagccttgcctactcagagagcgaatggggaccttcactggacgactatgacaggcgaccgaagtcttcctatctgaatcagacttccccacagcctacaatgaggcagagaagtcgttccggaagtggcctgcaggagcccatgatgcctttcggggctagcgcattcaagacacacccacagggacactcatacaacagctatacgtacccccgcttgtcagagcccaccatgtgtatacccaaggttgactacgacagggcccaaatggtcctctcgcctccactgtcaggcagtgacacatacccacgcgggcctgctaagttgccccagagccaaagcaagagtggatactccagctccagccaccaatacccttcaggatatcacaaagcgacattgtatcaccacccgtctcttcagagttcctcacagtatatctccaccgccagctacctgagcagtctgtcactgtcatcctctacctacccacctccttcctgggggtccagttctgaccagcagccaagtagagtaagtcacgagcagtttagagccgccctccagttggtggtttcgcctggggaccctcgcgagtaccttgccaattttattaagattggggagggaagtacaggaatcgtatgtatcgcaactgagaaacataccggaaaacaggtcgccgtcaagaagatggacctgcgcaagcagcagaggcgggagctcctgttcaacgaagttgtgattatgcgcgattatcaccacgacaatgtggtggatatgtattcatcctatctggtgggtgacgaactgtgggtcgtcatggagtttctggaggggggtgcgctgacagatatcgttacgcacacacgcatgaacgaagaacagattgctaccgtgtgtttatccgtcctgcgggccctgtcgtatctccataaccagggggtgattcacagggacatcaaaagcgattccatcttactgacaagcgacggtcgcattaagttaagtgacttcgggttctgcgcacaagtttccaaggaagtccccaaaagaaagagcctcgtcggtacaccatattggatggcgccagaggtaatctcccggctgccatatggaaccgaagtggatatctggtccctgggtattatggtcatcgagatgatcgacggggaacccccctacttcaatgagccccctctgcaggcaatgcgcaggataagggatagtttgcccccacgcgtgaaagatctccacaaagtctccagtgtgctcagaggcttcctcgacctgatgctcgtacgggaacctagtcagagggctaccgcgcaggaactcttagggcaccccttccttaaactggccggtccccctagttgcatcgttcccctcatgcgccagtacagacaccattag

SEQ ID NO: 203653 - DNA, 2160 bp, Artificial Sequence
  derived and/or modified sequence
atgtttggcaagaaaaaaaagaagatcgaaatctcaggtccaagtaactttgagcaccgagtccataccggtttcgacccgcaggaacagaagttcaccggtctgccacagcagtggcactccctcctggctgatactgcaaaccgaccgaaacccatggtggacccgagctgcataactcccatccagctggcacctatgaaaacaattgttcgcggcaacaaaccttgcaaggagacttccatcaatgggttgctggaggactttgataatattagtgtgacccggtcaaattcactcaggaaggaaagtccaccaacaccagaccagggcgcaagcagtcatggacctggacatgctgaggagaacggctttatcacgttttcccaatacagttccgaaagtgatacaacagccgactacactacggagaagtaccgagagaagtcactctacggcgatgacctggatccttactacagaggcagccacgcggctaaacagaacggtcatgtcatgaaaatgaaacacggagaggcctattactctgaagtcaagcctctcaaaagtgactttgcccgcttctctgcggactaccactcgcacttggactccctctcaaagcctagcgagtattccgatctcaaatgggagtaccagagggcctcctctagtagtccactggactattctttccagttcactccttcccgcacagcaggcactagtgggtgtagcaaggagtctttggcgtattccgaatccgaatggggcccctccttggatgactacgaccggagacctaagtcttcgtatctgaaccaaacctcgccccaacctaccatgaggcagagaagccgttcaggatccggcctgcaggagcctatgatgcccttcggagcttccgcctttaagacgcatcctcagggccattcctataacagttatacctaccccagactgtcggaaccaaccatgtgcattcctaaggttgattatgatagggcgcagatggttctctcacccccgttaagcggttcggatacgtacccaagagggcccgccaaacttccacagtcccagtctaagtcaggctattcttctagctcccaccagtacccttcgggctaccataaggcaaccctgtaccaccatccatccctgcagagttcttcccaatacatttctacggcctcctacctaagctctctcagcctgagtagtagcacctatcctcccccatcctgggggtcatcttccgatcagcaaccctccagagtatcacatgaacagtttagggcagctctccaacttgtggttagccctggggatccaagagagtatctggccaacttcattaagattggcgaaggctccactggtatcgtctgcatagctacagagaagcatacagggaaacaggtcgctgtgaagaagatggacctccgcaagcagcagcggcgagaactcctgtttaacgaggtcgtgataatgagggattaccaccatgacaacgtggtggacatgtatagcagttaccttgtgggcgatgaattgtgggtcgtgatggagttcctggagggcggagcactaactgacattgtgacccataccagaatgaacgaggaacagatcgctacagtgtgcctcagcgttcttcgggcactgtcctacctccacaatcaaggtgtcattcatcgggacattaagtctgactccatattgttgacttcagacggcaggattaaactttctgacttcggattttgtgctcaggtctctaaagaagtgcccaagagaaagtccctggtaggcacaccttattggatggccccggaggtgatctcgcggcttccctacggcaccgaggtggacatttggtccctggggataatggttattgaaatgattgacggcgaacctccttactttaacgaacccccccttcaggccatgcgacgcattcgcgattctctgcctccccgagttaaagacctgcataaggtttccagtgtacttagaggtttcttagatctcatgctagtccgtgagccgtcccagagagccactgcccaagaattgctgggccacccattcctcaaacttgcaggaccaccctcatgtatagtgcccctgatgcggcaataccggcaccactag

SEQ ID NO: 203654 - DNA, 1743 bp, Artificial Sequence
  derived and/or modified sequence
atggtcgacccatcatgcatcacacccatccagctagcccctatgaaaaccattgtgagaggcaataagccctgcaaagaaacctccatcaatgggctgctagaggacttcgacaatatttcggttacacggagcaactccttgcggaaggagtcccctcctactcccgaccagggcgccagcagtcatggacccggacacgcagaagaaaatgggtttattaccttttctcagtatagctccgagtcagacacaactgctgactataccacagaaaaataccgtgagaaatcgctctatggggacgacctcgacccatactacagagggtcgcatgcggccaaacaaaacggccatgtcatgaagatgaagcatggtgaagcatattacagcgaggtgaagccactgaaatctgattttgcaaggttctcagccgattaccattcccatctggactccttgagtaagccttcggaatattccgatttgaaatgggaatatcagagggcctcttcctcttctccgctggactactccttccaattcactcctagccggactgccggcacttccgggtgctctaaagagtcactggcctactctgagtctgaatggggaccatccctggatgattacgacagaaggcccaagagcagctacctcaatcagacctctccccagccgacaatgcggcagcgatctagatctggctccggcttgcaggagccaatgatgccattcggtgccagtgcgtttaaaacgcaccctcaagggcactcctacaattcgtatacttatccgcgtctgtcagagcccactatgtgcattcctaaggtcgactatgacagagctcagatggtgctgtctcccccactgtctggtagtgacacgtaccctagaggacccgccaaactaccccagagtcaatctaaatcgggctactcctccagttctcaccaataccctagcggctaccataaggccacattataccaccaccccagccttcaatcatccagtcagtatatctcaaccgcctcataccttagctctctgtccctgtctagcagtacctaccctccaccctcctggggctctagctcagaccagcagcctagtcgcgtgagtcatgagcagttcagggctgctctgcagctggtcgttagtccaggggacccccgcgaatatctggccaattttataaagatcggggaggggagcaccggaatagtgtgcatagctacggagaaacataccgggaagcaggtcgccgtcaagaagatggatcttcggaaacagcagaggagggagctgctatttaatgaagtcgtgattatgagggactatcaccatgacaacgtagttgacatgtacagctcttacttggtcggggatgaactgtgggtcgttatggaattcctcgagggcggggctctgaccgacatcgtgacacatacacggatgaacgaagaacagatcgcgacagtttgcctgagcgtcctccgggctctcagctacttgcataaccagggggtcatacacagagatatcaaatcagattctatactcttaaccagcgatggacgtgtgagctcagtgctgagggggttcctggatctgatgttagtacgcgagccgtctcagcgcgcgacagcacaagagctgctgggccacccctttctgaaactcgcaggtccgccctcctgcatcgttcccctcatgcgccagtaccggcatcattag

SEQ ID NO: 203655 - DNA, 2160 bp, Artificial Sequence
  derived and/or modified sequence
atgtttgggaagaagaagaagaagattgagatcagcggccccagcaactttgagcaccgggtgcacactggatttgacccccaggagcagaagttcaccggcctgccccagcagtggcacagcctgctggccgacacagccaaccggcccaagcccatggtggaccccagctgcatcacccccatccagctggcccccatgaagaccatcgtgcggggcaacaagccctgcaaggagaccagcatcaatggcctgctggaggactttgacaacatctctgtgaccaggagcaacagcctgaggaaggagagcccccccaccccagaccagggcgccagcagccacggccctggccacgccgaggagaatggcttcatcaccttcagccagtacagcagcgagagtgacaccacagctgactacaccacagagaagtaccgggagaagagcctgtatggagatgacctggacccctactaccggggcagccatgctgccaagcagaatggacatgtgatgaagatgaagcatggagaggcctactacagcgaggtgaagcccctgaagagtgactttgcccgcttctctgctgactaccacagccacctggacagcctgagcaagcccagcgagtacagcgacctgaagtgggagtaccagagggccagcagcagcagccccctggactacagcttccagttcacccccagcaggacagctggcaccagcggctgcagcaaggagagcctggcctacagcgagagcgagtggggccccagcctggatgattatgaccggcggcccaagagcagctacctgaaccagaccagcccccagcccaccatgaggcagaggagccgcagcggcagcggcctgcaggagcccatgatgccctttggagccagcgccttcaagacccacccccagggccacagctacaacagctacacctacccccggctgtctgagcccaccatgtgcatccccaaggtggactatgaccgggcccagatggtgctgagcccccccctgagcggcagtgacacctacccccggggccctgccaagctgccccagagccagagcaagagcggctacagcagcagcagccaccagtaccccagcggctaccacaaggccaccctgtaccaccaccccagcctgcagagcagcagccagtacatcagcacagccagctacctgagcagcctgagcctgagcagcagcacctacccacctccttcctggggcagcagcagtgaccagcagcccagccgggtgtcccatgagcagttccgggccgccctgcagctggtggtgtcccctggggacccccgggagtacctggccaacttcatcaagattggagagggcagcacaggcatcgtgtgcatcgccacagagaagcacacaggcaagcaggtggccgtgaagaagatggacctgaggaagcagcagaggcgggagctgctcttcaatgaggtggtgatcatgagggactaccaccacgacaacgtggtggacatgtacagcagctacctggtgggagatgagctgtgggtggtgatggagttcctggagggcggggccctgacagacatcgtgacccacaccaggatgaatgaggagcagatcgccaccgtgtgcctgtctgtgctgcgggccctgagctacctgcacaaccagggcgtcatccaccgggacatcaagagtgacagcatcctgctgaccagtgatggccgcatcaagctgagtgactttggcttctgtgcccaggtgtccaaggaggtgcccaagaggaagagcctggtgggcaccccctactggatggcccctgaggtgatcagccggctgccctacggcacagaggtggacatctggagcctgggcatcatggtgattgagatgattgatggagagcccccctacttcaatgaaccacccctgcaggccatgaggcgcatccgggacagcctgcccccccgggtgaaggacctgcacaaggtgtcctctgtgctgcggggcttcctggacctgatgctggtgcgggagcccagccagagggccacagcccaggagctgctgggccaccccttcctgaagctggccggcccccccagctgcatcgtgcccctgatgaggcagtaccgccaccactag

SEQ ID NO: 203656 - DNA, 1743 bp, Artificial Sequence
  derived and/or modified sequence
atggtggaccccagctgcatcacccccatccagctggcccccatgaagaccatcgtgcggggcaacaagccctgcaaggagaccagcatcaatggcctgctggaggactttgacaacatctctgtgaccaggagcaacagcctgaggaaggagagcccccccaccccagaccagggcgccagcagccacggccctggccacgccgaggagaatggcttcatcaccttcagccagtacagcagcgagagtgacaccacagctgactacaccacagagaagtaccgggagaagagcctgtatggagatgacctggacccctactaccggggcagccatgctgccaagcagaatggacatgtgatgaagatgaagcatggagaggcctactacagcgaggtgaagcccctgaagagtgactttgcccgcttctctgctgactaccacagccacctggacagcctgagcaagcccagcgagtacagcgacctgaagtgggagtaccagagggccagcagcagcagccccctggactacagcttccagttcacccccagcaggacagctggcaccagcggctgcagcaaggagagcctggcctacagcgagagcgagtggggccccagcctggatgattatgaccggcggcccaagagcagctacctgaaccagaccagcccccagcccaccatgaggcagaggagccgcagcggcagcggcctgcaggagcccatgatgccctttggagccagcgccttcaagacccacccccagggccacagctacaacagctacacctacccccggctgtctgagcccaccatgtgcatccccaaggtggactatgaccgggcccagatggtgctgagcccccccctgagcggcagtgacacctacccccggggccctgccaagctgccccagagccagagcaagagcggctacagcagcagcagccaccagtaccccagcggctaccacaaggccaccctgtaccaccaccccagcctgcagagcagcagccagtacatcagcacagccagctacctgagcagcctgagcctgagcagcagcacctacccacctccttcctggggcagcagcagtgaccagcagcccagccgggtgtcccatgagcagttccgggccgccctgcagctggtggtgtcccctggggacccccgggagtacctggccaacttcatcaagattggagagggcagcacaggcatcgtgtgcatcgccacagagaagcacacaggcaagcaggtggccgtgaagaagatggacctgaggaagcagcagaggcgggagctgctcttcaatgaggtggtgatcatgagggactaccaccacgacaacgtggtggacatgtacagcagctacctggtgggagatgagctgtgggtggtgatggagttcctggagggcggggccctgacagacatcgtgacccacaccaggatgaatgaggagcagatcgccaccgtgtgcctgtctgtgctgcgggccctgagctacctgcacaaccagggcgtcatccaccgggacatcaagagtgacagcatcctgctgaccagtgatggccgggtgtcctctgtgctgcggggcttcctggacctgatgctggtgcgggagcccagccagagggccacagcccaggagctgctgggccaccccttcctgaagctggccggcccccccagctgcatcgtgcccctgatgaggcagtaccgccaccactag

SEQ ID NO: 203657 - DNA, 2160 bp, Artificial Sequence
  derived and/or modified sequence
atgttcggcaagaagaagaagaagatcgagatcagcggccccagcaacttcgagcaccgggtgcacacagggtttgacccacaagaacagaaatttaccggattaccacagcagtggcattctcttctcgccgacaccgccaatcggccaaagcccatggtcgatcctagctgtatcaccccaatacagctggcacccatgaagactatcgtccgcgggaataagccgtgcaaagaaacttccataaacggactccttgaagatttcgataatatcagcgtaaccagaagcaatagcttacgtaaagagtctccgccaacacccgatcagggcgccagctcccacgggcccgggcacgccgaggagaatgggtttatcaccttctctcaatacagttccgaatccgatacaacagctgactacaccaccgagaagtatcgggagaaatcactctacggggatgaccttgacccctattaccgcggaagtcatgccgctaagcagaatggtcatgtgatgaagatgaagcatggcgaagcatattattccgaagttaagcccctgaaaagtgattttgcaaggttttcagccgactatcacagccatctggatagcttgagcaagccttccgaatatagcgatctaaaatgggagtaccaaagagcgtccagttcatcccctctggactacagttttcagttcactccatcccggaccgctggcacctcaggctgtagtaaggaatccctggcctactctgagtccgagtggggcccctccctggacgactatgatcgaaggccgaaaagttcctacctgaatcagactagcccacagccaacaatgcgccagcgcagccggtccggatctggtctccaggaaccaatgatgccgttcggggctagcgctttcaagacccacccacagggtcactcatacaacagctacacctatccaagactgagcgagcccacgatgtgtatccccaaggtggactacgatagggcccagatggtgctttctccccctctttccggcagtgacacctacccccggggtcctgccaaattaccacagagccagagcaagtctggatactcctccagctcacaccagtacccctctggctatcacaaggccacgctttatcaccatccttccctacaatcaagcagccagtatattagtaccgctagctatctttcctccttgtcattgtcctctagcacttacccccctccttcttggggatcaagtagcgaccagcagccgtctagagtgagccacgagcagtttcgagccgcattacagctggtagtgtccccaggtgacccccgggaataccttgccaatttcatcaaaataggggaagggagcaccggcatcgtgtgcatcgccacggagaagcacacgggcaaacaggtagcagtgaaaaaaatggaccttcgcaaacagcagagaagagagctgctcttcaacgaagtggtcatcatgcgggattatcatcacgataacgtcgtcgacatgtacagctcttacctcgtcggggacgagttgtgggtggtcatggaattcctggagggaggtgcactgaccgatatcgtaacacacaccagaatgaacgaggagcaaattgccaccgtatgtctgtccgtactgcgggcgctgtcttacctgcacaaccagggggtcatccaccgcgatatcaaaagtgatagtatcctgctgacatccgatggccgcattaagctgtccgatttcgggttttgcgcccaggtttcaaaggaagttcccaagcggaaatccctagtggggactccgtactggatggctccagaagtgattagccgccttccctatgggacggaggttgacatttggtccttgggcatcatggtcattgagatgattgatggggagcccccatacttcaatgagccacctcttcaggctatgagacggattcgggactccctgccccccagggtgaaggatctccacaaagtatcatctgtattgagggggtttttagatttgatgctggtgagggaaccatctcaaagagccaccgctcaggagctcctgggtcacccctttctaaagctggctgggcccccgtcgtgtatagtgcctttgatgagacagtatcgccaccattag

SEQ ID NO: 203658 - DNA, 2160 bp, Artificial Sequence
  derived and/or modified sequence
atgttcggcaagaagaagaagaagatcgagatcagcggccccagcaatttcgaacaccgagtgcacaccggatttgacccacaggagcagaagtttaccgggctccctcagcagtggcactccctcctggcggacactgcaaacagacccaaacccatggtggatccatcctgtatcacacccatacagctggctccgatgaagactatcgtgcgaggaaacaaaccttgtaaggaaacgtctatcaatggtctcttagaggacttcgacaacatttcagtcacgcgcagcaattcactgagaaaggaatcccctcctacaccagaccagggggcttcgagccatgggcccggacacgccgaggaaaatggttttatcactttcagtcagtattcctcagagagcgacacgactgccgactacacgactgagaagtaccgagagaaatccctgtatggtgatgatttggatccgtattaccgcgggagtcatgccgctaagcagaacggtcacgtgatgaaaatgaaacacggcgaggcctattatagtgaggttaagcccctgaagtcagacttcgcaagattctccgctgattatcacagccatcttgactccctgtccaaaccatctgaatactccgacctgaagtgggaataccagcgtgcaagctctagtagtcccctggactactcctttcagtttacaccttctaggactgctggtactagtggatgtagcaaagaatctctagcctattctgagtccgaatgggggccaagtcttgacgactacgacagaaggcctaaaagcagttatctcaatcagaccagtcctcagcctacaatgcgtcaacgttctcgtagtggctccggactccaggagcccatgatgcccttcggagcatctgcattcaaaacgcaccctcaaggccactcatataactcctatacgtacccccgacttagcgagcctactatgtgtattcctaaggtggactacgacagggcccaaatggtcttgagcccccccctctctggatccgacacttacccgaggggaccagctaaactgccccaatctcagtcaaagtcaggttacagttcaagttcacaccagtacccttccggttaccataaagccacactttaccaccatccctctctgcagtcgtcctcacagtacattagcacagcatcatatctcagcagcctcagtctgtcctccagtacatatccccccccttcatggggtagctcttctgaccagcagccaagccgcgtctcacacgagcaatttcgggccgcgctgcagctggtggtatcaccgggtgacccaagggagtatctcgcaaatttcattaaaatcggcgagggctccaccggaattgtttgtatcgcaaccgagaagcacaccggaaagcaggtggctgtgaaaaagatggatctgagaaagcagcagcgcagagaactgttatttaacgaagtggttattatgcgcgactatcaccatgacaacgttgtggatatgtattcttcttacctagtaggcgacgaactgtgggtggtcatggaatttttagaggggggcgccttaacagatattgttacgcacacaaggatgaacgaggagcagatcgctactgtttgcctttcagtgctgagagccctgtcttatcttcacaatcagggagtgattcatagagacataaaaagcgattccatattgctgacctctgacggtcgtataaagctgtcagacttcggcttttgtgctcaagtgtcaaaagaggtgcctaagaggaaatcgctggtaggtactccgtactggatggcccccgaagttatttcgcggctaccctacgggaccgaggtggatatctggagtctcggcataatggtaatcgagatgatcgacggggagcccccttattttaatgagccaccgcttcaggccatgcgtcgaatccgcgattcccttccacccagagtgaaggacttgcacaaggtgagcagcgtgctgagaggatttctcgatctgatgctggtacgcgaaccttcccaacgcgcaacggcccaggaactactcggccacccctttctgaagcttgctggacccccttcctgtatagtgccattgatgaggcagtataggcaccattag

SEQ ID NO: 203659 - DNA, 2160 bp, Artificial Sequence
  derived and/or modified sequence
atgttcggcaagaagaagaagaagatcgagatcagcggccccagcaactttgaacatcgcgtccacactgggtttgatccacaagagcagaagtttactgggttgccccagcaatggcacagcttgttagctgatactgccaatcgacctaagcccatggttgaccctagctgtatcactccaatccagttggcacccatgaaaaccatcgttagaggcaataagccctgtaaggagacctccattaatggccttctggaggatttcgacaatatatcagtgacccgtagcaacagccttcggaaggagtctccccctacgccagaccagggcgcctctagccacggccctgggcacgccgaggagaatgggttcatcacattctcgcaatatagcagcgagagtgataccactgcagactataccacagagaagtaccgggagaaaagtctttacggcgacgacctggatccttactacagaggctcccatgcagcaaaacagaacggtcatgtgatgaagatgaaacatggcgaggcctactactccgaagtcaaacctctcaagagtgactttgcccggttttcggcagactatcatagccacttggattccttatctaaacctagtgagtactcagatctgaaatgggagtatcagcgcgcatcatctagcagtccattggactattctttccaatttaccccttctcgcacagctggcacctccggatgttcaaaggagagcttggcgtattctgagtccgaatggggtccctcactggacgattatgatcgtaggcctaagtcgagctacctgaatcagacatctccccaacccactatgcgccaacggagcaggtctggctcaggtttgcaggagccaatgatgccattcggcgccagcgcgttcaagacccacccacagggccattcttacaattcctacacgtaccctcgcctgtctgagccaacaatgtgtatcccaaaggtagactacgaccgagcccaaatggtgctgtctcccccgctctctggatcagacacctacccccgggggcccgcgaaattgcctcagagccagtctaaaagtggctactcctcaagcagccaccagtacccttccgggtatcataaagctacactgtatcaccatcctagcttacagagtagctcacagtacatctcaacagcatcatatcttagttcactcagtcttagtagttcaacctacccaccgcccagctgggggtcatctagcgatcaacagccttctagggtgtctcacgagcaatttagggcagccctgcagctcgtcgtatctcctggcgacccccgggagtacctcgccaattttataaagatcggcgaaggctccactggaatagtttgtatagccaccgaaaagcatactgggaaacaagtcgcagtaaaaaaaatggacttaagaaagcaacagcggcgggaactgctcttcaatgaggtggttattatgagagattatcatcacgataacgtggtagatatgtactcatcctatctggtcggagatgagctgtgggtggttatggagtttttggaaggtggcgccctgacagatatcgtgacccacacacgcatgaacgaggaacaaattgccactgtttgcctctcagtgctgcgggctctgtcttacctccacaaccagggggtgatccacagggacattaaatccgattcaatcttgttaacctcggacggcagaatcaagctgtccgactttggattttgtgcccaagtctccaaggaggtgcccaagagaaaatctttggtcggcacaccttactggatggcccccgaagtgatttcccgccttccctacgggaccgaggttgacatctggtctctgggaattatggtaatcgagatgattgatggagagcccccatatttcaacgagcctccccttcaggccatgcggcgcatccgcgattctttgccccctcgggtaaaagatttgcacaaggtaagttctgtgctgaggggattcctagacttaatgttggtgcgcgagccttcacagcgggccacagctcaagagttgttgggccacccattcttaaaactggccggaccaccctcttgcatcgtgcccctgatgaggcagtatcgtcatcactag

SEQ ID NO: 203660 - DNA, 1743 bp, Artificial Sequence
  derived and/or modified sequence
atggtggaccccagctgcatcacccccatccagctggcccccatgaagacaattgtacgtggaaataaaccttgtaaagagacgtccattaatgggctcctcgaagacttcgataatatcagcgtgacacggagcaattctcttcgcaaggagtcccctcctacgcctgaccaaggagcttcttcgcacgggcccggccacgctgaagaaaatggattcatcacgttttctcagtatagctcagaatctgatactacagcagattacaccactgagaaataccgcgagaaatccttgtacggagacgatctggatccatactatagagggagccacgccgcaaaacaaaacgggcatgtgatgaaaatgaaacatggggaggcgtactatagcgaggtcaaacctcttaagtcggacttcgcgagattcagcgccgactaccactctcaccttgactctctgtccaaaccatccgagtacagcgacctgaagtgggagtaccagcgggcttcctcttcaagccctctagattactctttccagtttacaccatctagaactgcaggtacgagtgggtgttcaaaagagtcattggcctattcggagagtgagtggggtccgagcctcgatgactatgataggcgtcctaaatcctcgtacctcaaccagactagcccccagcctacaatgcggcagcggagcagatcaggttctggcttgcaggagcctatgatgcctttcggggcttccgccttcaaaacacatccgcaaggacacagctataactcatacacctacccaagactgtcggaacctaccatgtgcattcccaaggtcgactacgacagagcccaaatggtgttgtctccacctttatctggaagtgatacataccccaggggccctgcaaagctgccccagtcacaaagcaaaagcggatattcctcctccagtcatcagtatccaagcggataccataaggcaactctgtaccaccacccttctctgcagagttccagccagtacatctcaacggcctcttacctgagctcccttagtctctcctcatccacatatcctcccccttcctgggggagctcaagcgaccagcagccatctcgggtgagccatgagcagttcagggccgctctgcagcttgttgtttctcctggcgatccccgtgagtacctggccaactttatcaaaattggggagggatccaccggaatcgtgtgtattgctacagaaaaacatacggggaaacaagtggctgtaaaaaaaatggacttgagaaaacaacagcgccgcgaacttctgtttaacgaagtcgtaataatgcgggattaccatcatgacaacgtggtcgacatgtatagttcgtacctggtgggagatgagctctgggtggttatggagttcctcgagggcggcgctttaacagatatcgtgacccacacccgtatgaatgaggaacagatcgccaccgtgtgtctctccgtcttaagggccctctcatacctgcataatcagggcgttattcatcgcgatattaaaagcgactctatacttcttacgtctgacggacgtgtgtctagcgtgctgagaggcttcctcgacttgatgctcgtccgagagcccagtcagcgcgctactgctcaggaactgcttggacatccctttcttaaacttgccgggccccccagctgtattgtaccactgatgcggcagtaccgccaccattag

SEQ ID NO: 203661 - DNA, 4500 bp, Artificial Sequence
  derived and/or modified sequence
agttccccagcgtgcgcccggggagaccgggaacatggcgctgggagcgctgtagcagctgagaaggggctgaggcaccgccgcttcgctgacagccggccaccagaaatacactgtggtgaaatgcttccacctcttgctaaaatgaacactgaggaaaaatgaagaagactgacaagcaccagcgaaaagttgcagaatagaaatagccacactcctctggagtctttaattcatccacagccatcatataaaggttttggcatcatgtttgggaagaaaaagaaaaagattgaaatatctggcccgtccaactttgaacacagggttcatactgggtttgatccacaagagcagaagtttaccggccttccccagcagtggcacagcctgttagcagatacggccaacaggccaaagcctatggtggacccttcatgcatcacacccatccagctggctcctatgaagacaatcgttagaggaaacaaaccctgcaaggaaacctccatcaacggcctgctagaggattttgacaacatctcggtgactcgctccaactccctaaggaaagaaagcccacccaccccagatcagggagcctccagccacggtccaggccacgcggaagaaaatggcttcatcaccttctcccagtattccagcgaatccgatactactgctgactacacgaccgaaaagtacagggagaagagtctctatggagatgatctggatccgtattatagaggcagccacgcagccaagcaaaatgggcacgtaatgaaaatgaagcacggggaggcctactattctgaggtgaagcctttgaaatccgattttgccagattttctgccgattatcactcacatttggactcactgagcaaaccaagtgaatacagtgacctcaagtgggagtatcagagagcctcgagtagctcccctctggattattcattccaattcacaccttctagaactgcagggaccagcgggtgctccaaggagagcctggcgtacagtgaaagtgaatggggacccagcctggatgactatgacaggaggccaaagtcttcgtacctgaatcagacaagccctcagcccaccatgcggcagaggtccaggtcaggctcgggactccaggaaccgatgatgccatttggagcaagtgcatttaaaacccatccccaaggacactcctacaactcctacacctaccctcgcttgtccgagcccacaatgtgcattccaaaggtggattacgatcgagcacagatggtcctcagccctccactgtcagggtctgacacctaccccaggggccctgccaaactacctcaaagtcaaagcaaatcgggctattcctcaagcagtcaccagtacccgtctgggtaccacaaagccaccttgtaccatcacccctccctgcagagcagttcgcagtacatctccacggcttcctacctgagctccctcagcctctcatccagcacctacccgccgcccagctggggctcctcctccgaccagcagccctccagggtgtcccatgaacagtttcgggcggccctgcagctggtggtcagcccaggagaccccagggaatacttggccaactttatcaaaatcggggaaggctcaaccggcatcgtatgcatcgccaccgagaaacacacagggaaacaagttgcagtgaagaaaatggacctccggaagcaacagagacgagaactgcttttcaatgaggtcgtgatcatgcgggattaccaccatgacaatgtggttgacatgtacagcagctaccttgtcggcgatgagctctgggtggtcatggagtttctagaaggtggtgccttgacagacattgtgactcacaccagaatgaatgaagaacagatagctactgtctgcctgtcagttctgagagctctctcctaccttcataaccaaggagtgattcacagggacataaaaagtgactccatcctcctgacaagcgatggccggataaagttgtctgattttggtttctgtgctcaagtttccaaagaggtgccgaagaggaaatcattggttggcactccctactggatggcccctgaggtgatttctaggctaccttatgggacagaggtggacatctggtccctcgggatcatggtgatagaaatgattgatggcgagcccccctacttcaatgagcctcccctccaggcgatgcggaggatccgggacagtttacctccaagagtgaaggacctacacaaggtttcttcagtgctccggggattcctagacttgatgttggtgagggagccctctcagagagcaacagcccaggaactcctcggacatccattcttaaaactagcaggtccaccgtcttgcatcgtccccctcatgagacaatacaggcatcactgagcagaggattcgtgtaggtggcaaagctagatgaggacatgagaataattcaggagaacaaaaggaaacacagaacatgcaaaaggcctgtgcattctagaccagccaattggtgggacagcgtgatgaccggcagggttcaacagaccagggcatcttcttgtgtcttaaacaggcatctctccactgacagccggtgtggtcacttggagcacggctttaataagtcattattatatttttcagcccttcatccagcaaatcagaaggactcagtacaaactccgttatgatatatcctagccacatgcagggtaacatgtaggattttctatattgaaagaatacttttctggcaaaaaaaaaaaaaaaagaaagaaaggaaaacaaaaagcacttttttcttaatggtagcagtataatgtattttgcaacgaatttgtaatttttctgtacgatagttttgataatttatagtactttgatgtcatgtagccattgtatcagttgaagtaatacttgtttactagaggagtttgaacaaagcctttcctacttttttatccctttaagagaaccaatgattctttaggaactttgaatactgaatgactctcaatcaccgtcagctttagtaaaatctctttcttatcctaacaagtgtcttatttggtggaagaagaattaagagtgatggtgatggtgtgcacgtttcattaatccaaccaaaaataatgaaataaaatttgagccacagtataccactccttgggataaagttaaatatttttaaagatcacattttccatgaacgcctctagtagcaaaccattcttttgcacaccacaatgtttccctcagtgccctttctcaaatgggtacaatgttcccttgtggccaaatttccctcccagggagcaatttcagtgctaggatcattggattcagttcccaaaatagaatgtttcagtgagaccatgagaattccaggctcacaaagggagaggagagaacagggcaagacgtttggtttcatttgtcaccatttttaaaactctgtatgctagcacaccaaactcttgtctatatttacctttgtaccacagtattaatcgctattgttcatgtatcgtgctggaagtctgaactgactctagaggatgaattagcaagagggtattttaccaggtatgatctgacttcagttgtgcccatgttataatgtgtttccgacataggagagtcgtgctgctgtctagatcttcttgaatgttgataaaaatgaatgactactacaatacattttgtgttgcttgttggatgaatttgcatgttaactgtaggccaatatagatttgcctttaaaactctggaagagctacatagtcatcattagtttctattaattatgcatcagacaaaagccatttgttaccaaactgggaaaacagaggcttttcttaactatttcacatactgtaacaaatatgaatttaaatttgtgatagcgctctggttgctctaagcataattaagaatttttgtaattaataggttgctaattatttatcactgctaaaaaggaaaaaaggcataaaatgaccttctactgattagattttcagttttctttcaaactggaaatgcctccataaatatgatctatgattttgcttcataaaacagcaaatcaatgttttatgtaaaatattaaagcattaatataaatatgtgagaataaaaacaatctaaatccagaaaatggcagtcctaaatgttcatgagacagattgtattaatttaaccaggactatgtagaagtagaaagaaaagaaaaagaaaatcttttttaaaccagaataaacattaaaaactattgcagaaaatagtggattttggattccaaacattttcgacagtgtaatggaaatttttctgtaattttcttaccatcgggtattttttaaagtattcattgagtttaccaaaagttactgtagcttaaaaggttttgtgagcactaactattggcagaaactgcatttgcaaataaaaataaatgtttgccttttc

SEQ ID NO: 203662 - DNA, 4613 bp, Artificial Sequence
  derived and/or modified sequence
ggcgctgggagcgctgtagcagctgagaaggggctgaggcaccgccgcttcgctgacagccggccaccaggtttctgtctcccagtataatcatatccagccccatggctcttactggggcctctgaaatgtttatcaccaaatctgtgtctgcagttccaacctcttccctgagcatcaaagctgtatttccaactttcgctggatgcttctatctggaaatacactgtggtgaaatgcttccacctcttgctaaaatgaacactgaggaaaaatgaagaagactgacaagcaccagcgaaaagttgcagaatagaaatagccacactcctctggagtctttaattcatccacagccatcatataaaggttttggcatcatgtttgggaagaaaaagaaaaagattgaaatatctggcccgtccaactttgaacacagggttcatactgggtttgatccacaagagcagaagtttaccggccttccccagcagtggcacagcctgttagcagatacggccaacaggccaaagcctatggtggacccttcatgcatcacacccatccagctggctcctatgaagacaatcgttagaggaaacaaaccctgcaaggaaacctccatcaacggcctgctagaggattttgacaacatctcggtgactcgctccaactccctaaggaaagaaagcccacccaccccagatcagggagcctccagccacggtccaggccacgcggaagaaaatggcttcatcaccttctcccagtattccagcgaatccgatactactgctgactacacgaccgaaaagtacagggagaagagtctctatggagatgatctggatccgtattatagaggcagccacgcagccaagcaaaatgggcacgtaatgaaaatgaagcacggggaggcctactattctgaggtgaagcctttgaaatccgattttgccagattttctgccgattatcactcacatttggactcactgagcaaaccaagtgaatacagtgacctcaagtgggagtatcagagagcctcgagtagctcccctctggattattcattccaattcacaccttctagaactgcagggaccagcgggtgctccaaggagagcctggcgtacagtgaaagtgaatggggacccagcctggatgactatgacaggaggccaaagtcttcgtacctgaatcagacaagccctcagcccaccatgcggcagaggtccaggtcaggctcgggactccaggaaccgatgatgccatttggagcaagtgcatttaaaacccatccccaaggacactcctacaactcctacacctaccctcgcttgtccgagcccacaatgtgcattccaaaggtggattacgatcgagcacagatggtcctcagccctccactgtcagggtctgacacctaccccaggggccctgccaaactacctcaaagtcaaagcaaatcgggctattcctcaagcagtcaccagtacccgtctgggtaccacaaagccaccttgtaccatcacccctccctgcagagcagttcgcagtacatctccacggcttcctacctgagctccctcagcctctcatccagcacctacccgccgcccagctggggctcctcctccgaccagcagccctccagggtgtcccatgaacagtttcgggcggccctgcagctggtggtcagcccaggagaccccagggaatacttggccaactttatcaaaatcggggaaggctcaaccggcatcgtatgcatcgccaccgagaaacacacagggaaacaagttgcagtgaagaaaatggacctccggaagcaacagagacgagaactgcttttcaatgaggtcgtgatcatgcgggattaccaccatgacaatgtggttgacatgtacagcagctaccttgtcggcgatgagctctgggtggtcatggagtttctagaaggtggtgccttgacagacattgtgactcacaccagaatgaatgaagaacagatagctactgtctgcctgtcagttctgagagctctctcctaccttcataaccaaggagtgattcacagggacataaaaagtgactccatcctcctgacaagcgatggccggataaagttgtctgattttggtttctgtgctcaagtttccaaagaggtgccgaagaggaaatcattggttggcactccctactggatggcccctgaggtgatttctaggctaccttatgggacagaggtggacatctggtccctcgggatcatggtgatagaaatgattgatggcgagcccccctacttcaatgagcctcccctccaggcgatgcggaggatccgggacagtttacctccaagagtgaaggacctacacaaggtttcttcagtgctccggggattcctagacttgatgttggtgagggagccctctcagagagcaacagcccaggaactcctcggacatccattcttaaaactagcaggtccaccgtcttgcatcgtccccctcatgagacaatacaggcatcactgagcagaggattcgtgtaggtggcaaagctagatgaggacatgagaataattcaggagaacaaaaggaaacacagaacatgcaaaaggcctgtgcattctagaccagccaattggtgggacagcgtgatgaccggcagggttcaacagaccagggcatcttcttgtgtcttaaacaggcatctctccactgacagccggtgtggtcacttggagcacggctttaataagtcattattatatttttcagcccttcatccagcaaatcagaaggactcagtacaaactccgttatgatatatcctagccacatgcagggtaacatgtaggattttctatattgaaagaatacttttctggcaaaaaaaaaaaaaaaagaaagaaaggaaaacaaaaagcacttttttcttaatggtagcagtataatgtattttgcaacgaatttgtaatttttctgtacgatagttttgataatttatagtactttgatgtcatgtagccattgtatcagttgaagtaatacttgtttactagaggagtttgaacaaagcctttcctacttttttatccctttaagagaaccaatgattctttaggaactttgaatactgaatgactctcaatcaccgtcagctttagtaaaatctctttcttatcctaacaagtgtcttatttggtggaagaagaattaagagtgatggtgatggtgtgcacgtttcattaatccaaccaaaaataatgaaataaaatttgagccacagtataccactccttgggataaagttaaatatttttaaagatcacattttccatgaacgcctctagtagcaaaccattcttttgcacaccacaatgtttccctcagtgccctttctcaaatgggtacaatgttcccttgtggccaaatttccctcccagggagcaatttcagtgctaggatcattggattcagttcccaaaatagaatgtttcagtgagaccatgagaattccaggctcacaaagggagaggagagaacagggcaagacgtttggtttcatttgtcaccatttttaaaactctgtatgctagcacaccaaactcttgtctatatttacctttgtaccacagtattaatcgctattgttcatgtatcgtgctggaagtctgaactgactctagaggatgaattagcaagagggtattttaccaggtatgatctgacttcagttgtgcccatgttataatgtgtttccgacataggagagtcgtgctgctgtctagatcttcttgaatgttgataaaaatgaatgactactacaatacattttgtgttgcttgttggatgaatttgcatgttaactgtaggccaatatagatttgcctttaaaactctggaagagctacatagtcatcattagtttctattaattatgcatcagacaaaagccatttgttaccaaactgggaaaacagaggcttttcttaactatttcacatactgtaacaaatatgaatttaaatttgtgatagcgctctggttgctctaagcataattaagaatttttgtaattaataggttgctaattatttatcactgctaaaaaggaaaaaaggcataaaatgaccttctactgattagattttcagttttctttcaaactggaaatgcctccataaatatgatctatgattttgcttcataaaacagcaaatcaatgttttatgtaaaatattaaagcattaatataaatatgtgagaataaaaacaatctaaatccagaaaatggcagtcctaaatgttcatgagacagattgtattaatttaaccaggactatgtagaagtagaaagaaaagaaaaagaaaatcttttttaaaccagaataaacattaaaaactattgcagaaaatagtggattttggattccaaacattttcgacagtgtaatggaaatttttctgtaattttcttaccatcgggtattttttaaagtattcattgagtttaccaaaagttactgtagcttaaaaggttttgtgagcactaactattggcagaaactgcatttgcaaataaaaataaatgtttgccttttc

SEQ ID NO: 203663 - DNA, 4780 bp, Artificial Sequence
  derived and/or modified sequence
cgaaaacccggagcagctgcgtacgctcatggacagtcctccgaggggcgaagccgggcagctgggcatgctcagtagctgggggaggtttgggtggagagtagaaagctgtggctctgcctctcaccccctcccgctggcccccgccccccttgcccctacccagccagtagtagttccccagcgtgcgcccggggagaccgggaacatggcgctgggagcgctgtagcagctgagaaggggctgaggcaccgccgcttcgctgacagccggccaccagatgttcatgcattctagagaaagtggaaaacttagaagcctaattaatgactgtcttctggacctctgagaccatgtttctagtgttttccgtggaatattatcagaaatacactgtggtgaaatgcttccacctcttgctaaaatgaacactgaggaaaaatgaagaagactgacaagcaccagcgaaaagttgcagaatagaaatagccacactcctctggagtctttaattcatccacagccatcatataaaggttttggcatcatgtttgggaagaaaaagaaaaagattgaaatatctggcccgtccaactttgaacacagggttcatactgggtttgatccacaagagcagaagtttaccggccttccccagcagtggcacagcctgttagcagatacggccaacaggccaaagcctatggtggacccttcatgcatcacacccatccagctggctcctatgaagacaatcgttagaggaaacaaaccctgcaaggaaacctccatcaacggcctgctagaggattttgacaacatctcggtgactcgctccaactccctaaggaaagaaagcccacccaccccagatcagggagcctccagccacggtccaggccacgcggaagaaaatggcttcatcaccttctcccagtattccagcgaatccgatactactgctgactacacgaccgaaaagtacagggagaagagtctctatggagatgatctggatccgtattatagaggcagccacgcagccaagcaaaatgggcacgtaatgaaaatgaagcacggggaggcctactattctgaggtgaagcctttgaaatccgattttgccagattttctgccgattatcactcacatttggactcactgagcaaaccaagtgaatacagtgacctcaagtgggagtatcagagagcctcgagtagctcccctctggattattcattccaattcacaccttctagaactgcagggaccagcgggtgctccaaggagagcctggcgtacagtgaaagtgaatggggacccagcctggatgactatgacaggaggccaaagtcttcgtacctgaatcagacaagccctcagcccaccatgcggcagaggtccaggtcaggctcgggactccaggaaccgatgatgccatttggagcaagtgcatttaaaacccatccccaaggacactcctacaactcctacacctaccctcgcttgtccgagcccacaatgtgcattccaaaggtggattacgatcgagcacagatggtcctcagccctccactgtcagggtctgacacctaccccaggggccctgccaaactacctcaaagtcaaagcaaatcgggctattcctcaagcagtcaccagtacccgtctgggtaccacaaagccaccttgtaccatcacccctccctgcagagcagttcgcagtacatctccacggcttcctacctgagctccctcagcctctcatccagcacctacccgccgcccagctggggctcctcctccgaccagcagccctccagggtgtcccatgaacagtttcgggcggccctgcagctggtggtcagcccaggagaccccagggaatacttggccaactttatcaaaatcggggaaggctcaaccggcatcgtatgcatcgccaccgagaaacacacagggaaacaagttgcagtgaagaaaatggacctccggaagcaacagagacgagaactgcttttcaatgaggtcgtgatcatgcgggattaccaccatgacaatgtggttgacatgtacagcagctaccttgtcggcgatgagctctgggtggtcatggagtttctagaaggtggtgccttgacagacattgtgactcacaccagaatgaatgaagaacagatagctactgtctgcctgtcagttctgagagctctctcctaccttcataaccaaggagtgattcacagggacataaaaagtgactccatcctcctgacaagcgatggccggataaagttgtctgattttggtttctgtgctcaagtttccaaagaggtgccgaagaggaaatcattggttggcactccctactggatggcccctgaggtgatttctaggctaccttatgggacagaggtggacatctggtccctcgggatcatggtgatagaaatgattgatggcgagcccccctacttcaatgagcctcccctccaggcgatgcggaggatccgggacagtttacctccaagagtgaaggacctacacaaggtttcttcagtgctccggggattcctagacttgatgttggtgagggagccctctcagagagcaacagcccaggaactcctcggacatccattcttaaaactagcaggtccaccgtcttgcatcgtccccctcatgagacaatacaggcatcactgagcagaggattcgtgtaggtggcaaagctagatgaggacatgagaataattcaggagaacaaaaggaaacacagaacatgcaaaaggcctgtgcattctagaccagccaattggtgggacagcgtgatgaccggcagggttcaacagaccagggcatcttcttgtgtcttaaacaggcatctctccactgacagccggtgtggtcacttggagcacggctttaataagtcattattatatttttcagcccttcatccagcaaatcagaaggactcagtacaaactccgttatgatatatcctagccacatgcagggtaacatgtaggattttctatattgaaagaatacttttctggcaaaaaaaaaaaaaaaagaaagaaaggaaaacaaaaagcacttttttcttaatggtagcagtataatgtattttgcaacgaatttgtaatttttctgtacgatagttttgataatttatagtactttgatgtcatgtagccattgtatcagttgaagtaatacttgtttactagaggagtttgaacaaagcctttcctacttttttatccctttaagagaaccaatgattctttaggaactttgaatactgaatgactctcaatcaccgtcagctttagtaaaatctctttcttatcctaacaagtgtcttatttggtggaagaagaattaagagtgatggtgatggtgtgcacgtttcattaatccaaccaaaaataatgaaataaaatttgagccacagtataccactccttgggataaagttaaatatttttaaagatcacattttccatgaacgcctctagtagcaaaccattcttttgcacaccacaatgtttccctcagtgccctttctcaaatgggtacaatgttcccttgtggccaaatttccctcccagggagcaatttcagtgctaggatcattggattcagttcccaaaatagaatgtttcagtgagaccatgagaattccaggctcacaaagggagaggagagaacagggcaagacgtttggtttcatttgtcaccatttttaaaactctgtatgctagcacaccaaactcttgtctatatttacctttgtaccacagtattaatcgctattgttcatgtatcgtgctggaagtctgaactgactctagaggatgaattagcaagagggtattttaccaggtatgatctgacttcagttgtgcccatgttataatgtgtttccgacataggagagtcgtgctgctgtctagatcttcttgaatgttgataaaaatgaatgactactacaatacattttgtgttgcttgttggatgaatttgcatgttaactgtaggccaatatagatttgcctttaaaactctggaagagctacatagtcatcattagtttctattaattatgcatcagacaaaagccatttgttaccaaactgggaaaacagaggcttttcttaactatttcacatactgtaacaaatatgaatttaaatttgtgatagcgctctggttgctctaagcataattaagaatttttgtaattaataggttgctaattatttatcactgctaaaaaggaaaaaaggcataaaatgaccttctactgattagattttcagttttctttcaaactggaaatgcctccataaatatgatctatgattttgcttcataaaacagcaaatcaatgttttatgtaaaatattaaagcattaatataaatatgtgagaataaaaacaatctaaatccagaaaatggcagtcctaaatgttcatgagacagattgtattaatttaaccaggactatgtagaagtagaaagaaaagaaaaagaaaatcttttttaaaccagaataaacattaaaaactattgcagaaaatagtggattttggattccaaacattttcgacagtgtaatggaaatttttctgtaattttcttaccatcgggtattttttaaagtattcattgagtttaccaaaagttactgtagcttaaaaggttttgtgagcactaactattggcagaaactgcatttgcaaataaaaataaatgtttgccttttc

SEQ ID NO: 203664 - DNA, 2593 bp, Artificial Sequence
  derived and/or modified sequence
ggagcagctgcgtacgctcatggacagtcctccgaggggcgaagccgggcagctgggcatgctcagtagtagttccccagcgtgcgcccggggagaccgggaacatggcgctgggagcgctgtagcagctgagaaggggctgaggcaccgccgcttcgctgacagccggccaccagaaatacactgtggtgaaatgcttccacctcttgctaaaatgaacactgaggaaaaatgaagaagactgacaagcaccagcgaaaagttgcagaatagaaatagccacactcctctggagtctttaattcatccacagccatcatataaaggttttggcatcatgtttgggaagaaaaagaaaaagattgaaatatctggcccgtccaactttgaacacagggttcatactgggtttgatccacaagagcagaagtttaccggccttccccagcagtggcacagcctgttagcagatacggccaacaggccaaagcctatggtggacccttcatgcatcacacccatccagctggctcctatgaagacaatcgttagaggaaacaaaccctgcaaggaaacctccatcaacggcctgctagaggattttgacaacatctcggtgactcgctccaactccctaaggaaagaaagcccacccaccccagatcagggagcctccagccacggtccaggccacgcggaagaaaatggcttcatcaccttctcccagtattccagcgaatccgatactactgctgactacacgaccgaaaagtacagggagaagagtctctatggagatgatctggatccgtattatagaggcagccacgcagccaagcaaaatgggcacgtaatgaaaatgaagcacggggaggcctactattctgaggtgaagcctttgaaatccgattttgccagattttctgccgattatcactcacatttggactcactgagcaaaccaagtgaatacagtgacctcaagtgggagtatcagagagcctcgagtagctcccctctggattattcattccaattcacaccttctagaactgcagggaccagcgggtgctccaaggagagcctggcgtacagtgaaagtgaatggggacccagcctggatgactatgacaggaggccaaagtcttcgtacctgaatcagacaagccctcagcccaccatgcggcagaggtccaggtcaggctcgggactccaggaaccgatgatgccatttggagcaagtgcatttaaaacccatccccaaggacactcctacaactcctacacctaccctcgcttgtccgagcccacaatgtgcattccaaaggtggattacgatcgagcacagatggtcctcagccctccactgtcagggtctgacacctaccccaggggccctgccaaactacctcaaagtcaaagcaaatcgggctattcctcaagcagtcaccagtacccgtctgggtaccacaaagccaccttgtaccatcacccctccctgcagagcagttcgcagtacatctccacggcttcctacctgagctccctcagcctctcatccagcacctacccgccgcccagctggggctcctcctccgaccagcagccctccagggtgtcccatgaacagtttcgggcggccctgcagctggtggtcagcccaggagaccccagggaatacttggccaactttatcaaaatcggggaaggctcaaccggcatcgtatgcatcgccaccgagaaacacacagggaaacaagttgcagtgaagaaaatggacctccggaagcaacagagacgagaactgcttttcaatgaggtcgtgatcatgcgggattaccaccatgacaatgtggttgacatgtacagcagctaccttgtcggcgatgagctctgggtggtcatggagtttctagaaggtggtgccttgacagacattgtgactcacaccagaatgaatgaagaacagatagctactgtctgcctgtcagttctgagagctctctcctaccttcataaccaaggagtgattcacagggacataaaaagtgactccatcctcctgacaagcgatggccgggtttcttcagtgctccggggattcctagacttgatgttggtgagggagccctctcagagagcaacagcccaggaactcctcggacatccattcttaaaactagcaggtccaccgtcttgcatcgtccccctcatgagacaatacaggcatcactgagcagaggattcgtgtaggtggcaaagctagatgaggacatgagaataattcaggagaacaaaaggaaacacagaacatgcaaaaggcctgtgcattctagaccagccaattggtgggacagcgtgatgaccggcagggttcaacagaccagggcatcttcttgtgtcttaaacaggcatctctccactgacagccggtgtggtcacttggagcacggctttaataagtcattattatatttttcagcccttcatccagcaaatcagaaggactcagtacaaactccgttatgatatatcctagccacatgcagggtaacatgtaggattttctatattgaaagaatacttttctggc

SEQ ID NO: 203665 - DNA, 2160 bp, Artificial Sequence
  derived and/or modified sequence
atgtttggcaaaaaaaagaagaagatcgagatttcaggaccaagcaacttcgagcaccgggtgcatacagggtttgatccacaggagcagaagttcacaggcctgccacagcagtggcatagtcttctcgcggatacagcaaacagacctaagccaatggtcgacccctcttgcattacccccattcaacttgctccaatgaagaccatcgtgcggggtaacaaaccctgcaaagaaacatcaataaatggactgctcgaagacttcgacaacatttctgtaacccgttctaatagccttaggaaagagtctccacccaccccagaccaaggcgcatcctcccatggacctgggcacgctgaagagaatgggttcattaccttcagccagtacagctccgaatcagatactacagctgattacaccactgaaaagtacagggaaaaatccttgtacggagacgatctggacccttactaccgagggtcccacgccgcaaagcagaatggacatgttatgaagatgaaacatggcgaggcttattattcggaagtgaagcctctcaaatcagacttcgcacgcttcagcgcagattaccacagtcatctcgacagcctctcgaaaccaagtgaatactccgaccttaagtgggagtaccagagagccagttcctctagtcccctcgattacagctttcagttcaccccgagccgaactgcaggcactagtggatgtagtaaggaaagtctcgcatactcagagtcagagtggggcccaagcctggacgactacgatcggaggccaaagtcatcttatctgaatcaaacttcgcctcaacctacaatgagacagcggagccggagtggcagcgggctccaggaacctatgatgcccttcggcgcatccgcctttaagactcatccccagggccattcctacaactcgtacacctatccaagactcagcgagcccaccatgtgtattcctaaggtggactatgacagggcacagatggtgttgagcccacccctgtccggaagcgatacttatccgaggggcccagctaagctgccccagtcacagtcaaagtccggatactcatcgtcgtctcatcaatatccaagtggatatcataaggccaccttatatcatcacccgtctttgcagtcctcgagtcagtatatttcaacggcatcttacttaagcagtctctcactttcctcctcaacttatccccctccaagttggggaagctcatcagaccagcagccgtcaagagttagccatgagcagttccgtgctgccctacagcttgttgtgtcccctggggacccacgggagtatcttgcgaacttcatcaaaattggagaaggatccaccggaatcgtgtgcatcgcgacagaaaagcacactgggaagcaggtggccgtgaaaaaaatggacctgcgaaagcaacagcggagggagctgttgtttaatgaggtggtgattatgcgggactaccaccacgataatgtggtagacatgtactcttcttatctggtgggcgacgagctttgggtggtgatggaattcctggaaggcggagctctgacagacattgtgacacacacgcgtatgaatgaggagcagatcgcgactgtctgcttaagcgttctgcgtgctctgtcatacctgcacaatcagggagttatccacagggacattaagtcagattctatcttgctgacctctgacggtcgaatcaagctgtccgactttggattttgtgcgcaggtaagtaaggaggtcccgaaacggaagtctttggtcgggactccatactggatggcacctgaagtgatatccagactcccttacggcacagaagtggatatatggtccctgggcatcatggttatcgagatgatcgacggcgaacccccatacttcaacgagcctccgctccaggcaatgcgacggatccgagattctctgcccccaagggtcaaagacctccataaagtcagttccgtgttgcgcggttttctcgacctcatgcttgtacgggagccttcccagcgcgcaaccgcccaggaattgctgggtcacccttttctgaaactcgccggtcccccaagttgtatcgtaccacttatgcgtcagtaccgtcaccattag

SEQ ID NO: 203666 - DNA, 2160 bp, Artificial Sequence
  derived and/or modified sequence
atgtttgggaagaagaagaagaaaatcgaaatctcaggtccaagcaatttcgagcatagagtccataccggcttcgatccacaggagcagaagtttactggactgcctcaacagtggcactctctgctcgcggatacagccaaccgccctaagcctatggtggatccgtcgtgcatcaccccaattcaactcgcccctatgaaaaccatagtacgcggaaataagccctgtaaggaaacctccatcaatggtcttctcgaggatttcgataatataagcgttacgagatcaaattccttgcgcaaagaatctcctcctaccccagaccagggagccagttctcatggtcccggtcatgccgaagaaaacggatttatcaccttctcccagtactctagcgagagtgatacaaccgctgactacaccacagagaaatacagggagaaaagcctctacggagatgacctagacccatattaccgtggaagtcatgccgctaaacagaacgggcacgttatgaagatgaaacatggtgaagcctattatagtgaagtgaagccgctgaagtctgatttcgctagattctctgcggattaccatagccacctggatagcctcagcaagcccagcgagtacagcgaccttaaatgggaataccagagggcatcgagcagctcccctctggattattcctttcagtttacgccgtcccgaacagcagggaccagcggatgctccaaggagtcactggcctattcagagtcagaatgggggccatcactcgacgattacgatcgacgaccaaagagcagctatctcaaccagacaagtccacagccaaccatgcggcagaggtcaaggtccggttcagggctccaggagcctatgatgccttttggtgcctcggctttcaagactcatccacagggccattcttataacagctatacttacccgcgattgtcagagccgactatgtgcattccaaaagtggactatgaccgggctcagatggtgctgtctccccctctgagcggatcagacacatatcctagagggcctgccaagctcccacagagccaaagtaaaagtggctactcgtcctcatcccaccagtacccttcaggataccacaaggccacactgtatcaccacccgagtttacagagcagttctcagtatatctcaacggcctcctacctatcatccctgagcctctctagtagcacttatcctcctccatcttggggctcaagtagcgaccaacagccgtctcgagtcagtcacgagcagttcagggcagccttacagctcgtggtctctccaggtgaccctcgcgaatacttggctaactttatcaagatcggggagggctctaccggtattgtttgcatcgccaccgagaaacatacaggcaagcaagtggcagttaaaaagatggacctgagaaagcagcagcgcagagaactgctattcaatgaggtagtcatcatgagggactaccatcacgataacgtggtcgacatgtatagctcgtacctcgtgggggacgagctgtgggtggtgatggagtttctggagggtggcgctctgactgacatcgtgacacatacgcggatgaatgaggagcagattgcaacggtctgcttgtcagtcctccgcgcactatcataccttcacaatcagggtgtgatacatagggatatcaagtcggactcaatcctcttgacctccgatggccgaattaagctgtccgactttgggttctgcgctcaggtttccaaggaggtccctaaaagaaagtccctcgtaggaacaccctattggatggcgccagaggtcatatcgcgcctgccgtatggcactgaagttgacatctggtccctcggaattatggtcattgaaatgatcgatggggaacccccatatttcaacgaacctccactccaggccatgaggaggatacgcgactcgcttccaccacgggtgaaggacctccataaggtaagtagcgtgctcagaggctttcttgatcttatgctagtgcgggaaccttctcaaagagccacagcccaggaactgctgggccatcctttcttaaagcttgcaggtccaccatcatgcatagtccctcttatgagacagtacagacaccattag

SEQ ID NO: 203667 - DNA, 2160 bp, Artificial Sequence
  derived and/or modified sequence
atgttcggcaagaaaaagaagaagatcgagatatccggcccatcaaacttcgagcaccgagttcatactggcttcgatcctcaggagcagaagtttaccggattgccccaacagtggcacagtctgcttgccgatacagcaaacaggccaaagccgatggttgatccaagctgcatcacgccaatccagctggctcccatgaaaaccatcgtgcgagggaacaaaccttgcaaagagacatctataaacggcctgctagaggatttcgacaacatttccgtgacccggtccaacagcctgagaaaggagagtcctccaacaccagaccagggggcatcttcccacggtcccggacacgctgaagagaacggctttattacattttcccagtattcatcggagagtgacaccacagcagattatacaaccgagaagtacagagagaagtctctttacggtgacgatctggacccgtactataggggatctcacgcagcaaaacagaacggccacgtcatgaagatgaaacacggtgaagcctactattcagaggtgaagccccttaagagtgacttcgctaggttctccgccgactaccactcccacctcgactctttatccaagccaagcgaatactctgatctaaagtgggaataccagcgagcttcttcttcatcccctctggattatagttttcagttcactccatctcgcacagcagggaccagtggatgttcgaaagagtccctggcttacagcgagtctgagtggggtccttctctggatgactatgatcgcaggcccaagtctagctacctgaatcagacttcaccacagcccaccatgcgccagcgctcacgatccggtagtggcttacaggagccaatgatgccttttggcgcatccgccttcaagacgcacccccaaggccattcctacaattcatacacttatccaaggctttccgaacctaccatgtgtattcctaaggttgattacgatcgagcgcagatggtgttgtctcccccactgtcaggcagtgacacttaccccagaggacccgcaaagctgcctcagagccagtcaaagtcagggtactcgagtagtagtcatcaatacccatcaggctaccacaaagccacgctatatcaccacccgtccctgcagagtagcagtcagtatatctctacagcctcttacctttcttcactctccctttcctccagtacctacccccctcccagttggggctcctcaagcgatcagcagcccagcagagtttcgcacgagcagttccgggctgccttacagctcgtagtttctcccggagacccgcgagagtacctagctaactttataaagataggcgaagggtccaccggaattgtgtgtattgcgactgagaagcatactggaaaacaggtggccgttaagaagatggaccttaggaaacagcagcgaagagagctgctgttcaacgaggtggtgataatgcgcgattaccatcacgacaacgtggtggacatgtacagctcttatctagtcggcgacgaactgtgggtcgtcatggaatttctcgagggaggggctctgactgatattgttacccatactaggatgaatgaggaacagatcgctaccgtgtgtctctccgtcttaagggccctgagttatttgcataatcaaggagtcatccatagggacataaaatcagactccattctgctgacaagcgatggccgaatcaaactctccgactttggcttctgcgcccaggtgtcgaaggaagtgcccaaacgaaagtccctcgtcgggactccctattggatggctccagaggtgatctcaaggctgccctatgggacagaggtggacatctggtcactaggtatcatggttattgagatgattgatggcgagcctccctatttcaacgaacccccactgcaggccatgcgcaggatccgagactcactgcccccaagggttaaagatctacataaagtctcttctgtgctcagagggttcctggatctgatgttagttcgtgagccttcacagcgcgctacagcgcaagaactcctgggacatcctttcctcaagcttgccggtcccccatcctgtatcgtccccctgatgcgtcaatatcggcaccactag

SEQ ID NO: 203668 - DNA, 1743 bp, Artificial Sequence
  derived and/or modified sequence
atggtggaccctagttgtatcaccccaatccagctagccccaatgaaaacgatagtgcgtggcaataagccttgcaaagagacctcaattaatggactgcttgaggatttcgacaatatatctgtcaccagatcgaactctctgcggaaggagagccctccaactcctgatcaaggcgcatcttcacacggtccaggacatgctgaagaaaacgggttcattaccttcagccagtacagttctgagtcagacaccactgccgactacacaactgagaagtatagagagaagagtctctacggggatgatttggacccttattaccgcggatcccacgccgcaaaacagaatggccatgttatgaagatgaagcacggtgaggcatactattcagaggtcaaaccattaaagagcgatttcgctcgtttctcagccgattaccactcgcatctggattccctgagcaaacctagcgaatattctgacctcaaatgggagtatcaacgtgcaagcagtagtagccctcttgattatagttttcaatttacaccaagtagaaccgcaggtactagtgggtgctcgaaggaatccttagcttacagtgaaagtgaatggggtccatctctggacgattacgatcgtcgacctaaatcctcttacctcaaccagacatccccccagcctaccatgcgtcagagaagccgcagcggcagcggattacaggagcccatgatgccctttggggcatctgcattcaagacacacccgcaggggcacagttataacagttatacataccctcggttaagtgagccaacgatgtgtataccaaaggtcgactacgaccgagcgcagatggtgctaagcccacccctctcaggctccgatacctaccctagagggcctgccaaacttccacagagccagtccaaatcaggttatagctccagcagtcatcaatacccatccggctatcacaaagccacgctataccaccacccaagtttacagtcttccagccagtatataagcaccgcaagttatttaagcagtctttctctgtcctcctccacatacccacccccatcttggggaagttccagcgatcaacaacccagccgcgtgtcccatgagcagtttagggccgctctgcagttagtggtctcacccggagacccgagagagtaccttgcaaatttcattaaaatcggcgaaggcagcacagggattgtatgtatcgccacggaaaagcacaccggaaagcaggtcgccgtcaagaagatggacctgcggaagcaacagaggagggagcttctgttcaatgaggttgtaattatgcgggattaccaccatgacaacgtagtggacatgtattcatcatacctagtgggcgacgagctctgggtggtcatggaatttctggagggtggcgcactgacggatattgttacccatacaagaatgaatgaagaacagatcgctactgtatgccttagcgtactacgagcgctgagctacctgcacaaccaaggcgtcatccacagggacatcaaatctgattcaatcctgcttacatctgatgggcgtgtctccagcgtcctgagggggtttttagatttgatgctggtacgtgagccatcacaacgggcaaccgcccaggagttactggggcacccattcctgaagttggcaggaccccctagttgtatcgtccctttaatgcggcaataccggcaccactag

SEQ ID NO: 203669 - DNA, 603 bp, Artificial Sequence
  derived and/or modified sequence
gtgctgatcttcgcctgcctggtgcccggcttccccgccgtgatgagcagcagaggcccctgcaccctggagaccctgatcaaccccagccccagcgtggccgacgtgaagatctaccccgaggagatcacccccctgctgcccgccatcagcggcgagaagatcgccgaggaccagacctgcttcttcctgcagatcctgctgaagtacatggtgatccaggccgccagcctggagtggaagaacaaggagaaccaggacaccggcttcaagttcctgttcaccctgttcagaaagtactacctgccccacctgttccccagcttcaccaagctgaccaacatctacaagcccgtgctggacatcccccacctgagacccaagcccgtgtacatcaccaccaccagagacaacgagaacatctacagcaccaagatcccctacatggccgccagagtggtgttcatcaagtggatcgtgaccttcttcctggagaagaagtacctgaccgccacccagaacaccaagaacggcgtggacgtgctgcccaagatcatccaggtgtgccaccccagcagcttctacctgctgatgctggtgtag

SEQ ID NO: 203670 - DNA, 684 bp, Artificial Sequence
  derived and/or modified sequence
tgactgatcttcgcctgcctggtgcccggcttccccgccgtgatgagcagcagaggcccctgcaccctggagaccctgatcaaccccagccccagcgtggccgacgtgaagatctaccccgaggagatcacccccctgctgcccgccatcagcggcgagaagatcgccgaggaccagacctgcttcttcctgcagatcctgctgaagtacatggtgatccaggccgccagcctggagtggaagaacaaggagaaccaggacaccggcttcaagttcctgttcaccctgttcagaaagtactacctgccccacctgttccccagcttcaccaagctgaccaacatctacaagcccgtgctggacatcccccacctgagacccaagcccgtgtacatcaccaccaccagagacaacgagaacatctacagcaccaagatcccctacatggccgccagagtggtgttcatcaagtggatcgtgaccttcttcctggagaagaagtacctgaccgccacccagaacaccaagaacggcgtggacgtgctgcccaagatcatccagaccgtgggcggcggcgccgtgcaggagagagcccccgagctggacggcggcggccccaccgagcaggacaagagccacagcaacagcagcaccctgagcgacagaagactgagcaacagctag

SEQ ID NO: 203671 - DNA, 855 bp, Artificial Sequence
  derived and/or modified sequence
atgttcagcagaagaagccacggcgacgtgaagaagagcacccagaaggtgctggaccccaagaaggacgtgctgaccagactgaagcacctgagagccctgctggacaacgtggacgccaacgacctgaagcagttcttcgagaccaactacagccagatctacttcatcttctacgagaacttcatcgccctggagaacagcctgaagctgaagggcaacaacaagagccagagagaggagctggacagcatcctgttcctgttcgagaagatcctgcagttcctgcccgagagaatcttcttcagatggcactaccagagcatcggcagcaccctgaagaagctgctgcacaccggcaacagcatcaagatcagatgcgagggcatcagactgttcctgctgtggctgcaggccctgcagaccaactgcgccgaggagcaggtgctgatcttcgcctgcctggtgcccggcttccccgccgtgatgagcagcagaggcccctgcaccctggagaccctgatcaaccccagccccagcgtggccgacgtgaagatctaccccgaggagatcacccccctgctgcccgccatcagcggcgagaagatcgccgaggaccagacctgcttcttcctgcagatcctgctgaagtacatggtgatccaggccgccagcctggagtggaagaacaaggagaaccaggacaccggcttcaagttcctgttcaccctgttcagaaagtactacctgccccacctgttccccagcttcaccaagctgaccaacatctacaagcccgtgctggacatcccccacctgagacccaagcccgtgtacatcaccaccaccagatag

SEQ ID NO: 203672 - DNA, 5622 bp, Artificial Sequence
  derived and/or modified sequence
atgttctcaagacgcagtcacggggacgtgaagaagtctacccaaaaagtgttggacccaaaaaaagacgtcttaaccagacttaagcacttgagggccctgttagataacgtcgacgcgaacgacctaaagcagtttttcgagaccaactattctcagatttatttcatcttctacgagaatttcattgccttagaaaattctctgaagctaaaagggaacaataagagccaacgcgaagagctggactcaattctgttcttgtttgaaaagatcctgcagttcttgcctgagcgcatttttttccgatggcactaccaatccattgggtccacgttgaagaaattactccatacaggcaattcaatcaagattaggtgcgaaggcattcgactttttttgctttggcttcaggcactccaaaccaactgtgctgaagaacaggtgctgatatttgcatgcttggtgcctggattccccgccgtgatgagcagccgaggcccttgtaccctggagacactgattaatcccagccctagcgtcgccgacgtgaagatatacccggaagagatcactcccctcttgcccgccatttcaggggagaaaattgcagaggaccagacttgtttctttctccagattctcctaaaatatatggtgatccaggccgcctccctagaatggaagaataaggagaaccaggatacaggctttaaatttctcttcacgttgttccggaaatattacctcccacacctttttccctctttcaccaaactcactaacatttacaagcccgtactggacatcccgcacttgagacctaaacccgtgtacatcaccacaacacgggataatgaaaacatatactccacgaaaataccatatatggccgcccgggtggtcttcattaaatggattgtcacttttttccttgagaaaaagtatctgactgctacacagaacaccaaaaatggcgttgacgtgctgcccaagatcattcagactgtcggcggcggcgccgtacaagagcgtgcccccgaattggatgggggtgggcctaccgagcaggataagagccattcgaatagctccaccctgtccgatcgcagattaagtaactcctccctgtgcagtatcgaggaggaacacagaatggtctacgagatggtccagagaatcctcttgtccacaagaggttatgtgaactttgtcaatgaggtcttccaccaggcgttcctgcttccttcatgcgagatagccgtcaccagaaaggtggtccaggtctaccgcaagtggattctccaggacaaacctgtcttcatggaagaacctgatcgcaaagatgtggcgcaggaagacgccgaaaagctcggctttagcgagaccgactctaaagaggcttcgtccgaatcttctggtcacaagagaagctccagctggggacggacatatagctttacttccgccatgtctaggggctgcgtcaccgaagaagaaaatactaacgttaaagcgggtgtccaggccctgctgcaggtgttcctgactaattcggccaatatcttcctgcttgaaccctgcgccgaagtaccggtcctcctgaaagaacaggtagatgcttgcaaggccgtgctgatcatctttcgacggatgattatggagctgactatgaataagaagacctgggaacagatgctgcagatactgctgaggatcaccgaagccgttatgcaaaagcctaaagacaaacaaattaaagatcttttcgcccaatcgctcgcaggactgctattccgaaccctgatggtcgcatggattagagcaaatctctgcgtatacatctccagggaactgtgggatgattttctgggggtcctgtcttctcttacagaatgggaagaactgatcaatgagtgggctaatattatggattcattaactgccgtccttgcccggactgtttacggggtggagatgacaaatctgccattagataagttgtcagaacagaaagagaaaaaacagcgaggtaagggctgtgtgttggacccccaaaaggggacaacagtcggaagatccttctcactttcctggcgcagccaccctgatgtcacggaacccatgcgcttccgaagcgccaccacttctggtgccccaggagtggagaaagccaggaatatcgtgcggcagaaggcaaccgaagtggaagagtgccagcagtcagagaacgcgccagccgccggctcaggacatctgacagtgggccagcagcagcaggtgcttaggagtagttctacttcagacatccctgagcccctgtgtagtgattcctctcaaggacaaaaagctgaaaatactcaaaatagttcatcctctgaaccacagcctattcaagagaataaaggacatgttaaacgggaacacgaggggataacgattctcgtccggcggtcttcctccccggctgagcttgatctaaaagatgatctccagcagacccaaggcaagtgccgtgagcgccaaaaatccgagagcaccaactccgatacaacccttggatgtacaaacgaagcggagctgtctatgggtccatggcagacatgtgaggaagatcctgagttgaacacccctaccgatgtagtggcagatgccgatgctcgacactggctgcaattgagccctaccgatgcatccaatctaactgacagctccgaatgcctgacagacgattgttccataattgccggcggaagccttaccgggtggcatcctgactcggccgcagtcctgtggaggagagtattagggatcctgggtgacgtgaataatatccaaagccctaaaatacacgctagagtgttctgctacctgtatgagctctggtacaagctagccaagattagggataacctagccatctccctggataaccaatccagtccttcgcctccggtcctaatcccgcccctgcgcatgtttgcctcatggttatttaaggccgccaccctccctaatgagtataaggagggaaaattgcaggcataccgcctgatctgtgccatgatgacgagacgccaggatgtgctgcccaacagcgacttcttggtccacttctatctcgtgatgcacctgggactgaccagtgaggaccaggacatactgaacaccataatccggcactgccctcccaggttcttctctctaggtttccctggctttagtatgctggtaggcgacttcattactgctgctgccagggtgctttctacagacattttgactgccccaaggtctgaggcggttacagtgttgggcagcctcgtgtgtttccctaatacgtatcaggagatccctctacttcaatctgtgccagaagttaatgaagcgatcaccggcaccgaggatgttaagcattacctaatcaacattctgcttaaaaacgccaccgaagaacctaatgaatacgcacggtgtatagccgtgtgttcactcggagtctggatctgtgaggaactggcacagtgcacctctcacccgcaagtgaaagaggcgattaatgtcatcggcgtgacccttaaatttcccaacaagatcgtggcccaggtggcctgcgatgttttacaactgctggtttcgtactgggaaaagttacaaatgtttgagacctcactgcctcgcaagatggctgagatactggtggccacagtagccttcctactccctagcgcagagtacagttcagttgagaccgataagaagtttatagtctcactgctcctttgcctgctggattggtgcatggcactcccagtgtccgtgctgttgcatcctgtctccacagccgttctagaagagcagcatagcgccagagccccacttttggattatatctatagagtgcttcattgttgtgtgtgtgggtcaagcacatatacccagcagtcacattacatcctgactctggcggacctgtcctcgaccgactacgaccccttccttcccctcgcaaatgtgaaaagcagtgagcccgtccagtaccattctagtgccgagctgggaaacttgctcacagtggaggaagagaaaaaacggaggtcactggagctgatccctttgaccgctagaatggtcatggcacatctggtcaaccacctgggccactatcccttgtcgggtggccctgctatcctacacagcttggtctccgagaatcatgacaacgcacatgtcgaaggttcggagttgagcttcgaggtgtttcggtctcccaatctccagctctttgtctttaatgatagtacactgatctcctacctgcagacacccacagaagggccagtcggcgggtcccctgtagggagccttagcgatgtcagggtgattgtgcgcgatatcagcggaaaatattcatgggatgggaaagtgctatacggcccactcgaaggttgcctcgcccctaacggaagaaatccatcctttctgatcagttcttggcatcgagatacattcggaccgcagaaagattccagccaagtggaggagggagacgacgtgctggacaagctgctagaaaatataggccatacatctcctgaatgcctcctcccctcgcaacttaatctaaatgaaccgtccttgactccttgtggcatgaactacgatcaggagaaggagattattgaggtgatcctgcggcagaatgctcaggaagacgaatacatccagagtcacaacttcgactcggcaatgaaagtgacgtctcagggccaaccttcgccggtcgagccccgcgggccattctatttctgccgtctgttgcttgatgatctgggtatgaattcttgggatcgtcgcaagaatttccacttgctcaaaaaaaacagcaagctactgcgcgagcttaagaacctggactctagacagtgccgcgagacacacaaaattgctgtattttacattgccgaagggcaagaggataagtgttctattctctctaacgagagaggatctcaggcttatgaggacttcgtggccggacttggctgggaagtcgatctgtccacgcactgtgggttcatgggaggcctccagagaaacggcagtactggacaaacagctccgtattacgccacctccactgtcgaggttatctttcatgtgagtacacgcatgccctcagactccgatgatagtttgactaagaaattgcgccacctggggaacgacgaggttcacattgtctggagcgaacattccagggattatcgaaggggcatcatccctactgcctttggagacgttagcataatcatctatccaatgaagaatcacatgtttttcatcgctattacaaaaaaaccggaagtgccattctttgggcccctgttcgacggcgccattgtatccggcaagctgctcccttctttggtatgtgccacgtgtattaacgcaagtcgcgcagttaagtgcctgatcccattgtatcagtccttttacgaagaacgggccctgtacctagaggctattattcaaaatcatcgagaggtgatgaccttcgaggactttgcagctcaggttttcagcccatcaccatcatactccttaagtggaacagactag

SEQ ID NO: 203673 - DNA, 603 bp, Artificial Sequence
  derived and/or modified sequence
gtgttgattttcgcgtgcctcgtgccgggctttcccgcagtaatgagttcaagggggccctgcactttggagacactaatcaatccctcgcctagtgtggccgatgtgaagatctatcctgaggaaatcactccattgctccccgcaatttccggagaaaagatagccgaagatcagacctgcttttttctgcagatcctcctgaagtacatggtcattcaagctgcgagcctggagtggaagaataaagagaatcaggacacaggcttcaaattcctttttaccctgttcaggaaatattatctacctcacctcttcccttccttcacaaaactgacaaatatctataaacccgtgttagatatcccccatctgcggccgaagcccgtttatataactaccaccagagacaatgagaacatttactcaacaaagatcccgtatatggctgctcgcgtcgtctttattaagtggatagttactttcttcttggaaaagaagtacttaaccgctacccagaacacaaagaacggggttgatgttttgcccaagatcatccaggtgtgtcacccatcgtcattttacctgttgatgctcgtctag

SEQ ID NO: 203674 - DNA, 603 bp, Artificial Sequence
  derived and/or modified sequence
gtgctgatttttgcttgcttggtcccaggtttccccgccgtgatgagctccaggggaccctgtacattggaaactctgattaacccatcccccagcgtcgcagatgtgaaaatctacccagaagaaataactccactgctgcctgctatcagtggagagaagattgcagaggatcagacctgcttttttctgcaaatcctgttgaagtatatggtgatccaggcggcaagcctagagtggaaaaacaaggaaaaccaggacacaggtttcaagttcctcttcaccctcttcagaaagtactatcttccgcacctttttccgagctttaccaaactgacaaatatctacaagcccgtccttgatattcctcatctccggccaaagcccgtctatatcaccaccacccgcgacaatgaaaatatatacagtaccaagatcccttacatggccgcccgagtggtcttcattaaatggatagtaaccttcttccttgaaaagaaatacctgacagccacccagaataccaagaatggagtcgacgtcctccctaagatcatccaagtttgccacccttccagcttttacctgctcatgctcgtttag

SEQ ID NO: 203675 - DNA, 684 bp, Artificial Sequence
  derived and/or modified sequence
taacttatcttcgcatgtttagtgccaggattcccggctgtgatgtcctccagaggtccatgtactttggaaacgcttatcaatcccagcccctccgttgcagacgtcaaaatttatcccgaggaaatcacccctttactccctgctataagtggtgagaagattgccgaagaccaaacttgcttttttctccagatcctgctgaagtatatggtgatccaggcagcctctttagaatggaagaacaaagaaaaccaggacaccggctttaagtttttattcacactattcaggaaatactacctcccgcaccttttcccatccttcactaagctgacaaacatatacaagccggtgttggacatcccccatctgagaccaaagcctgtatacatcaccacgacgagagacaacgagaacatctattcgaccaagatcccctacatggcggcaagagtggtcttcattaaatggatagtcacctttttcctcgaaaaaaagtacttgaccgctacccagaatactaaaaacggagtcgatgtgctgccaaaaattatccaaacagtcggcggaggtgccgtgcaggaacgcgcccccgagctcgatgggggtggccccaccgagcaagataaatcacactctaactcaagcaccctctcagatcgaaggcttagcaattcctag

SEQ ID NO: 203676 - DNA, 855 bp, Artificial Sequence
  derived and/or modified sequence
atgttctctcgccgcagtcacggggacgtcaaaaaatcaacccagaaagtcctggaccccaagaaggatgtgttgactcgtctgaagcatcttcgagctctgcttgataatgtggatgcaaacgacctgaagcaatttttcgagacaaactacagccaaatctattttatattctatgaaaattttatcgccctggagaattccctgaaactaaaaggtaataacaagtcacagcgggaggagctggattccattctgttcctttttgagaagatcttacagttcctgcccgaacgaatcttctttcggtggcactatcagagtattggctccaccctgaaaaagctgctccataccgggaactccatcaaaatcagatgcgaaggaattcggttgttcttactatggttgcaagccctacagaccaattgtgccgaggaacaggttcttatcttcgcatgcctggtccctggattccctgcagtaatgagctccaggggaccatgtacgcttgagaccctaattaatcccagcccctccgtagccgacgtcaagatataccctgaagagatcacaccattgctcccggccatctcgggtgagaaaatagccgaagaccagacctgcttttttttgcaaattctcctgaaatacatggtgatccaagctgcctccctcgagtggaaaaacaaggaaaaccaggacaccggcttcaagtttttattcacactgttcaggaaatattacctgccccatctcttcccctctttcacaaaactgactaacatttacaaacccgtgcttgacatcccgcacttaagacccaaaccagtgtatataacaaccacacgctag

SEQ ID NO: 203677 - DNA, 6287 bp, Artificial Sequence
  derived and/or modified sequence
gcggcggcggcggcggcggcagcagcggggctgggggcggcgagtggcccgcgcgacacgcgccggcctcgaccctatgctttgattcgcgtggcgcaggcgcctactgccccgccggcggggcccgggcttcctgccgcgggatgttctcccgaaggagccacggggatgtgaagaagtccacccagaaggtgctggacccgaagaaggacgtgctgacccgcctgaagcacctgcgggcgctgctggataatgtggatgcaaatgatcttaagcagttttttgagaccaactattctcagatatatttcatcttctatgaaaattttatagcactggaaaatagtttgaaattaaaagggaataataagtcacaaagggaggagctggactccatcctcttcctttttgaaaaaatactgcagtttctacctgaacgaattttctttcgatggcattaccagagtataggctcaactttaaagaagcttctacacactggaaattctattaagataagatgtgaaggaatcaggctgtttcttctgtggcttcaagcacttcagacaaactgtgcagaagagcaggttctgatttttgcttgcctggtgcctggtttcccagcagtcatgtcatccaggggcccttgcacactggagacactcatcaatcccagccctagtgtagctgatgtaaagatatatccagaagaaatcactccactcctaccagccatatcaggggagaagattgctgaggaccaaacctgcttttttcttcaaatactgttgaagtatatggttattcaggctgcgagcttggagtggaagaataaggagaatcaagatactggttttaaatttctttttacattgtttcgaaagtattatcttcctcatttatttccatcatttactaagttaacaaacatctacaaacctgtacttgacatcccccatttgagaccaaagcctgtgtacattactaccactcgagacaatgagaacatttacagtacaaagattccatatatggcagctcgtgttgtttttattaagtggattgtaaccttctttttggaaaaaaagtatctaactgcaacacaaaacactaaaaatggagttgatgtattgcctaaaatcatccagactgttggtggtggtgctgtgcaggagagagcgcctgagctggatggtggtgggcccacggagcaggacaaaagccattctaacagcagcaccttgtcggaccgaagactcagcaactccagcctctgtagcattgaagaagagcaccgaatggtgtatgaaatggtacagcggattctcttgtcaacacgaggttatgtcaacttcgtgaatgaagtatttcaccaggcatttttgttgccttcctgtgagatagctgtaacaagaaaagtagttcaagtgtacagaaagtggattctccaggacaaacctgtgttcatggaggagccagatagaaaagatgttgcccaagaagatgctgaaaaattaggattttccgagactgatagcaaggaggcctcatctgaaagttctggtcataaacgatcttccagttggggacgcacatactccttcacaagtgcaatgagcagagggtgtgtgacagaggaggaaaatacaaatgtgaaagccggcgtccaggctttgttgcaggtatttttgacgaactctgcaaacatctttttgttggaaccatgtgctgaagttcctgtgctcttgaaagaacaagttgatgcttgtaaagctgttttgattatttttaggcgcatgataatggagcttacaatgaataaaaagacatgggaacagatgttgcaaatactactcaggataacagaagctgtcatgcagaagccaaaggataaacaaataaaggacttgtttgcccagagcttggcagggttactatttaggacgctcatggtagcttggatccgagcaaacctctgtgtgtacatttctcgagagctctgggatgactttcttggtgtgctgtcctccctcacggaatgggaggaacttataaacgagtgggccaacattatggactccttgacagcagtgcttgcaagaaccgtttatggagttgagatgacaaacctacctctggataaattaagtgaacaaaaggaaaagaagcaacgaggcaaaggctgtgttctagatcctcagaaaggaaccaccgtggggaggtccttttctctcagctggcggagccacccagatgtgaccgaaccgatgcgatttaggagtgccaccacgtctggagcaccgggagtggaaaaggcaagaaatattgttcgccaaaaagcaactgaagtggaggagtgtcaacagtcagaaaatgcacctgcagccggatctggccatctcacagtgggacagcagcagcaggtccttcggagcagcagcacctccgacatccccgagccgctgtgctcagattcttctcagggtcaaaaggcagaaaacacacagaattcgagttcttcagagcctcagcctattcaagagaataaaggacatgtgaagagagaacatgaaggaataacaatcttagttcgaagaagcagcagccctgctgaattggatttgaaagatgatttgcagcagacacaaggaaaatgtagggaaagacagaagagtgaaagtaccaacagtgacacaactctgggctgtaccaatgaggcagagctgtccatgggcccatggcagacctgtgaggaagacccagaactgaatactcccacagatgttgtggctgatgctgatgcccgtcattggttacaactgagtcccaccgatgcttcaaatttaacagatagcagcgagtgcctcacagatgactgtagtataatcgccggggggagcctcactggttggcacccagactctgctgctgtgttatggcgaagggtcttggggatcctcggagatgtgaataacatccagtcacccaagatccatgccagagttttctgctatctctatgaactctggtacaaactagcaaagatacgggataatctagcaataagcctggataaccagtcttctccatctcctccagttttgatcccaccactcagaatgtttgcatcatggctgtttaaggcggcgacactgccaaatgaatataaggaaggcaaactacaagcctacaggctgatctgtgccatgatgaccagacgccaggacgttctgccaaactcagatttcctggtgcatttttaccttgtgatgcacctgggattaaccagcgaggatcaggatatcttaaatacgatcataaggcactgtccaccccgctttttctccctgggttttcctggcttctcaatgctggtgggggacttcatcacggccgctgccagggtccttagcacagacattttgacggcgcctcgttcagaggctgtcactgtcctcggctctctggtctgctttccaaatacctaccaggagattcctttactgcagtcagtgccagaagtaaatgaggccattacaggaactgaagatgtcaagcattacctcataaatattttactgaagaatgccacagaagaaccaaatgaatatgcaagatgcattgctgtttgctcccttggggtctggatatgtgaagagcttgcacagtgtacaagccaccctcaggtgaaagaggccatcaatgtgataggagtaactctgaagtttcccaacaaaatcgtggcccaggtagcttgcgatgtccttcagttgctggtttcctactgggagaagcttcagatgtttgaaacctctctgcctcggaaaatggcagaaatcctcgtggccacagttgcttttcttttaccaagtgcagagtactcctcagtggaaacagacaagaagtttattgtgtccttgctactctgcctcttggactggtgcatggcattgcccgtgagtgtccttctccaccccgtgtccacagcagtcctagaggagcagcattcggccagagcccccttgctggattatatctacagggttttgcactgctgtgtgtgtggctcaagcacgtacacccaacagagtcactacatactgaccctggctgacttgtcatccacggattatgaccccttcctgccactggcaaatgtgaagagctctgagccagtccagtatcattcatcagcagaattgggtaacctgctgactgttgaagaggagaagaagagaagaagtttggagttgatccctttgactgctcgaatggtgatggcccacctggtgaaccacctggggcactaccccctcagtgggggccctgccatactgcacagccttgtcagcgagaaccatgacaatgcccatgtggaaggctccgagctgtcctttgaggtgttcagaagtccaaacctgcagctgtttgtatttaatgatagcaccctcatctcctaccttcagacacccacagaaggaccggtagggggatcaccagtgggctctctctctgatgtgagagtaattgtgagggatatctcagggaagtactcttgggatggtaaggttttatatggacctttggaaggctgcttagcacccaatggaagaaatccttcatttctgatttcgagctggcatcgtgacacatttggacctcagaaagactcttctcaagttgaggagggggatgatgttcttgacaaattacttgaaaacattggccatacaagtcctgaatgccttttaccgtcacagctaaatctaaatgaaccttccctaaccccatgtggcatgaactatgaccaagagaaggaaatcattgaggtcattttgcgccaaaatgctcaagaggatgagtatatccagagtcataacttcgattctgcaatgaaagtcaccagccaagggcagccctccccagtggagccccgaggacccttttatttctgcaggttattgcttgatgacttgggaatgaattcttgggacagaaggaagaattttcatctattgaagaaaaattcaaaattattgagagagctgaaaaatttggactcccgccagtgccgtgagacacacaaaatcgcagtgttttacattgctgaaggtcaagaagacaagtgttcaatcctctctaatgaaagaggaagccaagcatatgaagactttgttgctggacttggatgggaggtggatctctccacccactgtgggttcatgggtggccttcagcgcaatggcagcaccgggcagacggccccttactatgctacctcaactgtggaagtgattttccatgtttccactcgaatgccgtcagactcagatgattccctcaccaaaaagcttcgtcacttggggaatgacgaggtccatatcgtctggtctgaacactccagagactaccgcaggggtattatcccaactgcctttggagatgtttcaatcattatttacccaatgaagaatcacatgttcttcatcgcgataacgaagaaacctgaggttccattttttgggcctctgtttgatggagccatagtgagtgggaagctgctgccaagccttgtatgtgccacgtgcatcaacgccagcagggctgtgaagtgcctcatcccactctaccagagcttctatgaagagcgagctctgtatctcgaagcaataattcagaaccaccgcgaagtaatgacattcgaggatttcgcagcccaagtcttttctccctctcccagctactccctcagcggaacggattaaaacacgtaaaggtctcatttcaatatttgagcaaggggccctggcctccagtctgagtgctgacctcgaagagcccctgagtgaggaggagacagaacaccctctcctgcctctgccccgagccactaaacccagaatctccaggaaatttcgttgctgtactagtgccctcagcaggtcttcccattagtggacttctgaagcccatggtgaatcccactaccgtgtctcagatgggactcaaactaggctgtatcatcttgtcctgaaacctcacaaaccttggacttccaaagaagaaaagaaaaagtcaccaaaaaccagagatgaacccactgacacgtgggcactggtgtggctgctctgggcagatgacagcaggaaaagattctgcgctttcagggagggggcagagggcagcttgcttctgcaccccaagttgtttcttctcatttatgaacccaagcatgattcacaaaggggctggcaaaacaattgtctaattgaggaatctgatctgca

SEQ ID NO: 203678 - DNA, 5622 bp, Artificial Sequence
  derived and/or modified sequence
atgttcagccgccgcagccatggagatgtgaagaagagcacccagaaggtgctggaccccaagaaggatgtgctgacccggctgaagcacctgcgggccctgctggacaacgtggatgccaatgacctgaagcagttctttgagaccaactacagccagatctacttcatcttctatgagaacttcatcgccctggagaacagcctgaagctgaagggcaacaacaagagccagcgggaggagctggacagcatcctcttcctgtttgagaagatcctgcagttcctgcctgagcgcatcttcttccgctggcactaccagagcatcggcagcaccctgaagaagctgctgcacactggaaacagcatcaagatccgctgtgagggcatccgcctcttcctgctgtggctgcaggccctgcagaccaactgtgccgaggagcaggtgctgatctttgcctgcctggtgcccggcttccctgctgtgatgagcagccggggcccctgcaccctggagaccctcatcaaccccagccccagcgtggctgatgtgaagatctacccagaggagatcacccccctgctgcctgccatctctggagagaagattgctgaggaccagacctgcttcttcctgcagatcctgctgaagtacatggtgatccaggccgccagcctggagtggaagaacaaggagaaccaggacaccggcttcaagttcctgttcaccctcttcaggaagtactacctgccccacctgttccccagcttcaccaagctgaccaacatctacaagcctgtgctggacatcccccacctgcggcccaagcctgtgtacatcaccaccacccgggacaatgaaaacatctacagcaccaagatcccctacatggccgcccgggtggtgttcatcaagtggatcgtgaccttcttcctggagaagaagtacctgacagccacccagaacaccaagaatggagtggatgtgctgcccaagatcatccagacagtgggcggcggcgctgtgcaggagcgggcccctgagctggatggcggcggccccacagagcaggacaagagccacagcaacagcagcaccctgagtgaccggcggctgagcaacagcagcctgtgcagcattgaggaggagcacaggatggtgtatgagatggtgcagaggatcctgctgagcacccggggctacgtgaactttgtgaatgaggtgttccaccaggccttcctgctgcccagctgtgaaattgctgtgaccaggaaggtggtgcaggtgtacaggaagtggatcctgcaggacaagcctgtgttcatggaggagccagacaggaaggatgtggcccaggaggatgctgagaagctgggcttcagcgagacagacagcaaggaggccagcagcgagagcagcggccacaagaggagcagctcctggggccgcacctacagcttcaccagcgccatgagccggggctgtgtgacagaggaggagaacaccaacgtgaaggccggcgtgcaggccctgctgcaggtgttcctgaccaacagcgccaacatcttcctgctggagccctgtgccgaggtgcctgtgctgctgaaggagcaggtggatgcctgcaaggctgtgctgatcatcttccggaggatgatcatggagctgaccatgaacaagaagacctgggagcagatgctgcagatcctgctgcgcatcacagaggccgtgatgcagaagcccaaggacaagcagatcaaggacctgtttgcccagagcctggccggcctgctcttccgcaccctgatggtggcctggatccgggccaacctgtgtgtgtacatcagccgggagctgtgggatgacttcctgggcgtgctgagcagcctgacagagtgggaggagctgatcaatgagtgggccaacatcatggacagcctgacagctgtgctggccaggacagtgtatggagtggagatgaccaacctgcccctggacaagctgtctgagcagaaggagaagaagcagaggggcaagggctgtgtgctggacccccagaagggcaccaccgtgggccgctccttcagcctgtcctggaggagccacccagatgtgacagagcccatgaggttccgcagcgccaccaccagcggggcccctggggtggagaaggccaggaacatcgtgcggcagaaggccacagaggtggaggagtgccagcagagtgaaaatgccccagctgctggcagcggccacctgactgtgggccagcagcagcaggtgctgcggagcagcagcaccagtgacatccctgagcccctgtgcagcgacagcagccagggccagaaggccgagaacacccagaacagcagcagcagcgagccccagcccatccaggagaacaagggccacgtgaagcgggagcacgagggcatcaccatcctggtgagaagaagcagcagccctgctgagctggacctgaaggatgacctgcagcagacccagggcaaatgtcgggagcggcagaagtctgagagcaccaacagcgacaccaccctgggctgcaccaatgaagctgagctgtccatgggcccctggcagacctgtgaagaagatcctgagctgaacacccccacagatgtggtggctgatgctgatgcccggcactggctgcagctgagccccacagatgccagcaacctgacagacagcagcgagtgcctgacagatgactgcagcatcatcgccggcggcagcctgaccggctggcacccagattctgctgctgtgctgtggaggagagtgctgggcatcctgggagatgtgaacaacatccagagccccaagatccacgcccgggtcttctgctacctgtatgagctgtggtacaagctggccaagatccgggacaacctggccatcagcctggacaaccagagcagccccagcccccctgtgctgatcccccccctgaggatgtttgcctcctggctgttcaaggccgccaccctgcccaatgagtacaaggagggcaagctgcaggcctaccgcctcatctgtgccatgatgacccggcggcaggatgtgctgcccaacagcgacttcctggtgcacttctacctggtgatgcacctgggcctgaccagcgaggaccaggacatcctgaacaccatcatccgccactgccccccacgcttcttcagcctgggcttccctggcttctccatgctggtgggggacttcatcacagctgctgcccgggtgctgagcacagacatcctgacagcccccaggtctgaggccgtgacagtgctgggcagcctggtgtgcttccccaacacctaccaggagatccccctgctgcagagcgtgcctgaggtgaatgaggccatcaccggcacagaagatgtgaagcactacctgatcaacatcctgctgaagaatgccacagaggagcccaatgaatatgcccgctgcatcgctgtgtgcagcctgggcgtgtggatctgtgaggagctggcccagtgcaccagccacccccaggtgaaggaggccatcaacgtgattggagtgaccctgaagttccccaacaagatcgtggcccaggtggcctgtgatgtgctgcagctgctggtgtcctactgggagaagctgcagatgtttgagaccagcctgcccaggaagatggccgagatcctggtggccaccgtggccttcctgctgcccagcgctgagtacagctctgtggagacagacaagaagttcatcgtgtccctgctgctgtgcctgctggactggtgcatggccctgcctgtgtctgtgctgctgcaccctgtgtccacagctgtgctggaggagcagcacagcgcccgggcccccctgctggactacatctacagagtgctgcactgctgcgtgtgtggcagcagcacctacacccagcagagccactacatcctgaccctggccgacctgagcagcacagattatgaccccttcctgcccctggccaacgtgaagagcagcgagcctgtgcagtaccacagcagcgctgagctgggcaacctgctgactgtggaggaggagaagaagagaagaagcctggagctgatccccctgacagccaggatggtgatggcccacctggtgaaccacctgggccactaccccctgagcggcggccctgccatcctgcacagcctggtgtctgagaaccacgacaatgcccacgtggagggcagcgagctgagctttgaggtgttccgcagccccaacctgcagctgtttgtgttcaatgacagcaccctcatctcctacctgcagacccccacagagggccctgtgggcggcagccctgtgggcagcctgagtgatgtgcgggtcatcgtgcgggacatcagcggcaagtacagctgggatggcaaggtgctgtatggccccctggagggctgcctggcccccaacggcaggaaccccagcttcctgatcagctcctggcaccgggacaccttcggcccccagaaggacagcagccaggtggaggagggagatgatgtgctggacaagctgctggagaacatcggccacaccagcccagaatgtctgctgcccagccagctgaacctgaatgagcccagcctgaccccctgtggcatgaactatgaccaggagaaggagatcattgaagtcatcctgcggcagaatgcccaggaggatgagtacatccagagccacaactttgacagcgccatgaaggtgaccagccagggccagcccagccctgtggagccccggggccccttctacttctgccgcctgctgctggatgacctgggcatgaacagctgggacaggaggaagaacttccacctgctgaagaagaacagcaagctgctgcgggagctgaagaacctggacagccggcagtgccgggagacccacaagattgctgtgttctacatcgccgagggccaggaggacaagtgcagcatcctgagcaatgaaagaggcagccaggcctatgaagattttgtggccggcctgggctgggaggtggacctgagcacccactgcggcttcatgggcggcctgcagagaaatggcagcacaggccagacagccccctactatgccaccagcacagtggaggtgatcttccacgtgtccaccaggatgcccagcgacagtgatgacagcctgaccaagaagctgcggcacctgggcaatgatgaggtgcacatcgtgtggagcgagcacagccgggactacagaagaggcatcatccccacagcctttggagatgtgtccatcatcatctaccccatgaagaaccacatgttcttcatcgccatcaccaagaagccagaggtgcccttcttcggccccctgtttgatggagccatcgtgtctgggaagctgctgcccagcctggtgtgtgccacctgcatcaatgccagcagagctgtgaagtgcctgatccccctgtaccagagcttctatgaggagcgggccctgtacctggaggccatcatccagaaccaccgggaggtgatgacctttgaggactttgctgcccaggtgttcagccccagccccagctacagcctgagcggcacagactag

SEQ ID NO: 203679 - DNA, 603 bp, Artificial Sequence
  derived and/or modified sequence
gtgctgatctttgcctgcctggtgcccggcttccctgctgtgatgagcagccggggcccctgcaccctggagaccctcatcaaccccagccccagcgtggctgatgtgaagatctacccagaggagatcacccccctgctgcctgccatctctggagagaagattgctgaggaccagacctgcttcttcctgcagatcctgctgaagtacatggtgatccaggccgccagcctggagtggaagaacaaggagaaccaggacaccggcttcaagttcctgttcaccctcttcaggaagtactacctgccccacctgttccccagcttcaccaagctgaccaacatctacaagcctgtgctggacatcccccacctgcggcccaagcctgtgtacatcaccaccacccgggacaatgaaaacatctacagcaccaagatcccctacatggccgcccgggtggtgttcatcaagtggatcgtgaccttcttcctggagaagaagtacctgacagccacccagaacaccaagaatggagtggatgtgctgcccaagatcatccaggtgtgccaccccagcagcttctacctgctgatgctggtgtag

SEQ ID NO: 203680 - DNA, 684 bp, Artificial Sequence
  derived and/or modified sequence
tgactcatctttgcctgcctggtgcccggcttccctgctgtgatgagcagccggggcccctgcaccctggagaccctcatcaaccccagccccagcgtggctgatgtgaagatctacccagaggagatcacccccctgctgcctgccatctctggagagaagattgctgaggaccagacctgcttcttcctgcagatcctgctgaagtacatggtgatccaggccgccagcctggagtggaagaacaaggagaaccaggacaccggcttcaagttcctgttcaccctcttcaggaagtactacctgccccacctgttccccagcttcaccaagctgaccaacatctacaagcctgtgctggacatcccccacctgcggcccaagcctgtgtacatcaccaccacccgggacaatgaaaacatctacagcaccaagatcccctacatggccgcccgggtggtgttcatcaagtggatcgtgaccttcttcctggagaagaagtacctgacagccacccagaacaccaagaatggagtggatgtgctgcccaagatcatccagacagtgggcggcggcgctgtgcaggagcgggcccctgagctggatggcggcggccccacagagcaggacaagagccacagcaacagcagcaccctgagtgaccggcggctgagcaacagctag

SEQ ID NO: 203681 - DNA, 855 bp, Artificial Sequence
  derived and/or modified sequence
atgttcagccgccgcagccatggagatgtgaagaagagcacccagaaggtgctggaccccaagaaggatgtgctgacccggctgaagcacctgcgggccctgctggacaacgtggatgccaatgacctgaagcagttctttgagaccaactacagccagatctacttcatcttctatgagaacttcatcgccctggagaacagcctgaagctgaagggcaacaacaagagccagcgggaggagctggacagcatcctcttcctgtttgagaagatcctgcagttcctgcctgagcgcatcttcttccgctggcactaccagagcatcggcagcaccctgaagaagctgctgcacactggaaacagcatcaagatccgctgtgagggcatccgcctcttcctgctgtggctgcaggccctgcagaccaactgtgccgaggagcaggtgctgatctttgcctgcctggtgcccggcttccctgctgtgatgagcagccggggcccctgcaccctggagaccctcatcaaccccagccccagcgtggctgatgtgaagatctacccagaggagatcacccccctgctgcctgccatctctggagagaagattgctgaggaccagacctgcttcttcctgcagatcctgctgaagtacatggtgatccaggccgccagcctggagtggaagaacaaggagaaccaggacaccggcttcaagttcctgttcaccctcttcaggaagtactacctgccccacctgttccccagcttcaccaagctgaccaacatctacaagcctgtgctggacatcccccacctgcggcccaagcctgtgtacatcaccaccaccaggtag

SEQ ID NO: 203682 - DNA, 5622 bp, Artificial Sequence
  derived and/or modified sequence
atgttcagccggcggagccacggcgacgtgaagaagagcacccagaaagtcctcgaccccaagaaggacgttctgacccgcctaaagcacctgcgagctctcctggacaacgtggatgccaatgaccttaaacagttctttgagaccaattatagccagatatactttatattctacgagaatttcattgcactggagaattctctcaagctaaaaggcaacaacaaatcacagcgtgaagagctggattcaattctgtttttgtttgagaagatcttacagttcctaccagaaaggatctttttcagatggcactatcagagtattgggtcaacattaaaaaagttgcttcatactgggaactctattaaaatccgctgcgagggcatcagacttttcttgctctggctgcaggctctgcagacaaattgtgcagaggagcaggtcctcatcttcgcatgtctcgtgccggggtttccagctgtaatgtcatcacggggaccatgcacactcgaaactcttattaacccaagcccgtcagtcgccgacgtgaagatatatcctgaagaaattacccccctgctacctgccatctctggcgaaaaaattgctgaggatcagacgtgtttcttccttcagatcctgctaaagtacatggtaatacaggctgcgagcttggagtggaagaataaagaaaaccaggacaccggcttcaagtttctatttaccttgtttcgaaagtattacttgccccacctgtttccatcttttacaaagcttaccaatatatataagccagtgctggacataccacatctcagacccaaacccgtttacataaccacaaccagggacaacgagaacatctactccaccaagattccctatatggccgcgcgggtagtgttcattaaatggattgtgactttcttcctggaaaagaagtacctaactgcaactcaaaataccaaaaacggcgtagacgtccttcctaaaatcattcagaccgtcggcggcggcgccgttcaggagagggcaccagagttggatgggggaggccctaccgaacaagacaagagccatagcaatagctcaaccctgagtgatagaaggctttctaactcctccctgtgcagtatcgaggaagagcatcggatggtttacgaaatggtgcagcgtatccttctgagcaccaggggatacgtgaattttgtgaatgaggtttttcatcaggcttttctgttgccctcctgcgagattgccgtcaccaggaaggtggtacaggtttatcgcaaatggatcctccaggacaaaccagtgttcatggaggagccagaccgtaaggacgtggcacaggaagacgccgagaagctagggttctcagagaccgatagtaaagaggcgtcctccgagagctccggtcacaagagatcatcttcatgggggcgcacatactcattcacgtcagccatgtctcgaggctgcgtaactgaggaggagaacaccaatgtcaaggccggggtacaggcacttctccaggtttttctgaccaattccgcaaacattttcctgctggaaccttgtgcagaggtacccgtgttgctgaaggaacaagtcgacgcatgcaaggcagtcttaataattttcagacggatgattatggaactcactatgaacaagaaaacctgggaacaaatgctccagattttactgagaatcaccgaggcagtcatgcagaagccgaaagacaagcagatcaaggatctgtttgcgcagtctcttgccgggctactgtttagaacgttgatggtggcctggattcgcgcgaacttgtgtgtctatatttcacgcgaactgtgggacgattttcttggtgttctgtcctccctgaccgagtgggaggaactcattaacgagtgggcaaatattatggattctctgaccgccgtccttgcgagaaccgtttatggggtagaaatgactaacctgccgctggacaaactctccgagcagaaggaaaagaagcagcgcggaaaaggatgtgtgctggatccacagaagggaacgactgtgggtaggagctttagcttgagctggcgttctcatcccgacgtcactgagccgatgcggtttcgttcggcaacaacttcaggagctcccggagtagaaaaagcaagaaatatagtaaggcagaaggctactgaggtagaagagtgtcagcagtcagagaacgctccggccgctggctccggacacctcaccgttggtcagcaacaacaggtcctgcggtcttccagcacgtccgacatacctgagccattatgctctgattcttcacaaggccagaaggcagaaaacacacagaattcaagcagctccgaaccgcagccaatacaggaaaataagggtcatgtgaaaagggagcacgaaggaatcaccatcctggtcaggcggagctcctcacccgccgaattggatctgaaggatgatcttcagcaaacacagggaaagtgtagagaaaggcagaaatcagaatctactaatagcgataccaccttaggatgtactaatgaggcggagctgagcatgggcccttggcaaacatgcgaggaggacccagagctcaacacgccaacagacgtcgtagcagacgcggatgcaaggcattggctccagcttagcccaactgatgcatccaatctcacggatagctccgagtgtcttacagatgattgtagcattatcgcaggcgggtcgctgaccgggtggcatccagactctgcggccgtcctatggcgccgggtgcttggaattttgggtgacgtaaataacatccagtctcctaagatacatgcccgtgtcttctgctatttgtatgagctgtggtacaagttagccaaaatccgagataatctggccattagcctggacaatcaatcttcgccaagcccccccgtgcttatcccccctctacgcatgttcgcctcttggctgttcaaagccgcaaccctccccaacgaatataaagagggtaagttacaagcctataggctgatctgtgcgatgatgacccgcaggcaggatgtactccccaactcagatttcctcgtccacttttaccttgtcatgcatctggggctaacgagtgaggatcaggacatcttgaacactataatcagacactgtcccccccgcttcttcagtctgggattccccggttttagtatgctggtaggcgatttcattaccgctgccgccagagtgctgtcaacagatatactgaccgccccacgaagcgaggccgtgactgtgcttggctcactggtgtgcttccctaacacttatcaggagatacccctgctgcagtccgttcctgaagtgaacgaggctattactggaaccgaagacgtaaaacactacctaatcaatattctgctgaagaacgctaccgaagaacccaacgaatatgcccgctgtatagcggtgtgctccctaggcgtgtggatctgcgaggaactggctcagtgcacttcgcaccctcaagtgaaggaggcaatcaatgtgatcggcgttactctgaaattcccaaataaaattgtagcccaggtagcatgcgatgttttacagctgttggtgtcctactgggaaaagctccagatgttcgagacaagcctccccaggaaaatggccgagattctggtcgctaccgtggccttcctcttgccaagcgcagagtattcctcggtggaaacagacaagaagttcattgtcagcctcctgctgtgtctccttgactggtgtatggcattgcccgtatctgtgctgctccacccagtgtcaaccgccgtgctcgaggaacagcactccgctcgggctcccctactcgactatatctatcgtgtccttcattgctgtgtctgcggtagttccacatatacacagcagtcccactatattctgactttggccgacctgagcagcaccgattacgacccgtttctcccattggccaacgtgaaatcgtcagaacctgtccagtatcactcctctgcggaactcggtaacctgttgactgtggaggaggagaaaaagcgtaggtccctagagttgattccactcactgctcgtatggtgatggctcacctggtaaaccatctgggacactatccactttccggaggtcctgctatcttgcactcccttgtgtctgagaatcatgacaatgcccatgtggaggggagtgagttgtccttcgaagtgttccgcagcccgaatttacagctgttcgtatttaacgactcgactctaatcagctacctgcagacccctaccgagggtcccgtgggcggaagcccagtgggttctttaagcgacgtacgggtcatagtgagggatatatctggtaagtactcttgggatggcaaggttctttacggccctctggaaggctgccttgccccaaatggacgaaaccccagtttcctgataagttcatggcatcgggacacattcggcccccagaaagattcatcccaagtagaggagggtgacgacgtcctcgacaagctattggaaaatattggccacactagtcctgagtgtctactgccttcccaactcaatctgaacgagccaagtcttactccatgtgggatgaattacgaccaagaaaaggagatcattgaggtgattttgcggcaaaacgcccaggaggacgaatacatccaatcccacaatttcgattccgccatgaaggttaccagccagggacagcctagccctgttgaacccaggggccctttctacttttgccgcctccttctggatgatcttggaatgaatagttgggaccgccgcaagaactttcatctgttaaagaaaaacagtaaattactgcgggagctgaaaaatttggactcacgccagtgccgggagactcataagattgccgtgttctatatcgccgaaggccaggaagataaatgttcgattttgtctaatgaacggggcagtcaagcctacgaggattttgtggccgggctgggctgggaggtggacctgtctacccactgtggatttatgggtggcctgcagcgcaatggtagcaccgggcagaccgctccttactacgccacctccacagttgaggtgatctttcatgtgagcacacggatgccctcagactccgatgattccctgaccaagaaactacgccacttaggtaacgacgaggtgcacatagtttggtccgaacacagccgcgactatcggaggggcataattccaaccgccttcggcgacgtgtctatcattatctatccgatgaagaatcatatgtttttcatcgccataacaaaaaagccagaggtaccatttttcggccctctatttgatggagcaatagtctcaggtaagctgttaccctctctagtctgcgctacctgcatcaatgcaagcagggcagtgaaatgtctgatcccactgtatcagtcattttacgaagagcgcgcattgtacctggaggccattatccagaatcatcgggaggtgatgacctttgaggacttcgcagctcaggtgttttcgccatcaccttcatacagtctgagcggcacagactag

SEQ ID NO: 203683 - DNA, 603 bp, Artificial Sequence
  derived and/or modified sequence
gtgctgatcttcgcctgcctggtgcccggcttccccgccgtgatgagctcccgcggcccatgtactctggagaccctaattaatccttcaccgtctgtggccgatgttaaaatatatccggaagaaatcaccccactcctaccagctatctccggggagaagattgccgaggaccaaacttgcttttttctgcagattctcctgaagtacatggtgattcaggcagcttccctggaatggaagaataaggaaaaccaggacactgggttcaaattcttgtttacgctgtttcggaagtactacctcccccatctatttccctcttttaccaagctgacgaatatttacaaacctgtgctcgatattccccacctgagaccgaaaccagtctatatcacaaccacgagagacaatgagaatatctattccacaaaaatcccctacatggccgccagagtcgtgttcattaaatggatcgtgacgttcttcctcgagaagaaatacctgaccgccacccagaacacaaagaatggcgtggacgttctgcctaaaataatccaagtttgccacccctcatcattctatttattgatgctggtatag

SEQ ID NO: 203684 - DNA, 603 bp, Artificial Sequence
  derived and/or modified sequence
gtgctgatcttcgcctgcctggtgcccggcttccccgccgtgatgtcctctcgcgggccttgtactcttgagactcttatcaatcccagtccaagcgtcgccgacgttaagatttatcccgaggaaattacccccctgttgccagccatcagcggtgaaaagatagccgaagaccaaacctgtttcttcctacagattttgctgaagtatatggtgattcaggccgcctccctcgaatggaagaataaagaaaaccaggatactggtttcaagtttttgttcacacttttccgaaagtattaccttccccatttgttcccttcattcacaaagctcacaaatatctataagccggttttggacatccctcacctgcgccccaagcctgtgtacattacaactactcgcgacaatgaaaacatctactcaacaaagattccatacatggccgctcgtgttgtatttattaaatggatcgtcacgttttttttagagaagaagtaccttaccgccacacaaaacaccaagaacggcgtcgacgtgctgccaaagataatccaagtgtgccacccttcttctttctacttgttaatgcttgtgtag

SEQ ID NO: 203685 - DNA, 684 bp, Artificial Sequence
  derived and/or modified sequence
tgactgatcttcgcctgcctggtgcccggcttccccgccgtgatgtcctcccgcgggccttgtactctagagacccttatcaacccttccccatcagtggccgacgtgaagatctaccccgaggaaataacgccactcctcccggcgataagcggcgaaaagatcgcagaggaccagacatgtttcttcctacagattctgctgaaatacatggtgatccaggctgccagccttgagtggaagaacaaagaaaatcaggacactggctttaaatttctgtttactctgtttcgcaagtactacttgccgcatcttttcccctcctttactaaactaacgaatatctacaagccagtgctagatataccccatctaagaccaaagcccgtttacattacaacaactcgggacaatgagaacatttatagtacaaagatcccatatatggccgcgcgcgtggtgtttatcaagtggattgtcaccttttttcttgagaaaaagtaccttacagcaacccaaaacactaaaaatggcgtagacgtgctaccgaaaatcatacaaaccgtagggggaggcgcggtgcaggaacgcgcccctgagctggacggtggtggccccaccgaacaggacaagtcccactctaactctagtacactgagcgatcgccgtctcagcaattcctag

SEQ ID NO: 203686 - DNA, 855 bp, Artificial Sequence
  derived and/or modified sequence
atgttcagccggcggagccacggcgacgtgaagaagagcacccagaaggtgctggaccccaagaaagacgtcttgacccgcctgaagcacttgagagctctactagataacgtcgatgctaatgatcttaagcagttcttcgagacgaactattctcaaatctactttatcttttacgagaacttcatcgctctggaaaattcgctgaaactcaaaggtaacaacaagagccagcgggaggagctggattccattctgttcctgttcgaaaagatcctccagttcttgccggagcgcattttcttcaggtggcactaccagagcattggctctacactgaaaaaattgctccacacaggtaattcaatcaagattcgatgcgagggaatacggctgtttctcctctggttacaggcattacagaccaactgtgccgaagagcaggtacttatctttgcatgtctggttcctgggtttccagcagtgatgtcctccagaggtccttgcaccctcgaaacactcatcaacccttccccttcagtcgcggacgtaaagatttaccccgaagaaattacgcctctgctccctgctatctccggcgaaaagattgcagaggaccagacgtgcttcttcctccagatccttctgaagtatatggtgatccaggctgccagcctcgagtggaaaaacaaagaaaatcaggacactggatttaaattcctgttcactctgtttcgaaagtattacctgccgcacctgtttcctagctttaccaagctcacaaacatctacaagccggttttggatatcccgcaccttcgacctaaacctgtgtatatcactaccacccggtag

SEQ ID NO: 203687 - DNA, 5622 bp, Artificial Sequence
  derived and/or modified sequence
atgttttccagaaggtcccacggtgatgtgaaaaagagcacccagaaagtgctggaccctaaaaaagatgtgcttaccagactgaagcacctgagagccttgcttgacaacgtcgatgctaatgacttgaaacaattttttgaaaccaattacagccagatctattttatcttctacgagaacttcatcgcactcgagaacagcctgaagcttaagggcaacaataagagtcaaagagaagagctcgactctattctattcctgttcgagaaaatcctgcagttccttccagagagaatcttttttagatggcactaccagtccatcgggagtacgctcaaaaaactacttcacactgggaactcaattaagattaggtgcgaggggattagactgttcctgctctggctgcaagctctgcagactaactgtgctgaagagcaggtgctgatcttcgcatgcctagtgcccggttttcctgctgtcatgagcagcaggggaccctgcactctagagaccttgattaacccttccccatccgttgctgacgtgaagatctaccccgaggaaatcaccccactgctgccagccatttcgggagaaaagattgccgaggatcagacctgcttctttctccaaatcctgctcaaatatatggtaatccaggcagcctctctggagtggaagaacaaagagaatcaggacactggctttaaatttctgtttacgctgtttcgtaagtattacctgccacacctcttcccctcctttacaaagctgacaaacatctataagcctgttctggatattccccaccttcgcccaaagcccgtctatattactactacacgcgacaacgagaatatctattccacaaagatcccttatatggccgcacgtgtagtgtttatcaaatggatcgtcaccttttttcttgagaagaaatacctcacagctacacagaataccaagaatggagttgatgtcctgcccaagatcatccaaaccgttggaggcggagctgtgcaggaaagggcccctgagctggatgggggaggtccgacagaacaggacaagtcacactccaattcctctaccctttccgacaggcgcctctctaattcctctctttgttctattgaagaagagcatcgcatggtgtacgagatggtccagcgtattttgctgtccacccgcggatacgtaaactttgtgaacgaggtgtttcaccaagcgttcctgctgccttcatgtgagattgctgtaactcggaaagttgtgcaggtgtaccgcaagtggatcctgcaggataaacctgtatttatggaggaacccgatagaaaagatgttgcccaggaggacgccgagaaactcggattttccgagaccgactctaaggaggccagttctgaaagctccggtcataaacggtcctctagttggggacgaacgtactcgtttacctctgcaatgtcccggggatgtgtgaccgaggaggaaaataccaatgtcaaagctggagtacaggccctgctccaggtgttcctcacaaactccgcaaacatatttctactggaaccgtgtgctgaagtgcccgtactgctgaaagaacaggttgacgcgtgcaaagctgtgttaatcatctttcgcagaatgattatggagctgactatgaacaagaaaacctgggagcaaatgctacaaatcctcctgagaattacagaggccgtcatgcaaaagcccaaggacaaacaaatcaaagatctgttcgctcagtctctggctggcctgctctttcgaacactcatggtcgcctggatacgggctaacctctgcgtgtacatcagtcgagagctgtgggacgattttttgggtgtgctgtcttccctgaccgaatgggaggagcttattaatgagtgggccaacattatggattcccttactgctgttcttgcacgaactgtgtatggtgttgaaatgacgaacttgccgctcgacaaactgagcgaacagaaagagaaaaagcagaggggcaaaggctgcgtgttagacccccaaaaagggaccactgtcggtaggtctttcagcctcagttggcgcagtcaccccgacgttacagaaccaatgcggtttagatcagcaacaaccagcggagcccctggagtggagaaggctagaaacatagtgcgccagaaggctacagaggtcgaggaatgccaacaatctgaaaacgcacccgcagctggaagtgggcacctcacggtaggccagcagcagcaggtgctgcggtccagcagtacaagcgacattcccgagcctctttgtagcgattcttcacaaggacaaaaagctgaaaatacccaaaatagctcttcatctgaaccccagcccatccaggagaacaaaggccacgtaaaacgtgagcatgaaggaatcaccatcctggtccgcagaagtagctcccccgctgagctggatcttaaggatgatcttcaacagacacagggcaaatgcagggaacggcagaagtctgaatccaccaactccgacacaacgctgggctgcaccaacgaggccgaactctctatgggaccctggcagacctgcgaagaagatccagaactgaacacccctacagatgtggtcgcagatgctgatgctcgccactggctgcaactgagccctaccgacgcatccaacttaactgatagctccgagtgtctgacagacgattgcagtattattgccggtggctcactcacgggctggcatcccgatagtgctgcggtgttatggcggagggtgctgggaattctcggcgacgtaaacaatattcaatcaccgaagatccatgctagggtcttctgctatctttacgagttatggtataagctcgcgaaaatcagagacaatttggctatcagccttgataatcaaagttcgccgagtccccctgtgctgatcccgccactgcgcatgttcgccagctggctgttcaaggcggctacattacccaacgagtataaggaagggaaactccaggcctatcgtcttatttgcgctatgatgaccagacgccaagacgtgctccccaattccgattttctggtgcacttctatttggtgatgcatctggggctcactagcgaggatcaggatatattgaatactatcatcagacactgccctccaaggttcttcagcctcggcttccctgggttcagcatgcttgtgggggactttatcaccgccgcagccagggttttgtccacggatattctgacagccccaagatccgaggccgtgaccgtgttgggctccctggtgtgcttcccaaacacttatcaggagattccactactgcagtctgtgcccgaagtgaatgaggccattaccggaaccgaggacgtcaaacactatctcattaacatcctgttgaagaacgcaacggaggagcccaacgagtacgcgagatgtattgccgtctgctcgctgggggtatggatatgcgaggagctggcacagtgcaccagccaccctcaagtgaaggaagccataaatgtcatcggggtgactctgaagtttcctaataagattgtcgctcaagtggcctgtgatgtgctccagctgctcgtcagctattgggagaagctgcagatgtttgaaacttccctcccgaggaaaatggccgagatcctcgtcgccacagtggcctttctgctacccagcgctgaatatagctccgtggaaacagataaaaaattcatcgtgtcgctcctattatgtctcctggactggtgtatggctctgcctgtaagcgtgcttctccatccagtgagcactgccgttctggaggaacagcactcagccagagctcctctcctggattatatataccgcgttctccactgctgcgtatgtggatcttccacctatacacagcagtctcattacatcctcaccttggcggacctctcgtctactgactatgaccccttcctgcctctggctaatgttaaatcgtctgaaccagttcagtatcactcctctgcggaactgggcaatcttttgactgtggaagaggagaagaagagaaggtctctggagctgatccccctaacagccaggatggtcatggcacacttggtgaaccatctggggcactatccgttgtctggcggtcctgctatcctgcatagcctggtgtccgaaaaccacgataacgcacacgtggagggtagcgaactatcctttgaggtcttccgatctccaaatttgcagctctttgtctttaacgattccacacttatctcttatctgcaaacccctaccgaaggtccagttggagggtcacccgtggggtcgctttcagatgtgcgggtgatcgtgcgcgatatcagcggaaaatactcttgggacggtaaagtcttgtacgggcctctggaggggtgcttggctccaaacggtagaaacccgtcattcttaatatcatcttggcacagggatactttcggtcctcagaaagatagctcgcaggtggaagagggagacgatgttctggacaaactgcttgaaaatataggtcacactagtccggaatgcctattaccgtctcagttaaacttgaatgagccttcactgacaccctgcgggatgaactacgatcaggagaaagagatcatcgaggttatcctgcgccagaacgcccaagaggacgagtacatacagtcccacaacttcgatagcgctatgaaggtcacatctcaaggacagccatcccccgtagagccgcgagggccattttatttctgccgcctgctccttgatgaccttggcatgaattcttgggacagaagaaaaaacttccacttgctgaagaaaaactcaaaactgcttagagaattaaaaaaccttgactctaggcagtgcagagaaacacacaagatcgctgtgttctatatcgccgaaggccaggaggataagtgttccattctttcaaacgaacgcggatcccaggcttacgaagacttcgtggccggactcggctgggaggtcgatctgtcaacgcattgcggcttcatgggagggttgcaacgaaacggcagtactggccagaccgccccatattacgctacctctacggtcgaagtgatcttccacgtcagcacgagaatgccttctgacagcgatgactcactcaccaagaagctccgccatctcggaaacgatgaggtccacattgtgtggagcgagcacagccgggattaccggagagggattatccctaccgcattcggggatgtcagcattatcatctaccctatgaagaatcacatgtttttcatagccatcacgaagaagcccgaggtcccgttcttcggcccattatttgacggcgctatcgtgtcaggcaaactcctgccaagcctggtctgcgccacgtgcattaatgcctcgagggcagtaaagtgtctcattcctttgtaccagtccttctatgaagaaagagcactgtacctggaggccattatccagaatcaccgcgaggtgatgaccttcgaagacttcgccgcacaggttttttcgccaagcccaagttactcattaagtggtacagattas

SEQ ID NO: 203688 - DNA, 962 bp, Artificial Sequence
  derived and/or modified sequence
ggcctcgaccctatgctttgattcgcgtggcgcaggcgcctactgccccgccggcggggcccgggcttcctgccgcgggatgttctcccgaaggagccacggggatgtgaagaagtccacccagaaggtgctggacccgaagaaggacgtgctgacccgcctgaagcacctgcgggcgctgctggaaaatactgcagtttctacctgaacgaattttctttcgatggcattaccagagtataggctcaactttaaagaagcttctacacactggaaattctattaagataagatgtgaaggaatcaggctgtttcttctgtggcttcaagcacttcagacaaactgtgcagaagagcaggttctgatttttgcttgcctggtgcctggtttcccagcagtcatgtcatccaggggcccttgcacactggagacactcatcaatcccagccctagtgtagctgatgtaaagatatatccagaagaaatcactccactcctaccagccatatcaggggagaagattgctgaggaccaaacctgcttttttcttcaaatactgttgaagtatatggttattcaggctgcgagcttggagtggaagaataaggagaatcaagatactggttttaaatttctttttacattgtttcgaaagtattatcttcctcatttatttccatcatttactaagttaacaaacatctacaaacctgtacttgacatcccccatttgagaccaaagcctgtgtacattactaccactcgagacaatgagaacatttacagtacaaagattccatatatggcagctcgtgttgtttttattaagtggattgtaaccttctttttggaaaaaaagtatctaactgcaacacaaaacactaaaaatggagttgatgtattgcctaaaatcatccaggtatgccatccatcatctttttatctgttaatgcttgtgtaa

SEQ ID NO: 203689 - DNA, 628 bp, Artificial Sequence
  derived and/or modified sequence
gttctgatttttgcttgcctggtgcctggtttcccagcagtcatgtcatccaggggcccttgcacactggagacactcatcaatcccagccctagtgtagctgatgtaaagatatatccagaagaaatcactccactcctaccagccatatcaggggagaagattgctgaggaccaaacctgcttttttcttcaaatactgttgaagtatatggttattcaggctgcgagcttggagtggaagaataaggagaatcaagatactggttttaaatttctttttacattgtttcgaaagtattatcttcctcatttatttccatcatttactaagttaacaaacatctacaaacctgtacttgacatcccccatttgagaccaaagcctgtgtacattactaccactcgagacaatgagaacatttacagtacaaagattccatatatggcagctcgtgttgtttttattaagtggattgtaaccttctttttggaaaaaaagtatctaactgcaacacaaaacactaaaaatggagttgatgtattgcctaaaatcatccaggtatgccatccatcatctttttatctgttaatgcttgtgtaataaaatacactggaacatagccaaa

SEQ ID NO: 203690 - DNA, 603 bp, Artificial Sequence
  derived and/or modified sequence
gtcctgattttcgcgtgcttggtccctgggttccctgctgtaatgtcttcccggggaccctgtaccttggaaaccctcattaacccatcacccagcgttgcagacgtgaaaatctatcccgaagaaatcactccgctgttgcccgcaatttcaggtgagaagatcgccgaggatcagacatgtttcttcttgcagattctcctgaaatatatggtgattcaggcagcttctttggaatggaaaaacaaggagaatcaagacacgggctttaaatttttattcactctcttccgcaagtattacctgccgcacctgttcccatcttttactaagcttacaaacatttacaagcccgttctggatatcccacatctaagaccgaaacccgtctacatcacgacaacaagggataatgagaacatctacagtaccaaaattccttacatggccgctcgggtcgtgttcataaagtggattgtcacctttttccttgaaaaaaaatatctgacagctacacagaatactaagaacggggtggatgtcttacccaaaatcatccaggtgtgtcacccatccagtttctacctgctcatgcttgtgtag

SEQ ID NO: 203691 - DNA, 603 bp, Artificial Sequence
  derived and/or modified sequence
gtactcatcttcgcatgcctcgtgcccggtttccctgccgtcatgtcatcccggggtccttgcactctggagaccctcatcaacccctccccttcagtggccgatgtgaagatataccccgaggaaataacgccattactccctgctatctcaggcgagaaaatcgcagaagaccagacctgtttctttcttcagatcttgcttaaatacatggttatccaggcagcctctctggagtggaaaaataaggagaatcaagatactggcttcaagtttctctttacactgttcaggaagtattacctgcctcacctgttcccttcattcaccaagctgacgaacatctataaaccagttctagatatcccccatctgaggcccaaacccgtgtacataacgaccaccagagacaacgagaacatctactccaccaagattccctacatggctgccagggtggtgttcattaagtggattgttaccttctttctggagaagaaatacctgaccgcgacacagaatacaaagaacggtgtcgatgtgctcccgaagatcattcaggtgtgtcacccttcttccttctatcttttgatgctggtgtag

SEQ ID NO: 203692 - DNA, 684 bp, Artificial Sequence
  derived and/or modified sequence
taactcatttttgcttgtttggttccaggctttcctgcggtcatgagctcccgaggcccttgtactttagaaactctgatcaacccatcaccctcagtagccgatgtgaaaatttatccagaggaaatcactccacttttacccgctatttctggcgaaaagattgctgaagatcagacttgcttctttctgcaaatattgctcaagtatatggtaatacaagctgccagcttagagtggaaaaacaaagaaaatcaggatacgggattcaaattcctgttcacactgtttcgcaaatactaccttccacacctgtttccatcgtttactaaactgacaaacatttataagcctgtgcttgacattccccaccttcgcccaaaacccgtttatattactactacaagggataatgagaacatttactcaactaaaattccatatatggccgctcgggtcgtttttataaagtggattgtgacttttttcctggagaagaaataccttaccgccacccagaacactaaaaacggtgtggacgtcctgcccaagattatccagaccgtaggcggtggagccgtgcaggaaagagcgcctgaacttgatgggggtggtccaacagagcaggacaagtcccactcgaatagcagcaccttatcagatcgtagactctcaaactcatag

SEQ ID NO: 203693 - DNA, 855 bp, Artificial Sequence
  derived and/or modified sequence
atgttctcccgaagatcgcatggtgacgtgaaaaagtctacacagaaggtgttagacccaaagaaggacgtactgacccggcttaagcacctgcgagcccttctagacaatgtggacgccaacgacctcaagcagttctttgaaacaaattatagccagatttactttatattttacgagaacttcatcgccctagagaactcactcaagctcaaaggcaacaacaagagtcagcgcgaagaacttgactctatactgtttttatttgagaaaatcctccagttcttgcctgagaggatctttttccggtggcattaccagagtatcggatccactttgaagaaacttctgcatactgggaactccattaagattcgttgcgagggaatcagactgtttctcctttggctgcaggccttgcagaccaactgcgctgaggaacaggtgctaatcttcgcctgtctggtccctggctttcctgctgtaatgtcatctaggggcccttgtactctggaaacactaatcaacccctcaccttcggtcgcagacgtgaaaatttaccctgaggagatcacacccctcctgccagccatctctggggaaaagatcgccgaagatcagacgtgcttcttcctgcagattctcctgaaatatatggtcatccaggccgcttccctggaatggaaaaacaaggagaatcaggacactggcttcaagtttctcttcaccctcttccgcaagtattaccttccacacctgtttccctcgttcaccaagctgacaaacatttacaagccggtacttgacatccctcatctgaggcctaagcccgtgtatataaccacgacacggtag

SEQ ID NO: 203694 - DNA, 681 bp, Artificial Sequence
  derived and/or modified sequence
tctgatttttgcttgcctggtgcctggtttcccagcagtcatgtcatccaggggcccttgcacactggagacactcatcaatcccagccctagtgtagctgatgtaaagatatatccagaagaaatcactccactcctaccagccatatcaggggagaagattgctgaggaccaaacctgcttttttcttcaaatactgttgaagtatatggttattcaggctgcgagcttggagtggaagaataaggagaatcaagatactggttttaaatttctttttacattgtttcgaaagtattatcttcctcatttatttccatcatttactaagttaacaaacatctacaaacctgtacttgacatcccccatttgagaccaaagcctgtgtacattactaccactcgagacaatgagaacatttacagtacaaagattccatatatggcagctcgtgttgtttttattaagtggattgtaaccttctttttggaaaaaaagtatctaactgcaacacaaaacactaaaaatggagttgatgtattgcctaaaatcatccagactgttggtggtggtgctgtgcaggagagagcgcctgagctggatggtggtgggcccacggagcaggacaaaagccattctaacagcagcaccttgtcggaccgaagactcagcaactccag

SEQ ID NO: 203695 - DNA, 859 bp, Artificial Sequence
  derived and/or modified sequence
gccgcgggatgttctcccgaaggagccacggggatgtgaagaagtccacccagaaggtgctggacccgaagaaggacgtgctgacccgcctgaagcacctgcgggcgctgctggataatgtggatgcaaatgatcttaagcagttttttgagaccaactattctcagatatatttcatcttctatgaaaattttatagcactggaaaatagtttgaaattaaaagggaataataagtcacaaagggaggagctggactccatcctcttcctttttgaaaaaatactgcagtttctacctgaacgaattttctttcgatggcattaccagagtataggctcaactttaaagaagcttctacacactggaaattctattaagataagatgtgaaggaatcaggctgtttcttctgtggcttcaagcacttcagacaaactgtgcagaagagcaggttctgatttttgcttgcctggtgcctggtttcccagcagtcatgtcatccaggggcccttgcacactggagacactcatcaatcccagccctagtgtagctgatgtaaagatatatccagaagaaatcactccactcctaccagccatatcaggggagaagattgctgaggaccaaacctgcttttttcttcaaatactgttgaagtatatggttattcaggctgcgagcttggagtggaagaataaggagaatcaagatactggttttaaatttctttttacattgtttcgaaagtattatcttcctcatttatttccatcatttactaagttaacaaacatctacaaacctgtacttgacatcccccatttgagaccaaagcctgtgtacattactaccactcg

SEQ ID NO: 203696 - DNA, 5622 bp, Artificial Sequence
  derived and/or modified sequence
atgttcagcagaagaagccacggcgacgtgaagaagagcacccagaaggtgctggaccccaagaaggacgtgctgaccagactgaagcacctgagagccctgctggacaacgtggacgccaacgacctgaagcagttcttcgagaccaactacagccagatctacttcatcttctacgagaacttcatcgccctggagaacagcctgaagctgaagggcaacaacaagagccagagagaggagctggacagcatcctgttcctgttcgagaagatcctgcagttcctgcccgagagaatcttcttcagatggcactaccagagcatcggcagcaccctgaagaagctgctgcacaccggcaacagcatcaagatcagatgcgagggcatcagactgttcctgctgtggctgcaggccctgcagaccaactgcgccgaggagcaggtgctgatcttcgcctgcctggtgcccggcttccccgccgtgatgagcagcagaggcccctgcaccctggagaccctgatcaaccccagccccagcgtggccgacgtgaagatctaccccgaggagatcacccccctgctgcccgccatcagcggcgagaagatcgccgaggaccagacctgcttcttcctgcagatcctgctgaagtacatggtgatccaggccgccagcctggagtggaagaacaaggagaaccaggacaccggcttcaagttcctgttcaccctgttcagaaagtactacctgccccacctgttccccagcttcaccaagctgaccaacatctacaagcccgtgctggacatcccccacctgagacccaagcccgtgtacatcaccaccaccagagacaacgagaacatctacagcaccaagatcccctacatggccgccagagtggtgttcatcaagtggatcgtgaccttcttcctggagaagaagtacctgaccgccacccagaacaccaagaacggcgtggacgtgctgcccaagatcatccagaccgtgggcggcggcgccgtgcaggagagagcccccgagctggacggcggcggccccaccgagcaggacaagagccacagcaacagcagcaccctgagcgacagaagactgagcaacagcagcctgtgcagcatcgaggaggagcacagaatggtgtacgagatggtgcagagaatcctgctgagcaccagaggctacgtgaacttcgtgaacgaggtgttccaccaggccttcctgctgcccagctgcgagatcgccgtgaccagaaaggtggtgcaggtgtacagaaagtggatcctgcaggacaagcccgtgttcatggaggagcccgacagaaaggacgtggcccaggaggacgccgagaagctgggcttcagcgagaccgacagcaaggaggccagcagcgagagcagcggccacaagagaagcagcagctggggcagaacctacagcttcaccagcgccatgagcagaggctgcgtgaccgaggaggagaacaccaacgtgaaggccggcgtgcaggccctgctgcaggtgttcctgaccaacagcgccaacatcttcctgctggagccctgcgccgaggtgcccgtgctgctgaaggagcaggtggacgcctgcaaggccgtgctgatcatcttcagaagaatgatcatggagctgaccatgaacaagaagacctgggagcagatgctgcagatcctgctgagaatcaccgaggccgtgatgcagaagcccaaggacaagcagatcaaggacctgttcgcccagagcctggccggcctgctgttcagaaccctgatggtggcctggatcagagccaacctgtgcgtgtacatcagcagagagctgtgggacgacttcctgggcgtgctgagcagcctgaccgagtgggaggagctgatcaacgagtgggccaacatcatggacagcctgaccgccgtgctggccagaaccgtgtacggcgtggagatgaccaacctgcccctggacaagctgagcgagcagaaggagaagaagcagagaggcaagggctgcgtgctggacccccagaagggcaccaccgtgggcagaagcttcagcctgagctggagaagccaccccgacgtgaccgagcccatgagattcagaagcgccaccaccagcggcgcccccggcgtggagaaggccagaaacatcgtgagacagaaggccaccgaggtggaggagtgccagcagagcgagaacgcccccgccgccggcagcggccacctgaccgtgggccagcagcagcaggtgctgagaagcagcagcaccagcgacatccccgagcccctgtgcagcgacagcagccagggccagaaggccgagaacacccagaacagcagcagcagcgagccccagcccatccaggagaacaagggccacgtgaagagagagcacgagggcatcaccatcctggtgagaagaagcagcagccccgccgagctggacctgaaggacgacctgcagcagacccagggcaagtgcagagagagacagaagagcgagagcaccaacagcgacaccaccctgggctgcaccaacgaggccgagctgagcatgggcccctggcagacctgcgaggaggaccccgagctgaacacccccaccgacgtggtggccgacgccgacgccagacactggctgcagctgagccccaccgacgccagcaacctgaccgacagcagcgagtgcctgaccgacgactgcagcatcatcgccggcggcagcctgaccggctggcaccccgacagcgccgccgtgctgtggagaagagtgctgggcatcctgggcgacgtgaacaacatccagagccccaagatccacgccagagtgttctgctacctgtacgagctgtggtacaagctggccaagatcagagacaacctggccatcagcctggacaaccagagcagccccagcccccccgtgctgatcccccccctgagaatgttcgccagctggctgttcaaggccgccaccctgcccaacgagtacaaggagggcaagctgcaggcctacagactgatctgcgccatgatgaccagaagacaggacgtgctgcccaacagcgacttcctggtgcacttctacctggtgatgcacctgggcctgaccagcgaggaccaggacatcctgaacaccatcatcagacactgcccccccagattcttcagcctgggcttccccggcttcagcatgctggtgggcgacttcatcaccgccgccgccagagtgctgagcaccgacatcctgaccgcccccagaagcgaggccgtgaccgtgctgggcagcctggtgtgcttccccaacacctaccaggagatccccctgctgcagagcgtgcccgaggtgaacgaggccatcaccggcaccgaggacgtgaagcactacctgatcaacatcctgctgaagaacgccaccgaggagcccaacgagtacgccagatgcatcgccgtgtgcagcctgggcgtgtggatctgcgaggagctggcccagtgcaccagccacccccaggtgaaggaggccatcaacgtgatcggcgtgaccctgaagttccccaacaagatcgtggcccaggtggcctgcgacgtgctgcagctgctggtgagctactgggagaagctgcagatgttcgagaccagcctgcccagaaagatggccgagatcctggtggccaccgtggccttcctgctgcccagcgccgagtacagcagcgtggagaccgacaagaagttcatcgtgagcctgctgctgtgcctgctggactggtgcatggccctgcccgtgagcgtgctgctgcaccccgtgagcaccgccgtgctggaggagcagcacagcgccagagcccccctgctggactacatctacagagtgctgcactgctgcgtgtgcggcagcagcacctacacccagcagagccactacatcctgaccctggccgacctgagcagcaccgactacgaccccttcctgcccctggccaacgtgaagagcagcgagcccgtgcagtaccacagcagcgccgagctgggcaacctgctgaccgtggaggaggagaagaagagaagaagcctggagctgatccccctgaccgccagaatggtgatggcccacctggtgaaccacctgggccactaccccctgagcggcggccccgccatcctgcacagcctggtgagcgagaaccacgacaacgcccacgtggagggcagcgagctgagcttcgaggtgttcagaagccccaacctgcagctgttcgtgttcaacgacagcaccctgatcagctacctgcagacccccaccgagggccccgtgggcggcagccccgtgggcagcctgagcgacgtgagagtgatcgtgagagacatcagcggcaagtacagctgggacggcaaggtgctgtacggccccctggagggctgcctggcccccaacggcagaaaccccagcttcctgatcagcagctggcacagagacaccttcggcccccagaaggacagcagccaggtggaggagggcgacgacgtgctggacaagctgctggagaacatcggccacaccagccccgagtgcctgctgcccagccagctgaacctgaacgagcccagcctgaccccctgcggcatgaactacgaccaggagaaggagatcatcgaggtgatcctgagacagaacgcccaggaggacgagtacatccagagccacaacttcgacagcgccatgaaggtgaccagccagggccagcccagccccgtggagcccagaggccccttctacttctgcagactgctgctggacgacctgggcatgaacagctgggacagaagaaagaacttccacctgctgaagaagaacagcaagctgctgagagagctgaagaacctggacagcagacagtgcagagagacccacaagatcgccgtgttctacatcgccgagggccaggaggacaagtgcagcatcctgagcaacgagagaggcagccaggcctacgaggacttcgtggccggcctgggctgggaggtggacctgagcacccactgcggcttcatgggcggcctgcagagaaacggcagcaccggccagaccgccccctactacgccaccagcaccgtggaggtgatcttccacgtgagcaccagaatgcccagcgacagcgacgacagcctgaccaagaagctgagacacctgggcaacgacgaggtgcacatcgtgtggagcgagcacagcagagactacagaagaggcatcatccccaccgccttcggcgacgtgagcatcatcatctaccccatgaagaaccacatgttcttcatcgccatcaccaagaagcccgaggtgcccttcttcggccccctgttcgacggcgccatcgtgagcggcaagctgctgcccagcctggtgtgcgccacctgcatcaacgccagcagagccgtgaagtgcctgatccccctgtaccagagcttctacgaggagagagccctgtacctggaggccatcatccagaaccacagagaggtgatgaccttcgaggacttcgccgcccaggtgttcagccccagccccagctacagcctgagcggcaccgactag

SEQ ID NO: 203697 - DNA, 446 bp, Artificial Sequence
  derived and/or modified sequence
ggactcggcctatccgtcagcacgcaggctccaccctcgctgaactcacagaggacaatttaggcaggaaccacacactgctatgacatatccaccccaccgtgctttctcgaggagtgatgtcccataccccctgctgagcagccctgtacagtggccactttccctggtagtaggtgacacatctacaaggtggccccagcagccttcagccctagagtctgactgccctggtccaagccatccctgccttgctggcctcctggggcccatgcaccctgttgacattcccctctccactgccctccactcaaagcaccaaagaagacttactcaatgtgtccttatggtgcagagtcccagcaagcagaggtctttgtatctgttgaataaaaaaattcctcatgatgcgtagtaacatcagtgaggaagactgcaccaaggcg

SEQ ID NO: 203698 - protein, 192 aa, Artificial Sequence
  derived and/or modified sequence
MGKGCKVVVCGLLSVGKTAILEQLLYGNHTIGMEDCETMEDVYMASVETDRGVKEQLHLYDTRGLQEGVELPKHYFSFADGFVLVYSVNNLESFQRVELLKKEIDKFKDKKEVAIVVLGNKIDLSEQRQVDAEVAQQWAKSEKVRLWEVTVTDRKTLIEPFTLLASKLSQPQSKSSFPLPGRKNKGNSNSEN

SEQ ID NO: 203699 - DNA, 579 bp, Artificial Sequence
  derived and/or modified sequence
atgggcaagggctgcaaggtggtggtgtgcggcctgctgagcgtgggcaagaccgccatcctggagcagctgctgtacggcaaccacaccatcggcatggaggactgcgagaccatggaggacgtgtacatggccagcgtggagaccgacagaggcgtgaaggagcagctgcacctgtacgacaccagaggcctgcaggagggcgtggagctgcccaagcactacttcagcttcgccgacggcttcgtgctggtgtacagcgtgaacaacctggagagcttccagagagtggagctgctgaagaaggagatcgacaagttcaaggacaagaaggaggtggccatcgtggtgctgggcaacaagatcgacctgagcgagcagagacaggtggacgccgaggtggcccagcagtgggccaagagcgagaaggtgagactgtgggaggtgaccgtgaccgacagaaagaccctgatcgagcccttcaccctgctggccagcaagctgagccagccccagagcaagagcagcttccccctgcccggcagaaagaacaagggcaacagcaacagcgagaactag

SEQ ID NO: 203700 - DNA, 579 bp, Artificial Sequence
  derived and/or modified sequence
atgggcaaggggtgcaaggttgtggtctgtggactgctctccgtaggtaagactgccattttggagcagctgctctacggaaatcatacaatcgggatggaagactgtgagacaatggaggatgtctatatggcgagcgttgaaaccgacaggggcgttaaagaacagctgcacctatatgatactaggggcctgcaggagggcgtggagcttcctaagcactatttcagctttgctgacggcttcgtgctcgtgtactccgtcaacaacttggaatccttccaacgtgtggagttgctgaagaaagaaattgataagtttaaggataagaaggaagttgccattgtggttctgggcaacaagatcgacctgtctgagcaacgccaggtggatgctgaagtcgcacagcagtgggccaaaagcgagaaggtccgcctttgggaagtgaccgtcacggacaggaagacactgatcgagccatttaccctgcttgcttcaaaactctcacaaccccaatctaaaagctcctttccactccccggtcgcaagaataagggcaacagcaattctgagaactag

SEQ ID NO: 203701 - DNA, 579 bp, Artificial Sequence
  derived and/or modified sequence
atgggaaaaggctgcaaagtggtagtctgtggactgctgtcagttggaaaaaccgcaattcttgaacagctgctgtacgggaaccatactatcggaatggaggactgtgaaaccatggaggatgtgtacatggccagtgtcgagaccgaccgtggggttaaggaacagctgcacctctatgatacccgaggcctgcaggaaggagtagagcttcctaagcactacttttccttcgcagatggcttcgtgcttgtgtacagcgtgaacaatctggaatccttccagagggtggagttactgaaaaaagagattgataaattcaaagataagaaggaggtggccatcgtcgttttaggaaacaagatcgacttgtcagagcagcggcaggtggatgccgaggtagcacagcagtgggctaaatcggaaaaggtgagactgtgggaggtgacagtgacagacaggaagacgctaatcgagccattcacattactcgcatcaaaactaagtcaaccccaaagcaagagctcattcccccttcctggacgcaagaataagggtaacagtaatagcgagaattag

SEQ ID NO: 203702 - DNA, 579 bp, Artificial Sequence
  derived and/or modified sequence
atgggaaagggatgcaaagtggttgtgtgtggcctcttgtccgtgggtaaaacagccatcttagaacagctgctgtacggcaaccacaccatagggatggaggactgcgaaactatggaggatgtgtacatggcctcagtcgagacggataggggtgtgaaggagcagttacacctatacgatacccggggactccaggaaggggttgaacttcctaagcactacttttcttttgctgatggattcgttttggtatactctgtaaacaacctggagagcttccagagggtggaactgcttaagaaggagatcgacaagttcaaagataaaaaggaagttgcgattgtggtgttaggcaacaagattgatttgtctgaacaacggcaagtggatgccgaagtcgctcaacagtgggctaaaagcgaaaaggttcggctttgggaggtgacagttactgaccgcaagacactcattgagccttttactctcctcgcaagtaagttatcccaaccacagtcaaagtcttcattccctctccctggaagaaaaaacaaaggcaactctaattccgaaaactag

SEQ ID NO: 203703 - DNA, 579 bp, Artificial Sequence
  derived and/or modified sequence
atgggaaaagggtgcaaggtggtggtgtgcggattactgtcagttggaaaaactgcaatcctcgagcaactcctgtacggaaatcacacaattggaatggaggattgtgagaccatggaagatgtatatatggcctccgtggaaacagatagaggagtcaaggaacagctgcatctgtatgacaccagaggcttgcaggagggagttgagcttcccaaacattacttctcttttgcagacggatttgtcttggtttatagcgtcaacaacctggagtctttccaacgggttgagctgcttaaaaaggaaatagataaatttaaggacaagaaagaggtggctatcgtggtgctcggcaataagattgatctgtcagagcagagacaagttgacgcagaagtagcccagcagtgggctaaatctgagaaagtgagattgtgggaagttacagtgaccgatagaaaaactctgatcgagccctttactcttctggcctctaagttgtctcagccacagtccaagtcgtcgttcccgctacccggccggaaaaataaaggcaattctaactctgaaaactag

SEQ ID NO: 203704 - DNA, 579 bp, Artificial Sequence
  derived and/or modified sequence
atgggaaaagggtgtaaagttgtcgtttgcggattgcttagtgtcgggaaaacagccatactagagcagctcctgtacggaaatcataccatcggcatggaagattgtgaaacaatggaggatgtttacatggcctccgtagaaaccgaccgcggagtgaaggagcagctccacttatatgacacgcgcggcctacaggaaggtgtcgaactgcccaagcactatttttcctttgctgacgggttcgtgttagtgtactccgtcaacaatctcgaatctttccagagagttgagcttctaaagaaggagatcgataaattcaaggacaagaaagaagtggcaatagtggtactggggaataagattgatctcagcgagcagcgccaagttgacgctgaggtggcacagcagtgggccaagtctgagaaggttcgcctatgggaggtcaccgtgaccgaccgaaaaactttgatagagccattcaccctgttggcttcaaagttgagccagccacaaagcaagtcatcattcccattacccggcaggaagaataaaggaaattctaactccgaaaattag

SEQ ID NO: 203705 - DNA, 579 bp, Artificial Sequence
  derived and/or modified sequence
atgggcaagggctgcaaggtggtggtgtgtggcctgctgtctgtgggcaagacagccatcctggagcagctgctgtatggcaaccacaccatcggcatggaggactgtgagaccatggaggatgtgtacatggcctctgtggagacagaccggggcgtgaaggagcagctgcacctgtatgacacccggggcctgcaggagggcgtggagctgcccaagcactacttctcctttgctgatggctttgtgctggtgtacagcgtgaacaacctggagagcttccagagggtggagctgctgaagaaggagattgacaagttcaaggacaagaaggaggtggccatcgtggtgctgggcaacaagattgacctgtctgagcagaggcaggtggatgctgaggtggcccagcagtgggccaagtctgagaaggtgcggctgtgggaggtgacagtgacagacaggaagaccctcatcgagcccttcaccctgctggccagcaagctgagccagccccagagcaagagcagcttccccctgcccggcaggaagaacaagggcaacagcaacagtgaaaattag

SEQ ID NO: 203706 - DNA, 2335 bp, Artificial Sequence
  derived and/or modified sequence
caagattcgagcctgagcggcctgggcgtctcgagaggtgagagagttggcggcgaggtctcggcggctaagcgagcgtcggcgactgtctctccgcgagaggaggcaagttggggtccaggctccaaagccggtggccgcgtaccgcggtggagccgctgtctttgaggtctgaggagagaacagagtctagctctttcacccaggctggagtgaagtggtgcaatctcagctcagtgcaacctccgccccctgggttcaagtgattctcctgcctcagcctccccagtagctgggattacagtgatatcctgagagaagatgggaaagggctgcaaggttgtggtttgtggattgttatctgtggggaaaactgcaattttggagcagctcctttatggaaatcatactattggaatggaagattgcgaaacaatggaagatgtatacatggcttcagtagaaacagaccgaggagtaaaagaacagttacatctttatgacaccagaggtctacaggaaggcgtggagctgccaaagcattatttttcatttgctgatggcttcgttcttgtgtacagtgtgaataaccttgaatcctttcaaagagtggagcttctgaagaaagaaatcgataagttcaaagacaaaaaagaggtagcaattgtggtattaggaaacaaaatcgacctttctgagcagagacaagtggacgctgaagtggcacagcagtgggcaaaaagtgagaaagtaagactgtgggaggtgactgttacagatcggaaaactctgattgaaccattcactttattagccagtaaactttctcaaccccagagcaaatcaagctttcctttgcctgggaggaaaaacaaagggaactctaattctgagaactaaaaatcagtaatttccacaattgtatgttgaatagtgattgcctttaagtgtctgtgaacatggagtaatattactatttaaaataggccatttgtatctacctttggtccttaggaaaattcctaaggaagtcaattaatgcactttagatgttaaaagtatttgggctaaggttattattgcctgatatgaaataatatattcttattctcattgtttgaaacctgtctttgaaattagcacctttgttatttatgttgtacttgtgaaaacagtaaaatagtttggatagttatgcaaatgcacctatgtgtaacttccccccaaccccaagctgtttcggaagatatcataatcattctgtgtaacattatgcaaacttctaagcccaaacatgactttgtttttaaaaagttcattaatctaatgtctaggattataaaacatttttttgtgtctaaattggacccaaaacattgaacagtttggggtagtaagctaaatttcatcttgtggagattttgctaaacagactaagacccatgatttagctttgctcaaattagaatgtttagcatgagttgaggtaccaggtagtgttaagtaggttcatcacgctctaaggccgttttttccttagccagacccctgttgatagaccagatacttgagggcaaactgtttgctcctcctcttgaaaatgattaggcacttaaggacagtaaagctgtattttctggaaggaagactgtatcttctggaatagttttctagaaaactagtcatatacaataaaagtatcaaaaatattgggctctaatttgatctgacttagatgtctgagtttgtgttgtttctctaaagattttggcaagactcaagcaatgtggctgactgtaactttattaatttaaaaggtaggaagtaagctacttagtggtttcacctgtgaaataactattttgactgaaatgtaaaataagctattcaacaaagaacatattaaaacatcaagtaatttgtaacatcttaaatggaatacttttttcatgagctctagtgaagaactactacatataaaagacgatacttacaaatcagctattgctgctacagtataattcttcaaaatttctcatcataaattcattttttggtaaaaaaaaattaccagacactaactcacccccttacccttttcccccggttattgaatattaatctagcttcccacccatgcatgttacatagatggacaaatgctttcataatgatttttaaataagtaccttccagtttgctttgtttcctactaatgcaacttagtctatattagtacaaacagttaccaattctttttaaattctgtaatgaatgtatgtgtatccagataagtttctctgaaagagacatacagaaacagaactgctgggtc

SEQ ID NO: 203707 - DNA, 579 bp, Artificial Sequence
  derived and/or modified sequence
atgggcaagggctgcaaggtggtggtgtgcggcctgctgagcgtgggaaagaccgcgattctcgagcagctgctgtacggcaaccatacaatcggtatggaagattgtgaaaccatggaggatgtgtatatggcatccgtcgagacggaccgaggagtgaaggagcagctacatctgtacgacacccgcgggcttcaagagggggtggaactgcccaaacattatttctccttcgccgatggctttgtactcgtgtatagcgtgaataatttggagtcgttccagagagtcgagcttctgaagaaagaaatcgataaattcaaggacaaaaaggaagtggcgatcgttgttttggggaacaagatcgatttgtccgagcagcgccaggtggacgccgaagtggcgcaacaatgggccaaatctgaaaaggtgcgcttatgggaagtgaccgtgacagatagaaaaacattaatcgagccctttacactccttgcttcaaagttgtcgcagccgcagtcaaagtcttctttcccccttcctgggcgcaaaaataaaggcaactctaattctgaaaactag

SEQ ID NO: 203708 - DNA, 579 bp, Artificial Sequence
  derived and/or modified sequence
atgggcaagggctgcaaggtggtggtgtgcggcctgctgagcgtgggaaagactgccatactggaacagctgctgtatggaaaccatactattggcatggaggattgcgagacgatggaggatgtctacatggcgtcagtcgaaacggaccggggggtgaaggaacaactgcacctgtacgacacaagaggcctgcaggaaggagtcgaactgcctaagcattacttttcatttgcggacgggtttgtcctggtgtacagcgtcaacaacctcgagagcttccagagagttgagcttctgaagaaggagatagataagtttaaagacaagaaagaagtggcgatagtggtcctgggcaataaaatcgatctgagcgagcaaagacaggtggacgcggaagtcgctcagcaatgggcaaagtccgaaaaggtgcggttatgggaggtgaccgttacagaccgcaaaactcttatcgagccattcactctgctggctagtaagttgagccagccccagtctaagtccagtttccctctccctgggaggaagaacaaaggcaactccaatagcgagaactag

SEQ ID NO: 203709 - DNA, 579 bp, Artificial Sequence
  derived and/or modified sequence
atgggcaagggctgcaaggtggtggtgtgcggcctgctgagcgtgggaaagactgccattctggagcagctcctttacgggaatcacactatcggaatggaggattgcgaaactatggaagacgtttatatggcttccgttgaaactgatcgaggcgtcaaagagcagctgcacctttacgatacacggggactccaggaaggcgtagagctgcccaagcattatttttcttttgctgacggctttgtgttggtatacagtgtgaacaatcttgagtcattccagagagtcgaattgcttaagaaagaaattgacaaatttaaagacaaaaaagaggtcgccatagtggtgctcggcaacaagatcgatctgagtgagcagcggcaggttgacgccgaagtggctcagcaatgggcaaaaagtgagaaggttcggctgtgggaagtgacagtgactgatcgcaaaactctaatagagccatttacactgctcgcctctaagctcagccaaccccaaagcaaaagctcctttccactgccgggacggaaaaataaggggaacagcaattctgagaactag

SEQ ID NO: 203710 - DNA, 579 bp, Artificial Sequence
  derived and/or modified sequence
atgggcaagggctgcaaggtggtggtgtgcggcctgctgagcgtgggcaagacagccattttagagcagctgctttatggtaatcatacgatcggcatggaagattgtgagacaatggaagacgtgtatatggccagtgtcgagacagatcgcggcgttaaggagcagctccatttgtatgatacaagagggctgcaggagggcgtggagctacctaaacattattttagcttcgcagatggattcgttctcgtgtactctgtgaataatctggagagctttcagcgggtcgagctgctaaagaaagagatcgataagtttaaagacaagaaagaagtagccattgtggtgctgggtaataagattgatcttagcgaacaaagacaggttgatgcagaggtagctcaacagtgggccaaatcggaaaaggtaagactttgggaggtgacagttacagacaggaagacactgattgaaccctttacactcctagcctctaaactgtctcaaccacagtcaaaatctagttttccactgcctgggagaaagaacaagggaaattccaactctgagaactag

SEQ ID NO: 203711 - DNA, 579 bp, Artificial Sequence
  derived and/or modified sequence
atgggcaagggctgcaaggtggtggtgtgcggcctgctgagcgtgggaaaaactgccatcctggagcagctgctctacggaaaccatacaatcggcatggaggattgcgagacgatggaagacgtatacatggcttccgtcgaaaccgaccgcggagttaaggagcaactccatctgtacgatactagagggttgcaggaaggagtagagctcccaaagcattacttttcctttgccgatggattcgttctggtttactcggtgaataatttagagagttttcagagagtagagctcctgaaaaaggaaattgacaaatttaaggataagaaagaagtggctatcgtcgttctcgggaataagattgacctcagcgagcagcggcaggtggacgcggaagtggcgcagcagtgggccaagtcagagaaagtgagactgtgggaggtcactgttacagacagaaagactctcatagagccgtttacactgctcgccagcaaactgagccagcctcagagtaaatcatccttcccactgccaggacggaaaaataagggaaactcgaattccgagaactag

SEQ ID NO: 203712 - DNA, 795 bp, Artificial Sequence
  derived and/or modified sequence
cggcctgggcgtctcgagaggtgagagagttggcggcgaggtctcggcggctaagcgagcgtcggcgactgtctctccgcgagaggaggcaagttggggtccaggctccaaagccggtggccgcgtaccgcggtggagccgctgtctttgaggtctgaggagagaacagtgatatcctgagagaagatgggaaagggctgcaaggttgtggtttgtggattgttatctgtggggaaaactgcaattttggagcagctcctttatggaaatcatactattggaatggaagattgcgaaacaatggaagatgtatacatggcttcagtagaaacagaccgaggagtaaaagaacagttacatctttatgacaccagaggtctacaggaaggcgtggagctgccaaagcattatttttcatttgctgatggcttcgttcttgtgtacagtgtgaataaccttgaatcctttcaaagagtggagcttctgaagaaagaaatcgataagttcaaagacaaaaaagaggtagcaattgtggtattaggaaacaaaatcgacctttctgagcagagacaagtggacgctgaagtggcacagcagtgggcaaaaagtgagaaagtaagactgtgggaggtgactgttacagatcggaaaactctgattgaaccattcactttattagccagtaaactttctcaaccccagagcaaatcaagctttcctttgcctgggaggaaaaacaaagggaactctaattctgagaactaaaaatcagtaatttccacaattgtatgttga

SEQ ID NO: 203713 - DNA, 2018 bp, Artificial Sequence
  derived and/or modified sequence
aaaactccagcccgaagggatctggaagcagtttttaagactgtgtgtgtatgagacaggtcgcgtcctagagcaaacggttttttttgtaaacagacggcatcctaacaggggcggtgctacccagtctgcggggagtcgctcgggatcgaagcacctcagagctccttcgagcgtatcccttcgggaaagccccacgccttccccgaggcgcctcctccggcctgcagcacgccctcgtcctgcacttcctcctcggaatctgcaagacagagtctagctctttcacccaggctggagtgaagtggtgcaatctcagctcagtgcaacctccgccccctgggttcaagtgattctcctgcctcagcctccccagtagctgggattacagtgatatcctgagagaagatgggaaagggctgcaaggttgtggtttgtggattgttatctgtggggaaaactgcaattttggagcagctcctttatggaaatcatactattggaatggaagattgcgaaacaatggaagatgtatacatggcttcagtagaaacagaccgaggagtaaaagaacagttacatctttatgacaccagaggtctacaggaaggcgtggagctgccaaagcattatttttcatttgctgatggcttcgttcttgtgtacagtgtgaataaccttgaatcctttcaaagagtggagcttctgaagaaagaaatcgataagttcaaagacaaaaaagaggtagcaattgtggtattaggaaacaaaatcgacctttctgagcagagacaagtggacgctgaagtggcacagcagtgggcaaaaagtgagaaagtaagactgtgggaggtgactgttacagatcggaaaactctgattgaaccattcactttattagccagtaaactttctcaaccccagagcaaatcaagctttcctttgcctgggaggaaaaacaaagggaactctaattctgagaactaaaaatcagtaatttccacaattgtatgttgaatagtgattgcctttaagtgtctgtgaacatggagtaatattactatttaaaataggccatttgtatctacctttggtccttaggaaaattcctaaggaagtcaattaatgcactttagatgttaaaagtatttgggctaaggttattattgcctgatatgaaataatatattcttattctcattgtttgaaacctgtctttgaaattagcacctttgttatttatgttgtacttgtgaaaacagtaaaatagtttggatagttatgcaaatgcacctatgtgtaacttccccccaaccccaagctgtttcggaagatatcataatcattctgtgtaacattatgcaaacttctaagcccaaacatgactttgtttttaaaaagttcattaatctaatgtctaggattataaaacatttttttgtgtctaaattggacccaaaacattgaacagtttggggtagtaagctaaatttcatcttgtggagattttgctaaacagactaagacccatgatttagctttgctcaaattagaatgtttagcatgagttgaggtaccaggtagtgttaagtaggttcatcacgctctaaggccgttttttccttagccagacccctgttgatagaccagatacttgagggcaaactgtttgctcctcctcttgaaaatgattaggcacttaaggacagtaaagctgtattttctggaaggaagactgtatcttctggaatagttttctagaaaactagtcatatacaataaaagtatcaaaaatattgggctctaatttgatctgacttagatgtctgagtttgtgttgtttctctaaagattttggcaagactcaagcaatgtggctgactgtaactttattaatttaaaaggtaggaagtaagctacttagtggtttcacctgtgaaataactattttgactgaaatgtaaaataagctattcaacaaagaacatattaaaacatcaagtaatttgtaacatctt

SEQ ID NO: 203714 - DNA, 579 bp, Artificial Sequence
  derived and/or modified sequence
atggggaaaggctgtaaggtcgtcgtgtgtggtctgctttctgtgggcaagacagccatcctggagcaactgttatacggtaatcacactatagggatggaggactgtgaaactatggaggatgtatacatggcctccgtggagaccgaccggggagtcaaagaacagctccatctgtacgatacccggggactccaggaaggcgtggagttgcctaagcattactttagcttcgccgatgggtttgtgctcgtgtacagcgtgaataacctggagtccttccagcgcgttgaattgcttaagaaggaaattgacaagttcaaggataaaaaagaggtcgcaatagtggtgctgggtaacaagattgatttatccgaacagaggcaggttgacgccgaagtcgcacagcagtgggcaaaaagcgaaaaggttcggctctgggaggtcacagtgaccgatcgaaagactctaatcgagcctttcaccctgctggcttccaaattgtcgcaaccacagtcaaaaagttcttttccattgccgggaagaaagaataagggtaattctaatagcgagaattag

SEQ ID NO: 203715 - DNA, 579 bp, Artificial Sequence
  derived and/or modified sequence
atgggtaagggatgtaaagtagtcgtatgcggactcctgtccgtcggcaaaaccgcaattttggagcaactgctgtacggtaaccacacgatcggtatggaagattgtgaaacgatggaggatgtgtatatggcgagcgtggagacagaccgaggcgtgaaggaacagctgcacctctacgatactcgcggtctccaggagggagtggagttaccgaagcattatttctcttttgccgacgggttcgtcctggtgtactccgttaacaaccttgagtcctttcagcgcgtggagctcctgaagaaagaaatagataaattcaaggacaaaaaggaggtcgccatcgtggtgctgggcaacaaaattgacttgagcgagcagcgacaggttgacgcagaggtcgctcagcaatgggcaaaatctgaaaaagtcaggctctgggaagtcaccgtgacagacaggaaaacactgattgagccctttacactcctcgcatctaagttatctcagcctcagtcaaagagctctttccctctccctggcaggaagaacaaaggtaactctaactccgagaattag

SEQ ID NO: 203716 - DNA, 2014 bp, Artificial Sequence
  derived and/or modified sequence
agagcgtcatgggacatgtagttccggcatcgcgcctggtggcggagttctgccgagtggggcgccgcggccgctattgtcccgccccctgctccgcaagattcgagcctgagcggcctgggcgtctcgagaggtgagagagttggcggcgaggtctcggcggctaagcgagcgtcggcgactgtctctccgcgagaggaggcaagttggggtccaggctccaaagccggtggccgcgtaccgcggtggagccgctgtctttgaggtctgaggagagaacagacagagtctagctctttcacccaggctggagtgaagtggtgcaatctcagctcagtgcaacctccgccccctgggttcaagtgattctcctgcctcagcctccccagtagctgggattacagtgatatcctgagagaagatgggaaagggctgcaaggttgtggtttgtggattgttatctgtggggaaaactgcaattttggagcagctcctttatggaaatcatactattggaatggaagattgcgaaacaatggaagatgtatacatggcttcagtagaaacagaccgaggagtaaaagaacagttacatctttatgacaccagaggtctacaggaaggcgtggagctgccaaagcattatttttcatttgctgatggcttcgttcttgtgtacagtgtgaataaccttgaatcctttcaaagagtggagcttctgaagaaagaaatcgataagttcaaagacaaaaaagaggtagcaattgtggtattaggaaacaaaatcgacctttctgagcagagacaagtggacgctgaagtggcacagcagtgggcaaaaagtgagaaagtaagactgtgggaggtgactgttacagatcggaaaactctgattgaaccattcactttattagccagtaaactttctcaaccccagagcaaatcaagctttcctttgcctgggaggaaaaacaaagggaactctaattctgagaactaaaaatcagtaatttccacaattgtatgttgaatagtgattgcctttaagtgtctgtgaacatggagtaatattactatttaaaataggccatttgtatctacctttggtccttaggaaaattcctaaggaagtcaattaatgcactttagatgttaaaagtatttgggctaaggttattattgcctgatatgaaataatatattcttattctcattgtttgaaacctgtctttgaaattagcacctttgttatttatgttgtacttgtgaaaacagtaaaatagtttggatagttatgcaaatgcacctatgtgtaacttccccccaaccccaagctgtttcggaagatatcataatcattctgtgtaacattatgcaaacttctaagcccaaacatgactttgtttttaaaaagttcattaatctaatgtctaggattataaaacatttttttgtgtctaaattggacccaaaacattgaacagtttggggtagtaagctaaatttcatcttgtggagattttgctaaacagactaagacccatgatttagctttgctcaaattagaatgtttagcatgagttgaggtaccaggtagtgttaagtaggttcatcacgctctaaggccgttttttccttagccagacccctgttgatagaccagatacttgagggcaaactgtttgctcctcctcttgaaaatgattaggcacttaaggacagtaaagctgtattttctggaaggaagactgtatcttctggaatagttttctagaaaactagtcatatacaataaaagtatcaaaaatattgggctctaatttgatctgacttagatgtctgagtttgtgttgtttctctaaagattttggcaagactcaagcaatgtggctgactgtaactttattaatttaaaaggtaggaagtaagctacttagtggtttcacctgtgaaataactattttgactgaaatgtaaaataagctattcaacaaagaacatattaaaacatcaa

SEQ ID NO: 203717 - DNA, 579 bp, Artificial Sequence
  derived and/or modified sequence
atgggaaagggctgtaaagtggtagtctgtggcctgctctctgtagggaaaactgccattctggaacaactgctctatggtaaccataccattggcatggaggactgcgaaactatggaagacgtgtacatggccagcgtcgagactgaccgaggagtaaaagagcagctgcatctctacgatactagaggtcttcaagagggagttgagctgcctaaacactacttcagctttgctgatggatttgttctggtatactctgtcaacaatctcgagtcatttcagagggtggaactgctaaagaaagaaatcgataagttcaaggacaagaaggaagtcgcaatcgtggtcctaggcaataagattgacctctcagagcagagacaggtggacgccgaggtggctcagcagtgggcgaaatccgagaaggttcggctctgggaggtaactgttaccgatcggaaaaccctgatcgaacccttcacactgctggccagcaaactgtcccaaccacagagcaaatcgtcctttccacttccgggacgcaagaataagggaaacagcaacagcgagaactag

SEQ ID NO: 203718 - DNA, 579 bp, Artificial Sequence
  derived and/or modified sequence
atgggaaagggatgtaaggttgtagtgtgcgggctgctgagcgttggaaaaactgccatcctagaacagctcttatatggaaaccacacaatcggaatggaggattgcgagactatggaggacgtttacatggcctccgttgagaccgatagaggtgttaaggagcagttgcatctttatgacacgcggggattgcaggagggagtggaactgcccaaacactacttctcattcgccgatggatttgtgctcgtgtattccgttaataatctggagagtttccaacgcgtggaactgttaaagaaggagattgataaatttaaagacaaaaaggaagtcgccatcgtcgtgctggggaataagatagacttgagcgaacaaaggcaggtagatgccgaggtagcacagcagtgggctaaatctgaaaaagtccgtttatgggaggtgaccgtcacagatcgtaagaccctgattgaaccattcaccctcctcgcctccaaactgtctcagccccagtcaaaatctagttttcccctccccggacgcaagaacaagggaaacagtaactctgaaaattag

SEQ ID NO: 203719 - DNA, 579 bp, Artificial Sequence
  derived and/or modified sequence
atggggaaaggctgcaaagtcgtagtttgtggactgcttagcgtgggcaagaccgcgatcctggaacaactcctttacggcaaccacaccataggcatggaggactgcgagaccatggaggacgtatatatggcaagtgtcgagaccgacaggggggtaaaagaacagctgcacttatatgacacgagaggtcttcaggagggcgtggaactcccaaaacactacttttcttttgccgacgggttcgtactggtatattcagttaataatctggagtcgtttcaaagggtggaacttcttaagaaggaaattgataaattcaaagataaaaaagaggtagccatagtggttttgggaaacaaaatcgacctctctgagcagcggcaagtggatgccgaggtggcccagcagtgggctaaatcagagaaggtgcggctgtgggaagtcacagtcactgataggaagacactcattgaaccttttacactgctggcttctaaactgtcccagccacagtcaaagtcttccttcccactgcctggcagaaagaacaaaggcaattctaactcggagaactag

SEQ ID NO: 203720 - DNA, 2391 bp, Artificial Sequence
  derived and/or modified sequence
gtccctctctggccaccgcacgacgggcgcagaaatctgggccccagagctgcgctgagagatcccccgacgcttccccagcctcccagggaggccttcgcggagtcggggcgtcgcgggtcggggcgctcgctgtgtcccttcagctccagactgcgtgaagctcctccagcaggccccagcgcccagggattttgtcctaaaaaagggtcatggagtgggtggattgcgggcggcccggcgctttttctgcatacggatttcgtcccaaatttgctaacatgagaaccacagtttttcagaagagcagaatgtttatttgccaagacctgtttggcaggtgtgaatgttttagagaagaaatgccgagaaaatgctggcattttgcgttgcgggtttttttttaaattgagaaataggttactggcttactttgtttctccagaatattttcacttggctttaatttaagtcatgtggctttaatttccttccagattatgcgttcagatgtggcaaaggcttaagagaatcattatctcttaatcgtagcggttttgattatcttttttcccacatcatatttttctttctttctttttaaatcacagctttacgtttttaagagtctctatctggttcattgattgattcaacaaatatttattaagtgtctaatatgtgccaggcatagttgctggggatgcagcaggaaacaacgcagaatttttggccttcttggaaatgggcagtaagcagaatgatatcctgagagaagatgggaaagggctgcaaggttgtggtttgtggattgttatctgtggggaaaactgcaattttggagcagctcctttatggaaatcatactattggaatggaagattgcgaaacaatggaagatgtatacatggcttcagtagaaacagaccgaggagtaaaagaacagttacatctttatgacaccagaggtctacaggaaggcgtggagctgccaaagcattatttttcatttgctgatggcttcgttcttgtgtacagtgtgaataaccttgaatcctttcaaagagtggagcttctgaagaaagaaatcgataagttcaaagacaaaaaagaggtagcaattgtggtattaggaaacaaaatcgacctttctgagcagagacaagtggacgctgaagtggcacagcagtgggcaaaaagtgagaaagtaagactgtgggaggtgactgttacagatcggaaaactctgattgaaccattcactttattagccagtaaactttctcaaccccagagcaaatcaagctttcctttgcctgggaggaaaaacaaagggaactctaattctgagaactaaaaatcagtaatttccacaattgtatgttgaatagtgattgcctttaagtgtctgtgaacatggagtaatattactatttaaaataggccatttgtatctacctttggtccttaggaaaattcctaaggaagtcaattaatgcactttagatgttaaaagtatttgggctaaggttattattgcctgatatgaaataatatattcttattctcattgtttgaaacctgtctttgaaattagcacctttgttatttatgttgtacttgtgaaaacagtaaaatagtttggatagttatgcaaatgcacctatgtgtaacttccccccaaccccaagctgtttcggaagatatcataatcattctgtgtaacattatgcaaacttctaagcccaaacatgactttgtttttaaaaagttcattaatctaatgtctaggattataaaacatttttttgtgtctaaattggacccaaaacattgaacagtttggggtagtaagctaaatttcatcttgtggagattttgctaaacagactaagacccatgatttagctttgctcaaattagaatgtttagcatgagttgaggtaccaggtagtgttaagtaggttcatcacgctctaaggccgttttttccttagccagacccctgttgatagaccagatacttgagggcaaactgtttgctcctcctcttgaaaatgattaggcacttaaggacagtaaagctgtattttctggaaggaagactgtatcttctggaatagttttctagaaaactagtcatatacaataaaagtatcaaaaatattgggctctaatttgatctgacttagatgtctgagtttgtgttgtttctctaaagattttggcaagactcaagcaatgtggctgactgtaactttattaatttaaaaggtaggaagtaagctacttagtggtttcacctgtgaaataactattttgactgaaatgtaaaataagctattcaacaaagaacatattaaaacatcaagtaatttgtaacatcttaaa

SEQ ID NO: 203721 - protein, 582 aa, Artificial Sequence
  derived and/or modified sequence
MESVKQRILAPGKEGLKNFAGKSLGQIYRVLEKKQDTGETIELTEDGKPLEVPERKAPLCDCTCFGLPRRYIIAIMSGLGFCISFGIRCNLGVAIVDMVNNSTIHRGGKVIKEKAKFNWDPETVGMIHGSFFWGYIITQIPGGYIASRLAANRVFGAAILLTSTLNMLIPSAARVHYGCVIFVRILQGLVEGVTYPACHGIWSKWAPPLERSRLATTSFCGSYAGAVIAMPLAGILVQYTGWSSVFYVYGSFGMVWYMFWLLVSYESPAKHPTITDEERRYIEESIGESANLLGAMEKFKTPWRKFFTSMPVYAIIVANFCRSWTFYLLLISQPAYFEEVFGFEISKVGMLSAVPHLVMTIIVPIGGQIADFLRSKQILSTTTVRKIMNCGGFGMEATLLLVVGYSHTRGVAISFLVLAVGFSGFAISGFNVNHLDIAPRYASILMGISNGVGTLSGMVCPIIVGAMTKNKSREEWQYVFLIAALVHYGGVIFYAIFASGEKQPWADPEETSEEKCGFIHEDELDEETGDITQNYINYGTTKSYGATTQANGGWPSGWEKKEEFVQGEVQDSHSYKDRVDYS

SEQ ID NO: 203722 - protein, 470 aa, Artificial Sequence [sequence omitted]

SEQ ID NO: 203723 - DNA, 1749 bp, Artificial Sequence
  derived and/or modified sequence
atggagtcagtgaagcagcggattctcgcccctggcaaggagggcctaaagaacttcgctggaaagtcgttgggccagatttatcgggtgttggaaaagaagcaggatactggggaaactatcgagcttacagaagatggaaaaccgctggaagtgccagagcgaaaagctccgctgtgtgactgtacctgctttggcctgccccgacggtacatcattgcaataatgtctgggcttggcttttgtatttcatttgggatccggtgcaacctgggggtagctatcgtggatatggtcaacaattcaacaatccaccgcggcggaaaagtgataaaggaaaaagccaagttcaactgggacccagaaactgtcggcatgatccacggcagcttcttctggggctatataatcacacagatacccggaggctatatcgcctcacgactggcagctaacagggtgtttggcgccgcaatcctacttacgtccacactgaatatgcttattccttctgcagctcgggtgcactacggctgcgtgatatttgtgcgtatcctgcagggcctggtggaaggtgtgacctaccctgcctgccacgggatatggtcaaagtgggcacctccactggagcggtctcgactggcaaccacctctttttgtggcagctacgcaggtgcggtcattgccatgcccctcgccggaatactcgtgcagtacaccggatggagctctgttttctatgtgtacggctcctttggcatggtttggtacatgttctggttgctggtgagctacgaatctcctgcaaaacatccgactattacagacgaagagcggcggtacattgaggaaagcattggagaatcagccaatttactcggcgccatggaaaaatttaaaaccccttggcgaaagttctttacaagcatgcccgtgtacgccatcattgtggccaacttctgtcgctcatggactttctatctcctgttaatttcccaacccgcatactttgaagaagtgttcggattcgagatctccaaggtgggcatgttatcagcagtcccccacctggtaatgaccataatcgttccaattggaggccagattgccgatttcttaaggtcgaagcagatcctcagcactaccaccgtgcgcaagatcatgaactgcggcggttttggtatggaggctacactgctgttagtggtgggctacagccatacccgcggcgtggcaatttcattcctggtgctggcagtcggctttagcggctttgcaatttcaggtttcaatgtcaatcatctggacattgccccgcgctatgcctccatcttaatgggtatctcaaatggggttggaaccctgagtggcatggtatgtccaattatcgtgggggcaatgaccaaaaacaagtctagagaagaatggcagtacgtcttccttatcgcagccctcgtgcattatggaggcgtcattttctacgccatttttgctagtggggaaaagcagccttgggcagacccagaggagacctccgaagaaaaatgtggattcatacacgaagacgagttggatgaggagacgggcgacataactcaaaattacatcaactacggtaccactaagagttatggcgccacgacgcaagccaacggaggatggccatctgggtgggaaaagaaagaggagttcgtgcagggcgaggtgcaagactctcatagttacaaggaccgcgtagattactcatag

SEQ ID NO: 203724 - DNA, 1413 bp, Artificial Sequence
  derived and/or modified sequence
atgaaggcaaagttcaattgggaccccgagactgtgggcatgatccatggcagctttttctggggctatattatcacacagatcccagggggctatatcgcttcacgactggccgcaaatagggtgttcggggccgctatccttctcacaagcaccctcaacatgctgattcctagcgcagcaagagtgcactacgggtgcgtgatcttcgtgcgcatactgcagggactggtggagggtgtgacgtacccagcatgccacggcatctggtccaagtgggctccccctctggaacgcagccgcctggcaactacctcattttgcgggtcctacgccggagcagttatagcaatgccactggctggaatcctggtgcagtacaccggctggtcttcagtgttttacgtgtacggatccttcgggatggtgtggtacatgttttggcttttggtgtcctacgagagccccgccaagcatcccacaatcactgacgaggaaaggagatacatcgaggaatccataggcgaatcggcaaatcttttgggagctatggagaagttcaaaaccccttggcgcaagttttttacttccatgcccgtgtatgccatcattgtggccaacttttgtcgatcgtggaccttctacctgctgttaatatcccagccagcgtattttgaggaggtctttgggttcgagattagtaaagttggtatgttgtctgctgtaccccacctggttatgacaattatcgtcccaattgggggccagattgccgactttttacggtcaaagcagatcctgagtactactacggtcaggaagatcatgaactgtggaggatttggcatggaggcgactttgctgctggtcgtcgggtactcccatacacgaggggtggctatttccttcctagtacttgctgtggggttctcaggcttcgccataagcggatttaatgtgaaccatcttgatattgctccacgatatgcaagcatacttatggggattagcaacggcgtcgggactctttccggcatggtgtgcccaattatagtcggagccatgacaaagaacaaatcacgggaggaatggcagtatgtatttttaatcgccgcccttgtacactatgggggcgtgatcttctacgcgatttttgcatcaggcgagaagcaaccgtgggccgatcctgaagaaacctccgaggaaaaatgcgggttcatacatgaagatgaactggatgaggagacgggcgacataacccagaattacatcaattatgggactacaaaaagttatggcgcgaccactcaggcaaacggcggctggccatccgggtgggaaaaaaaagaggaatttgtgcagggcgaagtacaggattcccatagttataaagatcgcgtagattactcctag

SEQ ID NO: 203725 - DNA, 1749 bp, Artificial Sequence
  derived and/or modified sequence
atggagagcgtgaagcagaggatcctggcccctgggaaggagggcctgaagaactttgctgggaagagcctgggccagatctacagagtgctggagaagaagcaggacacaggagagaccatcgagctgacagaagatggcaagcccctggaggtgcctgagaggaaggcccccctgtgtgactgcacctgcttcggcctgccccggcgctacatcatcgccatcatgagcggcctgggcttctgcatcagctttggcatccgctgcaacctgggcgtggccatcgtggacatggtgaacaacagcaccatccacagaggaggcaaggtgatcaaggagaaggccaagttcaactgggaccctgagaccgtgggcatgatccacggcagcttcttctggggctacatcatcacccagatccctgggggctacatcgccagccggctggccgccaacagagtgtttggagctgccatcctgctgaccagcaccctgaacatgctgatccccagcgctgcccgggtgcactacggctgtgtgatctttgtgcgcatcctgcagggcctggtggagggcgtgacctacccagcctgccacggcatctggagcaagtgggccccacccctggagaggagccggctggccaccaccagcttctgtggcagctatgctggggccgtcatcgccatgcccctggccggcatcctggtgcagtacacaggctggagcagcgtcttctacgtgtatggcagctttggcatggtgtggtacatgttctggctgctggtgtcctatgagagccctgccaagcaccccaccatcacagatgaggagcggcgctacatcgaggagagcatcggggagagcgccaacctgctgggcgccatggagaagttcaagaccccctggaggaagttcttcacctccatgcctgtgtatgccatcatcgtggccaacttctgccgctcctggaccttctacctgctgctgatcagccagcctgcctactttgaggaggtgtttggatttgagatcagcaaggtgggcatgctgtctgctgtgccccacctggtgatgaccatcatcgtgcccatcggcggccagattgctgacttcctgcggagcaagcagatcctgagcaccaccaccgtgaggaagatcatgaactgtggcggcttcggcatggaggccaccctgctgctggtggtgggctacagccacacccggggcgtggccatctccttcctggtgctggccgtgggcttcagcggctttgccatcagcggcttcaacgtgaaccacctggacatcgcccccaggtatgccagcatcctgatgggcatcagcaatggagtgggcaccctgagcggcatggtgtgccccatcatcgtgggcgccatgaccaagaacaagagccgggaggagtggcagtatgtgttcctgattgctgccctggtgcactacggcggcgtcatcttctacgccatctttgccagcggggagaagcagccctgggccgaccctgaggagaccagcgaggagaagtgtggcttcatccatgaagatgagctggatgaggagaccggggacatcacccagaactacatcaactacggcaccaccaagagctatggagccaccacccaggccaatggaggctggcccagcggctgggagaagaaggaggagtttgtgcagggcgaggtgcaggacagccacagctacaaggacagagtggactacagctag

SEQ ID NO: 203726 - DNA, 1413 bp, Artificial Sequence
  derived and/or modified sequence
atgaaggccaagttcaactgggaccctgagaccgtgggcatgatccacggcagcttcttctggggctacatcatcacccagatccctgggggctacatcgccagccggctggccgccaacagagtgtttggagctgccatcctgctgaccagcaccctgaacatgctgatccccagcgctgcccgggtgcactacggctgtgtgatctttgtgcgcatcctgcagggcctggtggagggcgtgacctacccagcctgccacggcatctggagcaagtgggccccacccctggagaggagccggctggccaccaccagcttctgtggcagctatgctggggccgtcatcgccatgcccctggccggcatcctggtgcagtacacaggctggagcagcgtcttctacgtgtatggcagctttggcatggtgtggtacatgttctggctgctggtgtcctatgagagccctgccaagcaccccaccatcacagatgaggagcggcgctacatcgaggagagcatcggggagagcgccaacctgctgggcgccatggagaagttcaagaccccctggaggaagttcttcacctccatgcctgtgtatgccatcatcgtggccaacttctgccgctcctggaccttctacctgctgctgatcagccagcctgcctactttgaggaggtgtttggatttgagatcagcaaggtgggcatgctgtctgctgtgccccacctggtgatgaccatcatcgtgcccatcggcggccagattgctgacttcctgcggagcaagcagatcctgagcaccaccaccgtgaggaagatcatgaactgtggcggcttcggcatggaggccaccctgctgctggtggtgggctacagccacacccggggcgtggccatctccttcctggtgctggccgtgggcttcagcggctttgccatcagcggcttcaacgtgaaccacctggacatcgcccccaggtatgccagcatcctgatgggcatcagcaatggagtgggcaccctgagcggcatggtgtgccccatcatcgtgggcgccatgaccaagaacaagagccgggaggagtggcagtatgtgttcctgattgctgccctggtgcactacggcggcgtcatcttctacgccatctttgccagcggggagaagcagccctgggccgaccctgaggagaccagcgaggagaagtgtggcttcatccatgaagatgagctggatgaggagaccggggacatcacccagaactacatcaactacggcaccaccaagagctatggagccaccacccaggccaatggaggctggcccagcggctgggagaagaaggaggagtttgtgcagggcgaggtgcaggacagccacagctacaaggacagagtggactacagctag

SEQ ID NO: 203727 - DNA, 1749 bp, Artificial Sequence
  derived and/or modified sequence
atggagagcgtgaagcagcggatcctggcccccggcaaggagggcttgaagaatttcgcaggaaagagcctcggccagatctacagagtcttggaaaagaagcaggacaccggagagaccatcgagttaacagaagacggaaagccacttgaggtcccggagaggaaagcaccactgtgtgactgtacctgcttcggtttgccgcggcggtacattatcgccattatgagcggtctgggtttttgcatcagctttggtattaggtgtaatttaggggtagctatcgtcgatatggtcaataactctactatacacaggggcggtaaggtgataaaggaaaaggccaaatttaactgggacccagagactgtgggaatgatccatgggagttttttctggggatatattattacccagatccctggcggttacattgcgagtagattggccgccaaccgggtttttggtgccgccatccttcttacctcaactctgaacatgctcattccgtctgccgccagagtgcactatggctgcgtaatcttcgtgaggatcctccagggtctagttgagggcgttacttacccagcatgtcacggcatctggagcaagtgggcccccccattagagcgcagcagactcgctaccacttctttttgtggcagctacgccggcgccgtgatcgccatgcccctcgccgggatccttgtccaatacacaggttggtcaagcgtgttctacgtgtatggctccttcgggatggtgtggtatatgttttggctgctagtctcttatgaatctccggccaagcatccaaccatcaccgacgaggagcggagatacattgaggagtcaatcggtgaatccgctaatctactgggagctatggagaaatttaaaaccccctggcgcaaattctttacatctatgcctgtgtacgcaatcatcgtggccaacttctgcagatcctggactttctacctgctgctgatttcacagcccgcctactttgaagaggtttttgggtttgagatctccaaggtgggaatgttatctgctgtgcctcacctggtgatgaccatcattgttcccattgggggccagatcgccgatttccttcggagcaagcagattttgtcaacaactacagttcgcaagatcatgaattgcggcggcttcggaatggaggccacactcctgttagtggtgggttacagccacacacgtggtgtggccatcagctttctggtgctggcggtcggattctctgggtttgccatatcgggtttcaacgtcaaccatctggacatcgcccctcgatatgcgtctatcttgatgggcattagtaatggtgttgggaccctgagcgggatggtctgtccaattatcgtgggtgctatgacaaaaaataaatccagggaagagtggcagtatgtatttctgattgcagccctcgtccactatggaggtgtgatcttttacgcgatctttgcgagtggggaaaagcagccttgggccgatcccgaagagacatcagaggagaaatgcggattcattcacgaagatgagctggacgaggagaccggggacatcacacaaaactacattaactatggaacgacaaaatcgtatggcgctaccacacaagccaacggcggctggccctccggatgggagaaaaaagaagaattcgtccaaggcgaggtccaggatagccactcttacaaggaccgagtcgattatagctag

SEQ ID NO: 203728 - DNA, 1413 bp, Artificial Sequence
  derived and/or modified sequence
atgaaggccaagttcaactgggaccccgagaccgtgggcatgatccacggcagtttcttctggggctatatcataacacagatacccggggggtacattgcatcccgccttgccgctaatagggttttcggagcggccattttactgacctcaaccctgaatatgcttatcccttcggcagcaagggtacattacgggtgtgtcatttttgtgcggattctgcaggggttggtagaaggggtcacctacccggcctgccatggcatatggtctaaatgggcccctcccctcgaacggagccgtctggccaccacctcattttgcgggtcgtatgccggagctgtgatcgcgatgcccctggctggtatcttggtgcagtacaccgggtggtcctcagtcttctacgtctatgggagttttgggatggtctggtacatgttttggctcctggtctcatacgagtcccctgccaagcatcccactattaccgacgaggagcgcagatacattgaagagagcattggcgaaagtgccaatctgctcggagctatggaaaaattcaaaacaccatggaggaaattcttcacttctatgccagtgtatgccattattgtggctaatttctgtaggagctggaccttttatctcctattgatctcacagccagcatatttcgaggaagtgtttggattcgagatcagcaaagtaggaatgcttagtgctgtcccacatttagtgatgactatcatcgtgccaatcggcggacagattgctgacttcctgagatctaagcagattctaagtactacgaccgtccgcaagattatgaactgcggaggcttcggtatggaagccacactgctcctggtcgtgggctactcgcatacacgcggggtagccattagctttctggtcttggcggtggggttcagtggatttgccatctccggcttcaacgtaaaccacctggacatcgcaccccggtatgcctccattctcatgggcattagtaacggtgtggggacattaagcggaatggtgtgtccgattatcgtaggcgctatgacaaagaacaaatctcgtgaggagtggcagtatgtcttcctgatcgccgccctggtccactacgggggagttatattttatgccatttttgcctctggtgagaagcagccttgggcggaccccgaggagacttctgaggaaaaatgcggatttattcacgaggacgaactagacgaggaaacgggagacataacccagaattatatcaactacggaacaaccaagtcctacggggccacgactcaagctaatggcgggtggccctccggctgggagaaaaaggaagaatttgtgcagggagaggttcaagactcccattcctacaaggaccgcgtagactattcatag

SEQ ID NO: 203729 - DNA, 1749 bp, Artificial Sequence
  derived and/or modified sequence
atggagagcgtcaagcagcggattctcgcccctggtaaggagggcctcaagaactttgcgggtaaatctctcggtcagatttatcgcgtattggaaaagaagcaagacacgggggagaccatcgaattgaccgaggatggtaaacctcttgaggtaccagaacgtaaagcgcctctgtgcgattgcacctgctttgggctgcctaggcgctacattatcgccatcatgtcaggactcgggttctgcattagctttggcattcgttgcaaccttggagtggccatcgttgacatggtaaacaacagtactatacatcgcggaggcaaggtcattaaggagaaggctaagttcaactgggaccctgaaaccgttggtatgatccacgggtcattcttttggggctatatcatcacccagattcccggtggttatatcgcatcacgactcgccgcaaatagggtatttggtgcggctatcctgctgacttccacgctgaatatgttgataccaagcgccgcaagagtgcattacgggtgcgtaatctttgtgcgaatcctgcaaggccttgttgaaggggtgacataccccgcttgccacgggatttggtcaaaatgggctccccctctggagcgttcaagacttgcaaccacaagtttttgtggctcatacgccggagccgtaatcgcgatgcccctggccggtatcctggtccagtacaccggctggtcttcggttttctacgtttacggctccttcggcatggtctggtacatgttctggctgctcgtgtcatatgagtccccagctaagcaccccacaatcaccgatgaggagcgtcggtatatcgaggaaagcatcggtgagtctgccaacctcctgggagccatggagaaatttaaaaccccttggcgtaagttctttacgtcaatgcccgtctatgccatcatagtggcaaatttttgccggtcttggacattttacttgctcctcattagccagccggcatactttgaggaagtgttcggattcgagatatcgaaggtgggtatgctgtctgcagtcccccacctagtgatgaccataatcgtgccgatcggtggacagattgccgatttcctgcgttcaaagcagatcctttccacaaccacagtgagaaagattatgaactgtggcggttttggaatggaagcaacactgctcctcgtggttggatacagtcacacgaggggcgtggcaatttcatttctggtcctcgccgtaggcttttcaggttttgctatcagcggctttaatgttaaccatttagatattgctcccagatacgcgtccatcctgatggggataagtaacggagtgggcacacttagtggcatggtgtgccccatcatagtgggtgccatgaccaagaataaatcccgagaggagtggcaatacgtcttcctcatcgccgcactcgttcattacggcggagtcatcttttatgcaatcttcgcatccggcgagaagcaaccatgggcagatccggaggaaaccagcgaagaaaaatgcggattcattcacgaagacgagctggatgaagagacgggagatataacccaaaattacatcaattatggcacgacgaagtcgtacggagccacaacccaagccaatggtggctggcccagcggctgggagaagaaagaggagtttgtgcagggtgaggtccaggattcccactcctataaggaccgcgtggactatagttag

SEQ ID NO: 203730 - DNA, 1413 bp, Artificial Sequence
  derived and/or modified sequence
atgaaggctaaatttaactgggatccagaaaccgtcgggatgatccacgggtccttcttttggggctatattattacacagattcctggtggttatatagctagcagattagccgcaaaccgggtctttggcgctgccattctactgacgagtacactgaacatgctgattccttctgccgcaagggtgcattatggatgcgtcattttcgtaaggattctccaaggactggtggagggcgtaacatatcctgcttgtcatgggatttggtccaagtgggccccaccactcgaaagatcccgattggccaccacttctttttgcggctcctatgctggggctgttatagcaatgcccctggcgggaatcctcgtgcagtacacagggtggtcctctgttttctatgtctacggatcatttggcatggtttggtatatgttttggttgttagtatcctacgaatcccctgcgaaacatcccactatcaccgacgaagaaaggagatacatcgaagagtcaattggcgaatccgcgaatctgctcggtgccatggagaagtttaagactccctggcgcaaatttttcacaagcatgcctgtatatgccataattgtggctaatttttgcaggtcctggacattttatctccttcttatttctcagccagcctatttcgaagaggtcttcgggttcgaaatatccaaggttggcatgctcagcgccgtcccccacctggtcatgaccatcattgtacccattgggggacaaattgccgactttttgcgcagtaaacagattcttagcaccaccacagtcaggaagatcatgaactgtggaggttttggtatggaagccacactgctgttagtcgttggatattcgcatacccgcggtgtagccatatccttcttggtacttgcggtgggcttctccggctttgccatttctggattcaacgtgaatcacctggacattgcccctaggtatgcctccattctcatgggaatctcaaatggagttggaacgctatctggcatggtgtgtcccattattgtgggagctatgactaagaacaaaagccgggaagaatggcaatacgtgtttcttattgcggcactggttcattacgggggagtgatcttttatgcgattttcgccagtggcgagaaacagccctgggccgatcccgaggagacttccgaggagaagtgcggattcatccatgaggatgagcttgacgaagagacaggggatattacccagaattatatcaattatggcactacaaaatcttacggcgcaacaacccaagcaaatgggggttggccctcaggatgggagaagaaggaagagttcgtgcagggagaggttcaggactctcatagctacaaggatcgagtcgactactcatag

SEQ ID NO: 203731 - DNA, 3949 bp, Artificial Sequence
  derived and/or modified sequence
gcttctgtgatattccggcccctccgtttaaaagccatcagatttgagagcaataagtcttcaaaaccgggaatttacattgtttttcagctgaccgacttccaggaaaaggactcaaccgcatctacccaaataccgtggcactgcttgcgctctttgccaccggatcctccccttccaatgagactttctgattgtgtctaccaactctcctattaggaaacccgtgggttgcatgcagctattctgttgtattctcattctcactctccctcccttctctcactctcactcttgctggaggcgagccactaccattctgctgagaaggaaaagcccgcaactactttaagagattaagacaatatgcgcaatcctcgcctttcctagcaatcactatttaaatctggcaagaactgacaacagtctttgcaagaatggaatccgtaaaacaaaggattttggccccaggaaaagaggggctaaagaattttgctggaaaatcactcggccagatctacagggtgctggagaagaagcaagacaccggggagacaatcgagctgacggaggatgggaagcccctagaggtgcccgagaggaaggcgccgctgtgcgactgcacgtgcttcggcctgccccgccgctacattatcgccatcatgagcggcctgggcttctgcatctccttcggtatccgctgcaacctgggcgtggccattgtggacatggtcaacaacagcaccatccaccgcgggggcaaggtcatcaaggagaaagccaaattcaactgggacccggaaaccgtggggatgatccacggttccttcttttggggctacatcatcactcagattccgggaggctacatcgcgtctcggctggcagccaacagggttttcggagctgccatacttcttacctctaccctaaatatgctaattccatcagcagccagagtgcattatggatgtgtcatctttgtcagaatactgcagggacttgttgagggtgtgacctacccagcatgtcatgggatatggagcaaatgggccccacctctagagaggagtagactggcaaccacctccttttgtggttcctatgccggagctgtgattgcaatgcctttagctggcattcttgtgcagtacactggctggtcttcagtgttttatgtctacggaagctttggaatggtctggtacatgttttggcttttggtgtcttatgaaagtcctgcaaagcatcctactattacagatgaagaacgtaggtacatagaagaaagcattggagagagtgcaaatcttttaggtgcaatggaaaaattcaagactccatggaggaagttttttacatccatgccagtctatgcaataattgttgcaaacttctgcagaagctggactttttatttattgcttattagtcagccagcatattttgaggaagtctttggatttgaaattagcaaggttggtatgctatctgctgtgccacacttagtaatgacaattattgtgcctattgggggacaaattgcagattttctaagaagcaagcagattctttcaactacgacagtgagaaagatcatgaattgtggtggttttggcatggaagccacactgctcctggtcgttggctattctcatactagaggggtagcaatctcattcttggtacttgcagtgggattcagtggatttgctatatctggtttcaatgttaaccacttggatatcgctccaagatatgccagtatcttaatgggcatttcgaatggtgttggcacattgtcaggaatggtttgtcctatcattgttggtgcaatgacaaagaataagtcacgtgaagagtggcagtatgtcttcctgatcgctgccctagtccactatggtggagttatattttatgcaatatttgcctcaggagagaaacaaccctgggcagacccggaggaaacaagtgaagaaaaatgtggatttattcatgaagatgaactcgatgaagaaacaggggacattactcaaaattatataaattatggtaccaccaagtcttatggtgccacaacacaggccaatggaggttggcctagtggttgggaaaagaaagaggaatttgtacaaggagaagtacaagactcacatagctataaggaccgagttgattattcataacaaaactaattactggatttatttttagtgtttgtgattaaattcattgtgattgcacaaaaattttaaaaacacgtgatgtaaacttgcaagcatatcaaccaggcaagtcttgctgtaaaaatgaaaacaaaacaaacccatgaggttaccatcaagtgcaatctgtaaaattgtgaagttccatcatttccattcaagtcatccattcttgcatttgtgacttaaaggttgactggtcaaaattgtagaaacaagtagttacccattggattcatatgagctaaaactcatcactatttactaaagcacaacatctcatcctacaaaagttaagaagccaaagctacttgatcatgcaaaatgcacttatatatttgttacactgtattgcaagatagcacacagaagttggctgcgtcaagtagaggcgacatttattaagtgaaaatcatggagttgggatatctctcaattaaagaaatacattgtgaactatcagctacaaagttgtactgaataactattagaattgcataatgtgagatattttgttagtcctcaaaaggaatatcttgcagtgttttctatgaaatgcttgggcacaaacacttatttctgtgaaagagaacatgtaagttgaggggtatgcttcatgttcttccatccatttacctaatagtatgaaacagttcacatttcaataaaatcaaacttttcatgtagcgtatcacataacttttttgcaaaaaatataaaaagaaataaacttcaatgtattttttattacaactttgtactggttgtaacttgcattagaaaaaaaagagatatatacaccacaaagaatctaataagaaatttattatggagatatagcccttaaaatgcaatattaagaacaaagaaatagaaaatggtttagatatctttcttccttcataattaaatactatatgaaacttgtgccacagagctatatataatatgaaaagattaacttcatagagatattgtaagtaggtaattttattatttaaagtcctattaagaaatatttgtcttaaatatataggacaatacattatattaaaatggtctctctctatatatatctgtatatcttatacatgtccatacacagaaacataataaacaatcttcacacgaaaccaaaaatagcatacacctaatgttgggttagggaattgcaatttctactttcatagagtcatagaattttaggtggggaagaggcattttgcttgtcatttcttaatataactcaacaagaattgcaacatttgtgtaccaagcaataagtgcaatgcataaaatttcctgtctgtatattaccttcattttgcttgtagtagctgtttgggtggttggaataattttatttttcttttaaaaaagctaacatcagacccctttataatgtcctaaaattatgataatacatttcccaattcaactcaaaatattattggtgtattttgtctattctggatatttgatctgttcaatgtactgtgctagtgactggaggccctgctactgcaaatataaaacataaagtttgtttaaaaaaatgcaaatcattctttaccttaagaaaaaaaaaataccctttgctttgtgcctcaaagtgatgtaatgtgatcacagcttttgttgtgttgaatgaaaatatgtggactgtcattttgttgcagcaaaaaagtgttaataaaatgctctatttatcctttttttaaaaa

SEQ ID NO: 203732 - DNA, 1870 bp, Artificial Sequence
  derived and/or modified sequence
agaatttcccgatttaagtctccagggttggaagtcactacactactgtgtctgcattggccggattcgttaagtggacccctgacaggcgtctccacatctggctaacaaatctcttcatgaaagccaaattcaactgggacccggaaaccgtggggatgatccacggttccttcttttggggctacatcatcactcagattccgggaggctacatcgcgtctcggctggcagccaacagggttttcggagctgccatacttcttacctctaccctaaatatgctaattccatcagcagccagagtgcattatggatgtgtcatctttgtcagaatactgcagggacttgttgagggtgtgacctacccagcatgtcatgggatatggagcaaatgggccccacctctagagaggagtagactggcaaccacctccttttgtggttcctatgccggagctgtgattgcaatgcctttagctggcattcttgtgcagtacactggctggtcttcagtgttttatgtctacggaagctttggaatggtctggtacatgttttggcttttggtgtcttatgaaagtcctgcaaagcatcctactattacagatgaagaacgtaggtacatagaagaaagcattggagagagtgcaaatcttttaggtgcaatggaaaaattcaagactccatggaggaagttttttacatccatgccagtctatgcaataattgttgcaaacttctgcagaagctggactttttatttattgcttattagtcagccagcatattttgaggaagtctttggatttgaaattagcaaggttggtatgctatctgctgtgccacacttagtaatgacaattattgtgcctattgggggacaaattgcagattttctaagaagcaagcagattctttcaactacgacagtgagaaagatcatgaattgtggtggttttggcatggaagccacactgctcctggtcgttggctattctcatactagaggggtagcaatctcattcttggtacttgcagtgggattcagtggatttgctatatctggtttcaatgttaaccacttggatatcgctccaagatatgccagtatcttaatgggcatttcgaatggtgttggcacattgtcaggaatggtttgtcctatcattgttggtgcaatgacaaagaataagtcacgtgaagagtggcagtatgtcttcctgatcgctgccctagtccactatggtggagttatattttatgcaatatttgcctcaggagagaaacaaccctgggcagacccggaggaaacaagtgaagaaaaatgtggatttattcatgaagatgaactcgatgaagaaacaggggacattactcaaaattatataaattatggtaccaccaagtcttatggtgccacaacacaggccaatggaggttggcctagtggttgggaaaagaaagaggaatttgtacaaggagaagtacaagactcacatagctataaggaccgagttgattattcataacaaaactaattactggatttatttttagtgtttgtgattaaattcattgtgattgcacaaaaattttaaaaacacgtgatgtaaacttgcaagcatatcaaccaggcaagtcttgctgtaaaaatgaaaacaaaacaaacccatgaggttaccatcaagtgcaatctgtaaaattgtgaagttccatcatttccattcaagtcatccattcttgcatttgtgacttaaaggttgactggtcaaaattgtagaaacaagtagttacccattggattcatatgagctaaaactcatcactatttactaaagcacaacatctcatcctacaaaagttaaga

SEQ ID NO: 203733 - DNA, 1749 bp, Artificial Sequence
  derived and/or modified sequence
atggagagcgtgaagcagagaatcctggcccccggcaaggagggcctgaagaacttcgccggcaagagcctgggccagatctacagagtgctggagaagaagcaggacaccggcgagaccatcgagctgaccgaggacggcaagcccctggaggtgcccgagagaaaggcccccctgtgcgactgcacctgcttcggcctgcccagaagatacatcatcgccatcatgagcggcctgggcttctgcatcagcttcggcatcagatgcaacctgggcgtggccatcgtggacatggtgaacaacagcaccatccacagaggcggcaaggtgatcaaggagaaggccaagttcaactgggaccccgagaccgtgggcatgatccacggcagcttcttctggggctacatcatcacccagatccccggcggctacatcgccagcagactggccgccaacagagtgttcggcgccgccatcctgctgaccagcaccctgaacatgctgatccccagcgccgccagagtgcactacggctgcgtgatcttcgtgagaatcctgcagggcctggtggagggcgtgacctaccccgcctgccacggcatctggagcaagtgggccccccccctggagagaagcagactggccaccaccagcttctgcggcagctacgccggcgccgtgatcgccatgcccctggccggcatcctggtgcagtacaccggctggagcagcgtgttctacgtgtacggcagcttcggcatggtgtggtacatgttctggctgctggtgagctacgagagccccgccaagcaccccaccatcaccgacgaggagagaagatacatcgaggagagcatcggcgagagcgccaacctgctgggcgccatggagaagttcaagaccccctggagaaagttcttcaccagcatgcccgtgtacgccatcatcgtggccaacttctgcagaagctggaccttctacctgctgctgatcagccagcccgcctacttcgaggaggtgttcggcttcgagatcagcaaggtgggcatgctgagcgccgtgccccacctggtgatgaccatcatcgtgcccatcggcggccagatcgccgacttcctgagaagcaagcagatcctgagcaccaccaccgtgagaaagatcatgaactgcggcggcttcggcatggaggccaccctgctgctggtggtgggctacagccacaccagaggcgtggccatcagcttcctggtgctggccgtgggcttcagcggcttcgccatcagcggcttcaacgtgaaccacctggacatcgcccccagatacgccagcatcctgatgggcatcagcaacggcgtgggcaccctgagcggcatggtgtgccccatcatcgtgggcgccatgaccaagaacaagagcagagaggagtggcagtacgtgttcctgatcgccgccctggtgcactacggcggcgtgatcttctacgccatcttcgccagcggcgagaagcagccctgggccgaccccgaggagaccagcgaggagaagtgcggcttcatccacgaggacgagctggacgaggagaccggcgacatcacccagaactacatcaactacggcaccaccaagagctacggcgccaccacccaggccaacggcggctggcccagcggctgggagaagaaggaggagttcgtgcagggcgaggtgcaggacagccacagctacaaggacagagtggactacagctag

SEQ ID NO: 203734 - DNA, 1413 bp, Artificial Sequence
  derived and/or modified sequence
atgaaggccaagttcaactgggaccccgagaccgtgggcatgatccacggcagcttcttctggggctacatcatcacccagatccccggcggctacatcgccagcagactggccgccaacagagtgttcggcgccgccatcctgctgaccagcaccctgaacatgctgatccccagcgccgccagagtgcactacggctgcgtgatcttcgtgagaatcctgcagggcctggtggagggcgtgacctaccccgcctgccacggcatctggagcaagtgggccccccccctggagagaagcagactggccaccaccagcttctgcggcagctacgccggcgccgtgatcgccatgcccctggccggcatcctggtgcagtacaccggctggagcagcgtgttctacgtgtacggcagcttcggcatggtgtggtacatgttctggctgctggtgagctacgagagccccgccaagcaccccaccatcaccgacgaggagagaagatacatcgaggagagcatcggcgagagcgccaacctgctgggcgccatggagaagttcaagaccccctggagaaagttcttcaccagcatgcccgtgtacgccatcatcgtggccaacttctgcagaagctggaccttctacctgctgctgatcagccagcccgcctacttcgaggaggtgttcggcttcgagatcagcaaggtgggcatgctgagcgccgtgccccacctggtgatgaccatcatcgtgcccatcggcggccagatcgccgacttcctgagaagcaagcagatcctgagcaccaccaccgtgagaaagatcatgaactgcggcggcttcggcatggaggccaccctgctgctggtggtgggctacagccacaccagaggcgtggccatcagcttcctggtgctggccgtgggcttcagcggcttcgccatcagcggcttcaacgtgaaccacctggacatcgcccccagatacgccagcatcctgatgggcatcagcaacggcgtgggcaccctgagcggcatggtgtgccccatcatcgtgggcgccatgaccaagaacaagagcagagaggagtggcagtacgtgttcctgatcgccgccctggtgcactacggcggcgtgatcttctacgccatcttcgccagcggcgagaagcagccctgggccgaccccgaggagaccagcgaggagaagtgcggcttcatccacgaggacgagctggacgaggagaccggcgacatcacccagaactacatcaactacggcaccaccaagagctacggcgccaccacccaggccaacggcggctggcccagcggctgggagaagaaggaggagttcgtgcagggcgaggtgcaggacagccacagctacaaggacagagtggactacagctag

SEQ ID NO: 203735 - protein, 299 aa, Artificial Sequence
  derived and/or modified sequence
MAELGLNEHHQNEVINYMRFARSKRGLRLKTVDSCFQDLKESRLVEDTFTIDEVSEVLNGLQAVVHSEVESELINTAYTNVLLLRQLFAQAEKWYLKLQTDISELENRELLEQVAEFEKAEITSSNKKPILDVTKPKLAPLNEGGTAELLNKEILRLQEENEKLKSRLKTIEIQATNALDEKSKLEKALQDLQLDQGNQKDFIKAQDLSNLENTVAALKSEFQKTLNDKTENQKSLEENLATAKHDLLRVQEQLHMAEKELEKKFQQTAAYRNMKEILTKKNDQIKDLRKRLAQYEPED

SEQ ID NO: 203736 - DNA, 900 bp, Artificial Sequence
  derived and/or modified sequence
atggccgagctaggcttgaacgagcaccaccaaaacgaggtgattaattacatgcggtttgcacggtctaagagagggctccgtctcaagaccgttgactcatgcttccaggatctgaaggaaagcaggctagtggaggacacttttacaattgatgaggtgtccgaggtgctgaacggtttgcaggccgtggtgcactccgaagtggaaagcgaactgatcaacacagcgtacaccaacgtcctgctgcttagacaactgtttgctcaagctgagaagtggtacctaaaactgcagactgacatctccgaattggaaaatagggaactgttagagcaagtggccgagttcgagaaagctgagataaccagctcaaacaaaaagccaatcctagacgtgacgaagccaaaactggcccctttgaacgagggcggcactgctgaactgttgaacaaagagatcctgaggttgcaggaggagaacgaaaagctgaagagcagactgaagactattgagatccaggccaccaatgctcttgatgagaagtcaaaactagagaaggcgctgcaggacctgcagcttgatcagggaaaccaaaaagatttcatcaaagcccaggacttgtcaaacttggaaaacaccgtggcagctctgaagtctgagtttcagaaaacactgaatgataagacagaaaatcagaagagcctggaagaaaacctggccacagctaaacacgacctactcagagtgcaggagcaacttcatatggcggagaaagagctggagaagaagtttcagcagactgctgcctaccgaaacatgaaggagatactgaccaagaagaatgaccagatcaaagacttgaggaagaggttggcccagtatgaacccgaagactag

SEQ ID NO: 203737 - DNA, 900 bp, Artificial Sequence
  derived and/or modified sequence
atggccgagctgggcctgaatgagcaccaccagaatgaggtgatcaactacatgagatttgcccggagcaagaggggcctgcggctgaagacagtggacagctgcttccaggacctgaaggagagccggctggtggaggacaccttcaccattgatgaggtgtctgaggtgctgaatggcctgcaggccgtggtgcacagcgaggtggagagcgagctgatcaacacagcctacaccaacgtgctgctgctgcggcagctgtttgcccaggccgagaagtggtacctgaagctgcagacagacatcagcgagctggagaaccgggagctgctggagcaggtggccgagtttgagaaggccgagatcaccagcagcaacaagaagcccatcctggatgtgaccaagcccaagctggcccccctgaatgaaggaggaacagctgagctgctgaacaaggagatcctgcggctgcaggaggagaatgagaagctgaagagccggctgaagaccatcgagatccaggccaccaatgccctggatgagaagagcaagctggagaaggccctgcaggacctgcagctggaccagggcaaccagaaggacttcatcaaggcccaggacctgagcaacctggagaacacagtggccgccctgaagtctgagttccagaagaccctgaatgacaagacagagaaccagaagagcctggaggagaacctggccacagccaagcatgacctgctgcgggtgcaggagcagctgcacatggccgagaaggagctggagaagaagttccagcagacagctgcctacagaaacatgaaggagatcctgaccaagaagaatgaccagatcaaggacctgaggaagaggctggcccagtatgagcctgaggactag

SEQ ID NO: 203738 - DNA, 4073 bp, Artificial Sequence
  derived and/or modified sequence
gaaaatgcataattgcagtccacgtgcctcggtttccgttagcaaccagaggcttctaaacaacctaccctccttccccattttctgtggtccaactaccctcggcgatcccaggcttggcggggcaccgcctggcctctcccgttcctttaggctgccgccgctgcctgccgccatggcagagttgggcctaaatgagcaccatcaaaatgaagttattaattatatgcgttttgctcgttcaaagagaggcttgagactcaaaactgtagattcctgcttccaagacctcaaggagagcaggctggtggaggacaccttcaccatagatgaagtctctgaagtcctcaatggattacaagctgtggttcatagtgaggtggaatctgagctcatcaacactgcctataccaatgtgttacttctgcgacagctgtttgcacaagctgagaagtggtatcttaagctacagacagacatctctgaacttgaaaaccgagaattattagaacaagttgcagaatttgaaaaagcagagattacatcttcaaacaaaaagcccatcttagatgtcacaaagccaaaacttgctccacttaatgaaggtggaacagcagaactcctaaacaaggaaattttaagacttcaagaagagaatgagaaattgaagtcaaggttgaagaccattgaaatacaggctacaaatgcactggatgaaaagtcaaaactagaaaaagcactgcaagatttacagcttgatcaaggaaatcaaaaggattttataaaggcccaagacttaagtaacttagaaaacactgtcgctgccttaaagagtgagtttcagaagacacttaatgacaagacagaaaaccagaagtcactggaggagaatctggcgacagccaagcacgatctactcagggttcaggagcagctgcacatggctgaaaaggaattagaaaagaaatttcagcaaacagcagcttatcgaaacatgaaagagattcttaccaagaagaatgaccaaatcaaagatctgaggaaaagactggcacaatatgaacctgaagattaaaactgaagatttcctctggaagctaccacatgcaaacatacaagcagtctcacctcaggcatgtattttgaaaagcattttgtcatatcccctctccttatttttctaatatttagactttgaatatttagaactagagttcctattttcagctagttgaaaacagagaaaacctagtgattctgtctggtcatcccacacacctctctactgagtgctccagagtcttagctcacatgcactgagaattctttacagcaaagaagagatttttagagtgggaagaagaggcttatccttctgcattagtataaagagtctgtatttttaataaatgttaaataagctaacaatgtttgtacttatgcattccccatgggtaaaaataaataatagcattgttaaagatagttattaccaaaaaaagagagttattacaaataaatatgtctctttatttttaaaaatgaaatcttaattcatttactctatttgatgataaactataaattcattgaaaatgtgaattctattatgggtagcctttttaccaattataaggaaaatttacagcagtgaacatgaacattcacttagcttcctcagtctctccatcttaaagatcatttatcagaggaggttcagcattttttgcagcataacttttcatgagtctgtattactaatggataagtcaaatccatcctgcacttctacagtttagaaagtatctggactcagaataaatgtaatatttatacttgtttccagaatgttattttacattttatgttcaataagaacactttttaaaagacgtatattcaacataaaatcagctatcagacttcagattagactttatttatgtgggtctataataattgtattttcaagaggttttcactatatttgtattggcctggttttctcagacgattttggacaaatcattagaaactgggcatcatatccacagttatgtaaggcagtgatatactataaggataaacaaagtcaagtccataaagcaataatccctcagaaggaaagtccttacttttcacatattaatatttagtaatttttcctgcttctaaaagtgagagtatcacaccctaaatgaacactgtctactaagagacatcattccatttccacaaatgaagattttattccaagaaacgagtttactgattggagcatagggcttgttgttatttttattcaagcttttagtaatagccttgaatttattatttttcttataggctttttgttaaaatagtgaaggaacaaatgttaaagggtaagataatttccctgcaaaaggacacagaaggcagtcttaagaagatgaatggatgagagaagggagagaataaaatgcaataacgagccagcatttactatgtattttctcctcacctgtctctccatatttaggtcacttaccagtttctgtgcccttttggagcttttgttgagggcttcattctcaccctgtatttctttagccctaaattgacactctctccaaaaatccattccattgtctgtggaccaagatgttctatgtaattcagaagcagaactcttggctaaagggctagtgtggccttcagaaaccattcaattattttctccctacacctttgtcagtttgaaaccagtgaggaaaaaaggtatgttgataagaaacctatattgctaggtagaatttgtacttgttttcttggtagcagttttgaaatattctgtacagtacgttcctattgtttaataataaattcaaaaatatttctaaaaccttaaaaccaactatgccaagcattaagataaacaaatatgatgttctttgacgtaaatcaacgtgatgattctttcacatgtaaacacattttagtgtttctggtttgtcatttttgttgttgttgttgttgttgttatttactctataccctttagcaaaatacagttttaaatttttattgtttttagtagtttcccaactttaagacttatctaatttaactgagaaagaaagcctttttcatatatatatatattggatttctaaggatggtggtttgagccttgattagacttttgatgtgctaagccagacaggcagtctgtacattgatggccatcacaatgcagctttggtttaatttaattcaggcctgctgctgagttatgcacagactttttgttgaccaaaataaaatataaagggttttcttctgtttgacatttgtgttcattttttctctttatgtattacattttaacctatattaaataaatgtttaaatgataatttgcttatgtcttataaaactcagcataagaaaaatactgccctaccttgactgtgtaatcttatttgataaagcctttgctattcattatttccattctgattaactgaaagagatttatagagatgctcaaattttaagcccttggtgcttttagatatatattggttgcaaaagtttggcattaatgatttccctctgcttatgtgtaaatgcctatgttccaaagctttgccactagatattcaaatcataaattgtcatgtaagccagtcttccagaaagaaaagctatttcagcaaaatgatatttcacatttagacaaaacagtagtatttagacaataatattttgacaaaaccattttcaaaactgcttaggaaaaaggggaaatattatacttaaaggtaatgacctctgtcttgaatagaggtgagtgggttggtgacaactggtttggaggcttttgtgggggactgtggtgtcttttggattgtgtcatcagctccttcatcaagtaagcgtgtagctgttattgcctattgtaaaacatgaattgatgtgaacagtactcaatctcttacattatatgaagtataacttcctctcttttttgcctataatacatcctttaacttttacagattaaaaaaccactgttagacaaagcaaaa

SEQ ID NO: 203739 - DNA, 2014 bp, Artificial Sequence
  derived and/or modified sequence
acacacatctgaagagcaaacagatggtgaaaccagtagcccaagatgagaaaacggactttttttgagacagcagttgaagctgaagcctcaaaagccgggcggggggaaagcatagcaattatgaaagacattcaaagtgggttaggggtgagggaaaggtcagccttttacttttcccacacccgctgttttctgaagaaggatggtaatgcgagcagaagggtgatggccaacctctgggctttgatgtgtgtcccctcctcccgcccccatcctgcaagctctggggaggtcggagactagtgtggtttcctcacacctcccaccatgctggcactgaggttatctaagagttgacagccccatctaaagccttgaatgaattaagtcttttttagctaaaaaatgaacaaaacctgagatgcatgagtgtccttaccaaaaggaagtccttgtttctaggacaggtctgtcttcgggcctgtgggtccatagaatcatcacagaaaaaatgatttcaggaggtctcccccgctttctgctcccaaggccgactctgactgagcctcggaggagagaaggaagccatttctgggaggccaaaacgtccgtcttccaggctcttgctgtaagtcagcccacttttacagatgaggaaccaagacccagggaagatgggaaggcagagaaaatccatcaagttgtaccctacccaccctttggtgacttttccaagaagctgggctaagttccaggagaaagctctgcagagttgggcctaaatgagcaccatcaaaatgaagttattaattatatgcgttttgctcgttcaaagagaggcttgagactcaaaactgtagattcctgcttccaagacctcaaggagagcaggctggtggaggacaccttcaccatagatgaagtctctgaagtcctcaatggattacaagctgtggttcatagtgaggtggaatctgagctcatcaacactgcctataccaatgtgttacttctgcgacagctgtttgcacaagctgagaagtggtatcttaagctacagacagacatctctgaacttgaaaaccgagaattattagaacaagttgcagaatttgaaaaagcagagattacatcttcaaacaaaaagcccatcttagatgtcacaaagccaaaacttgctccacttaatgaaggtggaacagcagaactcctaaacaaggaaattttaagacttcaagaagagaatgagaaattgaagtcaaggttgaagaccattgaaatacaggctacaaatgcactggatgaaaagtcaaaactagaaaaagcactgcaagatttacagcttgatcaaggaaatcaaaaggattttataaaggcccaagacttaagtaacttagaaaacactgtcgctgccttaaagagtgagtttcagaagacacttaatgacaagacagaaaaccagaagtcactggaggagaatctggcgacagccaagcacgatctactcagggttcaggagcagctgcacatggctgaaaaggaattagaaaagaaatttcagcaaacagcagcttatcgaaacatgaaagagattcttaccaagaagaatgaccaaatcaaagatctgaggaaaagactggcacaatatgaacctgaagattaaaactgaagatttcctctggaagctaccacatgcaaacatacaagcagtctcacctcaggcatgtattttgaaaagcattttgtcatatcccctctccttatttttctaatatttagactttgaatatttagaactagagttcctattttcagctagttgaaaacagagaaaacctagtgattctgtctggtcatcccacacacctctctactgagtgctccagagtcttagctcacatgcactgagaattctttacagcaaagaagagatttttagagtgggaagaagaggcttatccttctgcattagtataaagagtctgtatttttaataaatgttaaataagct

SEQ ID NO: 203740 - DNA, 900 bp, Artificial Sequence
  derived and/or modified sequence
atggccgagctgggcctgaacgagcaccaccagaacgaggtgatcaattacatgagatttgcaaggtccaaacgcgggttgcggctgaaaactgtcgattcctgcttccaggatctgaaagagtcacgcctagtagaagacacatttacaattgacgaggtgtccgaagtcctgaatggattgcaggcagtcgtgcattctgaggtagagagcgaattaatcaacaccgcttacacgaacgtactgctgctccgccaactttttgcgcaggcagaaaagtggtatctgaaactgcaaacagacatcagcgaactggaaaatagggaactgttagaacaggtagcagaattcgaaaaggcggaaatcacttctagcaataaaaagccaatcttagacgtgacgaagcccaaactagcgcccctcaatgagggaggcaccgcagagctgttaaataaagagatcctccggttacaagaagaaaatgaaaagctgaagagtaggcttaagaccatcgaaatccaggccacaaatgctctggatgagaagtccaaactcgaaaaagctctgcaagatctccagttagaccaggggaatcagaaggattttatcaaggcgcaggatctgagcaacctggaaaacaccgtggccgctctgaagtccgaattccagaagactcttaatgataagacggaaaatcagaagtcgcttgaagagaacttagcgacggccaagcatgatctcctgagggttcaggagcagctgcatatggccgaaaaggaactggagaagaagtttcagcaaaccgcggcttaccggaacatgaaggagatcctgactaaaaagaatgaccagataaaagatctgcgcaagcgcctggctcagtatgagccagaagattag

SEQ ID NO: 203741 - DNA, 900 bp, Artificial Sequence
  derived and/or modified sequence
atggcagagctgggcctgaacgagcatcaccagaatgaggttatcaactacatgcggttcgccaggtcaaagagaggactgcggctgaagaccgttgactcctgctttcaggatctgaaagaatcccgcttagtggaggacacctttacaatcgacgaggtgagtgaggtattaaatggcttacaggctgtggttcattccgaggtggagagcgagctaattaacacagcgtacaccaacgtcctgcttctgcgtcagttgttcgcccaagctgagaaatggtatctaaaactccaaaccgatatctccgagctcgaaaatagggagcttctggagcaagtggctgaattcgaaaaagctgagatcacgtccagtaataagaagccaattctcgacgttacaaagcccaagttggctcccctgaatgaaggcggtaccgctgagctgctgaacaaggagattctacggctacaagaagagaacgagaagctcaaaagtcgattgaagactattgaaattcaggccactaacgccttagatgaaaaatccaagctggagaaagctctccaggatcttcaacttgaccagggaaaccagaaggattttattaaggcacaggatctgagcaatctggaaaacacagtcgccgcattgaagtcggagttccagaagactttgaatgacaaaaccgagaaccagaaatctctcgaagaaaacctggcgaccgctaaacacgatctgctgagggtgcaagaacagctgcacatggccgaaaaggagctggagaaaaaatttcagcagaccgctgcctaccgcaacatgaaagagatattgacaaaaaaaaatgatcagatcaaggatctgagaaaacgccttgcccagtatgagcctgaagactag

SEQ ID NO: 203742 - DNA, 900 bp, Artificial Sequence
  derived and/or modified sequence
atggccgagctgggcctgaacgagcaccaccagaacgaggtgatcaactacatgagattcgccagaagcaagagaggcctgagactgaagaccgtggacagctgcttccaggacctgaaggagagcagactggtggaggacaccttcaccatcgacgaggtgagcgaggtgctgaacggcctgcaggccgtggtgcacagcgaggtggagagcgagctgatcaacaccgcctacaccaacgtgctgctgctgagacagctgttcgcccaggccgagaagtggtacctgaagctgcagaccgacatcagcgagctggagaacagagagctgctggagcaggtggccgagttcgagaaggccgagatcaccagcagcaacaagaagcccatcctggacgtgaccaagcccaagctggcccccctgaacgagggcggcaccgccgagctgctgaacaaggagatcctgagactgcaggaggagaacgagaagctgaagagcagactgaagaccatcgagatccaggccaccaacgccctggacgagaagagcaagctggagaaggccctgcaggacctgcagctggaccagggcaaccagaaggacttcatcaaggcccaggacctgagcaacctggagaacaccgtggccgccctgaagagcgagttccagaagaccctgaacgacaagaccgagaaccagaagagcctggaggagaacctggccaccgccaagcacgacctgctgagagtgcaggagcagctgcacatggccgagaaggagctggagaagaagttccagcagaccgccgcctacagaaacatgaaggagatcctgaccaagaagaacgaccagatcaaggacctgagaaagagactggcccagtacgagcccgaggactag

SEQ ID NO: 203743 - protein, 951 aa, Artificial Sequence
  derived and/or modified sequence
MAAAAAAAAAVGVRLRDCCSRGAVLLLFFSLSPRPPAAAAWLLGLRPEDTAGGRVSLEGGTLRAAEGTSFLLRVYFQPGPPATAAPVPSPTLNSGENGTGDWAPRLVFIEEPPGGGGVAPSAVPTRPPGPQRCREQSDWASDVEVLGPLRPGGVAGSALVQVRVRELRKGEAERGGAGGGGKLFSLCAWDGRAWHHHGAAGGFLLRVRPRLYGPGGDLLPPAWLRALGALLLLALSALFSGLRLSLLSLDPVELRVLRNSGSAAEQEQARRVQAVRGRGTHLLCTLLLGQAGANAALAGWLYTSLPPGFGGTGEDYSEEGIHFPWLPALVCTGAVFLGAEICPYSVCSRHGLAIASHSVCLTRLLMAAAFPVCYPLGRLLDWALRQEISTFYTREKLLETLRAADPYSDLVKEELNIIQGALELRTKVVEEVLTPLGDCFMLRSDAVLDFATVSEILRSGYTRIPVYEGDQRHNIVDILFVKDLAFVDPDDCTPLLTVTRFYNRPLHCVFNDTRLDTVLEEFKKGKSHLAIVQRVNNEGEGDPFYEVMGIVTLEDIIEEIIKSEILDETDLYTDNRKKQRVPQRERKRHDFSLFKLSDTEMRVKISPQLLLATHRFMATEVEPFKSLYLSEKILLRLLKHPNVIQELKFDEKNKKAPEHYLYQRNRPVDYFVLLLQGKVEVEVGKEGLRFENGAFTYYGVPAIMTTACSDNDVRKVGSLAGSSVFLNRSPSRCSGLNRSESPNRERSDFGGSNTQLYSSSNNLYMPDYSVHILSDVQFVKITRQQYQNALTACHMDSSPQSPDMEAFTDGDSTKAPTTRGTPQTPKDDPAITLLNNRNSLPCSRSDGLRSPSEVVYLRMEELAFTQEEMTDFEEHSTQQLTLSPAAVPTRAASDSECCNINLDTETSPCSSDFEENVGKKLLRTLSGQKRKRSPEGERTSEDNSNLTPLIT

SEQ ID NO: 203744 - protein, 880 aa, Artificial Sequence
  derived and/or modified sequence
MAAAAAAAAAVGVRLRDCCSRGAVLLLFFSLSPRPPAAAAWLLGLRPEDTAGGRVSLEGGTLRAAEGTSFLLRVYFQPGPPRCREQSDWASDVEVLGPLRPGGVAGSALVQLFSLCAWDGRAWHHHGAAGGFLLRVRPRLYGPGGDLLPPAWLRALGALLLLALSALFSGLRLSLLSLDPVELRVLRNSGSAAEQEQARRVQAVRGRGTHLLCTLLLGQAGANAALAGWLYTSLPPGFGGTGEDYSEEGIHFPWLPALVCTGAVFLGAEICPYSVCSRHGLAIASHSVCLTRLLMAAAFPVCYPLGRLLDWALRQEISTFYTREKLLETLRAADPYSDLVKEELNIIQGALELRTKVVEEVLTPLGDCFMLRSDAVLDFATVSEILRSGYTRIPVYEGDQRHNIVDILFVKDLAFVDPDDCTPLLTVTRFYNRPLHCVFNDTRLDTVLEEFKKGKSHLAIVQRVNNEGEGDPFYEVMGIVTLEDIIEEIIKSEILDETDLYTDNRKKQRVPQRERKRHDFSLFKLSDTEMRVKISPQLLLATHRFMATEVEPFKSLYLSEKILLRLLKHPNVIQELKFDEKNKKAPEHYLYQRNRPVDYFVLLLQGKVEVEVGKEGLRFENGAFTYYGVPAIMTTACSDNDVRKVGSLAGSSVFLNRSPSRCSGLNRSESPNRERSDFGGSNTQLYSSSNNLYMPDYSVHILSDVQFVKITRQQYQNALTACHMDSSPQSPDMEAFTDGDSTKAPTTRGTPQTPKDDPAITLLNNRNSLPCSRSDGLRSPSEVVYLRMEELAFTQEEMTDFEEHSTQQLTLSPAAVPTRAASDSECCNINLDTETSPCSSDFEENVGKKLLRTLSGQKRKRSPEGERTSEDNSNLTPLIT

SEQ ID NO: 203745 - protein, 404 aa, Artificial Sequence
  derived and/or modified sequence
MGIVTLEDIIEEIIKSEILDETDLYTDNRKKQRVPQRERKRHDFSLFKLSDTEMRVKISPQLLLATHRFMATEVEPFKSLYLSEKILLRLLKHPNVIQELKFDEKNKKAPEHYLYQRNRPVDYFVLLLQGKVEVEVGKEGLRFENGAFTYYGVPAIMTTACSDNDVRKVGSLAGSSVFLNRSPSRCSGLNRSESPNRERSDFGGSNTQLYSSSNNLYMPDYSVHILSDVQFVKITRQQYQNALTACHMDSSPQSPDMEAFTDGDSTKAPTTRGTPQTPKDDPAITLLNNRNSLPCSRSDGLRSPSEVVYLRMEELAFTQEEMTDFEEHSTQQLTLSPAAVPTRAASDSECCNINLDTETSPCSSDFEENVGKKLLRTLSGQKRKRSPEGERTSEDNSNLTPLIT

SEQ ID NO: 203746 - DNA, 2856 bp, Artificial Sequence
  derived and/or modified sequence
atggcagccgcagcagctgcggcggctgccgtgggcgttaggctccgcgattgttgtagtcgcggcgccgttctgcttctgttctttagtctgtctcccaggcccccagccgcggctgcgtggctcctgggcctccgacctgaagatacagcaggagggcgcgtgagtctggaagggggtacattgcgggccgcggagggcacctcctttctgctacgggtctattttcagcccggccctccagcaaccgctgcacctgtgccttcaccgactttaaactccggagaaaatggaactggcgattgggccccgagactggtgtttatcgaggaaccacccggaggcggaggggtggctccgtccgccgtgcctactcgcccacccggaccacagagatgccgcgaacagagcgactgggcttccgatgtcgaggtgcttggccctctccggcccgggggcgtcgccggctccgccttagttcaggtccgagtgcgtgagctccgaaagggtgaagcggagcggggtggcgctgggggagggggcaagctgttctcgttatgcgcttgggacggcagagcttggcaccaccacggggccgcgggcggctttctgctccgggtgaggccccgtctttatggtcccggcggcgatctgctcccaccggcgtggcttcgagcactgggtgcacttctcctgcttgcattgagcgcactgttttcgggactgcgactgagtctgctctccctggaccccgtggaactgcgtgtgctccggaattctggcagcgcagccgaacaggagcaagcacgaagggttcaggcagtccgcgggcggggaacccacctgctgtgtacgctgttgctcgggcaggctggagccaacgccgcattggcaggttggctgtatacaagccttcctcctggatttgggggcaccggcgaggactatagtgaagaagggatccacttcccctggctgcctgcacttgtctgtacaggagccgttttcctgggagcagagatctgcccttactccgtgtgttccagacacggtctggcaatcgcaagccatagtgtgtgcttgaccagattgctgatggccgccgcctttcccgtttgttaccctctgggccgactgctagactgggccttgagacaggaaataagtaccttttacaccagggagaagctcctcgagacgctgagagccgccgacccttactctgatctcgtcaaggaagagttgaatatcattcaaggagccctggagctgagaacaaaggtggtggaagaagtgctcacccccttgggcgactgttttatgctgcggagcgatgccgtcttggattttgccacggtctctgagattctgcgcagtggctacaccaggatccccgtgtatgaaggcgaccagcgtcacaacattgttgacatcctcttcgtgaaggatctagccttcgtcgatccggacgattgcacacctctcctgacagtcacccgcttttataacagaccactccactgtgtgttcaacgacaccaggcttgacacagtgctggaagaattcaagaagggtaaatcccacctggccatcgtgcagagagttaataacgagggggaaggagatccattttatgaagtgatgggaatagtcactctggaagatattatcgaggaaattatcaaaagcgaaatattggatgaaacggacctctacacggataacagaaagaaacagcgggtaccgcagcgtgaacgaaagcggcacgacttctccttgttcaagttatccgacaccgaaatgagggtgaaaatctcaccgcagttactactggccactcatagattcatggctaccgaagtggagcctttcaagagcttgtacttgtccgagaaaattttgctgcggcttctgaaacaccctaacgtcatccaagaactgaaattcgatgaaaagaataagaaagcccccgagcactacctctaccagcgcaatcggcccgtggactatttcgtgctcttactgcagggaaaggttgaggtggaggtcggtaaagagggcctgcgatttgaaaacggagctttcacctattatggggtgcctgcaataatgactacggcgtgctccgataacgacgttcgcaaggtggggtccttggccgggtctagcgtgttccttaaccgctcgccctctcgctgctcagggctcaacaggtcggaaagcccgaatagagagaggagtgattttggcggtagtaacacccagttatactctagttctaataatttatacatgccagattactctgtgcatatcctaagtgatgtgcagttcgtgaaaatcacccggcagcagtaccagaacgctcttaccgcttgtcacatggactcgtcaccccagtcgccggatatggaagcctttaccgatggagatagtactaaggcccccacgactcggggtaccccacaaacaccaaaggacgacccagctatcacccttctgaataataggaactccctgccctgtagccgcagtgacggcctaaggagcccgagcgaagttgtgtacctaaggatggaagagctcgcttttacacaggaagagatgacagatttcgaagaacactctacccagcagctgacactgtccccagccgccgtgcccaccagagcagcgtcggacagcgagtgttgcaacataaatctggatacagagacaagcccatgcagcagcgatttcgaggaaaatgttggcaagaaactattgcggaccctgtcagggcaaaagcgaaagcgatcccccgagggcgaaaggacatcagaagataactctaacctgaccccattgattacctag

SEQ ID NO: 203747 - DNA, 2643 bp, Artificial Sequence
  derived and/or modified sequence
atggcagctgccgctgctgctgccgccgccgttggcgtgaggctgagggattgttgttcccgcggtgccgtgctgctcctgttttttagtctgagtcctcgccccccagctgccgccgcctggcttttggggctccggccggaggacacggccggggggcgtgtgtccctggaggggggaacgctacgggcagcagaaggtacctcctttctgctgagagtgtacttccagcctggtcccccgcggtgtcgtgagcaatctgactgggcctctgacgtcgaggtgcttgggccacttaggccgggcggtgtcgccggctcggcactagtgcagcttttctcattatgcgcttgggatggtagggcttggcatcaccacggagcagccgggggctttctcctgcgcgtgcgaccccgcctttatggcccagggggcgatctcctgccgccagcttggctgagagccttaggggcactactgctgcttgcactctccgccttgttcagtggtcttcggttgagtctcctctctttagaccccgtggagcttcgagtgctgagaaacagtggtagtgctgctgaacaggaacaggctagacgggtacaggccgtccgaggcagagggactcatctcctgtgcacattactgttaggacaggctggcgctaacgcagccctggcaggatggctgtatacgtccctaccccccgggtttggaggcacaggcgaggactatagtgaggagggtatccattttccatggcttcccgctctcgtgtgtactggcgcggtcttcctgggggcggaaatctgcccctactctgtttgcagccgccatggtctggcgatcgccagccacagcgtgtgcttaacaaggctactcatggcagccgcattccctgtctgttatccattggggcgactgctggattgggcgttgcgccaggagatctccactttctacaccagggagaagcttctcgagactctaagggcggctgatccctactctgacctcgtaaaagaagagcttaacatcattcaaggagccttggagctgaggacaaaagtcgtcgaggaagtactgaccccgctgggtgattgtttcatgctgaggagcgatgccgtgctggattttgctaccgtaagcgagatactgagatcaggttacacccggataccagtatacgaaggagatcagaggcacaatatcgttgatattctgtttgtgaaggatctggcgttcgttgaccctgatgactgtacccctttgcttacagtgacccgattttataacaggcccctgcactgtgtatttaacgatacccgtctggatacagtcctggaggagttcaagaaaggcaagagccatttggcaattgtccagagagtcaataatgagggcgaaggagatccgttctatgaggtcatgggtatcgtcactttggaggacataatagaagaaattatcaaatcggagatcctcgacgaaaccgacctgtacacagataaccgaaaaaaacagcgcgttcctcagcgggagcgcaagagacacgacttctccttgttcaaactgagcgatactgaaatgagggtcaaaatcagcccgcaattactgctggctactcatcggtttatggctactgaggtcgaaccatttaagagcctgtacctgagcgagaagatccttctcagactgctcaaacatcccaacgtgatccaagaactgaaattcgacgagaagaacaagaaggcaccagagcactatctgtaccaacggaataggcctgtcgattactttgtcctgttgctccaaggtaaggttgaagtcgaagtaggcaaggagggcctgcgattcgaaaatggggccttcacatattacggagtacctgctatcatgacgacagcttgttcggacaatgatgtgaggaaagtcggtagcctggctgggagtagcgtgtttctgaaccgcagcccttcccgatgttccgggctcaacagatcagagtccccaaaccgcgaacgctcagactttggaggcagcaatactcagctgtactccagttctaataacctgtacatgccggattattctgtgcacatcttatctgacgtgcaatttgtcaagataacacgacagcaatatcagaatgctctgactgcatgtcacatggacagctccccccaatccccagacatggaagcatttacagacggagactcaacaaaggctcctaccacccggggcacaccacagactcctaaggacgacccagctattacactgttaaataaccgaaattccttgccttgtagcagaagcgatggcttacgctcaccttctgaggtagtgtacctgcgcatggaagagcttgcctttacccaggaggagatgacggactttgaagaacacagcacacagcagctcaccctgtccccagctgctgtgcctactagggccgctagcgactccgagtgctgcaacattaacttagacactgaaacttctccttgctcgagcgattttgaagagaacgttgggaagaagttgctgcggacactgtcaggccagaaacggaaacgcagccccgagggggagagaaccagtgaggataatagtaacttaacacccttgataacctag

SEQ ID NO: 203748 - DNA, 1215 bp, Artificial Sequence
  derived and/or modified sequence
atgggaattgttactctcgaagacatcattgaagaaattataaagtcggagattctcgatgaaactgatttgtacacggacaaccgcaaaaaacagcgggtgccccagagagagcggaaaaggcacgacttctcgctattcaagctgtcagacacagagatgcgcgtgaaaattagtccgcagctgctccttgcaacacacaggtttatggccacagaggtcgagccgttcaagagtctgtacctgagcgagaagattttgttaaggctgcttaaacatcctaacgtgatccaagagttgaagtttgatgagaagaataaaaaagccccagagcattatttgtaccagcgaaaccgaccggttgactatttcgttctactgctgcagggaaaggtggaggtggaagtaggaaaggaagggttgagattcgaaaacggcgcatttacttactacggtgtgcccgccataatgacaaccgcttgcagcgacaacgatgtgcgcaaagttggtagcctggccggctcgtccgtgtttctgaatcggtctccgagccgatgcagcggccttaacagatctgagtccccgaatagagagcgctcggattttggcggatccaatacacagctgtattcctcaagtaataatctctatatgccggactacagtgttcatattctatcagatgttcagtttgtgaaaattacgcgtcagcaataccaaaatgcccttaccgcttgtcacatggactccagtcctcagagcccagacatggaggctttcacagacggcgactccacaaaggcccccaccacaaggggaaccccacagacccccaaggatgaccctgcaatcacactgttgaataatagaaacagcctcccgtgtagcaggtccgatggcttgcggtccccctcagaagtcgtatacctccgcatggaagagcttgccttcacacaggaggaaatgacagattttgaagagcactccacccagcagctgacactaagccctgcagccgtacctacacgcgccgcctctgattccgagtgctgcaatatcaacttggacacagaaaccagtccttgttccagcgattttgaggagaatgtgggaaagaagctgctccgcacactgtccggacaaaaacggaagaggtctccggagggggagcggacttcagaggataacagcaacctaacaccattgatcacttag

SEQ ID NO: 203749 - DNA, 2856 bp, Artificial Sequence
  derived and/or modified sequence
atggctgctgctgctgctgctgctgctgctgtgggcgtgcggctgcgggactgctgcagcagaggagctgtgctgctgctcttcttcagcctgagccccaggcctcctgctgctgctgcctggctgctgggcctgcggcctgaggacacagctgggggccgggtgtccctggagggcggcaccctgcgggctgctgagggcaccagcttcctgctgcgggtgtacttccagcccggccccccagccacagctgcccctgtgcccagccccaccctgaacagcggggagaatggaactggagactgggccccccggctggtgttcatcgaggagcccccaggcggcggcggcgtggcccccagcgctgtgcccaccaggcctcctggcccccagcgctgccgggagcagagcgactgggccagtgatgtggaggtgctgggccccctgcggcctggaggagtggccggcagcgccctggtgcaggtgcgggtgcgggagctgaggaaaggagaggccgagcggggcggggccggcggcggcggcaagctgttcagcctgtgtgcctgggatggccgggcctggcaccaccacggggccgccggcggcttcctgctgcgggtgcggccccggctgtatggccctggaggagacctgctgcccccagcctggctgcgggccctgggcgccctgctgctgctggccctgagcgccctcttcagcggcctgcggctgagcctgctgagcctggaccctgtggagctgcgggtgctgaggaacagcggcagcgctgctgagcaggagcaggcccggcgggtgcaggccgtgcggggccggggcacccacctgctgtgcaccctgctgctgggccaggccggggccaatgctgccctggccggctggctgtacaccagcctgcccccaggctttggaggcaccggggaggactacagcgaggagggcatccacttcccctggctgcctgccctggtgtgcaccggggctgtgttcctgggcgctgagatctgcccctacagcgtgtgcagccgccacggcctggccatcgccagccacagcgtgtgcctgacccggctgctgatggccgccgccttccctgtgtgctaccccctgggccgcctgctggactgggccctgcggcaggagatcagcaccttctacacccgggagaagctgctggagaccctgcgggctgctgacccctacagcgacctggtgaaggaggagctgaacatcatccagggcgccctggagctgcggaccaaggtggtggaggaggtgctgacccccctgggggactgcttcatgctgcggagtgatgctgtgctggactttgccaccgtgtctgagatcctgcggagcggctacacccgcatccctgtgtatgaaggagaccagaggcacaacatcgtggacatcctgtttgtgaaggacctggcctttgtggaccctgatgactgcacccccctgctgactgtgacccgcttctacaaccggcccctgcactgtgtgttcaatgacacccggctggacacagtgctggaggagttcaagaagggcaagagccacctggccatcgtgcagagggtgaacaatgaaggagagggggaccccttctatgaggtgatgggcatcgtgaccctggaggacatcatcgaggagatcatcaagtctgagatcctggatgaaacagacctgtacacagacaacaggaagaagcagagggtgccccagcgggagaggaagagacatgacttcagcctcttcaagctgagtgacacagagatgagggtgaagatcagcccccagctgctgctggccacccaccgcttcatggccacagaggtggagcccttcaagagcctgtacctgtctgagaagatcctgctgcggctgctgaagcaccccaacgtcatccaggagctgaagtttgatgagaagaacaagaaggcccctgagcactacctgtaccagaggaacagacctgtggactactttgtgctgctgctgcagggcaaggtggaggtggaggtgggcaaggagggcctgcgctttgaaaatggagccttcacctactacggcgtgcctgccatcatgaccacagcctgcagcgacaatgatgtgaggaaggtgggcagcctggccggcagctctgtgttcctgaacagaagccccagccgctgcagcggcctgaacagaagtgagagccccaaccgggagaggagtgactttggaggcagcaacacccagctgtacagcagcagcaacaacctgtacatgccagactacagcgtgcacatcctgagtgatgtgcagtttgtgaagatcacccggcagcagtaccagaatgccctgacagcctgccacatggacagcagcccccagagcccagacatggaggccttcacagatggagacagcaccaaggcccccaccacccggggcaccccccagacccccaaggatgatcctgccatcaccctgctgaacaacagaaacagcctgccctgcagcagaagtgatggcctgcggagccccagcgaggtggtgtacctgaggatggaggagctggccttcacccaggaggagatgacagactttgaggagcacagcacccagcagctgaccctgagccctgctgctgtgcccaccagggctgccagtgacagcgagtgctgcaacatcaacctggacacagagaccagcccctgcagcagtgactttgaagaaaatgtgggcaagaagctgctgcggaccctgagcggccagaagaggaagaggagccctgagggggagaggaccagcgaggacaacagcaacctgacccccctcatcacctag

SEQ ID NO: 203750 - DNA, 2643 bp, Artificial Sequence
  derived and/or modified sequence
atggctgctgctgctgctgctgctgctgctgtgggcgtgcggctgcgggactgctgcagcagaggagctgtgctgctgctcttcttcagcctgagccccaggcctcctgctgctgctgcctggctgctgggcctgcggcctgaggacacagctgggggccgggtgtccctggagggcggcaccctgcgggctgctgagggcaccagcttcctgctgcgggtgtacttccagcccggccccccacgctgccgggagcagagcgactgggccagtgatgtggaggtgctgggccccctgcggcctggaggagtggccggcagcgccctggtgcagctgttcagcctgtgtgcctgggatggccgggcctggcaccaccacggggctgctgggggcttcctgctgcgggtgcggccccggctgtatggccctggaggagacctgctgcccccagcctggctgcgggccctgggcgccctgctgctgctggccctgagcgccctcttcagcggcctgcggctgagcctgctgagcctggaccctgtggagctgcgggtgctgagaaattctggcagcgctgctgagcaggagcaggccaggagagtgcaggccgtgcggggccggggcacccacctgctgtgcaccctgctgctgggccaggccggggccaatgctgccctggccggctggctgtacaccagcctgcccccaggctttggaggcactggagaggactacagcgaggagggcatccacttcccctggctgcctgccctggtgtgcacaggagctgtgttcctgggcgctgagatctgcccctacagcgtgtgcagcagacatggcctggccatcgccagccacagcgtgtgcctgacccggctgctgatggctgctgccttccctgtgtgctaccccctgggccgcctgctggactgggccctgcggcaggagatcagcaccttctacacccgggagaagctgctggagaccctgcgggctgctgacccctacagcgacctggtgaaggaggagctgaacatcatccagggcgccctggagctgcggaccaaggtggtggaggaggtgctgacccccctgggggactgcttcatgctgcggagtgatgctgtgctggactttgccaccgtgtctgagatcctgcggagcggctacacccgcatccctgtgtatgaaggagaccagaggcacaacatcgtggacatcctgtttgtgaaggacctggcctttgtggaccctgatgactgcacccccctgctgactgtgacccgcttctacaaccggcccctgcactgtgtgttcaatgacacccggctggacacagtgctggaggagttcaagaagggcaagagccacctggccatcgtgcagagggtgaacaatgaaggagagggggaccccttctatgaggtgatgggcatcgtgaccctggaggacatcatcgaggagatcatcaagtctgagatcctggatgaaacagacctgtacacagacaacaggaagaagcagagggtgccccagcgggagaggaagagacatgacttcagcctcttcaagctgagtgacacagagatgagggtgaagatcagcccccagctgctgctggccacccaccgcttcatggccacagaggtggagcccttcaagagcctgtacctgtctgagaagatcctgctgcggctgctgaagcaccccaacgtcatccaggagctgaagtttgatgagaagaacaagaaggcccctgagcactacctgtaccagaggaacagacctgtggactactttgtgctgctgctgcagggcaaggtggaggtggaggtgggcaaggagggcctgcgctttgaaaatggagccttcacctactatggagtgcctgccatcatgaccacagcctgcagcgacaatgatgtgaggaaggtgggcagcctggccggcagcagcgtcttcctgaacagaagccccagccgctgcagcggcctgaacagaagtgagagccccaaccgggagaggagtgactttggaggcagcaacacccagctgtacagcagcagcaacaacctgtacatgccagactacagcgtgcacatcctgagtgatgtgcagtttgtgaagatcacccggcagcagtaccagaatgccctgacagcctgccacatggacagcagcccccagagcccagacatggaggccttcacagatggagacagcaccaaggcccccaccacccggggcaccccccagacccccaaggatgatcctgccatcaccctgctgaacaacagaaacagcctgccctgcagcagaagtgatggcctgcggagccccagcgaggtggtgtacctgaggatggaggagctggccttcacccaggaggagatgacagactttgaggagcacagcacccagcagctgaccctgagccctgctgctgtgcccacccgggccgccagtgacagcgagtgctgcaacatcaacctggacacagagaccagcccctgcagcagtgactttgaggagaatgtgggcaagaagctgctgcggaccctgagcggccagaagaggaagaggagccctgagggggagaggaccagcgaggacaacagcaacctgacccccctcatcacctag

SEQ ID NO: 203751 - DNA, 1215 bp, Artificial Sequence
  derived and/or modified sequence
atgggcatcgtgaccctggaggacatcatcgaggagatcatcaagtctgagatcctggatgaaacagacctgtacacagacaacaggaagaagcagagggtgccccagcgggagaggaagagacatgacttcagcctcttcaagctgagtgacacagagatgagggtgaagatcagcccccagctgctgctggccacccaccgcttcatggccacagaggtggagcccttcaagagcctgtacctgtctgagaagatcctgctgcggctgctgaagcaccccaacgtcatccaggagctgaagtttgatgagaagaacaagaaggcccctgagcactacctgtaccagaggaacagacctgtggactactttgtgctgctgctgcagggcaaggtggaggtggaggtgggcaaggagggcctgcgctttgaaaatggagccttcacctactatggagtgcctgccatcatgaccacagcctgcagcgacaatgatgtgaggaaggtgggcagcctggccggcagcagcgtcttcctgaacagaagccccagccgctgcagcggcctgaacagaagtgagagccccaaccgggagaggagtgactttggaggcagcaacacccagctgtacagcagcagcaacaacctgtacatgccagactacagcgtgcacatcctgagtgatgtgcagtttgtgaagatcacccggcagcagtaccagaatgccctgacagcctgccacatggacagcagcccccagagcccagacatggaggccttcacagatggagacagcaccaaggcccccaccacccggggcaccccccagacccccaaggatgatcctgccatcaccctgctgaacaacagaaacagcctgccctgcagcagaagtgatggcctgcggagccccagcgaggtggtgtacctgaggatggaggagctggccttcacccaggaggagatgacagactttgaggagcacagcacccagcagctgaccctgagccctgctgctgtgcccacccgggccgccagtgacagcgagtgctgcaacatcaacctggacacagagaccagcccctgcagcagtgactttgaggagaatgtgggcaagaagctgctgcggaccctgagcggccagaagaggaagaggagccctgagggggagaggaccagcgaggacaacagcaacctgacccccctcatcacctag

SEQ ID NO: 203752 - DNA, 2856 bp, Artificial Sequence
  derived and/or modified sequence
atggccgccgccgccgccgccgccgccgccgtgggcgtgcggctgagggactgctgctctcgcggtgcagtgctgctattattcttctctcttagcccaagaccaccagctgccgccgcctggctccttgggttgcgtccagaggacacagctggcgggagggtaagtttagaggggggcaccctgcgggctgccgagggtacctccttcctgctgagagtctactttcagcctggtccccctgcaacagccgctcctgttcctagtccaacattgaacagcggagaaaacggaactggtgactgggcccctcgtctggtgttcatcgaagagccccccggcggaggaggggtagcaccatccgcagtgcccactaggccgcccggacctcaaagatgccgtgaacaatcagactgggccagtgatgttgaggtcctcggtcctctgcgtccaggtggagtggccggctccgcactggtgcaggttcgtgtcagggagctgagaaagggggaggccgagagggggggggccggagggggcggaaagctgttctccctgtgtgcttgggatggacgggcctggcaccaccacggcgcggctggcgggtttttactgagggtgcgtcccagattgtatggaccaggcggagatttgctcccccctgcctggctcagggccctgggggcgcttcttttgctggctctatcagctctgtttagtggactgcgcttaagcttattgtcccttgacccagtggagttacgggtgctgaggaactctggttctgcagcggaacaggaacaggctcgtcgcgtgcaggctgtgcgtgggcgaggtacccacttactgtgtacactgctgcttggccaggccggcgcaaacgcagctttggcgggctggctgtacaccagcttaccacccggctttggcggcacgggtgaagactacagcgaggagggaatccatttcccatggctgccagctctggtgtgtaccggtgctgtgttcctcggcgcagagatctgtccatattcagtttgcagccgccacggcctggccattgcatcacactctgtgtgtttaaccagactactgatggccgctgccttcccagtctgctaccctctgggcaggctgctggactgggctttgaggcaagagattagcactttctacacccgagagaaacttttagaaaccctcagggccgccgacccctattcagatctcgtcaaggaggagctcaatataattcagggcgcgcttgagctccggacgaaggtggtggaggaggtacttacaccattgggggattgctttatgctaagaagcgatgccgtgctcgatttcgcaacagtgtcagagatcctgcgatcaggatatacccgaattccggtttatgaaggcgatcagagacataatatcgttgatattctgtttgtcaaagatctggcttttgttgaccctgacgactgtacccctctgctcacagtgacgcggttttacaaccgaccccttcactgtgtcttcaacgatactagactagacaccgttttagaggagttcaaaaagggcaagagccacctggcgatagtacagcgggtcaataatgaaggagagggagaccccttttacgaggtcatgggcatcgtgactttagaggacataatcgaggaaattatcaagtccgaaatactggacgaaacagatctctacacagataatagaaagaaacagcgcgtcccacagagagagagaaaacggcatgacttttccttgtttaaactttctgatacggagatgcgcgtgaagatttccccccaactgctcctcgcaacacacaggtttatggctaccgaggtcgaaccctttaaatccttataccttagtgaaaagatcttgcttaggcttctcaaacaccctaatgttatccaggaattgaagttcgatgaaaaaaacaaaaaagctccagagcactacctttatcaaaggaataggcctgtggactacttcgttctcttgctgcagggaaaggtggaggtggaagtcgggaaggaaggcctcagatttgagaatggagccttcacctattatggtgttcctgccatcatgaccaccgcgtgcagcgataatgacgtaaggaaggtgggctctctggccgggagttcggtattcctgaaccggagtccttcgagatgcagcggcctaaacagaagcgagtcccccaatagggagcgaagcgactttggtggaagtaacacacagctgtattcatcctcgaataacctctacatgccggactattcagtacatattctgtctgatgtgcagtttgtgaagattacaaggcagcagtatcagaatgctttaactgcttgccatatggattccagcccacagtcccctgacatggaagcgttcactgacggtgattccactaaggcgcctacaacacggggcacaccccagacaccaaaagatgatccagcaattaccctgctcaataacagaaatagtttaccatgtagcagatcggatggtttgagatcaccttcagaggtggtgtatctgaggatggaggaactggcttttacacaggaggaaatgacggatttcgaggaacatagtacacagcagctgacactgtccccagctgctgttccaaccagagccgctagcgacagtgagtgctgcaatattaacctggacacagagacatctccctgctccagcgacttcgaagaaaatgtggggaagaaacttctgcgtaccctgtccggccaaaaacgaaagcgatcaccagaaggtgaacgcacgagcgaggacaattctaatctgacaccactaataacgtag

SEQ ID NO: 203753 - DNA, 2643 bp, Artificial Sequence
  derived and/or modified sequence
atggccgccgccgccgccgccgccgccgccgtgggcgtgcggctgagggactgctgctcaaggggagctgtcctgctactcttcttttcattgagccctcgacccccagccgccgccgcatggctgctggggttacggcctgaggatacagccggaggacgggtgagcctggagggagggaccctgcgggccgccgaaggcacctccttcctattgcgagtctacttccagccaggccccccccggtgtagggagcagagtgattgggcatctgacgtggaagtattagggcctttacggccaggcggtgtcgccgggagtgccctcgtgcagctcttctctctctgtgcttgggatggccgcgcttggcaccatcacggtgcagccggcggctttctcctgagggtgagaccacgcctgtatggccctggcggcgacctgcttcctcctgcttggttgcgcgcgcttggcgctttgttattgctggccctgagtgcgctatttagcggccttcggttgtcactgctctcccttgaccctgttgaactcagagtgctcaggaacagcgggagcgctgcagagcaggaacaagctcgccgtgtgcaagcggtcagagggagaggaacacatttgctgtgcactttgctgctgggccaggctggcgcaaacgccgccttagccggatggctctacacatcactgcctcccggatttgggggcacaggagaggattattccgaggagggaatccattttccatggttgcctgccctggtttgtactggggctgtcttcctgggcgctgagatttgcccctatagcgtctgtagccggcacgggcttgcaatcgcatctcactccgtgtgcctgacgcgcttactgatggcggcagccttcccagtgtgttaccccttgggccggttacttgactgggccctcaggcaggaaatctcgacgttctacacaagagaaaaactccttgagacccttcgggccgcagatccttatagcgatctcgtgaaggaggaactgaatatcatccagggggcgctggagctgcggaccaaggttgtcgaggaggtcctaacacctctcggagattgctttatgctcagatctgacgccgttttggactttgccacagtgagcgaaatcctgcgcagcgggtacacccggatccctgtatacgaaggggatcagcgacataacatcgtcgatatcctcttcgtgaaagacctggcattcgttgacccggatgattgcactcctctcctgaccgttacacggttctacaacaggcctcttcactgtgtgttcaatgatacaagactggacacagtgctggaagaattcaagaagggtaaatctcacctagccattgtgcagagagtaaacaacgagggggagggtgacccattctacgaagtcatgggtatagtcaccctggaagatataattgaggagatcatcaaatctgagatattggatgagactgacctgtacacagacaatagaaaaaagcaaagggtccctcagagagagcgaaagcgccatgatttcagtctgttcaagttgtccgataccgaaatgagagtcaagattagcccacagctgttgttagcaactcacagatttatggctactgaggtggagcccttcaagtctctatacctttcagaaaagatcctgctgcggctgttgaagcacccaaatgttattcaggaactgaagttcgatgagaaaaataaaaaggcgcctgaacattatttatatcagcggaaccgccctgtggattacttcgtgctcctgctgcagggaaaagtggaggtggaggtgggcaaggagggactgcgatttgagaacggagcttttacatattacggcgtcccggctattatgaccactgcctgttcagacaacgacgtgcggaaagtcggctctctggcgggtagtagtgtgttcctgaaccgcagccctagcaggtgcagtggcctgaatcgctcagagtccccaaaccgtgaacgttctgatttcggcggctccaacacacaattgtactctagctctaataatctgtacatgccggactatagcgtccacattctttctgacgtgcaattcgtgaagatcacgagacagcagtatcagaatgccctgaccgcctgccatatggacagtagccctcagagcccagatatggaagcttttaccgacggcgattcaactaaggcaccaaccacccgagggaccccgcaaacccctaaagatgatcctgcgattacacttctgaataatagaaattctctcccatgcagccgaagtgatggcttacggtcccccagcgaggtggtatatcttagaatggaagaactggccttcacacaggaggagatgacggactttgaagagcacagcactcagcagttgacactgtctcccgcggctgttccaacaagggccgccagcgacagtgagtgctgtaatattaatctggacactgaaacgtccccctgtagctccgatttcgaagagaacgtcgggaagaagctgctccgcacactgtcgggccagaagaggaagagatcgcctgaaggagagagaacatccgaggataacagtaacctcaccccgttgatcacctag

SEQ ID NO: 203754 - DNA, 1215 bp, Artificial Sequence
  derived and/or modified sequence
atgggcatcgtgaccctggaggacatcatcgaggagatcatcaagagcgaaatactcgacgaaaccgatctgtatacggacaataggaagaaacagcgcgtgcctcaacgggagcggaagcgccacgacttcagcctgtttaaactgagcgatactgagatgagggtcaagatttctccgcaactcctgctggctacccatagatttatggctacagaggtggaacccttcaagagtctgtacctcagcgagaaaatcctgctgcgcttgctcaaacaccccaatgtgattcaggaactgaagttcgacgagaagaacaagaaagcgcctgagcactatttgtaccagcggaataggcctgtcgattactttgttctgctgttgcaagggaaggtggaggtggaagttggaaaagaggggctgagattcgagaacggggccttcacctattacggtgtgcccgccattatgacgaccgcctgcagtgacaacgacgtgaggaaggttggctccttagcgggcagctcggtgtttctgaacaggtcacctagtaggtgcagtgggcttaaccggtcggaaagtccaaatagagaacggagtgattttggaggcagtaatacacagttatatagctccagtaacaatttatacatgcccgattacagcgttcatattctctcagacgttcagttcgttaaaataaccaggcagcagtaccagaatgctctgactgcctgtcatatggatagctcccctcagtccccagacatggaagctttcactgacggcgatagcacgaaggctcctactactaggggcaccccacagacccctaaagacgatccggctattactctcttgaataatcgcaatagcctgccttgctcccgtagtgatggtttacgctccccaagcgaagttgtgtacctgcggatggaggagctggcgttcacacaggaagagatgactgatttcgaggaacatagcacccaacagttgaccctctcccccgctgccgtaccaactcgtgccgcgtccgatagcgaatgctgcaatataaatctcgacacggagacttctccctgctcctccgactttgaagagaatgtgggcaaaaaacttctgcgcactctctctgggcagaaacgtaagcgcagccctgagggtgaaagaacaagcgaggataattcaaaccttactcccttaataacttag

SEQ ID NO: 203755 - DNA, 2856 bp, Artificial Sequence
  derived and/or modified sequence
atggccgctgctgctgctgccgcagctgccgtcggggtccgcctccgggattgctgctctcgcggagccgttctactcctgttttttagcctgagccctagacctcctgcagccgctgcatggctactgggcctcagacctgaagacaccgcagggggaagagtgtctctggaagggggaacacttagagccgcagaaggtaccagtttcctgctacgcgtctatttccagcccggacctcccgctaccgccgcacctgttcccagccctacactgaatagtggcgaaaatggtacaggagactgggcgcctagactggtcttcatcgaagagcctcctgggggaggaggtgtggcgccaagcgccgtgccaactaggcctcctggcccacaacggtgcagagagcagagtgactgggcgtctgacgtagaagtgttaggaccgctgaggcccggaggagtggccggaagcgcactggtccaagtgagagttcgggagctccggaagggcgaggctgagcggggaggggctggcggaggcggaaagctcttcagcttgtgtgcatgggacggacgagcctggcatcaccacggagccgcagggggatttttacttcgagtcagacccaggctgtacggcccaggcggtgacctgcttcctccggcttggctccgggcattgggagccttgctcctgctcgcactaagtgcgctgttctccggcctgcgcctgtcactgttgtctctggatcccgtggagctgcgggtgctgagaaacagcggatccgccgctgagcaggagcaggccagaagagttcaagccgtaagggggcgaggaacacacttactctgcactcttttacttggacaagccggtgctaacgcagctctggctgggtggttatatacttctctgccccctggctttggcggaacaggcgaggattactcagaggaggggatccattttccttggctccccgctttggtctgcactggagccgtgtttttgggagccgagatatgcccgtattctgtttgctctaggcacgggctcgcaatagccagtcatagtgtttgcctgacccgtctcttgatggccgctgcatttcccgtgtgttacccactaggaagactgctggattgggccctccgacaggaaatctcaactttctatacccgggagaaactcttagaaactctgcgagcagccgatccctattcggacctcgtgaaggaggagttgaatattattcagggtgcccttgagctccgcaccaaggtggttgaagaggtgcttacccctctgggcgactgtttcatgctgcgatctgacgccgttctggattttgccactgtaagcgaaatcctccggtccgggtatacccgaatcccggtgtacgagggcgaccagaggcacaacattgtagacatattgtttgtcaaggacttagcctttgtggaccctgacgattgcactccactactgaccgtaaccagattctataacaggcccttacattgtgttttcaatgataccagacttgacacagtgctagaagaattcaagaagggcaagtctcacctggctattgttcagagggtgaataatgagggggagggtgacccattctatgaggtgatgggcatcgtgacgttggaggatatcatcgaagagattattaagtcagaaattctggacgaaactgacttgtacaccgataatagaaaaaagcaacgggtgccccagagagaaagaaagaggcacgactttagccttttcaaactttcagacacggagatgcgcgttaagataagcccacaattactgcttgccacgcaccggttcatggcaacagaagtggagccatttaagagcctgtacttatcagaaaagatcctgctcagactcttaaagcatcctaacgtgatccaggagctcaagtttgacgagaaaaataagaaggctcccgaacattatttataccagcggaatagaccggtggattattttgtactgcttcttcaaggtaaggtggaggtcgaggtgggaaaggagggcctgagattcgagaacggtgcctttacatattatggggtgcccgctattatgaccactgcttgctcagacaacgatgtgcggaaggtcggatcattagcaggatcatcagtatttcttaaccgctcccccagcagatgctcaggcctgaataggagcgagtctccgaaccgggagcggagcgacttcggcggaagcaacactcagctctatagcagctcaaataacttgtatatgccagactactcggtgcatatcctcagtgatgtccagtttgttaaaattacacgccagcagtaccagaacgctcttaccgcctgtcacatggacagctccccccagagtccagatatggaggcgtttaccgatggcgattctacaaaagccccaacaacccgcggtactccacagacacccaaagatgatcccgctataaccctattgaacaatcgcaattcacttccatgctcaagatccgatggcttgcggagcccttctgaggtggtgtacttacgaatggaggagctggctttcacacaggaagagatgacagacttcgaagaacatagcactcagcagttgaccctctctcccgcagccgtgcccacacgagcagcgtctgattccgaatgctgtaacattaacttggacaccgaaactagcccatgctcatctgactttgaggagaatgttgggaaaaagctgctgcgaaccctgtcaggccagaagaggaaacgatcacctgagggcgagcgcactagcgaggataatagcaacttaacgcctctgataacgtag

SEQ ID NO: 203756 - DNA, 2643 bp, Artificial Sequence
  derived and/or modified sequence
atggccgctgccgcagccgcagccgctgctgtaggtgtgagacttcgtgattgctgcagccgcggagccgtcctgctactgttcttttctctgtccccccgtccgcctgctgctgcagcctggctcctgggtcttagaccagaggatactgccggaggtagggtgagcctggaggggggaactctacgggctgctgaaggtaccagtttcttgcttagggtctatttccaacccggacctcctcgttgcagagagcaatcggactgggcttccgacgtcgaggtgctggggccactgaggcccggtggggtggccggtagcgctttggtgcagctgttcagtctgtgcgcttgggacgggagagcatggcaccatcatggcgctgctggcggtttcctgctccgggtccgccctaggctgtacgggcctggaggggacctcctgcctccagcgtggctacgggctctgggggcactacttctcctggctctcagcgccctgttctctggactgcggttgtccctcctatccctggatcccgtggaactgagagttcttagaaactccggttctgctgcagagcaagaacaggcgaggcgcgtacaagctgtgcgcggacgcggtactcacctgctttgcacgcttctgttgggacaggcgggtgccaacgctgcactagccggttggctttacacttccctgcctccgggttttgggggtactggagaagactactctgaggaaggcatccatttcccttggctgcccgctctggtctgcacgggcgcagtctttctaggggcagaaatctgcccatactcagtttgcagtagacacggactggcaatcgcttcacactcagtttgtctcacgcgtctgcttatggcagccgcatttcctgtctgttaccctctgggcaggttactcgactgggcgctacggcaggaaatcagcaccttttatacccgcgagaagctcctggaaaccctgcgggcagctgatccttactctgacttggtgaaagaagagcttaatatcatccagggtgcattagagctacgtacgaaggttgtcgaggaggttctcacccccctgggggattgcttcatgctgagaagtgacgccgtcctcgatttcgccaccgtgagtgagatcttgcgctcaggttacacccggattccagtttatgaaggagatcagcggcataacattgtggacatcctcttcgtcaaggatctagcattcgtggatcctgacgactgcacccctctgctcaccgttacaaggttctacaacaggcccctgcactgtgtgttcaacgacaccaggttagatacggtcttagaagaatttaaaaaaggaaagagtcacctggcgatcgttcagagggtcaacaatgaaggggagggtgatcctttctacgaagtaatgggcatagtgactctggaggacatcattgaggagatcatcaagtcagagatactggatgagaccgacctatacacggataatcgaaagaaacagcgagtgccgcagcgtgagcgcaagcggcatgatttttctttatttaaactgtccgataccgagatgcgcgttaagattagtcctcagctgctgttagccacccacaggttcatggccaccgaggtggagccttttaaatcactatatctgtccgagaagatcctactgcggttattgaagcaccccaacgtcattcaggaattgaagttcgacgagaagaataagaaagctccagagcactacctgtaccaacggaacagacctgtggactatttcgtcctgctgctacaggggaaggtggaggtcgaggtaggaaaggagggtctgcgatttgagaacggcgctttcacctactacggagtccccgctataatgaccaccgcatgctccgacaatgatgtcaggaaagtagggtctctggccggatcttcggtgttcctcaaccggtccccatcgcgttgttcaggcctcaaccgcagcgaatctccaaaccgcgaacgatcagatttcggaggcagtaatactcagctctactcatcaagtaataacctctatatgcccgactatagcgtacacatactatctgacgtgcagttcgtgaagatcacccggcagcagtaccagaatgctctgactgcctgccatatggattcctcaccacaatcaccagatatggaagcttttaccgatggcgactcaacaaaagcaccaactacccggggaaccccacaaactcccaaggatgaccccgctatcaccctcctcaacaaccgaaacagtctcccgtgtagtcggagcgacggcctgcgctccccatccgaagtggtatatcttaggatggaagaactcgcgtttactcaggaagaaatgaccgattttgaagagcacagcactcagcaactgaccctgagccccgctgcagttcctactcgcgcagcctccgacagcgagtgttgtaatatcaacttggacactgagacctcaccctgcagtagtgactttgaggaaaatgtagggaaaaagctgttacgaaccctttccgggcagaagcggaaacgcagtcctgagggagaacggacgagtgaagacaattcaaatctgacccctcttattacgtag

SEQ ID NO: 203757 - DNA, 1215 bp, Artificial Sequence
  derived and/or modified sequence
atggggatcgttactctggaagatattatagaggaaataatcaagtccgagatcttggacgagactgacctgtacacagataatcgtaaaaaacagagggtaccccagagggagagaaaacggcatgacttttctctatttaagctgagtgatacggaaatgcgggtcaagatttctccacagctactgctggctacccaccggtttatggctaccgaagtggaaccattcaaaagtctttacctgtccgaaaagattttgctgcgattgctcaagcatccgaatgtgatccaagagttgaaatttgatgaaaaaaacaaaaaagctcctgagcattatctatatcagagaaatagaccggtagactacttcgtcttgcttcttcagggaaaggtggaggtggaggtcggaaaggaaggattaagattcgagaacggggcattcacctactacggagtccctgcaattatgaccaccgcctgttcggataacgatgtacggaaggtgggttcgctcgcgggatccagtgtctttctgaaccggtcaccgtcgcgctgttctgggttaaatagatcagagagccccaaccgggagcggtcagactttggtggctcaaacacacagttgtattcgagttcgaacaatctgtacatgcctgactacagcgtacacatcctgagtgacgtacagtttgtaaaaattacacgtcagcagtaccagaatgctctgaccgcctgccatatggattcctctccgcagtcacccgacatggaagcatttactgatggagacagtaccaaagccccaacaacgagggggacgccgcagacccctaaggacgacccggcaatcactctgctgaacaacaggaacagcctcccatgctctagatcagacgggcttcggagcccctcagaagtcgtctacttgcgcatggaggagctggcgtttacgcaagaggaaatgaccgattttgaggagcattccacacagcagttgacactcagccccgctgcagtgccaacaagagccgcatctgactctgagtgttgtaacataaatctggacacagagacaagcccctgcagctcagacttcgaggaaaatgtgggcaaaaagctgctcaggactttgagtggccagaagcggaaacgtagcccggaaggggaaaggacctcggaggataactcgaatttaacccccttgattacctag

SEQ ID NO: 203758 - DNA, 5959 bp, Artificial Sequence
  derived and/or modified sequence
acttttggagtaggaggccatgctgcaaacccagacttttcaggctgcatctcagatataccgaagtgtgtacccgctacgcacagtgcggtgatgcctggccacctccagcctccagcggggacctcctgcccaggtggagtctgaatgcccaccgccaccagcccacgcgcgcagtgggcgtacacgtggtgacctgcctgcggctgggttcccagctccggctcctcctccctccagctctcgctcggcttcctgcagtatcacgtgcagctgcgctgggtgcaggatggcggcggccgcggcggcggcagcagcggtgggtgtcaggctccgggactgctgcagccgaggcgctgtgctcctgctcttcttttccctgtctcctcggcccccggccgccgccgcctggctgctgggcctgcggcccgaggacactgctggaggccgcgtgtccctggaggggggcaccctgcgcgccgccgaaggcaccagcttcctcctgcgtgtctatttccagccaggaccgccggccaccgccgcaccggtgccctcaccgaccctcaactcgggggagaatggcaccggcgactgggctccgcggctcgtgttcatcgaggagcccccgggcggtggcggcgtggcccccagcgcggtccccactcgccccccgggaccgcagcgctgcagggagcagagcgactgggcatcggacgtggaagtcctggggcccttgcgtcccgggggcgtggcaggctcggccctggtccaggtgcgagtgcgggagctgcgcaagggcgaagcggagcggggcggcgcgggcggtggcgggaagctcttttcactctgcgcctgggatgggcgcgcgtggcaccaccacggcgccgccggcggcttcctgctgcgcgttcgcccgcggttgtacggcccaggcggggacctgctgccccctgcgtggctgcgggcgctcggggcgctcctgctgctagccttgtcggccctgttcagcggcctgcgcctgagcctgctgtcgctggacccggtggagttacgggtgctgcggaacagcggctcggccgccgagcaggagcaggcgcgccgcgtgcaggccgttcgcggcagggggacccatctgctctgcaccctactcctgggccaagccggagccaacgcggccctggctggctggctgtacacctcgctgccgccgggcttcgggggcaccggggaagactacagcgaagaggggatccacttcccgtggctgccggcgctcgtgtgcaccggcgcggtattcctgggcgccgaaatctgcccctactcagtgtgttcgcggcacgggctggccatcgcctcgcacagcgtgtgcctgacccggcttctgatggcagccgccttccccgtgtgctacccgctgggccgcctgctggactgggcgctgcgccaggagataagcaccttctacacgcgggagaagttgctggagacgttgcgggccgcagacccctacagtgacctggtgaaggaggagctcaacatcatacagggtgccctggagctgcgcaccaaagttgtggaggaggtgctgacccccctgggagactgcttcatgctgcgctcagacgcggtgctcgacttcgccactgtctccgagatcctgcgcagcggctacactcgcatcccagtgtacgagggtgaccagcggcacaacattgtggacattttatttgtcaaggacttggccttcgtggaccccgacgactgcaccccgctcctcactgtcacccgcttctacaaccggcccctgcattgtgttttcaatgacacccgactggacacggttctggaggagtttaagaagggaaaatctcacctggccattgtccagcgggtgaataatgagggagaaggggaccctttctatgaggtgatgggcattgtcacgctggaggatatcatagaggagattatcaagtcggagatcctggatgaaactgatctctacactgacaatcggaaaaagcagagggtcccgcaacgggagcggaagcggcatgacttctccttgtttaagctttcggacacggagatgcgggtgaagatctcaccacagcttctgctagccacacaccgcttcatggccacagaagtggagccctttaagtctctgtacctttcggagaagatcctgctccggctcctgaaacatcccaacgtgatccaggagctgaagtttgatgagaagaacaagaaggccccggaacactacctctaccagcgcaaccgccctgtggactactttgtgctgcttctacagggtaaagtggaggtggaggttggtaaggaaggccttcgctttgaaaatggagcctttacttactatggcgtcccagccatcatgaccactgcttgctcagataatgacgtgcggaaggttggaagtctggctggatcttctgtctttctaaaccggtccccttctcgctgcagtgggttgaatcgctctgagtctccaaaccgagagcgcagtgactttgggggcagcaacacccagctgtacagcagcagcaacaacctctacatgcctgactactcagtccacatcctcagcgatgtgcagtttgtgaagatcacacggcagcaatatcagaacgcactcactgcctgccacatggacagctcacctcagtcccctgacatggaggccttcacagacggggactccactaaggcccccacaacccggggcacaccccagacccctaaggatgaccccgccatcacgctcctcaacaacaggaacagcctgccgtgcagccgctcagacgggctgagaagccccagcgaggtagtgtacctgaggatggaggagctggccttcacccaggaagaaatgactgacttcgaggagcacagcacacagcagctcacgctgtctcctgcagccgttcccacgagagcagcatcagatagtgaatgttgtaacatcaacctggatacagagaccagcccctgcagtagcgattttgaggaaaacgtgggcaagaagctgctgagaaccttgagtggccaaaaaaggaagaggtcaccagaaggagagagaacctctgaggacaactccaatttaacacctctgatcacatgacagggcaaagccagcattcactgggtgtgtgaaattccagagctttgggggagaatccaccctcccatcatctgcttcccccaaggcctcccacaggtgacagaatgttctgccttcccttccatctcttcacccctagctgtcagtttggcagattttccctcgttacctccagttcgactcagaaccttgacatggccataacagaaggaggtgcctctgatagaacatgctagaaatggtcttttccacagcatagtctgggactggaaaagagatgtctgactgcaagctgacaatgccactctgggacccctgatgctcttctttgttctttgggtcccctgatgccataggagacctatcgtcttggaacttgccattctttcctccagaacaaaatgttaactttctaacacatttcatgcatagcttggctcagaaggtgccattggcagacaggcacatgggaggctggagtaggaggtctgaagattagttcaggggatggaccaagaatttcccccagagctttaaagaagtgggactcagccatgttggcgcgtgattgacattacagcacagaaaactgttagtgactggtttcctgttagataagggttccagcagcctggggcagtatgtctcagctggaatggaaagaatgtgagatggaacctcaagtcactgtttttaccagggacacatctgttttggctcccaatcagcagtcttcaatcgatcaataattctgctctggaagagaaggaacagggagcagagagacccaactgggagccagagatggaacttcaggtcttaagtgcaaatcaaagcaaaaaacaaacaaaacttacatggaaaaactgtaagtgctgaaagcaagtttagccatgacaaaccaaagagtgcccaggtcagccaagaaagatacataatctcatgggacttcagtgggagttacacaggaatgttgaagaatcattcttctttttcatgcatttgtccttctcccacccccttactacaccctagcagatcagctgagtgtactttattccaagaacttactggatctctggtttttctcctgaagttggggcaggtgcaattccaagcataaccaccagatggcagagtgaccgcgcatacctgcttccaagaataaaacagttctgaaaagcaaccgcaaagccgggcgcggtggctcacacctgtaatcccaacagtttggaagaccgaggcgggtggatcacttgaagtcaggagtttgagaccagcctggccaacatggtgaaaccccatctctcctgggcatgtagtcccagctactcgggaggctgaggcaggagaatcgcttgaacctgggaggcagaggttgcagtgagctgagatcacaccactgcacttcatcctaggcaacagagcgagactctgtctccccccgcaaaaaaaaaaaagaaagaaagaaagagaaaagaaaagaaaagcaaccacagccagccttagggaaaacttggaagtaagtgaaatttgtcttcagaataactatctccctttctgatctgtctcctactctttagatgttctcagtcaagtactcactgaactcattgatcgagtgctgtctgctaaatctccaaaccattcccaaacctttccccgtagtataccatccagcttccctccccttcctccaaaaccctccctcccacctccccacacccattgagtcattcacaggcaggagggagactgatcattcctctgggttatctgcatctcaaaagaaaatgcttacccacaggaactgttaactcaggggttcttaacttggggtccatcaccccagggggtccatagttggacttcagagggtctatgaaacccctaaaactgtcagtatttaatgtatttattcttgtatgttttttccagagcattaaagctttcataaggttctcaaaggtctcagacctacaaagagttaaaacaaacagacaaacaaaaaaaaacactactattttaaatagtggaactttcagcccagcgtttctgcaatgcagagtgaagtggatactgggcagttcgagacaggtttttaatcataagtggtcttttcaaatgtccatcaattgatggggaaggctggcacccaccaagaagtggaagtcctcagaaattctcggcacaccctagagtattgtacaaccaacacccccacataactttgtcccctcttccccaacaacccagagcaggtgttgcagacaggagggccacagcgtgtggaagtaaagactttggagctagagaagccttttccagcaatgattattgacttcaccacaccccttgcctggcctggcctgaggctcagcagtgcatgacttctcgtagataacttcacagtcatccagtcccaacacctgctcttgcctggtaggaacaggcgaagtgtcagccctcaatgttgggtacttagacccaaaccaataaatggtgagttttgaacaagaactaccatcatgcaggcttcttgcccagctgaccactggccccggggtgcctgcctggctggtcttcatcacctgaggccaccaggctcaagccactgctgttgcattacacccatccctttgcaaaatccctatggagcctgtcaccactcccctccctatatacccccaccccacaaagattttcttcaggttaaaaaaaaagtttaaaaaaaagattttaaaataaagcatttatgaaggcttaataaattgtaaataatttttaaataaaatgaaaatgcctttcctggaa

SEQ ID NO: 203759 - DNA, 5455 bp, Artificial Sequence
  derived and/or modified sequence
atggcggcggccgcggcggcggcagcagcggtgggtgtcaggctccgggactgctgcagccgaggcgctgtgctcctgctcttcttttccctgtctcctcggcccccggccgccgccgcctggctgctgggcctgcggcccgaggacactgctggaggccgcgtgtccctggaggggggcaccctgcgcgccgccgaaggcaccagcttcctcctgcgtgtctatttccagccaggaccgccgcgctgcagggagcagagcgactgggcatcggacgtggaagtcctggggcccttgcgtcccgggggcgtggcaggctcggccctggtccagctcttttcactctgcgcctgggatgggcgcgcgtggcaccaccacggcgccgccggcggcttcctgctgcgcgttcgcccgcggttgtacggcccaggcggggacctgctgccccctgcgtggctgcgggcgctcggggcgctcctgctgctagccttgtcggccctgttcagcggcctgcgcctgagcctgctgtcgctggacccggtggagttacgggtgctgcggaacagcggctcggccgccgagcaggagcaggcgcgccgcgtgcaggccgttcgcggcagggggacccatctgctctgcaccctactcctgggccaagccggagccaacgcggccctggctggctggctgtacacctcgctgccgccgggcttcgggggcaccggggaagactacagcgaagaggggatccacttcccgtggctgccggcgctcgtgtgcaccggcgcggtattcctgggcgccgaaatctgcccctactcagtgtgttcgcggcacgggctggccatcgcctcgcacagcgtgtgcctgacccggcttctgatggcagccgccttccccgtgtgctacccgctgggccgcctgctggactgggcgctgcgccaggagataagcaccttctacacgcgggagaagttgctggagacgttgcgggccgcagacccctacagtgacctggtgaaggaggagctcaacatcatacagggtgccctggagctgcgcaccaaagttgtggaggaggtgctgacccccctgggagactgcttcatgctgcgctcagacgcggtgctcgacttcgccactgtctccgagatcctgcgcagcggctacactcgcatcccagtgtacgagggtgaccagcggcacaacattgtggacattttatttgtcaaggacttggccttcgtggaccccgacgactgcaccccgctcctcactgtcacccgcttctacaaccggcccctgcattgtgttttcaatgacacccgactggacacggttctggaggagtttaagaagggaaaatctcacctggccattgtccagcgggtgaataatgagggagaaggggaccctttctatgaggtgatgggcattgtcacgctggaggatatcatagaggagattatcaagtcggagatcctggatgaaactgatctctacactgacaatcggaaaaagcagagggtcccgcaacgggagcggaagcggcatgacttctccttgtttaagctttcggacacggagatgcgggtgaagatctcaccacagcttctgctagccacacaccgcttcatggccacagaagtggagccctttaagtctctgtacctttcggagaagatcctgctccggctcctgaaacatcccaacgtgatccaggagctgaagtttgatgagaagaacaagaaggccccggaacactacctctaccagcgcaaccgccctgtggactactttgtgctgcttctacagggtaaagtggaggtggaggttggtaaggaaggccttcgctttgaaaatggagcctttacttactatggcgtcccagccatcatgaccactgcttgctcagataatgacgtgcggaaggttggaagtctggctggatcttctgtctttctaaaccggtccccttctcgctgcagtgggttgaatcgctctgagtctccaaaccgagagcgcagtgactttgggggcagcaacacccagctgtacagcagcagcaacaacctctacatgcctgactactcagtccacatcctcagcgatgtgcagtttgtgaagatcacacggcagcaatatcagaacgcactcactgcctgccacatggacagctcacctcagtcccctgacatggaggccttcacagacggggactccactaaggcccccacaacccggggcacaccccagacccctaaggatgaccccgccatcacgctcctcaacaacaggaacagcctgccgtgcagccgctcagacgggctgagaagccccagcgaggtagtgtacctgaggatggaggagctggccttcacccaggaagaaatgactgacttcgaggagcacagcacacagcagctcacgctgtctcctgcagccgttcccacgagagcagcatcagatagtgaatgttgtaacatcaacctggatacagagaccagcccctgcagtagcgattttgaggaaaacgtgggcaagaagctgctgagaaccttgagtggccaaaaaaggaagaggtcaccagaaggagagagaacctctgaggacaactccaatttaacacctctgatcacatgacagggcaaagccagcattcactgggtgtgtgaaattccagagctttgggggagaatccaccctcccatcatctgcttcccccaaggcctcccacaggtgacagaatgttctgccttcccttccatctcttcacccctagctgtcagtttggcagattttccctcgttacctccagttcgactcagaaccttgacatggccataacagaaggaggtgcctctgatagaacatgctagaaatggtcttttccacagcatagtctgggactggaaaagagatgtctgactgcaagctgacaatgccactctgggacccctgatgctcttctttgttctttgggtcccctgatgccataggagacctatcgtcttggaacttgccattctttcctccagaacaaaatgttaactttctaacacatttcatgcatagcttggctcagaaggtgccattggcagacaggcacatgggaggctggagtaggaggtctgaagattagttcaggggatggaccaagaatttcccccagagctttaaagaagtgggactcagccatgttggcgcgtgattgacattacagcacagaaaactgttagtgactggtttcctgttagataagggttccagcagcctggggcagtatgtctcagctggaatggaaagaatgtgagatggaacctcaagtcactgtttttaccagggacacatctgttttggctcccaatcagcagtcttcaatcgatcaataattctgctctggaagagaaggaacagggagcagagagacccaactgggagccagagatggaacttcaggtcttaagtgcaaatcaaagcaaaaaacaaacaaaacttacatggaaaaactgtaagtgctgaaagcaagtttagccatgacaaaccaaagagtgcccaggtcagccaagaaagatacataatctcatgggacttcagtgggagttacacaggaatgttgaagaatcattcttctttttcatgcatttgtccttctcccacccccttactacaccctagcagatcagctgagtgtactttattccaagaacttactggatctctggtttttctcctgaagttggggcaggtgcaattccaagcataaccaccagatggcagagtgaccgcgcatacctgcttccaagaataaaacagttctgaaaagcaaccgcaaagccgggcgcggtggctcacacctgtaatcccaacagtttggaagaccgaggcgggtggatcacttgaagtcaggagtttgagaccagcctggccaacatggtgaaaccccatctctcctgggcatgtagtcccagctactcgggaggctgaggcaggagaatcgcttgaacctgggaggcagaggttgcagtgagctgagatcacaccactgcacttcatcctaggcaacagagcgagactctgtctccccccgcaaaaaaaaaaaagaaagaaagaaagagaaaagaaaagaaaagcaaccacagccagccttagggaaaacttggaagtaagtgaaatttgtcttcagaataactatctccctttctgatctgtctcctactctttagatgttctcagtcaagtactcactgaactcattgatcgagtgctgtctgctaaatctccaaaccattcccaaacctttccccgtagtataccatccagcttccctccccttcctccaaaaccctccctcccacctccccacacccattgagtcattcacaggcaggagggagactgatcattcctctgggttatctgcatctcaaaagaaaatgcttacccacaggaactgttaactcaggggttcttaacttggggtccatcaccccagggggtccatagttggacttcagagggtctatgaaacccctaaaactgtcagtatttaatgtatttattcttgtatgttttttccagagcattaaagctttcataaggttctcaaaggtctcagacctacaaagagttaaaacaaacagacaaacaaaaaaaaacactactattttaaatagtggaactttcagcccagcgtttctgcaatgcagagtgaagtggatactgggcagttcgagacaggtttttaatcataagtggtcttttcaaatgtccatcaattgatggggaaggctggcacccaccaagaagtggaagtcctcagaaattctcggcacaccctagagtattgtacaaccaacacccccacataactttgtcccctcttccccaacaacccagagcaggtgttgcagacaggagggccacagcgtgtggaagtaaagactttggagctagagaagccttttccagcaatgattattgacttcaccacaccccttgcctggcctggcctgaggctcagcagtgcatgacttctcgtagataacttcacagtcatccagtcccaacacctgctcttgcctggtaggaacaggcgaagtgtcagccctcaatgttgggtacttagacccaaaccaataaatggtgagttttgaacaagaactaccatcatgcaggcttcttgcccagctgaccactggccccggggtgcctgcctggctggtcttcatcacctgaggccaccaggctcaagccactgctgttgcattacacccatccctttgcaaaatccctatggagcctgtcaccactcccctccctatatacccccaccccacaaagattttcttcaggttaaaaaaaaagtttaaaaaaaagattttaaaataaagcatttatgaaggcttaataaattgtaaataatttttaaataaaatgaaaatgcctttcctgg

SEQ ID NO: 203760 - DNA, 2207 bp, Artificial Sequence
  derived and/or modified sequence
aatgagggagaaggggaccctttctatgaggtgatgggcattgtcacgctggaggatatcatagaggagattatcaagtcggagatcctggatgaaactgatctctacactgacaatcggaaaaagcagagggtcccgcaacgggagcggaagcggcatgacttctccttgtttaagctttcggacacggagatgcgggtgaagatctcaccacagcttctgctagccacacaccgcttcatggccacagaagtggagccctttaagtctctgtacctttcggagaagatcctgctccggctcctgaaacatcccaacgtgatccaggagctgaagtttgatgagaagaacaagaaggccccggaacactacctctaccagcgcaaccgccctgtggactactttgtgctgcttctacagggtaaagtggaggtggaggttggtaaggaaggccttcgctttgaaaatggagcctttacttactatggcgtcccagccatcatgaccactgcttgctcagataatgacgtgcggaaggttggaagtctggctggatcttctgtctttctaaaccggtccccttctcgctgcagtgggttgaatcgctctgagtctccaaaccgagagcgcagtgactttgggggcagcaacacccagctgtacagcagcagcaacaacctctacatgcctgactactcagtccacatcctcagcgatgtgcagtttgtgaagatcacacggcagcaatatcagaacgcactcactgcctgccacatggacagctcacctcagtcccctgacatggaggccttcacagacggggactccactaaggcccccacaacccggggcacaccccagacccctaaggatgaccccgccatcacgctcctcaacaacaggaacagcctgccgtgcagccgctcagacgggctgagaagccccagcgaggtagtgtacctgaggatggaggagctggccttcacccaggaagaaatgactgacttcgaggagcacagcacacagcagctcacgctgtctcctgcagccgttcccacgagagcagcatcagatagtgaatgttgtaacatcaacctggatacagagaccagcccctgcagtagcgattttgaggaaaacgtgggcaagaagctgctgagaaccttgagtggccaaaaaaggaagaggtcaccagaaggagagagaacctctgaggacaactccaatttaacacctctgatcacatgacagggcaaagccagcattcactgggtgtgtgaaattccagagctttaaagaagtgggactcagccatgttggcgcgtgattgacattacagcacagaaaactgttagtgactggtttcctgttagataagggttccagcagcctggggcagtatgtctcagctggaatggaaagaatgtgagatggaacctcaagtcactgtttttaccagggacacatctgttttggctcccaatcagcagtcttcaatcgatcaataattctgctctggaagagaaggaacagggagcagagagacccaactgggagccagagatggaacttcaggtcttaagtgcaaatcaaagcaaaaaacaaacaaaacttacatggaaaaactgtaagtgctgaaagcaagtttagccatgacaaaccaaagagtgcccaggtcagccaagaaagatacataatctcatgggacttcagtgggagttacacaggaatgttgaagaatcattcttctttttcatgcatttgtccttctcccacccccttactacaccctagcagatcagctgagtgtactttattccaagaacttactggatctctggtttttctcctgaagttggggcaggtgcaattccaagcataaccaccagatggcagagtgaccgcgcatacctgcttccaagaataaaacagttctgaaaagcaaccgcaaagccgggcgcggtggctcacacctgtaatcccaacagtttggaagaccgaggcgggtggatcacttgaagtcaggagtttgagaccagcctggccaacatggtgaaaccccatctctcctgggcatgtagtcccagctactcgggaggctgaggcaggagaatcgcttgaacctgggaggcagaggttgcagtgagctgagatcacaccactgcacttcatcctaggcaacagagcgagactctgtctccccccgc

SEQ ID NO: 203761 - DNA, 2856 bp, Artificial Sequence
  derived and/or modified sequence
atggccgccgccgccgccgccgccgccgccgtgggcgtgagactgagagactgctgcagcagaggcgccgtgctgctgctgttcttcagcctgagccccagaccccccgccgccgccgcctggctgctgggcctgagacccgaggacaccgccggcggcagagtgagcctggagggcggcaccctgagagccgccgagggcaccagcttcctgctgagagtgtacttccagcccggcccccccgccaccgccgcccccgtgcccagccccaccctgaacagcggcgagaacggcaccggcgactgggcccccagactggtgttcatcgaggagccccccggcggcggcggcgtggcccccagcgccgtgcccaccagaccccccggcccccagagatgcagagagcagagcgactgggccagcgacgtggaggtgctgggccccctgagacccggcggcgtggccggcagcgccctggtgcaggtgagagtgagagagctgagaaagggcgaggccgagagaggcggcgccggcggcggcggcaagctgttcagcctgtgcgcctgggacggcagagcctggcaccaccacggcgccgccggcggcttcctgctgagagtgagacccagactgtacggccccggcggcgacctgctgccccccgcctggctgagagccctgggcgccctgctgctgctggccctgagcgccctgttcagcggcctgagactgagcctgctgagcctggaccccgtggagctgagagtgctgagaaacagcggcagcgccgccgagcaggagcaggccagaagagtgcaggccgtgagaggcagaggcacccacctgctgtgcaccctgctgctgggccaggccggcgccaacgccgccctggccggctggctgtacaccagcctgccccccggcttcggcggcaccggcgaggactacagcgaggagggcatccacttcccctggctgcccgccctggtgtgcaccggcgccgtgttcctgggcgccgagatctgcccctacagcgtgtgcagcagacacggcctggccatcgccagccacagcgtgtgcctgaccagactgctgatggccgccgccttccccgtgtgctaccccctgggcagactgctggactgggccctgagacaggagatcagcaccttctacaccagagagaagctgctggagaccctgagagccgccgacccctacagcgacctggtgaaggaggagctgaacatcatccagggcgccctggagctgagaaccaaggtggtggaggaggtgctgacccccctgggcgactgcttcatgctgagaagcgacgccgtgctggacttcgccaccgtgagcgagatcctgagaagcggctacaccagaatccccgtgtacgagggcgaccagagacacaacatcgtggacatcctgttcgtgaaggacctggccttcgtggaccccgacgactgcacccccctgctgaccgtgaccagattctacaacagacccctgcactgcgtgttcaacgacaccagactggacaccgtgctggaggagttcaagaagggcaagagccacctggccatcgtgcagagagtgaacaacgagggcgagggcgaccccttctacgaggtgatgggcatcgtgaccctggaggacatcatcgaggagatcatcaagagcgagatcctggacgagaccgacctgtacaccgacaacagaaagaagcagagagtgccccagagagagagaaagagacacgacttcagcctgttcaagctgagcgacaccgagatgagagtgaagatcagcccccagctgctgctggccacccacagattcatggccaccgaggtggagcccttcaagagcctgtacctgagcgagaagatcctgctgagactgctgaagcaccccaacgtgatccaggagctgaagttcgacgagaagaacaagaaggcccccgagcactacctgtaccagagaaacagacccgtggactacttcgtgctgctgctgcagggcaaggtggaggtggaggtgggcaaggagggcctgagattcgagaacggcgccttcacctactacggcgtgcccgccatcatgaccaccgcctgcagcgacaacgacgtgagaaaggtgggcagcctggccggcagcagcgtgttcctgaacagaagccccagcagatgcagcggcctgaacagaagcgagagccccaacagagagagaagcgacttcggcggcagcaacacccagctgtacagcagcagcaacaacctgtacatgcccgactacagcgtgcacatcctgagcgacgtgcagttcgtgaagatcaccagacagcagtaccagaacgccctgaccgcctgccacatggacagcagcccccagagccccgacatggaggccttcaccgacggcgacagcaccaaggcccccaccaccagaggcaccccccagacccccaaggacgaccccgccatcaccctgctgaacaacagaaacagcctgccctgcagcagaagcgacggcctgagaagccccagcgaggtggtgtacctgagaatggaggagctggccttcacccaggaggagatgaccgacttcgaggagcacagcacccagcagctgaccctgagccccgccgccgtgcccaccagagccgccagcgacagcgagtgctgcaacatcaacctggacaccgagaccagcccctgcagcagcgacttcgaggagaacgtgggcaagaagctgctgagaaccctgagcggccagaagagaaagagaagccccgagggcgagagaaccagcgaggacaacagcaacctgacccccctgatcacctag

SEQ ID NO: 203762 - DNA, 2643 bp, Artificial Sequence
  derived and/or modified sequence
atggccgccgccgccgccgccgccgccgccgtgggcgtgagactgagagactgctgcagcagaggcgccgtgctgctgctgttcttcagcctgagccccagaccccccgccgccgccgcctggctgctgggcctgagacccgaggacaccgccggcggcagagtgagcctggagggcggcaccctgagagccgccgagggcaccagcttcctgctgagagtgtacttccagcccggcccccccagatgcagagagcagagcgactgggccagcgacgtggaggtgctgggccccctgagacccggcggcgtggccggcagcgccctggtgcagctgttcagcctgtgcgcctgggacggcagagcctggcaccaccacggcgccgccggcggcttcctgctgagagtgagacccagactgtacggccccggcggcgacctgctgccccccgcctggctgagagccctgggcgccctgctgctgctggccctgagcgccctgttcagcggcctgagactgagcctgctgagcctggaccccgtggagctgagagtgctgagaaacagcggcagcgccgccgagcaggagcaggccagaagagtgcaggccgtgagaggcagaggcacccacctgctgtgcaccctgctgctgggccaggccggcgccaacgccgccctggccggctggctgtacaccagcctgccccccggcttcggcggcaccggcgaggactacagcgaggagggcatccacttcccctggctgcccgccctggtgtgcaccggcgccgtgttcctgggcgccgagatctgcccctacagcgtgtgcagcagacacggcctggccatcgccagccacagcgtgtgcctgaccagactgctgatggccgccgccttccccgtgtgctaccccctgggcagactgctggactgggccctgagacaggagatcagcaccttctacaccagagagaagctgctggagaccctgagagccgccgacccctacagcgacctggtgaaggaggagctgaacatcatccagggcgccctggagctgagaaccaaggtggtggaggaggtgctgacccccctgggcgactgcttcatgctgagaagcgacgccgtgctggacttcgccaccgtgagcgagatcctgagaagcggctacaccagaatccccgtgtacgagggcgaccagagacacaacatcgtggacatcctgttcgtgaaggacctggccttcgtggaccccgacgactgcacccccctgctgaccgtgaccagattctacaacagacccctgcactgcgtgttcaacgacaccagactggacaccgtgctggaggagttcaagaagggcaagagccacctggccatcgtgcagagagtgaacaacgagggcgagggcgaccccttctacgaggtgatgggcatcgtgaccctggaggacatcatcgaggagatcatcaagagcgagatcctggacgagaccgacctgtacaccgacaacagaaagaagcagagagtgccccagagagagagaaagagacacgacttcagcctgttcaagctgagcgacaccgagatgagagtgaagatcagcccccagctgctgctggccacccacagattcatggccaccgaggtggagcccttcaagagcctgtacctgagcgagaagatcctgctgagactgctgaagcaccccaacgtgatccaggagctgaagttcgacgagaagaacaagaaggcccccgagcactacctgtaccagagaaacagacccgtggactacttcgtgctgctgctgcagggcaaggtggaggtggaggtgggcaaggagggcctgagattcgagaacggcgccttcacctactacggcgtgcccgccatcatgaccaccgcctgcagcgacaacgacgtgagaaaggtgggcagcctggccggcagcagcgtgttcctgaacagaagccccagcagatgcagcggcctgaacagaagcgagagccccaacagagagagaagcgacttcggcggcagcaacacccagctgtacagcagcagcaacaacctgtacatgcccgactacagcgtgcacatcctgagcgacgtgcagttcgtgaagatcaccagacagcagtaccagaacgccctgaccgcctgccacatggacagcagcccccagagccccgacatggaggccttcaccgacggcgacagcaccaaggcccccaccaccagaggcaccccccagacccccaaggacgaccccgccatcaccctgctgaacaacagaaacagcctgccctgcagcagaagcgacggcctgagaagccccagcgaggtggtgtacctgagaatggaggagctggccttcacccaggaggagatgaccgacttcgaggagcacagcacccagcagctgaccctgagccccgccgccgtgcccaccagagccgccagcgacagcgagtgctgcaacatcaacctggacaccgagaccagcccctgcagcagcgacttcgaggagaacgtgggcaagaagctgctgagaaccctgagcggccagaagagaaagagaagccccgagggcgagagaaccagcgaggacaacagcaacctgacccccctgatcacctag

SEQ ID NO: 203763 - DNA, 1215 bp, Artificial Sequence
  derived and/or modified sequence
atgggcatcgtgaccctggaggacatcatcgaggagatcatcaagagcgagatcctggacgagaccgacctgtacaccgacaacagaaagaagcagagagtgccccagagagagagaaagagacacgacttcagcctgttcaagctgagcgacaccgagatgagagtgaagatcagcccccagctgctgctggccacccacagattcatggccaccgaggtggagcccttcaagagcctgtacctgagcgagaagatcctgctgagactgctgaagcaccccaacgtgatccaggagctgaagttcgacgagaagaacaagaaggcccccgagcactacctgtaccagagaaacagacccgtggactacttcgtgctgctgctgcagggcaaggtggaggtggaggtgggcaaggagggcctgagattcgagaacggcgccttcacctactacggcgtgcccgccatcatgaccaccgcctgcagcgacaacgacgtgagaaaggtgggcagcctggccggcagcagcgtgttcctgaacagaagccccagcagatgcagcggcctgaacagaagcgagagccccaacagagagagaagcgacttcggcggcagcaacacccagctgtacagcagcagcaacaacctgtacatgcccgactacagcgtgcacatcctgagcgacgtgcagttcgtgaagatcaccagacagcagtaccagaacgccctgaccgcctgccacatggacagcagcccccagagccccgacatggaggccttcaccgacggcgacagcaccaaggcccccaccaccagaggcaccccccagacccccaaggacgaccccgccatcaccctgctgaacaacagaaacagcctgccctgcagcagaagcgacggcctgagaagccccagcgaggtggtgtacctgagaatggaggagctggccttcacccaggaggagatgaccgacttcgaggagcacagcacccagcagctgaccctgagccccgccgccgtgcccaccagagccgccagcgacagcgagtgctgcaacatcaacctggacaccgagaccagcccctgcagcagcgacttcgaggagaacgtgggcaagaagctgctgagaaccctgagcggccagaagagaaagagaagccccgagggcgagagaaccagcgaggacaacagcaacctgacccccctgatcacctag

SEQ ID NO: 203764 - protein, 360 aa, Artificial Sequence
  derived and/or modified sequence
MAKAPSWAGVGALAYKAPEALWPAEAVMDGTMEDSEAVQRATALIEQRLAQEEENEKLRGDARQKLPMDLLVLEDEKHHGAQSAALQKVKGQERVRKTSLDLRREIIDVGGIQNLIELRKKRKQKKRDALAASHEPPPEPEEITGPVDEETFLKAAVEGKMKVIEKFLADGGSADTCDQFRRTALHRASLEGHMEILEKLLDNGATVDFQDRLDCTAMHWACRGGHLEVVKLLQSHGADTNVRDKLLSTPLHVAVRTGQVEIVEHFLSLGLEINARDREGDTALHDAVRLNRYKIIKLLLLHGADMMTKNLAGKTPTDLVQLWQADTRHALEHPEPGAEHNGLEGPNDSGRETPQPVPAQ

SEQ ID NO: 203765 - protein, 333 aa, Artificial Sequence
  derived and/or modified sequence
MDGTMEDSEAVQRATALIEQRLAQEEENEKLRGDARQKLPMDLLVLEDEKHHGAQSAALQKVKGQERVRKTSLDLRREIIDVGGIQNLIELRKKRKQKKRDALAASHEPPPEPEEITGPVDEETFLKAAVEGKMKVIEKFLADGGSADTCDQFRRTALHRASLEGHMEILEKLLDNGATVDFQDRLDCTAMHWACRGGHLEVVKLLQSHGADTNVRDKLLSTPLHVAVRTGQVEIVEHFLSLGLEINARDREGDTALHDAVRLNRYKIIKLLLLHGADMMTKNLAGKTPTDLVQLWQADTRHALEHPEPGAEHNGLEGPNDSGRETPQPVPAQ

SEQ ID NO: 203766 - DNA, 1083 bp, Artificial Sequence
  derived and/or modified sequence
atggccaaagcgccgagctgggccggagtgggtgctctggcctataaagcgccagaagccctctggcccgctgaagctgttatggacgggacaatggaggatagcgaagctgtgcagcgggcgaccgcactgatagagcaacgactagcccaagaggaagaaaacgagaagctgcggggagatgctagacagaagttacccatggatctgctggtgctggaagatgagaaacatcacggggcacagagtgctgccctgcagaaagtgaaggggcaagaaagagtgaggaagactagcctggacctgaggagagaaatcatcgacgtgggcgggatacagaacctgattgagttaagaaaaaagcgtaagcagaagaagagagatgcgctggctgcaagtcacgaaccaccccctgaaccagaggagatcaccggtccggtggatgaggagacattcttaaaggctgccgtggagggaaagatgaaagttatcgagaagtttctcgctgacggcggatctgccgatacatgtgaccagtttagacggacggcgctgcaccgcgcctccctcgaaggtcatatggagatactagagaagctcctcgacaacggtgcaactgtagattttcaggataggctcgactgcacagctatgcattgggcctgtaggggtggacatttagaagtggttaagctcctacagtctcacggtgcagacacaaacgtgagggacaaactgctgtcaacaccgttgcacgttgctgttcgcacaggccaggtggagattgttgagcattttttgtcattgggactggaaatcaacgctagggatcgcgaaggggatactgccctccacgacgctgtgcggcttaatcgatataagatcattaagttgctcctgctccatggtgcagacatgatgacaaagaatttagccggtaaaaccccaaccgatttggttcagctatggcaagctgacaccagacacgctctggaacatcccgagcccggcgccgaacacaacggcctagagggacctaatgactctggaagagagaccccgcagccagtcccagcgcagtag

SEQ ID NO: 203767 - DNA, 1002 bp, Artificial Sequence
  derived and/or modified sequence
atggatggcaccatggaagacagtgaggccgtacaacgcgccaccgccctgattgaacaaagattggcccaggaggaggaaaacgagaagctgagaggcgatgctagacagaagcttccaatggacctccttgtgttagaggatgaaaagcaccacggtgctcagtccgcagcacttcaaaaagtgaagggccaggagcgcgtgcggaagacatcactggatttgcgaagagaaattattgacgttgggggaattcagaatcttatcgagctccgaaaaaagagaaagcaaaaaaaacgggacgccctggctgcctcacatgaaccgcctcccgagcctgaggagattaccgggcctgtggacgaagagacattcctgaaggcagccgtagagggaaaaatgaaggtcattgagaagttcctcgccgatggtggttcagctgacacctgtgaccaatttagaagaacagctctgcaccgggcctctcttgaggggcacatggagatactagaaaagttgctggacaacggcgcaacagtcgacttccaggatagattggattgtaccgctatgcattgggcctgccgaggaggccacctggaagtggttaagctcttacagtcacacggggctgataccaacgtgcgggacaaactcctgtcaactcccctgcacgtggcagtcaggacaggacaagttgagatcgttgaacattttctctccctgggactggagattaacgccagggaccgggagggcgacacagcactgcatgatgctgtccgtttgaacaggtataaaataattaagctcttgctcttacacggagccgacatgatgacgaagaatcttgcaggcaaaactcccactgatctggtccagctctggcaagccgacacccgccacgccttggaacatcctgaaccgggtgccgaacataacggactcgaaggacctaacgattcaggacgagagacgccccagcctgtacctgcgcaatag

SEQ ID NO: 203768 - DNA, 1083 bp, Artificial Sequence
  derived and/or modified sequence
atggccaaggcccccagctgggccggcgtgggcgccctggcctacaaggcccctgaggccctgtggccagctgaggccgtgatggatggcaccatggaggacagcgaggccgtgcagagggccacagccctgattgagcagaggctggcccaggaggaggagaatgagaagctgcggggagatgcccggcagaagctgcccatggacctgctggtgctggaggatgagaagcaccacggggcccagagcgctgccctgcagaaggtgaagggccaggagcgggtgaggaagaccagcctggacctgcggcgggagatcattgatgtgggcggcatccagaacctgattgagctgaggaagaagaggaagcagaagaagagagatgccctggccgccagccatgagcccccacctgagcctgaggagatcaccggccctgtggatgaggagaccttcctgaaggctgctgtggagggcaagatgaaggtgattgagaagttcctggctgatggcggcagcgctgacacctgtgaccagttcagaagaacagccctgcaccgggccagcctggagggccacatggagatcctggagaagctgctggacaatggagccaccgtggacttccaggaccggctggactgcacagccatgcactgggcctgccggggcggccacctggaggtggtgaagctgctgcagagccacggggctgacaccaacgtgcgggacaagctgctgagcacccccctgcacgtggccgtgaggacaggccaggtggagatcgtggagcacttcctgagcctgggcctggagatcaatgcccgggaccgggagggggacacagccctgcatgatgctgtgcggctgaaccgctacaagatcatcaagctgctgctgctgcacggggctgacatgatgaccaagaacctggccggcaagacccccacagacctggtgcagctgtggcaggccgacaccaggcatgccctggagcaccctgagcccggggctgagcacaacggcctggagggccccaatgattctggccgggagaccccccagcctgtgcctgcccagtag

SEQ ID NO: 203769 - DNA, 1002 bp, Artificial Sequence
  derived and/or modified sequence
atggatggcaccatggaggacagcgaggccgtgcagagggccacagccctgattgagcagaggctggcccaggaggaggagaatgagaagctgcggggagatgcccggcagaagctgcccatggacctgctggtgctggaggatgagaagcaccacggggcccagagcgctgccctgcagaaggtgaagggccaggagcgggtgaggaagaccagcctggacctgcggcgggagatcattgatgtgggcggcatccagaacctgattgagctgaggaagaagaggaagcagaagaagagagatgccctggccgccagccatgagcccccacctgagcctgaggagatcactggacctgtggatgaggagaccttcctgaaggctgctgtggagggcaagatgaaggtgattgagaagttcctggctgatggcggcagcgctgacacctgtgaccagttccggaggacagccctgcaccgggccagcctggagggccacatggagatcctggagaagctgctggacaacggggccaccgtggacttccaggaccggctggactgcacagccatgcactgggcctgccggggcggccacctggaggtggtgaagctgctgcagagccatggagctgacaccaacgtgcgggacaagctgctgagcacccccctgcacgtggccgtgaggacaggccaggtggagatcgtggagcacttcctgagcctgggcctggagatcaatgcccgggaccgggagggggacacagccctgcatgatgctgtgcggctgaaccgctacaagatcatcaagctgctgctgctgcatggagctgacatgatgaccaagaacctggccggcaagacccccacagacctggtgcagctgtggcaggccgacaccaggcatgccctggagcaccctgagcctggagctgagcacaacggcctggagggccccaatgacagcggccgggagaccccccagcctgtgcctgcccagtag

SEQ ID NO: 203770 - DNA, 1083 bp, Artificial Sequence
  derived and/or modified sequence
atggccaaggcccccagctgggccggcgtgggcgccctggcctacaaagcccctgaagctctctggcccgcggaagccgtcatggacggaaccatggaagactctgaggccgtgcaaagagccaccgctttgatcgaacagaggttagcccaggaggaggagaacgaaaaactgagaggtgatgcgcggcagaagctgccaatggacctgctggtcctcgaggacgaaaaacatcacggggcccagagcgctgccttgcaaaaagtaaagggtcaagagcgtgttcggaaaacttctctcgacttgcggcgggagattattgatgtgggaggaattcagaacctgatcgagctgcgcaagaagagaaaacagaaaaaaagagatgctctggccgcgagtcacgagccgccccctgagccggaggaaatcactggccctgttgacgaggagacgtttctgaaagcggctgtggagggtaagatgaaggtcattgagaagtttctcgcggatggtggctccgctgatacatgcgatcagttccggcgtacagctctccatagagcttctctcgaggggcacatggaaattttggagaagctgctggacaatggagcgaccgtcgattttcaggatagactggactgtaccgctatgcattgggcctgtaggggaggacatttagaagtggtgaaactgctgcagagtcacggagctgacacaaacgttagggacaagctcctgagtacaccacttcatgtagccgtccggaccgggcaggttgaaatcgtcgagcactttctgagtctagggctggaaatcaatgctagagatagagaaggggatacagctctccatgatgcagtacgattgaatcgctataagataatcaagctgttgttgctccacggtgctgacatgatgaccaaaaacctggccggcaaaacccctactgatttggttcagctgtggcaggccgacacaaggcatgcactggaacatcctgaaccaggagccgaacacaacggactagaaggtcctaatgacagcgggcgcgaaacgccacagcccgtgcccgctcagtag

SEQ ID NO: 203771 - DNA, 1002 bp, Artificial Sequence
  derived and/or modified sequence
atggacggcaccatggaggacagcgaggccgtgcagcgggccaccgccctgattgaacagaggctcgctcaggaggaagaaaatgaaaagctgcggggagatgcacggcaaaaacttcccatggacctcctggtgctggaagacgagaagcatcacggggcacagagtgcagcactgcagaaggtgaaggggcaggagcgcgtacgcaaaacttcgctcgacctcaggagagagattatcgacgtggggggcatacagaacttgattgaattgagaaaaaaaaggaaacagaagaaacgcgacgccctcgcagccagtcatgaacctcctccagagccagaggaaatcactggacccgtggacgaggaaacttttttgaaagcagccgtggaagggaagatgaaggtgatagagaagttcctggccgacggcggcagcgctgacacctgtgatcaatttagacggacagccctgcaccgcgcctcacttgagggacacatggagattctagaaaagctcctagataacggtgccactgtggactttcaggatcggctggactgtacggccatgcactgggcctgccgaggaggacaccttgaggtggtcaagcttctgcagtcccatggggccgacacgaacgtccgggataaactgttgtccactcctttacatgtggcagtacggaccggacaagtggagatcgttgaacattttctgtctctcgggctggaaatcaatgcaagggaccgcgagggcgacaccgcactacatgacgcagtgcgcttgaatcgatacaagataataaagctcctgctgctccatggcgccgacatgatgaccaagaatcttgctggaaagactcctaccgacctcgtgcagctttggcaggctgacacgagacatgcactggaacaccctgagcccggtgccgagcacaatggtctggaaggtccaaacgactcaggtagggagaccccacagccagttcccgcgcagtag

SEQ ID NO: 203772 - DNA, 1083 bp, Artificial Sequence
  derived and/or modified sequence
atggccaaggctcctagctgggctggcgtgggggcactggcgtacaaggcccctgaggcattatggccggctgaggcggtgatggatgggactatggaggacagcgaggccgttcaaagagccacagccctaattgagcagcggctagctcaggaagaagagaatgagaagctgaggggcgacgctcgccagaagctaccgatggacttgctggtgttagaggacgagaaacaccatggggctcaatcggccgcactccaaaaggtgaaaggtcaggagcgtgtaagaaagacctccctggacctgagacgagaaatcatcgatgtcggcggtattcagaaccttattgaacttcgcaagaagcgcaaacagaaaaaaagggacgcgcttgcagccagccacgaaccaccgccagagcccgaagaaatcacaggaccggtcgacgaggaaacatttctgaaagcggctgtcgagggaaagatgaaagtcattgaaaaattcctggccgatggaggttccgcagacacttgtgatcagtttcggcgtacggccttgcatagagcatcccttgaaggtcacatggaaatcctggaaaagctgctggacaacggtgcaactgtcgactttcaagatagactggattgcacagcgatgcattgggcttgccggggaggtcacttggaagtcgtcaagctactgcaatcccacggggcagatacaaacgtacgggataaactactgtcaactccactacatgtcgcagtgagaacgggccaggtggagatagtggagcactttctgtccctcggactggagatcaacgctcgggatcgtgagggcgataccgccctgcatgatgcagtccggctgaacaggtacaagatcataaagctgttgctgctccatggggcagacatgatgaccaaaaaccttgcagggaaaacacccacagacctggtgcaactctggcaggcggacacccgccacgcgttagaacatcctgagcccggagcagaacacaacggcttggaggggcctaatgacagtgggagagaaacacctcaacccgtgccagcccaatag

SEQ ID NO: 203773 - DNA, 1002 bp, Artificial Sequence
  derived and/or modified sequence
atggatggtaccatggaggactctgaagctgtgcagagagcaactgcactgattgaacagcgcctagcgcaagaggaggagaatgaaaagttacgaggagatgcccgacagaagctcccgatggacctcttagtgctagaggatgagaagcatcacggagcccagagcgccgcactgcagaaggtgaagggtcaggagcgagtacgcaagacgtctctcgatctccggagggagatcattgatgtgggcggaatccagaacttgattgagctccggaaaaagcgaaaacaaaaaaaacgggatgctctcgccgctagccacgagcccccacccgagccggaagaaatcacaggccctgttgacgaggaaaccttcctaaaagcggctgttgagggaaaaatgaaggtgattgaaaaattcctcgctgacggaggttcagcagatacatgtgaccagtttaggcggacggcccttcacagagctagcctggaagggcacatggagatcctggaaaagctgctcgacaacggcgctactgttgatttccaagatagactcgactgtactgccatgcattgggcctgtagagggggacatttggaagtcgtgaagctgttgcagagtcatggggctgatacaaacgttcgggacaaactgctttccacgcccctgcatgtggccgtaaggactggacaggttgagatcgttgaacactttctctcccttgggctggagatcaacgccagggatcgggaaggcgatacagcactgcacgatgctgttcgactgaaccgttacaagattataaagttactactcctgcatggagctgacatgatgacgaagaatttagcaggtaaaacccccacagatttggtccaactttggcaggccgacacgcgccacgctctggagcaccctgaacctggtgcagagcacaatgggctcgaaggacccaatgacagcggacgcgagacacctcagccagtaccggcacagtag

SEQ ID NO: 203774 - DNA, 1083 bp, Artificial Sequence
  derived and/or modified sequence
atggccaaggcccccagctgggccggcgtgggcgccctggcctacaaggcccccgaggccctgtggcccgccgaggccgtgatggacggcaccatggaggacagcgaggccgtgcagagagccaccgccctgatcgagcagagactggcccaggaggaggagaacgagaagctgagaggcgacgccagacagaagctgcccatggacctgctggtgctggaggacgagaagcaccacggcgcccagagcgccgccctgcagaaggtgaagggccaggagagagtgagaaagaccagcctggacctgagaagagagatcatcgacgtgggcggcatccagaacctgatcgagctgagaaagaagagaaagcagaagaagagagacgccctggccgccagccacgagcccccccccgagcccgaggagatcaccggccccgtggacgaggagaccttcctgaaggccgccgtggagggcaagatgaaggtgatcgagaagttcctggccgacggcggcagcgccgacacctgcgaccagttcagaagaaccgccctgcacagagccagcctggagggccacatggagatcctggagaagctgctggacaacggcgccaccgtggacttccaggacagactggactgcaccgccatgcactgggcctgcagaggcggccacctggaggtggtgaagctgctgcagagccacggcgccgacaccaacgtgagagacaagctgctgagcacccccctgcacgtggccgtgagaaccggccaggtggagatcgtggagcacttcctgagcctgggcctggagatcaacgccagagacagagagggcgacaccgccctgcacgacgccgtgagactgaacagatacaagatcatcaagctgctgctgctgcacggcgccgacatgatgaccaagaacctggccggcaagacccccaccgacctggtgcagctgtggcaggccgacaccagacacgccctggagcaccccgagcccggcgccgagcacaacggcctggagggccccaacgacagcggcagagagaccccccagcccgtgcccgcccagtag

SEQ ID NO: 203775 - DNA, 1002 bp, Artificial Sequence
  derived and/or modified sequence
atggacggcaccatggaggacagcgaggccgtgcagagagccaccgccctgatcgagcagagactggcccaggaggaggagaacgagaagctgagaggcgacgccagacagaagctgcccatggacctgctggtgctggaggacgagaagcaccacggcgcccagagcgccgccctgcagaaggtgaagggccaggagagagtgagaaagaccagcctggacctgagaagagagatcatcgacgtgggcggcatccagaacctgatcgagctgagaaagaagagaaagcagaagaagagagacgccctggccgccagccacgagcccccccccgagcccgaggagatcaccggccccgtggacgaggagaccttcctgaaggccgccgtggagggcaagatgaaggtgatcgagaagttcctggccgacggcggcagcgccgacacctgcgaccagttcagaagaaccgccctgcacagagccagcctggagggccacatggagatcctggagaagctgctggacaacggcgccaccgtggacttccaggacagactggactgcaccgccatgcactgggcctgcagaggcggccacctggaggtggtgaagctgctgcagagccacggcgccgacaccaacgtgagagacaagctgctgagcacccccctgcacgtggccgtgagaaccggccaggtggagatcgtggagcacttcctgagcctgggcctggagatcaacgccagagacagagagggcgacaccgccctgcacgacgccgtgagactgaacagatacaagatcatcaagctgctgctgctgcacggcgccgacatgatgaccaagaacctggccggcaagacccccaccgacctggtgcagctgtggcaggccgacaccagacacgccctggagcaccccgagcccggcgccgagcacaacggcctggagggccccaacgacagcggcagagagaccccccagcccgtgcccgcccagtag

SEQ ID NO: 203776 - protein, 744 aa, Artificial Sequence
  derived and/or modified sequence
MAVLPGPLQLLGVLLTISLSSIRLIQAGAYYGIKPLPPQIPPQMPPQIPQYQPLGQQVPHMPLAKDGLAMGKEMPHLQYGKEYPHLPQYMKEIQPAPRMGKEAVPKKGKEIPLASLRGEQGPRGEPGPRGPPGPPGLPGHGIPGIKGKPGPQGYPGVGKPGMPGMPGKPGAMGMPGAKGEIGQKGEIGPMGIPGPQGPPGPHGLPGIGKPGGPGLPGQPGPKGDRGPKGLPGPQGLRGPKGDKGFGMPGAPGVKGPPGMHGPPGPVGLPGVGKPGVTGFPGPQGPLGKPGAPGEPGPQGPIGVPGVQGPPGIPGIGKPGQDGIPGQPGFPGGKGEQGLPGLPGPPGLPGIGKPGFPGPKGDRGMGGVPGALGPRGEKGPIGAPGIGGPPGEPGLPGIPGPMGPPGAIGFPGPKGEGGIVGPQGPPGPKGEPGLQGFPGKPGFLGEVGPPGMRGLPGPIGPKGEAGQKGVPGLPGVPGLLGPKGEPGIPGDQGLQGPPGIPGIGGPSGPIGPPGIPGPKGEPGLPGPPGFPGIGKPGVAGLHGPPGKPGALGPQGQPGLPGPPGPPGPPGPPAVMPPTPPPQGEYLPDMGLGIDGVKPPHAYGAKKGKNGGPAYEMPAFTAELTAPFPPVGAPVKFNKLLYNGRQNYNPQTGIFTCEVPGVYYFAYHVHCKGGNVWVALFKNNEPVMYTYDEYKKGFLDQASGSAVLLLRPGDRVFLQMPSEQAAGLYAGQYVHSSFSGYLLYPM

SEQ ID NO: 203777 - protein, 114 aa, Artificial Sequence
  derived and/or modified sequence
MAVLPGPLQLLGVLLTISLSSIRLIQAGAYYGIKPLPPQIPPQMPPQIPQYQPLGQQVPHMPLAKDGLAMGKEMPHLQYGKEYPHLPQYMKEIQPAPRMGKEAVPKKGKEIPLA

SEQ ID NO: 203778 - DNA, 2235 bp, Artificial Sequence
  derived and/or modified sequence
atggccgtgttacctgggccactgcagttactgggggtcttattgacaatcagtctgagttccattcggctcatccaggccggagcctactacgggatcaagcccttgcctccccagatccccccacaaatgccgccacagattccacagtatcagccactggggcagcaggtcccgcacatgcccctcgctaaggacggcttggccatgggtaaggaaatgccacacttgcaatacgggaaggaatatccccacctgcctcagtacatgaaggagatccagccagcccctcggatgggtaaagaggccgtccccaaaaaagggaaggagatccccctagcttctctcagaggggaacaaggcccacgtggcgaacccgggccacggggccccccggggccacctggccttcctgggcacggcattccgggtatcaagggcaagccaggcccgcaggggtaccctggggttggcaaaccagggatgcccgggatgcccgggaaaccaggggcaatgggcatgcccggtgctaaaggagagattgggcagaagggggaaattggcccgatgggtatcccaggaccacaaggcccgcccgggccccatggtctaccaggcatcggaaagccaggcggacccgggcttccgggtcaacccggtccaaagggggatcgcgggccaaaagggttgccaggaccacaaggcctgagaggccctaagggggacaaaggatttggaatgcctggtgcgccaggagtgaagggcccgccaggcatgcatggccccccaggaccagtgggcctcccaggcgtaggcaaacctggggtgacaggttttccaggcccccagggccccctcggcaaaccaggggctcccggcgaacccggaccacagggcccgattggcgtgccaggtgtgcaggggcccccaggcattcccggcattggcaagcctggccaggacggaatccccggccaacctggatttcctggaggtaaaggagaacagggccttccgggtttgccgggaccaccaggtctccctgggatcgggaaaccaggctttcctggccccaagggcgataggggtatgggaggagtgccgggagctctcggaccaaggggcgagaaaggacctataggggctcctggtatcggcgggcctccaggagaacctggacttcctgggattcctggtcctatgggtcctccaggagccatcggatttcccggcccaaagggcgagggtgggatcgtgggaccccagggcccccccgggcccaagggagagccaggactgcaagggtttccaggtaagcctgggtttttgggcgaagtgggtcccccaggtatgagggggctccctggaccgattggccctaaaggagaagccggacaaaagggagtgcccgggctgcctggggttcccggccttctgggccccaaaggcgagccgggcataccaggggaccagggtttgcaggggcccccaggcatacctggaatcggtggcccttcaggccccatcggcccaccaggtatccctgggccaaagggagagcccgggctccctggaccacctgggtttcctggcattggcaaacctggagtagctgggttacacgggccaccaggcaagcccggcgctcttgggcctcaggggcaacccggactcccaggacccccaggaccaccgggaccccccggtccccctgctgtgatgcccccaactccccccccacagggcgaatatctcccagacatggggctgggaattgatggagttaaaccacctcatgcctacggggccaagaaggggaagaatgggggacctgcctacgagatgcctgcatttactgcagaactgactgcccccttccctccagtgggtgcacctgttaagttcaataaactgctttacaatgggcggcagaactataacccccagacagggatatttacatgcgaagtccctggcgtctattattttgcatatcacgttcactgcaagggaggtaacgtatgggtcgccctgttcaaaaacaatgagcccgtaatgtacacttatgatgagtataagaagggctttctcgaccaggcctcaggaagcgcagtgctgcttctcaggcctggggatcgggtttttttgcagatgcccagcgagcaggccgctgggctgtatgccggccagtacgtccactcaagcttcagcgggtatctcctgtacccaatgtag

SEQ ID NO: 203779 - DNA, 2235 bp, Artificial Sequence
  derived and/or modified sequence
atggctgtgctgcccggccctctgcagctgctgggggttttgctaacaatttccctgtcaagtatccgcctcattcaggccggcgcttactacggaattaaacctctccccccccagattccccctcagatgccccctcagatcccacagtatcagccactggggcagcaggtcccccatatgccccttgctaaggacgggctggctatgggcaaagagatgcctcatctacagtacggaaaagaatatcctcacttgccccagtacatgaaggagattcagcccgcaccaaggatgggtaaagaggctgtgcctaaaaaaggtaaggagatccctctcgccagtctaaggggtgagcagggtccacgaggggaacccggtccaaggggacccccaggaccgccagggttgccaggtcacggaatacccggcattaagggaaagcctggaccccagggatacccaggagtcgggaagccagggatgcccggcatgccaggaaagccgggcgccatgggtatgccaggtgcaaagggggaaatcgggcagaaaggcgaaatcggacctatgggaattcccgggccacagggacccccaggcccccacggcttgccaggcattggcaaaccaggcgggcctggcctccctgggcagcccggccccaaaggtgaccggggccccaaaggcctccccggtccacagggtctgagaggaccaaagggagacaagggatttggtatgccaggagcaccaggtgtcaagggcccccctggcatgcatggtccccctggcccagtaggactgcctggcgtagggaaaccaggcgttactggctttcccggccctcagggaccactcgggaagcctggagcccctggtgaacccggcccacaggggcctataggcgtacccggagtgcagggtcccccgggtattcccggcattggcaagcccggtcaggacggcatccccgggcagcctggcttcccaggtgggaagggagagcagggcctgcctgggctccccggacctccgggccttcctggcattggaaaacccggtttcccgggacctaaaggggatagaggaatgggtggtgtgccaggggctctgggtccgaggggtgaaaagggacccatcggagcaccaggcatcggtggacctccaggcgagccaggcttacccggcatcccaggccccatgggccctcctggggctattgggttcccaggacctaagggcgagggaggcattgtcggcccacagggtcccccaggacctaagggagagcctggcctgcagggttttccagggaagccaggattcctgggagaggttggccctcctggcatgcggggcctgcctggccccatcggccctaaaggtgaggccgggcaaaagggggtcccaggactgcccggggtgcctggattgctcggccccaagggcgaacccgggattccaggcgatcagggtcttcagggaccccccggtataccaggtatcggagggccatctggccctatcgggcctcctggcattccggggcccaagggagaaccaggattacccggccctcctggcttcccggggattggcaaaccaggtgtcgccgggctgcacggccctcccggcaagccaggggccctgggcccgcagggacagcctgggctgccagggcccccagggcctccgggcccccccggacctccagcggtgatgccacctactcccccaccccagggagagtacctgcctgacatgggcctgggtattgacggcgtgaagccaccgcacgcctacggggcgaagaagggaaagaacggaggcccagcttatgaaatgcccgcttttaccgctgagttaactgcacccttccccccagtgggtgcccccgtcaagttcaacaagctattgtacaatggccgacagaattataacccacagacggggatcttcacctgcgaggtcccaggagtttattacttcgcctatcacgtccattgcaagggggggaacgtatgggttgctttgttcaaaaataacgaaccagtgatgtatacctatgacgagtataagaaggggttcctggatcaggcttccgggagcgctgtcctcctgctgagacccggcgacagggtgttcttacagatgccttcagagcaggccgctgggctgtatgcaggacaatatgttcactcatctttcagtgggtatctgctttatcctatgtag

SEQ ID NO: 203780 - DNA, 345 bp, Artificial Sequence
  derived and/or modified sequence
atggcggtgttgcccgggcccttgcagctgctgggcgtgttgttgacaataagcctgagcagcattcgcctgatccaggccggagcttactatggcatcaagcccttgccccctcaaattccgcctcaaatgccacctcaaatccctcagtaccaaccactcggtcagcaggttccacatatgcctcttgctaaagacggactggccatggggaaggagatgccacatctgcagtacggcaaggaataccctcacctcccacagtacatgaaagaaattcaacctgctcccagaatggggaaagaggctgttccaaaaaagggcaaagagatccccttagcttag

SEQ ID NO: 203781 - DNA, 2235 bp, Artificial Sequence
  derived and/or modified sequence
atggctgtgctgcccggccccctgcagctgctgggcgtgctgctgaccatcagcctgagcagcatccgcctcatccaggccggggcctactacggcatcaagcccctgcccccccagatccccccccagatgccaccccagatcccccagtaccagcccctgggccagcaggtgccccacatgcccctggccaaggatggcctggccatgggcaaggagatgccccacctgcagtatggcaaggagtacccccacctgccccagtacatgaaggagatccagcctgcccccaggatgggcaaggaggccgtgcccaagaagggcaaggagatccccctggccagcctgcggggggagcagggccccagaggagagcccggcccccggggccccccaggccccccaggcctgcccggccacggcatccctggcatcaagggcaagccaggcccccagggctacccaggagtgggcaagccaggcatgcctggcatgcctgggaagccaggggccatgggcatgcctggggccaagggggagatcggccagaagggggagatcggccccatgggcatccctggcccccagggccccccaggcccccacggcctgcccggcatcggcaagccaggcggccctggcctgcccggccagcccggccccaagggggaccggggccccaagggcctgcccggcccccagggcctgcggggccccaagggggacaagggcttcggcatgcctggggcccctggggtgaagggccccccaggcatgcacggccccccaggccctgtgggcctgcccggggtgggcaagccaggagtgacaggcttccctggcccccagggccccctgggcaagccaggggcccctggagagcccggcccccagggccccatcggcgtgcctggggtgcagggccccccaggcatccctggcatcggcaagccaggccaggacggcatccctggccagcccggcttccctgggggcaaaggagagcagggcctgcccggcctgcccggccccccaggcctgcccggcatcggcaagccaggcttccctggccccaagggggaccggggcatgggcggcgtgcctggggccctgggccccagaggagagaagggccccatcggggcccctggcattggaggccccccaggagagcccggcctgcccggcatccctggccccatgggccccccaggggccatcggcttccctggccccaagggggagggcggcatcgtgggcccccagggccccccaggccccaagggggagcccggcctgcagggcttccctgggaagccaggcttcctgggggaggtgggccccccaggcatgaggggcctgcccggccccatcggccccaagggggaggccggccagaagggcgtgcccggcctgcccggggtgcccggcctgctgggccccaagggggagcccggcatccctggggaccagggcctgcagggccccccaggcatccctggcatcggcggccccagcggccccatcggccccccaggcatccctggccccaagggggagcccggcctgcccggccccccaggcttccctggcatcggcaagccaggagtggccggcctgcacggccccccaggcaagccaggggccctgggcccccagggccagcccggcctgcccggccccccaggccccccaggccccccaggccccccagctgtgatgccacccaccccaccaccccagggcgagtacctgcctgacatgggcctgggcattgatggagtgaagccccctcatgcctatggagccaagaagggcaagaatggaggccctgcctatgagatgcctgccttcaccgctgagctgacagcccccttcccccctgtgggcgcccctgtgaagttcaacaagctgctgtacaacggccggcagaactacaacccccagacaggcatcttcacctgtgaggtgcctggggtgtactactttgcctaccacgtgcactgcaagggcggcaatgtgtgggtggccctcttcaagaacaatgaacctgtgatgtacacctatgatgagtacaagaagggcttcctggaccaggccagcggcagcgctgtgctgctgctgcggcctggggacagagtcttcctgcagatgcccagcgagcaggccgccggcctgtatgccggccagtatgtgcacagcagcttcagcggctacctgctgtaccccatgtag

SEQ ID NO: 203782 - DNA, 345 bp, Artificial Sequence
  derived and/or modified sequence
atggctgtgctgcccggccccctgcagctgctgggcgtgctgctgaccatcagcctgagcagcatccgcctcatccaggccggggcctactacggcatcaagcccctgcccccccagatccccccccagatgccaccccagatcccccagtaccagcccctgggccagcaggtgccccacatgcccctggccaaggatggcctggccatgggcaaggagatgccccacctgcagtatggcaaggagtacccccacctgccccagtacatgaaggagatccagcctgcccccaggatgggcaaggaggccgtgcccaagaagggcaaggagatccccctggcctag

SEQ ID NO: 203783 - DNA, 2235 bp, Artificial Sequence
  derived and/or modified sequence
atggccgtgctgcccggccccctgcagctgctgggcgtgctgctgaccattagcctgtcgtcaatccgcctgattcaggccggcgcatactatggcatcaagcccctgcctcctcagatccctccccagatgccaccccaaataccacagtatcaacccctcgggcagcaagtaccacacatgcctttagctaaggacggtcttgctatggggaaggagatgccccatctccagtacggcaaagaatacccacacctgccccagtatatgaaggaaattcagcctgcccctagaatgggaaaggaggcggtgcccaagaaaggcaaggagatccccctcgcctccctccgtggggaacagggacctaggggtgaacccgggcctcgaggccctcccgggcccccaggattacccggacatgggatccccggcatcaagggcaaaccaggtccccagggataccccggcgtcgggaaacctgggatgccaggcatgccgggaaagcccggcgctatggggatgccgggagccaagggcgaaatcgggcagaaaggcgagattggccccatggggatccccggcccacagggccctccaggaccgcatggcctgccaggaattggcaagccgggcgggcctggcctccctggtcagccagggccaaagggagatcgtgggcctaagggcctgccaggccctcagggcttacgagggcctaaaggcgacaagggctttgggatgcctggagcccctggggtgaaaggacctcccggcatgcatggcccgcccggccctgtggggctgccgggtgttggcaaaccaggggtgaccggctttcctggcccgcagggcccactcgggaagcccggtgctcctggagagcctggcccccagggaccaatcggggtgcccggcgtgcagggcccacctggtatccccggaatcggaaaacccggccaagacgggatccctggacaaccaggtttcccgggcggcaaaggggaacaaggcctgcctggtctgcccggtccccccggactgcctggcattggcaaacctggattcccaggcccaaagggcgatcgcggcatggggggtgtaccgggggctttgggaccacgcggcgaaaagggccccatcggtgcaccaggtattggcggccccccaggggaaccaggcctgcccggaatcccgggacctatgggcccacctggcgcgattggcttcccaggccccaaaggtgagggagggattgtggggccccaggggcctcctgggccaaagggcgagcccggactgcagggcttcccaggcaaacctggcttcctaggcgaagtaggccctccaggcatgagagggctgccaggacctattggtccaaagggagaggccggccagaaaggtgtccccggactcccgggggtgcccggcctgctggggcccaagggagagcccgggattccgggagaccaaggtctccagggccctccaggcattcctgggatcggcggacctagtggccccatcggaccacccggtatacctgggcccaaaggagaacccggtctaccagggcctcccggctttccagggatcggcaaaccaggtgtggctggtttgcacgggccccccggcaagccaggcgccctggggccgcagggacaaccaggcttgccagggcccccaggcccccccgggcctcctgggccaccggctgtgatgccccccacaccacccccacagggcgagtacttacccgacatgggcctaggtatagacggagttaaacccccacatgcctatggcgccaaaaagggtaaaaatgggggcccagcctacgaaatgccagccttcactgccgagttaacagcgccattcccccccgtgggtgcccctgtgaaatttaataaactcttgtacaacggcaggcagaactataaccctcagaccggaatcttcacatgcgaagtaccaggtgtgtactactttgcttaccatgtacattgtaagggaggcaacgtctgggtcgcccttttcaaaaacaacgagcctgtgatgtacacctatgacgagtataaaaaaggattcttagaccaagcatccggcagcgccgtgctcctcctccgccccggggatagagtttttctgcagatgccgtcagagcaggccgccggcctttacgctggccagtacgtgcactcaagcttctccgggtatttgctatatccaatgtag

SEQ ID NO: 203784 - DNA, 2235 bp, Artificial Sequence
  derived and/or modified sequence
atggccgtgctgcccggccccctgcagctgctgggcgtgctgctgactattagcctttctagtatcagacttatacaagctggggcgtactacggtatcaaaccgctacccccacagattcctccccagatgcccccccaaattcctcagtaccagcctttggggcagcaagtgccccatatgccgctggccaaagatggcctcgctatgggaaaggagatgcctcacctccagtatggcaaagagtatcctcatctgccacagtacatgaaagagattcagcccgcacctaggatgggaaaagaggcggttccaaagaagggaaaggagattcctctcgcatctctgcgtggcgagcagggtcctcgcggcgaacctgggccccggggcccacccggaccacctggcctgcctggtcacggcatcccaggcattaaaggtaagcctggacctcaggggtaccccggggtgggcaagcccggcatgccgggtatgcccggaaaaccgggggcaatgggcatgcctggtgctaagggtgagatcgggcagaagggagagatcgggccaatggggatccctggtccccaggggccacctggacctcacggactgcccggaatcggcaagccaggcggcccaggcctcccgggccagccaggtccaaaaggtgaccggggacccaaagggctcccagggccccaaggactacgaggaccaaaaggggataagggcttcggaatgccgggagccccaggggtcaagggcccccctggcatgcacgggccaccaggccccgtggggctgcctggggtgggtaagccgggagtcaccgggttccctggtcctcagggaccccttggcaaaccaggcgcccctggcgaaccgggaccacagggcccaatcggtgtcccaggcgtgcagggcccccccggcattcccggcattgggaagccaggccaggatggcatccccggtcagcccggcttcccaggaggcaaaggagagcagggccttcctggccttcctggacccccaggactcccaggaatcggcaagccgggcttcccaggcccaaaaggtgatcgcggcatgggaggagtaccaggcgccctggggcctcgaggcgagaagggtccaatcggggccccgggcattggtggtccacccggcgaacctgggcttcccggaatccccggaccgatgggcccgcctggagctattgggttcccgggacctaagggtgagggtggaattgtgggcccacaggggcctcccggacctaagggggaacccggcctgcagggattccccgggaaaccaggattcctcggcgaggtgggccctccaggcatgaggggacttcccggtccgatcggcccgaagggtgaggctggacaaaagggcgtacctggactgcccggagtgccaggtctgctggggcctaagggagaaccgggcattcccggcgaccaaggcctccaggggccaccaggcatccccggcataggggggccctccgggcctatcggtcctcctggcatcccgggacctaagggtgaaccggggctaccaggccctcctggctttccaggcattgggaagcctggtgttgccgggctccatgggcctcccgggaagccgggcgcgctgggcccccaaggtcagcccggactgcccggaccccctggtccccccggaccccctggtccaccggcggtgatgcccccaacccctccgcctcagggtgagtacttaccagacatgggcttgggtattgatggcgtcaagccccctcacgcctatggcgcaaaaaagggtaagaatggtgggcctgcatacgagatgccagcgtttaccgccgaactaacagcgccctttccgcctgtcggagctcccgtcaagttcaacaagttgctctacaacggaagacaaaactataatcctcagacaggaatcttcacctgcgaagtccccggtgtgtattactttgcctatcacgtgcactgtaaaggcggaaacgtctgggtcgccttattcaagaacaatgagccggtgatgtatacatatgatgagtacaagaagggtttcctggaccaggcctcaggctccgcggtccttctgctccggcccggagatagggtgttcctgcaaatgccctccgaacaggcagctgggctttatgccggacagtatgttcactctagtttctctggctatctcctgtatccaatgtag

SEQ ID NO: 203785 - DNA, 345 bp, Artificial Sequence
  derived and/or modified sequence
atggccgtgctgcccggccccctgcagctgctgggcgtgctgctgaccattagtctgagttccattagacttatccaagcgggagcgtattatgggataaagcccctgcccccgcagatacccccccagatgcctccgcagattccccagtatcaacccctagggcaacaggttcctcatatgccactggcaaaagacggccttgccatgggcaaagagatgccccacctccagtacggcaaagagtatccacatctgccacagtacatgaaagagatacagcccgccccccgaatggggaaggaggctgtaccaaagaagggaaaagagatccctctcgcctag

SEQ ID NO: 203786 - DNA, 2235 bp, Artificial Sequence
  derived and/or modified sequence
atggcggtccttccaggtcccttgcaactgcttggcgtgctgttaaccatctcactcagcagtattcgcttgatccaggccggagcttattatggaataaaacccctaccaccgcagatccccccacagatgcctccacagatcccccagtaccagccattggggcagcaggttccacatatgcccttggctaaagacggactggccatgggaaaggaaatgccccacttacagtatggcaaggagtacccgcacctgccccagtacatgaaggaaattcaaccagctcccagaatgggaaaagaggccgttcctaagaaggggaaggagatacccctggcttctctcagaggcgagcagggaccgaggggagagcccggacctagagggcctcctggacccccaggtctccctggccatgggatccctggtattaaaggcaagccaggcccacagggttaccctggagtggggaaacctggcatgcccggaatgcccggaaagcctggagcgatgggcatgcctggagccaagggcgaaatcggccaaaagggagagataggaccaatgggtatccctggcccacagggtcccccaggaccgcacggtctaccaggtatcggcaagcccggtgggccaggcctgccgggacagcccggaccgaagggcgatagagggcctaaggggttgcccggaccacaaggcttaaggggcccaaaaggcgacaaaggatttggcatgccaggcgcaccgggagtcaaaggccctccaggtatgcacggccctcccggacctgtggggctcccaggtgtggggaagcctggggtgacaggctttccaggccctcagggccctttaggaaagcccggagccccaggcgaacccggtccacagggtccaatcggcgtgccaggcgttcaaggaccgcctggcatacctgggataggaaaaccagggcaggacggcattcctggccagccagggtttccgggagggaagggggaacaaggcctgcccggtctcccgggaccgcctgggttgccaggcatcggcaaacctggattcccaggccctaaaggcgaccgcggaatggggggtgtccctggtgcgttggggcctagaggcgagaaaggccctattggcgcacctggaatcggtggcccacccggtgagcccggtctaccaggcatcccaggcccaatgggaccccctggtgctatcggattccccggtcctaagggggaggggggaatcgtgggccctcaggggccaccgggtcccaagggcgagcctggtcttcagggctttccagggaagccaggtttcctgggggaggtgggcccacccggaatgcgtggactgccgggacctatcggccctaaaggggaggctggccagaaaggagtgccaggcctgcctggcgttccgggtttgctaggcccaaagggcgagccaggcatcccaggcgaccaggggctacaagggcctcccggaatccccggaatcgggggaccatctggcccaattggccctccaggaattcccggaccaaagggagaaccagggctccccggaccaccgggattccctggcattggcaaacctggagtcgcgggactgcatggaccgcctggtaagccaggtgcgctgggccctcaggggcagccaggcctgcctggccctccgggtcctcccggaccgcctggcccaccggcagtgatgccaccaacaccaccccctcagggggaatatttgccagatatgggcctcggcattgacggagttaagcctccccacgcatacggtgcaaagaaaggcaaaaatggcggtcctgcctacgagatgccagcatttacggcagaactcactgctccgttccctccagtcggcgctcccgtgaaatttaataaactgctgtacaatggacggcagaactataatcctcagaccgggattttcacttgtgaagttccaggtgtatattatttcgcttaccatgtgcactgcaagggagggaatgtgtgggtcgccctctttaagaacaacgagccggtgatgtatacatacgatgaatacaagaagggctttctcgaccaggccagtgggtccgctgtcctgctcctgcggccaggagatagggtgttcctgcaaatgccatcagaacaggctgcgggattatatgctgggcagtacgtccactcgagtttctccggataccttctctacccaatgtag

SEQ ID NO: 203787 - DNA, 2235 bp, Artificial Sequence
  derived and/or modified sequence
atggccgtgttgccagggcctctccaactgctaggggtcctgcttacaatttctctgagctctatcagacttattcaggccggagcttattatggcattaagccattgccgccacagatcccgcctcagatgcccccacagattccccagtatcagcctctggggcagcaagtgccacacatgcccttggctaaggacggtctggccatgggaaaggagatgccgcatcttcagtatggcaaagaatatcctcatctcccccagtatatgaaagagatccagccagcccctagaatggggaaagaagcggtgcccaaaaagggaaaagaaatccctttggcatcactgcgcggtgaacagggtcctcggggtgaaccaggcccaagaggtccccctgggccaccagggcttcctggtcatgggatccccggaataaaaggtaaacctggccctcagggatatcccggtgtagggaagcctggaatgcccggtatgccagggaaaccaggggcaatgggaatgcctggagccaaaggcgaaattggccagaagggggagattggcccaatgggcatccccggaccccagggtcctcctgggcctcacggcctgccgggaatcgggaaacctggaggtcccggacttcctgggcaacctggccctaaaggagatagaggtccgaagggactaccagggccacaaggcttgcgaggtccaaagggggacaaagggtttgggatgccgggagcccctggcgtcaagggccctcctggtatgcacggacccccagggcctgtggggctccccggagttggtaaacccggagtcacgggctttcctggacctcaagggcctttgggcaaaccaggggcacctggcgaacctggccctcagggaccaataggcgtgcctggggttcaaggacctcccggaatccctggcatcggaaaacctgggcaggacgggattcctggccagccgggtttccctggaggaaagggggaacagggattaccaggactgcccggacctccgggactcccgggaatcggaaaaccaggttttcccggacccaagggtgacagaggaatgggaggcgtgccgggagcactgggcccacgaggagagaaggggccaatcggggcaccgggaatcggaggcccacctggcgagccgggacttcccggtatcccgggacccatggggcctcctggcgcaatcggatttcccggaccaaaaggcgagggagggattgtgggtccccaagggcctcccggtcccaagggagagccaggcttacaaggcttccccggtaagcccggattcttgggcgaggtaggcccacctggaatgagaggtcttcccggtcctattggacctaaaggggaggccggtcagaaaggtgtgcctggattacctggagtgcctggactcttagggccaaaaggggagcccggaatcccgggtgaccagggccttcagggcccacctgggatccctggaatcggcggtccgagtggcccaataggcccacccggaatccctgggccaaaaggtgaaccgggtctgccaggccctcctggatttccaggcatcggcaagccgggagtggctggcctccatggaccccctggcaagcccggtgccctcggcccacagggacagcccggactcccagggcctcctggaccaccgggacccccaggccctcctgccgtcatgcctcccacccccccacctcagggcgaatacctgccagatatggggttggggatagacggcgtgaagccacctcatgcttacggggctaaaaagggaaagaacggagggccagcgtatgagatgccagccttcaccgctgaattgaccgccccattccctccagttggagccccagtgaagtttaacaaactcttgtacaatgggagacagaactataacccccagacaggtatcttcacttgcgaggtgcctggagtttattatttcgcttaccatgtacattgtaagggaggaaacgtgtgggtcgctctgttcaaaaataacgaacctgtgatgtatacttacgacgaatacaagaaggggttcctcgaccaagcatcgggcagtgccgtgctgctgttacggcctggcgaccgggtattcctgcaaatgccctccgaacaagcagccggactctatgccggacagtatgttcactcgtccttttctggatatctcttgtaccccatgtag

SEQ ID NO: 203788 - DNA, 345 bp, Artificial Sequence
  derived and/or modified sequence
atggccgtgctgccagggccactccagctgctcggcgttctcctaacaatctccctgagtagcatcagacttattcaggctggagcctactacggtattaagcccctaccaccccagatccccccacagatgcctccccaaatcccccagtaccaacctctggggcagcaggtcccccatatgcctctggctaaagatgggttggccatgggtaaggaaatgccccaccttcagtatggaaaggaatatccacacctgccccaatacatgaaggagattcagccagcccctagaatggggaaagaggccgtacctaagaagggcaaggagataccactcgcctag

SEQ ID NO: 203789 - DNA, 5705 bp, Artificial Sequence
  derived and/or modified sequence
agagaagagtgtccagctcctccagaggctgcccgcccgccgctccttccctgcccacctactatgaggagcagctcctcccacctgcccataaaagccaagtgcatgttaccagcagcggatcacagcccttccccgatcctctccgtgggagccagcgagcctctctccctgatcttacgtgctcaagggagctcacacgttcaccaactcacccttgaagtcatctcaagaacaaaagacaactgaaagaagctgttgtgaaggcagagcagcatctgctgaagagacagaaaccagccccagaggtgtcacaggaaggcaccagcaaggacattggtctttgatttgattcagcagtcctgtcaagtataaatgtgatggctgtgctgcctggccctctgcagctgctgggagtgctgcttaccatttccctgagttccatcaggctcattcaggctggtgcctactatgggatcaagccgctgccacctcaaattcctcctcagatgccaccacaaattccacaataccagcccctgggtcagcaagtacctcacatgcctttggccaaagatggccttgccatgggcaaggagatgccccacttgcagtatggcaaagagtatccacacctaccccaatatatgaaggaaattcaaccggcgccaagaatgggcaaggaagccgtacccaagaaaggcaaagaaataccattagccagtttacgaggggaacaaggtccccgtggagagcctggcccaagaggaccacctgggccccctggtttgccaggtcatgggatacctggaattaaaggaaaaccagggccacagggatatccaggagttggaaagccaggtatgcctggaatgccagggaagccaggagccatgggcatgcctggggcaaaaggagaaattggacagaaaggggaaattgggcctatggggatcccaggaccacaaggacctccagggcctcatggacttcctggcattgggaagccaggtgggccagggttaccagggcaaccaggaccaaagggtgatcgaggacccaaaggactaccaggacctcaaggccttcggggtcctaaaggagacaagggcttcgggatgccaggtgcgccaggtgtaaaggggcctccagggatgcacggccctcccggccctgttggactgccaggagtgggcaaaccaggagtgacaggcttccctgggccccagggccccctgggaaagccaggggctccaggagaacctgggccacaaggccctattggggtaccgggggttcaaggacctcctgggatacccggaattggaaagccaggccaggatgggatcccaggccagccaggatttccaggtggcaaaggggagcaaggactgccagggctaccaggacccccaggccttccagggattgggaaaccaggcttcccaggacccaaaggtgaccggggcatgggaggtgttcctggggctcttggaccaagaggggagaaaggaccaataggtgccccaggaatagggggtcctccaggagagccaggcctgcctggaatcccaggtcctatgggccctccaggtgctattggttttcctggacccaaaggagaaggtgggattgtagggccacaggggccaccaggtcccaagggtgagccagggcttcaaggcttcccaggaaagccaggtttccttggtgaagtagggcctcctggcatgaggggtttgccaggtcccatagggcccaagggggaagctgggcaaaaaggtgtaccaggactccctggtgttccagggcttctcggacctaagggagagccaggaatcccaggggatcagggtttacagggccccccaggtatcccagggattgggggccctagtggccccattggaccacctgggattccaggccccaaaggggagccgggcctcccagggccccctgggttccctggtatagggaaacccggagtggcaggacttcatggccccccagggaagcctggtgcccttggtcctcaaggccagcctggccttccaggacccccaggccctccaggacctccaggacccccagctgtgatgccccctacaccaccaccccagggagagtatctgccagatatggggctgggaattgatggcgtgaaacccccccatgcctacggggctaagaaaggcaagaatggagggccagcctatgagatgcctgcatttaccgccgagctaaccgcacctttcccaccggtgggggccccagtgaagtttaacaaactgctgtataacggcagacagaactacaacccgcagacaggcatcttcacctgtgaggtccctggtgtctactactttgcataccacgttcactgcaaggggggcaacgtgtgggttgctctattcaagaacaacgagcccgtgatgtacacgtacgacgagtacaaaaagggcttcctggaccaggcatctgggagtgcagtgctgctgctcaggcccggagaccgggtgttcctccagatgccctcagaacaggctgcaggactgtatgccgggcagtatgtccactcctccttttcaggatatttattgtatcccatgtaaaaacaaaaaaacaaaaaacaaagaaaagaaagagattttatagaagaaaatgacacaccaaaaaatccaaatgaaaaacataattgcttcaaaacacttacacagttggaaagttatatgtaagtgaaaatttggaccattgtgtacaaataaaaactaagatgcatgtttaatactccacacagcagcctgtaattgcgaatgatgggatagagttatgtatcaagtactgacacttggttgtacccactggaatcatattagctgttttatgttatatgcttccacagtaacctgcttattcagatcagtcaaaatatatcagtatgaaagatcatagctaatgaaaggcactcactcatattgtttactttaaaatatttataaatatgccttaaagaaatacaaatgataacaattacataccgtatttacttgcttaatttcctctgtatttgtgtagatactttgacatggaatatatggtggggagacccgtagtgttaccgccccagtgggagggggccctggggaccctggtaatgctttagtcaaagggatatctctcttgtatcagaggctgtgtcttttagtaacaggagtcctcgtcagaattgcgtgtctgttgtctctaaaagaatgggtgaaccaatcggcctttgtgaatttattcagtgccttctctgtaccaagcactgggtaaggcacttttgtggagcattagacagtaaccctcaaggagctagagaaccggatgggagacatgagcagtaattaactcacttgttccccagagtttctatttgttttgattttctttttctgtgacttattttcctattttctttcctccatgtaattttcactatggcccaactaatataaacacctggaaattacaaggaaaaaaaattcttcctctaataactttccaaatttgtggaatatttatttgtaatagcagttatcagttatgcttatatagcattaaaaattctcctcctttgactacacacacaaccacagtgtggttctaatcatggagatatcagtaatttttagtaactgaattttgaggacatttctctgtttagcatgtatgcaaactgatatgtaatctgaggttccaaagtcaatttttttcttttttttttgagatggagtcttactctgtcacccaggctggagtgcagtagcacgatcttggcttactgcaacctctacctcctaggttcaagcaattgtcctgtctcagcctcccgagtactgggactactgtcttgcgccaccatgcctggctaatttttgtatatttagtaaagatgggttttcgccatgttggccaggctggtctcaaactcctggcctcaagtgatgcacctgcctcagccttccaaagtgctgggattacaggcatgagccaccgtgcccggccaaagtcagctttcaaaatccaagccataattggtgaggggggagtttcagaattacatagaaaaattaatatttgaaaaaataattctgaaatttcgaatttaaaaacagatgtgctgcttctgggtgtaggtagtaaaagtataggaaaagaactgtttccttagaagcggactgtggaagggctatgtagaatgtcaaagggcaacaagagcctgtgtttttaatgtcatcctgtactcggcacaaatcaaaggccaatacaagtctgaaaagcagaaataaatatttttccaggtttttgcttgggcacatactaactgctttgggcattctaatctggtctccaaacaccaaagacccatttcgagcctgctattagcctgctgctgactctatcacttggagcaataatgtggggttatggtggtggaatcttgtatatttttgtcaaaaataaaaccatgagttaaggggatagatatagatggaaaaatacacaaataaatacggtatgaaaacacatggaaatgtgtctttgtcaaatctgaatcattattaccatcacaaaaattcttctcttggccaatatctcatttccctatatagtatacaagcaccatttcttctcaatttttaagaagagaaattagtccattaccacaggggttcttgtcactactaattatacaacaatcttttcccaacaaaaagatgtcctccacaacctttgttttcaaagcagacagcatctatgtggccaaatatactttgggttgttcttgaggatactggttttgggctgatgactatggtgggcagcatggatccattgggctccttctgctaaacagccacattgaaatggtttaaaagcaagtcagatcaggtgatttgtaaaattgtatttatctgtacatgtatgggcttttaattcccaccaagaaagagagaaattatctttttagttaaaaccaaatttcacttttcaaaatatcttccaacttatttattggttgtcactcaattgcctatatatatatatatatgtgtgtgtgtgtgtgtgtgcgcgtgagcgcacgtgtgtgtatgcgtgcgcatgtgtgtgtatgtgtattatcagacataggtttctaacttttagatagaagaggagcaacatctatgccaaatactgtgcattctacaatggtgctaatctcagacctaaatgatactccatttaatttaaaaaagagttttaaataattatctatgtgcctgtatttcccttttgagtgctgcacaacatgttaacatattagtgtaaaagcagatgaaacaaccacgtgttctaaagtctagggattgtgctataatccctatttagttcaaaattaaccagaattcttccatgtgaaatggaccaaactcatattattgttatgtaaatacagagttttaatgcagtatgacatcccacaggggaaaagaatgtctgtagtgggtgactgttatcaaatattttatagaatacaatgaacggtgaacagactggtaacttgtttgagttcccatgacagatttgagacttgtcaatagcaaatcatttttgtatttaaatttttgtactgatttgaaaaacatcattaaatatctttaaaagtatgtttctca

SEQ ID NO: 203790 - DNA, 2596 bp, Artificial Sequence
  derived and/or modified sequence
ccgatcctctccgtgggagccagcgagcctctctccctgatcttacgtgctcaagaagctgttgtgaaggcagagcagcatctgctgaagagacagaaaccagccccagaggtgtcacaggaaggcaccagcaaggacattggtctttgatttgattcagcagtcctgtcaagtataaatgtgatggctgtgctgcctggccctctgcagctgctgggagtgctgcttaccatttccctgagttccatcaggctcattcaggctggtgcctactatgggatcaagccgctgccacctcaaattcctcctcagatgccaccacaaattccacaataccagcccctgggtcagcaagtacctcacatgcctttggccaaagatggccttgccatgggcaaggagatgccccacttgcagtatggcaaagagtatccacacctaccccaatatatgaaggaaattcaaccggcgccaagaatgggcaaggaagccgtacccaagaaaggcaaagaaataccattagccagtttacgaggggaacaaggtccccgtggagagcctggcccaagaggaccacctgggccccctggtttgccaggtcatgggatacctggaattaaaggaaaaccagggccacagggatatccaggagttggaaagccaggtatgcctggaatgccagggaagccaggagccatgggcatgcctggggcaaaaggagaaattggacagaaaggggaaattgggcctatggggatcccaggaccacaaggacctccagggcctcatggacttcctggcattgggaagccaggtgggccagggttaccagggcaaccaggaccaaagggtgatcgaggacccaaaggactaccaggacctcaaggccttcggggtcctaaaggagacaagggcttcgggatgccaggtgcgccaggtgtaaaggggcctccagggatgcacggccctcccggccctgttggactgccaggagtgggcaaaccaggagtgacaggcttccctgggccccagggccccctgggaaagccaggggctccaggagaacctgggccacaaggccctattggggtaccgggggttcaaggacctcctgggatacccggaattggaaagccaggccaggatgggatcccaggccagccaggatttccaggtggcaaaggggagcaaggactgccagggctaccaggacccccaggccttccagggattgggaaaccaggcttcccaggacccaaaggtgaccggggcatgggaggtgttcctggggctcttggaccaagaggggagaaaggaccaataggtgccccaggaatagggggtcctccaggagagccaggcctgcctggaatcccaggtcctatgggccctccaggtgctattggttttcctggacccaaaggagaaggtgggattgtagggccacaggggccaccaggtcccaagggtgagccagggcttcaaggcttcccaggaaagccaggtttccttggtgaagtagggcctcctggcatgaggggtttgccaggtcccatagggcccaagggggaagctgggcaaaaaggtgtaccaggactccctggtgttccagggcttctcggacctaagggagagccaggaatcccaggggatcagggtttacagggccccccaggtatcccagggattgggggccctagtggccccattggaccacctgggattccaggccccaaaggggagccgggcctcccagggccccctgggttccctggtatagggaaacccggagtggcaggacttcatggccccccagggaagcctggtgcccttggtcctcaaggccagcctggccttccaggacccccaggccctccaggacctccaggacccccagctgtgatgccccctacaccaccaccccagggagagtatctgccagatatggggctgggaattgatggcgtgaaacccccccatgcctacggggctaagaaaggcaagaatggagggccagcctatgagatgcctgcatttaccgccgagctaaccgcacctttcccaccggtgggggccccagtgaagtttaacaaactgctgtataacggcagacagaactacaacccgcagacaggcatcttcacctgtgaggtccctggtgtctactactttgcataccacgttcactgcaaggggggcaacgtgtgggttgctctattcaagaacaacgagcccgtgatgtacacgtacgacgagtacaaaaagggcttcctggaccaggcatctgggagtgcagtgctgctgctcaggcccggagaccgggtgttcctccagatgccctcagaacaggctgcaggactgtatgccgggcagtatgtccactcctccttttcaggatatttattgtatcccatgtaaaaacaaaaaaacaaaaaacaaagaaaagaaagagattttatagaagaaaatgacacaccaaaaaatccaaatgaaaaacataattgcttcaaaacacttacacagttggaaagttatatgtaagtgaaaatttggaccattgtgtacaaataaaaactaagatgcatgtttaatactc

SEQ ID NO: 203791 - DNA, 659 bp, Artificial Sequence
  derived and/or modified sequence
agagaagagtgtccagctcctccagaggctgcccgcccgccgctccttccctgcccacctactatgaggagcagctcctcccacctgcccataaaagccaagtgcatgttaccagcagcggatcacagcccttccccgatcctctccgtgggagccagcgagcctctctccctgatcttacgtgctcaagaagctgttgtgaaggcagagcagcatctgctgaagagacagaaaccagccccagaggtgtcacaggaaggcaccagcaaggacattggtctttgatttgattcagcagtcctgtcaagtataaatgtgatggctgtgctgcctggccctctgcagctgctgggagtgctgcttaccatttccctgagttccatcaggctcattcaggctggtgcctactatgggatcaagccgctgccacctcaaattcctcctcagatgccaccacaaattccacaataccagcccctgggtcagcaagtacctcacatgcctttggccaaagatggccttgccatgggcaaggagatgccccacttgcagtatggcaaagagtatccacacctaccccaatatatgaaggaaattcaaccggcgccaagaatgggcaaggaagccgtacccaagaaaggcaaagaaataccattagc

SEQ ID NO: 203792 - DNA, 2235 bp, Artificial Sequence
  derived and/or modified sequence
atggccgtgctgcccggccccctgcagctgctgggcgtgctgctgaccatcagcctgagcagcatcagactgatccaggccggcgcctactacggcatcaagcccctgcccccccagatccccccccagatgcccccccagatcccccagtaccagcccctgggccagcaggtgccccacatgcccctggccaaggacggcctggccatgggcaaggagatgccccacctgcagtacggcaaggagtacccccacctgccccagtacatgaaggagatccagcccgcccccagaatgggcaaggaggccgtgcccaagaagggcaaggagatccccctggccagcctgagaggcgagcagggccccagaggcgagcccggccccagaggcccccccggcccccccggcctgcccggccacggcatccccggcatcaagggcaagcccggcccccagggctaccccggcgtgggcaagcccggcatgcccggcatgcccggcaagcccggcgccatgggcatgcccggcgccaagggcgagatcggccagaagggcgagatcggccccatgggcatccccggcccccagggcccccccggcccccacggcctgcccggcatcggcaagcccggcggccccggcctgcccggccagcccggccccaagggcgacagaggccccaagggcctgcccggcccccagggcctgagaggccccaagggcgacaagggcttcggcatgcccggcgcccccggcgtgaagggcccccccggcatgcacggcccccccggccccgtgggcctgcccggcgtgggcaagcccggcgtgaccggcttccccggcccccagggccccctgggcaagcccggcgcccccggcgagcccggcccccagggccccatcggcgtgcccggcgtgcagggcccccccggcatccccggcatcggcaagcccggccaggacggcatccccggccagcccggcttccccggcggcaagggcgagcagggcctgcccggcctgcccggcccccccggcctgcccggcatcggcaagcccggcttccccggccccaagggcgacagaggcatgggcggcgtgcccggcgccctgggccccagaggcgagaagggccccatcggcgcccccggcatcggcggcccccccggcgagcccggcctgcccggcatccccggccccatgggcccccccggcgccatcggcttccccggccccaagggcgagggcggcatcgtgggcccccagggcccccccggccccaagggcgagcccggcctgcagggcttccccggcaagcccggcttcctgggcgaggtgggcccccccggcatgagaggcctgcccggccccatcggccccaagggcgaggccggccagaagggcgtgcccggcctgcccggcgtgcccggcctgctgggccccaagggcgagcccggcatccccggcgaccagggcctgcagggcccccccggcatccccggcatcggcggccccagcggccccatcggcccccccggcatccccggccccaagggcgagcccggcctgcccggcccccccggcttccccggcatcggcaagcccggcgtggccggcctgcacggcccccccggcaagcccggcgccctgggcccccagggccagcccggcctgcccggcccccccggcccccccggcccccccggcccccccgccgtgatgccccccaccccccccccccagggcgagtacctgcccgacatgggcctgggcatcgacggcgtgaagcccccccacgcctacggcgccaagaagggcaagaacggcggccccgcctacgagatgcccgccttcaccgccgagctgaccgcccccttcccccccgtgggcgcccccgtgaagttcaacaagctgctgtacaacggcagacagaactacaacccccagaccggcatcttcacctgcgaggtgcccggcgtgtactacttcgcctaccacgtgcactgcaagggcggcaacgtgtgggtggccctgttcaagaacaacgagcccgtgatgtacacctacgacgagtacaagaagggcttcctggaccaggccagcggcagcgccgtgctgctgctgagacccggcgacagagtgttcctgcagatgcccagcgagcaggccgccggcctgtacgccggccagtacgtgcacagcagcttcagcggctacctgctgtaccccatgtag

SEQ ID NO: 203793 - DNA, 345 bp, Artificial Sequence
  derived and/or modified sequence
atggccgtgctgcccggccccctgcagctgctgggcgtgctgctgaccatcagcctgagcagcatcagactgatccaggccggcgcctactacggcatcaagcccctgcccccccagatccccccccagatgcccccccagatcccccagtaccagcccctgggccagcaggtgccccacatgcccctggccaaggacggcctggccatgggcaaggagatgccccacctgcagtacggcaaggagtacccccacctgccccagtacatgaaggagatccagcccgcccccagaatgggcaaggaggccgtgcccaagaagggcaaggagatccccctggcctag

SEQ ID NO: 203794 - protein, 329 aa, Artificial Sequence
  derived and/or modified sequence
MSGVVPTAPEQPAGEMENQTKPPDPRPDAPPEYNSHFLPGPPGTAVPPPTGYPGGLPMGYYSPQQPSTFPLYQPVGGIHPVRYQPGKYPMPNQSVPITWMPGPTPMANCPPGLEYLVQLDNIHVLQHFEPLEMMTCFETNNRYDIKNNSDQMVYIVTEDTDDFTRNAYRTLRPFVLRVTDCMGREIMTMQRPFRCTCCCFCCPSARQELEVQCPPGVTIGFVAEHWNLCRAVYSIQNEKKENVMRVRGPCSTYGCGSDSVFEVKSLDGISNIGSIIRKWNGLLSAMADADHFDIHFPLDLDVKMKAMIFGACFLIDFMYFERSPPQRSR

SEQ ID NO: 203795 - protein, 262 aa, Artificial Sequence
  derived and/or modified sequence
MSGVVPTAPEQPAGEMENQTKPPDPRPDAPPEYNSHFLPGPPGTAVPPPTGYPGGLPMGYYSPQQPSTFPLYQPVGGIHPVRYQPGKYPMPNQSVPITWMPGPTPMANCPPGLEYLVQLDNIHVLQHFEPLEMMTCFETNNRYDIKNNSDQMVYIVTEDTDDFTRNAYRTLRPFVLRVTDCMGREIMTMQRPFRCTCCCFCCPSARQELEVQCPPGVTIGFVAEHWNLCRAVYSIQNEKKENVMRVRGPCSTYGCGSDSVFE

SEQ ID NO: 203796 - protein, 208 aa, Artificial Sequence
  derived and/or modified sequence
MSGVVPTAPEQPAGEMENQTKPPDPRPDAPPEYNSHFLPGPPGTAVPPPTGYPGGLPMGYYSPQQPSTFPLYQPVGGIHPVRYQPGKYPMPNQSVPITWMPGPTPMANCPPGLEYLVQLDNIHVLQHFEPLEMMTCFETNNRYDIKNNSDQMVYIVTEDTDDFTRNAYRTLRPFVLRVTDCMGREIMTMQRPFRCTCCCFCCPSARQE

SEQ ID NO: 203797 - protein, 142 aa, Artificial Sequence
  derived and/or modified sequence
MSGVVPTAPEQPAGEMENQTKPPDPRPDAPPEYNSHFLPGPPGTAVPPPTGYPGGLPMGYYSPQQPSTFPLYQPVGGIHPVRYQPGKYPMPNQSVPITWMPGPTPMANCPPGLEYLVQLDNIHVLQHFEPLEMMTCFETNNR

SEQ ID NO: 203798 - protein, 98 aa, Artificial Sequence
  derived and/or modified sequence
MSGVVPTAPEQPAGEMENQTKPPDPRPDAPPEYNSHFLPGPPGTAVPPPTGYPGGLPMGYYSPQQPSTFPLYQPVGGIHPVRYQPGKYPMPNQSVPIT

SEQ ID NO: 203799 - DNA, 990 bp, Artificial Sequence
  derived and/or modified sequence
atgtcgggggtggtgcctaccgcccccgaacagccagcaggcgaaatggaaaaccagactaagccacctgatccccgacctgatgccccgcccgagtacaatagccacttcctcccgggaccacctgggacagcagtgcctccgcctactggctacccaggtgggcttccaatgggctactactccccccagcagccctcgaccttcccactataccagcctgtcggggggatccatccggtaagataccaacctgggaaataccctatgccgaaccagtctgtgcctatcacctggatgcctggtcccacacctatggccaactgtccccccggactggagtaccttgtccagctcgataatatccatgtcctccaacattttgagcccttagagatgatgacatgtttcgagacaaacaataggtatgatatcaagaataattcggatcagatggtgtatattgtgactgaggacacggacgattttacccggaatgcttaccggacacttaggccttttgtactgcgagtcaccgactgtatgggccgcgagattatgactatgcaacgcccctttcgctgcacatgctgttgcttttgctgcccgagcgcacggcaggagctagaagtccaatgtcccccaggcgtgacaataggatttgtagctgaacactggaatctgtgtcgtgccgtgtactcaatacagaatgaaaagaaggagaatgtgatgagagtaagagggccctgctctacctatgggtgcgggtcagacagcgtgttcgaggtcaagtccttggacggcatttcaaatatcgggtccattatccgaaagtggaatggtctgctaagtgctatggccgacgcagaccactttgacatccacttccccctcgaccttgatgtgaagatgaaagcaatgatctttggggcttgcttcctgatagactttatgtatttcgaaaggagcccgccccagagaagtcgctag

SEQ ID NO: 203800 - DNA, 990 bp, Artificial Sequence
  derived and/or modified sequence
atgtcaggggtggtccccaccgccccagagcagcccgcgggtgaaatggaaaaccagacaaagcctcctgacccaaggccggatgcgccccccgagtataattcccatttcctgcccggcccgcctggaacagctgtgccgcctccaaccggctaccctggcggcctgcccatgggttactattcaccacagcagccaagcacctttcctctttatcagcccgtgggtgggatccaccccgttcgatatcagccgggcaaataccccatgccaaatcagtccgtgcccatcacctggatgcccggccctacacccatggcaaactgccccccgggactggaataccttgtgcaacttgacaatatacacgttttacagcatttcgaaccactggagatgatgacctgtttcgaaactaataaccgctatgacatcaagaataattctgatcagatggtctatattgttacggaagacacggacgacttcacccgcaacgcctataggactttgagacctttcgtattgcgagtgaccgattgcatgggtagagaaattatgacgatgcaacgcccctttaggtgcacctgctgttgcttctgttgcccctccgcccggcaagaactcgaggtccagtgtccaccaggagtaaccattggcttcgtggccgagcattggaacttatgcagggccgtgtattccatccagaatgaaaagaaagaaaatgttatgagagtgagaggtccatgcagtacgtatggctgtggttcagatagtgtctttgaagtgaagagcttggacgggatctcaaacattgggtcaattattcgcaagtggaacggattgctgtcggctatggccgatgccgaccactttgacattcattttcccttagacctggatgtgaagatgaaggctatgatttttggtgcctgcttccttatcgatttcatgtacttcgagcgctcccctccccagcggtcgaggtag

SEQ ID NO: 203801 - DNA, 789 bp, Artificial Sequence
  derived and/or modified sequence
atgtctggcgttgttcctacagcgcccgaacagccagccggggaaatggagaaccagacaaaaccaccagatcctaggcccgacgctcctcccgagtataattcacacttcctgcccggtcccccaggaaccgccgtcccaccacccacgggatatcctggcggcctgccaatgggctactactccccccagcagccatctacttttccactctaccagccggtgggcgggatccaccctgtgaggtatcagccgggcaagtaccccatgccaaatcagagcgtgccgattacatggatgcccgggcccaccccaatggccaattgtccacccggcctcgaatatttggtccaactggataatattcatgtcctacagcatttcgaacccctagagatgatgacatgtttcgagaccaataacaggtacgacattaaaaataactcagatcaaatggtttacattgtgaccgaagacaccgacgacttcactcgaaatgcttatagaacattaaggcccttcgtgctgcgtgtgaccgactgcatgggtagggagattatgactatgcagcggcctttccggtgcacatgttgctgcttttgctgcccctccgcccgtcaggagctggaggtgcagtgtcccccaggggtgactataggcttcgtcgctgaacactggaatctgtgtagggcagtgtattccattcagaatgaaaagaaagagaacgtcatgcgggtaagggggccctgttctacctacggctgtgggagcgactcagtatttgaatag

SEQ ID NO: 203802 - DNA, 627 bp, Artificial Sequence
  derived and/or modified sequence
atgagcggcgttgtcccaacagccccagaacaaccagccggggagatggagaatcagactaaaccccctgatcctaggccagatgctcctcctgagtacaacagccatttcctgccaggccccccaggcacggccgtgcctccccctacaggctaccctggaggacttcccatggggtattactcgccccagcagccctcaacctttcctttgtatcaacccgtggggggcattcatcccgtccgataccaacccggcaaataccccatgcccaatcagtcagtgcccatcacatggatgcccgggcccaccccaatggctaactgcccacctggcttagaatacctggtgcagctcgataacatccatgttctccagcacttcgaaccactcgagatgatgacatgttttgaaactaataatagatatgatatcaaaaacaatagtgatcaaatggtgtacattgtcacggaggataccgatgacttcacacggaatgcttatagaaccttgcgtcccttcgtactgcgggtgacagattgcatgggccgagagatcatgaccatgcaacgcccttttcggtgtacctgttgctgtttctgctgtccaagtgcgcggcaggagtag

SEQ ID NO: 203803 - DNA, 429 bp, Artificial Sequence
  derived and/or modified sequence
atgagtggggtagttcccacagcacccgagcagcccgctggggagatggaaaaccagacgaagcccccagaccccagacctgacgcgcctccagagtataatagccacttcctgcccgggccgcctggcacggccgtgccccctcctacagggtaccctggtggcctgcctatgggctattattccccacagcagccatctacattcccattataccaaccggtgggaggaatccaccctgtgcgttatcagcctggaaagtaccctatgcctaatcagagcgtccccatcacttggatgccgggaccaaccccaatggccaactgccctccaggactggagtacttagtgcagctagataatatccacgtgctccaacatttcgagccattggaaatgatgacttgcttcgaaactaataatagatag

SEQ ID NO: 203804 - DNA, 990 bp, Artificial Sequence
  derived and/or modified sequence
atgagcggcgtggtgcctactgctcccgaacagcccgctggagaaatggagaatcagacaaaaccccccgacccgcggcccgatgcgccacccgagtacaacagtcacttccttcccggccctccaggcaccgcagttcctccgcctacaggataccctgggggacttccaatgggctattatagccctcaacagccgagtacttttccgctgtaccaacccgtcggcggaattcatccggtcagataccaaccggggaaatacccaatgccaaaccagtccgtgcccataacatggatgccaggaccaacgcctatggctaattgcccccctggactagagtacctcgtacaactagataatattcacgtgctgcagcactttgagcccctcgagatgatgacgtgcttcgagaccaataatcgctatgacatcaagaacaattctgaccagatggtttatatcgtgaccgaggacacagacgactttacccgcaacgcttatagaaccttgagacccttcgttctcagagtcacagactgtatggggagggagataatgacaatgcagcgcccgtttaggtgtacatgttgctgcttctgctgtccttctgccagacaggaattggaggtgcagtgtccccccggcgtaactattgggttcgtcgccgagcactggaatctatgccgcgcagtctacagcatccaaaatgagaagaaagagaacgtaatgagagttagaggcccttgctccacctatggatgtgggagtgacagtgtatttgaagtgaaatctctcgatggcatctccaacatagggtccatcattcggaagtggaatggccttctaagtgccatggccgatgcagatcatttcgatatacacttccctctggacctggatgtaaaaatgaaagctatgattttcggtgcttgctttctgatcgactttatgtactttgagcgttcgcctccccagcgaagcagatag

SEQ ID NO: 203805 - DNA, 990 bp, Artificial Sequence
  derived and/or modified sequence
atgtctggagtggtgcccacagcccctgagcagcctgctggggagatggagaaccagaccaagcccccagaccccaggccagatgcccctcctgagtacaacagccacttcctgcccggccccccaggcacagctgtgcccccacccaccggctacccaggcggcctgcccatgggctactacagcccccagcagcccagcaccttccccctgtaccagcctgtgggcggcatccaccctgtgcgctaccagcccgggaagtaccccatgcccaaccagagcgtgcccatcacctggatgcctggccccacccccatggccaactgccccccaggcctggagtacctggtgcagctggacaacatccacgtgctgcagcactttgagcccctggagatgatgacctgctttgagaccaacaacagatatgacatcaagaacaacagcgaccagatggtgtacatcgtgacagaggacacagatgacttcaccagaaatgcctaccgcaccctgcggccctttgtgctgcgggtgacagactgcatgggccgggagatcatgaccatgcagaggcccttccgctgcacctgctgctgcttctgctgccccagcgcccggcaggagctggaggtgcagtgccccccaggagtgaccatcggctttgtggccgagcactggaacctgtgcagagctgtgtacagcatccagaatgagaagaaggaaaatgtgatgagggtgcggggcccctgcagcacctacggctgcggcagtgacagcgtgtttgaggtgaagagcctggatggcatcagcaacatcggcagcatcatcaggaagtggaatggcctgctgagcgccatggctgatgctgaccactttgacatccacttccccctggacctggatgtgaagatgaaggccatgatctttggagcctgcttcctgattgacttcatgtactttgagaggagccccccccagaggagcaggtag

SEQ ID NO: 203806 - DNA, 789 bp, Artificial Sequence
  derived and/or modified sequence
atgtctggagtggtgcccacagcccctgagcagcctgctggggagatggagaaccagaccaagcccccagaccccaggccagatgcccctcctgagtacaacagccacttcctgcccggccccccaggcacagctgtgcccccacccaccggctacccaggcggcctgcccatgggctactacagcccccagcagcccagcaccttccccctgtaccagcctgtgggcggcatccaccctgtgcgctaccagcccgggaagtaccccatgcccaaccagagcgtgcccatcacctggatgcctggccccacccccatggccaactgccccccaggcctggagtacctggtgcagctggacaacatccacgtgctgcagcactttgagcccctggagatgatgacctgctttgagaccaacaacagatatgacatcaagaacaacagcgaccagatggtgtacatcgtgacagaggacacagatgacttcaccagaaatgcctaccgcaccctgcggccctttgtgctgcgggtgacagactgcatgggccgggagatcatgaccatgcagaggcccttccgctgcacctgctgctgcttctgctgccccagcgcccggcaggagctggaggtgcagtgccccccaggagtgaccatcggctttgtggccgagcactggaacctgtgcagagctgtgtacagcatccagaatgagaagaaggaaaatgtgatgagggtgcggggcccctgcagcacctacggctgcggcagtgacagcgtgtttgaatag

SEQ ID NO: 203807 - DNA, 627 bp, Artificial Sequence
  derived and/or modified sequence
atgtctggagtggtgcccacagcccctgagcagcctgctggggagatggagaaccagaccaagcccccagaccccaggccagatgcccctcctgagtacaacagccacttcctgcccggccccccaggcacagctgtgcccccacccaccggctacccaggcggcctgcccatgggctactacagcccccagcagcccagcaccttccccctgtaccagcctgtgggcggcatccaccctgtgcgctaccagcccgggaagtaccccatgcccaaccagagcgtgcccatcacctggatgcctggccccacccccatggccaactgccccccaggcctggagtacctggtgcagctggacaacatccacgtgctgcagcactttgagcccctggagatgatgacctgctttgagaccaacaacagatatgacatcaagaacaacagcgaccagatggtgtacatcgtgacagaggacacagatgacttcaccagaaatgcctaccgcaccctgcggccctttgtgctgcgggtgacagactgcatgggccgggagatcatgaccatgcagaggcccttccgctgcacctgctgctgcttctgctgccccagcgcccggcaggagtag

SEQ ID NO: 203808 - DNA, 429 bp, Artificial Sequence
  derived and/or modified sequence
atgtctggagtggtgcccacagcccctgagcagcctgctggggagatggagaaccagaccaagcccccagaccccaggccagatgcccctcctgagtacaacagccacttcctgcccggccccccaggcacagctgtgcccccacccaccggctacccaggcggcctgcccatgggctactacagcccccagcagcccagcaccttccccctgtaccagcctgtgggcggcatccaccctgtgcgctaccagcccgggaagtaccccatgcccaaccagagcgtgcccatcacctggatgcctggccccacccccatggccaactgccccccaggcctggagtacctggtgcagctggacaacatccacgtgctgcagcactttgagcccctggagatgatgacctgctttgagaccaacaacagatag

SEQ ID NO: 203809 - DNA, 990 bp, Artificial Sequence
  derived and/or modified sequence
atgagcggcgtggtgcccaccgcccccgagcagcccgccggcgagatggagaaccagactaaaccgcccgaccctaggccagacgcacctcctgaatataattcccacttccttcccgggccccccggcacagccgtgcctccgcctaccggttatcccggcggtctcccaatgggatactactctccacagcaaccctctaccttccccctgtaccagcctgtcggtgggattcatcccgtgcgatatcagccaggaaaatacccaatgcccaaccagtccgtccccataacatggatgccgggtcccacacctatggcaaactgcccaccaggcttagaatatctagtgcagttagacaatatccacgttctccagcattttgaaccactggagatgatgacctgttttgagacaaacaaccgttacgacattaagaacaactccgatcagatggtctatatagtgaccgaggacaccgatgactttacccggaatgcctacaggactctccggccttttgtgctgagagtgactgactgcatgggtagagaaataatgactatgcagaggcctttcagatgtacctgttgctgtttctgctgcccttccgcccgacaagagctggaggttcagtgcccgcctggagtcactattgggttcgttgcagagcactggaatttatgcagggctgtgtactccatacagaacgagaagaaggagaatgtcatgcgcgtgcgaggcccatgctccacttacggttgtggcagcgatagcgtatttgaggttaagagtctggacggaatctcaaacatcggcagtatcatccggaagtggaatgggttattaagcgctatggccgatgccgatcactttgacatccactttccactggacctcgacgtgaagatgaaggccatgatttttggcgcctgttttcttatcgactttatgtactttgagcgtagtccacctcagcgaagcaggtag

SEQ ID NO: 203810 - DNA, 990 bp, Artificial Sequence
  derived and/or modified sequence
atgagcggcgtggtgcccaccgcccccgagcagcccgccggcgagatggagaatcaaactaagcctccagaccctagacctgatgccccacctgaatacaactcccattttctcccgggacccccggggaccgcagtgcccccccccactgggtatcccgggggcttaccaatggggtactatagcccacagcagcccagcaccttccccttatatcagcccgtggggggaattcatccggtccggtatcagcctgggaaatacccaatgccaaatcagagcgtcccaatcacgtggatgcccggccccacaccgatggccaattgcccacccgggctcgagtacctggtgcagttggataatatccatgttctacagcattttgaacctctggagatgatgacttgtttcgagacaaataaccgctacgatatcaaaaacaacagtgaccaaatggtttatatcgtgaccgaggatactgacgatttcacacgcaatgcttatagaactttgagacctttcgtcttgagggtgacagactgtatggggcgggagatcatgaccatgcaacggcccttccgctgtacctgctgttgtttttgctgtcctagcgcccggcaggagctggaggtgcagtgccctcctggggtgacgattgggttcgttgccgagcactggaatctgtgcagggcagtatactctattcagaacgagaaaaaggaaaacgtgatgcgcgtccggggcccttgttcaacatacggctgcggctcagactcagtgttcgaagtgaagtctctcgacggaatttcaaatatcggaagtattatccgcaaatggaacggtttattaagcgctatggccgacgctgaccacttcgacatccatttccccttggatctggacgtcaagatgaaggctatgatcttcggcgcatgtttcctgatcgacttcatgtacttcgaacgaagtccaccacaaaggagccggtag

SEQ ID NO: 203811 - DNA, 789 bp, Artificial Sequence
  derived and/or modified sequence
atgagcggcgtggtgcccaccgcccccgagcagcccgccggcgagatggagaaccagacgaagccccctgatccacggcccgacgcaccacccgaatacaacagccacttcctgcccgggcctcctgggacggcagtgcccccacctacaggctacccaggaggactaccaatggggtactattccccccagcagccctctacctttcctctgtatcagcccgtgggcggcatacaccccgtgaggtatcagccaggtaaatatcccatgcccaatcagagcgttccaattacatggatgccagggcccaccccgatggccaactgcccccctggtctagagtatttggtgcaactggacaacatccacgtactgcagcatttcgaacctctggagatgatgacgtgtttcgagacgaacaaccgctacgatatcaaaaacaattccgaccagatggtgtacattgtcacggaggataccgacgattttacaagaaacgcctatcggaccctgagaccatttgtgctccgggttactgattgtatgggcagggagataatgaccatgcagcgcccatttcgatgcacttgttgctgcttctgttgcccctctgcacgtcaggagctggaggtgcaatgcccccccggcgtcactattggattcgttgccgaacactggaacctctgtcgcgctgtgtatagtatacagaacgagaaaaaagagaacgtaatgcgcgtgagaggcccttgctcaacttacgggtgcgggagcgacagtgtattcgaatag

SEQ ID NO: 203812 - DNA, 627 bp, Artificial Sequence
  derived and/or modified sequence
atgagcggcgtggtgcccaccgcccccgagcagcccgccggcgagatggaaaatcagaccaagccgcctgatcccagacccgacgccccccccgagtacaactctcattttttgcctggaccgcccgggacggctgtgcccccccccactggataccccggtggtctgcctatggggtactattctccccagcagccgagcacttttcccctataccagcccgtagggggcatacatcccgttcgttaccagcctggcaagtaccccatgcctaaccaatctgttccaataacctggatgcctggaccgacaccaatggcaaactgcccccctggactggagtatctggtgcagctagataacatccacgtgctgcagcatttcgaaccactggagatgatgacatgcttcgaaactaacaacagatacgacattaaaaacaattctgatcagatggtgtatatcgtaacagaagacacagacgacttcacccgtaatgcttaccgcacactacggccatttgttctccgggtcaccgactgcatgggtagggagattatgacaatgcagcggccgtttcgctgcacctgctgctgtttttgctgcccatctgcaagacaggaatag

SEQ ID NO: 203813 - DNA, 429 bp, Artificial Sequence
  derived and/or modified sequence
atgagcggcgtggtgcccaccgcccccgagcagcccgccggcgagatggaaaatcagaccaagccgccagacccacgaccagatgcaccacccgagtacaactcacacttcctgcctggtccacccgggacagccgtccccccacccactggttaccctggcgggctgccaatgggatattatagcccccaacaaccttctacatttcctctgtaccagccagttggcgggatccatcccgtgcgctaccagcccgggaaataccccatgcctaaccagtccgtgcccatcacatggatgccgggacctacacccatggccaattgtccacccgggttggagtatttggtgcaactggacaatattcatgtcctgcaacatttcgaacctcttgagatgatgacctgcttcgaaactaacaatcgttag

SEQ ID NO: 203814 - DNA, 990 bp, Artificial Sequence
  derived and/or modified sequence
atgagcggcgtggtgcccaccgcccccgagcagcccgccggcgagatggaaaatcagaccaagccaccagaccccaggcctgacgcccccccagaatacaacagccactttctaccaggtccgcccgggacagcagtcccaccccccaccggctacccaggcggtctgcctatgggatattactctccacaacagccctctacattccccctgtatcagcccgtcggcggtatccaccccgttcgctaccagcccggtaaataccccatgccaaaccagagcgttcctatcacgtggatgcccggacctacccccatggcaaactgcccccctggactggaatacctggtccagctggacaacattcacgtcttgcaacattttgaaccactggagatgatgacatgctttgagacaaacaaccgatatgacatcaaaaacaatagtgatcaaatggtgtacattgtgaccgaagatactgacgatttcacaaggaacgcgtacagaactctgaggcccttcgttctgagagtgactgactgcatgggcagagagataatgacaatgcagcgtcccttccgttgtacatgctgctgcttttgttgcccctccgctcgtcaggagctggaggtccaatgtcctccaggtgtgacaattggattcgtcgcggagcattggaacctgtgccgtgccgtatatagtatacagaacgaaaagaaagaaaacgttatgagagttcgaggtccttgcagcacatatggctgcgggtcagacagcgttttcgaagtaaagagcctagacggcatcagcaatatcggtagcataatcagaaaatggaatggcctgctgagtgctatggccgatgcagaccatttcgatatccacttcccccttgacctggacgtcaaaatgaaggccatgatcttcggtgcgtgttttcttattgattttatgtatttcgagcgctctcctccacaacgttccaggtag

SEQ ID NO: 203815 - DNA, 3303 bp, Artificial Sequence
  derived and/or modified sequence
cgagacggggaagccgcgcgcggggaaggagggtccaggcgtgccggacccgcccccagaacccgcgcctagccctcccttccgcgcgcttactttgtttataacttgaaaaatcctctccgtctcccttccctgcctcctttcctttccctttcctctgccagtacaactagacccggcgtctggcgtccccggtgcccagcattctgcggggcaggcggattaattggaattcttcaaaatgtcaggtgtggtacccacagcccctgaacagcctgcaggtgaaatggaaaatcaaacaaaaccaccagatccaaggcctgatgctcctcctgaatacaattctcattttttaccaggaccccctggaacagctgtccctccacctactggctacccaggaggcttgcctatgggatactacagtccacagcaacccagtaccttccctttgtaccagccagttggtggtatccatcctgtccggtatcagcctggcaaatatcctatgccaaatcagtctgttccaataacatggatgccagggccaactcctatggcaaactgccctcctggtctggaatacttagttcagttggacaacatacatgttcttcagcattttgagcctctggaaatgatgacatgttttgaaactaataatagatatgatattaaaaacaactcagaccagatggtttacattgtaaccgaagacacagatgactttaccaggaatgcctatcggacactaaggcccttcgtcctccgggtcactgattgtatgggccgagaaatcatgacaatgcagagacccttcagatgcacctgctgttgcttctgttgcccctctgccagacaagagctggaggtgcagtgtcctcctggtgtcaccattggctttgttgcggaacattggaacctgtgcagggcggtgtacagcatccaaaatgagaagaaagaaaatgtgatgagagttcgtgggccatgctcaacctatggctgtggttcagattctgtttttgaggtcaaatcccttgatggcatatccaacatcggcagtattatccggaagtggaatggtttgttatcagcaatggcagatgctgaccattttgacattcacttcccactagacctggatgtgaagatgaaagccatgatttttggagcttgcttcctcattgacttcatgtattttgaaagatctccaccacaacgttcaagatagagagacacagcaagccatcaactatggttaattttgaaaaatggaaaagttggattgggcttacagtcagcactcagttatttgcaagtgtatttctttgctttgtagagtatttttattgggtgttaactttgacagctgagagtgggcttgcaagaacacaatctaaaagtgtgtttcaattgagtatctctctagtagaataggagttcatcctgaaaagctgtgactcattaacccagtaaacatatacaaagtaagcttaaaacactataaacatgagataagggaaaatgaatccagagttctcatattaataggtagtgaaacaataaggctttttagagcagactttgttggcataaaataacctggcttctatccctaaccctttcctacctttcctctccgtcaacatgtcctcatactgaagacaaacttgtttcaatgatagtcttcatttttaaaaacaaaaaggcaggcagacagaaataatgatgttttcttgcactaagaaggtactacttgtacacatatatcaaaacctcattctgcaaagtttttgaaggtttcaatgggaaatttgattttattacaaaataaaacattttttaatgttaaagtttatatattccatgcttgttttctcattcactggcatggatgatcaggagctgcctatatatgaaggcagaatcagactatcaggaaaggagctggccagggccacagccagtcaagatctctgagcaacttagagacattggtgtcattatatgaagcttgcatttaatacatttatacataatacatttgtacatttaattcataacgtctcttggtcacagatgccttatatataaaataagttgccagatctctaagattgcctagtacacctttgtatctcatttgatgtgatacccagaagagatcattgttttttgtttttgtttttgtttttttcaagaagatccttcgtgatcaccatgctgttctcatggtaagaactggagttatgtttttaaatttggaaatatgacattttatgtagcactttataaaaagtgaaagcgacaaattccaccgctgcttaatactgctttgcttctttttattgacatgatagataaatatgtatctacacagagtaataataataaaacacagtaaacattctatttctctatggtctacagcatgccagtaaataatatgtaggaccaataataaattatcaattacacatttttgtgttaactaattaaaagcatagtgtataagtgagtacactctaattaacttgcttctgttgcactttagttttctacctgcatatggactgcattttttttttttaacacagtcagtatgtagaatgggatgtattcttctgctgctgcttattaaataaagaaagcctgagtgttcttagatggggttattctgagatgagggtcttagcctacagttctttttgaaatgaaaggtgctttgttttttaattatattcatcttttcagggtaaatttgtttttctgagtttctcgtaatgctcatttttacatgctgctactagcttttttttttaaaaaaagtaaaagttgctgctttctaaaatattaattgccttatatttgaaagtgccattgcaatcgtaagtagactatgtatttcctataatgatgtctgatatttaaataggaaatcagacaaacaatattcagaaagtttaagcatataaactttttatttttaacttgcctaaatccctgtattccaaaacctgctgcatcataataaatatatctatatatatttagcataagacgtgatatttttaatttcttttttaaaaaattatatttgtctcttagagttaaaattttctttatataatattgtcatatgtcatagttttaatacaattcacatgatttctatgtttcttaatgatattttgttgtgtaaaattgatcggattgattaaaaaacaaattctctggaatttgtgcgttcatgctttttcgtattctttatggcttttaaataaatatacaatggttaatagt

SEQ ID NO: 203816 - DNA, 1442 bp, Artificial Sequence
  derived and/or modified sequence
ggccgcggtgcctgcgggcaggcgcggaggttgcgcggcgtcctgcgctagcagttcccggacactgcgctcgcgtcgcatcctcaggtggttgcagaagttccgtggtgtcgggcgcgcgtctgcactgcagacgcagagggtttgggagcgagcagtttcctgcccagggatgggggtcctggctgcacttcacgggggcggccctttcgtttcgctctgcgtgacaggtctcgcttgattgggtttctcatgggtctctggcgtttctacggcgcggctctcacggactcaggccaggccactcgcaggattaattggaattcttcaaaatgtcaggtgtggtacccacagcccctgaacagcctgcaggtgaaatggaaaatcaaacaaaaccaccagatccaaggcctgatgctcctcctgaatacaattctcattttttaccaggaccccctggaacagctgtccctccacctactggctacccaggaggcttgcctatgggatactacagtccacagcaacccagtaccttccctttgtaccagccagttggtggtatccatcctgtccggtatcagcctggcaaatatcctatgccaaatcagtctgttccaataacatggatgccagggccaactcctatggcaaactgccctcctggtctggaatacttagttcagttggacaacatacatgttcttcagcattttgagcctctggaaatgatgacatgttttgaaactaataatagatatgatattaaaaacaactcagaccagatggtttacattgtaaccgaagacacagatgactttaccaggaatgcctatcggacactaaggcccttcgtcctccgggtcactgattgtatgggccgagaaatcatgacaatgcagagacccttcagatgcacctgctgttgcttctgttgcccctctgccagacaagagctggaggtgcagtgtcctcctggtgtcaccattggctttgttgcggaacattggaacctgtgcagggcggtgtacagcatccaaaatgagaagaaagaaaatgtgatgagagttcgtgggccatgctcaacctatggctgtggttcagattctgtttttgaggtcaaatcccttgatggcatatccaacatcggcagtattatccggaagtggaatggtttgttatcagcaatggcagatgctgaccattttgacattcacttcccactagacctggatgtgaagatgaaagccatgatttttggagcttgcttcctcattgacttcatgtattttgaaagatctccaccacaacgttcaagatagagagacacagcaagccatcaactatggttaattttgaaaaatggaaaagttggattgggcttacagtcagcactcagttatttgcaagtgtatttctttgctttgtagagtatttttatt

SEQ ID NO: 203817 - DNA, 1054 bp, Artificial Sequence
  derived and/or modified sequence
cccagaacccgcgcctagccctcccttccgcgcgcttactttgtttataacttgaaaaatcctctccgtctcccttccctgcctcctttcctttccctttcctctgccagtacaactagacccggcgtctggcgtccccggtgcccagcattctgcggggcaggcggtctcgcttgattgggtttctcatgggtctctggcgtttctacggcgcggctctcacggactcaggccaggccactcgcaggattaattggaattcttcaaaatgtcaggtgtggtacccacagcccctgaacagcctgcaggtgaaatggaaaatcaaacaaaaccaccagatccaaggcctgatgctcctcctgaatacaattctcattttttaccaggaccccctggaacagctgtccctccacctactggctacccaggaggcttgcctatgggatactacagtccacagcaacccagtaccttccctttgtaccagccagttggtggtatccatcctgtccggtatcagcctggcaaatatcctatgccaaatcagtctgttccaataacatggatgccagggccaactcctatggcaaactgccctcctggtctggaatacttagttcagttggacaacatacatgttcttcagcattttgagcctctggaaatgatgacatgttttgaaactaataatagatatgatattaaaaacaactcagaccagatggtttacattgtaaccgaagacacagatgactttaccaggaatgcctatcggacactaaggcccttcgtcctccgggtcactgattgtatgggccgagaaatcatgacaatgcagagacccttcagatgcacctgctgttgcttctgttgcccctctgccagacaagagctggaggtgcagtgtcctcctggtgtcaccattggctttgttgcggaacattggaacctgtgcagggcggtgtacagcatccaaaatgagaagaaagaaaatgtgatgagagttcgtgggccatgctcaacctatggctgtggttcagattctgtttttgag

SEQ ID NO: 203818 - DNA, 814 bp, Artificial Sequence
  derived and/or modified sequence
gtttataacttgaaaaatcctctccgtctcccttccctgcctcctttcctttccctttcctctgccagtacaactagacccggcgtctggcgtccccggtgcccagcattctgcggggcaggcgcttggagacacatagggcaccgtacaacaaactccagctccagaggattaattggaattcttcaaaatgtcaggtgtggtacccacagcccctgaacagcctgcaggtgaaatggaaaatcaaacaaaaccaccagatccaaggcctgatgctcctcctgaatacaattctcattttttaccaggaccccctggaacagctgtccctccacctactggctacccaggaggcttgcctatgggatactacagtccacagcaacccagtaccttccctttgtaccagccagttggtggtatccatcctgtccggtatcagcctggcaaatatcctatgccaaatcagtctgttccaataacatggatgccagggccaactcctatggcaaactgccctcctggtctggaatacttagttcagttggacaacatacatgttcttcagcattttgagcctctggaaatgatgacatgttttgaaactaataatagatatgatattaaaaacaactcagaccagatggtttacattgtaaccgaagacacagatgactttaccaggaatgcctatcggacactaaggcccttcgtcctccgggtcactgattgtatgggccgagaaatcatgacaatgcagagacccttcagatgcacctgctgttgcttctgttgcccctctgccagacaagag

SEQ ID NO: 203819 - DNA, 683 bp, Artificial Sequence
  derived and/or modified sequence
gtgtttctcttaagcttgttacattgttttcctcataactgtactatctaacgttaaactttaacatttcttgactttttttaaatctcattctactacaatataaactgcagcacagtaggtggcagagtgtctgtctgcttcattgctgtactctcaacatctgtattagtgcctcgtacataataggtgctcaataagtatttttttaattaatgaagggacaaatgtaaggattaattggaattcttcaaaatgtcaggtgtggtacccacagcccctgaacagcctgcaggtgaaatggaaaatcaaacaaaaccaccagatccaaggcctgatgctcctcctgaatacaattctcattttttaccaggaccccctggaacagctgtccctccacctactggctacccaggaggcttgcctatgggatactacagtccacagcaacccagtaccttccctttgtaccagccagttggtggtatccatcctgtccggtatcagcctggcaaatatcctatgccaaatcagtctgttccaataacatggatgccagggccaactcctatggcaaactgccctcctggtctggaatacttagttcagttggacaacatacatgttcttcagcattttgagcctctggaaatgatgacatgttttgaaactaataatagata

SEQ ID NO: 203820 - DNA, 1375 bp, Artificial Sequence
  derived and/or modified sequence
aggcgtgccggacccgcccccagaacccgcgcctagccctcccttccgcgcgcttactttgtttataacttgaaaaatcctctccgtctcccttccctgcctcctttcctttccctttcctctgccagtacaactagacccggcgtctggcgtccccggtgcccagcattctgcggggcaggcggtctcgcttgattgggtttctcatgggtctctggcgtttctacggcgcggctctcacggactcaggccaggccactcgcagcttggagacacatagggcaccgtacaacaaactccagctccagaggattaattggaattcttcaaaatgtcaggtgtggtacccacagcccctgaacagcctgcaggtgaaatggaaaatcaaacaaaaccaccagatccaaggcctgatgctcctcctgaatacaattctcattttttaccaggaccccctggaacagctgtccctccacctactggctacccaggaggcttgcctatgggatactacagtccacagcaacccagtaccttccctttgtaccagccagttggtggtatccatcctgtccggtatcagcctggcaaatatcctatgccaaatcagtctgttccaataacatggatgccagggccaactcctatggcaaactgccctcctggtctggaatacttagttcagttggacaacatacatgttcttcagcattttgagcctctggaaatgatgacatgttttgaaactaataatagatatgatattaaaaacaactcagaccagatggtttacattgtaaccgaagacacagatgactttaccaggaatgcctatcggacactaaggcccttcgtcctccgggtcactgattgtatgggccgagaaatcatgacaatgcagagacccttcagatgcacctgctgttgcttctgttgcccctctgccagacaagagctggaggtgcagtgtcctcctggtgtcaccattggctttgttgcggaacattggaacctgtgcagggcggtgtacagcatccaaaatgagaagaaagaaaatgtgatgagagttcgtgggccatgctcaacctatggctgtggttcagattctgtttttgaggtcaaatcccttgatggcatatccaacatcggcagtattatccggaagtggaatggtttgttatcagcaatggcagatgctgaccattttgacattcacttcccactagacctggatgtgaagatgaaagccatgatttttggagcttgcttcctcattgacttcatgtattttgaaagatctccaccacaacgttcaagatagagagacacagcaagccatcaactatggttaattttgaaaaatggaaaagttgga

SEQ ID NO: 203821 - DNA, 990 bp, Artificial Sequence
  derived and/or modified sequence
atgagcggcgtggtgcccacagctccagagcagcccgcaggcgagatggagaaccagactaaacccccagaccctaggcctgacgcaccaccagaatataactcacacttccttcctggccctcccggaaccgccgtgcctccccctaccggttaccccggagggttaccaatgggttactattcaccccaacaaccgagcacctttcctctctaccaaccagtcgggggaatccatccagttcgatatcagccaggtaaataccccatgcccaaccaatccgtgcccattacctggatgcctggtcctactccgatggctaattgtcctccaggattagagtatctcgtgcagctggacaatattcatgttcttcagcacttcgagcctcttgagatgatgacgtgcttcgagaccaataatcgctacgatattaagaataatagcgaccagatggtgtacatcgtgacggaagacaccgacgactttactcgcaatgcctataggaccctaaggcccttcgttctgagagtcacggactgtatgggtcgggagatcatgaccatgcaacgtccattccggtgcacctgctgctgtttctgttgcccctcagcaagacaggaattggaagtacaatgcccgcctggtgtaaccatcggatttgtcgccgaacattggaatctctgtcgggctgtatatagtatccagaacgagaaaaaagaaaatgtaatgagggtacgcggaccttgcagcacctatggctgcggaagtgactctgtgtttgaagttaagtcactggatggcatttcaaatatcggatctattattaggaagtggaatgggcttctttccgcaatggccgacgctgaccacttcgacatccatttccccctggacttagatgtgaagatgaaggctatgatctttggtgcgtgctttctgattgatttcatgtattttgagcggtctcctccacagcggtccaggtag

SEQ ID NO: 203822 - DNA, 990 bp, Artificial Sequence
  derived and/or modified sequence
atgtccggcgttgttcctaccgccccagagcagcccgctggtgagatggagaatcagacaaagccaccagatccacgacctgatgccccaccggaatacaactctcatttcctgccagggccacccggtaccgccgtgccaccaccaacgggttatccaggtgggctcccaatgggatattattcgccccagcagccctcgactttcccactctaccaaccagtgggaggcatccaccctgtgaggtaccaacctggcaaataccctatgcctaaccagagtgtgcccatcacatggatgcctggtccaacccccatggcgaactgcccacctggactcgaatatctcgtgcaactggataatatacatgtgctgcagcatttcgaaccactggaaatgatgacctgcttcgagactaacaatcgctacgatataaaaaataacagtgaccagatggtttacatagtgactgaggacaccgatgactttactagaaacgcttatcggacactccggccatttgttcttcgagtgaccgactgcatggggagagagatcatgactatgcagagacccttcaggtgcacctgttgctgtttctgttgccccagtgccaggcaggagctggaggtgcaatgcccacctggagtgacaattggattcgttgctgagcattggaacctctgcagggcggtgtattcaatccagaacgagaaaaaggaaaatgtcatgcgggttcgtgggccttgcagcacctacgggtgcggatctgacagtgtattcgaggtgaaatccctagatggcataagtaacatcggaagcattattcggaagtggaacgggctgctctcggctatggcagacgccgaccacttcgatatccatttccctctcgatctggacgtgaaaatgaaagccatgattttcggagcttgttttctgatcgatttcatgtactttgagcgatcaccgcctcaaaggtcgcgctag

SEQ ID NO: 203823 - DNA, 789 bp, Artificial Sequence
  derived and/or modified sequence
atgagcggagtggttccaaccgcaccggaacaacctgccggagagatggagaaccagacaaagccgcctgaccccaggccagatgcaccaccggagtacaattctcactttctgccgggaccacctggtaccgctgtcccgccaccaaccggttacccagggggtttgcccatggggtattactctcctcaacagccatcaactttcccgttatatcagccggtgggtgggatccaccctgtgagataccaaccgggaaaatacccaatgccgaaccagtctgtcccaattacatggatgccgggacccacccctatggctaactgcccgccaggacttgaatatcttgtgcagttggacaatatacacgtccttcagcatttcgagcccctggagatgatgacttgcttcgagaccaacaaccgttatgacatcaaaaacaactccgatcaaatggtttacatcgtgactgaagacacggatgacttcacacggaatgcatacaggaccctacgtccatttgtgctccgggttactgattgtatgggtcgcgaaatcatgaccatgcaacgtccctttcgatgcacgtgttgttgtttttgttgtccaagcgccagacaggaactagaagttcagtgccctcccggagttactataggattcgtcgccgagcattggaacttgtgtcgggctgtctattctattcagaatgaaaagaaagaaaacgtgatgagggtgcggggaccctgttctacctatgggtgcggcagcgactccgtgtttgagtag

SEQ ID NO: 203824 - DNA, 627 bp, Artificial Sequence
  derived and/or modified sequence
atgagcggtgtggtcccaacagcgcctgagcagcccgctggggagatggaaaatcagaccaagcctcctgatccacgacctgatgcaccgccagaatacaattctcatttcctgcctgggccacctggcaccgctgtgccgcctcctacaggttacccaggtgggttgccaatgggctattacagtccacagcaaccaagcaccttccccttgtatcagcctgttggcggtatacacccagtgcggtaccagcctggcaagtacccaatgcccaatcaatcagttcctatcacatggatgcccggtccaacaccaatggctaactgtcctcccggactagagtaccttgtgcaacttgacaacatccatgtgctgcaacattttgagccgctcgagatgatgacgtgcttcgaaacaaataatcgctatgatattaaaaataacagtgatcaaatggtgtacatagtaacagaggataccgacgatttcaccaggaacgcctacaggactctgaggccctttgtactgcgggtcactgattgtatgggccgtgagataatgaccatgcagcgcccatttcggtgtacttgttgttgcttctgttgcccctccgccaggcaagaatag

SEQ ID NO: 203825 - DNA, 429 bp, Artificial Sequence
  derived and/or modified sequence
atgtcaggcgtggttcccacagcgcctgagcagcccgctggcgaaatggaaaaccagaccaagcctccagatcctcgacctgacgcgcctccagaatataacagccacttcctgcctggccctccagggacagctgtgccgcctccaacgggataccctggcggactccccatgggctattattcaccccaacagcctagcacctttcccctataccaaccagtgggcggaatccatccagtgcggtatcagccgggtaaatacccgatgcccaaccagtccgtgcccattacttggatgcctgggccaacgccaatggcaaattgcccaccaggcttggaatatctggttcagttagacaatattcacgtactgcagcacttcgaacctttagagatgatgacctgtttcgaaacaaataacaggtag

SEQ ID NO: 203826 - DNA, 990 bp, Artificial Sequence
  derived and/or modified sequence
atgtccggtgtggtccctactgccccagagcagcccgcaggcgaaatggagaatcagaccaaacctcctgacccaagacccgatgctcctcccgagtataatagccactttctccccggacctcctggaaccgctgtacctcctcctaccgggtaccctgggggactgccaatgggttattattcgcctcaacagcctagcacattccccctgtatcagccagtgggtgggattcaccctgtgagataccaacccggaaagtatcccatgccaaatcaatcggtgcctataacgtggatgcccggtcccacgcccatggctaactgtccacccggtctggagtacctggtgcagctagataatatccacgtcctccagcactttgagcccctagagatgatgacttgtttcgagaccaataacagatacgatattaaaaacaacagcgaccagatggtttacattgtgacagaggatactgacgatttcaccagaaatgcttacagaaccctgcgccctttcgtattgagagtgactgactgcatgggaagggagattatgaccatgcaacggccattcaggtgcacttgttgttgcttttgttgtccctctgctagacaggaattggaggtacagtgtcctccaggcgtgacaatcggattcgtcgccgagcattggaacctgtgccgggctgtttactcaatacagaacgagaagaaggaaaatgtgatgcgggtgaggggcccatgctccacctacggatgcggctctgattctgtatttgaggtgaaatccctcgatggaattagtaacatcgggagcattatccggaaatggaatggcttgctctcagccatggcagacgctgaccattttgacattcactttcctctggacctggatgtgaagatgaaagccatgatcttcggcgcatgcttcttgatcgatttcatgtattttgaacggagccctccccagagatccagatag

SEQ ID NO: 203827 - DNA, 990 bp, Artificial Sequence
  derived and/or modified sequence
atgagcggcgtggtgcccaccgcccccgagcagcccgccggcgagatggagaaccagaccaagccccccgaccccagacccgacgccccccccgagtacaacagccacttcctgcccggcccccccggcaccgccgtgcccccccccaccggctaccccggcggcctgcccatgggctactacagcccccagcagcccagcaccttccccctgtaccagcccgtgggcggcatccaccccgtgagataccagcccggcaagtaccccatgcccaaccagagcgtgcccatcacctggatgcccggccccacccccatggccaactgcccccccggcctggagtacctggtgcagctggacaacatccacgtgctgcagcacttcgagcccctggagatgatgacctgcttcgagaccaacaacagatacgacatcaagaacaacagcgaccagatggtgtacatcgtgaccgaggacaccgacgacttcaccagaaacgcctacagaaccctgagacccttcgtgctgagagtgaccgactgcatgggcagagagatcatgaccatgcagagacccttcagatgcacctgctgctgcttctgctgccccagcgccagacaggagctggaggtgcagtgcccccccggcgtgaccatcggcttcgtggccgagcactggaacctgtgcagagccgtgtacagcatccagaacgagaagaaggagaacgtgatgagagtgagaggcccctgcagcacctacggctgcggcagcgacagcgtgttcgaggtgaagagcctggacggcatcagcaacatcggcagcatcatcagaaagtggaacggcctgctgagcgccatggccgacgccgaccacttcgacatccacttccccctggacctggacgtgaagatgaaggccatgatcttcggcgcctgcttcctgatcgacttcatgtacttcgagagaagccccccccagagaagcagatag

SEQ ID NO: 203828 - DNA, 789 bp, Artificial Sequence
  derived and/or modified sequence
atgagcggcgtggtgcccaccgcccccgagcagcccgccggcgagatggagaaccagaccaagccccccgaccccagacccgacgccccccccgagtacaacagccacttcctgcccggcccccccggcaccgccgtgcccccccccaccggctaccccggcggcctgcccatgggctactacagcccccagcagcccagcaccttccccctgtaccagcccgtgggcggcatccaccccgtgagataccagcccggcaagtaccccatgcccaaccagagcgtgcccatcacctggatgcccggccccacccccatggccaactgcccccccggcctggagtacctggtgcagctggacaacatccacgtgctgcagcacttcgagcccctggagatgatgacctgcttcgagaccaacaacagatacgacatcaagaacaacagcgaccagatggtgtacatcgtgaccgaggacaccgacgacttcaccagaaacgcctacagaaccctgagacccttcgtgctgagagtgaccgactgcatgggcagagagatcatgaccatgcagagacccttcagatgcacctgctgctgcttctgctgccccagcgccagacaggagctggaggtgcagtgcccccccggcgtgaccatcggcttcgtggccgagcactggaacctgtgcagagccgtgtacagcatccagaacgagaagaaggagaacgtgatgagagtgagaggcccctgcagcacctacggctgcggcagcgacagcgtgttcgagtag

SEQ ID NO: 203829 - DNA, 627 bp, Artificial Sequence
  derived and/or modified sequence
atgagcggcgtggtgcccaccgcccccgagcagcccgccggcgagatggagaaccagaccaagccccccgaccccagacccgacgccccccccgagtacaacagccacttcctgcccggcccccccggcaccgccgtgcccccccccaccggctaccccggcggcctgcccatgggctactacagcccccagcagcccagcaccttccccctgtaccagcccgtgggcggcatccaccccgtgagataccagcccggcaagtaccccatgcccaaccagagcgtgcccatcacctggatgcccggccccacccccatggccaactgcccccccggcctggagtacctggtgcagctggacaacatccacgtgctgcagcacttcgagcccctggagatgatgacctgcttcgagaccaacaacagatacgacatcaagaacaacagcgaccagatggtgtacatcgtgaccgaggacaccgacgacttcaccagaaacgcctacagaaccctgagacccttcgtgctgagagtgaccgactgcatgggcagagagatcatgaccatgcagagacccttcagatgcacctgctgctgcttctgctgccccagcgccagacaggagtag

SEQ ID NO: 203830 - DNA, 429 bp, Artificial Sequence
  derived and/or modified sequence
atgagcggcgtggtgcccaccgcccccgagcagcccgccggcgagatggagaaccagaccaagccccccgaccccagacccgacgccccccccgagtacaacagccacttcctgcccggcccccccggcaccgccgtgcccccccccaccggctaccccggcggcctgcccatgggctactacagcccccagcagcccagcaccttccccctgtaccagcccgtgggcggcatccaccccgtgagataccagcccggcaagtaccccatgcccaaccagagcgtgcccatcacctggatgcccggccccacccccatggccaactgcccccccggcctggagtacctggtgcagctggacaacatccacgtgctgcagcacttcgagcccctggagatgatgacctgcttcgagaccaacaacagatag

SEQ ID NO: 203831 - protein, 604 aa, Artificial Sequence
  derived and/or modified sequence
MARISFSYLCPASWYFTVPTVSPFLRQRVAFLGLFFISCLLLLMLIIDFRHWSASLPRDRQYERYLARVGELEATDTEDPNLNYGLVVDCGSSGSRIFVYFWPRHNGNPHDLLDIKQMRDRNSQPVVKKIKPGISAMADTPEHASDYLRPLLSFAAAHVPVKKHKETPLYILCTAGMRLLPERKQLAILADLVKDLPLEFDFLFSQSQAEVISGKQEGVYAWIGINFVLGRFDHEDESDAEATQELAAGRRRTVGILDMGGASLQIAYEVPTSTSVLPAKQEEAAKILLAEFNLGCDVQHTEHVYRVYVTTFLGFGGNFARQRYEDLVLNETLNKNRLLGQKTGLSPDNPFLDPCLPVGLTDVVERNSQVLHVRGRGDWVSCGAMLSPLLARSNTSQASLNGIYQSPIDFNNSEFYGFSEFFYCTEDVLRIGGRYHGPTFAKAAQDYCGMAWSVLTQRFKNGLFSSHADEHRLKYQCFKSAWMYQVLHEGFHFPYDYPNLRTAQLVYDREVQWTLGAILYKTRFLPLRDLRQEGVRQAHGSWFRLSFVYNHYLFFACILVVLLAIFLYLLRLRRIHHRQTRASAPLDLLWLEEVVPMMGVQVGP

SEQ ID NO: 203832 - DNA, 1815 bp, Artificial Sequence
  derived and/or modified sequence
atggccagaatcagcttcagctacctgtgccccgccagctggtacttcaccgtgcccaccgtgagccccttcctgagacagagagtggccttcctgggcctgttcttcatcagctgcctgctgctgctgatgctgatcatcgacttcagacactggagcgccagcctgcccagagacagacagtacgagagatacctggccagagtgggcgagctggaggccaccgacaccgaggaccccaacctgaactacggcctggtggtggactgcggcagcagcggcagcagaatcttcgtgtacttctggcccagacacaacggcaacccccacgacctgctggacatcaagcagatgagagacagaaacagccagcccgtggtgaagaagatcaagcccggcatcagcgccatggccgacacccccgagcacgccagcgactacctgagacccctgctgagcttcgccgccgcccacgtgcccgtgaagaagcacaaggagacccccctgtacatcctgtgcaccgccggcatgagactgctgcccgagagaaagcagctggccatcctggccgacctggtgaaggacctgcccctggagttcgacttcctgttcagccagagccaggccgaggtgatcagcggcaagcaggagggcgtgtacgcctggatcggcatcaacttcgtgctgggcagattcgaccacgaggacgagagcgacgccgaggccacccaggagctggccgccggcagaagaagaaccgtgggcatcctggacatgggcggcgccagcctgcagatcgcctacgaggtgcccaccagcaccagcgtgctgcccgccaagcaggaggaggccgccaagatcctgctggccgagttcaacctgggctgcgacgtgcagcacaccgagcacgtgtacagagtgtacgtgaccaccttcctgggcttcggcggcaacttcgccagacagagatacgaggacctggtgctgaacgagaccctgaacaagaacagactgctgggccagaagaccggcctgagccccgacaaccccttcctggacccctgcctgcccgtgggcctgaccgacgtggtggagagaaacagccaggtgctgcacgtgagaggcagaggcgactgggtgagctgcggcgccatgctgagccccctgctggccagaagcaacaccagccaggccagcctgaacggcatctaccagagccccatcgacttcaacaacagcgagttctacggcttcagcgagttcttctactgcaccgaggacgtgctgagaatcggcggcagataccacggccccaccttcgccaaggccgcccaggactactgcggcatggcctggagcgtgctgacccagagattcaagaacggcctgttcagcagccacgccgacgagcacagactgaagtaccagtgcttcaagagcgcctggatgtaccaggtgctgcacgagggcttccacttcccctacgactaccccaacctgagaaccgcccagctggtgtacgacagagaggtgcagtggaccctgggcgccatcctgtacaagaccagattcctgcccctgagagacctgagacaggagggcgtgagacaggcccacggcagctggttcagactgagcttcgtgtacaaccactacctgttcttcgcctgcatcctggtggtgctgctggccatcttcctgtacctgctgagactgagaagaatccaccacagacagaccagagccagcgcccccctggacctgctgtggctggaggaggtggtgcccatgatgggcgtgcaggtgggcccctag

SEQ ID NO: 203833 - DNA, 3550 bp, Artificial Sequence
  derived and/or modified sequence
cttccggctgggcaaggggccgcggggagcagctcgggactgaaccgagaggtgccgaaggaaccggcgggccgcttgatcccgctgcagacgtaggagatgcctgggacaaggaggccaccttctcagggcaaaagaaaaagaaggtgacaggcgttgagaccaccgaagggaacccatggctaggatcagtttttcctacctctgcccagcctcctggtacttcactgtgcccacagtgagtccatttctccgtcagcgggtggcattcctgggactcttcttcatatcctgtctccttttacttatgttaatcatagactttcgacattggagtgcttcattaccacgagataggcaatacgaaaggtatttggctcgagtaggggagcttgaagctactgacactgaagacccaaatctgaattatggacttgttgttgactgtggcagcagtggttcccggatttttgtttatttctggccaagacataatgggaacccccatgacttgctggacatcaaacagatgagagaccgcaacagccaaccagtggttaaaaaaatcaagccaggaatctctgcaatggcagacactccagaacatgccagtgattaccttcgtcctctgctgagctttgctgctgctcatgtgcctgtgaagaagcacaaggagacccctctttacatcctctgcacagcaggcatgaggcttctccctgagaggaagcagttggctatcttggctgacctagtgaaagatttaccactggagtttgacttcctcttttcacagtctcaagcagaagtgatctctgggaagcaggaaggggtttatgcatggattggaatcaactttgttttgggaagattcgaccacgaggatgaatcagatgctgaggctacccaggaattggcagcaggacggagaaggacagtagggatactggatatgggaggagcctctctccaaattgcttatgaagttcctacctcaacctctgtccttcctgcaaagcaggaagaagctgccaagatcctgctggctgagttcaacctgggctgtgatgtgcaacacactgaacacgtgtacagggtttatgtcacaacttttctgggtttcggaggcaactttgcccggcagcgctacgaagaccttgttctgaatgaaactcttaacaaaaacagattgcttggtcagaagacaggtctgagtcccgacaatccatttctggatccctgcctgccagtgggactcacagatgtggtggagaggaacagccaagtcttacatgtccgaggaagaggagactgggtgtcttgtggggcaatgctgagccccctgctggctcgctccaacaccagccaggcctcactcaatggcatatatcaatcgcctattgacttcaacaacagcgagttctacggcttctctgagtttttttattgtacagaggatgtgttgcgcattggtggccgctaccatgggccaacatttgccaaggctgctcaggattactgtggcatggcttggtcggtactaactcagagattcaagaatggcctcttttcatcacatgcagatgagcatcgactcaaatatcagtgttttaaatcggcttggatgtaccaagtcttacatgaaggattccactttccctatgactacccaaacctgcggacagcccagctggtgtatgaccgagaggttcagtggacgctgggagccattctatataaaacacgattcttaccactcagggatcttcggcaggaaggtgtccgacaagcccatggtagctggttccgtctctcctttgtatacaaccactatctcttctttgcctgtatcctggtggtgctactggccatcttcctataccttctgcggctacgccgaattcaccaccgacaaacacgagcctcagctccattggacttgctgtggcttgaagaggtggtgcccatgatgggagtacaggtggggccgtgaggctggaccaggactagagaagcttgagcacccccgagttgctgctcattgaattcctccactttcttatatagcctcagatgctgtgatgtctgaccttgtggatatttgcccttggaatttctactttactttctaccgtaattccttctccgtacccaggtcttctctgagagaagctataatttaatctgtgaggaactaaatgacaggagattggtgctaatacgggggaccaagctttgtccaagtgaagcaggcttcgactccttctgagaggtctggtgtgttcctagaatctcaccttttcttcccttgctaaagcatgaagtttggcatttggcacactggaagcctggttgaaatgaaatttgtagcatctgatacaaagccagagacattctagcaagtgcagcagccccttctttctctgtaacagagatatcatttatgtggagatccacaacctttaacagggatccaagatctttgcagttcaatcgaccacataggaatttccaggcaccaaaatgatataacttccttgcttccttgacaaagaagccatcatgggtgtgatccaagatccctgtcgtagtgttgatgatgttagtacatgattttaaaggttagaaccccttctaaatgaatggtctgtggaagattttagtatcttatctgatgcctggtatgatgaggatagaaaatttttccatttttatgtgcctcacaggctgtttgggcattaattttgctttttgagccttaagtgtgttagtaggatggagaaactgtgatggggactgggaacctggatttgtctgattttaggtcactgttccctgggcctgtttttgtgagcccttacacaggaagatataaagagagttctttcatttcactgctaaaatcagtatgtagtatggggaatgtatttgggttgtttttaaagaaaaggggaacagaatcaggagagtgggcaaaggcaataaaatcaaagttcttattaattatttctgagaaatagaagtttctcaatttatgactcttggaatgtctgaaagggagcaaatttggaatagatcaatctgttaataagccatctggcaactttcagaacctctattaagagactgctgagtcacaaacagcacttccattaatgaagcgagaggaaaagccataataattacatcttcacccactacccttccagagctttgcttctcctccacatttagccattaaattgcatgaggatttctcttcatcagggtccgcatggaatctttcttatattttaccctttcctacatgtagccttgaatgtcctttccacgaatatgctcccacggctgggagcattttcttttcttttcgtcacctttgatttttgggattagattaataggggaaaaagtccctggctttaaagaaaacaaaagtagaattcttcaaaaataaatttcatactgggaacagaaaggaactaaatgcttcataaaacagggaaaaagaaattaagatcatcctagaaataaactaagataaaaataa

SEQ ID NO: 203834 - DNA, 1815 bp, Artificial Sequence
  derived and/or modified sequence
atggcccgaatatccttttcttatttatgtcccgcctcctggtactttactgtgccaacagtgtcccccttcctgagacagagggtagcctttttgggcctgttctttatatcttgcctcctgttgctgatgctgattatagatttccgccactggtcagccagccttcctcgagaccgccaatacgaacggtacctagcacgagtcggagagttagaggctacagatactgaagaccctaatctgaactacgggctggtggtggattgcgggagctccgggagcagaatatttgtctatttttggccacggcataacggaaatccccatgatctgctcgacatcaagcagatgagagatagaaactctcaacccgtggtgaagaagataaaaccgggaatatccgcgatggctgataccccagaacacgcctctgactacttgaggccgttgctgtcgtttgctgccgcgcatgtccccgtgaaaaagcacaaagaaacgccactgtatatattgtgtacagctggcatgagacttttgcccgagaggaagcagctggctatcctggctgacctcgtgaaagacctaccccttgagtttgattttctgtttagccagtctcaggcagaagtgatttccggtaaacaagagggcgtgtacgcttggattggaatcaatttcgtactgggacgttttgaccacgaggatgagagcgacgcggaagccacacaagaactcgccgctggacggaggcggactgttggcattctggacatgggcggagccagtctccaaattgcctacgaggtgcccacatccacatccgtgctgcctgcaaagcaggaggaagctgccaagattctcttggctgaattcaacctgggctgtgatgtgcagcacaccgagcatgtgtaccgggtatatgtgactacattcctggggtttggaggaaatttcgctcgtcagcgttacgaggatctcgttctgaatgagactttgaataaaaataggctcctcggtcagaaaaccggcctctcacctgataatcccttccttgatccttgcttgcccgtgggactcaccgatgtggtggaacggaacagccaggtgctccacgttcgtggtcggggagactgggtctcgtgcggcgcaatgctctcgcctctactggctaggagcaacacaagccaggcatccttaaacggtatttatcagagcccaatcgacttcaacaactcagaattttatggtttcagcgaatttttctattgcacggaggatgttttaagaatcggtggtaggtaccatggacctacatttgccaaagccgcacaagattactgtggtatggcctggtccgtgctcacccagaggttcaaaaatgggttgttcagttcgcacgccgatgagcaccgccttaaatatcagtgtttcaagtctgcatggatgtaccaggtgctgcatgagggttttcactttccctatgactacccgaatctcagaacggcacaactggtgtacgaccgggaggtccagtggacgctaggggctattctctacaagactagattcctcccgctcagagatctacgccaagagggggtccgccaggcacatggctcctggttccggctgtctttcgtgtacaatcactaccttttttttgcctgtatcctcgtcgtgcttctggcaatatttctatatctgctgcgtctgaggcgcatccatcaccggcagacgcgagcatcggcacccctcgacctactgtggctggaagaagtggtgccgatgatgggcgtccaggtggggccatag

SEQ ID NO: 203835 - DNA, 1815 bp, Artificial Sequence
  derived and/or modified sequence
atggcccgcatctccttctcctacctgtgcccagcctcctggtacttcaccgtgcccaccgtgagccccttcctgcggcagagggtggccttcctgggcctcttcttcatcagctgcctgctgctgctgatgctgatcatcgacttccgccactggagcgccagcctgccccgggaccggcagtatgaaagatacctggcccgggtgggggagctggaggccacagacacagaggaccccaacctgaactacggcctggtggtggactgtggcagcagcggcagccgcatctttgtgtacttctggcccaggcacaacggcaacccccatgacctgctggacatcaagcagatgagggacaggaacagccagcctgtggtgaagaagatcaagccaggcatcagcgccatggctgacaccccagagcacgccagtgactacctgcggcccctgctgagctttgctgctgcccacgtgcctgtgaagaagcacaaggagacccccctgtacatcctgtgcacagctggcatgaggctgctgcctgagaggaagcagctggccatcctggccgacctggtgaaggacctgcccctggagtttgacttcctgttcagccagagccaggccgaggtgatcagcggcaagcaggagggcgtgtatgcctggattggcatcaactttgtgctgggccgctttgaccatgaagatgaaagtgatgctgaggccacccaggagctggccgccggcagaagaagaacagtgggcatcctggacatgggcggggccagcctgcagatcgcctatgaggtgcccaccagcacctctgtgctgcctgccaagcaggaggaggccgccaagatcctgctggccgagttcaacctgggctgtgatgtgcagcacacagaacatgtgtacagagtgtatgtgaccaccttcctgggctttggaggcaactttgcccggcagagatatgaggacctggtgctgaatgagaccctgaacaagaaccggctgctgggccagaagacaggcctgagcccagacaaccccttcctggacccctgcctgcctgtgggcctgacagatgtggtggagaggaacagccaggtgctgcacgtgcggggccgcggggactgggtgtcctgtggggccatgctgagccccctgctggcccggagcaacaccagccaggccagcctgaatggcatctaccagagccccatcgacttcaacaacagcgagttctacggcttcagcgagttcttctactgcacagaagatgtgctgagaattggaggccgctaccacggccccacctttgccaaggccgcccaggactactgcggcatggcctggagcgtgctgacccagcgcttcaagaatggcctcttcagcagccatgctgatgagcaccggctgaagtaccagtgcttcaagagcgcctggatgtaccaggtgctgcacgagggcttccacttcccctatgactaccccaacctgaggacagcccagctggtgtatgaccgggaggtgcagtggaccctgggcgccatcctgtacaagacccgcttcctgcccctgcgggacctgcggcaggagggcgtgcggcaggcccacggctcctggttccggctgagctttgtgtacaaccactacctgttctttgcctgcatcctggtggtgctgctggccatcttcctgtacctgctgcggctgcggcgcatccaccaccggcagacccgggccagcgcccccctggacctgctgtggctggaggaggtggtgcccatgatgggcgtgcaggtgggcccctag

SEQ ID NO: 203836 - DNA, 1815 bp, Artificial Sequence
  derived and/or modified sequence
atggcccggatcagcttcagctacctgtgccccgccagctggtactttacagtgccaacagtgtcccccttccttcgtcagagagttgctttcctcgggctttttttcatctcatgtttgctgcttctgatgctgattattgatttccgacactggagcgcctccctgcctcgtgatcgacagtatgagaggtatttagccagagttggggagctggaggccacggacacggaagacccgaacctgaactatgggctggtggtcgattgcggaagttcagggtccaggatttttgtgtacttctggccgcggcataacgggaaccctcatgatttactggatataaaacagatgagagaccgcaactcccagcctgtggtgaaaaaaattaaacccggcatctcagctatggccgatacccctgagcatgcatctgattacctaaggcctcttttgagttttgcggcagcgcacgttccggtgaaaaaacataaagagacgccgctgtatattctctgcaccgccggcatgcgactgctgcccgagaggaagcagctggctatcctggcagatttggttaaggacctgcctctggaattcgactttttgttctcacagtctcaggctgaggtgattagcggtaagcaggagggagtgtacgcatggattggcattaatttcgtgttgggccgatttgaccacgaggatgagtcagacgccgaggccacccaggaactagccgctggccgtaggcgcaccgtgggcatactggacatgggaggtgccagtctgcagattgcatacgaggttcctacctctacctcagtgttacctgccaagcaggaggaagcggcgaagatcttactggctgagttcaatctaggttgcgatgtgcagcacacagaacacgtttatcgggtgtatgtaacgacctttctgggcttcggcggtaacttcgcaaggcagaggtacgaagacctggtgctgaatgagactctgaacaagaatcgactgctggggcagaagacagggctaagtcctgacaaccctttccttgatccatgcctccctgtgggtctaactgatgtggttgaacggaatagtcaggtcttgcacgttcggggtcgtggagactgggtctcatgtggggccatgctgtctcctctgctggcgcgatcaaacacaagccaggcaagcctgaatggcatctaccagagtcccatcgacttcaacaattccgagttctacgggtttagcgaatttttctactgtacagaagacgtgctacgcatcggcggccgataccacggccccacttttgctaaggctgcacaggactactgtggcatggcttggtcagtgctcacccagcgatttaaaaatggcctattcagctcccatgcagatgaacataggctgaagtaccagtgttttaagtcagcgtggatgtaccaggttttgcatgaaggcttccatttcccttacgattaccctaacctgagaactgcgcagctggtttacgaccgcgaggtgcaatggaccctgggagccatcttgtataagacgaggtttctgcctttacgcgacctgaggcaagaaggagtaagacaggctcatggcagctggttccgcctctctttcgtgtataatcattacttgtttttcgcgtgtattctcgtagtcctgctcgccatctttctttatcttctgcggctgcggcggatacaccacaggcaaaccagggctagcgcaccccttgacctcttgtggctggaagaggttgtccctatgatgggcgtgcaagtggggccttag

SEQ ID NO: 203837 - DNA, 1815 bp, Artificial Sequence
  derived and/or modified sequence
atggcccgtatttctttctcatacttgtgtccagcctcatggtacttcacagttcctaccgtgtctcctttccttcggcaacgtgtggctttcctgggcctttttttcatcagctgtctgctgctcttgatgctcataattgattttcgacattggtccgcttcgttgcctcgagatcgccaatacgagcggtacctcgccagagtcggggaattagaagcgaccgacaccgaggaccctaatctgaactacgggctggtagtagattgtggctcttctggatcacggattttcgtctacttctggcctagacacaatggcaaccctcacgacctcctggacattaaacagatgcgggatcggaactctcaaccagttgtgaaaaagattaaacctgggatttccgctatggccgacactccagaacacgcttcagactacctgcgaccactgctttcattcgcagctgctcacgtgcccgtgaaaaaacacaaagagacacccctgtacatcctatgcacagccggaatgaggttgctgcccgagcggaaacagttagccatcctcgccgacctggttaaagatttaccattagagttcgatttcctgtttagtcagtcccaggcagaagttatcagcggcaaacaagaaggtgtatacgcttggatcgggatcaacttcgtgttaggcagatttgaccacgaggacgagtcagatgctgaagccacccaggaacttgctgctggtaggaggcgaaccgtcggcatcctggatatgggcggtgccagtctgcaaatagcttacgaggtacccacaagcaccagtgtgctgcctgccaaacaagaagaagcagcaaaaattctgttggctgagttcaacctgggctgcgacgtccagcacactgagcacgtctacagagtctacgtgacgactttcctgggcttcggaggcaatttcgccagacagcgatacgaagatcttgtcttgaacgaaactttgaataaaaatagactgcttgggcagaagacggggctcagccccgataaccccttcctggacccctgtctgcctgtaggactgacggacgtggttgagcggaattcccaggtactccacgtgagaggccgtggagattgggtgagttgcggagccatgctttcaccgctgttggcaagatctaacactagtcaggcctccctgaacgggatataccagagtccaatagattttaataattctgagttttacgggttctctgaattcttttattgcacggaggatgtgctgcgtataggcggtagatatcacggacctacttttgccaaggcagcccaggactactgtggtatggcctggtctgtcctgactcagaggtttaaaaacggtctattttcgagccacgctgatgaacaccgcctcaagtatcagtgcttcaagtcagcatggatgtatcaggtgttacacgaaggctttcacttcccctacgactatccaaatttgagaacggctcagctagtatatgatcgcgaagttcagtggaccctcggtgccatactgtataagaccaggtttcttccccttcgcgatcttcggcaggagggtgtacgccaggcccatggatcctggtttcgcctcagtttcgtttataatcactacctctttttcgcttgtatcttggtggtcctgctggccatctttctctatctgctccggctccggcgaattcaccataggcagacacgcgcaagcgcccctctggatctactgtggctggaagaagtcgtcccaatgatgggagtccaggtcggtccatag

SEQ ID NO: 203838 - protein, 295 aa, Artificial Sequence
  derived and/or modified sequence
MAGYLPPKGYAPSPPPPYPVTPGYPEPALHPGPGQAPVPAQVPAPAPGFALFPSPGPVALGSAAPFLPLPGVPSGLEFLVQIDQILIHQKAERVETFLGWETCNRYELRSGAGQPLGQAAEESNCCARLCCGARRPLRVRLADPGDREVLRLLRPLHCGCSCCPCGLQEMEVQAPPGTTIGHVLQTWHPFLPKFSIQDADRQTVLRVVGPCWTCGCGTDTNFEVKTRDESRSVGRISKQWGGLVREALTDADDFGLQFPLDLDVRVKAVLLGATFLIDYMFFEKRGGAGPSAVTS

SEQ ID NO: 203839 - protein, 223 aa, Artificial Sequence
  derived and/or modified sequence
MAGYLPPKGYAPSPPPPYPVTPGYPEPALHPGPGQAPVPAQVPAPAPGFALFPSPGPVALGSAAPFLPLPGVPSGLEFLVQIDQILIHQKAERVETFLGWRPVIGMNCALGPGSPWVRRPRRATAAPVCAVAPAGRCVSAWPTPGTVRCCVCSARCTVAAAAAPVASRRWKYRLHQAPPLATCYRPGIPSSPSSPSRMPIARQSCEWWGPAGPVAVAQTPTLR

SEQ ID NO: 203840 - DNA, 888 bp, Artificial Sequence
  derived and/or modified sequence
atggccggatatctgcctccgaaagggtacgccccatccccgccccccccttatcctgtcacacccgggtaccccgagccagcattacaccctggtcccgggcaggcccccgtgcctgcacaggtccccgccccagctcccggattcgctctgtttccttcaccgggacccgtcgccctcggcagcgccgcaccatttttgcccctgcctggcgtcccgtctggtctcgagttcctggtacagatagaccagatccttattcaccagaaagctgaaagggttgaaaccttcctaggttgggagacatgcaatcggtatgaactgaggagcggggccggccagcctttaggccaggctgctgaggaatccaactgctgcgccagattgtgctgcggcgccagacgaccccttagggtgcgcctcgccgacccaggggatcgggaggtgctacggctcctgagaccgttgcactgcggttgtagttgctgtccttgcggcttacaggagatggaggtccaggccccacccggaactacgatcgggcatgtgctgcagacgtggcatccgtttctgcccaagtttagcatccaggacgccgacagacaaacagtgctaagggttgtcgggccctgttggacctgtgggtgcgggaccgataccaacttcgaggtgaagacacgcgatgaatcacgatctgtgggccgtatttcgaagcagtggggaggattggtccgcgaggcccttacggacgcagacgacttcggactccagttccccctggatctagatgtcagagttaaagctgttctgttaggtgcaacatttctaatcgattacatgttcttcgagaagcgtggcggcgccggaccatcagccgtgacatcctag

SEQ ID NO: 203841 - DNA, 672 bp, Artificial Sequence
  derived and/or modified sequence
atggcaggctacctcccacccaaaggatatgcaccttcgcccccgccgccttatccagtgacgccaggttaccccgaacctgccctgcaccccggacctggccaggccccagtgcccgcacaggtcccggctccagctcccggcttcgcgctgtttccttccccaggccctgtagctttgggcagcgcggccccattcttacccctccccggcgtcccttcaggattggaattccttgtacagatcgaccagattttaattcaccagaaggcagaacgggtcgagacatttctgggctggaggcctgtgattggaatgaactgcgctctaggcccgggatccccatgggtgagacgcccaaggcgggccaccgctgccccagtctgcgccgtcgctcccgcagggagatgcgtgagcgcctggcctacccccggaacagtgaggtgttgtgtttgttccgcccggtgcacggtggcagcagcagccgcacctgtggcctccaggagatggaagtacaggctgcaccaggctccgcctttggcgacatgctatcgacctggtatcccctcatctccaagttccccttcacgtatgccgatcgcccgccaatcgtgtgaatggtggggaccagctgggcctgtggcggttgcgcagacccctactctgcggtag

SEQ ID NO: 203842 - DNA, 888 bp, Artificial Sequence
  derived and/or modified sequence
atggctggttacctccccccgaagggatatgcacccagtccacctcctccgtaccccgtgacccccgggtatcctgaacccgccctacacccagggccaggccaggcaccagtgcctgctcaggtcccggctcctgctccaggatttgcgttattccccagccctgggccggtcgccctgggctcagccgcccccttcctgccactaccaggggtgccaagcggactggagttcctggttcaaattgaccagattttaatacaccaaaaggcagaacgcgtggaaacctttctcgggtgggagacttgcaacagatatgagctccgctccggagccggccagcccctggggcaggccgctgaagagagcaattgctgtgcccgcctttgctgcggtgccagacggcctttacgagtgcgcttggcggaccccggcgaccgggaggtcttgcgcttactacgcccactgcactgtgggtgtagttgctgtccctgcggtctgcaggagatggaggtccaggctcctcccggcacgaccattggacacgttttacagacgtggcatccctttctgccaaagttctccattcaggatgccgaccgccagacagtacttcgcgtggttggaccctgctggacttgcggatgcggtacagatactaattttgaagtgaaaaccagagacgaatcaaggagtgtgggaagaatttccaaacagtggggggggctggtgagagaggcgttgactgatgcggacgatttcggactccagtttccactggatcttgacgttcgggtcaaggcggtccttctgggagcaacatttctaatcgactatatgttctttgagaagaggggaggggccggcccaagcgccgtgacctcttag

SEQ ID NO: 203843 - DNA, 888 bp, Artificial Sequence
  derived and/or modified sequence
atggcagggtatctgccccctaaaggatatgccccatcacccccaccaccttatcccgtgacccccggttacccagaaccggcgttgcaccccggaccaggccaggccccagtacctgcccaggtgcctgcccccgcccctggatttgccctgtttccttctccaggaccagtggctctgggctccgccgcgcccttcctgcccctgccaggggtaccatctgggttggagttcctggtgcaaatcgatcaaatactgatccaccagaaagccgagagagttgagacttttctggggtgggagacttgtaataggtatgaactcagatccggggctggccaaccgctcggccaggcagctgaggagagcaactgttgcgctagactgtgctgtggcgcgcgtcggcctcttcgcgtgagactcgctgatcctggcgatagggaagtgctgagactgcttcgtccacttcactgtggatgttcatgctgcccctgtggcctccaggaaatggaggtccaggcccccccaggcactaccataggtcacgtgctgcagacctggcacccctttttgcctaagtttagcatccaggacgcagaccggcaaaccgtgctccgtgtggtgggcccatgctggacatgtggatgtgggacagatacaaactttgaggtgaaaactagagatgagtcacgctccgtgggaaggatttcaaagcagtggggggggttggtgcgagaggctctgacggacgccgacgatttcggcctgcagttccccctggacctggatgtgcgggttaaagctgttctgcttggagctaccttcctgatcgattatatgttttttgagaagagggggggcgccggaccgtctgcagtgactagttag

SEQ ID NO: 203844 - DNA, 888 bp, Artificial Sequence
  derived and/or modified sequence
atggccggctacctgccccccaagggctacgcccccagccccccaccaccctaccctgtgaccccaggctacccagagcccgccctgcaccctggccctggccaggcccctgtgcctgcccaggtgcctgccccagcccctggctttgccctcttccccagccctggccctgtggccctgggcagcgctgcccccttcctgcccctgcccggggtgcccagcggcctggagttcctggtgcagattgaccagatcctgatccaccagaaggccgagcgggtggagaccttcctgggctgggagacctgcaacagatatgagctgcggagcggggccggccagcccctgggccaggccgctgaggagagcaactgctgtgcccggctgtgctgcggggcccggcggcccctgcgggtgcggctggccgaccccggggaccgggaggtgctgcggctgctgcggcccctgcactgcggctgcagctgctgcccctgtggcctgcaggagatggaggtgcaggcccctcctggcaccaccatcggccacgtgctgcagacctggcaccccttcctgcccaagttcagcatccaggatgctgaccggcagacagtgctgcgggtggtgggcccctgctggacctgtggctgcggcacagacaccaactttgaggtgaagaccagagatgagagccgctctgtgggccgcatcagcaagcagtggggcggcctggtgcgggaggccctgacagatgctgatgactttggcctgcagttccccctggacctggatgtgcgggtgaaggctgtgctgctgggcgccaccttcctgattgactacatgttctttgagaagaggggcggggccggccccagcgctgtgaccagctag

SEQ ID NO: 203845 - DNA, 672 bp, Artificial Sequence
  derived and/or modified sequence
atggccggctacctgccccccaagggctacgcccccagccccccaccaccctaccctgtgaccccaggctacccagagcccgccctgcaccctggccctggccaggcccctgtgcctgcccaggtgcctgccccagcccctggctttgccctcttccccagccctggccctgtggccctgggcagcgctgcccccttcctgcccctgcccggggtgcccagcggcctggagttcctggtgcagattgaccagatcctgatccaccagaaggccgagcgggtggagaccttcctgggctggaggcctgtgattggcatgaactgtgccctgggccctggcagcccctgggtgcggcggccccggcgggccacagctgcccctgtgtgtgctgtggccccagctggccgctgtgtgtctgcctggcccaccccaggcaccgtgcgctgctgcgtgtgcagcgcccgctgcaccgtggccgctgctgctgcccctgtggccagccgccgctggaagtaccgcctgcaccaggccccacccctggccacctgctaccggcccggcatccccagcagccccagcagccccagcaggatgcccatcgcccggcagagctgtgagtggtggggccctgctggccctgtggccgtggcccagacccccaccctgaggtag

SEQ ID NO: 203846 - DNA, 888 bp, Artificial Sequence
  derived and/or modified sequence
atggccggctacctgccccccaagggctacgcccccagcccccccccaccatacccagttactccagggtaccctgaacccgctctgcacccaggacccgggcaggccccagtgccagcccaagtgcctgctcccgcaccaggattcgctttgtttccctccccgggaccggtagccctgggttctgctgcaccgtttctacctcttccgggggttccatctgggctagagttcttagtgcaaattgatcagatactgatacaccagaaggctgaaagggtggagacgtttctaggctgggagacctgtaatcgctatgagctcagaagtggggctggtcagcctttggggcaggcagccgaggaatccaattgctgtgctagactctgttgtggcgccagaaggcccctgagagtccgtttggcagatccaggagaccgcgaagtgttgcgactgttgcggcctctacattgtggctgctcttgctgcccttgcggtttacaggaaatggaagtccaagcgcctcccggcaccaccataggacatgtcctccagacctggcaccccttcctacccaaatttagtatccaagacgcggaccgacaaaccgttcttagagtggtgggcccctgctggacatgtggctgcggaaccgataccaactttgaggtcaaaacccgggatgagagcagaagtgtcggcagaatctcaaagcagtggggcgggttggtgcgggaagccctaacagacgccgacgactttgggctgcagttcccacttgatttggatgtccgggtgaaggccgtgctgctgggagctacctttctcattgactacatgttttttgagaagaggggcggcgctggaccctctgccgtgacgagctag

SEQ ID NO: 203847 - DNA, 672 bp, Artificial Sequence
  derived and/or modified sequence
atggccggctacctgccccccaagggctacgcccccagccccccccccccctatcccgttacaccggggtatccagaaccagcactgcatccaggccccggccaggccccggtgccagctcaggtccccgcacccgcaccgggatttgcactcttcccgtctcctggacccgtcgcactgggctcagcagctccgtttctgcctctccccggagtgccttccggcctcgaatttctggtccagatcgatcaaatcctgatccaccagaaagcggaaagggtggagaccttcctagggtggagacccgtcatcgggatgaattgtgccctcggccctgggagcccttgggttaggagaccccgtcgggcaacagctgcccctgtctgtgccgtggcacccgcaggtcgttgtgtgtcagcctggccaactcctggaactgtgagatgttgcgtctgcagcgctcggtgtactgtagccgcagcggcagcccccgttgcttcaaggcggtggaagtatcgcttacaccaggcaccccctctggctacctgctatcggccggggatccctagcagccctagcagcccttccaggatgcctattgcgcgccagtcctgtgagtggtggggccccgccggccccgtggctgtcgcccaaacacccaccctgcgatag

SEQ ID NO: 203848 - DNA, 888 bp, Artificial Sequence
  derived and/or modified sequence
atggccggctacctgccccccaagggctacgcccccagccccccccccccttatccagtcactcctggctaccccgagccagctctgcatcccgggcccggccaggcgccggtgcccgcccaagtaccggctccggcgccaggtttcgccctgttcccgtccccgggtcccgtggctttgggatctgccgctcccttcctgcctttgcccggggtgccctcaggcctggagtttctggtgcagatagatcaaattctgatccatcagaaggccgagagggtcgagactttcctggggtgggagacttgtaatcgttatgaattgagaagtggagcaggccaaccattggggcaggcggcggaggagagtaattgctgtgcgcgactttgttgtggtgctaggaggccgttgagggtgcgactcgctgatccaggagatagagaggtgcttagactcctgcgtccgctccattgtggatgttcatgctgcccttgcggcctacaggaaatggaagtccaggcccctcccggcaccacaattgggcacgtcttacagacctggcatccgttcctacccaaattctctatccaagacgctgaccgccagactgtattgagggtggtcggcccatgttggacctgcggctgtggcactgatacaaattttgaggttaagacgagggacgaatcgagatcagtgggtagaatcagcaaacagtggggcggtctagtcagagaagccttgacggatgctgacgatttcgggctgcagtttcctctggacctggatgtgcgggtaaaagcagttctactgggcgctaccttcttgattgattacatgtttttcgaaaagagaggcggagcagggccaagcgcggtaacctcatag

SEQ ID NO: 203849 - DNA, 888 bp, Artificial Sequence
  derived and/or modified sequence
atggccggctacctgccccccaagggctacgcccccagccccccccctccatatcccgtgaccccaggttaccctgagcccgccctgcaccctggtcctgggcaggctcctgtacctgcccaagtgccagcgccagcaccagggtttgcacttttccctagccccggcccagtcgccctgggatcagcagcccccttcctgccgctgcccggcgtgccctccggtttagaattccttgtccagattgaccagatcctcatccaccagaaggccgagagagttgaaactttcctgggatgggaaacctgcaataggtatgaactcagaagcggcgctgggcaacctttaggccaagcagccgaagagtccaactgctgcgcaagactttgttgtggagcgcgacgccccctcagggtacggctcgccgatcccggcgaccgggaagtgcttcggctcctcagaccccttcactgtggatgcagctgctgcccctgcggactgcaggagatggaggtgcaggctccaccaggcacgacgattggccatgtgctgcagacctggcacccgtttctccccaaattttccattcaggatgccgatagacagactgtgctgcgggtggtgggcccttgttggacatgtggatgcggcacagacacgaatttcgaggtgaagacaagggatgagtcacgaagcgtcggacgaatctcaaagcaatgggggggcctcgttagggaagctttgaccgatgcagatgattttgggttgcagtttccattggatttggacgtgcgggtgaaggccgtactactcggggctacattcctcatcgattacatgtttttcgaaaaaagaggcggagctggccccagcgccgtaactagttag

SEQ ID NO: 203850 - DNA, 1746 bp, Artificial Sequence
  derived and/or modified sequence
ctgtgagctgccgagtgctaggcacccgggctcttctgggggctccagtcagaggcgccgcccaagagaccctgggccggcgccgggcgcagctgcctctccgtctttgtgtctgtctctgtgtctgtctggctatctccgagtttgcctccgcttccagaactaagccacccagacaccatcatctcgaaaaccccagcccttctcccatggcaggctacttgccccccaaaggctacgccccttcgcccccacctccctaccctgtcacccctgggtacccggagccggcgctacatcctgggcccgggcaggcgccagtgcccgcccaggtacctgccccagctcccggcttcgccctcttcccctcgcctggccccgtggccttggggtctgctgcccccttcttgccactgccaggggtgccttctggcctcgaattcctggtgcagattgatcagattttgattcaccagaaggctgagcgagtggaaacgttcctaggctgggagacctgtaatcggtatgaactgcgctctggggccgggcagcccctgggtcaggcggccgaggagagcaactgctgcgcccgtctgtgctgtggcgcccgccggccgctgcgtgtccgcctggccgaccccggggaccgtgaggtgctgcgtttgctccgcccgctgcactgtggctgcagctgctgcccctgtggcctccaggagatggaagtacaggctccaccaggcaccaccattggccacgtgctacagacctggcatcccttcctccccaagttctccatccaggatgccgatcgccagacagtcttgcgagtggtggggccctgctggacctgtggctgtggcacagacaccaactttgaggtgaagactcgggatgaatcccgcagtgtgggccgcatcagcaagcagtgggggggcctggtccgagaagccctcacagatgcagatgactttggcctacagttcccgctggacctggatgtgagggtgaaggctgtgctgctgggagccacattcctcattgactacatgttctttgagaagcgaggaggcgctgggccctctgccgtcaccagttagaggccaccatggtgtgaggagaccatcacctcgaccagaactccagatggtcacctgccctggcccctcctctgggcagcccctttcctccatgtacactgcaggggacagaaggggggccccatccctaccctactccctggccgcctgcccctgtggttcccaaggaggggtatgtatgagagccgctctcctgctacctcccaccactgtcccagcagtccctcggcacacaggcatatcagctttcacactttccccatgcactctctcccacccccttccagggcctctgctccaaaggaggcctctggaacccaggactctggggttttacaagagggctggggtgtggaagggcaagctgcaccaaagacggtggatatagccaccgcccccccgccgctgcctagcatctgcttggccaattagttcagcctcagaccatggcactttgagggggtctctacctccccatcaacagctgcagggggaccccagtgccaacttcctctcccactagggccctgccttcagctggtgcttgctgcgattcctgtgccttatgtaactgcccttccttcccttgccctaggaaaaaggctgcatctttatatgttacattcatataaactttgtaactttttgg

SEQ ID NO: 203851 - DNA, 1734 bp, Artificial Sequence
  derived and/or modified sequence
cgagtgctaggcacccgggctcttctgggggctccagtcagaggcgccgcccaagagaccctgggccggcgccgggcgcagctgcctctccgtctttgtgtctgtctctgtgtctgtctggctatctccgagtttgcctccgcttccagaactaagccacccagacaccatcatctcgaaaaccccagcccttctcccatggcaggctacttgccccccaaaggctacgccccttcgcccccacctccctaccctgtcacccctgggtacccggagccggcgctacatcctgggcccgggcaggcgccagtgcccgcccaggtacctgccccagctcccggcttcgccctcttcccctcgcctggccccgtggccttggggtctgctgcccccttcttgccactgccaggggtgccttctggcctcgaattcctggtgcagattgatcagattttgattcaccagaaggctgagcgagtggaaacgttcctaggctggagacctgtaatcggtatgaactgcgctctggggccgggcagcccctgggtcaggcggccgaggagagcaactgctgcgcccgtctgtgctgtggcgcccgccggccgctgcgtgtccgcctggccgaccccggggaccgtgaggtgctgcgtttgctccgcccgctgcactgtggctgcagctgctgcccctgtggcctccaggagatggaagtacaggctccaccaggcaccaccattggccacgtgctacagacctggcatcccttcctccccaagttctccatccaggatgccgatcgccagacagtcttgcgagtggtggggccctgctggacctgtggctgtggcacagacaccaactttgaggtgaagactcgggatgaatcccgcagtgtgggccgcatcagcaagcagtgggggggcctggtccgagaagccctcacagatgcagatgactttggcctacagttcccgctggacctggatgtgagggtgaaggctgtgctgctgggagccacattcctcattgactacatgttctttgagaagcgaggaggcgctgggccctctgccgtcaccagttagaggccaccatggtgtgaggagaccatcacctcgaccagaactccagatggtcacctgccctggcccctcctctgggcagcccctttcctccatgtacactgcaggggacagaaggggggccccatccctaccctactccctggccgcctgcccctgtggttcccaaggaggggtatgtatgagagccgctctcctgctacctcccaccactgtcccagcagtccctcggcacacaggcatatcagctttcacactttccccatgcactctctcccacccccttccagggcctctgctccaaaggaggcctctggaacccaggactctggggttttacaagagggctggggtgtggaagggcaagctgcaccaaagacggtggatatagccaccgcccccccgccgctgcctagcatctgcttggccaattagttcagcctcagaccatggcactttgagggggtctctacctccccatcaacagctgcagggggaccccagtgccaacttcctctcccactagggccctgccttcagctggtgcttgctgcgattcctgtgccttatgtaactgcccttccttcccttgccctaggaaaaaggctgcatctttatatgttacattcatataaactttgtaactttttgg

SEQ ID NO: 203852 - DNA, 2557 bp, Artificial Sequence
  derived and/or modified sequence
ctgttctacagctatggccgggccagctgcagctttccgccgcttgggcgccttgtccggagctgcggccttaggcttcgcttcctacggggcgcacggcgcccaattcccagatgcctacgggaaggagctgtttgacaaggccaacaaacaccacttcttacacagcctggccctgttaggggtgccccattgcagaaagccactctgggcggcctgagcacgctcactgacaccgtttggcggcctgtcacccgcgtggctggggcacctgcagaaactgctgtcgctgcgaggtgcccgtgtgggtcaccgctgtgccagggagagaagacggcgaggtcgcccctgggaggcagaaggcgagccaggagccagtcctggaagccaatgagcgctcctactctctgggcatctgcagtccgagcggaaggggcgggaacgtcggcgacgccgaggagcaaagcccacgatcggcttcccggggcagcggacggctgccttcctcccggcgcaaacgcaccgcccaggagggggcgggctcggcgggtcggggggcggggccggggtccgagctcgggcccgcctccgcctccgccagctcctgtgagctgccgagtgctaggcacccgggctcttctgggggctccaggtgagcgggggcacagaggggtcagggagaccgcccttggggtggggctgtcggtctgaccgcgggtccatctgtcctgccgtcggcccacagcctcctccgcaggatgggagaacaaagggagggggcggttctggggcccccgagggaatccagggtcccaggtacccggtcccgcccactgacacttgggtttctccccgagtcagaggcgccgcccaagagaccctgggccggcgccgggcgcagctgcctctccgtctttgtgtctgtctctgtgtctgtctggctatctccgagtttgcctccgcttccagaactaagccacccagacaccatcatctcgaaaaccccagcccttctcccatggcaggctacttgccccccaaaggctacgccccttcgcccccacctccctaccctgtcacccctgggtacccggagccggcgctacatcctgggcccgggcaggcgccagtgcccgcccaggtacctgccccagctcccggcttcgccctcttcccctcgcctggccccgtggccttggggtctgctgcccccttcttgccactgccaggggtgccttctggcctcgaattcctggtgcagattgatcagattttgattcaccagaaggctgagcgagtggaaacgttcctaggctgggagacctgtaatcggtatgaactgcgctctggggccgggcagcccctgggtcaggcggccgaggagagcaactgctgcgcccgtctgtgctgtggcgcccgccggccgctgcgtgtccgcctggccgaccccggggaccgtgaggtgctgcgtttgctccgcccgctgcactgtggctgcagctgctgcccctgtggcctccaggagatggaagtacaggctccaccaggcaccaccattggccacgtgctacagacctggcatcccttcctccccaagttctccatccaggatgccgatcgccagacagtcttgcgagtggtggggccctgctggacctgtggctgtggcacagacaccaactttgaggtgaagactcgggatgaatcccgcagtgtgggccgcatcagcaagcagtgggggggcctggtccgagaagccctcacagatgcagatgactttggcctacagttcccgctggacctggatgtgagggtgaaggctgtgctgctgggagccacattcctcattgactacatgttctttgagaagcgaggaggcgctgggccctctgccgtcaccagttagaggccaccatggtgtgaggagaccatcacctcgaccagaactccagatggtcacctgccctggcccctcctctgggcagcccctttcctccatgtacactgcaggggacagaaggggggccccatccctaccctactccctggccgcctgcccctgtggttcccaaggaggggtatgtatgagagccgctctcctgctacctcccaccactgtcccagcagtccctcggcacacaggcatatcagctttcacactttccccatgcactctctcccacccccttccagggcctctgctccaaaggaggcctctggaacccaggactctggggttttacaagagggctggggtgtggaagggcaagctgcaccaaagacggtggatatagccaccgcccccccgccgctgcctagcatctgcttggccaattagttcagcctcagaccatggcactttgagggggtctctacctccccatcaacagctgcagggggaccccagtgccaacttcctctcccactagggccctgccttcagctggtgcttgctgcgattcctgtgccttatgtaactgcccttccttcccttgccctaggaaaaaggctgcatctttatatgttacattcatataaactttgtaactttttggac

SEQ ID NO: 203853 - DNA, 2032 bp, Artificial Sequence
  derived and/or modified sequence
cagggcgctgagcacgcacgccgccggcctggcggcgttcgcggggcccgggaccagccgccgccttctccaggcgctcctactctctgggcatctgcagtccgagcggaaggggcgggaacgtcggcgacgccgaggagcaaagcccacgatcggcttcccggggcagcggacggctgccttcctcccggcgcaaacgcaccgcccaggagggggcgggctcggcgggtcggggggcggggccggggtccgagctcgggcccgcctccgcctccgccagctcctgtgagctgccgagtgctaggcacccgggctcttctgggggctccagtcagaggcgccgcccaagagaccctgggccggcgccgggcgcagctgcctctccgtctttgtgtctgtctctgtgtctgtctggctatctccgagtttgcctccgcttccagaactaagccacccagacaccatcatctcgaaaaccccagcccttctcccatggcaggctacttgccccccaaaggctacgccccttcgcccccacctccctaccctgtcacccctgggtacccggagccggcgctacatcctgggcccgggcaggcgccagtgcccgcccaggtacctgccccagctcccggcttcgccctcttcccctcgcctggccccgtggccttggggtctgctgcccccttcttgccactgccaggggtgccttctggcctcgaattcctggtgcagattgatcagattttgattcaccagaaggctgagcgagtggaaacgttcctaggctgggagacctgtaatcggtatgaactgcgctctggggccgggcagcccctgggtcaggcggccgaggagagcaactgctgcgcccgtctgtgctgtggcgcccgccggccgctgcgtgtccgcctggccgaccccggggaccgtgaggtgctgcgtttgctccgcccgctgcactgtggctgcagctgctgcccctgtggcctccaggagatggaagtacaggctccaccaggcaccaccattggccacgtgctacagacctggcatcccttcctccccaagttctccatccaggatgccgatcgccagacagtcttgcgagtggtggggccctgctggacctgtggctgtggcacagacaccaactttgaggtgaagactcgggatgaatcccgcagtgtgggccgcatcagcaagcagtgggggggcctggtccgagaagccctcacagatgcagatgactttggcctacagttcccgctggacctggatgtgagggtgaaggctgtgctgctgggagccacattcctcattgactacatgttctttgagaagcgaggaggcgctgggccctctgccgtcaccagttagaggccaccatggtgtgaggagaccatcacctcgaccagaactccagatggtcacctgccctggcccctcctctgggcagcccctttcctccatgtacactgcaggggacagaaggggggccccatccctaccctactccctggccgcctgcccctgtggttcccaaggaggggtatgtatgagagccgctctcctgctacctcccaccactgtcccagcagtccctcggcacacaggcatatcagctttcacactttccccatgcactctctcccacccccttccagggcctctgctccaaaggaggcctctggaacccaggactctggggttttacaagagggctggggtgtggaagggcaagctgcaccaaagacggtggatatagccaccgcccccccgccgctgcctagcatctgcttggccaattagttcagcctcagaccatggcactttgagggggtctctacctccccatcaacagctgcagggggaccccagtgccaacttcctctcccactagggccctgccttcagctggtgcttgctgcgattcctgtgccttatgtaactgcccttccttcccttgccctaggaaaaaggctgcatctttatatgttacattcatataaactttgtaactttttggaca

SEQ ID NO: 203854 - DNA, 888 bp, Artificial Sequence
  derived and/or modified sequence
atggccggatatttgcccccaaaaggatacgccccatcgccaccgccaccctacccagtgactcccggatacccagaacccgctctgcaccctggtccagggcaggctccggtgcccgcacaggtacccgcaccggcacccggttttgcgctattccccagtccaggccctgtggcactgggatctgccgcaccattcctccccctacccggagtccccagtgggctggagttcctggtacagatcgatcagattctgatccaccagaaggcagagcgtgtcgagacttttctggggtgggagacctgtaaccgttatgagttacgatctggagccggtcagccgctgggccaggcagccgaggagagcaattgttgcgcaaggctctgctgtggagcacgccgacctttaagagtgcgccttgccgatccgggagatagggaagtcctaaggctgctccgaccactccactgtggatgttcttgctgtccatgcggactgcaggaaatggaggttcaggcccctcccggtaccacaattggtcatgtactgcaaacatggcacccttttctgccgaaattttcaatccaagacgccgaccgccagactgtgctaagggtggtcggcccttgttggacatgtggctgcggcaccgacacaaattttgaggttaagacccgcgatgaaagtagatccgtaggaaggattagcaaacagtggggcggtcttgtaagagaagccctgaccgatgcagacgactttgggttgcagtttccgctcgacctcgatgtccgagtgaaggcagtgctgcttggcgctacattcttgattgattatatgttcttcgagaagagggggggagccggtccgagtgcagtgacgtcatag

SEQ ID NO: 203855 - DNA, 672 bp, Artificial Sequence
  derived and/or modified sequence
atggccggttacttgccccctaagggttacgcgcctagcccaccgccaccttaccccgtgacgcctggatatcccgagccagctcttcacccaggacccggacaagcgcctgtgccggctcaagtgccagctccagccccaggcttcgcactgttcccaagcccaggtcctgtggccctcggtagtgccgcaccctttctccctctgccaggcgtcccctccggtctggaattcttggttcaaattgaccagatccttattcatcagaaagccgaaagagtcgagactttcttgggatggcggcctgtgatcgggatgaattgcgctctgggccctggaagcccctgggtccgccgtcctaggcgtgctaccgccgcacccgtttgcgctgtggcacccgcaggcaggtgtgttagcgcttggcctacacccggaactgtgcggtgctgcgtatgcagtgcacgatgcactgtcgcagcggcagcagctccagttgcttccaggcgctggaagtacagactacaccaggcacccccactcgccacctgctatcgtcccggtataccttcctcaccgagctcccccagccggatgccaattgcacgtcagagctgcgaatggtgggggccagccggtccagtcgccgtggcccaaacccccacactccgttag

SEQ ID NO: 203856 - DNA, 888 bp, Artificial Sequence
  derived and/or modified sequence
atggctggatacttaccaccgaagggatacgctccaagtcctccacctccatatcccgtcacaccaggctaccctgaacctgcattacacccgggtcccggtcaagcacccgttcccgctcaggtgcccgcacctgcccctggattcgcgctgttcccgagtcctggacccgttgctctcggcagcgccgcaccattcctgccgctcccaggcgtgccgagtggcctcgagttcttggtgcagatcgatcaaattctgattcaccagaaggccgagcgggttgagacattcttgggctgggagacatgcaatagatacgagctgcggtcaggcgctggccagcctctgggacaagctgccgaggagtccaactgctgtgcaaggctgtgttgcggcgctcgccgaccacttcgggtgagattggcggacccaggagaccgagaggttctcaggctgttacggcctcttcactgcggctgttcctgttgtccttgtggcttgcaggagatggaagttcaggccccacccggtacgactatcggccacgtcctgcagacatggcacccctttttgccaaaattttccatccaggacgctgaccggcagacagttctgcgggtcgtaggtccctgttggacctgcgggtgcggaacagacacaaatttcgaggtaaagactagggatgagagccggagcgtgggccgtatctctaagcagtggggcggattggtcagagaggccttaacagacgccgatgattttggactgcaattcccactcgatctggacgtgcgcgtcaaagctgtcctcctgggagctacgttcttgatagactacatgttttttgaaaaacggggaggcgctgggccttctgcggtcacttcgtag

SEQ ID NO: 203857 - DNA, 888 bp, Artificial Sequence
  derived and/or modified sequence
atggcaggctatctcccacctaaaggttatgcccctagcccaccgccaccctatccggttactcctggttatcctgagccagccctgcaccctggccctggccaggcccctgtccctgcacaggttccagccccagctcccggatttgctttgtttccctctcccggacctgtagcccttgggtccgcggcaccattcttacccctccctggcgtgcctagcggtctcgagtttctagtgcagattgaccagatcctgatccaccagaaggcagagcgcgtggaaacatttttaggatgggagacttgtaatcggtacgaactgcgctcgggggctggacaacctcttggtcaagccgcagaagagtcaaattgttgtgccaggttgtgctgcggagcaaggagaccactacgggtccgcctagccgaccctggcgatcgggaggtgctgcgccttctgcgccctctccattgcggctgctcctgctgtccgtgcggtctgcaggaaatggaggtgcaagccccacctggaactacgatcgggcatgtgcttcagacctggcaccccttcctgcccaagttctccatccaggacgccgatcgacagaccgtactgcgtgttgtcggcccttgttggacatgcggttgtggaactgacaccaactttgaggttaagacccgcgacgaatccagaagcgtggggaggatttccaagcaatgggggggactggttcgcgaggccctgacagacgcggacgactttgggctgcaattccctttggacctggacgttagagttaaagctgttctattaggggcaacatttctgatcgattatatgttttttgagaaacggggtggtgcaggacccagtgctgtgacatcctag

SEQ ID NO: 203858 - DNA, 888 bp, Artificial Sequence
  derived and/or modified sequence
atggccggctacctgccccccaagggctacgcccccagccccccccccccctaccccgtgacccccggctaccccgagcccgccctgcaccccggccccggccaggcccccgtgcccgcccaggtgcccgcccccgcccccggcttcgccctgttccccagccccggccccgtggccctgggcagcgccgcccccttcctgcccctgcccggcgtgcccagcggcctggagttcctggtgcagatcgaccagatcctgatccaccagaaggccgagagagtggagaccttcctgggctgggagacctgcaacagatacgagctgagaagcggcgccggccagcccctgggccaggccgccgaggagagcaactgctgcgccagactgtgctgcggcgccagaagacccctgagagtgagactggccgaccccggcgacagagaggtgctgagactgctgagacccctgcactgcggctgcagctgctgcccctgcggcctgcaggagatggaggtgcaggccccccccggcaccaccatcggccacgtgctgcagacctggcaccccttcctgcccaagttcagcatccaggacgccgacagacagaccgtgctgagagtggtgggcccctgctggacctgcggctgcggcaccgacaccaacttcgaggtgaagaccagagacgagagcagaagcgtgggcagaatcagcaagcagtggggcggcctggtgagagaggccctgaccgacgccgacgacttcggcctgcagttccccctggacctggacgtgagagtgaaggccgtgctgctgggcgccaccttcctgatcgactacatgttcttcgagaagagaggcggcgccggccccagcgccgtgaccagctag

SEQ ID NO: 203859 - DNA, 672 bp, Artificial Sequence
  derived and/or modified sequence
atggccggctacctgccccccaagggctacgcccccagccccccccccccctaccccgtgacccccggctaccccgagcccgccctgcaccccggccccggccaggcccccgtgcccgcccaggtgcccgcccccgcccccggcttcgccctgttccccagccccggccccgtggccctgggcagcgccgcccccttcctgcccctgcccggcgtgcccagcggcctggagttcctggtgcagatcgaccagatcctgatccaccagaaggccgagagagtggagaccttcctgggctggagacccgtgatcggcatgaactgcgccctgggccccggcagcccctgggtgagaagacccagaagagccaccgccgcccccgtgtgcgccgtggcccccgccggcagatgcgtgagcgcctggcccacccccggcaccgtgagatgctgcgtgtgcagcgccagatgcaccgtggccgccgccgccgcccccgtggccagcagaagatggaagtacagactgcaccaggccccccccctggccacctgctacagacccggcatccccagcagccccagcagccccagcagaatgcccatcgccagacagagctgcgagtggtggggccccgccggccccgtggccgtggcccagacccccaccctgagatag

SEQ ID NO: 203860 - protein, 193 aa, Artificial Sequence
  derived and/or modified sequence
MHHLNKTHSGLIHMFSIGRSYEGRSLFILKLGRRSRLKRAVWIDCGIHAREWIGPAFCQWFVKEALLTYKSDPAMRKMLNHLYFYIMPVFNVDGYHFSWTNDRFWRKTRSRNSRFRCRGVDANRNWKVKWCDVSSGSSMDWAYKNGIPYAFAFELRDTGYFGFLLPEMLIKPTCTETMLAVKNITMHLLKKCP

SEQ ID NO: 203861 - protein, 437 aa, Artificial Sequence
  derived and/or modified sequence
MKCLGKRRGQAAAFLPLCWLFLKILQPGHSHLYNNRYAGDKVIRFIPKTEEEAYALKKISYQLKVDLWQPSSISYVSEGTVTDVHIPQNGSRALLAFLQEANIQYKVLIEDLQKTLEKGSSLHTQRNRRSLSGYNYEVYHSLEEIQNWMHHLNKTHSGLIHMFSIGRSYEGRSLFILKLGRRSRLKRAVWIDCGIHAREWIGPAFCQWFVKEALLTYKSDPAMRKMLNHLYFYIMPVFNVDGYHFSWTNDRFWRKTRSRNSRFRCRGVDANRNWKVKWCDEGASMHPCDDTYCGPFPESEPEVKAVANFLRKHRKHIRAYLSFHAYAQMLLYPYSYKYATIPNFRCVESAAYKAVNALQSVYGVRYRYGPASTTLYVSSGSSMDWAYKNGIPYAFAFELRDTGYFGFLLPEMLIKPTCTETMLAVKNITMHLLKKCP

SEQ ID NO: 203862 - protein, 315 aa, Artificial Sequence
  derived and/or modified sequence
MKCLGKRRGQAAAFLPLCWLFLKILQPGHSHLYNNRYAGDKVIRFIPKTEEEAYALKKISYQLKVDLWQPSSISYVSEGTVTDVHIPQNGSRALLAFLQEANIQYKVLIEDLQKTLEKGSSLHTQRNRRSLSGYNYEVYHSLEEIQNWMHHLNKTHSGLIHMFSIGRSYEGRSLFILKLGRRSRLKRAVWIDCGIHAREWIGPAFCQWFVKEALLTYKSDPAMRKMLNHLYFYIMPVFNVDGYHFSWTNDRFWRKTRSRNSRFRCRGVDANRNWKVKWCGKFGTNWDPDPKVSAGFTLQNMSPEDSHGRLMFFCM

SEQ ID NO: 203863 - DNA, 1314 bp, Artificial Sequence
  derived and/or modified sequence
atgaagtgcttagggaagagacggggacaagctgcggcgtttctcccactgtgttggctgtttctcaagattctgcagccaggccactcacatctgtacaacaacagatacgcaggtgataaggttattcgctttatcccaaaaaccgaagaggaggcctatgctctgaaaaaaatcagctatcaacttaaggttgacttgtggcaaccctctagcatctcttatgtgtccgagggcacggtcactgacgtgcatatcccacagaacggctccagggcactgctggcctttttacaggaggccaatattcaatataaagttctgatcgaagatctccagaagactttggagaagggaagcagtctccatacacagagaaatcggcggagcttgtccggttacaattacgaggtttaccactcactcgaagaaatccaaaactggatgcatcacctaaacaagacacacagcgggctgattcacatgttttctatcggccgcagctacgagggaaggagcttatttattctgaagctcggacgccgtagtcgtctgaagcgcgcagtttggatcgattgcgggattcatgcacgcgagtggatcggtcccgcgttctgccaatggtttgtcaaggaagccttgctgacctataagtcggacccagctatgcgaaaaatgttgaatcatctctacttttatattatgcccgtgtttaatgtggatgggtaccatttttcctggaccaacgacagattctggcggaaaactcgatcaaggaactctcgctttcgctgtcggggtgtggatgccaatcgcaactggaaggtaaaatggtgtgatgagggcgcatccatgcacccctgcgacgacacgtactgcgggcctttccctgagtctgagccggaggtgaaggctgtggccaacttcctgcgcaaacatagaaaacacatcagggcttacctgagtttccacgcatacgctcagatgctgctctatccctactcgtacaagtatgccactattccgaactttcgatgtgtggagtccgcagcctataaggccgtgaacgcccttcagtcagtttatggagtgaggtacaggtacgggccagcctccacgaccctctatgtgtctagtggcagttcaatggactgggcctacaaaaatgggatcccgtatgcctttgcctttgagctgcgggataccggatattttgggttcctgctacctgaaatgctcatcaaacctacatgtacagaaactatgttggctgtgaagaatatcactatgcacctgctgaagaagtgtccctag

SEQ ID NO: 203864 - DNA, 948 bp, Artificial Sequence
  derived and/or modified sequence
atgaagtgcctaggtaagaggagaggtcaagccgccgcctttttaccactgtgctggctttttctgaaaattttacaacctgggcactcccatctgtacaacaatcgctacgctggggataaggtgatcagattcattcccaagacagaggaagaagcatatgcattaaaaaagatctcctaccagctcaaagttgacctgtggcagcctagcagtatctcatacgtgtctgaagggaccgttaccgatgtgcacatcccacagaacggaagtagggctctgttagcgtttctgcaggaagctaacatccaatacaaggtactcattgaggatctgcaaaagacactggagaaagggagttcactccatacgcagcggaacagacggagcttgagcggatacaattatgaggtgtaccatagcctagaggagattcaaaattggatgcaccatctcaataagacgcatagcgggctcattcatatgttttcgattggcagatcctacgagggccgcagcctcttcattctcaagctgggcaggaggtctcgattgaagcgcgccgtgtggatcgattgcggcatacatgctagagagtggatcgggccagccttttgtcagtggttcgtcaaagaagccctcctgacatacaagagcgaccccgccatgcgtaaaatgttaaatcatttgtacttctatatcatgccagtgtttaacgtcgacgggtatcatttctcatggacaaatgatcgtttctggcgcaagactcggtcacgaaatagtcggttccgttgtcggggcgtcgacgccaaccgcaattggaaagtcaagtggtgtggcaaatttgggaccaattgggacccagaccccaaggtgtctgccgggtttacacttcaaaacatgtctcctgaagactctcacggcaggctgatgttcttctgcatgtag

SEQ ID NO: 203865 - DNA, 1314 bp, Artificial Sequence
  derived and/or modified sequence
atgaagtgcctgggcaagagaagaggccaggccgccgccttcctgcccctgtgctggctgttcctgaagatcctgcagcccggccacagccacctgtacaacaacagatatgctggggacaaggtgatccgcttcatccccaagacagaggaggaggcctatgccctgaagaagatctcctaccagctgaaggtggacctgtggcagcccagcagcatctcctatgtgtctgagggcaccgtgacagatgtgcacatcccccagaatggcagccgggccctgctggccttcctgcaggaggccaacatccagtacaaggtgctgattgaggacctgcagaagaccctggagaagggcagcagcctgcacacccagaggaacagaagaagcctgagcggctacaactatgaggtgtaccacagcctggaggagatccagaactggatgcaccacctgaacaagacccacagcggcctcatccacatgttcagcatcggccgctcctatgagggccgcagcctcttcatcctgaagctgggcagaagaagccggctgaagagagctgtgtggattgactgtggcatccacgcccgggagtggattggccctgccttctgccagtggtttgtgaaggaggccctgctgacctacaagagtgaccctgccatgaggaagatgctgaaccacctgtacttctacatcatgcctgtgttcaacgtggatggctaccacttctcctggaccaatgaccgcttctggaggaagaccaggagcaggaacagccgcttccgctgccggggcgtggatgccaacagaaactggaaggtgaagtggtgtgatgagggcgcctccatgcacccctgtgatgacacctactgcggccccttccctgagagcgagcctgaggtgaaggctgtggccaacttcctgaggaagcacaggaagcacatccgggcctacctgtccttccacgcctatgcccagatgctgctgtacccctacagctacaagtatgccaccatccccaacttccgctgtgtggagagcgctgcctacaaggctgtgaatgccctgcagagcgtgtatggagtgcgctaccgctatggccctgccagcaccaccctgtatgtgagcagcggcagctccatggactgggcctacaagaatggcatcccctatgcctttgcctttgagctgcgggacaccggctacttcggcttcctgctgcctgagatgctgatcaagcccacctgcacagagaccatgctggccgtgaagaacatcaccatgcacctgctgaagaagtgcccctag

SEQ ID NO: 203866 - DNA, 948 bp, Artificial Sequence
  derived and/or modified sequence
atgaagtgcctgggcaagagaagaggccaggccgccgccttcctgcccctgtgctggctgttcctgaagatcctgcagcccggccacagccacctgtacaacaacagatatgctggggacaaggtgatccgcttcatccccaagacagaggaggaggcctatgccctgaagaagatctcctaccagctgaaggtggacctgtggcagcccagcagcatctcctatgtgtctgagggcaccgtgacagatgtgcacatcccccagaatggcagccgggccctgctggccttcctgcaggaggccaacatccagtacaaggtgctgattgaggacctgcagaagaccctggagaagggcagcagcctgcacacccagaggaacagaagaagcctgagcggctacaactatgaggtgtaccacagcctggaggagatccagaactggatgcaccacctgaacaagacccacagcggcctcatccacatgttcagcatcggccgctcctatgagggccgcagcctcttcatcctgaagctgggcagaagaagccggctgaagagagctgtgtggattgactgtggcatccacgcccgggagtggattggccctgccttctgccagtggtttgtgaaggaggccctgctgacctacaagagtgaccctgccatgaggaagatgctgaaccacctgtacttctacatcatgcctgtgttcaacgtggatggctaccacttctcctggaccaatgaccgcttctggaggaagaccaggagcaggaacagccgcttccgctgccggggcgtggatgccaacagaaactggaaggtgaagtggtgtgggaagtttggcaccaactgggaccctgaccccaaggtgtctgctggcttcaccctgcagaacatgagccctgaggacagccacggccgcctgatgttcttctgcatgtag

SEQ ID NO: 203867 - DNA, 1314 bp, Artificial Sequence
  derived and/or modified sequence
atgaagtgcctgggcaagcggcggggccaggccgccgccttcctgccactgtgctggctctttctgaagatattacaaccgggccacagccacctctacaacaatcgctatgctggtgataaggtcatacgcttcatacctaagactgaagaagaggcctatgccctaaaaaaaatttcttatcagctgaaagtggatttgtggcagcccagttccatttcctacgtgtccgagggaaccgtgacagacgtgcacatcccgcaaaacggcagtagggctcttttggccttcttacaggaggctaatatccaatacaaagtgctgatcgaagatcttcaaaagactctagaaaaaggcagctctctccatactcaacgaaatcgaagatctctgtctggctataactatgaggtgtaccattcactggaagagatccagaattggatgcaccatcttaacaagacccactctggtctgattcacatgttttccatcgggcgatcctacgagggacggtccctgttcatcctgaagctgggtcggaggtcaagattaaagagggccgtatggatagactgcggcatccatgcgagagagtggatcggtccagcattttgccagtggttcgttaaagaggccttgctgacttacaaatccgatccagcgatgagaaaaatgctgaaccacctctatttctatatcatgcccgtcttcaatgtggatggctatcacttctcatggacgaatgataggttttggaggaagacaagaagccgcaactctcggttcagatgccggggcgtggatgctaaccggaattggaaagtcaagtggtgtgacgagggggcaagcatgcatccgtgtgatgatacttactgtggtccctttccagaatcagaaccagaggtaaaagccgtggccaatttcctccggaagcatcggaagcatatccgcgcttacttgtcatttcacgcctacgcacagatgctgctctatccttatagctacaaatacgctacaattcctaatttcaggtgtgttgaatcagctgcatataaagctgttaacgctttgcaatctgtatacggcgtgcggtaccggtacggccccgctagcaccaccctctatgttagctcaggaagttccatggattgggcttacaaaaacggtatcccctatgccttcgccttcgaattaagggataccggttactttggttttcttctccctgagatgctgataaagcctacgtgtaccgagacaatgttggcagtcaaaaacataactatgcacctgcttaaaaagtgcccgtag

SEQ ID NO: 203868 - DNA, 948 bp, Artificial Sequence
  derived and/or modified sequence
atgaagtgcctgggcaagcggcggggccaggccgccgccttcctgcctctgtgctggctgtttctgaagatactacagcccggccactcccacctctacaacaatagatatgccggagacaaagttattagatttattcccaaaactgaggaagaggcatacgctttgaagaaaatttcttatcagctaaaggtggatctctggcagcctagttcaatctcctatgtgtccgaaggtactgtgaccgacgtgcacattcctcagaacggatcccgagcccttctggcttttctccaggaggccaatattcagtataaggttctcatcgaggatttacagaaaacgctggagaagggcagcagtctccacacgcagaggaatcgtaggtcattgagcgggtacaactatgaagtataccatagcttagaggagattcaaaattggatgcatcacctgaataaaacccactcgggcctgatccacatgttctcgatcggccgtagctatgagggaagatccttattcattttaaagctgggcaggaggtctagattgaagcgagctgtttggattgattgtggcatacatgcaagagagtggatcgggcccgccttttgccagtggttcgtcaaggaggctctgttgacgtacaagtccgaccccgcaatgagaaaaatgttgaaccacctctacttctacatcatgccagtgtttaatgtcgacggatatcacttctcctggaccaatgatcgtttttggcgcaaaacccgatctagaaattcacgttttaggtgtcggggcgtggatgctaatcgaaactggaaagtgaaatggtgtgggaaatttggtaccaattgggaccccgatccaaaggtgtccgccgggtttacactgcagaatatgtcgcctgaggattcccatggcagactcatgtttttctgcatgtag

SEQ ID NO: 203869 - DNA, 1314 bp, Artificial Sequence
  derived and/or modified sequence
atgaagtgtcttggaaaaagaagaggccaggccgcagcctttttgcctctgtgctggctgtttttgaagatcctgcaaccaggtcactcacatctctataacaaccgttacgcaggtgacaaggttatcagattcattccaaaaacagaagaggaggcctatgcgctcaagaagatttcgtaccaattaaaggtagacctatggcagccgtccagcatcagctacgtcagcgagggcaccgtcaccgacgttcacataccacagaacggatcgcgcgctcttctggcctttcttcaggaagccaatattcagtataaggtgcttatagaggacctccagaagacactagaaaagggtagttctttgcacacacagaggaaccgaaggtctctgtctggatacaactatgaggtgtaccacagcctggaagagattcagaattggatgcaccacttaaataaaacacattccggattaatacatatgttttcgatcggcaggagctacgaaggcagaagtcttttcattctgaagctcgggagacggtcaaggctcaagagagcagtgtggatcgattgtggcatacacgcccgagagtggattgggccagccttttgtcagtggttcgtgaaagaagccctccttacttataaatctgatccggctatgcggaagatgcttaaccatctgtatttttacatcatgcctgtgtttaacgttgatggataccacttcagctggaccaatgacagattctggcgcaaaacccgcagcaggaacagcaggttccggtgtcgcggtgtggatgctaacagaaattggaaggtgaaatggtgtgacgagggagcctccatgcatccatgcgacgatacatactgtgggccattccctgaatccgaaccagaggtgaaggccgtggccaatttcttacgtaagcataggaagcacataagggcttatctcagcttccacgcctatgcccagatgttgctgtacccgtactcatataaatacgctaccatcccaaacttcagatgtgtggagagcgcagcttataaagcagtaaacgctctgcaaagtgtatatggcgtgcggtaccgctacggacctgctagtacgacgctttatgtcagctctggctcctctatggactgggcctataagaatgggatcccctacgccttcgccttcgagctgagagacaccggctactttggattcctactgccagaaatgttgatcaaacctacctgcaccgagactatgctggccgtaaagaatattactatgcatctgttgaagaaatgcccttag

SEQ ID NO: 203870 - DNA, 948 bp, Artificial Sequence
  derived and/or modified sequence
atgaagtgcctcgggaagaggagaggacaggcggcagcgtttctgcccctctgctggctcttcctcaaaatcctccaacccggacatagtcatttatacaacaaccgctatgcaggtgacaaggttatccggttcattccaaaaacagaagaagaagcctacgcgctgaagaagataagctaccagctcaaagttgacctgtggcagccaagctctatctcgtatgtgtcggagggcacggtgaccgacgtccacatcccacaaaatgggagtagggcacttctggcgtttcttcaggaagccaatattcagtataaggtgctcattgaggacctgcagaagactttagagaaaggcagctccctccacacccaaaggaaccgccgtagtctgagtggctataactacgaggtgtatcacagtttggaagagatccaaaattggatgcatcatttaaataagacacatagcggactaatccatatgttctcgattggcagatcatatgagggcagaagcttgttcatacttaaactcggtaggcgcagcaggcttaagagagcagtgtggatcgactgtggtatccatgcccgtgaatggattggaccagcattttgtcagtggttcgtgaaagaagcccttcttacatacaagtccgacccggctatgagaaagatgctaaatcacttgtatttttacatcatgccagtctttaacgtcgatggctatcacttctcctggaccaatgaccggttttggcgtaagactcggagcaggaattctcggttccgctgccgtggcgtggacgcaaatcggaactggaaggtcaaatggtgtggaaaattcggaacaaactgggatcccgaccccaaggtaagtgccggattcaccctccagaacatgagtcccgaagatagccatggccgactgatgttcttttgtatgtag

SEQ ID NO: 203871 - DNA, 1616 bp, Artificial Sequence
  derived and/or modified sequence
aagatcaggctcagctgctgctgctgctgctgctgcttgtcccaagaccaagtcgtaatagcaacttcccttcctcagctgcctgaactttttttttcccttgtagctggagagaagtgtcacattttgctcactctcaaccttcctcgcccacccccttcccggagaacctgtgcggtgtgtagagggtgctgtgagccacctccagcctcgggtggctgcttaagtaactttcaactcctctcttcttaacactatgaagtgtctcgggaagcgcaggggccaggcagctgctttcctgcctctttgctggctctttttgaagattctgcaaccggggcacagccacctttataacaaccgctatgctggtgataaagtgataagatttattcccaaaacagaagaggaagcatatgcactgaagaaaatatcctatcaacttaaggtggacctgtggcagcccagcagtatctcctatgtatcagagggaacagttactgatgtccatatcccccaaaatggttcccgagccctgttagccttcttacaggaagccaacatccagtacaaggtcctcatagaagatcttcagaaaacactggagaagggaagcagcttgcacacccagagaaaccgaagatccctctctggatataattatgaagtttatcactccttagaagaaattcaaaattggatgcatcatctgaataaaactcactcaggcctcattcacatgttctctattggaagatcatatgagggaagatctctttttattttaaagctgggcagacgatcacgactcaaaagagctgtttggatagactgtggtattcatgcaagagaatggattggtcctgccttttgtcagtggtttgtaaaagaagctcttctaacatataagagtgacccagccatgagaaaaatgttgaatcatctatatttctatatcatgcctgtgtttaacgtcgatggataccattttagttggaccaatgatcgattttggagaaaaacaaggtcaaggaactcaaggtttcgctgccgtggagtggatgccaatagaaactggaaagtgaagtggtgtgatgtgagctctggtagctcaatggattgggcctacaaaaatggaataccttatgcatttgctttcgaactacgtgacactggatattttggatttttactcccagagatgctcatcaaacccacctgtacagaaactatgctggctgtgaaaaatatcacaatgcacctgctaaagaaatgtccctgagacagcccaaggctcaggtcaactgccataggattctgagcaaggcctacttggccctggatagaaattgttttcaaagagaagggcagctgcttagagtgaacatgtctatggactttaaaaagaccccacgcaatttgactttgtggcaatagaaaacagtaaaaaacagggcatagcctagtttgttataagaaaaagcatccattttctatccttttagagtcttatttgattatggtgggagggaatgttttcaaatttcccatttctcaagaaatgttcatattaattgaggatttcccttcaataaatctcatgtcctcaattagga

SEQ ID NO: 203872 - DNA, 1861 bp, Artificial Sequence
  derived and/or modified sequence
cccaagaccaagtcgtaatagcaacttcccttcctcagctgcctgaactttttttttcccttgtagctggagagaagtgtcacattttgctcactctcaaccttcctcgcccacccccttcccggagaacctgtgcggtgtgtagagggtgctgtgagccacctccagcctcgggtggctgcttaagtaactttcaactcctctcttcttaacactatgaagtgtctcgggaagcgcaggggccaggcagctgctttcctgcctctttgctggctctttttgaagattctgcaaccggggcacagccacctttataacaaccgctatgctggtgataaagtgataagatttattcccaaaacagaagaggaagcatatgcactgaagaaaatatcctatcaacttaaggtggacctgtggcagcccagcagtatctcctatgtatcagagggaacagttactgatgtccatatcccccaaaatggttcccgagccctgttagccttcttacaggaagccaacatccagtacaaggtcctcatagaagatcttcagaaaacactggagaagggaagcagcttgcacacccagagaaaccgaagatccctctctggatataattatgaagtttatcactccttagaagaaattcaaaattggatgcatcatctgaataaaactcactcaggcctcattcacatgttctctattggaagatcatatgagggaagatctctttttattttaaagctgggcagacgatcacgactcaaaagagctgtttggatagactgtggtattcatgcaagagaatggattggtcctgccttttgtcagtggtttgtaaaagaagctcttctaacatataagagtgacccagccatgagaaaaatgttgaatcatctatatttctatatcatgcctgtgtttaacgtcgatggataccattttagttggaccaatgatcgattttggagaaaaacaaggtcaaggaactcaaggtttcgctgccgtggagtggatgccaatagaaactggaaagtgaagtggtgtgatgaaggagcttctatgcacccttgtgatgacacatactgtggcccttttccagaatctgagccggaagtgaaggctgtagctaacttccttcgaaaacacagaaagcacattagggcttatctctcctttcatgcatatgctcagatgttactgtatccctattcttacaaatatgcaacaattcccaattttagatgtgtggaatctgcagcttataaagctgtgaatgcacttcagtcagtatacggggtacgatacagatatggaccagcctccacaacgttgtatgtgagctctggtagctcaatggattgggcctacaaaaatggaataccttatgcatttgctttcgaactacgtgacactggatattttggatttttactcccagagatgctcatcaaacccacctgtacagaaactatgctggctgtgaaaaatatcacaatgcacctgctaaagaaatgtccctgagacagcccaaggctcaggtcaactgccataggattctgagcaaggcctacttggccctggatagaaattgttttcaaagagaagggcagctgcttagagtgaacatgtctatggactttaaaaagaccccacgcaatttgactttgtggcaatagaaaacagtaaaaaacagggcatagcctagtttgttataagaaaaagcatccattttctatccttttagagtcttatttgattatggtgggagggaatgttttcaaatttcccatttctcaagaaatgttcatattaattgaggatttcccttcaataaatctcatgtcctcaatta

SEQ ID NO: 203873 - DNA, 1538 bp, Artificial Sequence
  derived and/or modified sequence
caagaccaagtcgtaatagcaacttcccttcctcagctgcctgaactttttttttcccttgtagctggagagaagtgtcacattttgctcactctcaaccttcctcgcccacccccttcccggagaacctgtgcggtgtgtagagggtgctgtgagccacctccagcctcgggtggctgcttaagtaactttcaactcctctcttcttaacactatgaagtgtctcgggaagcgcaggggccaggcagctgctttcctgcctctttgctggctctttttgaagattctgcaaccggggcacagccacctttataacaaccgctatgctggtgataaagtgataagatttattcccaaaacagaagaggaagcatatgcactgaagaaaatatcctatcaacttaaggtggacctgtggcagcccagcagtatctcctatgtatcagagggaacagttactgatgtccatatcccccaaaatggttcccgagccctgttagccttcttacaggaagccaacatccagtacaaggtcctcatagaagatcttcagaaaacactggagaagggaagcagcttgcacacccagagaaaccgaagatccctctctggatataattatgaagtttatcactccttagaagaaattcaaaattggatgcatcatctgaataaaactcactcaggcctcattcacatgttctctattggaagatcatatgagggaagatctctttttattttaaagctgggcagacgatcacgactcaaaagagctgtttggatagactgtggtattcatgcaagagaatggattggtcctgccttttgtcagtggtttgtaaaagaagctcttctaacatataagagtgacccagccatgagaaaaatgttgaatcatctatatttctatatcatgcctgtgtttaacgtcgatggataccattttagttggaccaatgatcgattttggagaaaaacaaggtcaaggaactcaaggtttcgctgccgtggagtggatgccaatagaaactggaaagtgaagtggtgtggtaagtttgggaccaactgggatccagatccaaaggtttctgcaggttttactctgcaaaatatgagtccagaggactctcatgggagactcatgtttttctgtatgtgaaaacctggtagagaaaggtacagatacgtacatgatagctgtaattggcaaaagaaaatgaaaggattcttttttaatatataaaaatcaaggattttaaatatgtcaattcggtcctgaaaactgaaaatttaaatacatatgtaaaagcagcaaactgaggaatatttgtcattccccaaattaaaacatgaaccgtggtgtagtataattctggttaaatctttttatccttttcatacaagcaccactgatgctgcattcggctgtctgtcgtggtcagagctgtcatgaccttgtctatattctaccactctgctggtcatacgtggattgaccatgcacattgggaatgtatttctgctgcattccatgt

SEQ ID NO: 203874 - DNA, 1314 bp, Artificial Sequence
  derived and/or modified sequence
atgaagtgcctgggcaagagaagaggccaggccgccgccttcctgcccctgtgctggctgttcctgaagatcctgcagcccggccacagccacctgtacaacaacagatacgccggcgacaaggtgatcagattcatccccaagaccgaggaggaggcctacgccctgaagaagatcagctaccagctgaaggtggacctgtggcagcccagcagcatcagctacgtgagcgagggcaccgtgaccgacgtgcacatcccccagaacggcagcagagccctgctggccttcctgcaggaggccaacatccagtacaaggtgctgatcgaggacctgcagaagaccctggagaagggcagcagcctgcacacccagagaaacagaagaagcctgagcggctacaactacgaggtgtaccacagcctggaggagatccagaactggatgcaccacctgaacaagacccacagcggcctgatccacatgttcagcatcggcagaagctacgagggcagaagcctgttcatcctgaagctgggcagaagaagcagactgaagagagccgtgtggatcgactgcggcatccacgccagagagtggatcggccccgccttctgccagtggttcgtgaaggaggccctgctgacctacaagagcgaccccgccatgagaaagatgctgaaccacctgtacttctacatcatgcccgtgttcaacgtggacggctaccacttcagctggaccaacgacagattctggagaaagaccagaagcagaaacagcagattcagatgcagaggcgtggacgccaacagaaactggaaggtgaagtggtgcgacgagggcgccagcatgcacccctgcgacgacacctactgcggccccttccccgagagcgagcccgaggtgaaggccgtggccaacttcctgagaaagcacagaaagcacatcagagcctacctgagcttccacgcctacgcccagatgctgctgtacccctacagctacaagtacgccaccatccccaacttcagatgcgtggagagcgccgcctacaaggccgtgaacgccctgcagagcgtgtacggcgtgagatacagatacggccccgccagcaccaccctgtacgtgagcagcggcagcagcatggactgggcctacaagaacggcatcccctacgccttcgccttcgagctgagagacaccggctacttcggcttcctgctgcccgagatgctgatcaagcccacctgcaccgagaccatgctggccgtgaagaacatcaccatgcacctgctgaagaagtgcccctag

SEQ ID NO: 203875 - DNA, 948 bp, Artificial Sequence
  derived and/or modified sequence
atgaagtgcctgggcaagagaagaggccaggccgccgccttcctgcccctgtgctggctgttcctgaagatcctgcagcccggccacagccacctgtacaacaacagatacgccggcgacaaggtgatcagattcatccccaagaccgaggaggaggcctacgccctgaagaagatcagctaccagctgaaggtggacctgtggcagcccagcagcatcagctacgtgagcgagggcaccgtgaccgacgtgcacatcccccagaacggcagcagagccctgctggccttcctgcaggaggccaacatccagtacaaggtgctgatcgaggacctgcagaagaccctggagaagggcagcagcctgcacacccagagaaacagaagaagcctgagcggctacaactacgaggtgtaccacagcctggaggagatccagaactggatgcaccacctgaacaagacccacagcggcctgatccacatgttcagcatcggcagaagctacgagggcagaagcctgttcatcctgaagctgggcagaagaagcagactgaagagagccgtgtggatcgactgcggcatccacgccagagagtggatcggccccgccttctgccagtggttcgtgaaggaggccctgctgacctacaagagcgaccccgccatgagaaagatgctgaaccacctgtacttctacatcatgcccgtgttcaacgtggacggctaccacttcagctggaccaacgacagattctggagaaagaccagaagcagaaacagcagattcagatgcagaggcgtggacgccaacagaaactggaaggtgaagtggtgcggcaagttcggcaccaactgggaccccgaccccaaggtgagcgccggcttcaccctgcagaacatgagccccgaggacagccacggcagactgatgttcttctgcatgtag

SEQ ID NO: 203876 - protein, 558 aa, Artificial Sequence
  derived and/or modified sequence
MSAANPETPNSTISREASTQSSSAAASQGWVLPEGKIVPNTVFVGGIDARMDETEIGSCFGRYGSVKEVKIITNRTGVSKGYGFVSFVNDVDVQKIVGSQIHFHGKKLKLGPAIRKQKLCARHVQPRPLVVNPPPPPQFQNVWRNPNTETYLQPQITPNPVTQHVQAYSAYPHSPGQVITGCQLLVYNYQEYPTYPDSAFQVTTGYQLPVYNYQPFPAYPRSPFQVTAGYQLPVYNYQAFPAYPNSPFQVATGYQFPVYNYQPFPAYPSSPFQVTAGYQLPVYNYQAFPAYPNSPFQVATGYQFPVYNYQAFPAYPNSPVQVTTGYQLPVYNYQAFPAYPNSPVQVTTGYQLPVYNYQAFPAYPSSPFQVTTGYQLPVYNYQAFPAYPSSPFQVTTGYQLPVYNYQAFPAYPSSPFQVTTGYQLPVYNYQAFPAYPSSPFQVTTGYQLPVYNYQAFPAYPSSPFQVTTGYQLPVYNYQAFPAYPSSPFQVTTGYQLPVYNYQAFPAYPNSAVQVTTGYQFHVYNYQMPPQCPVGEQRRNLWTEAYKWWYLVCLIQRRD

SEQ ID NO: 203877 - protein, 581 aa, Artificial Sequence
  derived and/or modified sequence
MMDETEIGSCFGRYGSVKEVKIITNRTGVSKGYGFVSFVNDVDVQKIVGSQIHFHGKKLKLGPAIRKQKLCARHVQPRPLVVNPPPPPQFQNVWRNPNTETYLQPQITPNPVTQHVQAYSAYPHSPGQVITGCQLLVYNYQEYPTYPDSAFQVTTGYQLPVYNYQPFPAYPRSPFQVTAGYQLPVYNYQAFPAYPNSPFQVATGYQFPVYNYQPFPAYPSSPFQVTAGYQLPVYNYQAFPAYPNSPFQVATGYQFPVYNYQAFPAYPNSPFQVATGYQFPVYNYQAFPAYPNSPVQVTTGYQLPVYNYQPFPAYPRSPFQVTAGYQLPVYNYQAFPAYPNSPFQVATGYQFPVYNYQAFPAYPNSPVQVTTGYQLPVYNYQAFPAYPSSPFQVTTGYQLPVYNYQAFPAYPSSPFQVTTGYQLPVYNYQAFPAYPSSPFQVTTGYQLPVYNYQAFPAYPSSPFQVTTGYQLPVYNYQAFPAYPSSPFQVTTGYQLPVYNYQAFPAYPSSPFQVTTGYQLPVYNYQAFPAYPNSAVQVTTGYQFHVYNYQMPPQCPVGEQRRNLWTEAYKWWYLVCLIQRRD

SEQ ID NO: 203878 - DNA, 1677 bp, Artificial Sequence
  derived and/or modified sequence
atgagcgctgcaaatccagaaacaccaaacagcaccatctctcgtgaggcttcaacccagtcctccagtgctgcagcttcccagggatgggtgcttcccgaaggtaaaattgtgccaaacactgtatttgtcggcggaattgacgctcgcatggatgagacagagatcgggagctgtttcggtcgctatggctccgtgaaggaggtgaagatcattaccaatcgcaccggtgttagcaaaggttatggctttgtgtcatttgtcaacgacgtggacgtacaaaagatcgtgggaagccagattcacttccacggcaaaaagctgaagttggggccggcaattcgtaagcagaaattatgcgcccgtcacgtgcaaccccgacctctcgtggtgaatccgccaccgccaccacagttccagaacgtatggcgaaatcctaataccgagacttacctccagccccagattaccccaaaccctgtcacccagcatgtgcaggcttacagcgcctacccacattcccccgggcaggtgattacgggttgtcagctcctggtgtacaactatcaagaataccccacatatccagacagcgccttccaggtgaccacgggttaccagctgcctgtgtataactaccagcccttccccgcgtaccctaggtcaccctttcaggttaccgctggttaccagctgccagtctataactatcaggccttccccgcataccctaactctccgttccaagtggccacgggttaccagtttccagtgtataattaccagcctttccctgcctatccgtcttccccctttcaggttactgcaggttatcaactgccggtgtataattaccaagccttccccgcctatccgaacagtccctttcaggtagccacgggttaccaattccccgtgtacaactatcaggcattccccgcttacccaaacagcccagtccaggtgaccacgggctatcagcttcccgtgtataactatcaggcctttccggcctatcccaattccccggttcaagtgaccacgggctaccagttgcccgtttataattaccaggccttcccggcttacccttcatcacccttccaagtcaccaccgggtaccagctgcctgtgtacaattatcaggccttccctgcataccctagtagcccctttcaggttacaacagggtatcagctgcctgtctacaactaccaggcattcccagcatatccgtcatctccttttcaagtgacaactggatatcaactccccgtgtataactatcaggcattcccggcttatccctccagcccctttcaggtcactaccgggtaccagctgccggtatataattatcaggcattcccggcctatcccagtagcccgttccaggtaaccacaggttaccagctgccagtctacaattaccaggcttttcccgcctatcccagttctccgttccaggtgacaacagggtaccagttgccggtctacaattatcaggccttccccgcgtatcccaacagcgctgtgcaggtcacaaccggataccaatttcatgtgtataattatcagatgcccccacagtgcccggtgggcgaacagaggcgcaacctgtggaccgaggcttacaagtggtggtatctggtttgtcttatccaacgcagggactag

SEQ ID NO: 203879 - DNA, 1746 bp, Artificial Sequence
  derived and/or modified sequence
atgatggatgagactgagatcggatcttgttttggaaggtacgggtccgtgaaggaagtcaaaatcatcactaaccgcaccggggttagtaagggctacggcttcgtgtcatttgtaaatgatgtagacgttcagaaaattgttggcagtcaaatccatttccatggcaaaaaactgaagctaggccccgccatccgcaaacaaaaactgtgtgcccgacacgtccagccccggccattggtcgtcaatccccctccccctccacagttccagaatgtttggcggaatccaaatacagagacttatctgcaaccccaaatcactccaaatccggtgacacagcacgttcaggcctactccgcttatccccatagtccaggacaggtgattactggctgccagctccttgtgtacaattatcaggagtatcctacgtacccggatagtgccttccaagtcactaccggttatcagctgccggtctataattatcagccattccctgcatacccaaggtcaccctttcaggtaaccgccggatatcagctcccagtttataactatcaggccttcccagcctaccctaactccccctttcaggtggcgactggctaccaattccccgtatataactaccagcctttccccgcttatccatctagccccttccaggtgacggcaggataccagctccctgtgtacaactatcaagcctttcctgcctatcctaattccccttttcaggtggcaacaggttaccagttccccgtatacaactatcaggcttttccagcatacccaaacagccccttccaggtggctacgggatatcaatttcctgtctataattatcaggcgtttcccgcctaccccaatagtcccgttcaggtgaccaccggctaccagctgcccgtgtacaactatcaacccttcccagcgtaccccagatcccccttccaagttacagccggatatcagctgcccgtctacaattaccaggcattccctgcttaccccaattcccctttccaggtagcaacaggatatcagttccctgtctacaattatcaagctttcccggcatacccgaattctcctgtacaagtgactaccgggtatcaactaccagtctataattatcaggcttttccagcttacccctcttcacctttccaggtgacaactggctaccagctgccagtatacaattatcaggctttccctgcatatccctcgagtccctttcaggttaccaccgggtatcaactaccggtgtataactaccaggcgttcccagcatatcctagttcccctttccaggtcacaaccgggtatcaattacccgtctacaactaccaggcattccccgcttacccctcatcaccttttcaagtcaccaccggttaccagctgccagtttacaattaccaggcattccctgcatacccatcttcccccttccaggtgacaactggataccagttgcctgtgtataattatcaggcctttcctgcctatccttcttcccccttccaagtgaccacagggtaccagctaccagtctataactaccaggctttccctgcttatcccaacagcgcggtgcaggtgacgaccggataccagttccatgtgtacaactatcaaatgccccctcagtgtcctgtgggtgagcagaggcggaacctgtggaccgaggcttataagtggtggtaccttgtatgcctgatccagagaagagactag

SEQ ID NO: 203880 - DNA, 1677 bp, Artificial Sequence
  derived and/or modified sequence
atgtctgctgccaaccctgagacccccaacagcaccatcagccgggaggccagcacccagagcagcagcgctgctgccagccagggctgggtgctgcctgagggcaagatcgtgcccaacacagtgtttgtgggcggcattgatgccaggatggatgaaacagagatcggcagctgcttcggccgctatggctctgtgaaggaggtgaagatcatcaccaacagaactggagtgtccaagggctacggctttgtgtcctttgtgaatgatgtggatgtgcagaagatcgtgggcagccagatccacttccacggcaagaagctgaagctgggccctgccatcaggaagcagaagctgtgtgcccggcacgtgcagccccggcccctggtggtgaaccccccacctccaccccagttccagaatgtgtggaggaaccccaacacagagacctacctgcagccccagatcacccccaaccctgtgacccagcacgtgcaggcctacagcgcctacccccacagccctggccaggtgatcaccggctgccagctgctggtgtacaactaccaggagtaccccacctacccagacagcgccttccaggtgaccaccggctaccagctgcctgtgtacaactaccagcccttccctgcctaccccaggagccccttccaggtgacagctggctaccagctgcctgtgtacaactaccaggccttccctgcctaccccaacagccccttccaggtggccaccggctaccagtttcctgtgtacaactaccagcccttccctgcctaccccagcagccccttccaggtgacagctggctaccagctgcctgtgtacaactaccaggccttccctgcctaccccaacagccccttccaggtggccaccggctaccagtttcctgtgtacaactaccaggccttccctgcctaccccaacagccctgtgcaggtgaccaccggctaccagctgcctgtgtacaactaccaggccttccctgcctaccccaacagccctgtgcaggtgaccaccggctaccagctgcctgtgtacaactaccaggccttccctgcctaccccagcagccccttccaggtgaccaccggctaccagctgcctgtgtacaactaccaggccttccctgcctaccccagcagccccttccaggtgaccaccggctaccagctgcctgtgtacaactaccaggccttccctgcctaccccagcagccccttccaggtgaccaccggctaccagctgcctgtgtacaactaccaggccttccctgcctaccccagcagccccttccaggtgaccaccggctaccagctgcctgtgtacaactaccaggccttccctgcctaccccagcagccccttccaggtgaccaccggctaccagctgcctgtgtacaactaccaggccttccctgcctaccccagcagccccttccaggtgaccaccggctaccagctgcctgtgtacaactaccaggccttccctgcctaccccaacagcgctgtgcaggtgaccaccggctaccagttccacgtgtacaactaccagatgccaccccagtgccctgtgggggagcagaggaggaacctgtggacagaggcctacaagtggtggtacctggtgtgcctgatccagaggcgggactag

SEQ ID NO: 203881 - DNA, 1746 bp, Artificial Sequence
  derived and/or modified sequence
atgatggatgaaacagaaattggcagctgcttcggccgctatggctctgtgaaggaggtgaagatcatcaccaacagaactggagtgtccaagggctacggctttgtgtcctttgtgaatgatgtggatgtgcagaagatcgtgggcagccagatccacttccacggcaagaagctgaagctgggccctgccatcaggaagcagaagctgtgtgcccggcacgtgcagccccggcccctggtggtgaaccccccacctccaccccagttccagaatgtgtggaggaaccccaacacagagacctacctgcagccccagatcacccccaaccctgtgacccagcacgtgcaggcctacagcgcctacccccacagccctggccaggtgatcaccggctgccagctgctggtgtacaactaccaggagtaccccacctacccagattctgccttccaggtgaccaccggctaccagctgcctgtgtacaactaccagcccttccctgcctaccccaggagccccttccaggtgacagctggctaccagctgcctgtgtacaactaccaggccttccctgcctaccccaacagccccttccaggtggccaccggctaccagtttcctgtgtacaactaccagcccttccctgcctaccccagcagccccttccaggtgacagctggctaccagctgcctgtgtacaactaccaggccttccctgcctaccccaacagccccttccaggtggccaccggctaccagtttcctgtgtacaactaccaggccttccctgcctaccccaacagccccttccaggtggccaccggctaccagtttcctgtgtacaactaccaggccttccctgcctaccccaacagccctgtgcaggtgaccaccggctaccagctgcctgtgtacaactaccagcccttccctgcctaccccaggagccccttccaggtgacagctggctaccagctgcctgtgtacaactaccaggccttccctgcctaccccaacagccccttccaggtggccaccggctaccagtttcctgtgtacaactaccaggccttccctgcctaccccaacagccctgtgcaggtgaccaccggctaccagctgcctgtgtacaactaccaggccttccctgcctaccccagcagccccttccaggtgaccaccggctaccagctgcctgtgtacaactaccaggccttccctgcctaccccagcagccccttccaggtgaccaccggctaccagctgcctgtgtacaactaccaggccttccctgcctaccccagcagccccttccaggtgaccaccggctaccagctgcctgtgtacaactaccaggccttccctgcctaccccagcagccccttccaggtgaccaccggctaccagctgcctgtgtacaactaccaggccttccctgcctaccccagcagccccttccaggtgaccaccggctaccagctgcctgtgtacaactaccaggccttccctgcctaccccagcagccccttccaggtgaccaccggctaccagctgcctgtgtacaactaccaggccttccctgcctaccccaacagcgctgtgcaggtgaccaccggctaccagttccacgtgtacaactaccagatgccaccccagtgccctgtgggggagcagaggaggaacctgtggacagaggcctacaagtggtggtacctggtgtgcctgatccagaggcgggactag

SEQ ID NO: 203882 - DNA, 1677 bp, Artificial Sequence
  derived and/or modified sequence
atgagcgccgccaaccccgagacccccaacagcaccatcagccgggaggctagcacccaatctagctcagccgctgcctcgcagggatgggttctgcccgaggggaaaatcgtgccgaacacagtcttcgtgggaggcattgacgccagaatggatgagaccgaaattggatcgtgttttggccgatacggtagtgtgaaagaggtaaagattatcacaaaccgtaccggggtctcaaagggctacggattcgttagtttcgttaatgacgtggatgtccagaaaatcgtcggatcccaaatacattttcacggcaagaagctcaaattaggccccgcgatccggaagcaaaagctgtgcgctcggcacgtgcagcccagaccacttgttgtgaacccccccccgcccccccaattccagaacgtgtggaggaatcccaacacagagacttatctgcagcctcagatcacgcccaatcccgtcacacaacacgtgcaggcatactctgcctacccccattcaccgggccaggtgataacggggtgccagctgttggtctacaactaccaggagtatccaacctacccggatagcgcgtttcaggtcaccacaggttaccagctcccagtgtacaattatcaaccattcccagcctatccgcggtcacccttccaggtaaccgctggttaccagctgccggtttacaactaccaggcattccctgcttatcccaatagtccatttcaggtggctacaggataccagttccctgtctacaattaccagccctttccggcgtacccatccagcccattccaggtaacagcagggtatcagttacctgtgtacaactaccaggcatttcccgcataccccaactccccatttcaagtggccactggctatcagttccctgtgtacaattaccaggcattccctgcctatccgaactcccctgttcaggtgaccactgggtaccagctccccgtgtataattaccaggcgttccctgcttaccctaacagtccagtacaggtgacaacaggatatcagttaccagtgtacaactaccaggcattccctgcatacccttcttccccttttcaggtcacaacgggctatcagctgcctgtctacaactatcaggcgtttcctgcttatccctcgtctcccttccaagttacaaccggataccagctacctgtgtacaattatcaggccttcccagcataccctagtagcccctttcaggtgactacaggataccagctgcctgtctataattatcaggcatttccggcttatccgagctccccctttcaagtgacaacaggctaccagctacctgtctacaactaccaagccttccctgcctatccaagcagcccctttcaggtgacaaccggctaccagctcccagtgtacaactatcaggctttccccgcctacccaagctccccattccaagtcactactggatatcagctgcccgtttataattatcaggccttcccggcatacccaaacagtgccgtccaagtgactactggatatcaatttcatgtttataactaccaaatgcctcctcagtgccccgtgggggagcagcggcgcaatctgtggactgaggcgtacaagtggtggtacctggtgtgcctaatccagcgtagagattag

SEQ ID NO: 203883 - DNA, 1746 bp, Artificial Sequence
  derived and/or modified sequence
atgatggacgagaccgagatcggcagctgcttcggccggtacggcagcgtgaaggaggttaaaatcataacaaaccgaacaggcgtttcaaaagggtatggctttgtgagctttgtcaatgacgtcgatgtgcaaaagattgttggatcacaaatccattttcatggcaaaaagttgaaattggggccggctatacggaagcagaagctctgtgcacgccatgtccagccaaggcccctcgtcgtcaatccccccccaccgcctcagtttcaaaacgtgtggcgcaatcctaataccgaaacatatttgcagcctcagataacccctaacccagttacacagcatgtgcaagcatacagtgcctacccccattctccaggacaggtcattacaggatgtcagctcctagtgtataattaccaagagtatcccacctaccctgacagcgcttttcaggtgaccactggctaccagctgccagtttacaattaccaacccttcccagcctaccctagatccccctttcaggtcacagctgggtaccagctgcccgtgtacaattatcaggcatttcccgcataccccaacagccccttccaggtggcaactggctaccagttcccagtgtacaactaccagccctttcctgcctacccctccagcccattccaggtgactgctgggtaccagttgcctgtttacaactatcaggcttttcccgcctatcctaattctccattccaagtggctaccggctaccagttccccgtgtataactaccaggccttccccgcataccctaactcacctttccaggttgccaccggataccagttcccagtgtacaactaccaggcattcccagcttatcccaacagcccagtgcaggtgaccaccggataccaattacctgtttacaactaccagccctttcctgcatatccacggtccccatttcaagtgaccgccggttatcagctgcctgtgtacaattatcaagcgttccctgcctaccctaactcaccctttcaagtcgccaccggataccagtttccagtatacaactaccaggcattccccgcctaccctaacagcccggtacaagtcaccactggttatcaactcccagtttacaactaccaggcgtttccagcctacccttcaagtccatttcaagtgacaaccgggtaccagctgcctgtttacaattaccaggcattccctgcctacccctcaagcccttttcaggtgacaacaggctatcagcttcctgtttacaattatcaggcttttccagcatacccatcatctcctttccaagttacaacaggatatcaactgccagtgtacaactatcaggcctttcctgcgtatccctccagtcccttccaagtgactacagggtaccagcttcctgtgtacaattatcaggcgtttccagcttacccgtcaagtccttttcaggtgactacaggctatcagctgccagtgtataactatcaggcgttccctgcctacccctcatctcctttccaagtgactactggttatcagcttcccgtctacaactaccaagccttccctgcctatccgaacagcgctgtgcaggtaaccaccggataccagtttcacgtgtataattaccagatgccaccccagtgcccagtgggcgagcaacgccgtaacctctggactgaggcatacaagtggtggtacctggtttgtctgatccagaggagggattag

SEQ ID NO: 203884 - DNA, 1677 bp, Artificial Sequence
  derived and/or modified sequence
atgagtgcagcaaaccccgaaaccccgaacagcaccatatctagggaggcaagtacccagagcagctcagcggctgcatcgcaaggatgggtgctgcccgaaggaaaaatagtgcccaatactgtgtttgtcggagggatagacgccagaatggacgagactgagatcggctcctgctttgggcgttacggcagcgtcaaggaagtaaaaattatcactaatcgcactggagtaagcaaaggctatgggttcgtgtcgtttgtgaatgacgtcgacgtgcagaagattgtgggctcacagattcatttccacggtaagaaactcaagctgggtcccgctatcagaaaacagaagctttgcgcgcgtcacgtgcagccacgaccacttgtggtgaatccaccaccaccacctcaattccaaaacgtctggcggaatccaaacacagagacctatctacagcctcagattactcctaacccggttacccagcacgtgcaggcatacagcgcctaccctcattctccaggacaggttatcacaggctgtcagctgttagtgtacaactaccaggagtatcctacttatcccgactccgcattccaggtcacaacgggctatcagctgcccgtgtacaattatcagcctttccccgcttaccccagatcccctttccaggtgacggctggttatcaattgcccgtctataactatcaagcatttcctgcctatcctaactctccatttcaggtggcgactggatatcagttccctgtatacaactatcagccctttcctgcttacccttccagccccttccaggtcacagctgggtatcaactgccagtgtataattatcaagcttttccggcatatcccaactctcctttccaggtggccactggataccagttccccgtctacaactaccaagcttttccggcttaccccaatagtcccgtccaggtaacgactgggtaccagttgccagtgtacaattatcaggctttccctgcataccccaattccccagtccaggtgacaacaggttaccaactgcccgtctacaactaccaggcttttccagcctatccatccagtcccttccaggtgactaccgggtatcagcttccagtgtacaattaccaggcattcccagcttacccatcctcacctttccaagttacaactggttaccaactgccggtgtataattaccaagcgttccccgcatacccaagttcgccttttcaggttacaacaggctatcagttgcccgtctacaactaccaggcctttcctgcataccctagctcccccttccaagtgactaccggctaccagttacccgtatataattatcaggcctttcccgcatatcctagcagcccgtttcaggtgactaccggctaccagctcccagtttataactaccaagcgtttcccgcatatccgtcctctcctttccaagtcactacagggtatcaactgcctgtctacaattaccaggcattccctgcatatcctaactctgccgtccaggtgacaacgggataccagttccatgtgtataattatcagatgcctccacaatgtcccgttggtgagcaaaggcggaatctgtggaccgaggcttacaaatggtggtacctcgtatgcctcatccagcgccgtgattag

SEQ ID NO: 203885 - DNA, 1746 bp, Artificial Sequence
  derived and/or modified sequence
atgatggacgagacagagatcgggtcctgcttcggacggtatggctctgtcaaagaggtgaagattattaccaatcgcactggagtgagcaaaggttatggattcgttagctttgtgaatgacgtcgatgtccagaaaatcgtaggttcccagatacactttcacgggaagaaactaaagctcggacctgccattcgcaagcagaagctttgcgctagacatgtgcagcccaggccactggtggtaaaccctccccctccaccccagtttcaaaacgtttggcggaatcctaatacagagacttatctccagccacagatcacacctaatcccgtgacccagcacgtccaggcttacagcgcctacccccactccccagggcaggtcatcaccgggtgccaactgctcgtttataactatcaggagtatcctacctaccccgattcagcgtttcaagttacaaccgggtaccaactgcccgtctacaattaccaacctttccctgcttaccctagatcccctttccaagttacagccggatatcaactgccagtatataactaccaggcattcccagcttacccaaactccccgtttcaggtggcgactggctaccagtttcccgtgtacaattaccagccgtttccggcatacccatccagtccctttcaggttaccgcgggatatcaactgcctgtgtataattaccaggcattccctgcttacccgaatagtccatttcaagtagcgaccgggtaccagttccctgtttacaactatcaggcattcccagcataccccaactccccattccaagttgccaccgggtaccagtttcctgtttataactatcaggcatttccagcctaccccaactccccagtgcaagtgacgactggttaccagctgccggtctacaattatcagcccttccctgcctatccacggtcaccattccaggtcacagccggataccagctacctgtctataattaccaggcctttcccgcatatcctaactctcccttccaggtggctaccggttatcaattccccgtgtataattaccaggcatttccggcatatccgaatagtcccgtgcaggtaacaactggataccagctccctgtctataactatcaggcctttcccgcttatccgagtagcccatttcaagtcacaaccggatatcagctgccggtgtacaattaccaagcttttccagcctacccctcttctccctttcaggttaccaccgggtatcagctgcctgtgtataactatcaggcctttcccgcttatccctctagccctttccaggtgacgacgggctatcagctccccgtgtataattaccaggcctttccagcatatcccagctccccattccaagtgacaactggctatcaattgcctgtatacaattaccaggcttttccagcctatccgtctagtccattccaggtgactacaggttatcagctacctgtgtataactatcaggcgtttcctgcatacccctcaagtcctttccaggttaccactggatatcagcttccggtctacaactatcaggctttcccagcctatccgaatagcgcagtgcaagtgaccacaggttatcagtttcacgtctataattatcagatgcccccacagtgcccagtcggtgagcaacggagaaatctgtggactgaggcatataagtggtggtatctcgtgtgtttgattcagcgaagagactag

SEQ ID NO: 203886 - DNA, 1677 bp, Artificial Sequence
  derived and/or modified sequence
atgagcgccgccaaccccgagacccccaacagcaccatcagcagagaggccagcacccagagcagcagcgccgccgccagccagggctgggtgctgcccgagggcaagatcgtgcccaacaccgtgttcgtgggcggcatcgacgccagaatggacgagaccgagatcggcagctgcttcggcagatacggcagcgtgaaggaggtgaagatcatcaccaacagaaccggcgtgagcaagggctacggcttcgtgagcttcgtgaacgacgtggacgtgcagaagatcgtgggcagccagatccacttccacggcaagaagctgaagctgggccccgccatcagaaagcagaagctgtgcgccagacacgtgcagcccagacccctggtggtgaacccccccccccccccccagttccagaacgtgtggagaaaccccaacaccgagacctacctgcagccccagatcacccccaaccccgtgacccagcacgtgcaggcctacagcgcctacccccacagccccggccaggtgatcaccggctgccagctgctggtgtacaactaccaggagtaccccacctaccccgacagcgccttccaggtgaccaccggctaccagctgcccgtgtacaactaccagcccttccccgcctaccccagaagccccttccaggtgaccgccggctaccagctgcccgtgtacaactaccaggccttccccgcctaccccaacagccccttccaggtggccaccggctaccagttccccgtgtacaactaccagcccttccccgcctaccccagcagccccttccaggtgaccgccggctaccagctgcccgtgtacaactaccaggccttccccgcctaccccaacagccccttccaggtggccaccggctaccagttccccgtgtacaactaccaggccttccccgcctaccccaacagccccgtgcaggtgaccaccggctaccagctgcccgtgtacaactaccaggccttccccgcctaccccaacagccccgtgcaggtgaccaccggctaccagctgcccgtgtacaactaccaggccttccccgcctaccccagcagccccttccaggtgaccaccggctaccagctgcccgtgtacaactaccaggccttccccgcctaccccagcagccccttccaggtgaccaccggctaccagctgcccgtgtacaactaccaggccttccccgcctaccccagcagccccttccaggtgaccaccggctaccagctgcccgtgtacaactaccaggccttccccgcctaccccagcagccccttccaggtgaccaccggctaccagctgcccgtgtacaactaccaggccttccccgcctaccccagcagccccttccaggtgaccaccggctaccagctgcccgtgtacaactaccaggccttccccgcctaccccagcagccccttccaggtgaccaccggctaccagctgcccgtgtacaactaccaggccttccccgcctaccccaacagcgccgtgcaggtgaccaccggctaccagttccacgtgtacaactaccagatgcccccccagtgccccgtgggcgagcagagaagaaacctgtggaccgaggcctacaagtggtggtacctggtgtgcctgatccagagaagagactag

SEQ ID NO: 203887 - DNA, 1746 bp, Artificial Sequence
  derived and/or modified sequence
atgatggacgagaccgagatcggcagctgcttcggcagatacggcagcgtgaaggaggtgaagatcatcaccaacagaaccggcgtgagcaagggctacggcttcgtgagcttcgtgaacgacgtggacgtgcagaagatcgtgggcagccagatccacttccacggcaagaagctgaagctgggccccgccatcagaaagcagaagctgtgcgccagacacgtgcagcccagacccctggtggtgaacccccccccccccccccagttccagaacgtgtggagaaaccccaacaccgagacctacctgcagccccagatcacccccaaccccgtgacccagcacgtgcaggcctacagcgcctacccccacagccccggccaggtgatcaccggctgccagctgctggtgtacaactaccaggagtaccccacctaccccgacagcgccttccaggtgaccaccggctaccagctgcccgtgtacaactaccagcccttccccgcctaccccagaagccccttccaggtgaccgccggctaccagctgcccgtgtacaactaccaggccttccccgcctaccccaacagccccttccaggtggccaccggctaccagttccccgtgtacaactaccagcccttccccgcctaccccagcagccccttccaggtgaccgccggctaccagctgcccgtgtacaactaccaggccttccccgcctaccccaacagccccttccaggtggccaccggctaccagttccccgtgtacaactaccaggccttccccgcctaccccaacagccccttccaggtggccaccggctaccagttccccgtgtacaactaccaggccttccccgcctaccccaacagccccgtgcaggtgaccaccggctaccagctgcccgtgtacaactaccagcccttccccgcctaccccagaagccccttccaggtgaccgccggctaccagctgcccgtgtacaactaccaggccttccccgcctaccccaacagccccttccaggtggccaccggctaccagttccccgtgtacaactaccaggccttccccgcctaccccaacagccccgtgcaggtgaccaccggctaccagctgcccgtgtacaactaccaggccttccccgcctaccccagcagccccttccaggtgaccaccggctaccagctgcccgtgtacaactaccaggccttccccgcctaccccagcagccccttccaggtgaccaccggctaccagctgcccgtgtacaactaccaggccttccccgcctaccccagcagccccttccaggtgaccaccggctaccagctgcccgtgtacaactaccaggccttccccgcctaccccagcagccccttccaggtgaccaccggctaccagctgcccgtgtacaactaccaggccttccccgcctaccccagcagccccttccaggtgaccaccggctaccagctgcccgtgtacaactaccaggccttccccgcctaccccagcagccccttccaggtgaccaccggctaccagctgcccgtgtacaactaccaggccttccccgcctaccccaacagcgccgtgcaggtgaccaccggctaccagttccacgtgtacaactaccagatgcccccccagtgccccgtgggcgagcagagaagaaacctgtggaccgaggcctacaagtggtggtacctggtgtgcctgatccagagaagagactag

SEQ ID NO: 203888 - DNA, 2405 bp, Artificial Sequence
  derived and/or modified sequence
ctcagcctggcggttctacctccgagggttcgcccgcccttggttttccttacaccttagcctttggctcctttgaccactcgaagccccacagcgtgttccagcggacttcaccagcagacccagaagtggtgggtgaaacactgcctctgttcctccttgagcctgtcgggagctgctgcctgccaccaccatgtctgctgcaaatcctgagactccaaactcaaccatctccagagaggccagcacccagtcttcatcagctgcagctagccaaggctgggtgttaccagaaggcaaaatcgtgccaaacactgtttttgttggtggaattgatgctaggatggatgaaactgagattggaagctgctttggtagatacggttcagtgaaagaagtgaagataatcacgaatcgaactggtgtgtccaaaggctatggatttgtttcgtttgttaatgacgtggatgtccagaagatagtaggatcacagatacatttccatggtaaaaagctgaagctgggccctgcaatcaggaaacaaaagttatgtgctcgtcatgtgcagccacgtcctttggtagttaatcctcctcctccaccacagtttcagaacgtctggcggaatccaaacactgaaacctacctgcagccccaaatcacgccgaatcctgtaactcagcacgttcaggcttattctgcttatccacattcaccaggtcaggtcatcactggatgtcagttgcttgtatataattatcaggaatatcctacttatcccgattcagcatttcaggtcaccactggatatcagttgcctgtatataattatcagccatttcctgcttatccaagatcaccatttcaggtcactgctggatatcagttgcctgtatataattatcaggcatttcctgcttatccaaattcaccatttcaagtcgccactggatatcagttccctgtatacaattatcagccatttcctgcttatccaagttcaccatttcaggtcactgctggatatcagttgcctgtatataattatcaggcatttcctgcttatccaaattcaccatttcaagtcgccactggatatcagttccctgtatacaattatcaggcatttcctgcttatccaaattcaccagttcaggtcaccactggatatcagttgcctgtatacaattatcaggcatttcctgcttatccaaattcaccagttcaggtcaccactggatatcagttgcctgtatacaattatcaggcatttcctgcttatccaagttcaccatttcaggtcaccactggatatcagttgcctgtatataattatcaggcatttcctgcttatccaagttcaccatttcaggtcaccactggatatcagttgcctgtatataattatcaggcatttcctgcttatccaagttcaccatttcaggtcaccactggatatcagttgcctgtatataattatcaggcatttcctgcttatccaagttcaccatttcaggtcaccactggatatcagttgcctgtatataattatcaggcatttcctgcttatccaagttcaccatttcaggtcaccactggatatcagttgcctgtatataattatcaggcatttcctgcttatccaagttcaccatttcaggtcaccactggatatcagttgcctgtatataattatcaggcatttcctgcttatccaaattcagcagttcaggtcaccactggatatcagttccatgtatacaattaccagatgccaccgcagtgccctgttggggagcaaaggagaaatctgtggaccgaagcatacaaatggtggtatcttgtctgtttaatccagagaagagactgataaattccgttgttactcaagatgactgcttcaagggtaaaagagtgcatcgctttagaagaagtttggcagtatttaaatctgttggatcctctcagctatctagtttcatgggaagttgctggttttgaatattaagctaaaagttttccactattacagaaattctgaattttggtaaatcacactgaaactttctgtataacttgtattattagactctctagttttatcttaacactgaaactgttcttcattagatgtttatttagaacctggttctgtgtttaatatatagtttaaagtaacaaataatcgagactgaaagaatgttaagatttatctgcaaggatttttaaaaaattgaaacttgcattttaagtgtttaaaagcaaatactgactttcaaaaaagtttttaaaacctgatttgaaagctaacaattttgatagtctgaacacaagcatttcacttctccaagaagtacctgtgaacagtacaatatttcagtattgagctttgcatttatgattta

SEQ ID NO: 203889 - DNA, 3922 bp, Artificial Sequence
  derived and/or modified sequence
attggctcaggccgataccacgcgccccgatacccggcacaggagccacctcccagagccccgcagtccatgcctcagtcggcctgcgctcctcagcctggcggttctacctccgagggttcgcccgcccttggttttccttacaccttagcctttggctcctttgaccactcgaagccccacagcgtgttccagcggacttcaccagcagacccagaagtggtgggtgaaacactgcctctgttcctccttgagcctgtcgggagctgctgcctgccaccaccatgatggatgaaactgagattggaagctgctttggtagatacggttcagtgaaagaagtgaagataatcacgaatcgaactggtgtgtccaaaggctatggatttgtttcgtttgttaatgacgtggatgtccagaagatagtaggatcacagatacatttccatggtaaaaagctgaagctgggccctgcaatcaggaaacaaaagttatgtgctcgtcatgtgcagccacgtcctttggtagttaatcctcctcctccaccacagtttcagaacgtctggcggaatccaaacactgaaacctacctgcagccccaaatcacgccgaatcctgtaactcagcacgttcaggcttattctgcttatccacattcaccaggtcaggtcatcactggatgtcagttgcttgtatataattatcaggaatatcctacttatcccgattcagcatttcaggtcaccactggatatcagttgcctgtatataattatcagccatttcctgcttatccaagatcaccatttcaggtcactgctggatatcagttgcctgtatataattatcaggcatttcctgcttatccaaattcaccatttcaagtcgccactggatatcagttccctgtatacaattatcagccatttcctgcttatccaagttcaccatttcaggtcactgctggatatcagttgcctgtatataattatcaggcatttcctgcttatccaaattcaccatttcaagtcgccactggatatcagttccctgtatacaattatcaggcatttcctgcttatccaaattcaccatttcaagtcgccactggatatcagttccctgtatacaattatcaggcatttcctgcttatccaaattcaccagttcaggtcaccactggatatcagttgcctgtatacaattatcagccatttcctgcttatccaagatcaccatttcaggtcactgctggatatcagttgcctgtatataattatcaggcatttcctgcttatccaaattcaccatttcaagtcgccactggatatcagttccctgtatacaattatcaggcatttcctgcttatccaaattcaccagttcaggtcaccactggatatcagttgcctgtatacaattatcaggcatttcctgcttatccaagttcaccatttcaggtcaccactggatatcagttgcctgtatataattatcaggcatttcctgcttatccaagttcaccatttcaggtcaccactggatatcagttgcctgtatataattatcaggcatttcctgcttatccaagttcaccatttcaggtcaccactggatatcagttgcctgtatataattatcaggcatttcctgcttatccaagttcaccatttcaggtcaccactggatatcagttgcctgtatataattatcaggcatttcctgcttatccaagttcaccatttcaggtcaccactggatatcagttgcctgtatataattatcaggcatttcctgcttatccaagttcaccatttcaggtcaccactggatatcagttgcctgtatataattatcaggcatttcctgcttatccaaattcagcagttcaggtcaccactggatatcagttccatgtatacaattaccagatgccaccgcagtgccctgttggggagcaaaggagaaatctgtggaccgaagcatacaaatggtggtatcttgtctgtttaatccagagaagagactgataaattccgttgttactcaagatgactgcttcaagggtaaaagagtgcatcgctttagaagaagtttggcagtatttaaatctgttggatcctctcagctatctagtttcatgggaagttgctggttttgaatattaagctaaaagttttccactattacagaaattctgaattttggtaaatcacactgaaactttctgtataacttgtattattagactctctagttttatcttaacactgaaactgttcttcattagatgtttatttagaacctggttctgtgtttaatatatagtttaaagtaacaaataatcgagactgaaagaatgttaagatttatctgcaaggatttttaaaaaattgaaacttgcattttaagtgtttaaaagcaaatactgactttcaaaaaagtttttaaaacctgatttgaaagctaacaattttgatagtctgaacacaagcatttcacttctccaagaagtacctgtgaacagtacaatatttcagtattgagctttgcatttatgatttatctagaaatttacctcaaaagcagaatttttaaaactgcatttttaatcagtggaactcaatgtatagttagctttattgaagtcttatccaaacccagtaaaacagattctaagcaaacagtccaatcagtgagtcataatgtttattcaaagtattttatcttttatctagaatccacatatgtatgtccaatttgattgggatagtagttaggataactaaaattctgggcctaattttttaaagaatccaagacaaactaaactttactgggtatataaccttctcaatgagttaccattcttttttataaaaaaaattgttccttgaaatgctaaacttaatggctgtatgtgaaatttgcaaaatactggtattaaagaacgctgcagcttttttatgtcactcaaaggttaatcggagtatctgaaaggaattgtttttataaaaacattgaagtattagttacttgctataaatagatttttatttttgttttttagcctgttatatttccttctgtaaaataaaatatgtccagaagaggcatgttgtttctagattaggtagtgtcctcattttatattgtgaccacacagctagagcaccagagcccttttgctatactcacagtcttgttttcccagcctcttttactagtctttcaggaggtttgctcttagaactggtgatgtaaagaatggaagtagctgtatgagcagttcaaaggccaagccgtggaatggtagcaatgggatataatacctttctaagggaaacatttgtatcagtatcatttgatctgccatggacatgtgtttaaagtggctttctggcccttctttcaatggcttcttccctaaaacgtggagactctaagttaatgtcgttactatgggccatattactaatgcccactggggtctatgatttctcaaaattttcattcggaatccgaaggatacagtctttaaactttagaattcccaagaaggctttattacacctcagaaattgaaagcaccatgactttgtccattaaaaaattatccatagtttttttagtgcttttaacattccgacatacatcattctgtgattaaatctccagatttctgtaaatgatacctacattctaaagagttaattctaattattccgatatgaccttaaggaaaagtaaaggaataaatttttgtctttgttgaagtatttaatagagtaaggtaaagaagatattaagtccctttcaaaatggaaaattaattctaaactgagaaaaatgttcctactacctattgctgatactgtctttgcataaatgaataaaaataaactttttttcttcaaatgtg

SEQ ID NO: 203890 - protein, 438 aa, Artificial Sequence
  derived and/or modified sequence
MSAANPETPNSTISREASTQSSSAAASQGWVLPEGKIVPNTVFVGGIDARMDETEIGSCFGRYGSVKEVKIITNRTGVSKGYGFVSFVNDVDVQKIVGSQIHFHGKKLKLGPAIRKQKLCARHVQPRPLVVNPPPPPQFQNVWRNPNTETYLQPQITPNPVTQHVQAYSAYPHSPGQVITGCQLLVYNYQEYPTYPDSAFQVTTGYQLPVYNYQPFPAYPRSPFQVTAGYQLPVYNYQAFPAYPNSPFQVATGYQFPVYNYQAFPAYPNSPFQVATGYQFPVYNYQAFPAYPNSPFQVATGYQFPVYNYQAFPAYPNSPVQVTTGYQLPVYNYQAFPAYPNSPFQVATGYQFPVYNYQAFPAYPNSPVQVTTGYQLPVYNYQAFPAYPNSAVQVTTGYQFHVYNYQMPPQCPVGEQRRNLWTEAYKWWYLVCLIQRRD

SEQ ID NO: 203891 - protein, 337 aa, Artificial Sequence
  derived and/or modified sequence
MSAANPETPNSTISREASTQSSSAAASQGWVLPEGKIVPNTVFVGGIDARMDETEIGSCFGRYGSVKEVKIITNRTGVSKGYGFVSFVNDVDVQKIVGSQIHFHGKKLKLGPAIRKQKLCARHVQPRPLVVNPPPPPQFQNVWRNPNTETYLQPQITPNPVTQHVQAYSAYPHSPGQVITGCQLLVYNYQEYPTYPDSAFQVTTGYQLPVYNYQPFPAYPRSPFQVTAGYQLPVYNYQAFPAYPNSPFQVATGYQFPVYNYQAFPAYPNSPVQVTTGYQLPVYNYQAFPAYPNSPFQVATGYQFPVYNYQAFPAYPNSPVQVTTGYQLPVYNYQMPP

SEQ ID NO: 203892 - protein, 438 aa, Artificial Sequence
  derived and/or modified sequence
MSAANPETPNSTISREASTQSSSAAASQGWVLPEGKIVPNTVFVGGIDARMDETEIGSCFGRYGSVKEVKIITNRTGVSKGYGFVSFVNDVDVQKIVGSQIHFHGKKLKLGPAIRKQKLCARHVQPRPLVVNPPPPPQFQNVWRNPNTETYLQPQITPNPVTQHVQAYSAYPHSPGQVITGCQLLVYNYQEYPTYPDSAFQVTTGYQLPVYNYQPFPAYPRSPFQVTAGYQLPVYNYQAFPAYPNSPFQVATGYQFPVYNYQAFPAYPNSPVQVTTGYQLPVYNYQAFPAYPNSPFQVATGYQFPVYNYQAFPAYPNSPVQVTTGYQLPVYNYQAFPAYPNSPFQVATGYQFPVYNYQAFPAYPNSPVQVTTGYQLPVYNYQAFPAYPNSAVQVTTGYQFHVYNYQMPPQCPVGEQRRNLWTEAYKWWYLVCLIQRRD

SEQ ID NO: 203893 - DNA, 1149 bp, Artificial Sequence
  derived and/or modified sequence
atgagcgccgccaaccccgagacccccaacagcaccatcagcagagaggccagcacccagagcagcagcgccgccgccagccagggctgggtgctgcccgagggcaagatcgtgcccaacaccgtgttcgtgggcggcatcgacgccagaatggacgagaccgagatcggcagctgcttcggcagatacggcagcgtgaaggaggtgaagatcatcaccaacagaaccggcgtgagcaagggctacggcttcgtgagcttcgtgaacgacgtggacgtgcagaagatcgtgggcagccagatccacttccacggcaagaagctgaagctgggccccgccatcagaaagcagaagctgtgcgccagacacgtgcagcccagacccctggtggtgaacccccccccccccccccagttccagaacgtgtggagaaaccccaacaccgagacctacctgcagccccagatcacccccaaccccgtgacccagcacgtgcaggcctacagcgcctacccccacagccccggccaggtgatcaccggctgccagctgctggtgtacaactaccaggagtaccccacctaccccgacagcgccttccaggtgaccaccggctaccagctgcccgtgtacaactaccagcccttccccgcctaccccagaagccccttccaggtgaccgccggctaccagctgcccgtgtacaactaccaggccttccccgcctaccccaacagccccttccaggtggccaccggctaccagttccccgtgtacaactaccagcccttccccgcctaccccagcagccccttccaggtgaccgccggctaccagctgcccgtgtacaactaccaggccttccccgcctaccccaacagccccttccaggtggccaccggctaccagttccccgtgtacaactaccaggccttccccgcctaccccaacagccccgtgcaggtgaccaccggctaccagctgcccgtgtacaactaccaggccttccccgcctaccccaacagccccttccaggtggccaccggctaccagttccccgtgtacaactaccaggccttccccgcctaccccaacagccccgtgcaggtgaccaccggctaccagctgcccgtgtacaactaccagtag

SEQ ID NO: 203894 - DNA, 1149 bp, Artificial Sequence
  derived and/or modified sequence
atgagcgcagcaaatcccgaaactccaaacagtactatatcaagggaggccagcactcagtccagcagtgccgctgcgtcccaagggtgggtactgcctgagggcaagatagtccccaataccgttttcgttgggggcatcgacgcacgaatggacgaaaccgagatagggagctgttttggacgctacggttcggtcaaagaagtcaaaataataactaaccgcaccggtgtgtctaagggttatggttttgtttcattcgtcaatgatgtggacgtccagaagatagtgggctctcagatccacttccacgggaagaaactaaagctgggccccgccatccgaaagcagaaattgtgcgcccggcatgtgcaaccacggccactcgtagtgaacccacccccgccgccccagtttcaaaatgtatggcgtaaccctaataccgagacctatttacaaccccagattacccctaaccccgtgacacagcacgtccaagcctattccgcctatccgcacagtcctggtcaagtgattacagggtgccagttgttggtgtacaactatcaagaatacccaacatacccagatagcgcgtttcaggtgacaaccgggtatcagctgccggtttacaattaccagccttttccagcttatcctaggtccccctttcaagtgactgccggttaccaactccccgtgtataactatcaggccttcccggcctacccaaattcccctttccaagtcgccaccggatatcagttcccggtgtacaattaccagccatttcccgcttacccctcgagcccttttcaggtaaccgcaggatatcaacttccggtgtataattaccaggctttccctgcataccctaactcgccattccaagtggctacgggatatcagttccccgtctataattaccaggccttccccgcttaccctaactctccagtgcaggtgactaccgggtaccagttgccggtgtacaactaccaggcctttcccgcctatcctaactccccattccaagtcgccactgggtaccagtttccggtgtataattatcaggcatttcccgcctatcccaacagccccgttcaggttactactgggtatcagttgccagtctacaactatcagtag

SEQ ID NO: 203895 - DNA, 1149 bp, Artificial Sequence
  derived and/or modified sequence
atgtccgcagcaaacccagaaactcctaattccacaatttcacgggaagcctccactcagagttcatctgccgccgcatcccagggctgggtcttgcctgagggcaaaattgtaccaaacaccgtgttcgtcggcggaatcgatgcacgtatggatgaaaccgaaatcggcagctgctttggccggtatggcagtgtaaaggaagttaaaatcattaccaaccgcacgggggtgtctaaaggctatggatttgtgtctttcgtcaacgacgtggatgttcaaaagatagtggggagtcagatccatttccatggaaaaaagctcaaactgggcccagctatccgcaagcagaagctgtgtgcaagacatgtgcaacctcgccccctagtggttaacccccctcctccaccacagttccagaatgtgtggcgcaacccaaatacagagacctacctgcagccacagattaccccaaatcccgttacacagcacgtgcaggcatacagtgcttatccacacagccctggccaagttattacagggtgccagctcctggtttacaactatcaggaataccccacatacccagactccgctttccaggtgacaactggataccaactcccagtgtataactatcagccatttcccgcctaccctcgcagtcctttccaggtgaccgctgggtatcaactgcccgtttacaactatcaggccttcccagcttacccaaattcgcccttccaggtggcaaccggatatcaattccccgtttataattaccagccattccccgcctatccatcctcgccatttcaggtgacagctggatatcagctgccagtttacaactatcaagcctttcctgcatatcctaactctccctttcaggttgcaacgggctatcagtttcctgtgtataattaccaagcgtttcctgcatatcccaattcccccgtccaggttactaccggatatcagctgcccgtgtacaattaccaggcatttcctgcttatcccaattctccattccaggtagcgacgggataccagttcccagtgtacaactatcaagccttccccgcctacccgaatagtcccgtacaagtcacaaccgggtaccagttgcctgtgtacaattaccagtag

SEQ ID NO: 203896 - DNA, 1149 bp, Artificial Sequence
  derived and/or modified sequence
atgtctgctgccaaccctgagacccccaacagcaccatcagccgggaggccagcacccagagcagcagcgctgctgccagccagggctgggtgctgcctgagggcaagatcgtgcccaacacagtgtttgtgggcggcattgatgccaggatggatgaaacagagatcggcagctgcttcggccgctatggctctgtgaaggaggtgaagatcatcaccaacagaactggagtgtccaagggctacggctttgtgtcctttgtgaatgatgtggatgtgcagaagatcgtgggcagccagatccacttccacggcaagaagctgaagctgggccctgccatcaggaagcagaagctgtgtgcccggcacgtgcagccccggcccctggtggtgaaccccccacctccaccccagttccagaatgtgtggaggaaccccaacacagagacctacctgcagccccagatcacccccaaccctgtgacccagcacgtgcaggcctacagcgcctacccccacagccctggccaggtgatcaccggctgccagctgctggtgtacaactaccaggagtaccccacctacccagacagcgccttccaggtgaccaccggctaccagctgcctgtgtacaactaccagcccttccctgcctaccccaggagccccttccaggtgacagctggctaccagctgcctgtgtacaactaccaggccttccctgcctaccccaacagccccttccaggtggccaccggctaccagtttcctgtgtacaactaccagcccttccctgcctaccccagcagccccttccaggtgacagctggctaccagctgcctgtgtacaactaccaggccttccctgcctaccccaacagccccttccaggtggccaccggctaccagtttcctgtgtacaactaccaggccttccctgcctaccccaacagccctgtgcaggtgaccaccggctaccagctgcctgtgtacaactaccaggccttccctgcctaccccaacagccccttccaggtggccaccggctaccagtttcctgtgtacaactaccaggccttccctgcctaccccaacagccctgtgcaggtgaccaccggctaccagctgcctgtgtacaactaccagtag

SEQ ID NO: 203897 - DNA, 1149 bp, Artificial Sequence
  derived and/or modified sequence
atgagcgccgccaaccccgagacccccaacagcaccatcagccgggaggcgagtactcagagtagcagtgccgccgccagccagggctgggttttacctgaaggaaaaattgtaccaaacaccgtgttcgtcggcggtatcgacgcgaggatggatgagacggaaatcggcagctgttttgggagatatggaagtgttaaggaagtgaagatcataaccaacaggactggcgtgagcaagggctacggcttcgtgagtttcgtaaacgacgtggatgtgcaaaagatagtgggcagccagattcacttccatggcaagaagctcaagctgggtccagctatccgcaaacagaagctgtgcgcaagacacgtgcaaccacggccactcgtggtgaatccacctcctccaccccagttccaaaatgtttggagaaatcctaatacagaaacatacctccagccacaaatcaccccaaatcccgtgacgcagcacgtgcaggcctactccgcttacccccactcccctggccaggtcatcacaggttgccaattgttggtttacaattaccaagagtacccaacctaccccgattccgccttccaggttactactggataccagctgccggtctataattatcagccattccccgcatatccaagatcaccttttcaggtgacagccgggtatcagcttccagtgtacaattaccaggcctttcccgcttaccccaactcaccattccaggtggccaccggttatcagtttcccgtctacaattaccaaccatttcctgcatatccttccagcccctttcaggtcacagccggctatcagctgccagtgtataactaccaggcctttccagcctatccaaattcccctttccaggtcgccacgggctaccagttccccgtgtacaactaccaggcatttccagcgtatcccaacagccccgttcaggttaccacaggctaccagttgcccgtctacaactaccaggccttcccagcctaccccaactctccgttccaggtggccacaggatatcagttccctgtctataattaccaagctttcccagcatatcctaacagcccagtgcaggtgacaactggctatcagttgccagtctataattaccagtag

SEQ ID NO: 203898 - DNA, 1149 bp, Artificial Sequence
  derived and/or modified sequence
atgagcgccgccaaccccgagacccccaacagcaccatcagccgggaagcatctactcaatcaagctctgcagccgcaagccaggggtgggtcctgcccgaggggaaaatcgtgcccaataccgtatttgtggggggaatcgatgcccgcatggacgagacagagatcgggtcctgtttcggtagatacgggtccgtgaaagaagtgaaaatcatcacaaatcgcacaggtgtaagtaagggttatgggttcgtgtcttttgttaacgacgttgatgtgcaaaaaatcgtgggatcccagatccatttccacggcaaaaaactgaagctcggaccagctattagaaaacagaaactgtgcgcacggcacgtgcagcccaggcctttagtagtgaacccccctccaccgcctcagtttcagaatgtatggcgcaatcccaacactgaaacctacctgcaaccccaaatcacacctaacccggtgacccaacatgttcaggcctatagcgcctacccccatagcccaggacaagtgattaccggatgccagttactggtgtataattatcaggagtaccccacgtatcccgattccgcctttcaggttacaacgggctaccaactccccgtgtacaattaccaaccttttcccgcatatcccagatctccatttcaggtcactgccggataccaactccctgtgtacaattaccaggcattccccgcttatcctaactcaccctttcaggtggctactgggtaccagttcccggtttataactatcagcctttcccagcatatccttcctctccattccaggtaactgccgggtatcaattacccgtgtacaattaccaagctttcccagcatacccgaacagtcccttccaagttgccaccgggtatcagttccccgtgtataattatcaggcattccccgcctaccccaactctcctgtgcaagtgacgactggctatcagttgcctgtgtacaattatcaggccttccccgcttatcctaattctccttttcaggtggcgactggatatcagttccccgtatacaattatcaagccttcccggcttatcccaactcccccgtccaggtgacaacaggttaccaacttcccgtgtataattaccagtag

SEQ ID NO: 203899 - DNA, 3390 bp, Artificial Sequence
  derived and/or modified sequence
ctggcggttctacctccgagggttcgcccgcccttggttttccttacaccttagcctttggctcctttgaccactcgaagccccacagcgtgttccagcggacttcaccagcagacccagaagtggtgggtgaaacactgcctctgttcctccttgagcctgtcgggagctgctgcctgccaccaccatgtctgctgcaaatcctgagactccaaactcaaccatctccagagaggccagcacccagtcttcatcagctgcagctagccaaggctgggtgttaccagaaggcaaaatcgtgccaaacactgtttttgttggtggaattgatgctaggatggatgaaactgagattggaagctgctttggtagatacggttcagtgaaagaagtgaagataatcacgaatcgaactggtgtgtccaaaggctatggatttgtttcgtttgttaatgacgtggatgtccagaagatagtaggatcacagatacatttccatggtaaaaagctgaagctgggccctgcaatcaggaaacaaaagttatgtgctcgtcatgtgcagccacgtcctttggtagttaatcctcctcctccaccacagtttcagaacgtctggcggaatccaaacactgaaacctacctgcagccccaaatcacgccgaatcctgtaactcagcacgttcaggcttactctgcttatccacattcaccaggtcaggtcatcactggatgtcagttgcttgtatataattatcaggaatatcctacttatcccgattcagcatttcaggtcaccactggatatcagttgcctgtatataattatcagccatttcctgcttatccaagatcaccatttcaggtcactgctggatatcagttgcctgtatataattatcaggcatttcctgcttatccaaattcaccatttcaagtcgccactggatatcagttccctgtatacaattatcagccatttcctgcttatccaagttcaccatttcaggtcactgctggatatcagttgcctgtatataattatcaggcatttcctgcttatccaaattcaccatttcaagtcgccactggatatcagttccctgtatacaattatcaggcatttcctgcttatccaaattcaccagttcaggtcaccactggatatcagttgcctgtatacaattatcaggcatttcctgcttatccaaattcaccatttcaagtcgccactggatatcagttccctgtatacaattatcaggcatttcctgcttatccaaattcaccagttcaggtcaccactggatatcagttgcctgtatacaattatcaggcatttcctgcttatccaaattcagcagttcaggtcaccactggatatcagttccatgtatacaattaccagatgccaccgcagtgccctgttggggagcaaaggagaaatctgtggaccgaagcatacaaatggtggtatcttgtctgtttaatccagagaagagactgataaattccgttgttactcaagatgactgcttcaagggtaaaagagtgcatcgctttagaagaagtttggcagtatttaaatctgttggatcctctcagctatctagtttcatgggaagttgctggttttgaatattaagctaaaagttttccactattacagaaattctgaattttggtaaatcacactgaaactttctgtataacttgtattattagactctctagttttatcttaacactgaaactgttcttcattagatgtttatttagaacctggttctgtgtttaatatatagtttaaagtaacaaataatcgagactgaaagaatgttaagatttatctgcaaggatttttaaaaaattgaaacttgcattttaagtgtttaaaagcaaatactgactttcaaaaaagtttttaaaacctgatttgaaagctaacaattttgatagtctgaacacaagcatttcacttctccaagaagtacctgtgaacagtacaatatttcagtattgagctttgcatttatgatttatctagaaatttacctcaaaagcagaatttttaaaactgcatttttaatcagtggaactcaatgtatagttagctttattgaagtcttatccaaacccagtaaaacagattctaagcaaacagtccaatcagtgagtcataatgtttattcaaagtattttatcttttatctagaatccacatatgtatgtccaatttgattgggatagtagttaggataactaaaattctgggcctaattttttaaagaatccaagacaaactaaactttactgggtatataaccttctcaatgagttaccattcttttttataaaaaaaattgttccttgaaatgctaaacttaatggctgtatgtgaaatttgcaaaatactggtattaaagaacgctgcagcttttttatgtcactcaaaggttaatcggagtatctgaaaggaattgtttttataaaaacattgaagtattagttacttgctataaatagatttttatttttgttttttagcctgttatatttccttctgtaaaataaaatatgtccagaagaggcatgttgtttctagattaggtagtgtcctcattttatattgtgaccacacagctagagcaccagagcccttttgctatactcacagtcttgttttcccagcctcttttactagtctttcaggaggtttgctcttagaactggtgatgtaaagaatggaagtagctgtatgagcagttcaaaggccaagccgtggaatggtagcaatgggatataatacctttctaagggaaacatttgtatcagtatcatttgatctgccatggacatgtgtttaaagtggctttctggcccttctttcaatggcttcttccctaaaacgtggagactctaagttaatgtcgttactatgggccatattactaatgcccactggggtctatgatttctcaaaattttcattcggaatccgaaggatacagtctttaaactttagaattcccaagaaggctttattacacctcagaaattgaaagcaccatgactttgtccattaaaaaattatccatagtttttttagtgcttttaacattccgacatacatcattctgtgattaaatctccagatttctgtaaatgatacctacattctaaagagttaattctaattattccgatatgaccttaaggaaaagtaaaggaataaatttttgtctttgttgaagtatttaatagagtaaggtaaagaagatattaagtccctttcaaaatggaaaattaattctaaactgagaaaaatgttcctactacctattgctgatactgtctttgcataaatgaataaaaataaactttttttcttca

SEQ ID NO: 203900 - DNA, 1149 bp, Artificial Sequence
  derived and/or modified sequence
atgagcgcggctaaccccgagacccctaactctaccatatctcgagaggctagcacccaaagctcatcagccgctgcctcccagggttgggtcttgcccgagggtaagatagtgcccaacaccgtgttcgttggtgggattgatgcgagaatggacgagaccgagatcggcagctgttttgggagatatgggtctgtgaaagaggtcaagatcatcacaaatcgcaccggcgtctcaaagggctatgggtttgtgtcctttgttaatgatgtggacgttcaaaaaatcgtcgggtcacagatacacttccacggcaagaaattaaagcttggacctgctattcggaagcaaaagctctgtgccagacatgtgcagccccgacccctcgtggtgaacccaccgccacctcctcagttccagaatgtgtggcggaatcctaacaccgaaacgtaccttcagcctcaaatcactcccaaccccgtaacacagcatgtgcaggcctactcagcctacccccactcaccagggcaagttattacaggctgccagttgctggtgtacaattaccaggaatatccaacctaccctgactcggcattccaagttactacagggtaccagctgccagtgtacaactaccagccattccccgcttaccccagatccccattccaggtcactgcagggtatcagctcccagtctacaattaccaagcctttccagcttaccctaattccccctttcaggtggctactgggtaccagtttcctgtctataactaccagcccttcccggcatatccttcttcgccttttcaggtcacagccggatatcaactgcccgtgtacaattatcaggccttccccgcttatcctaacagtccattccaggtggccaccggctatcagttcccggtctacaattaccaagcctttcccgcatacccgaacagtcctgtgcaggtcacaactggctaccagctgcccgtctacaactaccaggctttcccggcttatcctaatagcccattccaggtggccaccggctatcagttcccagtgtacaactatcaggcatttcctgcgtacccgaactcccctgtgcaggtaaccacaggatatcagttgcccgtctataactaccagtag

SEQ ID NO: 203901 - DNA, 1149 bp, Artificial Sequence
  derived and/or modified sequence
atgtcagccgcaaaccctgagactcccaattcgactatttccagagaagcctccactcagtcctctagcgctgcggcttctcagggctgggtgctgcctgaggggaagatcgttccaaacactgtattcgtgggcggtatcgacgcaaggatggatgagacagaaatcggcagctgtttcggacggtacggatcagtgaaggaagtaaaaatcatcactaatcgaaccggagtgtcgaaaggctacggctttgtatccttcgtcaatgacgttgacgtgcagaaaatcgtcggatcgcaaatacacttccacgggaagaagctgaagctgggaccggcaattcgcaagcagaagctgtgcgccaggcacgtgcaaccacgtcctctcgtcgtgaatccgcctccgcctccacagtttcagaatgtgtggaggaaccctaacaccgagacttatttgcagcctcagataaccccaaatcccgtcacacaacacgtgcaggcctattccgcatatcctcacagccctggccaggtcattaccggatgccagttgctggtctataactaccaagaatatccaacatatcccgacagcgcctttcaggtgaccacaggataccagctgccagtgtataactatcagccttttccagcatatcctcgaagcccttttcaggtgactgctggataccagttgccagtgtataactaccaggcttttcctgcgtatcctaattccccgtttcaggttgcaactggataccagttccctgtgtataactatcagccatttcctgcctacccttctagcccctttcaagtcactgctgggtatcagctgcccgtgtacaattaccaggcgttccctgcttatccaaacagcccttttcaggttgccactggttatcagttcccggtgtataattatcaagcgttcccagcctacccaaactcacccgtacaagtgactacaggttatcagctcccggtatataactaccaggcatttcccgcttaccccaactcaccttttcaagtggccaccggttatcagtttcccgtctataattatcaggctttccctgcatacccaaatagcccggtgcaggtcacaaccgggtatcaactgcctgtctacaactaccagtag

SEQ ID NO: 203902 - DNA, 1317 bp, Artificial Sequence
  derived and/or modified sequence
atgtccgccgcaaatcctgagacacctaactccacgatcagcagagaggcatcaacccagagctcaagcgctgcggcttcccagggctgggtacttccggaaggtaaaatcgtgcctaacaccgtttttgtgggaggtatagatgcgaggatggacgaaactgaaattgggtcctgctttggccggtacgggagcgtgaaagaagtgaaaatcatcaccaacagaaccggagtctctaaaggatacggttttgtgagcttcgtgaacgacgtggacgtccagaagatagtcggctctcagattcacttccacggtaagaaactaaaattggggccagcaatccgcaaacagaagttatgtgcccgccatgtgcaacctcggccactcgtagtcaatcctcctccccctccacagtttcagaacgtgtggagaaaccccaacacagaaacatatttgcagccgcagattacaccaaaccccgttacacaacacgtgcaggcttattccgcttacccgcacagcccagggcaggtcattaccggatgccagctcctggtgtataactatcaggaatacccaacttatcccgactcagccttccaagtcaccactggctatcaacttccagtttataactaccagccttttccagcttacccgaggagtcccttccaagtcaccgcggggtaccaacttcccgtttacaattaccaggcctttcccgcctaccccaacagtcccttccaggttgcaacggggtaccagttcccagtctataactaccaggctttccccgcttatcccaattccccttttcaggttgccacgggctaccagtttccagtctacaattatcaggcctttcccgcttatcctaactcaccatttcaggtggctaccgggtatcagtttccggtgtacaattatcaagccttccctgcataccctaattctcccgtgcaggttacaaccggttaccagctccccgtctacaactaccaggccttcccagcgtaccctaattccccatttcaggtggcaaccgggtatcagtttccagtttataactaccaggcctttcctgcctatcctaacagccccgtgcaggtcactacaggctaccagctacctgtgtataactaccaagccttccctgcctatcccaactccgccgtccaggtgactacagggtatcagtttcacgtctacaattatcagatgcccccgcagtgtcctgtcggggaacagcgcagaaacctctggactgaggcctacaagtggtggtatctggtgtgtctcatccagcgccgggattag

SEQ ID NO: 203903 - DNA, 1014 bp, Artificial Sequence
  derived and/or modified sequence
atgagtgctgccaaccccgaaactccgaactccacgattagtagggaggcctcaacccagtcctcttctgccgctgcatctcagggttgggtgcttcccgaaggaaaaattgtgcctaataccgtctttgtcggaggaattgacgctagaatggatgaaactgaaatcgggagctgttttggacgttatggatcagtcaaagaagtgaaaataatcacaaacagaacgggtgtatctaagggttatggcttcgtttcctttgtaaatgatgtagacgtgcagaaaatagtgggctcccagatccatttccatggaaagaagttaaagcttggccccgccattagaaaacaaaagctgtgcgcccggcacgtgcagccccgtcccctggtggtaaacccccccccgccaccccagttccagaacgtatggcgaaatcctaatacggagacatatctgcagccacagatcacgccaaatcctgtgactcagcatgtgcaagcctactccgcataccctcacagtcctggtcaagtgattaccggctgtcagctactcgtgtataactaccaggagtacccaacttacccggactccgcgttccaagtcacaactggttatcagctcccggtatataattatcagccttttccggcttaccctcggtcaccttttcaagtgaccgccggctaccagctgccagtgtacaactaccaggccttcccggcctaccctaatagtccatttcaggtggccactggctaccagtttcctgtctacaattaccaggctttcccggcgtacccaaattccccggttcaggtgacaacagggtaccagctccctgtgtacaattaccaggcgttccctgcctacccaaattccccttttcaggtggccacaggataccagttccctgtgtataattaccaggccttccccgcgtacccaaattcccctgtgcaagtgacgaccggttaccaacttccagtgtacaactatcaaatgcccccgtag

SEQ ID NO: 203904 - DNA, 1317 bp, Artificial Sequence
  derived and/or modified sequence
atgtccgcggccaatcccgagacaccaaactccaccattagccgcgaagcatccacccaatcatcttcagccgcggcctcccaagggtgggtactgcccgagggcaagatagtccccaataccgtcttcgtgggtggcattgatgcacggatggatgagaccgagattggttcctgctttggccgatacggaagcgtgaaagaagtgaaaattatcaccaatcgaactggcgtgtccaaaggatacgggttcgtttcattcgtgaacgacgtcgacgtacagaagatcgtaggatctcagatacactttcacggtaaaaaactgaagctcgggcctgctattcgtaagcagaagttatgcgcccgccacgtacagccacggccactagttgtgaacccccccccgccgcctcaatttcagaatgtatggcgcaaccctaatacagagacctacctacagccccagatcacacccaatccggtcacgcagcacgtccaagcctattctgcttaccctcattcaccaggacaagtcattactgggtgccagctcctggtgtataactaccaggaataccctacttatcctgattctgcatttcaggttaccaccggataccaacttcccgtttataactatcaaccatttcccgcctatcctcgatccccattccaggtcactgcggggtaccagctgcccgtttacaattaccaggcctttcccgcctacccaaactctcctttccaagtagcaacaggataccagtttccagtgtacaactaccaggcgttcccagcttatcccaattcccccgtgcaggtgaccactggctatcagctgcccgtttataactaccaggcctttcccgcctacccaaacagcccctttcaggtggcaacaggctatcagtttcccgtgtacaactatcaagcattccctgcttatcccaacagtcctgtgcaggtgacaacaggctaccagcttcccgtctacaactaccaagcttttccggcttatccaaatagcccattccaggttgccacaggctaccagttccccgtctacaattaccaagccttcccagcgtatccaaatagtcccgtgcaggtgacgacaggctaccagctcccagtgtacaattatcaggccttccccgcctatcccaacagtgctgtgcaggtgacaacaggctatcaattccacgtgtacaactatcaaatgcccccacaatgtcctgtcggggaacagaggcgcaacctttggaccgaggcctataaatggtggtacctcgtgtgtcttattcagcgcagagattag

SEQ ID NO: 203905 - DNA, 1086 bp, Artificial Sequence
  derived and/or modified sequence
atgtcggctgctaatcctgaaacccctaacagcaccataagcagagaggcctcaacacagagtagttccgccgcagcctcccaggggtgggtgttacccgagggaaagatcgtgccaaatactgtttttgttgggggaattgacgcccgaatggacgaaacagaaatcggttcctgcttcggacgatatggttctgtaaaggaagtaaaaattataaccaataggacaggagtgagcaaggggtacggattcgtctccttcgtgaacgacgtggacgtgcagaagattgtggggtcacagattcacttccatggtaaaaaactcaaacttggacccgcgataaggaagcagaaactatgcgcccgccatgtacaaccccgaccccttgtggtaaacccccctcctccgccccagtttcagaacgtctggagaaaccccaatacggagacctacctgcagccccagatcacaccaaacccggtgacccagcacgttcaggcttactctgcttatccccacagccccggccaggtgataacagggtgtcagctactggtgtataattatcaggaataccctacctaccccgattccgcatttcaggtgaccactggctatcagctgccagtgtacaactaccaacctttcccagcctatcctcgttccccattccaggtaaccgccgggtatcagctgcccgtttacaactatcaagcctttcctgcatatcctaacagtccctttcaggtggcaactggataccagtttcccgtgtacaattatcaagcgtttcctgcatacccaaactcccccgtccaggtgaccacggggtaccagcttcccgtgtacaattatcaggcgtttccggcataccctaattcgccatttcaggtggctactgggtatcaatttcctgtatataattatcaggcctttccagcgtatcctaatagccctgttcaggttaccacagggtaccagttgcctgtttataactaccaggcctttcccgcataccccaactctcctgtccaggtcacaacggggtatcagctcccggtgtacaactaccagatgccgccatag

SEQ ID NO: 203906 - DNA, 1317 bp, Artificial Sequence
  derived and/or modified sequence
atgtctgctgccaaccctgagacccccaacagcaccatcagccgggaggccagcacccagagcagcagcgctgctgccagccagggctgggtgctgcctgagggcaagatcgtgcccaacacagtgtttgtgggcggcattgatgccaggatggatgaaacagagatcggcagctgcttcggccgctatggctctgtgaaggaggtgaagatcatcaccaacagaactggagtgtccaagggctacggctttgtgtcctttgtgaatgatgtggatgtgcagaagatcgtgggcagccagatccacttccacggcaagaagctgaagctgggccctgccatcaggaagcagaagctgtgtgcccggcacgtgcagccccggcccctggtggtgaaccccccacctccaccccagttccagaatgtgtggaggaaccccaacacagagacctacctgcagccccagatcacccccaaccctgtgacccagcacgtgcaggcctacagcgcctacccccacagccctggccaggtgatcaccggctgccagctgctggtgtacaactaccaggagtaccccacctacccagacagcgccttccaggtgaccaccggctaccagctgcctgtgtacaactaccagcccttccctgcctaccccaggagccccttccaggtgacagctggctaccagctgcctgtgtacaactaccaggccttccctgcctaccccaacagccccttccaggtggccaccggctaccagtttcctgtgtacaactaccaggccttccctgcctaccccaacagccccttccaggtggccaccggctaccagtttcctgtgtacaactaccaggccttccctgcctaccccaacagccccttccaggtggccaccggctaccagtttcctgtgtacaactaccaggccttccctgcctaccccaacagccctgtgcaggtgaccaccggctaccagctgcctgtgtacaactaccaggccttccctgcctaccccaacagccccttccaggtggccaccggctaccagtttcctgtgtacaactaccaggccttccctgcctaccccaacagccctgtgcaggtgaccaccggctaccagctgcctgtgtacaactaccaggccttccctgcctaccccaacagcgctgtgcaggtgaccaccggctaccagttccacgtgtacaactaccagatgccaccccagtgccctgtgggggagcagaggaggaacctgtggacagaggcctacaagtggtggtacctggtgtgcctgatccagaggcgggactag

SEQ ID NO: 203907 - DNA, 1014 bp, Artificial Sequence
  derived and/or modified sequence
atgtctgctgccaaccctgagacccccaacagcaccatcagccgggaggccagcacccagagcagcagcgctgctgccagccagggctgggtgctgcctgagggcaagatcgtgcccaacacagtgtttgtgggcggcattgatgccaggatggatgaaacagagatcggcagctgcttcggccgctatggctctgtgaaggaggtgaagatcatcaccaacagaactggagtgtccaagggctacggctttgtgtcctttgtgaatgatgtggatgtgcagaagatcgtgggcagccagatccacttccacggcaagaagctgaagctgggccctgccatcaggaagcagaagctgtgtgcccggcacgtgcagccccggcccctggtggtgaaccccccacctccaccccagttccagaatgtgtggaggaaccccaacacagagacctacctgcagccccagatcacccccaaccctgtgacccagcacgtgcaggcctacagcgcctacccccacagccctggccaggtgatcaccggctgccagctgctggtgtacaactaccaggagtaccccacctacccagacagcgccttccaggtgaccaccggctaccagctgcctgtgtacaactaccagcccttccctgcctaccccaggagccccttccaggtgacagctggctaccagctgcctgtgtacaactaccaggccttccctgcctaccccaacagccccttccaggtggccaccggctaccagtttcctgtgtacaactaccaggccttccctgcctaccccaacagccctgtgcaggtgaccaccggctaccagctgcctgtgtacaactaccaggccttccctgcctaccccaacagccccttccaggtggccaccggctaccagtttcctgtgtacaactaccaggccttccctgcctaccccaacagccctgtgcaggtgaccaccggctaccagctgcctgtgtacaactaccagatgccaccctag

SEQ ID NO: 203908 - DNA, 1317 bp, Artificial Sequence
  derived and/or modified sequence
atgtctgctgccaaccctgagacccccaacagcaccatcagccgggaggccagcacccagagcagcagcgctgctgccagccagggctgggtgctgcctgagggcaagatcgtgcccaacacagtgtttgtgggcggcattgatgccaggatggatgaaacagagatcggcagctgcttcggccgctatggctctgtgaaggaggtgaagatcatcaccaacagaactggagtgtccaagggctacggctttgtgtcctttgtgaatgatgtggatgtgcagaagatcgtgggcagccagatccacttccacggcaagaagctgaagctgggccctgccatcaggaagcagaagctgtgtgcccggcacgtgcagccccggcccctggtggtgaaccccccacctccaccccagttccagaatgtgtggaggaaccccaacacagagacctacctgcagccccagatcacccccaaccctgtgacccagcacgtgcaggcctacagcgcctacccccacagccctggccaggtgatcaccggctgccagctgctggtgtacaactaccaggagtaccccacctacccagacagcgccttccaggtgaccaccggctaccagctgcctgtgtacaactaccagcccttccctgcctaccccaggagccccttccaggtgacagctggctaccagctgcctgtgtacaactaccaggccttccctgcctaccccaacagccccttccaggtggccaccggctaccagtttcctgtgtacaactaccaggccttccctgcctaccccaacagccctgtgcaggtgaccaccggctaccagctgcctgtgtacaactaccaggccttccctgcctaccccaacagccccttccaggtggccaccggctaccagtttcctgtgtacaactaccaggccttccctgcctaccccaacagccctgtgcaggtgaccaccggctaccagctgcctgtgtacaactaccaggccttccctgcctaccccaacagccccttccaggtggccaccggctaccagtttcctgtgtacaactaccaggccttccctgcctaccccaacagccctgtgcaggtgaccaccggctaccagctgcctgtgtacaactaccaggccttccctgcctaccccaacagcgctgtgcaggtgaccaccggctaccagttccacgtgtacaactaccagatgccaccccagtgccctgtgggggagcagaggaggaacctgtggacagaggcctacaagtggtggtacctggtgtgcctgatccagaggcgggactag

SEQ ID NO: 203909 - DNA, 1086 bp, Artificial Sequence
  derived and/or modified sequence
atgtctgctgccaaccctgagacccccaacagcaccatcagccgggaggccagcacccagagcagcagcgctgctgccagccagggctgggtgctgcctgagggcaagatcgtgcccaacacagtgtttgtgggcggcattgatgccaggatggatgaaacagagatcggcagctgcttcggccgctatggctctgtgaaggaggtgaagatcatcaccaacagaactggagtgtccaagggctacggctttgtgtcctttgtgaatgatgtggatgtgcagaagatcgtgggcagccagatccacttccacggcaagaagctgaagctgggccctgccatcaggaagcagaagctgtgtgcccggcacgtgcagccccggcccctggtggtgaaccccccacctccaccccagttccagaatgtgtggaggaaccccaacacagagacctacctgcagccccagatcacccccaaccctgtgacccagcacgtgcaggcctacagcgcctacccccacagccctggccaggtgatcaccggctgccagctgctggtgtacaactaccaggagtaccccacctacccagacagcgccttccaggtgaccaccggctaccagctgcctgtgtacaactaccagcccttccctgcctaccccaggagccccttccaggtgacagctggctaccagctgcctgtgtacaactaccaggccttccctgcctaccccaacagccccttccaggtggccaccggctaccagtttcctgtgtacaactaccaggccttccctgcctaccccaacagccctgtgcaggtgaccaccggctaccagctgcctgtgtacaactaccaggccttccctgcctaccccaacagccccttccaggtggccaccggctaccagtttcctgtgtacaactaccaggccttccctgcctaccccaacagccctgtgcaggtgaccaccggctaccagctgcctgtgtacaactaccaggccttccctgcctaccccaacagccctgtgcaggtgaccaccggctaccagctgcctgtgtacaactaccagatgccaccctag

SEQ ID NO: 203910 - DNA, 1317 bp, Artificial Sequence
  derived and/or modified sequence
atgagcgccgccaaccccgagacccccaacagcaccatcagccgggaagctagtacgcaatcctcttccgccgccgcttcccagggatgggtgctgcccgagggcaagatagtccctaatacagtctttgtcggtgggatcgatgcacggatggatgagaccgagatcggttcctgcttcggccgctatggaagcgtgaaagaggttaagattatcacgaatagaacgggtgtttcgaaaggttacggttttgtgagtttcgtgaatgatgtggacgtgcagaaaattgtgggctctcagatacatttccatggcaagaaactcaaattgggtcccgctatccgcaagcagaaactctgcgccagacatgtccagcctcgtccactcgtcgtgaatcctccaccacctccgcagttccagaatgtatggcggaatccaaatacagaaacctacctacagccccaaatcacgcccaatcccgtcacacaacacgttcaggcctatagcgcgtacccacactcccctggacaggtgatcacaggatgccagctgctggtgtacaattaccaagaatatcccacctaccccgatagcgctttccaggttactactggctatcagctccctgtgtataactatcaacccttcccagcctaccctcgctccccatttcaagtgaccgccggttaccaattgcccgtgtacaactaccaggcctttcccgcgtaccccaactcaccttttcaggtggcgaccggctaccagttcccggtttataactatcaggccttccccgcgtatccaaattcaccctttcaggtcgcaacaggctatcaatttcccgtctacaactaccaagcattcccggcatacccaaacagcccatttcaggtggccacaggataccaatttcccgtctataactaccaagcctttccagcttacccaaattcacccgtccaggtcaccactggctatcaattgcctgtgtacaattatcaggcctttcccgcctacccaaacagtcccttccaagttgccaccggttaccagttccctgtttacaattatcaggccttccccgcctatccaaactctcctgtccaggtgactacaggttaccagctgcccgtttacaattatcaggcattcccagcatacccgaactctgccgttcaggtgacgaccggctaccaatttcacgtctacaattaccaaatgcctccccagtgcccagtgggcgaacaacgaagaaacctttggaccgaggcatacaagtggtggtatctcgtatgtttgatccagagaagagactag

SEQ ID NO: 203911 - DNA, 1014 bp, Artificial Sequence
  derived and/or modified sequence
atgagcgccgccaaccccgagacccccaacagcaccatcagccgggaggcatcaacccaaagtagttctgctgccgcctcccaaggttgggtcctgcccgagggcaagattgttcccaacactgtattcgtgggcgggatagacgccagaatggacgaaaccgaaatcgggagctgcttcggaagatacggcagcgtcaaggaggtcaaaatcattaccaataggacaggcgtgtcaaaaggttatggctttgtgagtttcgtgaatgatgtcgacgttcagaaaatcgtcggttcccaaatccatttccacggtaagaagctgaaactcgggcccgccatacgaaagcagaagctatgcgcgaggcatgtgcagcccaggccgttggtggtgaatcccccccccccccctcaattccagaatgtctggcgaaatcctaatacagagacctacctgcaaccgcagattactcccaatccagtcacgcagcatgttcaggcctatagcgcatatccgcattcacccggccaagttatcactggttgtcaactactggtgtataattatcaggagtaccctacttatcccgatagcgcattccaggtgaccacaggctatcaactcccggtttacaactatcagccttttcccgcttatccacgatccccatttcaagtcacagcaggctaccaactccccgtatacaactaccaggcttttcccgcttaccctaattcaccctttcaagtggctacaggctatcagttccccgtgtacaattaccaggctttccccgcttacccaaacagccccgtgcaggtgaccactggataccagctgcctgtctacaactaccaggcattcccagcctatcccaactctcccttccaggtagccacaggataccaatttccagtgtacaattaccaggcctttcctgcgtatccaaactcacctgttcaggtaaccactggttatcagctccccgtgtataattaccagatgccaccatag

SEQ ID NO: 203912 - DNA, 1317 bp, Artificial Sequence
  derived and/or modified sequence
atgagcgccgccaaccccgagacccccaacagcaccatcagccgggaagccagcactcagtcgagctctgctgccgcttctcaggggtgggttctgccagaggggaagatcgtgcctaacacagtgttcgtgggagggatagatgcgagaatggatgaaacagaaatcggttcctgttttggtcgctacggctctgtaaaggaggtcaaaatcattactaaccgcaccggagtctcgaaagggtacgggttcgtgagcttcgtcaacgacgttgacgtgcagaagatcgttgggtctcaaattcattttcatggcaaaaaactgaagctggggcctgcgatcaggaagcagaaactgtgtgcccggcatgttcagcctcggccgttagttgtgaatcctccccctccccctcaattccaaaacgtgtggaggaatcccaatactgagacatacttacagcctcagattaccccaaaccccgtcacacaacacgttcaggcttactccgcctacccacacagcccaggccaggtgatcactggttgccagttgctggtgtataactatcaggaatatcctacatacccagacagtgcttttcaggttactaccggttaccagcttccggtgtataactaccagcccttccctgcatatcccaggtcgccatttcaggtaacggccggttatcaattacccgtctataactaccaggcatttcctgcttacccgaatagcccatttcaagtggcaacaggatatcagtttcccgtgtacaactatcaggccttccccgcttatccaaattccccggtacaggttaccaccggctaccagttacccgtctataactaccaggctttcccagcgtatcccaatagccccttccaggtggcgacgggttatcagtttccagtctataactaccaggcctttccagcttacccgaattcccctgtccaggtgacgacaggctaccagctgcctgtgtataattaccaggcttttccagcctaccccaactcaccttttcaagtagccaccggataccaattccctgtgtacaattaccaggcgtttccagcctatcctaatagcccagtgcaagtcacaaccggctatcaactgccagtttacaattatcaggcttttcctgcctaccccaatagtgccgttcaggtgacgacaggataccagtttcacgtctacaactatcaaatgcctccacagtgccccgtgggcgagcagcgtcgcaacctgtggacggaggcgtacaaatggtggtatctggtttgccttattcagaggcgagactag

SEQ ID NO: 203913 - DNA, 1086 bp, Artificial Sequence
  derived and/or modified sequence
atgagcgccgccaaccccgagacccccaacagcaccatcagccgggaggcctccactcagtcaagttctgcggcagcgagccagggctgggtgctgcccgagggcaaaatagtgcccaataccgtatttgttggtggaatcgacgctcgtatggatgagactgaaataggctcctgctttggtagatatggctccgtgaaggaagtgaagattatcaccaatcggacgggcgtaagcaagggttacgggtttgtttcctttgtaaacgatgtagatgtgcagaagatcgttggctctcagatccattttcacggcaagaagcttaagcttggccccgctattcgcaagcagaagctgtgtgcacgccacgttcaaccccgccctttagtggtaaacccccctcctccaccccagttccagaatgtatggcgaaatcccaacacagaaacctacctgcaacctcagataacccccaatcccgtcacccaacacgttcaggcttactccgcttacccacatagtccaggacaggtcattaccggttgccagctcctcgtttacaactatcaagagtaccctacataccccgactcagcattccaggtgacaactgggtatcaattgccagtgtacaactaccaaccttttccagcatacccccgatccccattccaagtcaccgccgggtaccagctgccggtgtataattaccaggccttccctgcctaccctaactcaccatttcaggtggccaccggttatcaatttccagtgtataattaccaggcatttccagcatatccaaactcgcccgtccaggtgacgaccggttatcagcttccggtgtataattaccaggccttccctgcctatcccaacagcccctttcaggtggctacgggctaccaattccccgtctacaactatcaggcattcccagcctaccctaactcacctgttcaggtgaccaccggatatcaactccctgtgtataactaccaggccttccccgcttatccaaactctcctgtacaagtgaccacaggctatcaactccctgtgtacaattatcaaatgccgccttag

SEQ ID NO: 203914 - DNA, 1317 bp, Artificial Sequence
  derived and/or modified sequence
atgagtgcggctaatccagaaacaccgaacagcaccatttcccgggaggcaagcacacagtcttccagtgcagctgcctcacagggctgggtactgccagaaggaaaaatcgtgccaaacaccgtgtttgtagggggaattgacgcaaggatggatgaaaccgagatcggttcatgttttggccgatacggatcagtcaaagaggtcaagataatcaccaaccggaccggtgtttccaaagggtacggattcgtatcattcgtgaacgacgtggacgtccagaagattgttggaagccaaatccacttccatgggaagaaactaaaacttggccctgcaatccgtaagcagaaactgtgcgctcgccacgttcagcctagaccacttgtggtgaatccaccacccccaccccagtttcagaacgtttggaggaatccgaacacagaaacttatttgcagccacaaatcactcctaatcccgtgactcagcatgtgcaagcttactcagcatatccacattctccgggacaagtgatcacaggctgccagctgcttgtgtacaattaccaggaatatcccacataccccgatagcgcctttcaggtgactacagggtaccagctccccgtgtataattatcagcccttccccgcttatcctagatccccgttccaggtgacagctggataccagttacccgtttacaactaccaagcttttcccgcttatccgaattccccctttcaggtcgcaaccggctaccagtttcctgtctacaactatcaggccttcccagcctatcctaatagccctttccaggtggccaccggataccagttcccagtgtataactatcaggcgttccccgcataccctaatagccccttccaggtcgccaccggctatcagttcccagtctacaactaccaagctttccccgcttatcctaactcaccggtgcaagtaacgacaggataccagcttcccgtctataattaccaagctttccctgcctatcctaattcccccttccaagttgccaccgggtatcagttccctgtctacaattaccaggcctttcctgcatatcccaactcacctgtgcaggtaacgaccggctaccagctcccagtctataattatcaagcattcccagcttaccctaattctgctgtccaggttaccacaggttatcagtttcatgtctacaactaccagatgccaccccagtgtcctgtgggtgaacagcggagaaatctgtggaccgaagcttataagtggtggtacctggtgtgcttgatccagcgaagagactag

SEQ ID NO: 203915 - DNA, 1014 bp, Artificial Sequence
  derived and/or modified sequence
atgtccgcagcgaaccccgagacacctaacagtactataagcagggaggcatccacccagtcctcaagcgccgcagcctctcaggggtgggtcctgcctgagggcaaaattgttcccaacaccgtcttcgtcggaggcatcgatgccagaatggatgagaccgaaatcgggtcctgctttggcagatacggaagcgtgaaggaggtcaagatcataaccaataggacaggggtttcaaaaggatacggattcgtgtcgtttgttaacgacgtggatgtgcagaaaatcgtgggctcccagattcacttccacggtaagaagttgaagctgggaccggctattcgcaagcagaagctctgcgccagacatgtccaaccaagacctttggtggtgaatccaccaccacctccacagttccagaacgtttggcgtaacccgaatacagaaacttacctgcaacctcagattacccccaaccccgtgacgcagcacgttcaggcctacagtgcttatcctcacagccccggtcaggtgatcaccgggtgtcagctgttggtctacaactatcaggagtaccctacatatcctgacagtgcgttccaggtgacgaccggttaccagctaccagtgtataattatcaaccattccctgcgtaccccagatctcccttccaagtgacagccggttatcagctgccagtctataactaccaagcgtttccagcatatcctaacagtccctttcaggtagccactgggtatcaattcccagtctataactaccaggctttccccgcatacccaaactccccagtgcaagttacaaccgggtatcagctacccgtctataattatcaggcttttccagcatacccgaattcgcctttccaggtagcgactggctaccagttccctgtgtacaactaccaggcatttcctgcctatccaaacagcccagtgcaagttaccaccggctaccagctgcccgtctacaattatcagatgccgccatag

SEQ ID NO: 203916 - DNA, 1317 bp, Artificial Sequence
  derived and/or modified sequence
atgtcagctgcaaatcctgaaaccccaaacagcacaatatcgagagaggctagcactcaaagttcttctgccgctgcttctcagggctgggtgctgccagaagggaagatcgtccctaacacagtctttgtgggcggtatagacgccagaatggatgaaaccgaaatcggcagctgtttcggaagatatggatcagtcaaagaagtaaagatcatcaccaaccgcactggcgtgagtaaagggtacggatttgtctccttcgtcaatgacgtcgatgtgcagaagatagttggcagccaaatccatttccacggaaagaaactgaagctgggtcctgctattcgcaaacagaaactgtgcgctaggcacgtccagccgaggccactggtggttaatcctcccccacctccacagtttcagaacgtttggcggaaccccaacaccgaaacctatctgcagccccaaatcacccctaatcctgtgacacagcatgtgcaagcctactcagcttacccacattcgccgggacaggtcataacggggtgtcagctgctggtgtataattaccaggaataccctacctaccccgattccgccttccaggttacgaccggttaccagctgccagtgtacaactaccaaccatttccggcatacccaagatctccctttcaggttacagccggataccagctgcccgtgtataactatcaggctttccctgcctatccaaacagcccctttcaggtcgctaccggatatcagtttcctgtgtacaattatcaggccttcccagcatatccaaatagcccggtgcaggtgaccaccgggtaccaactgccagtctacaactaccaggcctttcctgcataccctaatagcccgtttcaagttgccacgggttatcagtttcctgtatataattatcaggctttccccgcataccccaattccccagtgcaagtgaccacaggataccagctgcctgtgtataactatcaagcttttccagcttacccaaatagtcccttccaggtggccacaggatatcagtttcctgtgtacaattaccaggcctttccagcctaccccaattcccccgtgcaggtcacaacaggctatcagttgcccgtctacaattaccaggccttccccgcttatcctaactctgccgtgcaggtgactactggctatcagtttcatgtttataactaccagatgcctccacagtgtcccgttggggaacaaaggcgcaatctgtggactgaggcttataagtggtggtacctggtatgtctcatccaacgcagggattag

SEQ ID NO: 203917 - DNA, 1086 bp, Artificial Sequence
  derived and/or modified sequence
atgtcggctgcaaacccagagacgcctaatagcaccataagccgggaagccagcacccagagcagctccgctgccgcatcacagggttgggtactgcctgaaggcaaaattgtccccaatacggtgtttgttggcggtatcgatgcacggatggacgagacggagatagggagttgcttcggtagatatggctccgtgaaggaagtcaaaatcattaccaataggacaggagtctccaagggatatggcttcgtttcattcgtcaacgacgtggacgtccagaaaattgtgggcagtcagattcattttcatggcaaaaaattgaaattgggaccagctattcgaaaacagaagctctgcgccagacacgtgcagccccgaccccttgtggtgaacccacctcccccaccacagttccagaacgtttggcggaatcctaacacagaaacgtatctccagcctcaaatcactcccaacccggtcacccagcatgtccaggcctattctgcttatccacatagtcccggacaggtgatcacgggctgccagctgttagtttataattaccaggagtatccaacttatccagattccgctttccaagtgacaaccgggtatcagctgccagtgtacaattaccagccattccccgcttaccccagaagcccattccaagttacggcaggataccaacttcccgtttacaactaccaagctttccctgcatacccgaattccccgttccaggtggcaacagggtaccagttccccgtttataactatcaagcatttcctgcttaccccaacagtcccgtacaagtgaccacgggataccagctgccggtctacaactatcaagcattccctgcgtatccaaacagcccattccaggttgccaccggctaccagttcccagtatataattatcaggccttccctgcctaccccaattcaccggtccaagtgacaacaggataccaactgcccgtgtacaattaccaagccttccccgcttacccaaattcccccgtgcaggtcacaaccgggtatcaactgcctgtgtacaactaccagatgcccccttag

SEQ ID NO: 203918 - DNA, 1317 bp, Artificial Sequence
  derived and/or modified sequence
atgagcgccgccaaccccgagacccccaacagcaccatcagcagagaggccagcacccagagcagcagcgccgccgccagccagggctgggtgctgcccgagggcaagatcgtgcccaacaccgtgttcgtgggcggcatcgacgccagaatggacgagaccgagatcggcagctgcttcggcagatacggcagcgtgaaggaggtgaagatcatcaccaacagaaccggcgtgagcaagggctacggcttcgtgagcttcgtgaacgacgtggacgtgcagaagatcgtgggcagccagatccacttccacggcaagaagctgaagctgggccccgccatcagaaagcagaagctgtgcgccagacacgtgcagcccagacccctggtggtgaacccccccccccccccccagttccagaacgtgtggagaaaccccaacaccgagacctacctgcagccccagatcacccccaaccccgtgacccagcacgtgcaggcctacagcgcctacccccacagccccggccaggtgatcaccggctgccagctgctggtgtacaactaccaggagtaccccacctaccccgacagcgccttccaggtgaccaccggctaccagctgcccgtgtacaactaccagcccttccccgcctaccccagaagccccttccaggtgaccgccggctaccagctgcccgtgtacaactaccaggccttccccgcctaccccaacagccccttccaggtggccaccggctaccagttccccgtgtacaactaccaggccttccccgcctaccccaacagccccttccaggtggccaccggctaccagttccccgtgtacaactaccaggccttccccgcctaccccaacagccccttccaggtggccaccggctaccagttccccgtgtacaactaccaggccttccccgcctaccccaacagccccgtgcaggtgaccaccggctaccagctgcccgtgtacaactaccaggccttccccgcctaccccaacagccccttccaggtggccaccggctaccagttccccgtgtacaactaccaggccttccccgcctaccccaacagccccgtgcaggtgaccaccggctaccagctgcccgtgtacaactaccaggccttccccgcctaccccaacagcgccgtgcaggtgaccaccggctaccagttccacgtgtacaactaccagatgcccccccagtgccccgtgggcgagcagagaagaaacctgtggaccgaggcctacaagtggtggtacctggtgtgcctgatccagagaagagactag

SEQ ID NO: 203919 - DNA, 1014 bp, Artificial Sequence
  derived and/or modified sequence
atgagcgccgccaaccccgagacccccaacagcaccatcagcagagaggccagcacccagagcagcagcgccgccgccagccagggctgggtgctgcccgagggcaagatcgtgcccaacaccgtgttcgtgggcggcatcgacgccagaatggacgagaccgagatcggcagctgcttcggcagatacggcagcgtgaaggaggtgaagatcatcaccaacagaaccggcgtgagcaagggctacggcttcgtgagcttcgtgaacgacgtggacgtgcagaagatcgtgggcagccagatccacttccacggcaagaagctgaagctgggccccgccatcagaaagcagaagctgtgcgccagacacgtgcagcccagacccctggtggtgaacccccccccccccccccagttccagaacgtgtggagaaaccccaacaccgagacctacctgcagccccagatcacccccaaccccgtgacccagcacgtgcaggcctacagcgcctacccccacagccccggccaggtgatcaccggctgccagctgctggtgtacaactaccaggagtaccccacctaccccgacagcgccttccaggtgaccaccggctaccagctgcccgtgtacaactaccagcccttccccgcctaccccagaagccccttccaggtgaccgccggctaccagctgcccgtgtacaactaccaggccttccccgcctaccccaacagccccttccaggtggccaccggctaccagttccccgtgtacaactaccaggccttccccgcctaccccaacagccccgtgcaggtgaccaccggctaccagctgcccgtgtacaactaccaggccttccccgcctaccccaacagccccttccaggtggccaccggctaccagttccccgtgtacaactaccaggccttccccgcctaccccaacagccccgtgcaggtgaccaccggctaccagctgcccgtgtacaactaccagatgcccccctag

SEQ ID NO: 203920 - DNA, 1317 bp, Artificial Sequence
  derived and/or modified sequence
atgagcgccgccaaccccgagacccccaacagcaccatcagcagagaggccagcacccagagcagcagcgccgccgccagccagggctgggtgctgcccgagggcaagatcgtgcccaacaccgtgttcgtgggcggcatcgacgccagaatggacgagaccgagatcggcagctgcttcggcagatacggcagcgtgaaggaggtgaagatcatcaccaacagaaccggcgtgagcaagggctacggcttcgtgagcttcgtgaacgacgtggacgtgcagaagatcgtgggcagccagatccacttccacggcaagaagctgaagctgggccccgccatcagaaagcagaagctgtgcgccagacacgtgcagcccagacccctggtggtgaacccccccccccccccccagttccagaacgtgtggagaaaccccaacaccgagacctacctgcagccccagatcacccccaaccccgtgacccagcacgtgcaggcctacagcgcctacccccacagccccggccaggtgatcaccggctgccagctgctggtgtacaactaccaggagtaccccacctaccccgacagcgccttccaggtgaccaccggctaccagctgcccgtgtacaactaccagcccttccccgcctaccccagaagccccttccaggtgaccgccggctaccagctgcccgtgtacaactaccaggccttccccgcctaccccaacagccccttccaggtggccaccggctaccagttccccgtgtacaactaccaggccttccccgcctaccccaacagccccgtgcaggtgaccaccggctaccagctgcccgtgtacaactaccaggccttccccgcctaccccaacagccccttccaggtggccaccggctaccagttccccgtgtacaactaccaggccttccccgcctaccccaacagccccgtgcaggtgaccaccggctaccagctgcccgtgtacaactaccaggccttccccgcctaccccaacagccccttccaggtggccaccggctaccagttccccgtgtacaactaccaggccttccccgcctaccccaacagccccgtgcaggtgaccaccggctaccagctgcccgtgtacaactaccaggccttccccgcctaccccaacagcgccgtgcaggtgaccaccggctaccagttccacgtgtacaactaccagatgcccccccagtgccccgtgggcgagcagagaagaaacctgtggaccgaggcctacaagtggtggtacctggtgtgcctgatccagagaagagactag

SEQ ID NO: 203921 - DNA, 1086 bp, Artificial Sequence
  derived and/or modified sequence
atgagcgccgccaaccccgagacccccaacagcaccatcagcagagaggccagcacccagagcagcagcgccgccgccagccagggctgggtgctgcccgagggcaagatcgtgcccaacaccgtgttcgtgggcggcatcgacgccagaatggacgagaccgagatcggcagctgcttcggcagatacggcagcgtgaaggaggtgaagatcatcaccaacagaaccggcgtgagcaagggctacggcttcgtgagcttcgtgaacgacgtggacgtgcagaagatcgtgggcagccagatccacttccacggcaagaagctgaagctgggccccgccatcagaaagcagaagctgtgcgccagacacgtgcagcccagacccctggtggtgaacccccccccccccccccagttccagaacgtgtggagaaaccccaacaccgagacctacctgcagccccagatcacccccaaccccgtgacccagcacgtgcaggcctacagcgcctacccccacagccccggccaggtgatcaccggctgccagctgctggtgtacaactaccaggagtaccccacctaccccgacagcgccttccaggtgaccaccggctaccagctgcccgtgtacaactaccagcccttccccgcctaccccagaagccccttccaggtgaccgccggctaccagctgcccgtgtacaactaccaggccttccccgcctaccccaacagccccttccaggtggccaccggctaccagttccccgtgtacaactaccaggccttccccgcctaccccaacagccccgtgcaggtgaccaccggctaccagctgcccgtgtacaactaccaggccttccccgcctaccccaacagccccttccaggtggccaccggctaccagttccccgtgtacaactaccaggccttccccgcctaccccaacagccccgtgcaggtgaccaccggctaccagctgcccgtgtacaactaccaggccttccccgcctaccccaacagccccgtgcaggtgaccaccggctaccagctgcccgtgtacaactaccagatgcccccctag

SEQ ID NO: 203922 - DNA, 3390 bp, Artificial Sequence
  derived and/or modified sequence
ctggcggttctacctccgagggttcgcccgcccttggttttccttacaccttagcctttggctcctttgaccactcgaagccccacagcgtgttccagcggacttcaccagcagacccagaagtggtgggtgaaacactgcctctgttcctccttgagcctgtcgggagctgctgcctgccaccaccatgtctgctgcaaatcctgagactccaaactcaaccatctccagagaggccagcacccagtcttcatcagctgcagctagccaaggctgggtgttaccagaaggcaaaatcgtgccaaacactgtttttgttggtggaattgatgctaggatggatgaaactgagattggaagctgctttggtagatacggttcagtgaaagaagtgaagataatcacgaatcgaactggtgtgtccaaaggctatggatttgtttcgtttgttaatgacgtggatgtccagaagatagtaggatcacagatacatttccatggtaaaaagctgaagctgggccctgcaatcaggaaacaaaagttatgtgctcgtcatgtgcagccacgtcctttggtagttaatcctcctcctccaccacagtttcagaacgtctggcggaatccaaacactgaaacctacctgcagccccaaatcacgccgaatcctgtaactcagcacgttcaggcttattctgcttatccacattcaccaggtcaggtcatcactggatgtcagttgcttgtatataattatcaggaatatcctacttatcccgattcagcatttcaggtcaccactggatatcagttgcctgtatataattatcagccatttcctgcttatccaagatcaccatttcaggtcactgctggatatcagttgcctgtatataattatcaggcatttcctgcttatccaaattcaccatttcaagtcgccactggatatcagttccctgtatacaattatcaggcatttcctgcttatccaaattcaccatttcaagtcgccactggatatcagttccctgtatacaattatcaggcatttcctgcttatccaaattcaccatttcaagtcgccactggatatcagttccctgtatacaattatcaggcatttcctgcttatccaaattcaccagttcaggtcaccactggatatcagttgcctgtatacaattatcaggcatttcctgcttatccaaattcaccatttcaagtcgccactggatatcagttccctgtatacaattatcaggcatttcctgcttatccaaattcaccagttcaggtcaccactggatatcagttgcctgtatacaattatcaggcatttcctgcttatccaaattcagcagttcaggtcaccactggatatcagttccatgtatacaattaccagatgccaccgcagtgccctgttggggagcaaaggagaaatctgtggaccgaagcatacaaatggtggtatcttgtctgtttaatccagagaagagactgataaattccgttgttactcaagatgactgcttcaagggtaaaagagtgcatcgctttagaagaagtttggcagtatttaaatctgttggatcctctcagctatctagtttcatgggaagttgctggttttgaatattaagctaaaagttttccactattacagaaattctgaattttggtaaatcacactgaaactttctgtataacttgtattattagactctctagttttatcttaacactgaaactgttcttcattagatgtttatttagaacctggttctgtgtttaatatatagtttaaagtaacaaataatcgagactgaaagaatgttaagatttatctgcaaggatttttaaaaaattgaaacttgcattttaagtgtttaaaagcaaatactgactttcaaaaaagtttttaaaacctgatttgaaagctaacaattttgatagtctgaacacaagcatttcacttctccaagaagtacctgtgaacagtacaatatttcagtattgagctttgcatttatgatttatctagaaatttacctcaaaagcagaatttttaaaactgcatttttaatcagtggaactcaatgtatagttagctttattgaagtcttatccaaacccagtaaaacagattctaagcaaacagtccaatcagtgagtcataatgtttattcaaagtattttatcttttatctagaatccacatatgtatgtccaatttgattgggatagtagttaggataactaaaattctgggcctaattttttaaagaatccaagacaaactaaactttactgggtatataaccttctcaatgagttaccattcttttttataaaaaaaattgttccttgaaatgctaaacttaatggctgtatgtgaaatttgcaaaatactggtattaaagaacgctgcagcttttttatgtcactcaaaggttaatcggagtatctgaaaggaattgtttttataaaaacattgaagtattagttacttgctataaatagatttttatttttgttttttagcctgttatatttccttctgtaaaataaaatatgtccagaagaggcatgttgtttctagattaggtagtgtcctcattttatattgtgaccacacagctagagcaccagagcccttttgctatactcacagtcttgttttcccagcctcttttactagtctttcaggaggtttgctcttagaactggtgatgtaaagaatggaagtagctgtatgagcagttcaaaggccaagccgtggaatggtagcaatgggatataatacctttctaagggaaacatttgtatcagtatcatttgatctgccatggacatgtgtttaaagtggctttctggcccttctttcaatggcttcttccctaaaacgtggagactctaagttaatgtcgttactatgggccatattactaatgcccactggggtctatgatttctcaaaattttcattcggaatccgaaggatacagtctttaaactttagaattcccaagaaggctttattacacctcagaaattgaaagcaccatgactttgtccattaaaaaattatccatagtttttttagtgcttttaacattccgacatacatcattctgtgattaaatctccagatttctgtaaatgatacctacattctaaagagttaattctaattattccgatatgaccttaaggaaaagtaaaggaataaatttttgtctttgttgaagtatttaatagagtaaggtaaagaagatattaagtccctttcaaaatggaaaattaattctaaactgagaaaaatgttcctactacctattgctgatactgtctttgcataaatgaataaaaataaactttttttcttca

SEQ ID NO: 203923 - DNA, 1201 bp, Artificial Sequence
  derived and/or modified sequence
ctggcggttctacctccgagggttcgcccgcccttggttttccttacaccttagcctttggctcctttgaccactcgaagccccacagcgtgttccagcggacttcaccagcagacccagaagtggtgggtgaaacactgcctctgttcctccttgagcctgtcgggagctgctgcctgccaccaccatgtctgctgcaaatcctgagactccaaactcaaccatctccagagaggccagcacccagtcttcatcagctgcagctagccaaggctgggtgttaccagaaggcaaaatcgtgccaaacactgtttttgttggtggaattgatgctaggatggatgaaactgagattggaagctgctttggtagatacggttcagtgaaagaagtgaagataatcacgaatcgaactggtgtgtccaaaggctatggatttgtttcgtttgttaatgacgtggatgtccagaagatagtaggatcacagatacatttccatggtaaaaagctgaagctgggccctgcaatcaggaaacaaaagttatgtgctcgtcatgtgcagccacgtcctttggtagttaatcctcctcctccaccacagtttcagaacgtctggcggaatccaaacactgaaacctacctgcagccccaaatcacgccgaatcctgtaactcagcacgttcaggcttactctgcttatccacattcaccaggtcaggtcatcactggatgtcagttgcttgtatataattatcaggaatatcctacttatcccgattcagcatttcaggtcaccactggatatcagttgcctgtatataattatcagccatttcctgcttatccaagatcaccatttcaggtcactgctggatatcagttgcctgtatataattatcaggcatttcctgcttatccaaattcaccatttcaagtcgccactggatatcagttccctgtatacaattatcaggcatttcctgcttatccaaattcaccagttcaggtcaccactggatatcagttgcctgtatacaattatcaggcatttcctgcttatccaaattcaccatttcaagtcgccactggatatcagttccctgtatacaattatcaggcatttcctgcttatccaaattcaccagttcaggtcaccactggatatcagttgcctgtatacaattatcagatgccaccttag

SEQ ID NO: 203924 - DNA, 3503 bp, Artificial Sequence
  derived and/or modified sequence
gctgccacccattggctcaggccgataccacgcgccccgatacccggcacaggagccacctcccagagccccgcagtccatgcctcagtcggcctgcgctcctcagcctggcggttctacctccgagggttcgcccgcccttggttttccttacaccttagcctttggctcctttgaccactcgaagccccacagcgtgttccagcggacttcaccagcagacccagaagtggtgggtgaaacactgcctctgttcctccttgagcctgtcgggagctgctgcctgccaccaccatgtctgctgcaaatcctgagactccaaactcaaccatctccagagaggccagcacccagtcttcatcagctgcagctagccaaggctgggtgttaccagaaggcaaaatcgtgccaaacactgtttttgttggtggaattgatgctaggatggatgaaactgagattggaagctgctttggtagatacggttcagtgaaagaagtgaagataatcacgaatcgaactggtgtgtccaaaggctatggatttgtttcgtttgttaatgacgtggatgtccagaagatagtaggatcacagatacatttccatggtaaaaagctgaagctgggccctgcaatcaggaaacaaaagttatgtgctcgtcatgtgcagccacgtcctttggtagttaatcctcctcctccaccacagtttcagaacgtctggcggaatccaaacactgaaacctacctgcagccccaaatcacgccgaatcctgtaactcagcacgttcaggcttactctgcttatccacattcaccaggtcaggtcatcactggatgtcagttgcttgtatataattatcaggaatatcctacttatcccgattcagcatttcaggtcaccactggatatcagttgcctgtatataattatcagccatttcctgcttatccaagatcaccatttcaggtcactgctggatatcagttgcctgtatataattatcaggcatttcctgcttatccaaattcaccatttcaagtcgccactggatatcagttccctgtatacaattatcaggcatttcctgcttatccaaattcaccagttcaggtcaccactggatatcagttgcctgtatacaattatcaggcatttcctgcttatccaaattcaccatttcaagtcgccactggatatcagttccctgtatacaattatcaggcatttcctgcttatccaaattcaccagttcaggtcaccactggatatcagttgcctgtatacaattatcaggcatttcctgcttatccaaattcaccatttcaagtcgccactggatatcagttccctgtatacaattatcaggcatttcctgcttatccaaattcaccagttcaggtcaccactggatatcagttgcctgtatacaattatcaggcatttcctgcttatccaaattcagcagttcaggtcaccactggatatcagttccatgtatacaattaccagatgccaccgcagtgccctgttggggagcaaaggagaaatctgtggaccgaagcatacaaatggtggtatcttgtctgtttaatccagagaagagactgataaattccgttgttactcaagatgactgcttcaagggtaaaagagtgcatcgctttagaagaagtttggcagtatttaaatctgttggatcctctcagctatctagtttcatgggaagttgctggttttgaatattaagctaaaagttttccactattacagaaattctgaattttggtaaatcacactgaaactttctgtataacttgtattattagactctctagttttatcttaacactgaaactgttcttcattagatgtttatttagaacctggttctgtgtttaatatatagtttaaagtaacaaataatcgagactgaaagaatgttaagatttatctgcaaggatttttaaaaaattgaaacttgcattttaagtgtttaaaagcaaatactgactttcaaaaaagtttttaaaacctgatttgaaagctaacaattttgatagtctgaacacaagcatttcacttctccaagaagtacctgtgaacagtacaatatttcagtattgagctttgcatttatgatttatctagaaatttacctcaaaagcagaatttttaaaactgcatttttaatcagtggaactcaatgtatagttagctttattgaagtcttatccaaacccagtaaaacagattctaagcaaacagtccaatcagtgagtcataatgtttattcaaagtattttatcttttatctagaatccacatatgtatgtccaatttgattgggatagtagttaggataactaaaattctgggcctaattttttaaagaatccaagacaaactaaactttactgggtatataaccttctcaatgagttaccattcttttttataaaaaaaattgttccttgaaatgctaaacttaatggctgtatgtgaaatttgcaaaatactggtattaaagaacgctgcagcttttttatgtcactcaaaggttaatcggagtatctgaaaggaattgtttttataaaaacattgaagtattagttacttgctataaatagatttttatttttgttttttagcctgttatatttccttctgtaaaataaaatatgtccagaagaggcatgttgtttctagattaggtagtgtcctcattttatattgtgaccacacagctagagcaccagagcccttttgctatactcacagtcttgttttcccagcctcttttactagtctttcaggaggtttgctcttagaactggtgatgtaaagaatggaagtagctgtatgagcagttcaaaggccaagccgtggaatggtagcaatgggatataatacctttctaagggaaacatttgtatcagtatcatttgatctgccatggacatgtgtttaaagtggctttctggcccttctttcaatggcttcttccctaaaacgtggagactctaagttaatgtcgttactatgggccatattactaatgcccactggggtctatgatttctcaaaattttcattcggaatccgaaggatacagtctttaaactttagaattcccaagaaggctttattacacctcagaaattgaaagcaccatgactttgtccattaaaaaattatccatagtttttttagtgcttttaacattccgacatacatcattctgtgattaaatctccagatttctgtaaatgatacctacattctaaagagttaattctaattattccgatatgaccttaaggaaaagtaaaggaataaatttttgtctttgttgaagtatttaatagagtaaggtaaagaagatattaagtccctttcaaaatggaaaattaattctaaactgagaaaaatgttcctactacctattgctgatactgtctttgcataaatgaataaaaataaactttttttcttcaaatgtg

SEQ ID NO: 203925 - DNA, 1273 bp, Artificial Sequence
  derived and/or modified sequence
ctggcggttctacctccgagggttcgcccgcccttggttttccttacaccttagcctttggctcctttgaccactcgaagccccacagcgtgttccagcggacttcaccagcagacccagaagtggtgggtgaaacactgcctctgttcctccttgagcctgtcgggagctgctgcctgccaccaccatgtctgctgcaaatcctgagactccaaactcaaccatctccagagaggccagcacccagtcttcatcagctgcagctagccaaggctgggtgttaccagaaggcaaaatcgtgccaaacactgtttttgttggtggaattgatgctaggatggatgaaactgagattggaagctgctttggtagatacggttcagtgaaagaagtgaagataatcacgaatcgaactggtgtgtccaaaggctatggatttgtttcgtttgttaatgacgtggatgtccagaagatagtaggatcacagatacatttccatggtaaaaagctgaagctgggccctgcaatcaggaaacaaaagttatgtgctcgtcatgtgcagccacgtcctttggtagttaatcctcctcctccaccacagtttcagaacgtctggcggaatccaaacactgaaacctacctgcagccccaaatcacgccgaatcctgtaactcagcacgttcaggcttactctgcttatccacattcaccaggtcaggtcatcactggatgtcagttgcttgtatataattatcaggaatatcctacttatcccgattcagcatttcaggtcaccactggatatcagttgcctgtatataattatcagccatttcctgcttatccaagatcaccatttcaggtcactgctggatatcagttgcctgtatataattatcaggcatttcctgcttatccaaattcaccatttcaagtcgccactggatatcagttccctgtatacaattatcaggcatttcctgcttatccaaattcaccagttcaggtcaccactggatatcagttgcctgtatacaattatcaggcatttcctgcttatccaaattcaccatttcaagtcgccactggatatcagttccctgtatacaattatcaggcatttcctgcttatccaaattcaccagttcaggtcaccactggatatcagttgcctgtatacaattatcaggcatttcctgcttatccaaattcaccagttcaggtcaccactggatatcagttgcctgtatacaattatcagatgccaccttag

SEQ ID NO: 203926 - protein, 1286 aa, Artificial Sequence
  derived and/or modified sequence
MSHLVDPTSGDLPVRDIDAIPLVLPASKGKNMKTQPPLSRMNREELEDSFFRLREDHMLVKELSWKQQDEIKRLRTTLLRLTAAGRDLRVAEEAAPLSETARRGQKAGWRQRLSMHQRPQMHRLQGHFHCVGPASPRRAQPRVQVGHRQLHTAGAPVPEKPKRGPRDRLSYTAPPSFKEHATNENRGEVASKPSELVSGSNSIISFSSVISMAKPIGLCMPNSAHIMASNTMQVEEPPKSPEKMWPKDENFEQRSSLECAQKAAELRASIKEKVELIRLKKLLHERNASLVMTKAQLTEVQEACTFLLTQNQGILSAAHEALLKQVNELRAELKEESKKAVSLKSQLEDVSILQMTLKEFQERVEDLEKERKLLNDNYDKLLESMLDSSDSSSQPHWSNELIAEQLQQQVSQLQDQLDAELEDKRKVLLELSREKAQNEDLKLEVTNILQKHKQEVELLQNAATISQPPDRQSEPATHPAVLQENTQIEPSEPKNQEEKKLSQVLNELQVSHAETTLELEKTRDMLILQRKINVCYQEELEAMMTKADNDNRDHKEKLERLTRLLDLKNNRIKQLEGILRSHDLPTSEQLKDVAYGTRPLSLCLETLPAHGDEDKVDISLLHQGENLFELHIHQAFLTSAALAQAGDTQPTTFCTYSFYDFETHCTPLSVGPQPLYDFTSQYVMETDSLFLHYLQEASARLDIHQAMASEHSTLAAGWICFDRVLETVEKVHGLATLIGAGGEEFGVLEYWMRLRFPIKPSLQACNKRKKAQVYLSTDVLGGRKAQEEEFRSESWEPQNELWIEITKCCGLRSRWLGTQPSPYAVYRFFTFSDHDTAIIPASNNPYFRDQARFPVLVTSDLDHYLRREALSIHVFDDEDLEPGSYLGRARVPLLPLAKNESIKGDFNLTDPAEKPNGSIQVQLDWKFPYIPPESFLKPEAQTKGKDTKDSSKISSEEEKASFPSQDQMASPEVPIEAGQYRSKRKPPHGGERKEKEHQVVSYSRRKHGKRIGVQGKNRMEYLSLNILNGNTPEQVNYTEWKFSETNSFIGDGFKNQHEEEEMTLSHSALKQKEPLHPVNDKESSEQGSEVSEAQTTDSDDVIVPPMSQKYPKADSEKMCIEIVSLAFYPEAEVMSDENIKQVYVEYKFYDLPLSETETPVSLRKPRAGEEIHFHFSKVIDLDPQEQQGRRRFLFDMLNGQDPDQGHLKFTVVSDPLDEEKKECEEVGYAYLQLWQILESGRDILEQELDIVSPEDLATPIGRLKVSLQAAAVLHAIYKEMTEDLFS

SEQ ID NO: 203927 - protein, 1286 aa, Artificial Sequence
  derived and/or modified sequence
MSHLVDPTSGDLPVRDIDAIPLVLPASKGKNMKTQPPLSRMNREELEDSFFRLREDHMLVKELSWKQQDEIKRLRTTLLRLTAAGRDLRVAEEAAPLSETARRGQKAGWRQRLSMHQRPQMHRLQGHFHCVGPASPRRAQPRVQVGHRQLHTAGAPVPEKPKRGPRDRLSYTAPPSFKEHATNENRGEVASKPSELVSGSNSIISFSSVISMAKPIGLCMPNSAHIMASNTMQVEEPPKSPEKMWPKDENFEQRSSLECAQKAAELRASIKEKVELIRLKKLLHERNASLVMTKAQLTEVQEAYETLLQKNQGILSAAHEALLKQVNELRAELKEESKKAVSLKSQLEDVSILQMTLKEFQERVEDLEKERKLLNDNYDKLLESMLDSSDSSSQPHWSNELIAEQLQQQVSQLQDQLDAELEDKRKVLLELSREKAQNEDLKLEVTNILQKHKQEVELLQNAATISQPPDRQSEPATHPAVLQENTQIEPSEPKNQEEKKLSQVLNELQVSHAETTLELEKTRDMLILQRKINVCYQEELEAMMTKADNDNRDHKEKLERLTRLLDLKNNRIKQLEGILRSHDLPTSEQLKDVAYGTRPLSLCLETLPAHGDEDKVDISLLHQGENLFELHIHQAFLTSAALAQAGDTQPTTFCTYSFYDFETHCTPLSVGPQPLYDFTSQYVMETDSLFLHYLQEASARLDIHQAMASEHSTLAAGWICFDRVLETVEKVHGLATLIGAGGEEFGVLEYWMRLRFPIKPSLQACNKRKKAQVYLSTDVLGGRKAQEEEFRSESWEPQNELWIEITKCCGLRSRWLGTQPSPYAVYRFFTFSDHDTAIIPASNNPYFRDQARFPVLVTSDLDHYLRREALSIHVFDDEDLEPGSYLGRARVPLLPLAKNESIKGDFNLTDPAEKPNGSIQVQLDWKFPYIPPESFLKPEAQTKGKDTKDSSKISSEEEKASFPSQDQMASPEVPIEAGQYRSKRKPPHGGERKEKEHQVVSYSRRKHGKRIGVQGKNRMEYLSLNILNGNTPEQVNYTEWKFSETNSFIGDGFKNQHEEEEMTLSHSALKQKEPLHPVNDKESSEQGSEVSEAQTTDSDDVIVPPMSQKYPKADSEKMCIEIVSLAFYPEAEVMSDENIKQVYVEYKFYDLPLSETETPVSLRKPRAGEEIHFHFSKVIDLDPQEQQGRRRFLFDMLNGQDPDQGHLKFTVVSDPLDEEKKECEEVGYAYLQLWQILESGRDILEQELDIVSPEDLATPIGRLKVSLQAAAVLHAIYKEMTEDLFS

SEQ ID NO: 203928 - DNA, 3861 bp, Artificial Sequence
  derived and/or modified sequence
atgagccacctggtggaccccaccagcggcgacctgcccgtgagagacatcgacgccatccccctggtgctgcccgccagcaagggcaagaacatgaagacccagccccccctgagcagaatgaacagagaggagctggaggacagcttcttcagactgagagaggaccacatgctggtgaaggagctgagctggaagcagcaggacgagatcaagagactgagaaccaccctgctgagactgaccgccgccggcagagacctgagagtggccgaggaggccgcccccctgagcgagaccgccagaagaggccagaaggccggctggagacagagactgagcatgcaccagagaccccagatgcacagactgcagggccacttccactgcgtgggccccgccagccccagaagagcccagcccagagtgcaggtgggccacagacagctgcacaccgccggcgcccccgtgcccgagaagcccaagagaggccccagagacagactgagctacaccgccccccccagcttcaaggagcacgccaccaacgagaacagaggcgaggtggccagcaagcccagcgagctggtgagcggcagcaacagcatcatcagcttcagcagcgtgatcagcatggccaagcccatcggcctgtgcatgcccaacagcgcccacatcatggccagcaacaccatgcaggtggaggagccccccaagagccccgagaagatgtggcccaaggacgagaacttcgagcagagaagcagcctggagtgcgcccagaaggccgccgagctgagagccagcatcaaggagaaggtggagctgatcagactgaagaagctgctgcacgagagaaacgccagcctggtgatgaccaaggcccagctgaccgaggtgcaggaggcctgcaccttcctgctgacccagaaccagggcatcctgagcgccgcccacgaggccctgctgaagcaggtgaacgagctgagagccgagctgaaggaggagagcaagaaggccgtgagcctgaagagccagctggaggacgtgagcatcctgcagatgaccctgaaggagttccaggagagagtggaggacctggagaaggagagaaagctgctgaacgacaactacgacaagctgctggagagcatgctggacagcagcgacagcagcagccagccccactggagcaacgagctgatcgccgagcagctgcagcagcaggtgagccagctgcaggaccagctggacgccgagctggaggacaagagaaaggtgctgctggagctgagcagagagaaggcccagaacgaggacctgaagctggaggtgaccaacatcctgcagaagcacaagcaggaggtggagctgctgcagaacgccgccaccatcagccagccccccgacagacagagcgagcccgccacccaccccgccgtgctgcaggagaacacccagatcgagcccagcgagcccaagaaccaggaggagaagaagctgagccaggtgctgaacgagctgcaggtgagccacgccgagaccaccctggagctggagaagaccagagacatgctgatcctgcagagaaagatcaacgtgtgctaccaggaggagctggaggccatgatgaccaaggccgacaacgacaacagagaccacaaggagaagctggagagactgaccagactgctggacctgaagaacaacagaatcaagcagctggagggcatcctgagaagccacgacctgcccaccagcgagcagctgaaggacgtggcctacggcaccagacccctgagcctgtgcctggagaccctgcccgcccacggcgacgaggacaaggtggacatcagcctgctgcaccagggcgagaacctgttcgagctgcacatccaccaggccttcctgaccagcgccgccctggcccaggccggcgacacccagcccaccaccttctgcacctacagcttctacgacttcgagacccactgcacccccctgagcgtgggcccccagcccctgtacgacttcaccagccagtacgtgatggagaccgacagcctgttcctgcactacctgcaggaggccagcgccagactggacatccaccaggccatggccagcgagcacagcaccctggccgccggctggatctgcttcgacagagtgctggagaccgtggagaaggtgcacggcctggccaccctgatcggcgccggcggcgaggagttcggcgtgctggagtactggatgagactgagattccccatcaagcccagcctgcaggcctgcaacaagagaaagaaggcccaggtgtacctgagcaccgacgtgctgggcggcagaaaggcccaggaggaggagttcagaagcgagagctgggagccccagaacgagctgtggatcgagatcaccaagtgctgcggcctgagaagcagatggctgggcacccagcccagcccctacgccgtgtacagattcttcaccttcagcgaccacgacaccgccatcatccccgccagcaacaacccctacttcagagaccaggccagattccccgtgctggtgaccagcgacctggaccactacctgagaagagaggccctgagcatccacgtgttcgacgacgaggacctggagcccggcagctacctgggcagagccagagtgcccctgctgcccctggccaagaacgagagcatcaagggcgacttcaacctgaccgaccccgccgagaagcccaacggcagcatccaggtgcagctggactggaagttcccctacatcccccccgagagcttcctgaagcccgaggcccagaccaagggcaaggacaccaaggacagcagcaagatcagcagcgaggaggagaaggccagcttccccagccaggaccagatggccagccccgaggtgcccatcgaggccggccagtacagaagcaagagaaagcccccccacggcggcgagagaaaggagaaggagcaccaggtggtgagctacagcagaagaaagcacggcaagagaatcggcgtgcagggcaagaacagaatggagtacctgagcctgaacatcctgaacggcaacacccccgagcaggtgaactacaccgagtggaagttcagcgagaccaacagcttcatcggcgacggcttcaagaaccagcacgaggaggaggagatgaccctgagccacagcgccctgaagcagaaggagcccctgcaccccgtgaacgacaaggagagcagcgagcagggcagcgaggtgagcgaggcccagaccaccgacagcgacgacgtgatcgtgccccccatgagccagaagtaccccaaggccgacagcgagaagatgtgcatcgagatcgtgagcctggccttctaccccgaggccgaggtgatgagcgacgagaacatcaagcaggtgtacgtggagtacaagttctacgacctgcccctgagcgagaccgagacccccgtgagcctgagaaagcccagagccggcgaggagatccacttccacttcagcaaggtgatcgacctggacccccaggagcagcagggcagaagaagattcctgttcgacatgctgaacggccaggaccccgaccagggccacctgaagttcaccgtggtgagcgaccccctggacgaggagaagaaggagtgcgaggaggtgggctacgcctacctgcagctgtggcagatcctggagagcggcagagacatcctggagcaggagctggacatcgtgagccccgaggacctggccacccccatcggcagactgaaggtgagcctgcaggccgccgccgtgctgcacgccatctacaaggagatgaccgaggacctgttcagctag

SEQ ID NO: 203929 - DNA, 3861 bp, Artificial Sequence
  derived and/or modified sequence
atgagtcatctggtcgaccccacgagcggcgatctccctgtgcgggatattgacgcgattcctctggtgttgccagcatcaaagggtaaaaacatgaagactcagccacccctgagtcgcatgaacagagaggagctggaggatagcttcttccgcttacgggaagatcatatgctggtgaaggaacttagctggaaacaacaggacgaaattaagagactgagaaccacgctgctaaggctgactgctgcaggcagggacctgagggtggctgaagaggctgctcctctgtccgagaccgctaggagaggccagaaggctgggtggagacagcgactgtccatgcaccagcgccctcagatgcatcggctccagggccactttcactgcgtaggtccagccagtccacggcgagcccagcctagggtccaggtcggacatagacaactgcacaccgccggcgctcctgtgcccgagaagccaaagcggggcccacgagaccggctgtcttataccgctccaccctctttcaaggagcacgccactaacgagaatcgtggcgaagttgccagtaaaccttccgagttggtgagcggctccaactccataatctccttctcgtcagtcatctcgatggctaagcctataggattatgtatgccaaatagtgctcacatcatggcctctaacacaatgcaagtggaggagccgccaaagtctccagagaagatgtggcctaaggatgagaattttgaacagcgaagcagtctcgagtgcgcacagaaggctgccgaactacgcgcatcaataaaggaaaaagtggagctgatcaggctaaaaaaactactgcatgagcgcaatgcctccctggtcatgaccaaggctcagctgactgaagttcaggaagcctatgaaacactgttgcaaaagaatcaggggattctgtccgcagctcatgaagcattactcaaacaggtcaacgagctacgggccgagctgaaggaggaaagcaagaaggctgtttctctgaaatcccagttagaagacgtttctatcctccagatgacactaaaagagttccaagagcgcgttgaagacctggagaaggagcgaaagcttctgaatgacaactacgataagttgctcgaatcgatgcttgacagcagtgatagctcctcgcagccacactggtcgaacgagctgatcgctgagcaacttcagcagcaggtctcacagctgcaggatcagctggatgccgaattggaggacaaacgtaaggttttgcttgaacttagtagggagaaggcacagaatgaggacctaaaattagaggtgaccaatatactgcagaagcataagcaggaggttgagctcttacaaaacgctgccacaatttcacaaccaccagacaggcagtcagaacctgcaacacaccccgccgtgctgcaggaaaacacccagatagaaccgtctgagcctaagaaccaagaagaaaagaaactgtcccaggtgttgaacgagttgcaggtctcccacgctgaaacgaccctagaactggagaaaacccgcgacatgctgattctacagcggaaaatcaacgtctgttaccaggaagaactagaagctatgatgactaaagctgataatgacaacagggatcacaaggagaagttggaacgcctcaccagactgctagacctcaagaacaaccgcatcaagcagttggaagggatccttcgatcccatgatctgcccacttctgagcagctcaaagatgtggcctacggcacacggcccttgagcctctgtttggaaacgcttccggcccacggggacgaggataaagtcgatatctctctgctgcaccaaggtgaaaatctgtttgagctgcatattcatcaagcattcttgacctcagccgccctggcccaagccggcgacactcagccaacaaccttctgtacatattccttttatgactttgaaacgcattgcacacctctgtcggtgggccctcaacccctgtacgacttcacatcacagtacgtgatggaaacagatagcctttttcttcattacctccaggaggcatcagcccggcttgatatacatcaggctatggccagtgagcacagcaccttggcggccgggtggatctgttttgatcgagttctcgagacggttgagaaagtacacggtttagccacactgattggcgcagggggagaggagttcggcgtgctggaatactggatgcgactgcgatttcctattaagccctccctccaagcctgtaacaagaggaaaaaagcccaggtatacctatcaacagatgtcctgggggggaggaaggctcaggaggaggaattcaggagcgaatcgtgggagccccaaaacgagctctggatcgaaatcactaaatgctgtgggctgagatcccgttggctggggacccaaccgtctccctacgccgtgtatcggtttttcacttttagcgatcatgacacagccatcattcccgcctctaacaacccttattttcgggaccaggccagatttcccgtccttgttactagcgacctcgaccattacctgaggagggaggcgctgagcatccatgtgtttgacgacgaagacttggagcctggctcatatttaggcagggcaagggtgccattgctccccttggccaaaaacgagagtataaagggagattttaacctgacagatcccgcggaaaagcccaatggtagcatccaggttcagcttgactggaagtttccttacataccaccagaatcgttcctgaagcccgaggcacaaacaaaaggtaaagataccaaagatagcagtaagatctcctctgaagaggaaaaggccagttttccctcccaagaccagatggcatcacccgaggtcccaatcgaggccgggcagtaccggtctaaaaggaaacctccacacgggggtgagcgtaaagagaaggaacatcaggtagtctcatactctcgccgcaaacacggtaagaggattggcgttcaggggaaaaatagaatggagtatctgtcacttaatatcctgaacggtaatacccctgaacaagtcaattacaccgaatggaaattcagcgaaaccaacagcttcattggggatgggtttaagaatcagcacgaagaagaggaaatgactctctcccatagtgctctcaaacagaaagaacccctgcacccggtaaatgataaggagtcctctgaacagggaagcgaagtgagcgaggcccaaaccactgatagcgatgacgtgatcgtccctcccatgagtcagaaatacccaaaagccgattctgaaaagatgtgcatagaaatcgttagtctcgcgttctatccagaggccgaggtcatgtcagatgaaaacattaagcaggtttatgtggagtacaagttctacgatttgcctctctctgagaccgagacgcccgtgagcctgcgtaaaccaagggctggggaagagatccatttccacttctctaaggtgattgacttagatccacaggagcagcagggcaggcgtcgtttccttttcgacatgctgaatggtcaggatcccgatcaaggtcacctgaagttcaccgtggtcagcgacccactggacgaagagaaaaaggagtgcgaagaagtgggttacgcctacctgcaactttggcagattctggagagcggcagagacattctggaacaggaactggatatagtgtctccagaggatctggctacccctattggtcgcctgaaggtgagtttacaggcggctgccgtgctccatgcaatttataaagagatgaccgaggatctgttctcttag

SEQ ID NO: 203930 - DNA, 3861 bp, Artificial Sequence
  derived and/or modified sequence
atgtctcacctggttgatccaacctccggagacctacccgtgcgggacatcgacgccataccccttgtcctccccgcctctaaaggaaagaatatgaagactcagcctcccctgtcgcgaatgaacagggaggaactagaggattctttttttcggcttcgcgaagaccacatgttggtgaaggagctttcgtggaaacagcaggacgagatcaaaagacttagaacaacacttctgaggttaacagccgccggaagagatctgcgcgttgcggaagaggccgccccgctatccgaaacagcacgccggggacagaaggctgggtggagacagcgcctctccatgcaccaaaggccccagatgcaccgactacagggtcacttccattgtgtgggaccagctagccctcgtcgagcacagcctcgtgtacaggtgggacacagacagctgcacacagccggtgcccccgtacctgaaaagcccaagcgggggccaagagaccgcttgtcatacacagcacccccctcatttaaagagcacgccacaaacgagaatagaggtgaggtggcctccaagccctccgagctggtatctggcagcaacagcattatctccttttctagcgtaatctcaatggccaaaccgattggactttgtatgccaaactccgcccatatcatggcctctaataccatgcaggtggaggaacctccaaagagccctgaaaagatgtggcccaaagacgagaactttgagcagcggagctcccttgaatgcgcccaaaaagcagccgagctgagagcaagtataaaagagaaagtggagttgatcaggctgaagaaactgctccatgaacgtaacgcatcccttgtgatgaccaaggcccaactcactgaagtgcaggaggcctgtacatttctgctgactcaaaaccagggaatcctcagcgcagcccacgaggcacttctaaaacaagttaacgagctgcgagccgagctgaaggaagaatcaaaaaaggcggtgagccttaaatctcagctcgaagatgtgtctattctccaaatgacgctcaaggaattccaggaacgtgtcgaagaccttgaaaaggaaagaaagctgctgaacgacaattatgataaactcctggaaagcatgttggatagctccgacagctctagtcagcctcactggtccaatgagctgatcgccgagcagcttcagcagcaggttagccagttgcaagaccagctggacgccgagctggaggataaaaggaaggttctactggaactgagcagggaaaaggcccaaaatgaggacctcaagttggaggtgacaaatatcctgcagaagcacaagcaggaggtcgaactgctgcagaatgcggcaacaatttctcagccaccagatcgtcagtccgaacctgcgacccaccccgccgtgctccaggaaaatacccagattgaaccatccgagccaaaaaatcaggaggaaaagaagctttctcaggtgctgaatgagctgcaggtgagccacgctgaaaccaccttagagttggagaagacccgggacatgttgattctgcagcgcaaaattaatgtctgctatcaagaagagctggaagctatgatgactaaggcagataatgataaccgggaccacaaggagaaactggagcgactcacgagactgttggatctgaaaaataacaggatcaaacagctggaaggcatcttgcggtcccacgatctcccaactagcgagcagcttaaggatgtcgcttacggtacacggcccctctctctgtgtttagaaaccttaccagctcacggcgacgaagataaggtggatattagccttttacaccagggagagaatctgtttgaactgcacattcaccaagcctttctaaccagtgctgccctggcccaggccggagacacccagcccactacgttctgcacctactcgttttacgactttgagacacactgtactcccctgtctgtggggcctcaaccattgtatgattttacttcccaatatgtgatggaaaccgatagtctgtttctgcattaccttcaggaggctagcgcccgcctggatattcaccaggcaatggccagtgagcactccacactcgcagctgggtggatctgcttcgatcgtgtacttgagacagtagaaaaggtacacgggctcgcaacacttatcggcgccggcggtgaggaatttggagtcctagaatattggatgaggctaaggtttcctattaagcccagcctgcaggcttgcaacaaaaggaaaaaggcccaggtttatcttagtacagatgtgcttggcggcaggaaagcgcaggaggaggagtttcgaagcgagagctgggagccacagaatgaactttggatcgagatcaccaaatgctgtggcctgaggtccaggtggctcggtactcagccctctccttacgctgtttacagatttttcacatttagcgatcatgacacagccattatccccgccagcaataacccgtacttccgcgatcaggcacgttttccagtgctcgtgacctctgatctagaccactacctgcgccgggaagcactgagtatacacgtgtttgacgatgaggacctagaacctgggagctacttgggcagggcccgggtgcctctgctgccacttgccaaaaatgagagtataaagggcgatttcaacctgacagatccggccgagaagccgaatggcagcatccaggtccagctcgattggaaattcccctatattcctcccgagagttttctgaaaccggaagctcaaactaaaggaaaggatacaaaagattcaagcaagatctccagtgaggaggagaaggcaagtttcccttcccaagaccagatggcatcccctgaggtcccaatcgaggcaggtcagtatcggtcaaagcgtaaacctcctcatggaggggaaagaaaggagaaggaacaccaggtcgtctcttattcacggcgcaagcatggcaaacgcattggtgtgcaggggaagaataggatggagtatttgtccttgaacattttaaatggtaacactccggagcaagtcaactacactgaatggaaattttccgagacgaacagtttcataggagatggcttcaagaatcaacatgaagaagaagagatgactttgtctcactccgcactgaagcaaaaagagccactgcaccccgtgaatgacaaggagtcatccgaacagggctctgaagtcagtgaagcacaaaccacggatagtgatgacgtgatcgtaccaccgatgtcccaaaaatatcccaaagcggacagcgaaaagatgtgtatcgaaattgtgtccttagccttctatcctgaggcagaggtgatgtcggatgagaatattaaacaggtctatgtggagtacaagttctatgatctgcctctgtctgagacagagaccccagtctcgctgaggaagcctagggctggggaagaaattcacttccatttttcgaaagttatcgacctcgaccctcaagagcagcagggcaggcgaaggttcctatttgacatgttgaatggtcaagaccctgaccagggccacttaaaattcacagttgtgagtgatccattggatgaggaaaaaaaggaatgtgaagaggtgggttatgcctatctgcaactgtggcagattcttgagtcggggagagacatcttggaacaggagctagacattgtgagccctgaggatctcgccaccccaatcgggagattgaaagtgtcccttcaggctgcagcggtgctccacgctatatataaagaaatgaccgaagatcttttctcctag

SEQ ID NO: 203931 - DNA, 3861 bp, Artificial Sequence
  derived and/or modified sequence
atgagccacctggtggaccccaccagcggggacctgcctgtgcgggacattgatgccatccccctggtgctgcctgccagcaagggcaagaacatgaagacccagccccccctgagcaggatgaaccgggaggagctggaggacagcttcttccggctgcgggaggaccacatgctggtgaaggagctgtcctggaagcagcaggatgagatcaagaggctgcggaccaccctgctgcggctgacagctgctggccgggacctgcgggtggccgaggaggccgcccccctgtctgaaacagcccggcggggccagaaggccggctggaggcagaggctgtccatgcaccagaggccccagatgcaccggctgcagggccacttccactgtgtgggccctgccagcccccggcgggcccagccccgggtgcaggtgggccaccggcagctgcacacagctggggcccctgtgcctgagaagcccaagaggggcccccgggaccggctgagctacacagccccacccagcttcaaggagcacgccaccaatgaaaatagaggagaggtggccagcaagcccagcgagctggtgtctggcagcaacagcatcatctccttcagcagcgtcatctccatggccaagcccatcggcctgtgcatgcccaacagcgcccacatcatggccagcaacaccatgcaggtggaggagccccccaagagccctgagaagatgtggcccaaggatgaaaattttgagcagaggagcagcctggagtgtgcccagaaggctgctgagctgcgggccagcatcaaggagaaggtggagctgatccggctgaagaagctgctgcacgagagaaatgccagcctggtgatgaccaaggcccagctgacagaggtgcaggaggcctatgagaccctgctgcagaagaaccagggcatcctgtctgctgcccacgaggccctgctgaagcaggtgaatgagctgcgggcagagctgaaggaggagagcaagaaggctgtgtccctgaagagccagctggaggatgtgtccatcctgcagatgaccctgaaggagttccaggagcgggtggaggacctggagaaggagaggaagctgctgaatgacaactatgacaagctgctggagagcatgctggacagcagtgacagcagcagccagccccactggagcaatgagctgattgctgagcagctgcagcagcaggtgtcccagctgcaggaccagctggatgctgagctggaggacaagaggaaggtgctgctggagctgagccgggagaaggcccagaatgaagacctgaagctggaggtgaccaacatcctgcagaagcacaagcaggaggtggagctgctgcagaatgctgccaccatcagccagcccccagaccggcagagcgagcccgccacccaccctgctgtgctgcaggagaacacccagatcgagcccagcgagcccaagaaccaggaggagaagaagctgagccaggtgctgaatgagctgcaggtgtcccatgctgagaccaccctggagctggagaagacccgggacatgctgatcctgcagaggaagatcaacgtgtgctaccaggaggagctggaggccatgatgaccaaggctgacaatgacaacagagaccacaaggagaagctggagcggctgacccggctgctggacctgaagaacaaccgcatcaagcagctggagggcatcctgcggagccatgacctgcccaccagcgagcagctgaaggatgtggcctacggcacccggcccctgagcctgtgcctggagaccctgcctgcccatggagatgaggacaaggtggacatcagcctgctgcaccagggcgagaacctgtttgagctgcacatccaccaggccttcctgaccagcgctgccctggcccaggccggggacacccagcccaccaccttctgcacctacagcttctatgactttgagacccactgcacccccctgtctgtgggcccccagcccctgtatgacttcaccagccagtatgtgatggagacagacagcctcttcctgcactacctgcaggaggccagcgcccggctggacatccaccaggccatggccagcgagcacagcaccctggccgccggctggatctgctttgacagagtgctggagaccgtggagaaggtgcacggcctggccaccctcatcggggccggcggggaggagtttggagtgctggagtactggatgaggctgcgcttccccatcaagcccagcctgcaggcctgcaacaagaggaagaaggcccaggtgtacctgagcacagatgtgctgggcggcaggaaggcccaggaggaggagttccgctctgagagctgggagccccagaatgagctgtggattgagatcaccaagtgctgcggcctgcggagccgctggctgggcacccagcccagcccctatgctgtgtaccgcttcttcaccttcagtgaccatgacacagccatcatcccagccagcaacaacccctacttccgggaccaggcccgcttccctgtgctggtgaccagtgacctggaccactacctgcggcgggaggccctgagcatccacgtgtttgatgatgaggacctggagcccggcagctacctgggccgggcccgggtgcccctgctgcccctggccaagaatgaaagcatcaagggggacttcaacctgacagatcctgctgagaagcccaacggcagcatccaggtgcagctggactggaagttcccctacatccccccagagagcttcctgaagccagaggcccagaccaagggcaaggacaccaaggacagcagcaagatcagcagcgaggaggagaaggccagcttccccagccaggaccagatggccagccctgaggtgcccattgaagctggccagtaccgcagcaagaggaagccaccccacggcggggagaggaaggagaaggagcaccaggtggtgtcctacagcaggaggaagcacggcaagagaattggagtgcagggcaagaacaggatggagtacctgagcctgaacatcctgaatggaaacaccccagagcaggtgaactacacagagtggaagttcagcgagaccaacagcttcatcggagatggcttcaagaaccagcacgaggaggaggagatgaccctgagccacagcgccctgaagcagaaggagcccctgcaccctgtgaatgacaaggagagcagcgagcagggcagcgaggtgtctgaggcccagaccacagacagtgatgatgtgattgtgccccccatgagccagaagtaccccaaggctgacagcgagaagatgtgcatcgagatcgtgtccctggccttctacccagaggccgaggtgatgtctgatgagaacatcaagcaggtgtatgtggagtacaagttctatgacctgcccctgtctgaaacagagacccctgtgtccctgaggaagcccagggctggggaggagatccacttccacttcagcaaggtgattgacctggacccccaggagcagcagggcagaagacgcttcctgtttgacatgctgaatggccaggaccctgaccagggccacctgaagttcaccgtggtgtctgaccccctggatgaggagaagaaggaatgtgaggaggtgggctacgcctacctgcagctgtggcagatcctggagagcggccgggacatcctggagcaggagctggacatcgtgtccccagaggacctggccacccccatcggccgcctgaaggtgtccctgcaggccgctgctgtgctgcacgccatctacaaggagatgacagaggacctcttctcctag

SEQ ID NO: 203932 - DNA, 3861 bp, Artificial Sequence
  derived and/or modified sequence
atgagccacctggtggaccccaccagcggggacctgcctgtgcgggacattgatgccatccccctggtgctgcctgccagcaagggcaagaacatgaagacccagccccccctgagcaggatgaaccgggaggagctggaggacagcttcttccggctgcgggaggaccacatgctggtgaaggagctgtcctggaagcagcaggatgagatcaagaggctgcggaccaccctgctgcggctgacagctgctggccgggacctgcgggtggccgaggaggccgcccccctgtctgaaacagcccggcggggccagaaggccggctggaggcagaggctgtccatgcaccagaggccccagatgcaccggctgcagggccacttccactgtgtgggccctgccagcccccggcgggcccagccccgggtgcaggtgggccaccggcagctgcacacagctggggcccctgtgcctgagaagcccaagaggggcccccgggaccggctgagctacacagccccacccagcttcaaggagcacgccaccaatgaaaatagaggagaggtggccagcaagcccagcgagctggtgtctggcagcaacagcatcatctccttcagcagcgtcatctccatggccaagcccatcggcctgtgcatgcccaacagcgcccacatcatggccagcaacaccatgcaggtggaggagccccccaagagccctgagaagatgtggcccaaggatgaaaattttgagcagaggagcagcctggagtgtgcccagaaggctgctgagctgcgggccagcatcaaggagaaggtggagctgatccggctgaagaagctgctgcacgagagaaatgccagcctggtgatgaccaaggcccagctgacagaggtgcaggaggcctgcaccttcctgctgacccagaaccagggcatcctgtctgctgcccacgaggccctgctgaagcaggtgaatgagctgcgggcagagctgaaggaggagagcaagaaggctgtgtccctgaagagccagctggaggatgtgtccatcctgcagatgaccctgaaggagttccaggagcgggtggaggacctggagaaggagaggaagctgctgaatgacaactatgacaagctgctggagagcatgctggacagcagtgacagcagcagccagccccactggagcaatgagctgattgctgagcagctgcagcagcaggtgtcccagctgcaggaccagctggatgctgagctggaggacaagaggaaggtgctgctggagctgagccgggagaaggcccagaatgaagacctgaagctggaggtgaccaacatcctgcagaagcacaagcaggaggtggagctgctgcagaatgctgccaccatcagccagcccccagaccggcagagcgagcccgccacccaccctgctgtgctgcaggagaacacccagatcgagcccagcgagcccaagaaccaggaggagaagaagctgagccaggtgctgaatgagctgcaggtgtcccatgctgagaccaccctggagctggagaagacccgggacatgctgatcctgcagaggaagatcaacgtgtgctaccaggaggagctggaggccatgatgaccaaggctgacaatgacaacagagaccacaaggagaagctggagcggctgacccggctgctggacctgaagaacaaccgcatcaagcagctggagggcatcctgcggagccatgacctgcccaccagcgagcagctgaaggatgtggcctacggcacccggcccctgagcctgtgcctggagaccctgcctgcccatggagatgaggacaaggtggacatcagcctgctgcaccagggcgagaacctgtttgagctgcacatccaccaggccttcctgaccagcgctgccctggcccaggccggggacacccagcccaccaccttctgcacctacagcttctatgactttgagacccactgcacccccctgtctgtgggcccccagcccctgtatgacttcaccagccagtatgtgatggagacagacagcctcttcctgcactacctgcaggaggccagcgcccggctggacatccaccaggccatggccagcgagcacagcaccctggccgccggctggatctgctttgacagagtgctggagaccgtggagaaggtgcacggcctggccaccctcatcggggccggcggggaggagtttggagtgctggagtactggatgaggctgcgcttccccatcaagcccagcctgcaggcctgcaacaagaggaagaaggcccaggtgtacctgagcacagatgtgctgggcggcaggaaggcccaggaggaggagttccgctctgagagctgggagccccagaatgagctgtggattgagatcaccaagtgctgcggcctgcggagccgctggctgggcacccagcccagcccctatgctgtgtaccgcttcttcaccttcagtgaccatgacacagccatcatcccagccagcaacaacccctacttccgggaccaggcccgcttccctgtgctggtgaccagtgacctggaccactacctgcggcgggaggccctgagcatccacgtgtttgatgatgaggacctggagcccggcagctacctgggccgggcccgggtgcccctgctgcccctggccaagaatgaaagcatcaagggggacttcaacctgacagatcctgctgagaagcccaacggcagcatccaggtgcagctggactggaagttcccctacatccccccagagagcttcctgaagccagaggcccagaccaagggcaaggacaccaaggacagcagcaagatcagcagcgaggaggagaaggccagcttccccagccaggaccagatggccagccctgaggtgcccattgaagctggccagtaccgcagcaagaggaagccaccccacggcggggagaggaaggagaaggagcaccaggtggtgtcctacagcaggaggaagcacggcaagagaattggagtgcagggcaagaacaggatggagtacctgagcctgaacatcctgaatggaaacaccccagagcaggtgaactacacagagtggaagttcagcgagaccaacagcttcatcggagatggcttcaagaaccagcacgaggaggaggagatgaccctgagccacagcgccctgaagcagaaggagcccctgcaccctgtgaatgacaaggagagcagcgagcagggcagcgaggtgtctgaggcccagaccacagacagtgatgatgtgattgtgccccccatgagccagaagtaccccaaggctgacagcgagaagatgtgcatcgagatcgtgtccctggccttctacccagaggccgaggtgatgtctgatgagaacatcaagcaggtgtatgtggagtacaagttctatgacctgcccctgtctgaaacagagacccctgtgtccctgaggaagcccagggctggggaggagatccacttccacttcagcaaggtgattgacctggacccccaggagcagcagggcagaagacgcttcctgtttgacatgctgaatggccaggaccctgaccagggccacctgaagttcaccgtggtgtctgaccccctggatgaggagaagaaggaatgtgaggaggtgggctacgcctacctgcagctgtggcagatcctggagagcggccgggacatcctggagcaggagctggacatcgtgtccccagaggacctggccacccccatcggccgcctgaaggtgtccctgcaggccgctgctgtgctgcacgccatctacaaggagatgacagaggacctcttctcctag

SEQ ID NO: 203933 - DNA, 3861 bp, Artificial Sequence
  derived and/or modified sequence
atgagccacctggtggaccccaccagcggcgacctgcccgtgcgggatattgatgccattccactggtgttgccagcttcaaaagggaagaacatgaaaacccagccacctctctcaaggatgaatcgggaagaattagaggacagcttctttagactgagggaagaccatatgctggtcaaagaactgtcttggaagcagcaggatgagataaaaaggctgcgtacaacattgctgagactgacagcagcgggtagagatctgagagtcgctgaggaggcagcaccgctgagcgagacagctcgccgtgggcaaaaagccgggtggaggcagcgcctttctatgcaccaaagacctcagatgcatcgcctccaaggccacttccactgcgttggcccagcatcaccccgacgcgcacagccccgtgtccaggtaggacatcggcagctgcatactgccggagcccctgttccagagaaaccgaaaagggggccaagagaccggctgtcatacacagctcctccgtcctttaaggaacacgcaactaacgagaatcgaggagaggtggcctcaaagccgtccgaattggtctcaggctcaaattctataatctccttcagtagcgtgatcagcatggcaaaacccatcggtttgtgtatgccaaacagtgcccacattatggcttccaacactatgcaggttgaggagcctcccaagtccccagagaaaatgtggcccaaagatgaaaatttcgagcagcggtcaagcttggagtgcgctcaaaaagcagcagaactcagggccagcattaaggaaaaggtcgagctcataaggctgaaaaaactgcttcacgagcggaacgcctccctggtgatgacgaaggctcagctcactgaagtccaggaagcctatgagaccctcttgcagaaaaaccaaggtattctatcagctgctcatgaagccctgctcaagcaggtcaacgagttaagggccgaactgaaggaagagagtaaaaaggccgtgagtcttaagagccagttggaggacgtatccattctacaaatgaccttaaaagagtttcaggagagagtggaggatctggagaaggaaagaaagctcttaaatgataactacgataaactattagagtcaatgctcgattcttccgactccagtagccagccacattggagtaatgagttgatcgctgagcaattgcagcaacaggttagccagctgcaggaccagctggacgccgagcttgaggacaaacgtaaagtactcctggagctgagtcgcgagaaagcccaaaatgaggatctgaagctcgaggtgaccaacatactgcagaagcacaaacaggaagtggagcttctgcagaatgccgccaccatatctcagcccccagacaggcagtcagaacccgctacacatccagctgtcctgcaagaaaacacacaaatcgagccatccgagcccaagaaccaagaagaaaagaagctgagccaggtcctcaatgaactccaggtgagtcacgctgagaccacactggaactggaaaaaactagagatatgttaatattgcaacggaagatcaatgtctgttatcaagaggagctcgaggccatgatgactaaggcagacaacgacaatagggatcataaagagaaactggaacgactcacaaggctgctagatttaaaaaataatcgaatcaagcaattagaggggattctcagatcccatgaccttcctacatcggaacagctgaaagatgttgcgtacggcactagacccctatccctttgcctggagacgctcccggcacatggagacgaggacaaagtcgatatctcccttctccaccagggagaaaacctcttcgagctccacattcaccaggcatttttaacctcagcagcccttgcccaggccggggacacacaacccaccactttttgcacatactcattctacgacttcgagactcactgtaccccactgtctgtgggacctcagccactgtacgactttactagccagtacgtgatggaaaccgacagtttgttcctgcactatcttcaggaagcatctgcgcgcttagacatccaccaagccatggcttcagaacattccacactcgcggctggttggatatgtttcgatagagtgctggagacggtcgagaaggtgcacggactggctacactcattggggccgggggtgaggagttcggggtgctggaatattggatgagacttaggtttcccatcaagcccagcctacaggcgtgtaataaaagaaaaaaggcacaggtttacctctctacagatgtgctgggcggcaggaaagcgcaggaggaggaattccggagcgagtcctgggagccacagaacgaactctggatcgaaatcaccaagtgttgcgggcttaggagcagatggctgggaacacagccatccccttatgcagtgtatagatttttcacattcagtgaccacgatactgcgatcatccctgccagtaataatccctacttcagggatcaagcacgcttccccgtattggtgacttccgatctggaccactatctgagaagggaggctttgtcaatccacgtgtttgacgatgaggatctggagcctggttcctacctagggcgggcacgcgttcctctcctgccacttgccaaaaacgagagcatcaagggagattttaatctgactgatccagctgagaagcccaatgggagcatccaagtacagttagattggaagttcccttatattccacctgagtcttttttgaaaccggaggctcaaaccaagggtaaagacactaaagatagttctaaaattagttccgaggaagaaaaggccagtttcccctcacaggaccagatggctagccccgaggttcctatcgaggcaggacagtatagatccaagcgaaaaccgcctcacggaggagaaaggaaggagaaagagcatcaagtcgtttcttattcccgtcgcaagcacggtaagcggatcggcgttcagggcaaaaaccgtatggagtatctgagcctgaacatcctgaacggcaacacacctgagcaggtgaattataccgagtggaagttcagcgaaacgaacagtttcatcggcgacggcttcaagaaccagcacgaagaggaggagatgaccctgtctcacagtgccctgaagcaaaaagagcccttacacccggtcaatgataaagaatcctccgagcaaggatccgaggtcagcgaggcccaaactaccgatagtgatgatgtgatcgtcccccctatgagccaaaagtacccaaaagcggattctgagaagatgtgcattgagatcgtttcactcgccttttaccccgaagctgaggttatgtcagacgaaaacatcaaacaagtatacgtagagtacaaattctatgacctgcctctgtcggagacagagacacctgtgagtttgcggaagccaagggcaggcgaggaaatccattttcatttttcaaaggtgattgatctcgacccccaagaacaacaaggaaggcgtcggttcctattcgacatgcttaacggccaggatcccgaccaaggtcatctgaagtttactgtggtgtccgacccattggatgaggagaagaaagagtgtgaagaggtgggctatgcctatctccagctgtggcaaatcctggagagcggcagagatattctggagcaggagcttgacatcgtaagtcctgaagatctggctacccctatcgggaggttaaaagtgtctctccaggctgcagccgtacttcacgcaatatacaaggagatgaccgaagatcttttttcctag

SEQ ID NO: 203934 - DNA, 3861 bp, Artificial Sequence
  derived and/or modified sequence
atgagccacctggtggaccccaccagcggcgacctgcccgtgcgggacatcgacgcaattccactggtgttgcctgcttcaaaaggcaagaatatgaaaacacaacctcccctgagccggatgaacagggaagagcttgaagactccttctttcgactgcgtgaagaccacatgcttgttaaagaactgtcctggaaacagcaggatgagattaagaggctgcgaacgacactgctgaggctgacagccgccggtcgagatttgcgcgtggccgaggaggctgctccactttcggagaccgctcgaagagggcagaaagccgggtggagacaaaggctgagcatgcatcagagaccacaaatgcatcggctccagggccacttccattgtgttggtccagcttctcccagaagagctcagccacgggttcaggtggggcatcggcaacttcatacagcaggtgccccggtacccgaaaaacctaagaggggtccacgcgatcgattgagttacactgcaccaccaagcttcaaggagcacgcaactaacgagaataggggcgaggtggcatctaagccaagtgaactcgtaagtggttccaactccataatctcctttagctctgtcatttccatggccaaaccaatcggactctgtatgcctaacagcgcacacatcatggcttccaacacaatgcaggtagaggagccgcccaaaagcccggagaagatgtggcccaaggatgaaaattttgagcagcggagcagcctggagtgtgctcagaaggccgcggaactgcgggccagcatcaaggagaaagtcgaactcattaggctcaagaagttgctccacgagaggaatgcatctttggtgatgacaaaggcccagctcacagaggtgcaggaagcctgcacttttttgctcacacagaatcagggtatcttatcagccgcacatgaggcgcttctgaagcaggtgaacgagctcagggcggagctaaaagaagaatcaaaaaaagccgtttcactcaaaagtcagctcgaagatgtgagcattctgcaaatgacactaaaagaattccaggaacgggtggaggacttggaaaaagaaaggaagctcttgaatgataattatgataagctgctcgagtcaatgttggatagttcagattcttcatctcaacctcattggtcgaatgaactcatagctgagcagttgcaacagcaggtatctcagctccaggatcagctggacgccgaattagaggacaagcgaaaggtattgttagagttgagcagggaaaaggcccagaacgaggatttgaaacttgaggtaacgaacatccttcagaagcacaaacaggaagtcgaactcctgcagaacgccgctacaattagtcagcctcccgaccggcaaagtgaaccagcgacccatccagcagtcctccaggaaaacactcaaatcgagccgagtgagcctaagaatcaggaagaaaagaagctgagccaagtcctgaacgaactgcaggttagccatgctgagaccacactggaattggaaaagactcgggatatgcttatcctccaaaggaagatcaatgtttgctatcaagaggagcttgaagctatgatgaccaaggctgacaacgacaatagggatcacaaggaaaagctcgagaggcttacgcgcttgctcgacctgaagaataacagaatcaaacagctggaagggattttaaggagccacgatttgccaacctctgagcagctaaaggatgtggcttacggaacaagacctctgagtttgtgcctggagaccctgccggcccacggtgatgaagataaggtcgatatatctctcctgcatcaaggagaaaacctcttcgaactgcacatccaccaagcatttctcacatctgccgcgcttgcccaggccggagacacccagcccactactttctgcacctatagtttctatgacttcgagactcattgtacgccgcttagcgtgggaccacagccgctgtacgattttaccagccagtatgtgatggagactgatagcctctttttgcattatctgcaggaggcctccgctagacttgatattcaccaggctatggcaagtgaacatagtacactggcagctggatggatttgcttcgatagagtcctcgaaactgttgagaaagtgcatggtctcgctacgctgatcggcgctggtggcgaagagttcggcgttctggaatattggatgagacttagatttcctattaagccctcccttcaagcttgtaataagcgaaagaaagctcaagtgtatctgagtacggacgtgctgggtggtcgcaaggctcaggaggaagagttcagaagcgaaagctgggagccacaaaacgagctgtggattgaaatcacaaagtgctgcggcctgaggagcagatggcttggcacacagccgtcaccctatgcagtttacaggtttttcacttttagcgaccatgacaccgccatcattcctgcatcaaacaatccctattttcgggaccaggcccggttcccggtgctggtcacctctgacctggatcactacctgcggagggaggccttgtctatccacgtcttcgatgatgaggatctggaacccggctcctatttggggcgcgctagggtccccctgctgcccttagcgaagaacgagtccatcaagggggattttaacttaacggatcccgcggagaagcccaacggtagtatccaggtgcagttggactggaaatttccttacatacctcccgagagcttcctgaagcctgaagcccagacaaagggtaaggatacgaaagacagctcaaaaatcagctccgaggaagagaaagcctcctttccgagccaggatcagatggctagcccagaggtgcccattgaagccggtcagtatagaagcaaacggaagccgccccacggaggcgagcggaaggagaaggaacaccaggtagtgtcgtattctcgccgcaagcacggtaaaaggatcggcgtgcagggaaaaaacaggatggagtaccttagcttgaacatactcaacggcaatactccagagcaggtcaactacactgaatggaagttttcggaaactaattctttcataggcgacgggttcaagaaccagcacgaagaggaggagatgactctctcccattctgccctaaaacagaaggagcctctgcatccagtgaacgacaaagagtcgtcagagcagggctcagaggtgtcagaggcccagacaaccgacagcgatgacgtgatagtgcctcctatgtctcagaaatacccaaaagcagattcagagaaaatgtgtatcgaaatcgtgtcgttggcattctacccggaggctgaagttatgtccgatgaaaatattaaacaggtatatgtggaatacaagttctatgatcttcctctgtccgaaaccgagactcctgtgagcctcaggaagcccagagccggcgaggagatccactttcacttttccaaggttatagatctggatccccaggagcagcagggaaggcgcaggtttctgttcgacatgctgaatggccaggatccagaccaaggccatctcaagtttaccgtcgtgagcgatccacttgacgaggagaaaaaggagtgcgaggaggtcgggtacgcctacctgcagttatggcaaattttggagtctggccgcgacattctggaacaggagttggacattgtatccccggaggacctggccacacccatagggagactgaaagtctctcttcaggccgccgccgtcctgcacgctatttacaaagagatgactgaggaccttttcagttag

SEQ ID NO: 203935 - DNA, 3861 bp, Artificial Sequence
  derived and/or modified sequence
atgtcacacctggtggatcctacaagtggcgacctgcccgtgagagatatcgatgccattccgctcgttctccctgcttcaaagggcaagaacatgaaaacgcaacccccattatctagaatgaatagggaggaactggaggatagcttttttcgcctgagagaggatcacatgctagtaaaagagctgtcctggaagcagcaggacgaaattaagcgactcaggactactttgttgcgactaactgccgctgggcgtgatctgcgggtcgctgaggaagcggcaccgctgtccgagaccgctcgacgcggacagaaggcagggtggcggcagagactttccatgcatcagcggccacagatgcatagacttcaaggacactttcactgcgtaggaccagcgtcaccccgaagagctcagcctcgagttcaggtcgggcatcgccagctgcacactgctggagccccagtgcccgagaagccaaagcgcggacctagggataggttatcctacactgccccacccagcttcaaggagcacgctacaaacgagaatagaggtgaggtggcttcaaaaccctcagaactcgtgagtgggtcaaattctatcatttccttctcttcagtcataagtatggctaagcccatcggactgtgcatgcccaatagcgctcatatcatggcctctaacactatgcaagttgaagagcctcctaagtccccagaaaagatgtggcctaaagatgagaacttcgagcaaagatcgagtctggagtgcgcccaaaaggctgcagaattaagggctagcataaaggagaaagtggaactcatcaggctgaagaaactcctgcatgagagaaatgcctccctcgtgatgacaaaggcccaactcacagaggtccaggaggcctacgagacgttgttgcagaaaaaccagggcatcctctctgcggctcatgaagctcttcttaaacaggtgaacgagctccgagccgaactcaaggaggaatctaagaaagcagttagcctaaaatcccagctcgaagatgtttctatcctgcaaatgactctcaaggagttccaggagcgagttgaagatctcgagaaagagcgcaaattgcttaacgataattacgataaactcctggagtcaatgctcgatagtagtgacagcagttctcagcctcattggagcaacgaattgatagctgaacagttgcagcagcaagttagtcaattacaggatcagttggatgcagaactggaggacaagaggaaggtgttgctcgaactgtctcgggagaaagcccagaacgaagatttaaagctggaagtgactaacatcctccaaaagcacaagcaggaagtggaactcttgcagaacgcagcaacaatctcccagccgcctgacagacagtccgagccagctacccatcccgctgttctccaagagaacacccagatcgaaccttcagaaccaaaaaaccaggaggagaagaaactctcccaggtgctgaatgagctgcaggtaagtcatgcagaaactaccttagagctggagaagaccagggatatgctcatcctccagagaaaaattaatgtatgctaccaagaagagctggaggctatgatgaccaaagcggacaacgacaatcgggatcacaaggaaaaacttgaaagacttactcgcctcctggacctgaagaataaccggatcaagcagctagagggcatcttgagatcgcacgatttacccactagcgagcagctcaaggacgtagcgtatggtacacgcccactgagtctgtgcttggagactctgcctgcccatggcgatgaggataaagtggatatttctctgctgcatcaaggcgaaaatctgtttgaactgcatatccaccaggcgtttcttacatccgctgccctggcccaggccggtgatacacagcccacaaccttttgcacgtacagtttttatgacttcgagacgcactgtactccattgagcgtaggtccgcagccgctctacgatttcacgtcccaatatgtgatggagacagattccctctttcttcactatttgcaggaggcctccgctcgactggacatccaccaggctatggcatcagagcatagcaccttggctgccggatggatttgcttcgatcgcgttctggagaccgttgagaaagtacacggactggcgactctcatcggggctggtggggaggagttcggtgtgcttgagtattggatgaggttacgattccctataaagccatctcttcaagcatgcaataagagaaaaaaagcacaggtgtacttaagtaccgatgttctgggaggtaggaaggcccaggaggaagagttccgtagcgagtcttgggaaccccaaaatgagctttggatcgaaatcactaagtgttgcggcctgaggtctcgttggctggggactcagcctagcccgtatgcagtgtaccgttttttcactttctccgatcacgatactgcaatcattcccgcatctaacaatccttattttcgggaccaggctcgattccccgttctggtcacatcagacttagatcactacttgaggcgggaggccttgagcatccacgtgtttgacgacgaggatctcgaacccggttcctacttagggagggccagggttccccttttacctttagccaaaaacgaatcaataaaaggggactttaatctgaccgatcccgctgagaagccaaatggaagtattcaggtgcagctagactggaaatttccctacattcctcccgagagcttcctcaagccggaggcgcaaacaaagggaaaggacaccaaggatagttcgaagattagctctgaagaagagaaagcaagttttcccagccaggatcagatggcatctcccgaggtcccaattgaagccggtcagtacaggtctaagcggaagccaccccacgggggagaaaggaaggagaaagagcaccaggtggtttcgtactcccggcgtaagcacggtaagcggatcggagttcagggcaaaaacaggatggagtacttgtcgctgaatatattgaatggaaacacgccagagcaggtaaactataccgagtggaagttctcagaaacaaactccttcattggtgacgggttcaaaaatcagcacgaggaagaggagatgactctcagccactcagcactaaagcagaaggaacccctgcacccagtgaacgataaggaatctagtgagcaaggcagtgaggtgtccgaggctcagacgacagattctgatgacgtgattgtaccaccgatgagccagaagtaccccaaagcggattcggagaaaatgtgcattgagatcgtctccctggcgttttatcccgaagcagaggttatgagcgatgagaatatcaagcaagtgtacgtggagtataaattctacgacctgcctctcagtgagacggagacacctgtctcgctgcggaaacctagagccggtgaagaaattcacttccactttagcaaagtaatcgatcttgacccgcaggagcagcagggtaggcgccgttttctttttgacatgctcaacggccaagaccccgaccaaggccatctgaagttcaccgtggtaagcgatccgctggatgaggagaaaaaagagtgcgaggaagttggctacgcttacttgcagctgtggcaaattctggagagcggtcgggacatactggagcaagaactcgacattgtgtcccctgaggacctggcaactcctatcggacggcttaaggtgtccctccaggcagccgctgtgctacatgctatatacaaagagatgacggaagatttgtttagttag

SEQ ID NO: 203936 - DNA, 3861 bp, Artificial Sequence
  derived and/or modified sequence
atgagtcatttagttgatcccacatctggggacctccccgtgagggacatcgacgctattccactcgtcctgccggctagcaaggggaagaacatgaagactcaacctccgctgtctcgaatgaaccgtgaggagttagaagactctttctttaggctgagagaggatcacatgctggtgaaggaactatcatggaagcagcaggatgagattaagcgcttgcgtaccacccttttgaggctaacagcagccggtcgggatctgcgggtcgccgaggaggcggcacctttgagcgagactgcgaggcgcggacaaaaagcgggttggaggcagcgcctatcaatgcaccagcgcccacaaatgcaccggctccagggacactttcattgtgtgggccctgctagtccccgaagggcacagcctcgagtgcaagtcgggcaccgccagctgcataccgccggtgcaccagtcccagaaaagcccaaaagaggacctagggaccggcttagttatacggccccaccttcttttaaggaacacgccaccaatgagaatcgaggcgaggtcgcaagcaagccatctgagctggtgagcgggtccaattctattatcagtttttccagcgtgattagtatggccaagcccatcgggctgtgcatgccgaattccgctcacattatggcatccaacaccatgcaggtggaagagcctccgaagagcccagagaagatgtggccgaaagatgagaatttcgagcagcgctcatccctggagtgtgctcagaaagctgccgagctgcgagcctccatcaaggagaaagtcgagctaattagattgaaaaagctgctgcacgaacgaaatgcgtccctggtcatgactaaagcccagttgacagaggtccaggaggcttgcacatttcttttgacccagaaccaggggatcctttctgccgctcacgaggcgttgctgaagcaggtgaatgaactccgggcagaactgaaggaggagtccaagaaggcagtcagtttgaaaagtcaattggaggatgtgagcattctgcagatgacattgaaggagttccaggagcgcgtcgaggacttggagaaagagcgcaaactcttgaatgacaactatgacaagctgctggagagcatgttggactcctcagatagctcttcccagccccactggtcaaacgaactgatcgctgagcagcttcagcagcaggtgagccagctccaggatcagctggacgcggagctagaggataaacgaaaagtactgctagagctaagcagagaaaaagcacagaatgaagatcttaagctcgaagtcaccaatatcctacagaaacacaagcaggaggtggaactactccagaatgccgctacaatttctcagccaccagatcgacaaagcgagccggctacccaccctgcagtgctccaggaaaacacacaaattgaacctagtgagccaaaaaatcaggaggaaaagaaactcagtcaagtcctgaatgaactccaggtctctcacgccgaaacaaccctggaattggaaaaaacccgcgacatgttgatattgcagaggaaaatcaacgtatgttatcaggaagagctcgaagccatgatgacaaaggctgacaacgataatcgcgatcacaaggaaaagctggagcggctaaccaggctcctcgatctgaaaaacaatcgtataaaacagctggagggaatcctacgttcccacgatctgcctacctcggagcagctgaaggatgtggcttatggtacccggccactttctttgtgcctggaaactctgcccgctcacggcgacgaggataaggtggatattagccttctgcaccaaggcgaaaacttattcgagcttcacattcaccaggcgtttctcacctcagccgctctggcgcaggccggtgatacgcagccaacaacgttttgtacctactcgttttacgattttgagacacattgcaccccattaagcgtgggtcctcagccactctacgatttcacatctcagtacgtgatggaaaccgactctctgttcctgcactacctacaagaagcttccgcacgcctggatattcaccaggcaatggcctcagaacattcgactctcgcagctggctggatctgtttcgatcgggttctcgaaacagtggagaaagtccacgggctagcaaccctgattggagcaggcggtgaagagtttggcgtcctcgagtattggatgagactgaggttccccatcaaaccctcactgcaagcctgcaataaacgcaagaaagcccaggtgtatctgagtactgatgtcttgggcggaagaaaggcgcaagaggaggagttcaggtctgaatcctgggaaccccagaatgagttgtggattgagatcacaaaatgctgcggcctgcgttctcgttggctggggacgcagccgtccccctatgccgtctaccgtttttttactttcagcgaccatgataccgctatcattcctgctagtaacaacccttatttccgtgatcaagccaggttcccagtgttagttaccagcgatttggatcactaccttaggcgtgaagccctgtcgatccatgtattcgacgatgaagatttagagcctggttcttatttgggacgagccagagtacccctgctccctttggccaagaatgagtccattaaaggcgactttaacctgactgatcctgctgagaaacctaatgggtctattcaggtacaactcgactggaagtttccctacatccccccagagagcttcctcaaacccgaggctcagacgaagggaaaggatacaaaagactcgagtaagatctccagcgaggaagagaaggcctcattcccaagccaggatcaaatggcttctcccgaggttcctattgaggccggacagtaccggagcaaacgcaaaccccctcatgggggtgagaggaaggagaaagagcaccaggtggtctcctattctagaagaaagcatggaaaacgcattggggtacaggggaaaaatcgcatggagtacctttcccttaacatccttaacggcaatacaccagagcaggtcaactatactgagtggaagttctcagagacgaactcattcatcggcgatgggtttaagaatcagcacgaagaggaagagatgaccctgagtcactctgccctcaagcagaaggaaccgctgcaccccgtcaatgataaagagagctctgagcagggctctgaagtaagcgaagctcagaccaccgactccgacgacgtcattgtgccgccaatgtcccagaaataccctaaggcggacagcgagaagatgtgtatcgagatcgtttcactggcgttctaccctgaagccgaggttatgagcgacgaaaacattaagcaagtgtacgtggagtataagttttacgatctgccgctaagcgagaccgagactcccgtctctttgagaaagccgcgtgccggtgaagagattcacttccatttctcaaaggttattgacctggacccccaggagcagcagggacggaggagattccttttcgacatgcttaacggtcaggatcccgaccaaggccatttgaaatttacagtggtgtcagaccccctggacgaggaaaaaaaagagtgcgaggaggtggggtacgcctatctccagctgtggcagatcctggagtccggacgcgacatactggaacaggagctggatattgtgagccctgaggacctcgccacccctatcgggcgactcaaagtgagcttgcaggccgctgctgtcctccacgcaatttacaaagaaatgaccgaagacctcttttcctag

SEQ ID NO: 203937 - DNA, 3944 bp, Artificial Sequence
  derived and/or modified sequence
atgtcacatctggtggaccctacatcaggagacttgccagttagagacatagatgctatacctctggtgctaccagcctcaaaaggtaagaatatgaaaactcaaccacccttgagcaggatgaaccgggaggaattggaggacagtttctttcgacttcgcgaagatcacatgttggtgaaggagctttcttggaagcaacaggatgagatcaaaaggctgaggaccaccttgctgcggttgaccgctgctggccgggacctgcgggtcgcggaggaggcggcgccgctctcggagaccgcaaggcgcgggcagaaggcgggatggcggcagcgcctctccatgcaccagcgcccccagatgcaccgactgcaagggcatttccactgcgtcggccctgccagcccccgccgcgcccagcctcgcgtccaagtgggacacagacagctccacacagccggtgcaccggtgccggagaaacccaagagggggccaagggacaggctgagctacacagcccctccatcgtttaaggagcatgcgacaaatgaaaacagaggtgaagtagccagtaaacccagtgaacttgtttctggttctaacagcataatttctttcagcagtgtcataagtatggctaaacccattggtctatgcatgcctaacagtgcccacatcatggccagcaataccatgcaagtggaagagccacccaagtctcctgagaaaatgtggcctaaagatgaaaattttgaacagagaagctcattggagtgtgctcagaaggctgcagagcttcgagcttccattaaagagaaggtagagctgattcgacttaagaagctcttacatgaaagaaatgcttcattggttatgacaaaagcacaattaacagaagttcaagaggcatgtactttccttttgacccagaatcagggaatcctgagtgcagcccatgaggccctcctcaagcaagtgaatgagctcagggcagagctgaaggaagaaagcaagaaggctgtgagcttgaagagccaactggaagatgtgtctatcttgcagatgactctgaaggagtttcaggagagagttgaagatttggaaaaagaacgaaaattgctgaatgacaattatgacaaactcttagaaagcatgctggacagcagtgacagctccagtcagccccactggagcaacgagctcatagcggaacagctacagcagcaagtctctcagctgcaggatcagctggatgctgagctggaggacaagagaaaagttttacttgagctgtccagggagaaagcccaaaatgaggatctgaagcttgaagtcaccaacatacttcagaagcataaacaggaagtagagctcctccaaaatgcagccacaatttcccaacctcctgacaggcaatctgaaccagccactcacccagctgtattgcaagagaacactcagatcgagccaagtgaacccaaaaaccaagaagaaaagaaactgtcccaggtgctaaatgagttgcaagtatcacacgcagagaccacattggaactagaaaagaccagggacatgcttattctgcagcgcaaaatcaacgtgtgttatcaggaggaactggaggcaatgatgacaaaagctgacaatgataatagagatcacaaagaaaagctggagaggttgactcgactactagacctcaagaataaccgtatcaagcagctggaaggtattttaagaagccatgaccttccaacatctgaacagctcaaagatgttgcttatggcacccgaccgttgtcgttatgtttggaaacactgccagcccatggagatgaggataaagtggatatttctctgctgcatcagggtgagaatctttttgaactgcacatccaccaggccttcctgacatctgccgccctagctcaggctggagatacccaacctaccactttctgcacctattccttctatgactttgaaacccactgtaccccattatctgtggggccacagcccctctatgacttcacctcccagtatgtgatggagacagattcgcttttcttacactaccttcaagaggcttcagcccggcttgacatacaccaggccatggccagtgaacacagcactcttgctgcaggatggatttgctttgacagggtgctagagactgtggagaaagtccatggcttggccacactgattggagctggtggagaagagttcggggttctagagtactggatgaggctgcgtttccccataaaacccagcctacaggcgtgcaataaacgaaagaaagcccaggtctacctgtcaaccgatgtgcttggaggccggaaggcccaggaagaggagttcagatcggagtcttgggaacctcagaacgagctgtggattgaaatcaccaagtgctgtggcctccggagtcgatggctgggaactcaacccagtccatatgctgtgtaccgcttcttcaccttttctgaccatgacactgccatcattccagccagtaacaacccctactttagagaccaggctcgattcccagtgcttgtgacctctgacctggaccattatctgagacgggaggccttgtctatacatgtttttgatgatgaagacttagagcctggctcgtatcttggccgagcccgagtgcctttactgcctcttgcaaaaaatgaatctatcaaaggtgattttaacctcactgaccctgcagagaaacccaacggatctattcaagtgcaactggattggaagtttccctacataccccctgagagcttcctgaaaccagaagctcagactaaggggaaggataccaaggacagttcaaagatctcatctgaagaggaaaaggcttcatttccttcccaggatcagatggcatctcctgaggttcccattgaagctggccagtatcgatctaagagaaaacctcctcatgggggagaaagaaaggagaaggagcaccaggttgtgagctactcaagaagaaaacatggcaaaagaataggtgttcaaggaaagaatagaatggagtatcttagccttaacatcttaaatggaaatacaccagagcaggtgaattacactgagtggaagttctcagagactaacagcttcataggtgatggctttaaaaatcagcacgaggaagaggaaatgacattatcccattcagcactgaaacagaaggaacctctacatcctgtaaatgacaaagaatcctctgaacaaggttctgaagtcagtgaagcacaaactaccgacagtgatgatgtcatagtgccacccatgtctcagaaatatcctaaggcagattcagagaagatgtgcattgaaattgtctccctggccttctacccagaggcagaagtgatgtctgatgagaacataaaacaggtgtatgtggagtacaaattctacgacctacccttgtcggagacagagactccagtgtccctaaggaagcctagggcaggagaagaaatccactttcactttagcaaggtaatagacctggacccacaggagcagcaaggccgaaggcggtttctgttcgacatgctgaatggacaagatcctgatcaaggacatttaaagtttacagtggtaagtgatcctctggatgaagaaaagaaagaatgtgaagaagtgggatatgcatatcttcaactgtggcagatcctggagtcaggaagagatattctagagcaagagctagacattgttagccctgaagatctggctaccccaataggaaggctgaaggtttcccttcaagcagctgctgtcctccatgctatttacaaggagatgactgaagatttgttttcatgaaggaacaagtgctattccaatctaaaagtctctgagggaaccatagtaaaaagtctcttataaagttagcttgctataacatg

SEQ ID NO: 203938 - DNA, 3940 bp, Artificial Sequence
  derived and/or modified sequence
atgtcacatctggtggaccctacatcaggagacttgccagttagagacatagatgctatacctctggtgctaccagcctcaaaaggtaagaatatgaaaactcaaccacccttgagcaggatgaaccgggaggaattggaggacagtttctttcgacttcgcgaagatcacatgttggtgaaggagctttcttggaagcaacaggatgagatcaaaaggctgaggaccaccttgctgcggttgaccgctgctggccgggacctgcgggtcgcggaggaggcggcgccgctctcggagaccgcaaggcgcgggcagaaggcgggatggcggcagcgcctctccatgcaccagcgcccccagatgcaccgactgcaagggcatttccactgcgtcggccctgccagcccccgccgcgcccagcctcgcgtccaagtgggacacagacagctccacacagccggtgcaccggtgccggagaaacccaagagggggccaagggacaggctgagctacacagcccctccatcgtttaaggagcatgcgacaaatgaaaacagaggtgaagtagccagtaaacccagtgaacttgtttctggttctaacagcataatttctttcagcagtgtcataagtatggctaaacccattggtctatgcatgcctaacagtgcccacatcatggccagcaataccatgcaagtggaagagccacccaagtctcctgagaaaatgtggcctaaagatgaaaattttgaacagagaagctcattggagtgtgctcagaaggctgcagagcttcgagcttccattaaagagaaggtagagctgattcgacttaagaagctcttacatgaaagaaatgcttcattggttatgacaaaagcacaattaacagaagttcaagaggcatacgaaaccttgctccagaagaatcagggaatcctgagtgcagcccatgaggccctcctcaagcaagtgaatgagctcagggcagagctgaaggaagaaagcaagaaggctgtgagcttgaagagccaactggaagatgtgtctatcttgcagatgactctgaaggagtttcaggagagagttgaagatttggaaaaagaacgaaaattgctgaatgacaattatgacaaactcttagaaagcatgctggacagcagtgacagctccagtcagccccactggagcaacgagctcatagcggaacagctacagcagcaagtctctcagctgcaggatcagctggatgctgagctggaggacaagagaaaagttttacttgagctgtccagggagaaagcccaaaatgaggatctgaagcttgaagtcaccaacatacttcagaagcataaacaggaagtagagctcctccaaaatgcagccacaatttcccaacctcctgacaggcaatctgaaccagccactcacccagctgtattgcaagagaacactcagatcgagccaagtgaacccaaaaaccaagaagaaaagaaactgtcccaggtgctaaatgagttgcaagtatcacacgcagagaccacattggaactagaaaagaccagggacatgcttattctgcagcgcaaaatcaacgtgtgttatcaggaggaactggaggcaatgatgacaaaagctgacaatgataatagagatcacaaagaaaagctggagaggttgactcgactactagacctcaagaataaccgtatcaagcagctggaaggtattttaagaagccatgaccttccaacatctgaacagctcaaagatgttgcttatggcacccgaccgttgtcgttatgtttggaaacactgccagcccatggagatgaggataaagtggatatttctctgctgcatcagggtgagaatctttttgaactgcacatccaccaggccttcctgacatctgccgccctagctcaggctggagatacccaacctaccactttctgcacctattccttctatgactttgaaacccactgtaccccattatctgtggggccacagcccctctatgacttcacctcccagtatgtgatggagacagattcgcttttcttacactaccttcaagaggcttcagcccggcttgacatacaccaggccatggccagtgaacacagcactcttgctgcaggatggatttgctttgacagggtgctagagactgtggagaaagtccatggcttggccacactgattggagctggtggagaagagttcggggttctagagtactggatgaggctgcgtttccccataaaacccagcctacaggcgtgcaataaacgaaagaaagcccaggtctacctgtcaaccgatgtgcttggaggccggaaggcccaggaagaggagttcagatcggagtcttgggaacctcagaacgagctgtggattgaaatcaccaagtgctgtggcctccggagtcgatggctgggaactcaacccagtccatatgctgtgtaccgcttcttcaccttttctgaccatgacactgccatcattccagccagtaacaacccctactttagagaccaggctcgattcccagtgcttgtgacctctgacctggaccattatctgagacgggaggccttgtctatacatgtttttgatgatgaagacttagagcctggctcgtatcttggccgagcccgagtgcctttactgcctcttgcaaaaaatgaatctatcaaaggtgattttaacctcactgaccctgcagagaaacccaacggatctattcaagtgcaactggattggaagtttccctacataccccctgagagcttcctgaaaccagaagctcagactaaggggaaggataccaaggacagttcaaagatctcatctgaagaggaaaaggcttcatttccttcccaggatcagatggcatctcctgaggttcccattgaagctggccagtatcgatctaagagaaaacctcctcatgggggagaaagaaaggagaaggagcaccaggttgtgagctactcaagaagaaaacatggcaaaagaataggtgttcaaggaaagaatagaatggagtatcttagccttaacatcttaaatggaaatacaccagagcaggtgaattacactgagtggaagttctcagagactaacagcttcataggtgatggctttaaaaatcagcacgaggaagaggaaatgacattatcccattcagcactgaaacagaaggaacctctacatcctgtaaatgacaaagaatcctctgaacaaggttctgaagtcagtgaagcacaaactaccgacagtgatgatgtcatagtgccacccatgtctcagaaatatcctaaggcagattcagagaagatgtgcattgaaattgtctccctggccttctacccagaggcagaagtgatgtctgatgagaacataaaacaggtgtatgtggagtacaaattctacgacctacccttgtcggagacagagactccagtgtccctaaggaagcctagggcaggagaagaaatccactttcactttagcaaggtaatagacctggacccacaggagcagcaaggccgaaggcggtttctgttcgacatgctgaatggacaagatcctgatcaaggacatttaaagtttacagtggtaagtgatcctctggatgaagaaaagaaagaatgtgaagaagtgggatatgcatatcttcaactgtggcagatcctggagtcaggaagagatattctagagcaagagctagacattgttagccctgaagatctggctaccccaataggaaggctgaaggtttcccttcaagcagctgctgtcctccatgctatttacaaggagatgactgaagatttgttttcatgaaggaacaagtgctattccaatctaaaagtctctgagggaaccatagtaaaaagtctcttataaagttagcttgctataa

SEQ ID NO: 203939 - DNA, 3861 bp, Artificial Sequence
  derived and/or modified sequence
atgagccacctggtggaccccaccagcggcgacctgcccgtgagagacatcgacgccatccccctggtgctgcccgccagcaagggcaagaacatgaagacccagccccccctgagcagaatgaacagagaggagctggaggacagcttcttcagactgagagaggaccacatgctggtgaaggagctgagctggaagcagcaggacgagatcaagagactgagaaccaccctgctgagactgaccgccgccggcagagacctgagagtggccgaggaggccgcccccctgagcgagaccgccagaagaggccagaaggccggctggagacagagactgagcatgcaccagagaccccagatgcacagactgcagggccacttccactgcgtgggccccgccagccccagaagagcccagcccagagtgcaggtgggccacagacagctgcacaccgccggcgcccccgtgcccgagaagcccaagagaggccccagagacagactgagctacaccgccccccccagcttcaaggagcacgccaccaacgagaacagaggcgaggtggccagcaagcccagcgagctggtgagcggcagcaacagcatcatcagcttcagcagcgtgatcagcatggccaagcccatcggcctgtgcatgcccaacagcgcccacatcatggccagcaacaccatgcaggtggaggagccccccaagagccccgagaagatgtggcccaaggacgagaacttcgagcagagaagcagcctggagtgcgcccagaaggccgccgagctgagagccagcatcaaggagaaggtggagctgatcagactgaagaagctgctgcacgagagaaacgccagcctggtgatgaccaaggcccagctgaccgaggtgcaggaggcctacgagaccctgctgcagaagaaccagggcatcctgagcgccgcccacgaggccctgctgaagcaggtgaacgagctgagagccgagctgaaggaggagagcaagaaggccgtgagcctgaagagccagctggaggacgtgagcatcctgcagatgaccctgaaggagttccaggagagagtggaggacctggagaaggagagaaagctgctgaacgacaactacgacaagctgctggagagcatgctggacagcagcgacagcagcagccagccccactggagcaacgagctgatcgccgagcagctgcagcagcaggtgagccagctgcaggaccagctggacgccgagctggaggacaagagaaaggtgctgctggagctgagcagagagaaggcccagaacgaggacctgaagctggaggtgaccaacatcctgcagaagcacaagcaggaggtggagctgctgcagaacgccgccaccatcagccagccccccgacagacagagcgagcccgccacccaccccgccgtgctgcaggagaacacccagatcgagcccagcgagcccaagaaccaggaggagaagaagctgagccaggtgctgaacgagctgcaggtgagccacgccgagaccaccctggagctggagaagaccagagacatgctgatcctgcagagaaagatcaacgtgtgctaccaggaggagctggaggccatgatgaccaaggccgacaacgacaacagagaccacaaggagaagctggagagactgaccagactgctggacctgaagaacaacagaatcaagcagctggagggcatcctgagaagccacgacctgcccaccagcgagcagctgaaggacgtggcctacggcaccagacccctgagcctgtgcctggagaccctgcccgcccacggcgacgaggacaaggtggacatcagcctgctgcaccagggcgagaacctgttcgagctgcacatccaccaggccttcctgaccagcgccgccctggcccaggccggcgacacccagcccaccaccttctgcacctacagcttctacgacttcgagacccactgcacccccctgagcgtgggcccccagcccctgtacgacttcaccagccagtacgtgatggagaccgacagcctgttcctgcactacctgcaggaggccagcgccagactggacatccaccaggccatggccagcgagcacagcaccctggccgccggctggatctgcttcgacagagtgctggagaccgtggagaaggtgcacggcctggccaccctgatcggcgccggcggcgaggagttcggcgtgctggagtactggatgagactgagattccccatcaagcccagcctgcaggcctgcaacaagagaaagaaggcccaggtgtacctgagcaccgacgtgctgggcggcagaaaggcccaggaggaggagttcagaagcgagagctgggagccccagaacgagctgtggatcgagatcaccaagtgctgcggcctgagaagcagatggctgggcacccagcccagcccctacgccgtgtacagattcttcaccttcagcgaccacgacaccgccatcatccccgccagcaacaacccctacttcagagaccaggccagattccccgtgctggtgaccagcgacctggaccactacctgagaagagaggccctgagcatccacgtgttcgacgacgaggacctggagcccggcagctacctgggcagagccagagtgcccctgctgcccctggccaagaacgagagcatcaagggcgacttcaacctgaccgaccccgccgagaagcccaacggcagcatccaggtgcagctggactggaagttcccctacatcccccccgagagcttcctgaagcccgaggcccagaccaagggcaaggacaccaaggacagcagcaagatcagcagcgaggaggagaaggccagcttccccagccaggaccagatggccagccccgaggtgcccatcgaggccggccagtacagaagcaagagaaagcccccccacggcggcgagagaaaggagaaggagcaccaggtggtgagctacagcagaagaaagcacggcaagagaatcggcgtgcagggcaagaacagaatggagtacctgagcctgaacatcctgaacggcaacacccccgagcaggtgaactacaccgagtggaagttcagcgagaccaacagcttcatcggcgacggcttcaagaaccagcacgaggaggaggagatgaccctgagccacagcgccctgaagcagaaggagcccctgcaccccgtgaacgacaaggagagcagcgagcagggcagcgaggtgagcgaggcccagaccaccgacagcgacgacgtgatcgtgccccccatgagccagaagtaccccaaggccgacagcgagaagatgtgcatcgagatcgtgagcctggccttctaccccgaggccgaggtgatgagcgacgagaacatcaagcaggtgtacgtggagtacaagttctacgacctgcccctgagcgagaccgagacccccgtgagcctgagaaagcccagagccggcgaggagatccacttccacttcagcaaggtgatcgacctggacccccaggagcagcagggcagaagaagattcctgttcgacatgctgaacggccaggaccccgaccagggccacctgaagttcaccgtggtgagcgaccccctggacgaggagaagaaggagtgcgaggaggtgggctacgcctacctgcagctgtggcagatcctggagagcggcagagacatcctggagcaggagctggacatcgtgagccccgaggacctggccacccccatcggcagactgaaggtgagcctgcaggccgccgccgtgctgcacgccatctacaaggagatgaccgaggacctgttcagctag

SEQ ID NO: 203940 - protein, 362 aa, Artificial Sequence
  derived and/or modified sequence
MQAERGARGGRGRRPGRGRPGGDRHSERPGAAAAVARGGGGGGGGDGGGRRGRGRGRGFRGARGGRGGGGAPRGSRREPGGWGAGASAPVEDDSDAETYGEENDEQGNYSKRKIVSNWDRYQDIEKEVNNESGESQRGTDFSVLLSSAGDSFSQFRFAEEKEWDSEASCPKQNSAFYVDSELLVRALQELPLCLRLNVAAELVQGTVPLEVPQVKPKRTDDGKGLGMQLKGPLGPGGRGPIFELKSVAAGCPVLLGKDNPSPGPSRDSQKPTSPLQSAGDHLEEELDLLLNLDAPIKEGDNILPDQTSQDLKSKEDGEVVQEEEVCAKPSVTEEKNMEPEQPSTSKNVTEEELEDWLDSMIS

SEQ ID NO: 203941 - DNA, 303 bp, Artificial Sequence
  derived and/or modified sequence
tgtgagaccccccggctgcctgagatcgccctgcgggccctgcccaggcctggggtgagcagcctgggcaccatcctgtgtgtgcccagcgtgcctgtgggccccatcgtgctgaccagcgccaccccagagagcagccgcttcaccaggcctgcccccagcacagtgcctgaggcccaccgccacagccgcatcctgcggctggcccctgtgccctgccgctgctaccggcccccagccccagcccacaccagccgcagcaccagcctcttctatgagagccccagcaccttcaacgtgtag

SEQ ID NO: 203942 - DNA, 1089 bp, Artificial Sequence
  derived and/or modified sequence
atgcaggcagagcgcggagccagaggggggcggggacgtcggcccggccgggggcgacctggtggagacaggcacagtgagcgacctggtgcagcagccgcggttgctcggggggggggcgggggcgggggcggtgacggcggagggaggagaggaagaggacgaggacgtggcttcagaggcgccaggggaggacggggcggagggggggccccgagagggagtaggcgagagcctggtggttggggtgcaggggcgtccgcccccgtagaggacgatagcgacgccgagacctacggtgaagaaaacgatgagcagggaaattactcaaagaggaagatcgtgtcaaattgggatcgataccaagacattgagaaagaagtgaacaacgagagtggagaatcacagaggggcaccgacttttctgtcctactgtcttccgccggagactcattctctcagttccgctttgcggaggaaaaggaatgggatagtgaggccagttgtcctaaacagaacagcgcgttttatgttgactctgagttgcttgtgcgtgcgcttcaagagttaccactttgtcttagattgaacgtcgcagcagagctcgtccagggcactgtcccccttgaagttccccaagttaagcctaagagaacggacgacggcaaaggacttggtatgcagctgaagggacccctaggacccgggggcagaggaccgatattcgagctgaaatcagttgcggctgggtgccccgtattactgggcaaggacaatccttcccctggtcctagtagggattcccagaagcccactagcccccttcaaagcgccggtgatcatttagaggaggagctggacctgctcttaaatttggacgcgccaatcaaggaaggcgataatatccttccagatcagacaagtcaggacttgaaatccaaagaggatggggaagtggtgcaggaagaagaggtgtgcgcaaagccaagcgtgacagaggagaaaaacatggaacccgaacaaccttctacgtcaaagaacgtgacggaggaggagctagaggactggttagactcaatgatctcctag

SEQ ID NO: 203943 - DNA, 1089 bp, Artificial Sequence
  derived and/or modified sequence
atgcaggccgagcggggggcccggggcggccggggcagaagacctggccggggccggcctggaggagacagacacagcgagaggcctggagctgctgctgctgtggcccggggcggcggcggcggcggcggcggagatggcggcggccggcggggccggggccggggccggggcttccggggggcccggggcggccggggcggcggcggggccccccggggcagccggcgggagcccggcggctggggcgctggggccagcgcccctgtggaggatgacagtgatgctgagacctatggagaggagaatgatgagcagggcaactacagcaagaggaagatcgtgagcaactgggaccgctaccaggacatcgagaaggaggtgaacaatgaaagtggagagagccagaggggcacagacttctctgtgctgctgagcagcgctggggacagcttcagccagttccgctttgctgaggagaaggagtgggacagcgaggccagctgccccaagcagaacagcgccttctacgtggacagcgagctgctggtgcgggccctgcaggagctgcccctgtgcctgcggctgaatgtggccgctgagctggtgcagggcaccgtgcccctggaggtgccccaggtgaagcccaagaggacagatgatggcaagggcctgggcatgcagctgaagggccccctgggccctgggggccggggccccatctttgagctgaagtctgtggccgccggctgccctgtgctgctgggcaaggacaaccccagccctggccccagccgggacagccagaagcccaccagccccctgcagagcgctggggaccacctggaggaggagctggacctgctgctgaacctggatgcccccatcaaggagggggacaacatcctgcctgaccagaccagccaggacctgaagagcaaagaagatggagaggtggtgcaggaggaggaggtgtgtgccaagcccagcgtgacagaggagaagaacatggagcctgagcagcccagcaccagcaagaatgtgacagaggaggagctggaggactggctggacagcatgatctcctag

SEQ ID NO: 203944 - DNA, 1089 bp, Artificial Sequence
  derived and/or modified sequence
atgcaggccgagcggggcgcccggggcggccggggccggcggcccgggcgcggaagaccggggggggaccgtcactctgaaagacctggcgctgccgcggccgtggccagaggaggagggggtggcgggggaggcgacggcgggggcaggagagggcgtgggagaggccgcggatttcgaggcgctcgaggaggccgaggcgggggaggtgcgcccagggggtcaaggcgggagccaggaggttggggagcaggggcttcagcccccgtggaagacgactctgatgcagaaacctacggagaagagaatgacgagcaggggaactacagtaagagaaaaatagtgagcaattgggatcggtaccaggatatagagaaggaggtaaacaacgagtccggcgagagccagagggggactgatttcagcgttttactaagcagcgccggcgacagcttttcccagtttcgctttgccgaggaaaaagagtgggacagcgaggcttcctgccctaagcagaacagcgccttctacgtggatagtgaattacttgtgcgagccttacaggagctccccctttgcttacgattaaatgtagccgccgaactggtgcagggcacagtacctctggaagttccacaggtgaaacctaagcggacagacgatggcaaaggattgggtatgcagttgaagggaccacttggcccaggcggtaggggccccattttcgagctcaaaagcgtggctgccggctgtccagtcctcttgggcaaagataacccaagtccaggtcccagtagagactcccagaagccaacatctcctctccaatcagccggggaccaccttgaggaagagttggatctactgttgaacctggacgcccccattaaagaaggagacaacatactgcccgatcagacatcgcaggatctgaagtccaaggaagatggagaagtcgtccaggaggaggaggtttgtgccaagccgtccgtgacagaggagaaaaacatggaaccggagcagccatctactagcaaaaatgtgacagaagaggagttagaggactggttggactccatgattagctag

SEQ ID NO: 203945 - DNA, 1089 bp, Artificial Sequence
  derived and/or modified sequence
atgcaggctgaaagaggagcccgaggcggtcgcggtcggaggcctggacgcggaagaccgggaggcgaccgtcactccgagaggccaggcgcagccgctgccgtggcccgtggagggggaggaggcggaggcggtgatggtggaggtagacggggtcggggacgtggcagaggtttccgcggagccaggggcggtcgcggaggcggaggggcaccacgcggatctagacgcgaacctggcggatggggcgcaggggcttccgcgccagtcgaagacgacagcgacgcagaaacatacggagaagaaaatgacgaacagggcaactactctaagcgtaagattgtcagtaattgggaccgctatcaggacatagagaaagaagtgaacaacgaatccggcgagtcccagcggggaaccgatttctctgtgttgctgtccagcgcaggagatagtttctcacaattcaggttcgccgaagaaaaagaatgggatagtgaagcgtcttgcccaaaacagaacagtgccttctacgttgacagcgagctccttgtacgtgcattacaggagctgccgctctgtctcagacttaatgtggcagcggaactggttcagggtacagtgccactcgaggtgcctcaagtgaaaccaaaaagaaccgatgacggcaagggcctcgggatgcagctgaaggggccacttggtcctggaggacgcggacccatcttcgagttaaaaagcgtggctgccggatgtccagttctgctggggaaagacaatcctagtccaggaccttcgcgcgacagtcaaaagcccacaagtcctcttcagtccgccggtgaccacctcgaagaggagctagatctgttgcttaatttggacgcccctataaaagagggagataatattctccctgatcagacaagtcaggacctgaagtcgaaggaggacggcgaagtggttcaggaggaggaggtgtgcgcgaagccctccgtaactgaagagaagaacatggaacctgagcagccaagcacctcaaagaacgtgaccgaagaggagctggaggactggttggactccatgatatcatag

SEQ ID NO: 203946 - DNA, 1605 bp, Artificial Sequence
  derived and/or modified sequence
gcaccccgcgcctcgctgctaccgggcgcctttcgctcgcggctcctccgtgcggcccgcttccggtggggccagggcgtctccgccgcagctcggctcccgcgcgctcagcaccgccagcggcggccagatgcaggcggagcgaggagctcggggaggccgtgggcggcggccaggccgcggccggcctggcggagatcgccacagcgagcggcccggagccgcagcggcggtagccagaggcggcggcggaggcggcggcggggacggaggcggacgccggggccgtggccgtggccggggcttccgcggcgctcgcggaggccgaggaggaggaggcgccccgcgaggcagccgccgggagccgggaggctggggcgcaggggccagcgcgccggttgaagatgacagcgatgcagagacctatggagaagagaatgatgaacagggaaattattctaaaagaaagattgtctctaactgggatcgatatcaagatattgaaaaagaggtcaataatgaaagtggagagtcacagaggggaacagatttcagtgtcctccttagctctgcaggggactcattctcacagttccggtttgctgaggagaaagaatgggatagtgaagcttcttgtccaaaacagaattcagcattttatgtggatagtgagttattggttcgagcccttcaagagctgcctctctgcctccgactcaacgttgctgccgaactggtccagggtacagttcctttagaggttcctcaggtgaaaccaaagagaactgatgatggcaagggattagggatgcagttaaaggggcccttggggcctggaggaagggggcccatctttgagctgaaatctgtggctgctggctgccctgtgttgctgggcaaagacaacccaagcccgggtccttcaagggattctcagaaacccacttccccactgcagtcagcaggagaccatttggaagaagaactagatctgttgcttaatttagatgcacctataaaagagggagataacatcttaccagatcagacgtctcaggacctgaaatccaaggaagatggggaggtggtccaagaggaagaagtttgtgcaaaaccatctgtgactgaagaaaaaaacatggaacctgagcaaccaagtacctccaaaaatgttaccgaggaagagctggaagactggttggacagcatgatttcctaaaaaggggaaaaaaagtgcctgaagcaaatcttggttgccttctaacggcaggtgggcataaggctgtccttcaggaccagccagtttacaagcatgtctcaagctagtgtgttccattatgctcacagcagtaaatgcctacctctgtgtttgacatctgaaagaatacattgaagcagcttgttgcatttgtttttctggcttagtaatctaatagatttccttaagggcaggagatagactctggcccttgtttctagcctccttccttgcagtgtttacaacatagccagtgtttacagcatagcagatgctgctgctgattaagagaatagatgcaaacaaggcatgcatttggccaaaataaacaaatgctggtctgtcca

SEQ ID NO: 203947 - DNA, 1089 bp, Artificial Sequence
  derived and/or modified sequence
atgcaggccgagagaggcgccagaggcggcagaggcagaagacccggcagaggcagacccggcggcgacagacacagcgagagacccggcgccgccgccgccgtggccagaggcggcggcggcggcggcggcggcgacggcggcggcagaagaggcagaggcagaggcagaggcttcagaggcgccagaggcggcagaggcggcggcggcgcccccagaggcagcagaagagagcccggcggctggggcgccggcgccagcgcccccgtggaggacgacagcgacgccgagacctacggcgaggagaacgacgagcagggcaactacagcaagagaaagatcgtgagcaactgggacagataccaggacatcgagaaggaggtgaacaacgagagcggcgagagccagagaggcaccgacttcagcgtgctgctgagcagcgccggcgacagcttcagccagttcagattcgccgaggagaaggagtgggacagcgaggccagctgccccaagcagaacagcgccttctacgtggacagcgagctgctggtgagagccctgcaggagctgcccctgtgcctgagactgaacgtggccgccgagctggtgcagggcaccgtgcccctggaggtgccccaggtgaagcccaagagaaccgacgacggcaagggcctgggcatgcagctgaagggccccctgggccccggcggcagaggccccatcttcgagctgaagagcgtggccgccggctgccccgtgctgctgggcaaggacaaccccagccccggccccagcagagacagccagaagcccaccagccccctgcagagcgccggcgaccacctggaggaggagctggacctgctgctgaacctggacgcccccatcaaggagggcgacaacatcctgcccgaccagaccagccaggacctgaagagcaaggaggacggcgaggtggtgcaggaggaggaggtgtgcgccaagcccagcgtgaccgaggagaagaacatggagcccgagcagcccagcaccagcaagaacgtgaccgaggaggagctggaggactggctggacagcatgatcagctag

SEQ ID NO: 203948 - protein, 538 aa, Artificial Sequence
  derived and/or modified sequence
MASDPIFTLAPPLHCHYGAFPPNASGWEQPPNASGVSVASAALAASAASRVATSTDPSCSGFAPPDFNHCLKDWDYNGLPVLTTNAIGQWDLVCDLGWQVILEQILFILGFASGYLFLGYPADRFGRRGIVLLTLGLVGPCGVGGAAAGSSTGVMALRFLLGFLLAGVDLGVYLMRLELCDPTQRLRVALAGELVGVGGHFLFLGLALVSKDWRFLQRMITAPCILFLFYGWPGLFLESARWLIVKRQIEEAQSVLRILAERNRPHGQMLGEEAQEALQDLENTCPLPATSSFSFASLLNYRNIWKNLLILGFTNFIAHAIRHCYQPVGGGGSPSDFYLCSLLASGTAALACVFLGVTVDRFGRRGILLLSMTLTGIASLVLLGLWDCEHPIFPTVWAQQGNPNRDLNEAAITTFSVLGLFSSQAAAILSTLLAAEVIPTTVRGRGLGLIMALGALGGLSGPAQRLHMGHGAFLQHVVLAACALLCILSIMLLPETKRKLLPEVLRDGELCRRPSLLRQPPPTRCDHVPLLATPNPAL

SEQ ID NO: 203949 - DNA, 1617 bp, Artificial Sequence
  derived and/or modified sequence
atggcctccgatcccattttcacgctcgccccacctcttcattgccattatggcgcgttcccgccaaacgccagcggatgggagcagccaccaaatgcatctggcgtgagtgtggcaagcgccgcactcgctgcttccgcggctagccgcgtagccacctccactgacccatcttgcagcgggtttgctcccccagacttcaaccactgtcttaaggactgggactacaatgggctcccagtgctgaccacaaacgctattggacagtgggatctggtgtgtgatctgggatggcaggtgatcttggagcagatcttattcatcctcggctttgcctctggctacctgtttctgggctatcccgctgataggtttgggcgacgcggcattgtactccttaccctcggcctggtcgggccttgcggggtgggcggtgcagccgccggatcgtccacaggggtaatggcattacggtttttgctcgggtttctcctcgccggcgtagatctgggtgtgtatttgatgcgattggagctgtgcgaccctactcagagattacgcgtggctttggctggggaactcgtcggtgttggaggtcattttctctttcttggccttgctctggtctccaaagattggagatttctccagcgaatgatcaccgccccttgcattctgttcctcttttacggttggcccggcctttttcttgaaagtgcccgctggcttattgttaaacggcagatcgaagaagcccagtcagtgctgagaatactcgccgaaagaaatagacctcacggccagatgctgggggaagaagcccaggaggcgctacaggacttagagaacacctgtccgttgcccgccacgagcagcttcagcttcgcgagtttgttgaactatcgtaatatctggaaaaatctgctgatcctagggttcacaaacttcatcgctcatgccatccgacactgctatcagccagtcggtggcggcggcagtcccagtgacttttacttatgcagcttgctggcatccggtacggcagcccttgcctgtgtttttctgggggtgactgtggatcggttcggccggcgagggattctcctgctgtctatgactctgacaggcatcgccagtctggtattattaggactatgggattgcgagcatccaatttttcccaccgtctgggctcaacaaggcaaccctaacagggacctcaacgaagctgcgatcacaacattttctgttttgggtctgtttagttcccaggccgccgccatcctgagcactttgctggcagccgaggtgattcccaccacagttagaggacgaggtctggggctaattatggctctgggagctctcggcggcctctctgggcctgctcaacgcctgcacatgggacacggagctttcctgcagcatgtggtcctcgccgcctgcgctctcctgtgtatattgagtataatgctgctacccgaaactaagcgcaagctgttgcccgaggtccttcgggacggtgagctttgtcggcggccctctctcctgagacagccacctcccacacgatgcgaccacgtgccgcttctggctacacccaatcccgctctctag

SEQ ID NO: 203950 - DNA, 1617 bp, Artificial Sequence
  derived and/or modified sequence
atggccagtgaccccatcttcaccctggccccacccctgcactgccactatggagccttccccccaaatgccagcggctgggagcagcccccaaatgccagcggcgtgtctgtggccagcgctgccctggccgccagcgctgccagccgggtggccaccagcacagaccccagctgcagcggctttgcccccccagacttcaaccactgcctgaaggactgggactacaacggcctgcctgtgctgaccaccaatgccatcggccagtgggacctggtgtgtgacctgggctggcaggtgatcctggagcagatcctcttcatcctgggctttgccagcggctacctgttcctgggctacccagctgacagatttggaagaagaggcatcgtgctgctgaccctgggcctggtgggcccctgtggggtgggcggcgctgctgctggcagcagcactggagtgatggccctgcgcttcctgctgggcttcctgctggccggcgtggacctgggcgtgtacctgatgaggctggagctgtgtgaccccacccagaggctgcgggtggccctggccggggagctggtgggcgtgggcggccacttcctgttcctgggcctggccctggtgtccaaggactggaggttcctgcagaggatgatcacagccccctgcatcctcttcctgttctacggctggccaggcctcttcctggagagcgcccgctggctgattgtgaagaggcagatcgaggaggcccagagcgtgctgcgcatcctggccgagaggaaccggccccacggccagatgctgggggaggaggcccaggaggccctgcaggacctggagaacacctgccccctgcctgccaccagcagcttctcctttgccagcctgctgaactacagaaacatctggaagaacctgctgatcctgggcttcaccaacttcatcgcccacgccatccgccactgctaccagcctgtgggcggcggcggcagccccagcgacttctacctgtgcagcctgctggccagcggcacagctgccctggcctgtgtgttcctgggcgtgacagtggaccgcttcggccggcggggcatcctgctgctgtccatgaccctgactggaattgccagcctggtgctgctgggcctgtgggactgtgagcaccccatcttccccaccgtgtgggcccagcagggcaaccccaacagagacctgaatgaggccgccatcaccaccttctctgtgctgggcctcttcagcagccaggccgccgccatcctgagcaccctgctggccgctgaggtgatccccaccaccgtgcggggccggggcctgggcctcatcatggccctgggcgccctgggcggcctgagcggccctgcccagaggctgcacatgggccacggggccttcctgcagcacgtggtgctggccgcctgtgccctgctgtgcatcctgagcatcatgctgctgcctgagaccaagaggaagctgctgcctgaggtgctgagagatggagagctgtgccggcggcccagcctgctgcggcagcccccacccacccgctgtgaccacgtgcccctgctggccacccccaacccagccctgtag

SEQ ID NO: 203951 - DNA, 1617 bp, Artificial Sequence
  derived and/or modified sequence
atggccagcgaccccatcttcaccctggccccccccctgcactgccactatggagcattcccaccaaacgcgtccggttgggaacagccaccaaatgcatccggggtttctgtcgcaagcgccgccctggccgcaagtgcagcatccagagtcgccactagtaccgatcccagctgctctggctttgcccctccagatttcaatcactgtctaaaggattgggactataacggcttgccagttctgactaccaatgctattggtcagtgggacctggtttgcgacttggggtggcaggtcattctggagcagattctgttcattctggggttcgcaagcggctacctttttctcggatatccagcagatcgctttggcagaagggggatcgtgctcttaacactgggcttggtggggccctgtggggtcggcggggcagctgccggctcttctaccggtgtaatggctcttcgcttcttgcttggctttcttctcgctggcgtcgatctgggggtttatctcatgagactggaactgtgtgaccccacccaacgcctgcgggttgccctggccggagaactggttggcgtcggagggcacttcctattcctcggactggcattagttagtaaggactggcgattcctacaaagaatgattacagcaccttgtatcctgtttcttttctatgggtggccgggattgtttctggagtccgcccgatggctcattgtgaaacgtcagattgaggaagcacaaagtgtgctgcgaatcctggcagagcgaaaccgcccgcatgggcagatgctcggagaagaggcgcaggaggcactgcaggatctggagaacacttgtcctttacctgcaaccagctcgttttccttcgcatccttgctgaactaccggaatatatggaagaacctcctcatattggggtttacaaattttattgcccacgcaattaggcattgctatcagcccgtgggcggcggcggatctcctagcgatttttatctctgtagcctgctcgccagcggcactgctgctctggcatgtgtgttcctgggagtgacagtggatcggtttggccgtcgaggaatcctcctcctaagcatgaccctgacaggtattgcctcactggtgctgttaggcctgtgggactgcgagcaccccatattcccgactgtgtgggcccagcagggcaatcctaaccgcgacttaaacgaagccgctattacgacgttctctgtgcttggattgttttctagccaagcagctgcaatcctcagcaccttgctcgccgcggaagtgatcccgaccactgttagaggaagaggcctgggcctgattatggccttaggagcccttgggggtctttcgggtcccgcccagcgtttgcatatgggacatggagcatttctgcagcacgtggttctggcagcatgcgctctcctgtgtatactttccattatgctgctgccagagaccaagaggaagctcttacccgaggttttgcgcgacggagagctttgcaggagaccttcactcctgaggcagccaccaccgacccggtgcgaccacgtcccgctgttggccacgcctaatccagccctgtag

SEQ ID NO: 203952 - DNA, 1617 bp, Artificial Sequence
  derived and/or modified sequence
atggccagtgacccaatttttactctcgcgccacctctccactgtcactatggggctttcccgcctaacgccagcgggtgggagcagccacccaatgcctcaggtgttagcgtagcttcggctgctctcgcagcttccgccgcatctcgcgtcgcaacatctacagatccgtcttgctccggattcgctccaccagactttaatcactgcttaaaggactgggactacaacgggctgcccgttcttacgactaacgccatcggtcagtgggacctggtgtgtgatcttgggtggcaggttatcctcgagcaaatactttttatcttggggtttgcctctggctatctgtttctggggtacccagcagatagattcggccgtcgaggcatcgtcctgctgactctcggcctggtgggtccatgcggagttggtggagcagccgctgggagttctaccggagtgatggcgctgaggtttctgctgggctttctcctcgccggagtcgacctgggtgtgtatcttatgagactggagctctgcgatcccacacagaggctgcgggtcgctctggccggagaactggtgggcgtggggggtcactttttgttcctggggctagccctagtaagcaaggattggcgatttctgcagcgtatgataaccgccccatgcatcctgtttcttttttatgggtggcctggactctttctcgaatccgccagatggttaattgttaaaaggcagattgaagaagcgcaatcagtcctgcgcattttggccgagcgcaataggccccatggacaaatgctgggagaggaagcgcaggaagccctccaggacctggaaaacacctgtcctctccctgccacgtccagttttagttttgcctccctattgaactatcggaatatctggaaaaacctcctgatactggggttcaccaactttatcgctcacgcaatcagacattgttaccagccggttggaggtggcggaagcccttcagatttctacctgtgctccttactggcctcaggaactgccgctttggcctgcgttttccttggggttaccgtggaccgcttcggtaggaggggtatcttactgctgtctatgactctcactggtatcgccagcctggtcctactgggtctttgggattgtgagcatcccatttttcctaccgtgtgggcccagcaaggcaaccccaatcgggatctcaacgaggctgcgatcactaccttctctgtactaggtctatttagctctcaggccgcagccatcctcagcacgctcctggctgcggaggtaattcctaccaccgtgaggggccgtggccttggcctcatcatggccctgggcgcattgggtggattaagcggaccagcccagagattgcacatgggtcacggtgcattcctccaacatgtcgtcctggccgcttgtgccctgctgtgcatactgagtattatgctcttgcccgaaacaaaaagaaagctactaccagaggtccttagagatggtgaactatgcaggcggccaagtctgctgagacagccgcctccaacccgctgtgatcacgtccctctgctggcaactccgaatcctgccctttag

SEQ ID NO: 203953 - DNA, 1617 bp, Artificial Sequence
  derived and/or modified sequence
atggccagcgaccccatcttcaccctggccccccccctgcactgccactacggcgccttcccccccaacgccagcggctgggagcagccccccaacgccagcggcgtgagcgtggccagcgccgccctggccgccagcgccgccagcagagtggccaccagcaccgaccccagctgcagcggcttcgccccccccgacttcaaccactgcctgaaggactgggactacaacggcctgcccgtgctgaccaccaacgccatcggccagtgggacctggtgtgcgacctgggctggcaggtgatcctggagcagatcctgttcatcctgggcttcgccagcggctacctgttcctgggctaccccgccgacagattcggcagaagaggcatcgtgctgctgaccctgggcctggtgggcccctgcggcgtgggcggcgccgccgccggcagcagcaccggcgtgatggccctgagattcctgctgggcttcctgctggccggcgtggacctgggcgtgtacctgatgagactggagctgtgcgaccccacccagagactgagagtggccctggccggcgagctggtgggcgtgggcggccacttcctgttcctgggcctggccctggtgagcaaggactggagattcctgcagagaatgatcaccgccccctgcatcctgttcctgttctacggctggcccggcctgttcctggagagcgccagatggctgatcgtgaagagacagatcgaggaggcccagagcgtgctgagaatcctggccgagagaaacagaccccacggccagatgctgggcgaggaggcccaggaggccctgcaggacctggagaacacctgccccctgcccgccaccagcagcttcagcttcgccagcctgctgaactacagaaacatctggaagaacctgctgatcctgggcttcaccaacttcatcgcccacgccatcagacactgctaccagcccgtgggcggcggcggcagccccagcgacttctacctgtgcagcctgctggccagcggcaccgccgccctggcctgcgtgttcctgggcgtgaccgtggacagattcggcagaagaggcatcctgctgctgagcatgaccctgaccggcatcgccagcctggtgctgctgggcctgtgggactgcgagcaccccatcttccccaccgtgtgggcccagcagggcaaccccaacagagacctgaacgaggccgccatcaccaccttcagcgtgctgggcctgttcagcagccaggccgccgccatcctgagcaccctgctggccgccgaggtgatccccaccaccgtgagaggcagaggcctgggcctgatcatggccctgggcgccctgggcggcctgagcggccccgcccagagactgcacatgggccacggcgccttcctgcagcacgtggtgctggccgcctgcgccctgctgtgcatcctgagcatcatgctgctgcccgagaccaagagaaagctgctgcccgaggtgctgagagacggcgagctgtgcagaagacccagcctgctgagacagcccccccccaccagatgcgaccacgtgcccctgctggccacccccaaccccgccctgtag

SEQ ID NO: 203954 - DNA, 1617 bp, Artificial Sequence
  derived and/or modified sequence
atggcgtccgaccctatattcacattggccccgcccttacattgccattatggcgcattccctccaaatgcttcaggttgggaacagccacccaatgcaagcggcgtaagcgtggcgagcgcggctctcgctgcatctgcagcctctcgcgtcgctaccagtaccgatccttcatgctctggcttcgcaccgcctgactttaaccattgcctgaaagattgggattataacggcttgcccgtcctaaccaccaacgcaattggtcagtgggaccttgtctgcgacctcggctggcaggtcatccttgagcagatacttttcatattgggtttcgcaagcggctacctctttctgggatatcccgcggacaggtttggaagacgcggcattgtccttctgacccttggcctggttggtccttgtggagtgggcggagctgctgctgggtcttcaacgggcgtaatggccttgagattcttgctgggttttctcctggctggcgtcgacctgggagtttatctgatgagactcgagctctgtgacccgacccagagacttcgagtcgctctggctggagagcttgtgggcgtgggaggccacttcctttttctgggactcgcgctggtatccaaggattggcgcttcttacagcgcatgattacagccccatgtattctgttcctgttctacggctggcccgggctgttcctggagtccgcgcgttggctgatcgtgaaacgtcagatcgaggaggctcagtctgtgctgaggattctggcagagcggaaccgtcctcacgggcaaatgttgggagaagaagcgcaggaggcactgcaagacctggagaatacctgtcccttaccagctacatcatccttttcgttcgcctccctgcttaactatcggaatatctggaaaaatctcctgatcctgggctttacgaatttcatagcccatgcaatcaggcactgttatcagccagttggcggtgggggctccccctcggatttttatctctgctccctcctggcctccgggaccgccgcactggcttgtgtttttcttggtgttaccgttgacaggtttggacggcgcggaatcctactgctcagtatgacactgaccggcatcgcatcactggtgctcctggggctgtgggactgcgagcatcccatcttcccaaccgtgtgggcgcagcagggcaaccccaaccgcgacctgaatgaggctgccataactaccttcagcgtgctcggactcttctccagtcaggcagcggccattctgagtaccctgctagccgcagaagtcataccaaccacagttagaggtcggggcctgggcctgattatggcactgggggctctgggaggcctgagcgggccagcgcaacgtttgcatatgggccacggagccttcctccagcacgtagtgcttgctgcctgtgccctgctctgcatcctgagcatcatgctgctgcccgagacaaaacgaaaacttctgcctgaggtcctccgggatggggaactttgccgccgaccttctctactgcggcagcccccccccacgcgctgcgaccacgtaccccttctcgcgacaccgaatcctgctctgtag

SEQ ID NO: 203955 - DNA, 1617 bp, Artificial Sequence
  derived and/or modified sequence
atggccagcgaccccatcttcaccctggccccccccctgcactgccattacggagctttccctcccaacgcaagtggatgggaacagcctcctaatgcctctggcgtctctgtggcctcggccgctctggcagctagcgccgcttcacgagtggcaacaagtaccgacccttcgtgcagcggattcgctccacctgattttaatcattgcctgaaggattgggactacaacggcctacctgtgttgacaaccaatgcaatcggacagtgggatttagtctgcgatcttgggtggcaagtgatactggagcagattttgtttatcctgggcttcgcaagcggctatttgtttctgggctatcccgccgataggttcggaagacgggggatagtgctgcttactctcgggcttgtcggtccttgcggcgtgggaggcgccgctgccgggtctagtactggagtcatggcgctccgcttcctgctggggttcctcctggcgggggtggatttgggcgtctacctgatgcgtcttgaactctgtgacccaacccagagacttcgcgtcgccttagcaggggaactggtgggagtgggtggccatttcctgtttcttggcctcgccctcgtcagtaaggattggaggttcctccaacgtatgatcacggccccctgtatcctctttctattctacggatggcccggactgttcctcgagagcgcccggtggcttattgtgaaaaggcaaattgaggaggctcagtctgtactgcgcattctggcagagcgaaatagaccccatggacagatgctgggggaagaggcacaggaggccctgcaggatcttgagaacacatgcccactcccagccacatcctcattttcgtttgcttcgctgctgaactacaggaatatatggaagaacttgctgatcctcggctttactaatttcatcgcccatgccattcggcattgctaccagccagttggtggtggtggatccccctcagacttttatttgtgttcgctcctagccagcggtacagcagcactggcctgcgtgttcctgggggttacagttgataggtttgggagacgcgggattctgctactgtccatgaccttgacggggatcgcctctctagtgctcctgggcctttgggattgtgagcatcccatttttccaaccgtttgggcacaacaaggcaaccctaatagggacctcaacgaagcagctattaccaccttctcagttttaggtttgttttcaagccaagctgctgccatcttaagtaccctgctggcagctgaggtgattcctaccacggtgcgcgggcgaggactgggcctaattatggcgctcggagccctgggaggcctgtcgggtccagcgcagcggttgcatatgggccatggggcctttcttcagcatgtggtcttggcagcgtgcgcactgctttgcatcctttcgattatgctattgccggagacaaagaggaagctcctccccgaggtactccgggacggagagctctgccgtaggccgagtctgctgagacagccaccacccacgcgatgtgaccacgtccctctcctggcaacacccaatcctgctctgtag

SEQ ID NO: 203956 - DNA, 1617 bp, Artificial Sequence
  derived and/or modified sequence
atggcatcagatcctatatttacgctggcccctcctctgcactgtcattatggcgcattccctccgaatgctagcggttgggagcagccaccaaacgccagtggcgtgagcgtggcatccgcagccctggccgcttccgctgcctccagagtggcaactagcacggacccaagctgttccgggttcgccccaccggactttaaccactgtttgaaagactgggactacaacggccttccagttctaaccacaaatgccatcggccagtgggatttggtgtgcgacctgggctggcaggtcattctggagcaaatcttattcattttggggttcgctagtggctatttgttcctgggctaccccgctgaccggttcggtagacggggtatagttctgttgacattaggcctggttggcccttgtggcgtcggaggtgctgcagctggttcttcgacaggagtgatggccctgcgctttttgcttggctttcttctggctggggtcgacctcggggtgtatctgatgaggctagagctctgcgaccctacacagcggttgcgggtagcactagccggagaattggttggcgttggaggccattttctctttcttggactcgcactggtgagcaaagactggcgctttttacagcgcatgatcactgcaccttgcattctatttctgttctacggttggcctgggctgttcctggaaagtgcacggtggctcattgtgaagcgccagattgaagaggcacagtccgttctgagaattctggccgaaagaaataggccccacgggcagatgctgggggaagaagcccaggaagcactccaggacctcgagaatacttgccccctgcccgctacatctagtttctccttcgctagtctgttgaattataggaatatctggaaaaatctcctcatcctgggttttacaaactttattgctcacgccatcaggcactgttaccaaccagtaggtggcggaggtagtccgtccgatttttacctctgctctctcctcgcaagtggaactgcagcattggcatgcgtgtttcttggtgtcacagtggacagatttgggaggcggggtattctcctgctgtccatgaccctgactggcatcgcttctctcgtgctcttaggcctttgggattgcgagcacccgatctttcctacagtgtgggctcaacagggaaatccaaatagggatctgaatgaagctgctatcaccacctttagtgtgctaggattattcagctcgcaggcagccgcaattttatcaacactcctggcagcagaggtcattcccacaactgtgaggggccgaggactgggcctaattatggccctgggcgcactcggcggactcagcggccctgcccagagattgcacatgggtcacggagctttcctacaacacgtcgtgctcgccgcatgtgccctgctgtgcatcctctctatcatgctcttacctgagaccaagcggaagctgttgcccgaagtcttacgcgatggagaactgtgtagaagaccctctctgctcagacagcccccaccaaccaggtgcgaccacgttcccctgctggccacgcctaatcctgccctctag

SEQ ID NO: 203957 - DNA, 2284 bp, Artificial Sequence
  derived and/or modified sequence
cctgactgccttcctagccctccctcccacctgccccctgcccttgctctgcggtttcctccgcttcacccttctcctgccaccccctgccccccaacagcaggtcgggaccctcggagatgcggtgcccacggagcagctgcagggtgagcgggagcgcgagcgggagggggagggagacgcgggcggcgacggactgggcagcagcctgtcgctggccgtgcccccaggccccctcagctttgaggcgctgctcgcccaggtgggggcgctgggcggcggccagcagctgcagctcggcctctgctgcctgccggtgctcttcgtggctctgggcatggcctcggaccccatcttcacgctggcgcccccgctgcattgccactacggggccttcccccctaatgcctctggctgggagcagcctcccaatgccagcggcgtcagcgtcgccagcgctgccctagcagccagcgccgccagccgtgtcgccaccagtaccgacccctcgtgcagcggcttcgccccgccggacttcaaccattgcctcaaggattgggactataatggccttcctgtgctcaccaccaacgccatcggccagtgggatctggtgtgtgacctgggctggcaggtgatcctggagcagatcctcttcatcttgggctttgcctccggctacctgttcctgggttaccccgcagacagatttggccgtcgcgggattgtgctgctgaccttggggctggtgggcccctgtggagtaggaggggctgctgcaggctcctccacaggcgtcatggccctccgattcctcttgggctttctgcttgccggtgttgacctgggtgtctacctgatgcgcctggagctgtgcgacccaacccagaggcttcgggtggccctggcaggggagttggtgggggtgggagggcacttcctgttcctgggcctggcccttgtctctaaggattggcgattcctacagcgaatgatcaccgctccctgcatcctcttcctgttttatggctggcctggtttgttcctggagtccgcacggtggctgatagtgaagcggcagattgaggaggctcagtctgtgctgaggatcctggctgagcgaaaccggccccatgggcagatgctgggggaggaggcccaggaggccctgcaggacctggagaatacctgccctctccctgcaacatcctccttttcctttgcttccctcctcaactaccgcaacatctggaaaaatctgcttatcctgggcttcaccaacttcattgcccatgccattcgccactgctaccagcctgtgggaggaggagggagcccatcggacttctacctgtgctctctgctggccagcggcaccgcagccctggcctgtgtcttcctgggggtcaccgtggaccgatttggccgccggggcatccttcttctctccatgacccttaccggcattgcttccctggtcctgctgggcctgtgggattgtgagcatcctatcttccccacagtgtgggctcaacaagggaaccccaacagagatctgaacgaggctgccatcaccactttctctgtccttgggctcttctcctcccaagctgccgccatcctcagcaccctccttgctgctgaggtcatccccaccactgtccggggccgtggcctgggcctgatcatggctctaggggcgcttggaggactgagcggcccggcccagcgcctccacatgggccatggagccttcctgcagcacgtggtgctggcggcctgcgccctcctctgcattctcagcattatgctgctgccggagaccaagcgcaagctcctgcccgaggtgctccgggacggggagctgtgtcgccggccttccctgctgcggcagccaccccctacccgctgtgaccacgtcccgctgcttgccacccccaaccctgccctctgagcggcctctgagtaccctggcgggaggctggcccacacagaaaggtggcaagaagatcgggaagactgagtagggaaggcagggctgcccagaagtctcagaggcacctcacgccagccatcgcggagagctcagagggccgtccccaccctgcctcctccctgctgctttgcattcacttccttggccagagtcaggggacagggagagagctccacactgtaaccactgggtctgggctccatcctgcgcccaaagacatccacccagacctcattatttcttgctctatcattctgtttcaataaagacatttggaataaacgagca

SEQ ID NO: 203958 - DNA, 2398 bp, Artificial Sequence
  derived and/or modified sequence
cgcccgcggctgcagagctgcagagcgggatctcttcgagctgtctgtgtccgggcagccggcgcgcaactgagccagaggacagcgcatcctttcggcgcgggccggcagggcccctgcggtcggcaagctggctccccgggtggccaccgggacccccgagcccaatggcgggggcggcggcaaaatcgacaacactgtagagatcacccccacctccaacggacaggtcgggaccctcggagatgcggtgcccacggagcagctgcagggtgagcgggagcgcgagcgggagggggagggagacgcgggcggcgacggactgggcagcagcctgtcgctggccgtgcccccaggccccctcagctttgaggcgctgctcgcccaggtgggggcgctgggcggcggccagcagctgcagctcggcctctgctgcctgccggtgctcttcgtggctctgggcatggcctcggaccccatcttcacgctggcgcccccgctgcattgccactacggggccttcccccctaatgcctctggctgggagcagcctcccaatgccagcggcgtcagcgtcgccagcgctgccctagcagccagcgccgccagccgtgtcgccaccagtaccgacccctcgtgcagcggcttcgccccgccggacttcaaccattgcctcaaggattgggactataatggccttcctgtgctcaccaccaacgccatcggccagtgggatctggtgtgtgacctgggctggcaggtgatcctggagcagatcctcttcatcttgggctttgcctccggctacctgttcctgggttaccccgcagacagatttggccgtcgcgggattgtgctgctgaccttggggctggtgggcccctgtggagtaggaggggctgctgcaggctcctccacaggcgtcatggccctccgattcctcttgggctttctgcttgccggtgttgacctgggtgtctacctgatgcgcctggagctgtgcgacccaacccagaggcttcgggtggccctggcaggggagttggtgggggtgggagggcacttcctgttcctgggcctggcccttgtctctaaggattggcgattcctacagcgaatgatcaccgctccctgcatcctcttcctgttttatggctggcctggtttgttcctggagtccgcacggtggctgatagtgaagcggcagattgaggaggctcagtctgtgctgaggatcctggctgagcgaaaccggccccatgggcagatgctgggggaggaggcccaggaggccctgcaggacctggagaatacctgccctctccctgcaacatcctccttttcctttgcttccctcctcaactaccgcaacatctggaaaaatctgcttatcctgggcttcaccaacttcattgcccatgccattcgccactgctaccagcctgtgggaggaggagggagcccatcggacttctacctgtgctctctgctggccagcggcaccgcagccctggcctgtgtcttcctgggggtcaccgtggaccgatttggccgccggggcatccttcttctctccatgacccttaccggcattgcttccctggtcctgctgggcctgtgggattgtgagcatcctatcttccccacagtgtgggctcaacaagggaaccccaacagagatctgaacgaggctgccatcaccactttctctgtccttgggctcttctcctcccaagctgccgccatcctcagcaccctccttgctgctgaggtcatccccaccactgtccggggccgtggcctgggcctgatcatggctctaggggcgcttggaggactgagcggcccggcccagcgcctccacatgggccatggagccttcctgcagcacgtggtgctggcggcctgcgccctcctctgcattctcagcattatgctgctgccggagaccaagcgcaagctcctgcccgaggtgctccgggacggggagctgtgtcgccggccttccctgctgcggcagccaccccctacccgctgtgaccacgtcccgctgcttgccacccccaaccctgccctctgagcggcctctgagtaccctggcgggaggctggcccacacagaaaggtggcaagaagatcgggaagactgagtagggaaggcagggctgcccagaagtctcagaggcacctcacgccagccatcgcggagagctcagagggccgtccccaccctgcctcctccctgctgctttgcattcacttccttggccagagtcaggggacagggagagagctccacactgtaaccactgggtctgggctccatcctgcgcccaaagacatccacccagacctcattatttcttgctctatcattctgtttcaataaagacatttgg

SEQ ID NO: 203959 - protein, 270 aa, Artificial Sequence
  derived and/or modified sequence
MARFALTVVRHGETRFNKEKIIQGQGVDEPLSETGFKQAAAAGIFLNNVKFTHAFSSDLMRTKQTMHGILERSKFCKDMTVKYDSRLRERKYGVVEGKALSELRAMAKAAREECPVFTPPGGETLDQVKMRGIDFFEFLCQLILKEADQKEQFSQGSPSNCLETSLAEIFPLGKNHSSKVNSDSGIPGLAASVLVVSHGAYMRSLFDYFLTDLKCSLPATLSRSELMSVTPNTGMSLFIINFEEGREVKPTVQCICMNLQDHLNGLTETR

SEQ ID NO: 203960 - DNA, 813 bp, Artificial Sequence
  derived and/or modified sequence
atggcccgcttcgctcttaccgtcgtgaggcatggcgaaacaagattcaacaaagaaaaaatcatccaggggcagggcgtagatgaaccactgtctgagactgggttcaagcaagccgcggctgccggtatcttcttaaataacgtgaagttcacacacgcattttcttctgatttaatgcgaacaaagcaaactatgcatggtattctcgagagatctaagttctgcaaagacatgacagtcaaatatgattctaggctgcgcgaaagaaaatatggcgtcgtggagggcaaggcccttagtgagctccgtgctatggccaaggcagccagagaagaatgtcccgtttttactccccctggaggagagacacttgaccaagtgaaaatgcgcggcatagatttcttcgagtttttgtgtcagctgattcttaaagaagccgatcagaaagaacagttttcgcaaggatctccttctaattgtctggaaaccagtctcgccgagattttccccctcgggaaaaatcattcttccaaagtaaactctgactccggcattccgggtttggctgcatctgtgttggtagtgagccacggagcatacatgaggtctttatttgattattttttgacagatcttaagtgcagtttgccggccaccctgagtaggtctgagctgatgagcgtgacacccaataccggcatgtccctgttcattataaacttcgaagaggggagggaggtaaaaccgactgtgcagtgcatatgtatgaatctgcaggatcatttaaacgggctgaccgagacgaggtag

SEQ ID NO: 203961 - DNA, 813 bp, Artificial Sequence
  derived and/or modified sequence
atggccaggtttgccctgactgtggtgagacatggagagacccgcttcaacaaggagaagatcatccagggccagggcgtggatgagcccctgtctgagaccggcttcaagcaggccgctgctgctggcatcttcctgaacaacgtgaagttcacccacgccttcagcagtgacctgatgaggaccaagcagaccatgcacggcatcctggagaggagcaagttctgcaaggacatgacagtgaagtatgacagccggctgcgggagaggaaatatggagtggtggagggcaaggccctgtctgagctgcgggccatggccaaggccgcccgggaggagtgccctgtgttcaccccacctggaggagagaccctggaccaggtgaagatgaggggcatcgacttctttgagttcctgtgccagctgatcctgaaggaggccgaccagaaggagcagttcagccagggcagccccagcaactgcctggagaccagcctggccgagatcttccccctgggcaagaaccacagcagcaaggtgaacagcgacagcggcatccctggcctggccgcctctgtgctggtggtgagccacggggcctacatgaggagcctgtttgactacttcctgacagacctgaagtgcagcctgcctgccaccctgagccgctctgagctgatgtctgtgacccccaacacaggcatgagcctcttcatcatcaactttgaggagggccgggaggtgaagcccaccgtgcagtgcatctgcatgaacctgcaggaccacctgaatggcctgacagagaccaggtag

SEQ ID NO: 203962 - DNA, 813 bp, Artificial Sequence
  derived and/or modified sequence
atggcccggttcgccctgaccgtggtgcggcacggcgagacccggttcaacaaagaaaagattatccagggacagggggtcgatgagccactgtcggagaccggatttaaacaggccgccgcagccgggatctttctgaacaacgtgaaattcacccacgccttttccagcgatttgatgaggaccaagcaaactatgcatgggatccttgaacggagcaaattttgcaaagacatgacagtgaagtacgattcaagattaagggaacgcaagtacggggtcgtggagggaaaggccctaagtgagctgcgcgccatggccaaggctgcccgggaggaatgccccgtcttcactcccccgggcggcgaaacgcttgatcaggttaagatgagaggcatcgactttttcgaattcctgtgtcagctgatcctgaaagaggccgatcagaaggagcaattttcccagggcagtccttccaattgcttggagacgtctctagctgagatctttcctctaggcaaaaaccattcttcgaaggtgaacagtgattccggaattccaggattggctgctagcgtgttggttgtctcccatggtgcgtatatgcgctccttgttcgattacttccttactgatctcaagtgctccctcccagcgactttgagcaggtcagaactgatgtcagtcacacccaacaccggaatgtcactgttcatcataaacttcgaggaaggtagagaagtcaaacccaccgtgcagtgcatctgcatgaacctgcaagatcatcttaacggcctgactgaaactaggtag

SEQ ID NO: 203963 - DNA, 813 bp, Artificial Sequence
  derived and/or modified sequence
atggcccgtttcgcgctgacagttgtgagacatggagagacccgatttaacaaagagaaaataattcaaggacagggagtggacgagccgttgagtgagactggattcaaacaggctgccgctgccggaatatttctgaataatgtgaaattcactcatgccttcagctcagacctgatgaggacgaagcagaccatgcatggcatccttgagcgatcgaaattttgcaaagatatgaccgtcaagtatgattctcgactgagggagcggaaatacggagtcgttgaaggcaaagctctgagtgagttgcgagcaatggccaaggccgcacgcgaagaatgtcctgtgttcactccccctggtggtgaaacactcgaccaggtgaaaatgagaggcatcgactttttcgaattcctgtgtcagttgatcctgaaggaagctgatcagaaggaacagttttcccaggggtcaccatcaaactgccttgagacctcgctggctgaaatcttccccttagggaagaaccactcctcaaaggtcaatagcgacagcggcattccaggcctggctgcctcggtgctcgtggtgtctcatggcgcttatatgcgcagcctcttcgactatttcctgaccgacctgaagtgttcattgcccgctactctgtcccggtctgaacttatgagtgtaacacccaacacaggcatgtccttgttcattattaatttcgaagaaggacgggaagtgaaaccaaccgttcaatgtatttgcatgaacctgcaagaccacttaaacgggttaacggaaacgaggtag

SEQ ID NO: 203964 - DNA, 1361 bp, Artificial Sequence
  derived and/or modified sequence
ggggaggtagcccgcagtgcaggggcagcgcggcgcggggccaccgacgggacgcggctccgggaacatggctcgcttcgctctgactgttgtccggcatggagaaacaagatttaacaaggagaaaataatccaaggacaaggagtagatgaacctctttcagaaactggatttaaacaagcagcagctgctggtatatttctgaataatgtgaagtttactcatgctttctccagtgatctcatgaggacaaagcagaccatgcatggaattttggagagaagcaaattttgcaaagatatgacggtaaagtatgactcaagacttcgggaaaggaaatacggggttgtagaaggcaaagcgctaagtgagctgagggccatggccaaagcagccagggaagagtgccctgtgtttacaccgcccggaggagagacgctggaccaggtgaaaatgcgtggaatagacttttttgaatttctttgtcaactaatcctgaaagaagcggatcaaaaagaacagttttcccaaggatctccaagcaactgtctggaaacttctttggcagagatatttcctttaggaaaaaatcacagctctaaagttaattcagacagcggtattccaggattagcagccagtgtcttagttgtgagtcacggtgcttacatgagaagtctgtttgattattttctgactgaccttaagtgttccttaccagccactctgagcagatctgaacttatgtcagtcactcccaatacagggatgagtctctttatcataaactttgaggaaggaagagaagttaaaccaacggttcagtgtatttgtatgaacctacaggatcatctaaatggactgactgaaactcgctaaggttaaatctgcatcaaaatctaaccattttgagcctctgaagggagtgccattggctttatttacttctctcctctgctagttctgatttggaaacagttaaaagccaatttttagctccagtggaaccatagccacataaaactttaatggacaaccatatagaattaacttattttgtccaagtacagttggcattttccagaataattttaccaccctgctagatgtcatctctggattgcacatggatgatgaaggaactcagcattgaaagttgggggattagtaaccttgttacaacggtttctttttcattttagcctattttaatggctattggtaagatactgtatgtttttagtatctcatccagtgcttagaagaaagaatggtttataattcccagtacatgtttatattgactgtgttatatttttaaatcctttaaataaaaaatccttataagtttatgtaaagc

SEQ ID NO: 203965 - DNA, 813 bp, Artificial Sequence
  derived and/or modified sequence
atggccagattcgccctgaccgtggtgagacacggcgagaccagattcaacaaggagaagatcatccagggccagggcgtggacgagcccctgagcgagaccggcttcaagcaggccgccgccgccggcatcttcctgaacaacgtgaagttcacccacgccttcagcagcgacctgatgagaaccaagcagaccatgcacggcatcctggagagaagcaagttctgcaaggacatgaccgtgaagtacgacagcagactgagagagagaaagtacggcgtggtggagggcaaggccctgagcgagctgagagccatggccaaggccgccagagaggagtgccccgtgttcaccccccccggcggcgagaccctggaccaggtgaagatgagaggcatcgacttcttcgagttcctgtgccagctgatcctgaaggaggccgaccagaaggagcagttcagccagggcagccccagcaactgcctggagaccagcctggccgagatcttccccctgggcaagaaccacagcagcaaggtgaacagcgacagcggcatccccggcctggccgccagcgtgctggtggtgagccacggcgcctacatgagaagcctgttcgactacttcctgaccgacctgaagtgcagcctgcccgccaccctgagcagaagcgagctgatgagcgtgacccccaacaccggcatgagcctgttcatcatcaacttcgaggagggcagagaggtgaagcccaccgtgcagtgcatctgcatgaacctgcaggaccacctgaacggcctgaccgagaccagatag

SEQ ID NO: 203966 - protein, 504 aa, Artificial Sequence
  derived and/or modified sequence
MFPREKTWNISFAGCGFLGVYYVGVASCLREHAPFLVANATHIYGASAGALTATALVTGVCLGEAGAKFIEVSKEARKRFLGPLHPSFNLVKIIRSFLLKVLPADSHEHASGRLGISLTRVSDGENVIISHFNSKDELIQANVCSGFIPVYCGLIPPSLQGVRYVDGGISDNLPLYELKNTITVSPFSGESDICPQDSSTNIHELRVTNTSIQFNLRNLYRLSKALFPPEPLVLREMCKQGYRDGLRFLQRNGLLNRPNPLLALPPARPHGPEDKDQAVESAQAEDYSQLPGEDHILEHLPARLNEALLEACVEPTDLLTTLSNMLPVRLATAMMVPYTLPLESALSFTIRLLEWLPDVPEDIRWMKEQTGSICQYLVMRAKRKLGRHLPSRLPEQVELRRVQSLPSVPLSCAAYREALPGWMRNNLSLGDALAKWEECQRQLLLGLFCTNVAFPPEALRMRAPADPAPAPADPASPQHQLAGPAPLLSTPAPEARPVIGALGL

SEQ ID NO: 203967 - DNA, 1515 bp, Artificial Sequence
  derived and/or modified sequence
atgttccctcgagagaaaacctggaatatcagcttcgccgggtgcggatttctcggagtttactacgtgggagtggcttcatgtctaagagagcacgcacccttcttggttgcgaatgctactcatatctacggcgcatctgcaggagcactgacggcaacagccctggtgacaggagtgtgtctgggagaagccggagctaaattcatcgaagtgagtaaggaggccaggaaacgatttctcgggcctctgcatcctagctttaacctggtgaagatcatacgaagctttctgctcaaggtgctccctgctgacagccatgagcatgccagcggcaggctgggaattagcctgacacgcgtatccgatggggagaacgtgatcattagccactttaatagtaaagatgaactgatccaagcaaacgtgtgtagtggctttatccctgtgtattgtggactcatccctccctccctgcaaggtgttaggtacgtggacggaggaatttcagataacctcccattatatgaattaaagaacactatcacagtgtcccccttttctggcgaatcagatatctgtccccaggacagctccacgaacattcacgagctgcgtgttaccaatacttctattcagtttaacctgcgcaacctgtaccgtctgagtaaggccttgtttcccccggaacctctcgtacttcgggagatgtgtaagcagggataccgcgacggtctacgttttctccagcggaacgggttgctcaaccggcccaaccctctgctcgccctgccccccgcgcgtcctcacggccccgaagataaagaccaagccgtggagagcgcccaggctgaggattattcccagctgcctggcgaagatcatatccttgagcacctgccagctagactaaatgaggccctgctcgaagcttgcgtagaacctaccgacctgctgaccacactgagtaatatgctcccggtgaggctcgcaaccgccatgatggtgccttatactctcccacttgagagtgccctaagctttacaattcggctgctggagtggcttcccgatgtgccagaagacatccgctggatgaaggagcaaaccggctcaatctgtcagtacctggtgatgagagcgaagaggaaacttggccgccacctgccctcacgcctgccagagcaggtggagctaagaagggtgcagtctcttccctctgtacccctgagttgtgctgcatacagggaagctttgcctggctggatgcgaaacaacctctcactgggcgatgctctggccaaatgggaggaatgccaaagacagcttttactcggcctgttttgcacgaacgtagccttccctccggaagctctcaggatgcgtgctccggccgacccagccccagctcctgccgaccccgccagcccacagcaccagcttgccggccccgctcctctactgtccacacccgcccctgaggccagacccgtgatcggtgccctcggcctatag

SEQ ID NO: 203968 - DNA, 1515 bp, Artificial Sequence
  derived and/or modified sequence
atgttcccccgggagaagacctggaacatcagctttgctggctgcggcttcctgggcgtgtactacgtgggcgtggccagctgcctgcgggagcacgcccccttcctggtggccaatgccacccacatctacggggccagcgctggggccctgacagccacagccctggtgactggagtgtgcctgggggaggccggggccaagttcatcgaggtgtccaaggaggccaggaagcgcttcctgggccccctgcaccccagcttcaacctggtgaagatcatccgctccttcctgctgaaggtgctgcctgctgacagccatgaacatgccagcggccgcctgggcatcagcctgaccagggtgtctgatggagaaaatgtcatcatcagccacttcaacagcaaggatgagctgatccaggccaacgtgtgcagcggcttcatccctgtgtactgcggcctcatcccccccagcctgcagggcgtgcgctacgtggatggcggcatcagtgacaacctgcccctgtatgagctgaagaacaccatcaccgtgagccccttcagcggggagagtgacatctgcccccaggacagcagcaccaacatccacgagctgcgggtgaccaacaccagcatccagttcaacctgaggaacctgtaccgcctgagcaaggccctcttccccccagagcccctggtgctgcgggagatgtgcaagcagggctacagagatggcctgcgcttcctgcagagaaatggcctgctgaaccggcccaaccccctgctggccctgcccccagcccggccccacggccctgaggacaaggaccaggccgtggagagcgcccaggccgaggactacagccagctgcctggagaggaccacatcctggagcacctgcctgcccggctgaatgaggccctgctggaggcctgtgtggagcccacagacctgctgaccaccctgagcaacatgctgcctgtgcggctggccacagccatgatggtgccctacaccctgcccctggagagcgccctgtccttcaccatccggctgctggagtggctgcctgatgtgcctgaggacatccgctggatgaaggagcagacaggcagcatctgccagtacctggtgatgagggccaagaggaagctgggccgccacctgcccagccggctgcctgagcaggtggagctgcggcgggtgcagagcctgcccagcgtgcccctgagctgtgccgcctaccgggaggccctgcccggctggatgaggaacaacctgagcctgggagatgccctggccaagtgggaggagtgccagaggcagctgctgctgggcctcttctgcaccaacgtggccttccccccagaggccctgaggatgagggccccagctgaccctgccccagccccagctgaccctgccagcccccagcaccagctggccggccctgcccccctgctgagcaccccagcccctgaggcccggcctgtgattggagccctgggcctgtag

SEQ ID NO: 203969 - DNA, 1515 bp, Artificial Sequence
  derived and/or modified sequence
atgttcccccgggagaagacctggaacatcagcttcgccggctgcgggtttctgggcgtgtattatgtcggtgtagcgagttgcctgcgtgaacacgctccatttctggtggctaacgccactcacatctacggcgcctccgccggagccctaactgccaccgctctggtgactggagtctgcctcggtgaagcaggagccaagttcattgaggtttcaaaagaggctcgcaaacggttcttgggccctctgcacccctcctttaatctcgtcaagatcatcagatctttcctcctgaaagtcctgcccgccgacagtcatgaacacgcttccgggcgactcggcatttcactgactcgggtgagcgatggcgaaaacgttatcatcagccattttaattccaaggacgaactgatccaggctaacgtgtgcagcggtttcattcccgtgtactgcggactcataccaccttccttacaaggcgtccggtatgtggatgggggaatttccgacaacctacccctgtatgagctgaaaaacactattacagtgagtcctttctccggcgagtcggatatctgcccccaggattcttcaactaacatccatgaactgagggtgacaaacacgtctatccagtttaatttgaggaatctgtacagactgtccaaggccttgttccctcccgaacctctggtgcttcgcgagatgtgcaagcaaggttaccgcgacggactccgcttcttgcagcggaacggcctgctcaaccggcccaatccgctgctggctctgccacccgctcgaccacacggcccagaggataaggaccaagccgtggagagcgcccaggctgaagattattcgcagctcccaggggaggaccacatcttagagcacctacccgctaggctgaacgaagccctccttgaggcatgcgtggagcccaccgatctgctgacaaccctgtcaaatatgctgccagttagactggccacagctatgatggtgccttacacactgccactggaaagtgctctgagctttacgataagactcctggaatggctaccggatgtgcccgaagacatacggtggatgaaagaacaaaccgggagcatttgccaatatcttgtgatgcgggccaaacggaagttaggacggcacctgccgagtaggttgcccgagcaggtggagctgagaagagtgcaatcattacctagcgtgcctctatcgtgtgcagcctacagagaagctctgcccggatggatgcgaaataacctcagcctcggagatgctttagctaagtgggaggaatgtcagcggcaactgctcctgggactcttttgcacaaacgttgctttcccccccgaggctcttcgtatgcgggcccctgccgatccagctcccgctcccgccgatcccgcatcacctcagcaccagttggccggtccagctcctttactctcaactcccgccccagaggcccggccggtcatcggcgctttgggcctttag

SEQ ID NO: 203970 - DNA, 2428 bp, Artificial Sequence
  derived and/or modified sequence
gcggccccagtcagacgcaggcagccccaaagcctgaacaggcagggccagacccagcttcttcgcctccgccagcggggaccccgagctagagccgcagcgggacctgcccggcccccggctccagcgagcgagcggcgagcaggcggctcacagaggcctggccgcccacggaacccggggcccggcggccgccgccgcgatgtttccccgcgagaagacgtggaacatctcgttcgcgggctgcggcttcctcggcgtctactacgtcggcgtggcctcctgcctccgcgagcacgcgcccttcctggtggccaacgccacgcacatctacggcgcctcggccggggcgctcacggccacggcgctggtcaccggggtctgcctgggtgaggctggtgccaagttcattgaggtatctaaagaggcccggaagcggttcctgggccccctgcacccctccttcaacctggtaaagatcatccgcagtttcctgctgaaggtcctgcctgctgatagccatgagcatgccagtgggcgcctgggcatctccctgacccgcgtgtcagacggcgagaatgtcattatatcccacttcaactccaaggacgagctcatccaggccaatgtctgcagcggtttcatccccgtgtactgtgggctcatccctccctccctccagggggtgcgctacgtggatggtggcatttcagacaacctgccactctatgagcttaagaacaccatcacagtgtcccccttctcgggcgagagtgacatctgtccgcaggacagctccaccaacatccacgagctgcgggtcaccaacaccagcatccagttcaacctgcgcaacctctaccgcctctccaaggccctcttcccgccggagcccctggtgctgcgagagatgtgcaagcagggataccgggatggcctgcgctttctgcagcggaacggcctcctgaaccggcccaaccccttgctggcgttgccccccgcccgcccccacggcccagaggacaaggaccaggcagtggagagcgcccaagcggaggattactcgcagctgcccggagaagatcacatcctggagcacctgcccgcccggctcaatgaggccctgctggaggcctgcgtggagcccacggacctgctgaccaccctctccaacatgctgcctgtgcgtctggccacggccatgatggtgccctacacgctgccgctggagagcgctctgtccttcaccatccgcttgctggagtggctgcccgacgttcccgaggacatccggtggatgaaggagcagacgggcagcatctgccagtacctggtgatgcgcgccaagaggaagctgggcaggcacctgccctccaggctgccggagcaggtggagctgcgccgcgtccagtcgctgccgtccgtgccgctgtcctgcgccgcctacagagaggcactgcccggctggatgcgcaacaacctctcgctgggggacgcgctggccaagtgggaggagtgccagcgccagctgctgctcggcctcttctgcaccaacgtggccttcccgcccgaagctctgcgcatgcgcgcacccgccgacccggctcccgcccccgcggacccagcatccccgcagcaccagctggccgggcctgcccccttgctgagcacccctgctcccgaggcccggcccgtgatcggggccctggggctgtgagaccccgaccctctcgaggaaccctgcctgagacgcctccattaccactgcgcagtgagatgaggggactcacagttgccaagaggggtctttgccgtgggccccctcgccagccactcaccagctgcatgcactgagaggggaggtttccacacccctcccctgggccgctgaggccccgcgcacctgtgccttaatcttccctcccctgtgctgcccgagcacctcccccgcccctttactcctgagaactttgcagctgcccttccctccccgtttttcatggcctgctgaaatatgtgtgtgaagaattatttattttcgccaaagcacatgtaataaatgctgcagcccagcctctgcccactttgtgtgtatgtgaccgcctgcttacttgcagtgagagcctggtggccagggtctggccctaccttggctgaccagcctctccacagctgcaggccaggtctcccagcgtcgcactcctgggcctggcatttggaacctgccaggctggcctgggaacacccccctacaggcacatatgaacgtactgcattcctgccgacccccctgtctaggatgcatccacaccccccccaattttgcccagcagcctcctggctgacccttggccacagccttctgagggccaatggaaatatttgggaccaagattcttggtaaataaaaacgaaaatgtttgcaaaa

SEQ ID NO: 203971 - DNA, 1515 bp, Artificial Sequence
  derived and/or modified sequence
atgttccccagagagaaaacctggaatatcagcttcgctggctgcgggtttctgggagtctactacgttggagtcgcctcatgcctccgggagcatgcccctttcctcgtagcgaacgcaactcacatctacggagcgtctgcaggcgctctgacagcaaccgcactagtgactggggtgtgtctgggcgaggcaggggcaaaattcattgaagttagtaaagaagctcgaaaacgctttctgggacctctccacccctctttcaacctggtcaagattatcagatcttttcttttgaaggtcctgcctgccgactctcacgaacatgctagcggacggttgggcatctcccttactcgggtgagcgatggcgagaatgtgattatttcccacttcaacagtaaggacgaactcatccaggctaatgtctgctcaggttttatacccgtttactgcggtcttataccccctagtttgcagggagtacgctatgtcgacggcggaatcagcgataatctgccattatatgagttgaaaaatactattacagtgtcaccattctctggcgagagcgacatatgccctcaggacagctctacaaacatacatgagttgcgagtgaccaacacgtctatccaattcaatttgcgcaatttgtaccgtctctctaaggctttgttccccccagagcccctcgttctgagggagatgtgtaagcaagggtatcgagatggacttcgcttccttcagcggaacggactcctaaatcgcccaaacccgctgttagccctcccgccagcaaggccccatggaccggaagataaagatcaggctgtagaatctgcccaagctgaggattacagtcagctgcctggggaggatcatatcctggaacatctgcccgcacgactaaatgaggcattgttggaggcctgtgtggagccaacagacttattgacaaccttatcaaacatgctgcctgtccgcttggcgaccgctatgatggtaccttacactctgcctttggagagtgctctgtcctttacaatacgtttactagaatggcttcctgacgtaccagaggatatcaggtggatgaaggagcaaactgggagcatatgtcagtacctggttatgcgggctaaacggaagttgggtcgccacttgccgtcgcggctcccagaacaggtagagttaagaagggtccagagcctgccctcagtcccactgagttgcgcagcttatcgggaggccctgcccggttggatgcggaacaatctgtcactaggcgacgccttggccaagtgggaggaatgtcagcgacagcttctgctcgggctattctgcacaaatgtggctttcccgccagaggcgctacgaatgagagccccagcagatcctgctccagcacctgccgatccagcctcaccacagcaccagctggcaggtcccgctcccctgctttcgacccctgcacccgaggctcgaccggttattggggcactcggtctctag

SEQ ID NO: 203972 - DNA, 1515 bp, Artificial Sequence
  derived and/or modified sequence
atgttccccagagagaagacctggaacatcagcttcgccggctgcggcttcctgggcgtgtactacgtgggcgtggccagctgcctgagagagcacgcccccttcctggtggccaacgccacccacatctacggcgccagcgccggcgccctgaccgccaccgccctggtgaccggcgtgtgcctgggcgaggccggcgccaagttcatcgaggtgagcaaggaggccagaaagagattcctgggccccctgcaccccagcttcaacctggtgaagatcatcagaagcttcctgctgaaggtgctgcccgccgacagccacgagcacgccagcggcagactgggcatcagcctgaccagagtgagcgacggcgagaacgtgatcatcagccacttcaacagcaaggacgagctgatccaggccaacgtgtgcagcggcttcatccccgtgtactgcggcctgatcccccccagcctgcagggcgtgagatacgtggacggcggcatcagcgacaacctgcccctgtacgagctgaagaacaccatcaccgtgagccccttcagcggcgagagcgacatctgcccccaggacagcagcaccaacatccacgagctgagagtgaccaacaccagcatccagttcaacctgagaaacctgtacagactgagcaaggccctgttcccccccgagcccctggtgctgagagagatgtgcaagcagggctacagagacggcctgagattcctgcagagaaacggcctgctgaacagacccaaccccctgctggccctgccccccgccagaccccacggccccgaggacaaggaccaggccgtggagagcgcccaggccgaggactacagccagctgcccggcgaggaccacatcctggagcacctgcccgccagactgaacgaggccctgctggaggcctgcgtggagcccaccgacctgctgaccaccctgagcaacatgctgcccgtgagactggccaccgccatgatggtgccctacaccctgcccctggagagcgccctgagcttcaccatcagactgctggagtggctgcccgacgtgcccgaggacatcagatggatgaaggagcagaccggcagcatctgccagtacctggtgatgagagccaagagaaagctgggcagacacctgcccagcagactgcccgagcaggtggagctgagaagagtgcagagcctgcccagcgtgcccctgagctgcgccgcctacagagaggccctgcccggctggatgagaaacaacctgagcctgggcgacgccctggccaagtgggaggagtgccagagacagctgctgctgggcctgttctgcaccaacgtggccttcccccccgaggccctgagaatgagagcccccgccgaccccgcccccgcccccgccgaccccgccagcccccagcaccagctggccggccccgcccccctgctgagcacccccgcccccgaggccagacccgtgatcggcgccctgggcctgtag

SEQ ID NO: 203973 - protein, 206 aa, Artificial Sequence
  derived and/or modified sequence
MAPSHLSVREMREDEKPLVLEMLKAGVKDTENRVALHALTRPPALLLLAAASSGLRFVLASFALALLLPVFLAVAAVKLGLRARWGSLPPPGGLGGPWVAVRGSGDVCGVLALAPGTNAGDGARVTRLSVSRWHRRRGVGRRLLAFAEARARAWAGGMGEPRARLVVPVAVAAWGVGGMLEGCGYQAEGGWGCLGYTLVREFSKDL

SEQ ID NO: 203974 - DNA, 1313 bp, Artificial Sequence
  derived and/or modified sequence
ccttgtcgaaggaccaaaggcgaccggtgcaggtgcacgacgccagctcccttctggggggccggggcctgggggttgccatggcccccagccacctgtcagtgcgggagatgagggaagatgagaagcccctggtgctggagatgctgaaggccggcgtgaaggacacggaaaaccgcgtggccctccatgccttgacacggccgccggccctgctcctcctggcggcggccagcagcggcctgcgctttgtcctggcttccttcgccctggccctcctcctgccggtgttcctggctgtggccgccgtgaagctgggcctgcgggcccgatggggctcgctgcctccgccgggtggcctggggggcccctgggtggccgtgcggggctccggtgacgtgtgtggggtcctggctctggcccctggcacaaatgcaggggacggggcccgggtcacccgcctgtctgtctctcgctggcaccgccgccggggcgtgggcaggaggctgctggccttcgcggaggcccgggctcgggcctgggctgggggcatgggggagccccgggcccggctcgtggtccccgtggctgtggccgcctggggggtgggagggatgctggagggctgtggctaccaggccgaggggggctggggctgcctgggctacacgctggtgagggaattcagcaaagacctgtgaagctacagactgacagccagggcaggggaggagggaggggcgccagcacctgatgatcgcctactgtctgcgggttcttttacctgctctccctcagtgagtcctcaaccaccctgggcccagaaacagaggcctgccgaggggaggagcctggcctctgtccacccgtcagcagtgtgaagtctgttgtgtttgagcttctcagagtggaatgactccttttccttcctggccctcgggggcctctcgaggtcagcctctccaacccctacctcagctcctgtctgcactgagaaacctccccgggtgatgtctgcaaagtctgtgctgtccgtgccccaggctgggagagctatctggggagggggagaggaggccgagcagaatacaccccagagttagggtttgcgactccgcctccctgggacctggattgggtcagatgcctgtccttggaggggacaaggttgactgcttaggaggcgcgacgcacagggctgccaggcctggcccctctctgggaaggttgagagctgagacgggcagccctgtcccttcctccagatccgtctggttttttacaccgtttgttaataaagcctgaaaccgctg

SEQ ID NO: 203975 - DNA, 621 bp, Artificial Sequence
  derived and/or modified sequence
atggctcctagccacctgagtgtgagagagatgagagaggacgagaagcccctggtgctggagatgctgaaggctggtgttaaggacacagagaatagggtcgcgctccatgccctgactaggcctcccgctctactgctgctggccgccgcctcgtcaggtctgcgcttcgtgttggcatccttcgcacttgctctgcttttgccggtgtttcttgcggtggctgccgttaagcttgggctgcgtgctcgctggggcagcctgcccccacccggcgggctcggtgggccgtgggttgcagttcggggcagcggagacgtgtgcggagtcctggcacttgccccagggaccaacgccggcgacggggctagagtgacccggctgtccgtcagcagatggcatagaagacgcggagtgggtcgaagactgttggcttttgccgaagcacgagcccgcgcttgggcggggggcatgggcgagccccgagctcggctggtggttccagtggctgtagcagcctggggtgttggcggaatgctggaagggtgtggataccaagccgaaggcggatggggctgtctgggttataccctcgtgcgtgaatttagtaaggatctgtag

SEQ ID NO: 203976 - DNA, 147 bp, Artificial Sequence
  derived and/or modified sequence
atgagccgggctggcggcaggggggagcaaagcagatggggccgcagagccgagctgagggggcttggtaggcctgaagcccctcttaggttggggcccgacgtttgtggtagtgttccctgcgctagaggtgctggctcagaatag

SEQ ID NO: 203977 - DNA, 621 bp, Artificial Sequence
  derived and/or modified sequence
atggcccccagccacctgtctgtgcgggagatgagagaagatgagaagcccctggtgctggagatgctgaaggccggcgtgaaggacacagaaaatagagtggccctgcacgccctgacccggcccccagccctgctgctgctggccgccgccagcagcggcctgcgctttgtgctggccagctttgccctggccctgctgctgcctgtgttcctggccgtggccgctgtgaagctgggcctgcgggcccgctggggcagcctgcccccacctgggggcctgggcggcccctgggtggccgtgcggggcagcggagatgtgtgtggggtgctggccctggcccctggcaccaatgctggagatggagcccgggtgacccggctgtctgtgagccgctggcacagaagaagaggagtgggccgccgcctgctggcctttgctgaggcccgggcccgggcctgggccggcggcatgggagagccccgggcccggctggtggtgcctgtggccgtggccgcctggggcgtgggcggcatgctggagggctgcggctaccaggccgagggcggctggggctgcctgggctacaccctggtgcgggagttcagcaaggacctgtag

SEQ ID NO: 203978 - DNA, 147 bp, Artificial Sequence
  derived and/or modified sequence
atgagccgggccggcggccgcggggagcagagccgctggggcagaagagctgagctgcggggcctgggccggcctgaggcccccctgcggctgggcccagatgtgtgtggctctgtgccctgtgcccggggagctggcagcgagtag

SEQ ID NO: 203979 - DNA, 621 bp, Artificial Sequence
  derived and/or modified sequence
atggcccccagccacctgagcgtgcgggagatgcgggaggacgagaagccactggtgctggagatgttgaaggcaggagttaaagataccgaaaacagagttgccctgcatgcactcacccgcccaccagcactcctcctcctggccgccgccagcagcggacttcgcttcgtgttagcatctttcgccctggccctgttactgcctgtgtttctcgctgttgcggctgtgaaactcggcttgcgcgcaagatggggctcgcttcctccacccgggggtctgggaggcccctgggtcgctgtgaggggctcaggagacgtttgtggggtcctggccctggccccgggtaccaacgcgggtgatggagcccgggtgacgcgtctgtcggtgagtcggtggcacaggaggcgaggcgtgggcaggaggctgctcgccttcgctgaagcccgggcccgcgcttgggcaggtgggatgggtgaacccagggcccgactggtcgtgcccgtggccgtcgccgcctggggcgtcggaggcatgctagaaggctgtggctatcaggccgaaggcgggtggggatgtctcggatatacgctagtgcgagagttttctaaggacctttag

SEQ ID NO: 203980 - DNA, 621 bp, Artificial Sequence
  derived and/or modified sequence
atggccccttcccacctttccgtcagggagatgagggaagatgaaaaacccctcgtgttggagatgctaaaggccggagtcaaagacacagagaatagagtcgccctgcatgcactaacccggccacctgccctgctgctgctggccgcagcgtcctcagggctgaggttcgtgctcgccagtttcgccctcgctctgctcctccccgtattcctcgcggtggccgctgtgaaactgggtctgcgcgcacggtgggggagtttaccccctcccggtggcctgggtggcccttgggtagccgttcgtggctctggggatgtttgtggagttctagcactggccccagggacaaatgctggggacggcgcacgggtaacaaggctgagcgtgagcaggtggcacaggcgtcggggagtgggcagaaggctcctggcctttgccgaggcacgggcacgagcatgggcagggggaatgggagagcccagggccaggctggtagtgccagtcgccgtagcagcctggggtgtgggcggaatgctggaaggatgtggatatcaggcggagggcggatgggggtgtctcggatacaccctggtgcgcgagttctctaaggatctatag

SEQ ID NO: 203981 - DNA, 147 bp, Artificial Sequence
  derived and/or modified sequence
atgagcagagctggcggaagaggagaacagtctaggtggggtagacgagccgagctgagaggcctcggtcgtcctgaggcacctctacgtctgggaccggatgtctgtggctctgtcccatgtgcaaggggcgctgggtccgaatag

SEQ ID NO: 203982 - DNA, 621 bp, Artificial Sequence
  derived and/or modified sequence
atggcccccagccacctgagcgtgagagagatgagagaggacgagaagcccctggtgctggagatgctgaaggccggcgtgaaggacaccgagaacagagtggccctgcacgccctgaccagaccccccgccctgctgctgctggccgccgccagcagcggcctgagattcgtgctggccagcttcgccctggccctgctgctgcccgtgttcctggccgtggccgccgtgaagctgggcctgagagccagatggggcagcctgcccccccccggcggcctgggcggcccctgggtggccgtgagaggcagcggcgacgtgtgcggcgtgctggccctggcccccggcaccaacgccggcgacggcgccagagtgaccagactgagcgtgagcagatggcacagaagaagaggcgtgggcagaagactgctggccttcgccgaggccagagccagagcctgggccggcggcatgggcgagcccagagccagactggtggtgcccgtggccgtggccgcctggggcgtgggcggcatgctggagggctgcggctaccaggccgagggcggctggggctgcctgggctacaccctggtgagagagttcagcaaggacctgtag

SEQ ID NO: 203983 - DNA, 147 bp, Artificial Sequence
  derived and/or modified sequence
atgagcagagccggcggcagaggcgagcagagcagatggggcagaagagccgagctgagaggcctgggcagacccgaggcccccctgagactgggccccgacgtgtgcggcagcgtgccctgcgccagaggcgccggcagcgagtag

SEQ ID NO: 203984 - protein, 399 aa, Artificial Sequence
  derived and/or modified sequence
MNFRQLLLHLPRYLGASGSPRRLWWSPSLDTISSVGSWRGRSSKSPAHWNQVVSEAEKIVGYPTSFMSLRCLLSDELSNIAMQVRKLVGTQHPLLTTARGLVHDSWNSLQLRGLVVLLISKAAGPSSVNTSCQNYDMVSGIYSCQRSLAEITELIHIALLVHRGIVNLNELQSSDGPLKDMQFGNKIAILSGDFLLANACNGLALLQNTKVVELLASALMDLVQGVYHENSTSKESYITDDIGISTWKEQTFLSHGALLAKSCQAAMELAKHDAEVQNMAFQYGKHMAMSHKINSDVQPFIKEKTSDSMTFNLNSAPVVLHQEFLGRDLWIKQIGEAQEKGRLDYAKLRERIKAGKGVTSAIDLCRYHGNKALEALESFPPSEARSALENIVFAVTRFS

SEQ ID NO: 203985 - DNA, 1200 bp, Artificial Sequence
  derived and/or modified sequence
atgaattttcgccaactgcttctacatcttccacgttacctaggcgcttccggaagccctcgcaggctgtggtggtctccatctcttgatactatctcctcagttggatcctggagaggtcgtagctccaagtcgcccgcacattggaaccaggttgtatcagaagctgaaaagattgtggggtatcccacatcatttatgagtctcagatgtctgctgtcggacgagctgtcgaacatcgccatgcaggtgaggaagctcgtcggaacacagcatccgctgctgacaaccgccagaggcctcgtccacgatagttggaactcattgcaattgaggggtttggtggtcctcctgatctcaaaggccgccggaccttcttcagtcaatactagctgtcaaaactatgatatggtgtctgggatttacagttgccaacggtctctggccgagatcactgaattgattcacattgcattactggtgcacagaggtattgtgaatcttaacgagctccagtcctccgatggtcccctgaaggatatgcagtttggcaataagatagctatcctgtccggggattttcttctggcaaacgcctgtaatggattagcccttctgcagaacaccaaggtggttgaacttttagctagtgcgctcatggatctcgtccagggggtataccatgaaaattccacctccaaggagagttacattaccgacgacatcggaatttcaacttggaaagagcagacctttttatcacatggggccctgctggctaaatcctgtcaggcagccatggagctggcgaaacacgacgcggaggtgcagaatatggcattccagtacggaaagcatatggctatgtctcacaaaattaactctgacgtccagcccttcattaaggaaaaaacatctgattccatgactttcaatctcaacagcgcccctgtcgtgctccatcaggagttcctcggaagggacctgtggataaagcagattggcgaggcacaggagaaaggccggctagattatgctaagctgcgcgagaggatcaaagctgggaagggcgtgacatccgccatcgatttgtgcaggtatcatggaaacaaagcgctcgaggctctggagagctttcctcccagcgaagctagatctgccttagagaacattgtgttcgctgtcacacgcttttcctag

SEQ ID NO: 203986 - DNA, 1200 bp, Artificial Sequence
  derived and/or modified sequence
atgaacttccggcagctgctgctgcacctgccccgctacctgggcgccagcggcagcccccggcggctgtggtggagccccagcctggacaccatcagctctgtgggctcctggaggggccgcagcagcaagagccctgcccactggaaccaggtggtgtctgaggccgagaagatcgtgggctaccccaccagcttcatgagcctgcgctgcctgctgagtgatgagctgagcaacatcgccatgcaggtgaggaagctggtgggcacccagcaccccctgctgaccacagcccggggcctggtgcatgacagctggaacagcctgcagctgcggggcctggtggtgctgctgatcagcaaggctgctggccccagctctgtgaacaccagctgccagaactatgacatggtgtctggcatctacagctgccagaggagcctggccgagatcacagagctgatccacatcgccctgctggtgcaccggggcatcgtgaacctgaatgagctgcagagcagtgatggccccctgaaggacatgcagtttggaaacaagatcgccatcctgagcggggacttcctgctggccaatgcctgcaatggcctggccctgctgcagaacaccaaggtggtggagctgctggccagcgccctgatggacctggtgcagggcgtgtaccacgagaacagcaccagcaaggagagctacatcacagatgacatcggcatcagcacctggaaggagcagaccttcctgagccatggagccctgctggccaagagctgccaggccgccatggagctggccaagcatgatgctgaggtgcagaacatggccttccagtatggcaagcacatggccatgagccacaagatcaacagtgatgtgcagcccttcatcaaggagaagaccagtgacagcatgaccttcaacctgaacagcgcccctgtggtgctgcaccaggagttcctgggccgggacctgtggatcaagcagatcggggaggcccaggagaagggccgcctggactatgccaagctgcgggagcgcatcaaggccggcaagggcgtgaccagcgccatcgacctgtgccgctaccacggcaacaaggccctggaggccctggagagcttcccccccagcgaggcccggagcgccctggagaacatcgtgtttgctgtgacccgcttctcctag

SEQ ID NO: 203987 - DNA, 1200 bp, Artificial Sequence
  derived and/or modified sequence
atgaacttccggcagctgctgctgcacctgccccggtacctgggcgcctctgggagtcccaggcgattatggtggtcaccatccttggacacaatctcatcagtcggaagctggaggggtaggtcgtccaagtcgccagctcactggaatcaagtggtgtctgaagctgaaaagatcgtcggctaccctacatctttcatgagcctcaggtgtctgctctcagacgaactcagcaatatcgcgatgcaggtgagaaaactcgtgggcacacagcaccccttactaaccacagcccgaggtctcgtgcatgattcttggaattcacttcaactgcggggcctcgtggtgctgctgattagcaaagcagctggcccttcatccgtcaatacatcatgccagaattatgacatggtgagcggcatttactcttgccagcgttcattggccgagattacagagctcattcatatcgcactgttggtgcacagaggcatagtgaacttaaatgaactccagagcagcgacggccctctgaaggatatgcagtttggcaataagattgccattctatccggagattttctcctggccaatgcatgtaacggccttgctctgctgcagaataccaaggtggttgagttactcgcttccgccttaatggatctcgtccagggcgtctatcacgagaacagtacttcaaaggagtcttatataaccgacgatatcggtatttctacttggaaggagcagaccttcctttcacacggggcactactcgcgaagtcctgccaagctgccatggagcttgcgaagcatgatgctgaggtgcagaatatggcttttcagtatggaaagcatatggcaatgtcccacaaaatcaacagtgatgtgcaacctttcatcaaggaaaagacatcagacagcatgacctttaatctgaatagtgctcctgtcgttctgcaccaggagttccttggtagggatctgtggataaagcagattggcgaggcacaagaaaagggcaggcttgattacgccaagctgcgcgagaggataaaagcgggaaagggcgtgacatccgccattgatctttgccgctaccacggcaataaagctctggaagccctggagagctttccaccttcagaagccaggtccgctctggagaatatagtttttgccgtgacacgattcagctag

SEQ ID NO: 203988 - DNA, 1336 bp, Artificial Sequence
  derived and/or modified sequence
aatatggcgtcctccacataggcagtggctgtggtttctaccccgggtggccgggggcagtgctgagctgggactgttgtttgcccagcctgggctgcagaaagcagcagttaaagttcgtttctggtcactgctccaggaagccaccttactctgagggtcaagaattgccgcttccttttagttactgtaagttcctcctctgcccctggtttgtttcccgcggcacttctggatacccccaggtcccagacccttccagactcaaaccatgaactttcggcagctgctgttgcacttgccacgttatcttggagcctcgggttccccgcgtcgcctgtggtggtccccgtccctcgacaccatctcctcggtgggctcttggcgtggtcggtcctccaagtccccggcccactggaatcaggtagtgtcagaggcggagaagatcgtggggtaccccacgtccttcatgagccttcgctgcctgctgagcgacgagctcagcaacatcgctatgcaggtgcggaagctggtgggcactcagcaccctctgcttaccacagccagggggcttgtacatgacagctggaatagcctccagttgaggggcttggtggtgctccttatctctaaagcagctgggcccagcagcgtgaacacttcatgtcagaactatgacatggtcagtgggatctactcatgtcaaagaagtttggcagagatcacggagctaattcatattgctctccttgtacatcgtgggatagtaaatttaaatgagttgcaatcatctgatggtccactgaaagacatgcaatttggaaataaaattgctatcctgagtggagactttcttctagcaaatgcctgcaatggactagctctgctacagaacaccaaggttgtggaacttttagcaagtgctcttatggacttggtacaaggagtatatcatgaaaattctacttcaaaggaaagttatatcacagatgatattggaatatcgacttggaaggagcagacttttctctcccatggtgccttactagcaaagagctgccaagctgcaatggaattagcaaagcatgatgctgaggttcagaatatggcatttcagtatgggaagcacatggccatgagtcataagataaattctgatgtccagccttttattaaagaaaagaccagtgactccatgacttttaatctaaactcagctcctgtagtcttacatcaggaatttcttggaagagatttgtggattaaacagatcggagagtcttcaagtacagaagttcaactttctaactttcaacaaatgctactttcaacactc

SEQ ID NO: 203989 - DNA, 3540 bp, Artificial Sequence
  derived and/or modified sequence
tgcctccaatatggcgtcctccacataggcagtggctgtggtttctaccccgggtggccgggggcagtgctgagctgggactgttgtttgcccagcctgggctgcagaaagcagcagttaaagttcgtttctggtcactgctccaggaagccaccttactctgagggtcaagaattgccgcttccttttagttactgtaagttcctcctctgcccctggtttgtttcccgcggcacttctggatacccccaggtcccagacccttccagactcaaaccatgaactttcggcagctgctgttgcacttgccacgttatcttggagcctcgggttccccgcgtcgcctgtggtggtccccgtccctcgacaccatctcctcggtgggctcttggcgtggtcggtcctccaagtccccggcccactggaatcaggtagtgtcagaggcggagaagatcgtggggtaccccacgtccttcatgagccttcgctgcctgctgagcgacgagctcagcaacatcgctatgcaggtgcggaagctggtgggcactcagcaccctctgcttaccacagccagggggcttgtacatgacagctggaatagcctccagttgaggggcttggtggtgctccttatctctaaagcagctgggcccagcagcgtgaacacttcatgtcagaactatgacatggtcagtgggatctactcatgtcaaagaagtttggcagagatcacggagctaattcatattgctctccttgtacatcgtgggatagtaaatttaaatgagttgcaatcatctgatggtccactgaaagacatgcaatttggaaataaaattgctatcctgagtggagactttcttctagcaaatgcctgcaatggactagctctgctacagaacaccaaggttgtggaacttttagcaagtgctcttatggacttggtacaaggagtatatcatgaaaattctacttcaaaggaaagttatatcacagatgatattggaatatcgacttggaaggagcagacttttctctcccatggtgccttactagcaaagagctgccaagctgcaatggaattagcaaagcatgatgctgaggttcagaatatggcatttcagtatgggaagcacatggccatgagtcataagataaattctgatgtccagccttttattaaagaaaagaccagtgactccatgacttttaatctaaactcagctcctgtagtcttacatcaggaatttcttggaagagatttgtggattaaacagatcggagaggctcaagaaaaaggaagattggactatgctaagttgcgagaaagaatcaaagctggcaaaggtgtgacttcagctattgacctgtgtcgttaccatggaaacaaggcactggaggccctggagagctttcctccctcggaggccagatctgctttagaaaacattgtgtttgctgtgaccagattttcatgacatcaaattaaaaagacactattgttagttagctgaaaatcctagggaatgaggttgattgggagcgctttcacgatgcgttaatgacttttaaaacatatgcatttttccttccttttatcacattgctaaatgagttctgctttctttttggaactgctacaaacaaaattagaagaaaaaaaggtcaagcagttttcacttgtcacgccagaagcacacttgaggctgcagtcgcagaaataattaatgagattcgctcctgtgacctcagcaaatggacaggaaataagtccttattgattggaccgagccagggatggcgccagggcggtggcctgtggtttttcctgctagagaggacaaagcaagttggaagctgcaggtgtcaagagaaatgctctcaataccaaccagggaggattgtctaatcaaaaactagtgaccaatttgtcataatggagagtagttcaatggattgagaaaaatatgttttatttgttggcttgtaattatgtctctggattattattattttttttttagatgtagttttgctcttgttgcccaggctggagtgcaatggtgcagttttgactcactgcaacctccgcctcctgggttcaagtgattctcctgcctcagcctcccgagtagctggaattacaggcacctgccaccacgcctggctaattttgtatttttagtagagatggggtttcactatgttggtcaggctagtctcgaactcctgacctcaggtgatccgcctgcctcggcctcccaaagtgctgggattagaggcttgagccactgcacctggcctcatgtctctggatttataatgcagtatgaatatactttgtgctttatggtttttataatgtctttttggagaaattgccgaaaagttgccaaatacttgaagtaggagattaaaatgttatcaaatgttaaattggttatattaggaatagtctgtttttctttcctgaagatcagtttttttattcaaacacatttcaaagaaccaaattttttttttctttaaggaaaaaggagctttttttcaagtgaaatgtattcatttgtaatactttggtttaaggcatactttaatttttacgagtttcagaaacagaatttttgtactagggaattcattggtgagagtgttcttttaacctcagaatgtcaaattttggtcttgaaccacagacatccaattacagaaagaatataagcaatctcacaggcctgcaatcggacactgtctctgtgtggttcataggagatgatttttgaggtttgcactcatgcaatttgagaacaccgttgacaagaaggctgagtttacataaatgatctagattgaaactcagctacctttcttcctcatgtggtgtaattacagccctatctggagacagcgaatacagcaaacagattttattacctagttcgctcaaacactacatgaagttattttagttaaagccctcccccaaaagttataaaaccattttatcagggcccaacatgtggcatgcaatgaagagaaaatgtaaagctacagaggttaatgtattgtattataaaatattttaagtgtactcaaaatatcataattgtacagtttatgccaccataatttgaggcctatagatttagcttaagagaacactgttctgtttgaaatgctttctgtcactgaaattggcttaattagtaaccatggataagatgctttagatcagactaggttttaatcattaacttccacaaagaagtcatactttgcgttaggtgtgctggttggatgtgcaggaacttcagcaagcagtaggttttactaagcagatggtcgggcactgcagggcaccaggcaggatcctagggcgcctcttattctgcgttagcatctggtttgctgtatgaccttgcacaagtcacttccttctgagcctcaattttctcatctgtacaatgagattcaaaagttgacctgaaagtcaagtgtgaaaaaaaaaaagagattaaacaagataattatgaaattctt

SEQ ID NO: 203990 - DNA, 1200 bp, Artificial Sequence
  derived and/or modified sequence
atgaactttaggcagttgcttttgcatctcccaaggtatcttggagcgtcagggtcccccagacgactgtggtggagcccctccctggacactatttcttctgtgggcagctggcgtggtcgtagcagtaagtcacccgctcactggaaccaggtggtgtcagaggcagagaaaatcgtgggatatcccacaagcttcatgtctttgaggtgcctgctgtcagacgaactgtcaaacattgccatgcaggtgcggaagctagtgggaacacagcatccactactgaccacagccagagggcttgtgcacgattcatggaactcactgcaattaagaggattggtggtgctcctgatatcgaaggcggcaggaccatcctccgtgaatacctcatgtcagaattacgacatggtctccggaatttatagctgccagagatctcttgctgagattaccgagctcattcatatcgcactgctcgtacacagggggattgtaaatctgaacgagttgcaaagctccgacgggccactgaaagatatgcagttcggcaataaaatcgcaattcttagcggtgattttctcttggcgaatgcttgcaacgggctcgctctgctccagaatacaaaggtggtggagctgttggcttctgctctgatggacctggttcagggagtctaccatgaaaactccacttctaaggagtcctatatcaccgatgatatcgggatcagtacatggaaggagcagactttcttgtcccacggcgctttgctcgcaaaatcctgtcaggccgctatggagctggccaagcacgatgccgaggtccagaacatggctttccagtacggaaaacacatggctatgagccacaagatcaattctgatgtgcagccattcataaaggagaaaacatctgacagtatgaccttcaacttaaacagcgcccctgtcgtcctgcatcaggagtttctcggtcgggacctgtggataaagcagatcggggaggcacaggagaaaggacggctcgactacgcaaagctacgggaaaggatcaaagccggtaaaggagttacttctgccatcgatctgtgtaggtaccacggaaataaggcattggaggcactcgagtcctttccaccatccgaggcccgatcggcactcgaaaatattgtgtttgccgtcacaagattcagctag

SEQ ID NO: 203991 - DNA, 1200 bp, Artificial Sequence
  derived and/or modified sequence
atgaacttcagacagctgctgctgcacctgcccagatacctgggcgccagcggcagccccagaagactgtggtggagccccagcctggacaccatcagcagcgtgggcagctggagaggcagaagcagcaagagccccgcccactggaaccaggtggtgagcgaggccgagaagatcgtgggctaccccaccagcttcatgagcctgagatgcctgctgagcgacgagctgagcaacatcgccatgcaggtgagaaagctggtgggcacccagcaccccctgctgaccaccgccagaggcctggtgcacgacagctggaacagcctgcagctgagaggcctggtggtgctgctgatcagcaaggccgccggccccagcagcgtgaacaccagctgccagaactacgacatggtgagcggcatctacagctgccagagaagcctggccgagatcaccgagctgatccacatcgccctgctggtgcacagaggcatcgtgaacctgaacgagctgcagagcagcgacggccccctgaaggacatgcagttcggcaacaagatcgccatcctgagcggcgacttcctgctggccaacgcctgcaacggcctggccctgctgcagaacaccaaggtggtggagctgctggccagcgccctgatggacctggtgcagggcgtgtaccacgagaacagcaccagcaaggagagctacatcaccgacgacatcggcatcagcacctggaaggagcagaccttcctgagccacggcgccctgctggccaagagctgccaggccgccatggagctggccaagcacgacgccgaggtgcagaacatggccttccagtacggcaagcacatggccatgagccacaagatcaacagcgacgtgcagcccttcatcaaggagaagaccagcgacagcatgaccttcaacctgaacagcgcccccgtggtgctgcaccaggagttcctgggcagagacctgtggatcaagcagatcggcgaggcccaggagaagggcagactggactacgccaagctgagagagagaatcaaggccggcaagggcgtgaccagcgccatcgacctgtgcagataccacggcaacaaggccctggaggccctggagagcttcccccccagcgaggccagaagcgccctggagaacatcgtgttcgccgtgaccagattcagctag

SEQ ID NO: 203992 - protein, 352 aa, Artificial Sequence
  derived and/or modified sequence
MARGRKMSKPRAVEAAAAAAAVAATAPGPEMVERRGPGRPRTDGENVFTGQSKIYSYMSPNKCSGMRFPLQEENSVTHHEVKCQGKPLAGIYRKREEKRNAGNAVRSAMKSEEQKIKDARKGPLVPFPNQKSEAAEPPKTPPSSCDSTNAAIAKQALKKPIKGKQAPRKKAQGKTQQNRKLTDFYPVRRSSRKSKAELQSEERKRIDELIESGKEEGMKIDLIDGKGRGVIATKQFSRGDFVVEYHGDLIEITDAKKREALYAQDPSTGCYMYYFQYLSKTYCVDATRETNRLGRLINHSKCGNCQTKLHDIDGVPHLILIASRDIAAGEELLYDYGDRSKASIEAHPWLKH

SEQ ID NO: 203993 - DNA, 1059 bp, Artificial Sequence
  derived and/or modified sequence
atggccagaggcagaaagatgagcaagcccagagccgtggaggccgccgccgccgccgccgccgtggccgccaccgcccccggccccgagatggtggagagaagaggccccggcagacccagaaccgacggcgagaacgtgttcaccggccagagcaagatctacagctacatgagccccaacaagtgcagcggcatgagattccccctgcaggaggagaacagcgtgacccaccacgaggtgaagtgccagggcaagcccctggccggcatctacagaaagagagaggagaagagaaacgccggcaacgccgtgagaagcgccatgaagagcgaggagcagaagatcaaggacgccagaaagggccccctggtgcccttccccaaccagaagagcgaggccgccgagccccccaagaccccccccagcagctgcgacagcaccaacgccgccatcgccaagcaggccctgaagaagcccatcaagggcaagcaggcccccagaaagaaggcccagggcaagacccagcagaacagaaagctgaccgacttctaccccgtgagaagaagcagcagaaagagcaaggccgagctgcagagcgaggagagaaagagaatcgacgagctgatcgagagcggcaaggaggagggcatgaagatcgacctgatcgacggcaagggcagaggcgtgatcgccaccaagcagttcagcagaggcgacttcgtggtggagtaccacggcgacctgatcgagatcaccgacgccaagaagagagaggccctgtacgcccaggaccccagcaccggctgctacatgtactacttccagtacctgagcaagacctactgcgtggacgccaccagagagaccaacagactgggcagactgatcaaccacagcaagtgcggcaactgccagaccaagctgcacgacatcgacggcgtgccccacctgatcctgatcgccagcagagacatcgccgccggcgaggagctgctgtacgactacggcgacagaagcaaggccagcatcgaggcccacccctggctgaagcactag

SEQ ID NO: 203994 - DNA, 1059 bp, Artificial Sequence
  derived and/or modified sequence
atggcaagaggtaggaaaatgtctaagccaagagcagtggaggcagctgccgcggccgctgcagtagctgcgactgccccagggcccgagatggtagaaagacgtggcccagggcgcccacgtaccgacggcgaaaacgttttcacagggcagtcaaagatttactcttacatgagtcccaacaaatgctcgggcatgcgcttcccactccaggaggagaacagcgtgactcaccacgaagtgaagtgccaaggaaagccgttggcaggcatctacaggaaacgcgaagaaaagaggaacgcaggcaacgcggtgcgctccgctatgaagtcagaggaacaaaaaatcaaagacgcaagaaagggccctctcgtgccctttccaaatcagaagtctgaggctgctgaaccacccaaaacaccaccctcttcgtgcgattctactaacgctgcaattgctaaacaggctctcaagaagcctatcaagggcaaacaagccccccgcaagaaggcacagggaaaaactcagcagaatcgtaagcttaccgatttctatcccgtgcgtagatcttcccgcaaatctaaggctgagttgcagtccgaagagaggaagcggatcgatgaacttatcgagagcggcaaggaggagggtatgaagattgacctgatcgatgggaagggccgcggtgtaatcgccactaaacagttcagcagaggggattttgtggtggagtaccacggtgacctgattgagatcaccgacgcaaaaaaaagagaggccctatacgcccaggatccctcaactggctgttatatgtattactttcagtacctgtccaaaacatattgtgtcgacgctactagagaaacaaaccgcctgggacgactgattaaccatagtaagtgtggtaattgtcagacgaagctccacgatatcgacggagttcctcacctgattctcattgcgagcagagatatcgccgctggcgaagagctgttatacgactatggggatagatccaaagcctcaatcgaggcacatccatggctgaagcactag

SEQ ID NO: 203995 - DNA, 1059 bp, Artificial Sequence
  derived and/or modified sequence
atggcccgggggagaaagatgtccaaacctcgggcagtggaggccgcagccgccgcagcagccgtggcagctacggcccccggccctgagatggtggaacggaggggccccggacgacccaggaccgacggcgaaaacgtgtttactggacagtcaaaaatttacagctatatgtcacccaataagtgctcggggatgcgcttccctctccaggaagaaaattccgtgacacaccacgaggtgaagtgccaggggaagccgcttgctggcatctatcggaaacgagaggaaaagcggaacgctggcaacgccgttagatccgccatgaaatctgaggaacagaagatcaaagatgcccgcaaaggcccactggttccctttcctaaccagaagtccgaagctgccgagcctccaaaaacacctccttcatcctgcgactctaccaatgccgcaatcgctaagcaggccctaaaaaaacctattaagggaaaacaggcacctagaaaaaaggcgcaaggaaaaacacagcagaacaggaagcttacagacttttacccagtcaggcgaagctctaggaaaagtaaggcggagttacaatccgaggaaaggaaacgaatcgatgagctcatcgagagcggcaaagaggagggtatgaagatagatttgatcgatgggaaaggacggggcgttatcgctaccaaacagttcagccggggagacttcgtagtggagtatcacggcgacttaattgaaatcacggacgcaaaaaagagagaggctctatatgcacaggacccaagtactggatgctacatgtactattttcaatacctgagcaagacgtattgcgttgatgccactagagagacgaatcggttaggaaggctgatcaatcatagcaagtgtggcaattgtcagaccaagctacatgacattgatggagtaccgcacttaattctgatcgccagccgcgacatagctgccggcgaagaactgttgtatgattacggagatcggagcaaagcaagcatagaggcgcatccttggctcaagcattag

SEQ ID NO: 203996 - DNA, 1059 bp, Artificial Sequence
  derived and/or modified sequence
atggcccggggcaggaagatgagcaagcccagggctgtggaggccgctgctgctgctgctgctgtggccgccacagcccctggccctgagatggtggagcggcggggccctggccggcccaggacagatggagaaaatgtgttcaccggccagagcaagatctacagctacatgagccccaacaagtgcagcggcatgaggttccccctgcaggaggagaacagcgtgacccaccacgaggtgaagtgccagggcaagcccctggccggcatctacaggaagcgggaggagaagagaaatgctggaaatgctgtgcgcagcgccatgaagtctgaggagcagaagatcaaggatgccaggaagggccccctggtgcccttccccaaccagaagtctgaggccgctgagccccccaagaccccacccagcagctgtgacagcaccaatgctgccatcgccaagcaggccctgaagaagcccatcaagggcaagcaggcccccaggaagaaggcccagggcaagacccagcagaacaggaagctgacagacttctaccctgtgcggcgcagcagcaggaagagcaaggccgagctgcagagcgaggagaggaagagaattgatgagctgattgagagcggcaaggaggagggcatgaagattgacctgattgatggcaagggccggggcgtgattgccaccaagcagttcagcagaggagactttgtggtggagtaccacggggacctgattgagatcacagatgccaagaagcgggaggccctgtatgcccaggaccccagcacaggctgctacatgtactacttccagtacctgagcaagacctactgtgtggatgccacccgggagaccaaccggctgggccgcctcatcaaccacagcaaatgtggcaactgccagaccaagctgcatgacattgatggagtgccccacctgatcctgattgccagccgggacattgctgctggggaggagctgctgtatgactatggagacaggagcaaggccagcattgaggcccacccctggctgaagcactag

SEQ ID NO: 203997 - DNA, 1059 bp, Artificial Sequence
  derived and/or modified sequence
atggcccggggccggaagatgagcaagccccgggccgtggaggccgccgcggctgcggccgctgtcgctgctactgcacccgggccagaaatggtagaacggcgcggtcccggaaggccacggaccgatggagagaatgtcttcaccggacagtctaagatctacagttacatgagcccaaacaaatgctctgggatgcggttccctttgcaagaagaaaattccgtcacccatcatgaggtgaaatgccaaggtaagcctcttgctgggatctatagaaagcgagaggaaaaacgcaacgccgggaatgcagtgcgctccgccatgaagtctgaggagcagaaaatcaaggacgcgcgcaaaggcccgttagttccattccccaaccagaagagcgaagcggcggagccacctaagaccccacccagctcttgtgacagcactaacgcggccatcgctaagcaggcgctaaagaagccaatcaaaggtaaacaggcgcctcggaaaaaggcccaaggtaaaacccagcagaaccgcaagctcactgatttctatcctgttcgccgctccagtcgtaaatcgaaagccgagctccaatctgaagagagaaaacgtattgacgagcttattgaatccggcaaagaagaaggaatgaaaatagacctcattgacggaaaggggcggggtgtcattgctacgaagcagttctcccggggtgacttcgttgttgagtatcatggtgatctgatcgaaatcacagacgcgaagaaacgagaagccttatacgcccaggacccaagcactggctgttacatgtactactttcaatacctatccaagacgtattgcgtcgacgcaactagagagacgaatcgcttggggcgtctgattaaccattccaaatgtggtaactgccagaccaagctgcatgatattgatggcgtaccgcaccttatcctgattgccagcagagatatcgccgccggcgaagaattgctgtacgattacggagatcggagcaaagcttccatcgaggcacacccctggctgaaacattag

SEQ ID NO: 203998 - DNA, 1059 bp, Artificial Sequence
  derived and/or modified sequence
atggcccggggccggaagatgagcaagccccgggccgtggaggccgccgcggccgcggccgcagttgcggcgacggctcctggacctgagatggtggagcggagggggcctggtagaccacggaccgatggggagaatgtgttcaccggacaatcaaagatctattcttatatgagccctaacaagtgttcaggcatgagatttccactccaggaagagaatagcgttacacaccatgaggtcaaatgtcagggtaagcctctggccgggatttatcgcaagcgtgaagaaaaacggaacgctggcaacgcagtcaggagcgcaatgaaatcagaggagcaaaagatcaaagacgcccgtaagggccctctcgtaccttttcccaaccaaaaatccgaggcagcagagccccctaagaccccccctagctcttgcgatagcacaaacgctgcgattgcgaaacaggctttgaaaaaacccatcaaaggcaagcaggctcccaggaagaaagcccagggaaagacccagcaaaaccggaagctgaccgacttctatcctgtgagacgttcttccaggaaatcaaaggccgagctacagagcgaggagcggaagaggattgacgagcttattgaaagcgggaaggaggaaggaatgaaaatcgatttgatcgatggaaaaggccgcggcgtaatcgcaaccaagcagttcagtagaggcgactttgttgtagaatatcacggggatctcatcgagatcacagacgcgaagaaaagagaggccctgtacgcccaggacccaagcactggctgttatatgtattactttcagtacctttctaaaacatactgcgtcgacgctactcgggaaacaaatcgacttggcaggcttatcaaccacagcaagtgtgggaactgtcaaactaagctccatgatattgatggagtacctcacttgatcctcattgccagccgcgacatcgctgccggggaggagcttctatacgactatggcgaccggagcaaggctagcatcgaagcacatccttggctgaagcactag

SEQ ID NO: 203999 - DNA, 1059 bp, Artificial Sequence
  derived and/or modified sequence
atggcccgtggacggaagatgagtaagcctagggccgtcgaggccgctgcggctgccgcagccgtcgcagcgacagcacccggacccgagatggttgagaggcggggtccgggtcggcctcgcacagacggagaaaacgtatttaccggccagtccaaaatatattcttacatgtcccccaacaagtgtagtggcatgcggtttcctctgcaggaggagaattccgtgacccaccatgaagtcaaatgtcagggcaaacccctggccggtatctaccgaaagagggaagagaaacggaatgccggtaacgctgtaaggtcggcgatgaagtcagaggagcaaaagatcaaagacgctcggaaggggcctttggtgccattccccaaccaaaaaagcgaggccgctgagccaccgaagacaccgccaagttcttgtgatagcacaaacgccgcaatcgcgaaacaggcattgaagaaacccatcaaaggtaaacaggctcccagaaagaaggcacagggcaagactcagcaaaatcgcaaattgactgacttttatccagtcagacgcagtagccgaaagtccaaagcggaactccagtcggaagaacggaagcgtattgatgagctgattgaatccggaaaggaagagggaatgaagattgacctgatcgatgggaaaggtcggggagtcatcgcaaccaagcagttttcccgcggtgactttgtggtcgagtaccacggggacctcattgaaattacggatgcaaaaaagcgggaggcattgtacgctcaggaccctagtacgggatgttacatgtactattttcagtacctgagtaagacctactgtgtagacgctacacgcgaaacgaaccgtctcggccgactgattaaccatagcaaatgcggcaactgccagactaaacttcatgatattgacggagtgccccacctgatcttgatagcttcccgcgatattgctgccggagaagagctgctgtacgactacggggaccgcagcaaggcttccattgaggctcacccctggctcaagcattag

SEQ ID NO: 204000 - DNA, 1059 bp, Artificial Sequence
  derived and/or modified sequence
atggcacgtggccgaaagatgtccaagcccagggcggtagaggccgcagctgccgcagctgctgtggctgctactgccccagggcctgagatggtcgaacggagggggccaggcaggccaagaaccgatggcgaaaatgtgttcactggccagagcaaaatctatagctatatgtcgcctaacaagtgtagcggaatgcgattcccgctccaggaagagaattccgtgactcatcacgaggtaaagtgtcagggaaaaccattggccggtatttaccggaaaagagaagaaaaaagaaacgcaggcaacgcagtgagaagcgctatgaaatctgaggagcagaaaatcaaagacgccaggaaggggccactggtgccttttcctaaccagaagagcgaggccgcagaaccaccgaagacacctccgagttcttgcgattctaccaatgctgctatagccaagcaggccctcaagaagccaattaaaggcaagcaggcccctcggaagaaggcgcagggtaagacccagcaaaatcggaagcttaccgacttctatccagttaggaggtctagccggaaatctaaggccgagcttcagagcgaagagagaaagcggattgatgagcttattgagtccggaaaagaagaggggatgaaaatcgatctgatcgatgggaaaggtcgaggggtaatcgccaccaaacagttcagccggggtgacttcgtcgtggaatatcacggagacctaatcgaaatcaccgatgccaagaagcgcgaggccctttacgcccaggacccatcgactggttgctatatgtactactttcaatacctgtctaagacttactgtgtcgatgccacgagagaaaccaaccgactcggacggcttattaaccactctaaatgcggcaattgtcagaccaagctccacgacatcgatggggtgccccacttaatccttatcgcgagccgagacattgctgccggagaggaactcctttacgattacggagaccggtccaaagcttctatagaggcccacccatggcttaagcactag

SEQ ID NO: 204001 - DNA, 3069 bp, Artificial Sequence
  derived and/or modified sequence
agatccggtcggctcggagcccagggctccagccgggctactcacgctccggaggcggagcttcagcagcgggagggggaggaatctggggcctcccaatggcagctcgggtgtcttccatcgcagccattcaacgtctggcgacggtcaaatttaaacacccctcccacctcctccgccgggacctgtcgggaaagcgtttgcagttattgcggcggctggacacgccccgccgccgaagaggcgggagaagggcggggcctttctccgagttggcctatcactacgggcagcctgcggagaggcgggaggcggcgccaatcggggcgagcagctggagcccggcggagcagttggctgagttgttgcaacttttttcgaaagctgggtttcccgggagatcccaggcggtgacagagtggagccatggctagaggcaggaagatgtccaagccccgcgcggtggaggcggcggcggcggcggcggcggtggcagcgacggccccgggcccggagatggtggagcggaggggcccggggaggccccgcaccgacggggagaacgtatttaccgggcagtcaaagatctattcctacatgagcccgaacaaatgctctggaatgcgtttcccccttcaggaagagaactcagttacacatcacgaagtcaaatgccaggggaaaccattagccggaatctacaggaaacgagaagagaaaagaaatgctgggaacgcagtacggagcgccatgaagtccgaggaacagaagatcaaagacgccaggaaaggtcccctggtaccttttccaaaccaaaaatctgaagcagcagaacctccaaaaactccaccctcatcttgtgattccaccaatgcagccatcgccaagcaagccctgaaaaagcccatcaagggcaaacaggccccccgaaaaaaagctcaaggaaaaacgcaacagaatcgcaaacttacggatttctaccctgtccgaaggagctccaggaagagcaaagccgagctgcagtctgaagaaaggaaaagaatagatgaattgattgaaagtgggaaggaagaaggaatgaagattgacctcatcgatggcaaaggcaggggtgtgattgccaccaagcagttctcccggggtgactttgtggtggaataccacggggacctcatcgagatcaccgacgccaagaaacgggaggctctgtacgcacaggacccttccacgggctgctacatgtactattttcagtatctgagcaaaacctactgcgtggatgcaactagagagacaaatcgcctaggaagactgatcaatcacagcaaatgtgggaactgccaaaccaaactgcacgacatcgacggcgtacctcacctcatcctcatcgcctcccgagacatcgcggctggggaggagctcctgtatgactatggggaccgcagcaaggcttccattgaagcccacccgtggctgaagcattaaccggtgggccccgtgccctccccgccccactttcccttcttcaaaggacaaagtgccctcaaagggaattgaattttttttttacacacttaatcttagcggattacttcagatgtttttaaaaagtatattaagatgccttttcactgtagtatttaaatatctgttacaggtttccaaggtggacttgaacagatggccttatattaccaaaacttttatattctagttgtttttgtactttttttgcatacaagccgaacgtttgtgcttcccgtgcatgcagtcaaagactcagcacaggttttagaggaaatagtcaaacatgaactaggaagccaggtgagtctcctttctccagtggaagagccgggaccttccccctgcacccccgacatccagggacggggtgtgaggaagacgctgcctcccaatggcctggacgggatgtttccaagctcttgttcccctaacgtctcaacaggcgctcactgaagtgtatgaatattttttaaaaaggtttttgcagtaagctagtcttcccctctgctttctcgaaagcttactgagccccgggccccaagcacgggccgggcatagatttcctcttccacaagctgccgcttttctgggcaccttgaagcatcagggcgtgaaatcaaactagatgtgggcagggagagggttgcttacctgccctgctggggcagggtttcctgaaactgggttaattctttatagaaatgtgaacactgaatttattttaaaaaataataataaaaatttaaaaaaattaaaaataaaaaaaaccacagaaaacaactttacatgtatataggtcttgaagtgagtgaagtggctgcttttttttttttttttttttgcttttttttgctttttgtagaagagattgagaatggtactctaatcaaaaataaagttttgtagtgggaccagaaattacttacctgacatccacccccattccccctcatcctgctggggttgaaagttccagacctgctgtcgaggccttgtgtttgtcagacacccagtgtcctcctgcaaggacgcaactgtgagctgaggtgtgagcctaggagcacacagggcccggcagcccccaggaatcaaggatagggctaaggttttcaccttaactgtgaaggcaggaggaataggtgactgcttcctcccgcccttcacagaactgattctcacacactgtcccttcagtccagggggccggggctcaggagccatgacctggtgtctcctgcccaccctggtcccaggtaaatgtgaatggagacaggtatgagaggctgtcctcgtctttgattcccccccaaccccacctcgggcctcacgacggtgctacctaagaaagtcttccctcccaccccccgctagcctggtcagtggtcagcaaattggaagaggatccgatgggagtgtaaatgtgagacacaatgtcttgattatacctgtttgtggtttagctttgtatttaaacaaggaaataaacttgaaaattatttgtcatcataaaaatgaaacaaattaaaatatttattgccaggc

SEQ ID NO: 204002 - DNA, 3140 bp, Artificial Sequence
  derived and/or modified sequence
agatccggtcggctcggagcccagggctccagccgggctactcacgctccggaggcggagcttcagcagcgggagggggaggaatctggggcctcccaatggcagctcgggtgtcttccatcgcagccattcaacgtctggcgacggtcaaatttaaacacccctcccacctcctccgccgggacctgtcgggaaagcgtttgcagttattgcggcggctggacacgccccgccgccgaagaggcgggagaagggcggggcctttctccgagttggcctatcactacgggcagcctgcggagaggcgggaggcggcgccaatcggggcgagcagctggagcccggcggagcagttggctgagttgttgcaacttttttcgaaagctgggtttcccgggagatcccaggcggtgacagagtggagccatggctagaggcaggaagatgtccaagccccgcgcggtggaggcggcggcggcggcggcggcggtggcagcgacggccccgggcccggagatggtggagcggaggggcccggggaggccccgcaccgacggggagaacgtatttaccgggcagtcaaagatctattcctacatgagcccgaacaaatgctctggaatgcgtttcccccttcaggaagagaactcagttacacatcacgaagtcaaatgccaggggaaaccattagccggaatctacaggaaacgagaagagaaaagaaatgctgggaacgcagtacggagcgccatgaagtccgaggaacagaagatcaaagacgccaggaaaggtcccctggtaccttttccaaaccaaaaatctgaagcagcagaacctccaaaaactccaccctcatcttgtgattccaccaatgcagccatcgccaagcaagccctgaaaaagcccatcaagggcaaacaggccccccgaaaaaaagctcaaggaaaaacgcaacagaatcgcaaacttacggatttctaccctgtccgaaggagctccaggaagagcaaagccgagctgcagtctgaagaaaggaaaagaatagatgaattgattgaaagtgggaaggaagaaggaatgaagattgacctcatcgatggcaaaggcaggggtgtgattgccaccaagcagttctcccggggtgactttgtggtggaataccacggggacctcatcgagatcaccgacgccaagaaacgggaggctctgtacgcacaggacccttccacgggctgctacatgtactattttcagtatctgagcaaaacctactgcgtggatgcaactagagagacaaatcgcctaggaagactgatcaatcacagcaaatgtgggaactgccaaaccaaactgcacgacatcgacggcgtacctcacctcatcctcatcgcctcccgagacatcgcggctggggaggagctcctgtatgactatggggaccgcagcaaggcttccattgaagcccacccgtggctgaagcattaaccggtgggccccgtgccctccccgccccactttcccttcttcaaaggacaaagtgccctcaaagggaattgaattttttttttacacacttaatcttagcggattacttcagatgtttttaaaaagtatattaagatgccttttcactgtagtatttaaatatctgttacaggtttccaaggtggacttgaacagatggccttatattaccaaaacttttatattctagttgtttttgtactttttttgcatacaagccgaacgtttgtgcttcccgtgcatgcagtcaaagactcagcacaggttttagaggaaatagtcaaacatgaactaggaagccaggtgagtctcctttctccagtggaagagccgggaccttccccctgcacccccgacatccagggacggggtgtgaggaagacgctgcctcccaatggcctggacgggatgtttccaagctcttgttcccctaacgtctcaacaggcgctcactgaagtgtatgaatattttttaaaaaggtttttgcagtaagctagtcttcccctctgctttctcgaaagcttactgagccccgggccccaagcacgggccgggcatagatttcctcttccacaagctgccgcttttctgggcaccttgaagcatcagggcgtgaaatcaaactagatgtgggcagggagagggttgcttacctgccctgctggggcagggtttcctgaaactgggttaattctttatagaaatgtgaacactgaatttattttaaaaaataataataaaaatttaaaaaaattaaaaataaaaaaaaccacagaaaacaactttacatgtatataggtcttgaagtgagtgaagtggctgcttttttttttttttttttttgcttttttttgctttttgtagaagagattgagaatggtactctaatcaaaaataaagttttgtagtgggaccagaaattacttacctgacatccacccccattccccctcatcctgctggggttgaaagttccagacctgctgtcgaggccttgtgtttgtcagacacccagtgtcctcctgcaaggacgcaactgtgagctgaggtgtgagcctaggagcccaggacccctgaccccggccgctgctgccagcctcagaaaggcacccaggtgtgcaggggagcacacagggcccggcagcccccaggaatcaaggatagggctaaggttttcaccttaactgtgaaggcaggaggaataggtgactgcttcctcccgcccttcacagaactgattctcacacactgtcccttcagtccagggggccggggctcaggagccatgacctggtgtctcctgcccaccctggtcccaggtaaatgtgaatggagacaggtatgagaggctgtcctcgtctttgattcccccccaaccccacctcgggcctcacgacggtgctacctaagaaagtcttccctcccaccccccgctagcctggtcagtggtcagcaaattggaagaggatccgatgggagtgtaaatgtgagacacaatgtcttgattatacctgtttgtggtttagctttgtatttaaacaaggaaataaacttgaaaattatttgtcatcataaaaatgaaacaaattaaaatatttattgccaggcaaggcca

SEQ ID NO: 204003 - protein, 623 aa, Artificial Sequence
  derived and/or modified sequence
MPPKVTSELLRQLRQAMRNSEYVTEPIQAYIIPSGDAHQSEYIAPCDCRRAFVSGFDGSAGTAIITEEHAAMWTDGRYFLQAAKQMDSNWTLMKMGLKDTPTQEDWLVSVLPEGSRVGVDPLIIPTDYWKKMAKVLRSAGHHLIPVKENLVDKIWTDRPERPCKPLLTLGLDYTGISWKDKVADLRLKMAERNVMWFVVTALDEIAWLFNLRGSDVEHNPVFFSYAIIGLETIMLFIDGDRIDAPSVKEHLLLDLGLEAEYRIQVHPYKSILSELKALCADLSPREKVWVSDKASYAVSETIPKDHRCCMPYTPICIAKAVKNSAESEGMRRAHIKDAVALCELFNWLEKEVPKGGVTEISAADKAEEFRRQQADFVDLSFPTISSTGPNGAIIHYAPVPETNRTLSLDEVYLIDSGAQYKDGTTDVTRTMHFGTPTAYEKECFTYVLKGHIAVSAAVFPTGTKGHLLDSFARSALWDSGLDYLHGTGHGVGSFLNVHEGPCGISYKTFSDEPLEAGMIVTDEPGYYEDGAFGIRIENVVLVVPVKTKYNFNNRGSLTFEPLTLVPIQTKMIDVDSLTDKECDWLNNYHLTCRDVIGKELQKQGRQEALEWLIRETQPISKQH

SEQ ID NO: 204004 - protein, 552 aa, Artificial Sequence
  derived and/or modified sequence
MWTDGRYFLQAAKQMDSNWTLMKMGLKDTPTQEDWLVSVLPEGSRVGVDPLIIPTDYWKKMAKVLRSAGHHLIPVKENLVDKIWTDRPERPCKPLLTLGLDYTGISWKDKVADLRLKMAERNVMWFVVTALDEIAWLFNLRGSDVEHNPVFFSYAIIGLETIMLFIDGDRIDAPSVKEHLLLDLGLEAEYRIQVHPYKSILSELKALCADLSPREKVWVSDKASYAVSETIPKDHRCCMPYTPICIAKAVKNSAESEGMRRAHIKDAVALCELFNWLEKEVPKGGVTEISAADKAEEFRRQQADFVDLSFPTISSTGPNGAIIHYAPVPETNRTLSLDEVYLIDSGAQYKDGTTDVTRTMHFGTPTAYEKECFTYVLKGHIAVSAAVFPTGTKGHLLDSFARSALWDSGLDYLHGTGHGVGSFLNVHEGPCGISYKTFSDEPLEAGMIVTDEPGYYEDGAFGIRIENVVLVVPVKTKYNFNNRGSLTFEPLTLVPIQTKMIDVDSLTDKECDWLNNYHLTCRDVIGKELQKQGRQEALEWLIRETQPISKQH

SEQ ID NO: 204005 - protein, 666 aa, Artificial Sequence
  derived and/or modified sequence
MAASRKPPRVRVNHQDFQLRNLRIIEPNEVTHSGDTGVETDGRMPPKVTSELLRQLRQAMRNSEYVTEPIQAYIIPSGDAHQSEYIAPCDCRRAFVSGFDGSAGTAIITEEHAAMWTDGRYFLQAAKQMDSNWTLMKMGLKDTPTQEDWLVSVLPEGSRVGVDPLIIPTDYWKKMAKVLRSAGHHLIPVKENLVDKIWTDRPERPCKPLLTLGLDYTGISWKDKVADLRLKMAERNVMWFVVTALDEIAWLFNLRGSDVEHNPVFFSYAIIGLETIMLFIDGDRIDAPSVKEHLLLDLGLEAEYRIQVHPYKSILSELKALCADLSPREKVWVSDKASYAVSETIPKDHRCCMPYTPICIAKAVKNSAESEGMRRAHIKDAVALCELFNWLEKEVPKGGVTEISAADKAEEFRRQQADFVDLSFPTISSTGPNGAIIHYAPVPETNRTLSLDEVYLIDSGAQYKDGTTDVTRTMHFGTPTAYEKECFTYVLKGHIAVSAAVFPTGTKGHLLDSFARSALWDSGLDYLHGTGHGVGSFLNVHEGPCGISYKTFSDEPLEAGMIVTDEPGYYEDGAFGIRIENVVLVVPVKTKYNFNNRGSLTFEPLTLVPIQTKMIDVDSLTDKECDWLNNYHLTCRDVIGKELQKQGRQEALEWLIRETQPISKQH

SEQ ID NO: 204006 - DNA, 1872 bp, Artificial Sequence
  derived and/or modified sequence
atgccccccaaggtgaccagcgagctgctgagacagctgagacaggccatgagaaacagcgagtacgtgaccgagcccatccaggcctacatcatccccagcggcgacgcccaccagagcgagtacatcgccccctgcgactgcagaagagccttcgtgagcggcttcgacggcagcgccggcaccgccatcatcaccgaggagcacgccgccatgtggaccgacggcagatacttcctgcaggccgccaagcagatggacagcaactggaccctgatgaagatgggcctgaaggacacccccacccaggaggactggctggtgagcgtgctgcccgagggcagcagagtgggcgtggaccccctgatcatccccaccgactactggaagaagatggccaaggtgctgagaagcgccggccaccacctgatccccgtgaaggagaacctggtggacaagatctggaccgacagacccgagagaccctgcaagcccctgctgaccctgggcctggactacaccggcatcagctggaaggacaaggtggccgacctgagactgaagatggccgagagaaacgtgatgtggttcgtggtgaccgccctggacgagatcgcctggctgttcaacctgagaggcagcgacgtggagcacaaccccgtgttcttcagctacgccatcatcggcctggagaccatcatgctgttcatcgacggcgacagaatcgacgcccccagcgtgaaggagcacctgctgctggacctgggcctggaggccgagtacagaatccaggtgcacccctacaagagcatcctgagcgagctgaaggccctgtgcgccgacctgagccccagagagaaggtgtgggtgagcgacaaggccagctacgccgtgagcgagaccatccccaaggaccacagatgctgcatgccctacacccccatctgcatcgccaaggccgtgaagaacagcgccgagagcgagggcatgagaagagcccacatcaaggacgccgtggccctgtgcgagctgttcaactggctggagaaggaggtgcccaagggcggcgtgaccgagatcagcgccgccgacaaggccgaggagttcagaagacagcaggccgacttcgtggacctgagcttccccaccatcagcagcaccggccccaacggcgccatcatccactacgcccccgtgcccgagaccaacagaaccctgagcctggacgaggtgtacctgatcgacagcggcgcccagtacaaggacggcaccaccgacgtgaccagaaccatgcacttcggcacccccaccgcctacgagaaggagtgcttcacctacgtgctgaagggccacatcgccgtgagcgccgccgtgttccccaccggcaccaagggccacctgctggacagcttcgccagaagcgccctgtgggacagcggcctggactacctgcacggcaccggccacggcgtgggcagcttcctgaacgtgcacgagggcccctgcggcatcagctacaagaccttcagcgacgagcccctggaggccggcatgatcgtgaccgacgagcccggctactacgaggacggcgccttcggcatcagaatcgagaacgtggtgctggtggtgcccgtgaagaccaagtacaacttcaacaacagaggcagcctgaccttcgagcccctgaccctggtgcccatccagaccaagatgatcgacgtggacagcctgaccgacaaggagtgcgactggctgaacaactaccacctgacctgcagagacgtgatcggcaaggagctgcagaagcagggcagacaggaggccctggagtggctgatcagagagacccagcccatcagcaagcagcactag

SEQ ID NO: 204007 - DNA, 1659 bp, Artificial Sequence
  derived and/or modified sequence
atgtggaccgacggcagatacttcctgcaggccgccaagcagatggacagcaactggaccctgatgaagatgggcctgaaggacacccccacccaggaggactggctggtgagcgtgctgcccgagggcagcagagtgggcgtggaccccctgatcatccccaccgactactggaagaagatggccaaggtgctgagaagcgccggccaccacctgatccccgtgaaggagaacctggtggacaagatctggaccgacagacccgagagaccctgcaagcccctgctgaccctgggcctggactacaccggcatcagctggaaggacaaggtggccgacctgagactgaagatggccgagagaaacgtgatgtggttcgtggtgaccgccctggacgagatcgcctggctgttcaacctgagaggcagcgacgtggagcacaaccccgtgttcttcagctacgccatcatcggcctggagaccatcatgctgttcatcgacggcgacagaatcgacgcccccagcgtgaaggagcacctgctgctggacctgggcctggaggccgagtacagaatccaggtgcacccctacaagagcatcctgagcgagctgaaggccctgtgcgccgacctgagccccagagagaaggtgtgggtgagcgacaaggccagctacgccgtgagcgagaccatccccaaggaccacagatgctgcatgccctacacccccatctgcatcgccaaggccgtgaagaacagcgccgagagcgagggcatgagaagagcccacatcaaggacgccgtggccctgtgcgagctgttcaactggctggagaaggaggtgcccaagggcggcgtgaccgagatcagcgccgccgacaaggccgaggagttcagaagacagcaggccgacttcgtggacctgagcttccccaccatcagcagcaccggccccaacggcgccatcatccactacgcccccgtgcccgagaccaacagaaccctgagcctggacgaggtgtacctgatcgacagcggcgcccagtacaaggacggcaccaccgacgtgaccagaaccatgcacttcggcacccccaccgcctacgagaaggagtgcttcacctacgtgctgaagggccacatcgccgtgagcgccgccgtgttccccaccggcaccaagggccacctgctggacagcttcgccagaagcgccctgtgggacagcggcctggactacctgcacggcaccggccacggcgtgggcagcttcctgaacgtgcacgagggcccctgcggcatcagctacaagaccttcagcgacgagcccctggaggccggcatgatcgtgaccgacgagcccggctactacgaggacggcgccttcggcatcagaatcgagaacgtggtgctggtggtgcccgtgaagaccaagtacaacttcaacaacagaggcagcctgaccttcgagcccctgaccctggtgcccatccagaccaagatgatcgacgtggacagcctgaccgacaaggagtgcgactggctgaacaactaccacctgacctgcagagacgtgatcggcaaggagctgcagaagcagggcagacaggaggccctggagtggctgatcagagagacccagcccatcagcaagcagcactag

SEQ ID NO: 204008 - DNA, 2001 bp, Artificial Sequence
  derived and/or modified sequence
atggccgccagcagaaagccccccagagtgagagtgaaccaccaggacttccagctgagaaacctgagaatcatcgagcccaacgaggtgacccacagcggcgacaccggcgtggagaccgacggcagaatgccccccaaggtgaccagcgagctgctgagacagctgagacaggccatgagaaacagcgagtacgtgaccgagcccatccaggcctacatcatccccagcggcgacgcccaccagagcgagtacatcgccccctgcgactgcagaagagccttcgtgagcggcttcgacggcagcgccggcaccgccatcatcaccgaggagcacgccgccatgtggaccgacggcagatacttcctgcaggccgccaagcagatggacagcaactggaccctgatgaagatgggcctgaaggacacccccacccaggaggactggctggtgagcgtgctgcccgagggcagcagagtgggcgtggaccccctgatcatccccaccgactactggaagaagatggccaaggtgctgagaagcgccggccaccacctgatccccgtgaaggagaacctggtggacaagatctggaccgacagacccgagagaccctgcaagcccctgctgaccctgggcctggactacaccggcatcagctggaaggacaaggtggccgacctgagactgaagatggccgagagaaacgtgatgtggttcgtggtgaccgccctggacgagatcgcctggctgttcaacctgagaggcagcgacgtggagcacaaccccgtgttcttcagctacgccatcatcggcctggagaccatcatgctgttcatcgacggcgacagaatcgacgcccccagcgtgaaggagcacctgctgctggacctgggcctggaggccgagtacagaatccaggtgcacccctacaagagcatcctgagcgagctgaaggccctgtgcgccgacctgagccccagagagaaggtgtgggtgagcgacaaggccagctacgccgtgagcgagaccatccccaaggaccacagatgctgcatgccctacacccccatctgcatcgccaaggccgtgaagaacagcgccgagagcgagggcatgagaagagcccacatcaaggacgccgtggccctgtgcgagctgttcaactggctggagaaggaggtgcccaagggcggcgtgaccgagatcagcgccgccgacaaggccgaggagttcagaagacagcaggccgacttcgtggacctgagcttccccaccatcagcagcaccggccccaacggcgccatcatccactacgcccccgtgcccgagaccaacagaaccctgagcctggacgaggtgtacctgatcgacagcggcgcccagtacaaggacggcaccaccgacgtgaccagaaccatgcacttcggcacccccaccgcctacgagaaggagtgcttcacctacgtgctgaagggccacatcgccgtgagcgccgccgtgttccccaccggcaccaagggccacctgctggacagcttcgccagaagcgccctgtgggacagcggcctggactacctgcacggcaccggccacggcgtgggcagcttcctgaacgtgcacgagggcccctgcggcatcagctacaagaccttcagcgacgagcccctggaggccggcatgatcgtgaccgacgagcccggctactacgaggacggcgccttcggcatcagaatcgagaacgtggtgctggtggtgcccgtgaagaccaagtacaacttcaacaacagaggcagcctgaccttcgagcccctgaccctggtgcccatccagaccaagatgatcgacgtggacagcctgaccgacaaggagtgcgactggctgaacaactaccacctgacctgcagagacgtgatcggcaaggagctgcagaagcagggcagacaggaggccctggagtggctgatcagagagacccagcccatcagcaagcagcactag

SEQ ID NO: 204009 - DNA, 1872 bp, Artificial Sequence
  derived and/or modified sequence
atgccgcccaaggtgacttcagagttactgagacagctgaggcaggccatgcgtaattctgagtacgtgacggagcccatacaggcttatataattcctagtggcgatgcccaccaatctgagtacatcgccccgtgtgactgtaggcgtgcttttgtcagcgggtttgatggcagcgcaggaacagccattataacagaagaacacgcagcaatgtggaccgatggacggtactttcttcaagccgcaaaacagatggatagtaattggactctaatgaagatgggactcaaggacacgcccactcaagaggattggctggtgtctgtgctgcccgagggctcaagggttggggtggaccctctgattattccaacagattactggaagaaaatggcaaaggtgctgcgcagcgccgggcatcatctaatccccgtgaaagagaaccttgtggacaagatctggactgaccgtcctgagcggccctgcaagcctctgctgacacttggtctggactacacaggtatctcctggaaggacaaagtggctgatctgcgactcaagatggccgaacgcaacgtcatgtggttcgttgttaccgcccttgatgagatcgcgtggttgttcaacctgagagggagcgacgttgagcataaccctgtgtttttttcttacgcaatcattggcctcgagacaatcatgctgtttatcgacggagatcgaatcgatgccccgtccgttaaagaacatctgctgctcgacttggggctggaggcagaataccgtatccaggtccatccttataagtccatcctcagcgaactgaaggctttgtgtgcagatctgtctccacgtgagaaggtgtgggtttcagacaaggcttcatacgccgtctccgagaccatccccaaagatcatcgctgctgcatgccttacaccccaatctgcattgcgaaggcagttaagaactcagctgagtctgagggaatgcggcgggcacacattaaagacgccgtggctctgtgcgagctgttcaattggctagaaaaagaagttccaaaaggcggtgtgactgagatttctgccgccgacaaagcagaagagtttaggcggcaacaggctgacttcgtggacctgagctttcccacgatcagcagcacagggcccaacggcgccatcatccactatgcccctgtgccagagactaataggactctcagcttggatgaggtctacctcattgactccggggcacaatacaaagacggtacaacagacgtaactcggacgatgcattttgggacacctaccgcctacgagaaagaatgctttacctatgtgctcaaaggacatatcgcagttagcgctgccgtgtttcccaccggtacaaagggacatctcctcgactccttcgccagatccgcgctgtgggactccgggctggactatctgcatggcaccggtcatggtgtgggatctttcctgaatgtacacgaggggccgtgtgggatttcttataagacattcagtgatgagccacttgaggctggaatgattgtcactgatgagccaggatattacgaagacggcgccttcgggatcaggatagaaaatgttgttctagtagtgccagtaaagacgaagtacaacttcaataatcggggttctttgacattcgagccactgactctagtgcccatacaaactaaaatgattgatgtggactccctgaccgataaggagtgcgactggttgaacaattatcatttaacgtgtcgcgatgtcatcggaaaggagctgcagaagcaaggacggcaggaggctctagaatggctgatccgcgagacgcagcctatctctaagcagcactag

SEQ ID NO: 204010 - DNA, 1659 bp, Artificial Sequence
  derived and/or modified sequence
atgtggacagacggacgatactttctccaggctgccaagcagatggattctaattggacactaatgaaaatgggcctcaaagatacccccacacaggaggactggctcgtaagcgtgctgcccgaaggcagccgagtgggtgtggaccctttgattattcctaccgattattggaagaaaatggccaaagtgttgcggtctgcgggccatcacttgatccctgtaaaagaaaaccttgtggacaaaatctggacggatcgacccgagaggccctgtaagcctctgctgaccctcgggctagattataccggcatctcgtggaaggacaaagtcgccgatttgagactgaaaatggcagagcggaatgtgatgtggttcgtggttaccgctcttgacgagatcgcttggctgtttaatctgcgcggcagcgatgtcgaacataatcccgttttcttcagttatgctattattgggctggaaacgatcatgctgttcatcgatggcgaccgtatcgatgccccttctgtgaaagagcacctgctgttagatttgggcttggaagcagaatacagaatccaagtgcacccatacaaatcaattctgagtgagctgaaagccctatgcgcagatctgtcaccgagagagaaagtgtgggtatccgataaagccagttatgctgtaagtgagacgattccaaaggatcatcgttgctgtatgccttatacacccatatgcatcgccaaggctgttaagaattctgcagaatctgagggcatgaggagagcccacattaaggatgctgtcgccctgtgcgaactgtttaactggctggagaaggaggtacctaaggggggggtgacagagatctccgctgctgataaggcagaagagttcagacgtcagcaggccgatttcgtcgacctgtctttccctaccatatcttccaccggcccgaacggggctatcatccattacgcccctgtgccagaaactaatcggaccttgtccctcgatgaggtgtaccttatcgactccggggctcagtacaaggacggaacaacggacgtcacacggacaatgcacttcggaaccccaaccgcatatgagaaggagtgtttcacttacgtgctcaaaggacatatcgccgtgtccgccgccgtttttccaaccggcaccaaaggccaccttctcgacagtttcgctcgcagcgcgctctgggattccgggctggactacttgcatggtactggacacggcgttggctccttcttaaacgtacacgaaggcccctgcggcatttcgtataaaactttctcagacgagcctctagaggctggcatgatcgtaaccgatgagccagggtattatgaagatggggcctttggcatccgtatcgaaaacgtagtcttagtcgtccctgtcaaaacgaaatacaattttaataatcggggctctctcacctttgagccactgaccttagttcctatccagaccaagatgatcgacgtggattctttgaccgacaaagagtgcgactggctcaacaactaccacctaacatgtcgtgatgtgatcgggaaggaactgcagaaacagggtaggcaggaggccctggagtggctcatccgcgaaacccagcccatatcaaagcagcactag

SEQ ID NO: 204011 - DNA, 2001 bp, Artificial Sequence
  derived and/or modified sequence
atggcggcctctcgcaagcctccccgggtgcgcgttaaccaccaagacttccagctcaggaatctccgaatcattgagcccaacgaggtgacccatagtggggacaccggtgtcgaaaccgatggtcgcatgccgcctaaagttacaagtgagctcctcaggcagttgcgccaggctatgcggaactcagagtatgtgaccgaaccaatacaggcctatattatcccctctggggatgcacaccaatctgagtatattgctccctgcgactgtcggcgggcttttgtttcggggttcgacggaagtgctggcaccgctatcatcactgaggagcatgccgctatgtggactgacggccgctacttccttcaagccgccaaacagatggatagcaattggactctcatgaaaatggggctcaaggatactcctacacaagaggactggctggtgtctgttctgccggaggggagccgggtgggcgtcgacccattgatcataccaacagactactggaagaagatggcaaaggtgctgcggtccgccgggcaccacctgattcctgtgaaggagaatcttgtcgacaagatttggacggatagacctgagcgtccttgcaaaccgttactgacgcttggactagactacaccgggatttcatggaaggacaaagtcgccgacctgcgactgaaaatggctgaacgtaacgtgatgtggtttgtggtaacggccctggacgagatcgcttggctcttcaacctgagggggtccgatgtcgaacacaatcctgtatttttcagctatgccataataggcctggagaccatcatgctctttattgacggggataggatcgacgcaccttccgtcaaggagcacctgctgcttgacctgggcctcgaggctgaatatcgaatacaagtgcatccctataagtcaatcctctcggaattaaaagcactttgcgccgatcttagtccgagggaaaaggtgtgggtttcagacaaggccagttatgctgtgagcgagacaattccgaaggatcatcgctgttgcatgccctataccccgatttgtatagccaaagccgtcaaaaacagtgctgagagtgaggggatgcggagggcccacattaaagatgccgtggcactgtgcgagctctttaattggctggagaaggaagtcccgaagggaggcgtcacagagatctctgcagctgataaagctgaggagtttaggaggcaacaggccgactttgtggacttatccttccctacaatctcgtcaactggacctaacggcgccatcattcattacgcccctgtgcccgagactaatcgcaccctttcccttgacgaggtttatctcatcgattccggcgcccagtacaaggatggcacgacagatgtgactcgcactatgcacttcggtactcccaccgcatacgagaaggagtgtttcacctatgtgctgaagggacacatcgcagtctccgccgcggtgttcccaacagggacaaagggccatctccttgacagcttcgcccgcagcgccctttgggacagcgggctggactatctgcatggaactggacacggggtgggatcttttctgaacgtgcatgaagggccctgcggcatcagctacaagactttctctgatgaaccactggaggccggaatgattgtcactgatgagcccggatactatgaagacggagcttttgggattcggatcgagaacgtagttcttgtggttccagttaagaccaaatacaacttcaacaaccgagggtctctgacctttgaacctctcactctggttcccatccaaacgaagatgatagacgtggattcgctcactgacaaggaatgcgactggctgaacaattatcacctcacttgtagggatgtgatcggcaaggagctgcagaagcagggcaggcaggaagcactcgagtggctgatcagagagacgcagccaattagtaagcagcactag

SEQ ID NO: 204012 - DNA, 1872 bp, Artificial Sequence
  derived and/or modified sequence
atgccacccaaggtgaccagcgagctgctgcggcagctgcggcaggccatgaggaacagtgaatatgtgacagagcccatccaggcctacatcatccccagcggagatgcccaccagagcgagtacatcgccccctgtgactgcagaagagcctttgtgtctggctttgatggcagcgctggaacagccatcatcacagaggagcacgccgccatgtggacagatggccgctacttcctgcaggccgccaagcagatggacagcaactggaccctgatgaagatgggcctgaaggacacccccacccaggaggactggctggtgtctgtgctgcctgagggcagccgggtgggcgtggaccccctcatcatccccacagactactggaagaagatggccaaggtgctgcggtctgctggccaccacctgatccctgtgaaggagaacctggtggacaagatctggacagacaggcctgagcggccctgcaagcccctgctgaccctgggcctggactacacaggcatctcctggaaggacaaggtggccgacctgcggctgaagatggccgagagaaatgtgatgtggtttgtggtgacagccctggatgaaattgcctggctgttcaacctgcggggcagtgatgtggagcacaaccctgtgttcttctcctatgccatcatcggcctggagaccatcatgctgttcattgatggagacagaattgatgcccccagcgtgaaggagcacctgctgctggacctgggcctggaggccgagtaccgcatccaggtgcacccctacaagagcatcctgtctgagctgaaggccctgtgtgccgacctgagcccccgggagaaggtgtgggtgtctgacaaggccagctatgctgtgtctgagaccatccccaaggaccaccgctgctgcatgccctacacccccatctgcatcgccaaggctgtgaagaacagcgctgagagcgagggcatgagaagagcccacatcaaggatgctgtggccctgtgtgagctgttcaactggctggagaaggaggtgcccaagggcggcgtgacagagatctctgctgctgacaaggccgaggagttccggcggcagcaggccgactttgtggacctgtccttccccaccatcagcagcacaggccccaacggggccatcatccactacgcccctgtgcctgagaccaacagaaccctgagcctggatgaggtgtacctgattgacagcggggcccagtacaaggatggcaccacagatgtgaccaggaccatgcacttcggcacccccacagcctatgagaaggagtgcttcacctacgtgctgaagggccacatcgctgtgtctgctgctgtgttccccaccggcaccaagggccacctgctggacagctttgcccggagcgccctgtgggacagcggcctggactacctgcatggaactggacatggagtgggcagcttcctgaatgtgcatgagggcccctgtggcatctcctacaagaccttcagtgatgagcccctggaggccggcatgattgtgacagatgagcccggctactatgaagatggagccttcggcatcagaattgaaaatgtggtgctggtggtgcctgtgaagaccaagtacaacttcaacaacagaggcagcctgacctttgagcccctgaccctggtgcccatccagaccaagatgattgatgtggacagcctgacagacaaggaatgtgactggctgaacaactaccacctgacctgcagagatgtgattggcaaggagctgcagaagcagggccggcaggaggccctggagtggctgatccgggagacccagcccatcagcaagcagcactag

SEQ ID NO: 204013 - DNA, 1659 bp, Artificial Sequence
  derived and/or modified sequence
atgtggacagatggccgctacttcctgcaggccgccaagcagatggacagcaactggaccctgatgaagatgggcctgaaggacacccccacccaggaggactggctggtgtctgtgctgcctgagggcagccgggtgggcgtggaccccctcatcatccccacagactactggaagaagatggccaaggtgctgcggtctgctggccaccacctgatccctgtgaaggagaacctggtggacaagatctggacagacaggcctgagcggccctgcaagcccctgctgaccctgggcctggactacacaggcatctcctggaaggacaaggtggccgacctgcggctgaagatggccgagagaaatgtgatgtggtttgtggtgacagccctggatgagatcgcctggctgttcaacctgcggggcagtgatgtggagcacaaccctgtgttcttctcctatgccatcatcggcctggagaccatcatgctgttcattgatggagacagaattgatgcccccagcgtgaaggagcacctgctgctggacctgggcctggaggccgagtaccgcatccaggtgcacccctacaagagcatcctgtctgagctgaaggccctgtgtgccgacctgagcccccgggagaaggtgtgggtgtctgacaaggccagctatgctgtgtctgagaccatccccaaggaccaccgctgctgcatgccctacacccccatctgcatcgccaaggctgtgaagaacagcgctgagagcgagggcatgaggcgggcccacatcaaggatgctgtggccctgtgtgagctgttcaactggctggagaaggaggtgcccaagggcggcgtgacagagatctctgctgctgacaaggccgaggagttccggcggcagcaggccgactttgtggacctgtccttccccaccatcagcagcacaggccccaatggagccatcatccactacgcccctgtgcctgagaccaacagaaccctgagcctggatgaggtgtacctgattgattctggggcccagtacaaggatggcaccacagatgtgaccaggaccatgcacttcggcacccccacagcctatgagaaggagtgcttcacctacgtgctgaagggccacatcgctgtgtctgctgctgtgttccccaccggcaccaagggccacctgctggacagctttgcccggagcgccctgtgggacagcggcctggactacctgcacggcaccggccacggcgtgggcagcttcctgaatgtgcatgagggcccctgtggcatctcctacaagaccttcagtgatgagcccctggaggccggcatgattgtgacagatgagcccggctactatgaagatggagccttcggcatcagaattgaaaatgtggtgctggtggtgcctgtgaagaccaagtacaacttcaacaacagaggcagcctgacctttgagcccctgaccctggtgcccatccagaccaagatgattgatgtggacagcctgacagacaaggaatgtgactggctgaacaactaccacctgacctgcagagatgtgattggcaaggagctgcagaagcagggccggcaggaggccctggagtggctgatccgggagacccagcccatcagcaagcagcactag

SEQ ID NO: 204014 - DNA, 2001 bp, Artificial Sequence
  derived and/or modified sequence
atggccgccagcaggaagccaccccgggtgcgggtgaaccaccaggacttccagctgaggaacctgcgcatcatcgagcccaatgaggtgacccacagcggggacaccggggtggagacagatggccgcatgccacccaaggtgaccagcgagctgctgcggcagctgcggcaggccatgagaaattctgaatatgtgacagagcccatccaggcctacatcatccccagcggagatgcccaccagagcgagtacatcgccccctgtgactgccggcgggcctttgtgtctggctttgatggcagcgctggaacagccatcatcacagaggagcacgccgccatgtggacagatggccgctacttcctgcaggccgccaagcagatggacagcaactggaccctgatgaagatgggcctgaaggacacccccacccaggaggactggctggtgtctgtgctgcctgagggcagccgggtgggcgtggaccccctcatcatccccacagactactggaagaagatggccaaggtgctgcggtctgctggccaccacctgatccctgtgaaggagaacctggtggacaagatctggacagacaggcctgagcggccctgcaagcccctgctgaccctgggcctggactacacaggcatctcctggaaggacaaggtggccgacctgcggctgaagatggccgagagaaatgtgatgtggtttgtggtgacagccctggatgagatcgcctggctgttcaacctgcggggcagtgatgtggagcacaaccctgtgttcttctcctatgccatcatcggcctggagaccatcatgctgttcattgatggagacagaattgatgcccccagcgtgaaggagcacctgctgctggacctgggcctggaggccgagtaccgcatccaggtgcacccctacaagagcatcctgtctgagctgaaggccctgtgtgccgacctgagcccccgggagaaggtgtgggtgtctgacaaggccagctatgctgtgtctgagaccatccccaaggaccaccgctgctgcatgccctacacccccatctgcatcgccaaggctgtgaagaacagcgctgagagcgagggcatgaggcgggcccacatcaaggatgctgtggccctgtgtgagctgttcaactggctggagaaggaggtgcccaagggcggcgtgacagagatctctgctgctgacaaggccgaggagttccggcggcagcaggccgactttgtggacctgtccttccccaccatcagcagcacaggccccaatggagccatcatccactacgcccctgtgcctgagaccaacagaaccctgagcctggatgaggtgtacctgattgattctggggcccagtacaaggatggcaccacagatgtgaccaggaccatgcacttcggcacccccacagcctatgagaaggagtgcttcacctacgtgctgaagggccacatcgctgtgtctgctgctgtgttccccaccggcaccaagggccacctgctggacagctttgcccggagcgccctgtgggacagcggcctggactacctgcacggcaccggccacggcgtgggcagcttcctgaatgtgcatgagggcccctgtggcatctcctacaagaccttcagtgatgagcccctggaggccggcatgattgtgacagatgagcccggctactatgaagatggagccttcggcatcagaattgaaaatgtggtgctggtggtgcctgtgaagaccaagtacaacttcaacaacagaggcagcctgacctttgagcccctgaccctggtgcccatccagaccaagatgattgatgtggacagcctgacagacaaggaatgtgactggctgaacaactaccacctgacctgcagagatgtgattggcaaggagctgcagaagcagggccggcaggaggccctggagtggctgatccgggagacccagcccatcagcaagcagcactag

SEQ ID NO: 204015 - DNA, 1872 bp, Artificial Sequence
  derived and/or modified sequence
atgccccccaaggtgaccagcgagctgctgcggcagctgcggcaggctatgaggaactctgagtacgttacggagccaattcaagcttatattatcccgagcggagacgcccatcagagcgaatacatcgcaccatgcgattgtaggcgagcctttgtgtcggggtttgatggctcagcgggaactgcgataataactgaggagcacgccgccatgtggacggacggccgttatttccttcaagcagccaaacagatggattctaattggactttgatgaagatgggtttgaaggatacccccactcaggaggactggttggtctctgttcttcctgaggggtcacgtgttggagtagaccccctgattatccccacggattactggaaaaagatggccaaggtgcttcgatcagcggggcaccacttaatacccgtgaaggagaacctggtggataagatctggactgaccggccagagagaccctgtaaaccgttacttaccctcgggctcgactatacagggatttcctggaaagacaaagtggcggacctaagattgaagatggcagagcggaatgtgatgtggttcgtggtgactgctctagacgagattgcctggctctttaaccttcggggcagcgacgtcgaacacaaccccgtattcttttcttatgccattattggtttggaaactattatgctgtttattgacggggaccgcattgacgctccatccgtgaaggagcatctgctgctcgacctcggtcttgaagccgaatataggatccaggtacatccctacaaatccattctgtccgaattgaaggccttgtgcgccgacctcagcccaagggagaaggtgtgggtgtccgataaggccagctacgcagtgtcagaaaccattcctaaagatcaccgttgttgcatgccgtacactcccatatgtatcgccaaagctgttaagaatagtgctgaaagcgagggaatgcgcagggcacacattaaagacgctgtggctctgtgtgaactttttaattggctggagaaagaagtgccgaagggaggggtcacggagataagcgccgccgacaaggctgaagaatttcgacgacaacaagccgattttgtcgatctctcatttcccactattagcagcacgggtccaaacggagccattatccactatgctccagtaccggaaactaaccgaacgttgtctctcgacgaagtgtacctgatagattccggggctcagtacaaggatggtacgacagatgtcacccggaccatgcacttcggcacccccaccgcctacgaaaaggaatgcttcacttacgtgctgaaggggcacatagcagtcagtgccgccgtgttccccacggggacaaagggccatctgctggattctttcgccaggtctgcattatgggattcaggcctggattaccttcatggtaccggacacggggtgggcagtttcctcaatgtacacgaaggtccttgtgggatttcctacaaaaccttcagtgacgaaccgctggaggccgggatgatcgttacagacgagcctggctactatgaagatggcgccttcggaattcgcatcgagaacgtggttctggtggtgccagtaaagacaaagtataactttaacaacaggggcagtttgacgttcgagcccctaacgctcgtgcctatccagactaagatgattgatgtggactctttaacggataaagagtgcgactggcttaataactatcatctgacctgccgcgacgtgatcgggaaggagctccagaaacagggaaggcaggaagcgctggaatggctgatcagagagactcagccaatctctaagcagcactag

SEQ ID NO: 204016 - DNA, 1659 bp, Artificial Sequence
  derived and/or modified sequence
atgtggaccgacggccggtacttcctgcaggccgccaagcagatggattcaaattggaccctgatgaagatgggcctgaaggatacaccaactcaggaggattggcttgtttcagtgctccccgagggaagtagagtcggagtggaccccctgatcatccccaccgactactggaagaaaatggctaaggttctccggtccgcaggccatcatttaattcccgtgaaggaaaatctagtggacaaaatctggacagatcggccagagcggccatgtaagccgctgctaaccctcggtctggactacaccgggattagctggaaggacaaggtcgctgaccttcgcctcaagatggccgagcggaacgtgatgtggttcgtggtaactgcccttgatgagattgcctggttgttcaatctgaggggtagtgatgtcgaacataacccagttttcttttcgtacgccattataggtctcgagacaatcatgctcttcattgacggcgatcgcattgatgcccctagcgtgaaggaacacctgttgctggatctcggcctcgaggccgaatacagaatccaggtccacccttataagtctatattgtctgagcttaaggcactgtgcgctgacctctctcccagagagaaggtgtgggtttccgacaaggcaagttacgcagtgtcagagaccattcctaaggaccaccgatgctgcatgccctacactccaatttgcatcgcaaaagccgtcaagaattcggccgaaagcgagggcatgcgccgggcacacatcaaggacgctgtggctctctgtgagcttttcaattggctggagaaggaagtgccaaaggggggtgtgacagagatcagcgcagctgataaagctgaagagtttcgaaggcagcaggccgactttgtcgacctctcctttcctaccattagtagcacggggcccaatggagctatcatccattacgcccccgtgcctgagacaaatcgcactctgtctctagatgaggtatatcttatagattccggggcccaatacaaagacggaacaacagacgtcaccaggaccatgcatttcggcactcctaccgcctatgagaaggagtgttttacatacgtgctgaagggccatattgccgtgtctgccgcagtatttcccactggtaccaaggggcacttactggacagttttgctagatcagccctttgggactcaggcctggactacctgcacggaacgggacacggggttggctcttttctgaacgttcatgaagggccctgcggaatttcttacaagacattctccgatgagccacttgaagccggaatgattgtgaccgacgagcccggctattacgaagatggcgcctttggcattcggatcgagaacgtggtgcttgtggttccagtgaaaacaaagtacaactttaacaacagagggtcccttacctttgagcccctgacactcgtgcccattcagaccaagatgatcgatgtagactctctgactgacaaggaatgcgattggctgaataactatcacttgacgtgcagggatgtgataggcaaagagcttcaaaagcagggaaggcaggaggcccttgaatggctgatacgggagacacagcctattagtaagcagcattag

SEQ ID NO: 204017 - DNA, 2001 bp, Artificial Sequence
  derived and/or modified sequence
atggccgccagccggaagcccccccgggtgcgggtgaaccaccaggatttccaactgagaaatctgcgcattatagaacctaatgaagtcacgcactcaggagacacaggggtcgagacagacggtcgcatgccccccaaggttacttctgagctactgcgacaacttagacaggccatgcgtaattcagagtacgtgacagaacctattcaagcttacataatcccatcaggagatgcacatcaatccgaatatattgctccctgtgactgcaggcgcgcctttgtgagtgggttcgacggaagcgcgggtacggccattatcaccgaggagcatgctgctatgtggaccgacggccgttacttcctgcaggcggccaaacagatggattcaaactggacactgatgaaaatggggctcaaggacacacctacccaagaagactggctggtcagcgttctccccgaggggtcgagagtgggtgtggatcccctcattattccgacagattactggaagaagatggccaaggtactcagatctgcagggcaccacctgatccccgtcaaagagaacctggtggataaaatctggaccgacaggcctgaaagaccctgcaaacctctgctcaccctgggacttgattacaccggcataagctggaaggataaagtggccgacctccgccttaagatggccgaaagaaatgttatgtggttcgtggtcaccgcgctcgacgaaattgcctggctctttaaccttcggggtagcgacgtggaacacaaccccgtgtttttttcttacgccattatcggactggagaccatcatgctattcatagatggagaccgtattgatgccccatctgtgaaggagcatctactgctggatctagggctcgaggccgagtataggattcaagtgcacccctacaagtccatactatccgaactcaaggccctgtgcgctgacctcagtccgcgggagaaagtatgggtgagcgataaagcctcatacgcggtttccgaaaccattcccaaggatcataggtgctgcatgccttataccccaatatgcatagccaaagctgtcaagaattcagccgaatccgaggggatgcgacgcgcgcatattaaagatgccgttgccctgtgcgaactgtttaactggcttgaaaaggaggtgccgaagggtggagtgactgaaatatccgccgcagacaaagcagaagagttccggcggcaacaggcggatttcgttgatctaagttttcccaccatttccagcacaggaccaaacggggccataattcattacgcgcccgttcccgagacaaataggacgttgtctctggatgaggtttacctgattgactccggggcccagtataaagacggcacaaccgatgtgaccagaaccatgcacttcgggaccccaaccgcctacgagaaggagtgttttacatatgtactgaaaggtcacatagctgtaagcgccgcagtgttcccaacgggcacaaagggtcacctgcttgacagcttcgccagatcggccctgtgggattcaggtctcgactacctccacggcaccggtcacggggtaggcagcttcttaaatgtgcatgaggggccctgtgggatctcatataagacattttccgacgaaccgttagaggcagggatgatagtaaccgatgagccagggtattacgaagatggcgcgtttggcattcggattgagaatgtggttctcgtcgtgccagtgaaaaccaagtacaattttaataacagaggctctttgacattcgagcccctgacattggtccccatccagaccaagatgatagacgtcgactccttgactgataaggaatgtgattggctaaataattatcatctcacatgccgcgacgtgattgggaaagaactccagaagcagggtcgacaggaagcgcttgaatggttgatccgtgaaactcaacctatcagcaagcaacattag

SEQ ID NO: 204018 - DNA, 1872 bp, Artificial Sequence
  derived and/or modified sequence
atgcccccaaaggtgacttccgagcttctgaggcagctgcgccaggcaatgcggaactcagagtatgtaactgaaccaatccaggcttatatcataccctcaggcgatgctcaccagagcgagtacattgctccctgtgactgtcgtagagcttttgtttcaggtttcgatggcagcgcgggtactgccatcatcacagaggagcatgctgcaatgtggactgacggtagatacttcctgcaggctgctaagcagatggatagcaattggaccctaatgaagatgggactcaaggacacccctacccaggaggactggcttgtgagtgttttacccgaaggatcaagggtgggcgtcgatccactcatcataccgacggattattggaagaagatggccaaagtcctgcggagtgccggacaccacctgatccccgtgaaggaaaacctggtcgataagatttggactgaccggcctgaacgcccttgcaagccactgctcacactcggcctggactataccgggatatcatggaaagataaggttgccgaccttcggctgaaaatggcagagaggaacgtgatgtggttcgttgtcactgcactggatgagattgcctggctgttcaatctgcggggatctgacgtcgagcacaaccctgtgttcttttcttacgccattattggcctcgagacaatcatgctatttatcgacggcgataggatcgatgcacctagcgtcaaagaacatctcttgctggatctgggattagaggccgaatacaggattcaggtgcatccgtataagtctatcctttctgagttgaaggccctctgtgcggacctatccccacgtgaaaaggtgtgggtaagtgacaaagcgagttacgcggtaagcgaaacaattcccaaagatcataggtgctgcatgccatatacacccatctgtatcgcaaaagccgtgaagaactctgctgaatctgaagggatgcggcgagctcacattaaggacgctgtggccctgtgtgagttgttcaactggctggagaaggaggtacctaagggaggggtgacagaaatatccgcggcagacaaggctgaagagtttcgccgacaacaagcagacttcgtggacctgagctttcccacaatcagtagcacaggaccaaacggcgctataattcactacgccccagtgcctgagacaaaccgcacactgagtttggacgaagtctatctgattgactctggcgcacagtacaaggacgggacgacagacgtcacacggacgatgcacttcggtacgcccacggcctatgagaaggaatgcttcacctatgtgctgaaaggccatatcgccgtctcggccgctgtgtttccaacagggacgaagggtcatctgctagacagttttgcaaggtctgccctctgggattccggactcgattatctccatgggacagggcatggtgttggaagctttctgaatgtgcacgagggaccgtgtggtattagctacaaaaccttctctgacgagcctttggaggctggtatgatcgtgactgatgaaccgggatattacgaggatggagcatttgggattcggatagagaacgtggtgctggtcgtacctgtgaaaactaagtataattttaacaacagaggctctttaactttcgagccgttgaccttagtgccgatccagactaagatgatcgatgtagactctcttacggacaaagaatgtgactggctcaataactatcacttaacatgccgggatgtaatcggcaaggagctacaaaagcaagggcgtcaagaagctttggagtggctgatccgggaaacgcaaccaatctccaagcagcactag

SEQ ID NO: 204019 - DNA, 1659 bp, Artificial Sequence
  derived and/or modified sequence
atgtggaccgacggtcgctattttttgcaggctgcaaagcaaatggattcaaattggacactgatgaagatgggactgaaggacacccccacacaggaggactggctggtttcagttctcccggagggcagtagggtaggagtcgatccactcatcattccgacagactactggaaaaagatggccaaggtgctacgcagcgccggacatcacctgattccagtgaaggagaatctggtggataagatctggacagacagacctgaacgcccatgtaagcccctgttaaccctgggactcgattatactgggatcagctggaaagataaagtggcagacctgaggctgaagatggctgagagaaacgttatgtggtttgtggtgacggcactagacgaaattgcgtggctgtttaatctaaggggtagtgatgtcgagcataacccagtattcttcagctacgccattatcggcctggaaactattatgctgttcatagacggtgataggatcgatgctccatccgttaaggagcacctattgttggatctcggcctggaggccgaatatcggattcaagtccatccttataagtcaattctttcggagttgaaggccctgtgtgccgatttatcccctagggagaaggtatgggtaagtgacaaagcctcgtatgcagtctccgaaactattccgaaagaccacagatgctgtatgccttacacccctatttgcattgctaaggccgtgaagaattccgctgaaagcgagggaatgaggcgcgcacatataaaagacgctgtcgccctgtgtgaactatttaactggctggagaaagaagtgcctaaagggggagtgacagaaatctcagctgcggataaagcggaagagttcagaaggcagcaggctgactttgtggacctctccttccccacaatcagctccaccgggcctaacggggctatcatccactacgcgccagttcctgaaaccaataggactcttagtctggatgaagtatatcttatagacagcggtgcccagtataaggatgggactacggatgttacgcggacaatgcacttcggcacgcccaccgcctacgagaaggagtgcttcacttatgtgcttaaaggacatatcgctgtctctgccgctgtgtttcctaccgggacgaaagggcatttactggattcttttgcccgatccgccttgtgggacagtgggctggattacttgcacggcactggtcacggcgtgggctcttttcttaacgtgcacgagggtccatgcggaatttcttacaagacattttctgacgaacccctggaagcagggatgattgtgacagatgaacccggttactacgaagatggagcattcggcattcggattgaaaatgtagtcttggtggtccctgtcaaaacaaagtacaacttcaataatcgaggcagtttgacgttcgaacccctgacactggtgccaatccaaactaagatgatcgatgttgatagcctgaccgacaaagagtgcgattggcttaacaactatcacctgacctgtcgggacgtaatcggtaaggagctgcagaaacaagggcgtcaggaggccctcgagtggctaatccgtgagacccagccaatcagtaagcagcactag

SEQ ID NO: 204020 - DNA, 2001 bp, Artificial Sequence
  derived and/or modified sequence
atggcagctagccggaagccacctagagtccgggtcaaccatcaggattttcagctaagaaatctgcggataatagaacctaacgaggtcacccacagtggcgatactggcgtggagaccgatgggagaatgcctcccaaagtgactagcgagttactgagacagcttcgccaggcaatgcggaattctgagtacgtgaccgaacccatccaggcctatatcatcccttccggtgatgcacaccaatctgaatacatcgccccttgtgactgtagacgcgcttttgtcagcgggtttgacggatcggcagggacagccattattactgaggaacacgccgcaatgtggacagatggcagatacttcctgcaggctgccaagcagatggatagtaactggacactcatgaagatgggtctcaaagatactcccacccaggaggactggctggttagtgtactgcccgaggggagccgcgtgggggtggaccctctgatcatacccaccgactactggaaaaagatggctaaagtcctgcgaagcgctggccaccacctgatcccggtgaaggaaaatctggtggacaaaatctggaccgatcggccagagaggccttgtaaaccattattaactcttggactggactacaccggcatcagttggaaggacaaagtggctgacttgagactgaagatggctgagcgcaatgtgatgtggttcgtagtaacagccctggacgaaatagcgtggctgtttaacctgcgtgggtcagatgtggaacacaaccccgtgtttttttcctacgccatcattggactcgaaacaataatgcttttcatagatggcgacaggatcgatgccccatccgtgaaggagcacttgctgttagacttgggtttggaggccgagtatagaatacaggtgcatccatataaatccatcctatctgagttgaaagcactgtgtgcggacctgtccccacgggagaaggtgtgggtgtctgacaaggcttcttacgcagtcagcgaaactattccgaaggaccacaggtgctgcatgccgtacactcccatttgcattgcaaaggccgtgaagaactctgccgagtctgaggggatgcgccgtgcacatataaaagacgctgtggccttatgtgagctgttcaactggcttgagaaagaagtgcccaaagggggtgtaactgagatttcagctgccgacaaggccgaggagttccggagacagcaggctgacttcgttgatctgtcatttcccaccatcagttccaccggaccgaacggcgctattatccactacgcacctgtgccagagactaacaggactctgagtctggacgaagtataccttattgattctggcgcacagtacaaggacggcacaaccgatgtgacaagaacaatgcattttggcacccccaccgcctacgagaaggaatgttttacctacgtgctgaaagggcacatagcagtgtcagccgcagtctttcctaccggaaccaaaggacacctcctggattctttcgcaagatcggccctgtgggatagtggcctggattatctccacggaaccgggcacggggtgggctcctttttgaacgttcacgagggcccttgcggtatctcatataaaacgttttccgacgagcctctggaagccggaatgattgttaccgacgagcctggctattatgaagatggtgctttcggaattcggattgaaaacgtagtcttagtggtgccagtgaagaccaagtacaatttcaacaatagaggatccctcacctttgaaccacttactttagtgccgatccaaaccaaaatgattgacgtggacagcctgaccgacaaagagtgtgattggctcaacaattaccatctgacctgccgggatgtgattggcaaagaactgcaaaagcagggacgccaggaagcgctcgagtggctcattagagaaacccaacctatatcaaagcagcattag

SEQ ID NO: 204021 - DNA, 2539 bp, Artificial Sequence
  derived and/or modified sequence
gacccggcgctagcccgcccgcccgcccgccggctctcgcgcctccttcgcgccggcccttccgcgggtgatcagctggtctgcgctcccctgacgtgggctggggcacgtcaccgccgaatggcagcctccagaaagccaccgcgagtaagggtgaatcaccaggattttcaactgagaaatttaagaataattgaacctaacgaggtgacacactcaggagacacaggtgtggaaacagacggcagaatgcctccaaaggtgacttcagagctgcttcggcagctgagacaagccatgaggaactctgagtatgtgaccgaaccgatccaggcctacatcatcccatcgggagatgctcatcagagtgagtatattgctccatgtgactgtcggcgggcttttgtctctggattcgatggctctgcgggcacagccatcatcacagaagagcatgcagccatgtggactgacgggcgctactttctccaggctgccaagcaaatggacagcaactggacacttatgaagatgggtctgaaggacacaccaactcaggaagactggctggtgagtgtgcttcctgaaggatccagggttggtgtggaccccttgatcattcctacagattattggaagaaaatggccaaagttctgagaagtgccggccatcacctcattcctgtcaaggagaacctcgttgacaaaatctggacagaccgtcctgagcgcccttgcaagcctctcctcacactgggcctggattacacaggcatctcctggaaggacaaggttgcagaccttcggttgaaaatggctgagaggaacgtcatgtggtttgtggtcactgccttggatgagattgcgtggctatttaatctccgaggatcagatgtggagcacaatccagtatttttctcctacgcaatcataggactagagacgatcatgctcttcattgatggtgaccgcatagacgcccccagtgtgaaggagcacctgcttcttgacttgggtctggaagccgaatacaggatccaggtgcatccctacaagtccatcctgagcgagctcaaggccctgtgtgctgacctctccccaagggagaaggtgtgggtcagtgacaaggccagctatgctgtgagcgagaccatccccaaggaccaccgctgctgtatgccttacacccccatctgcatcgccaaagctgtgaagaattcagctgagtcagaaggcatgaggcgggctcacattaaagatgctgttgctctctgtgaactctttaactggctggagaaagaggttcccaaaggtggtgtgacagagatctcagctgctgacaaagctgaggagtttcgcaggcaacaggcagactttgtggacctgagcttcccaacaatttccagtacgggacccaacggcgccatcattcactacgcgccagtccctgagacgaataggaccttgtccctggatgaggtgtaccttattgactcgggtgctcaatacaaggatggcaccacagatgtgacgcggacaatgcattttgggacccctacagcctacgagaaggaatgcttcacatatgtcctcaagggccacatagctgtgagtgcagccgttttcccgactggaaccaaaggtcaccttcttgactcctttgcccgttcagctttatgggattcaggcctagattacttgcacgggactggacatggtgttgggtcttttttgaatgtccatgagggtccttgcggcatcagttacaaaacattctctgatgagcccttggaggcaggcatgattgtcactgatgagcccgggtactatgaagatggggcttttggaattcgcattgagaatgttgtccttgtggttcctgtgaagaccaagtataattttaataaccggggaagcctgacctttgaacctctaacattggttccaattcagaccaaaatgatagatgtggattctcttacagacaaagagtgcgactggctcaacaattaccacctgacctgcagggatgtgattgggaaggaattgcagaaacagggccgccaggaagctctcgagtggctcatcagagagacgcaacccatctccaaacagcattaataaatacctccccggttttgtttttgtaaaatgctctggaggaaggaagaaacgtggcagatccctgacatctttcccctttcctttccttcttccctacctcccctttttactttagactttaagaagaacagaaaatcttcttatcctctttgatattttattgcaaacactcagtcttttatgattttttaattgttgagaacaagccaagaataaaattgctgcaccagaaggagggtccctccaaagttgaacacttggtgaaaggaagatgccccgacttctttggccagtgatggggaatcagtgagtgctccatgatggtcatgttccaggtgctagtacatcattcatgatcaccttaatgctcatgagactatatttatgatcagtgaataaaaatgtcagaactgtg

SEQ ID NO: 204022 - DNA, 2344 bp, Artificial Sequence
  derived and/or modified sequence
ctccttcgcgccggcccttccgcgggtgatcagctggtctgcgctcccctgacgtgggctggggcacgtcaccgccgaatggcagcctccagaaagccaccgcgagtaagacggcagaatgcctccaaaggtgacttcagagctgcttcggcagctgagacaagccatgaggaactctgagtatgtgaccgaaccgatccaggcctacatcatcccatcgggagatgctcatcaggcacagccatcatcacagaagagcatgcagccatgtggactgacgggcgctactttctccaggctgccaagcaaatggacagcaactggacacttatgaagatgggtctgaaggacacaccaactcaggaagactggctggtgagtgtgcttcctgaaggatccagggttggtgtggaccccttgatcattcctacagattattggaagaaaatggccaaagttctgagaagtgccggccatcacctcattcctgtcaaggagaacctcgttgacaaaatctggacagaccgtcctgagcgcccttgcaagcctctcctcacactgggcctggattacacaggcatctcctggaaggacaaggttgcagaccttcggttgaaaatggctgagaggaacgtcatgtggtttgtggtcactgccttggatgagattgcgtggctatttaatctccgaggatcagatgtggagcacaatccagtatttttctcctacgcaatcataggactagagacgatcatgctcttcattgatggtgaccgcatagacgcccccagtgtgaaggagcacctgcttcttgacttgggtctggaagccgaatacaggatccaggtgcatccctacaagtccatcctgagcgagctcaaggccctgtgtgctgacctctccccaagggagaaggtgtgggtcagtgacaaggccagctatgctgtgagcgagaccatccccaaggaccaccgctgctgtatgccttacacccccatctgcatcgccaaagctgtgaagaattcagctgagtcagaaggcatgaggcgggctcacattaaagatgctgttgctctctgtgaactctttaactggctggagaaagaggttcccaaaggtggtgtgacagagatctcagctgctgacaaagctgaggagtttcgcaggcaacaggcagactttgtggacctgagcttcccaacaatttccagtacgggacccaacggcgccatcattcactacgcgccagtccctgagacgaataggaccttgtccctggatgaggtgtaccttattgactcgggtgctcaatacaaggatggcaccacagatgtgacgcggacaatgcattttgggacccctacagcctacgagaaggaatgcttcacatatgtcctcaagggccacatagctgtgagtgcagccgttttcccgactggaaccaaaggtcaccttcttgactcctttgcccgttcagctttatgggattcaggcctagattacttgcacgggactggacatggtgttgggtcttttttgaatgtccatgagggtccttgcggcatcagttacaaaacattctctgatgagcccttggaggcaggcatgattgtcactgatgagcccgggtactatgaagatggggcttttggaattcgcattgagaatgttgtccttgtggttcctgtgaagaccaagtataattttaataaccggggaagcctgacctttgaacctctaacattggttccaattcagaccaaaatgatagatgtggattctcttacagacaaagagtgcgactggctcaacaattaccacctgacctgcagggatgtgattgggaaggaattgcagaaacagggccgccaggaagctctcgagtggctcatcagagagacgcaacccatctccaaacagcattaataaatacctccccggttttgtttttgtaaaatgctctggaggaaggaagaaacgtggcagatccctgacatctttcccctttcctttccttcttccctacctcccctttttactttagactttaagaagaacagaaaatcttcttatcctctttgatattttattgcaaacactcagtcttttatgattttttaattgttgagaacaagccaagaataaaattgctgcaccagaaggagggtccctccaaagttgaacacttggtgaaaggaagatgccccgacttctttggccagtgatggggaatcagtgagtgctccatgatggtcatgttccaggtgctagtacatcattcatgatcaccttaatgctcatgagactatatttatgatcagtgaataaaaatgtcagaactgtg

SEQ ID NO: 204023 - protein, 422 aa, Artificial Sequence
  derived and/or modified sequence
MGKAKVPASKRAPSSPVAKPGPVKTLTRKKNKKKKRFWKSKAREVSKKPASGPGAVVRPPKAPEDFSQNWKALQEWLLKQKSQAPEKPLVISQMGSKKKPKIIQQNKKETSPQVKGEEMPAGKDQEASRGSVPSGSKMDRRAPVPRTKASGTEHNKKGTKERTNGDIVPERGDIEHKKRKAKEAAPAPPTEEDIWFDDVDPADIEAAIGPEAAKIARKQLGQSEGSVSLSLVKEQAFGGLTRALALDCEMVGVGPKGEESMAARVSIVNQYGKCVYDKYVKPTEPVTDYRTAVSGIRPENLKQGEELEVVQKEVAEMLKGRILVGHALHNDLKVLFLDHPKKKIRDTQKYKPFKSQVKSGRPSLRLLSEKILGLQVQQAEHCSIQDAQAAMRLYVMVKKEWESMARDRRPLLTAPDHCSDDA

SEQ ID NO: 204024 - protein, 189 aa, Artificial Sequence
  derived and/or modified sequence
MGSKKKPKIIQQNKKETSPQVKGEEMPAGKDQEASRGSVPSGSKMDRRAPVPRTKASGTEHNKKGTKERTNGDIVPERGDIEHKKRKAKEAAPAPPTEEDIWFDDVDPADIEAAIGPEAAKIARKQLGQSEGSVSLSLVKEQAFGGLTRALALDCEMVGVGPKGEESMAARVSIVNQYGKCVYDKYVKP

SEQ ID NO: 204025 - protein, 374 aa, Artificial Sequence
  derived and/or modified sequence
PVAKPGPVKTLTRKKNKKKKRFWKSKAREVSKKPASGPGAVVRPPKAPEDFSQNWKALQEWLLKQKSQAPEKPLVISQMGSKKKPKIIQQNKKETSPQVKGEEMPAGKDQEASRGSVPSGSKMDRRAPVPRTKASGTEHNKKGTKERTNGDIVPERGDIEHKKRKAKEAAPAPPTEEDIWFDDVDPADIEAAIGPEAAKIARKQLGQSEGSVSLSLVKEQAFGGLTRALALDCEMVGVGPKGEESMAARVSIVNQYGKCVYDKYVKPTEPVTDYRTAVSGIRPENLKQGEELEVVQKEVAEMLKGRILVGHALHNDLKSGRPSLRLLSEKILGLQVQQDSGCPGSNEAVRHGEEGVGEHGPRQAPPADCSRPLQ

SEQ ID NO: 204026 - DNA, 1269 bp, Artificial Sequence
  derived and/or modified sequence
atgggaaaggccaaggtgcctgctagcaagcgagcaccctcgagcccagtggctaagccgggccccgtgaaaaccctgacacggaaaaagaacaagaaaaagaagcggttctggaaatctaaggcaagagaggtaagcaagaagccagcctcaggcccaggagctgtggtgcgccctccaaaggctccagaagattttagtcagaattggaaggccctgcaggaatggctattgaagcaaaagagccaggctcccgagaaaccactggtgatctctcaaatgggctccaaaaaaaaaccaaaaattattcagcaaaataagaaagagacctcgcctcaggtcaaaggagaggagatgcccgcaggtaaggatcaggaggcctcaaggggaagcgttcctagcggcagtaagatggataggcgggcccctgtcccccgtacaaaggctagtggaaccgagcataataagaagggaaccaaggagcggacgaacggggatatcgtccctgaaagaggggacattgaacacaagaaacgaaaggccaaggaggctgcacctgcaccgccaaccgaggaggacatttggtttgacgatgtggatcccgccgatattgaagctgccattggcccagaggcagcaaagatcgcccggaagcagctggggcagtcagaaggctccgtctctctctcgttggtgaaagagcaggctttcggtggactgacgcgagccctcgccctggactgcgagatggttggggtcggtccaaagggcgaggaatcgatggcggcgcgagtcagcatcgtgaaccagtacggcaaatgtgtctatgacaaatacgtcaaaccaactgagccagtgacagactaccgtacagctgtttcgggtatacgtccagaaaacttgaaacagggagaggagctggaggtggtgcagaaggaggtggcggaaatgttaaaagggaggatactggtcgggcatgcacttcataatgacttgaaggtcctcttcttggaccaccctaaaaagaagatccgggacacccagaagtataaaccttttaagtcccaggtgaagagtgggcgcccctccttacgcctgctaagtgagaaaattctgggcctgcaggtgcagcaagccgagcactgctcaatccaggacgcccaagctgctatgagactgtatgtgatggtaaagaaggagtgggaatcaatggctcgcgatcggcggcctttgctgactgcaccagaccactgctccgatgatgcatag

SEQ ID NO: 204027 - DNA, 1125 bp, Artificial Sequence
  derived and/or modified sequence
cccgtggccaagcctgggcccgtaaaaacattaacacggaagaagaacaaaaagaagaaacgattctggaaatccaaagcaagagaagttagcaaaaagcccgcctcagggcctggggcggtcgtcagaccaccgaaggcccctgaggatttctcccagaattggaaggcgctgcaggagtggctgctgaagcagaaatcccaggcccctgagaaacccctggtgatatcccagatggggtcaaaaaaaaagccgaaaatcatccagcagaataagaaagagactagcccccaagtgaaaggggaggaaatgcccgccggtaaagaccaggaggctagccgaggctctgttccatctggttccaagatggatcggagggcaccggtgcctcgtaccaaggcaagtggcacagagcataacaagaagggaactaaggaaagaaccaatggcgatattgtgcctgaacggggggacatagaacacaagaagagaaaggccaaggaggccgcgcctgcaccccctaccgaagaggatatttggtttgatgatgtcgatcctgcggatattgaagctgctatcggtcccgaagcagctaaaattgcaagaaagcagttgggacagtctgaaggaagtgtgagtctatccctcgtaaaagaacaagcatttggtggtctgacccgcgccttggcactagactgcgagatggtaggagtaggaccgaagggagaggagagtatggctgctcgggtcagcattgtaaaccagtacggtaaatgtgtgtacgacaagtatgttaagccaacagaacccgtgacagattacagaacagccgtctctggcattcggccagagaacctcaaacagggcgaggaactggaagtcgtccaaaaagaggtagcagagatgttgaagggaaggatcctcgtgggccacgccctgcacaatgacctgaagtccggaaggccgtcgctgaggctcttgtcagagaagattcttggacttcaggtacagcaggattcaggctgccctggttccaatgaagctgtgcggcacggcgaggaaggggttggagagcacggcccccgtcaagctccgccagctgattgctcaaggcccctccagtag

SEQ ID NO: 204028 - DNA, 1269 bp, Artificial Sequence
  derived and/or modified sequence
atgggcaaggccaaggtgcctgccagcaagagggcccccagcagccctgtggccaagccaggccctgtgaagaccctgaccaggaagaagaacaagaagaagaagcgcttctggaagagcaaggcccgggaggtgtccaagaagccagccagcggccctggagctgtggtgcggccccccaaggcccctgaggacttcagccagaactggaaggccctgcaggagtggctgctgaagcagaagagccaggcccctgagaagcccctggtgatcagccagatgggcagcaagaagaagcccaagatcatccagcagaacaagaaggagaccagcccccaggtgaagggggaggagatgcctgctgggaaggaccaggaggccagccggggctctgtgcccagcggcagcaagatggaccggcgggcccctgtgcccaggaccaaggccagcggcacagagcacaacaagaagggcaccaaggagaggaccaacggggacatcgtgcctgagcggggggacatcgagcacaagaagaggaaggccaaggaggccgccccagccccacccacagaggaggacatctggtttgatgatgtggaccctgctgacatcgaggccgccatcggccctgaggccgccaagatcgccaggaagcagctgggccagagcgagggctctgtgtccctgagcctggtgaaggagcaggcctttggaggcctgacccgggccctggccctggactgtgagatggtgggcgtgggccccaagggggaggagagcatggccgcccgggtgtccatcgtgaaccagtatggaaaatgtgtgtatgacaagtatgtgaagcccacagagcctgtgacagactacagaacagctgtgtctggcatccggcctgagaacctgaagcagggcgaggagctggaggtggtgcagaaggaggtggccgagatgctgaagggccgcatcctggtgggccacgccctgcacaatgacctgaaggtgctcttcctggaccaccccaagaagaagatccgggacacccagaagtacaagcccttcaagagccaggtgaagagcggccggcccagcctgcggctgctgtctgagaagatcctgggcctgcaggtgcagcaggccgagcactgcagcatccaggatgcccaggccgccatgaggctgtatgtgatggtgaagaaggagtgggagagcatggcccgggaccggcggcccctgctgacagccccagaccactgcagtgatgatgcctag

SEQ ID NO: 204029 - DNA, 1125 bp, Artificial Sequence
  derived and/or modified sequence
cctgtggccaagccaggccctgtgaagaccctgaccaggaagaagaacaagaagaagaagcgcttctggaagagcaaggcccgggaggtgtccaagaagccagccagcggccctggagctgtggtgcggccccccaaggcccctgaggacttcagccagaactggaaggccctgcaggagtggctgctgaagcagaagagccaggcccctgagaagcccctggtgatcagccagatgggcagcaagaagaagcccaagatcatccagcagaacaagaaggagaccagcccccaggtgaagggggaggagatgcctgctgggaaggaccaggaggccagccggggctctgtgcccagcggcagcaagatggacagaagagcccctgtgcccaggaccaaggccagcggcacagagcacaacaagaagggcaccaaggagaggaccaatggagacatcgtgcctgagcggggggacatcgagcacaagaagaggaaggccaaggaggccgccccagccccacccacagaggaggacatctggtttgatgatgtggaccctgctgacattgaagctgccatcggccctgaggccgccaagatcgccaggaagcagctgggccagagcgagggctctgtgtccctgagcctggtgaaggagcaggccttcggcggcctgacccgggccctggccctggactgtgagatggtgggcgtgggccccaagggggaggagagcatggccgcccgggtgtccatcgtgaaccagtatggaaaatgtgtgtatgacaagtatgtgaagcccacagagcctgtgacagactacagaacagctgtgtctggcatccggcctgagaacctgaagcagggcgaggagctggaggtggtgcagaaggaggtggccgagatgctgaagggccgcatcctggtgggccacgccctgcacaatgacctgaagagcggccggcccagcctgcggctgctgtctgagaagatcctgggcctgcaggtgcagcaggacagcggctgccccggcagcaatgaggccgtgagacatggagaggagggcgtgggggagcacggcccccggcaggcccctcctgctgactgcagccggcccctgcagtag

SEQ ID NO: 204030 - DNA, 1269 bp, Artificial Sequence
  derived and/or modified sequence
atgggcaaggccaaggtgcccgccagcaagcgggcccccagcagccccgtagcaaagcctgggcctgtgaaaaccctgacgaggaagaaaaataaaaaaaaaaaaagattttggaaatcaaaagcgagggaggtctccaaaaagcccgctagtggacccggtgcagttgtccgcccccccaaggcacctgaggacttctcccagaattggaaagcgctgcaggaatggctgctaaagcagaagagccaggcaccagaaaagcctctggtaatttcgcagatgggtagtaagaaaaaaccaaaaatcatccagcagaataaaaaagagacctctcctcaggtaaagggtgaagaaatgccagcgggcaaggatcaggaggccagccgcggtagtgtgccatctggcagtaagatggaccgaagggccccagttcctcgcacaaaagcctccggaactgagcataataaaaaaggaacgaaagaaaggacaaacggtgatatagttcctgaacggggggacatcgagcacaaaaagagaaaagcaaaggaggcggcacccgccccccctacagaggaggatatctggttcgacgatgtggatcccgctgatatcgaagccgctatcgggccagaggcagccaaaatagcaaggaagcagctgggacagagcgagggaagcgttagcctgtcgctggtaaaggagcaggcattcgggggcttaacccgggcactggccctcgattgtgaaatggtcggcgtcggcccaaagggcgaggagagtatggctgcccgcgtgtcaatagtcaatcagtacggcaagtgtgtttacgataagtacgtgaagcccacagaaccggtcaccgattatcgcactgctgtttcaggaataagacccgaaaatctcaagcagggggaggagttagaggtggttcagaaagaggtagctgagatgctcaaaggtcgcatcctggtggggcacgccctacacaatgacctgaaggtgctgttcctggaccatcccaagaagaagatcagagatactcagaagtacaaacctttcaagagtcaggtgaaaagtggaagaccctccctgcgattactctcagagaagatcttagggctgcaggtgcagcaggccgagcactgctcaattcaggatgcacaagccgccatgcgactttacgttatggtcaaaaaggagtgggaatccatggcccgagatagacgtccactcctgactgccccagaccattgttcagacgacgcttag

SEQ ID NO: 204031 - DNA, 1125 bp, Artificial Sequence
  derived and/or modified sequence
cccgtggccaagcccggccccgtgaagaccctgacccggaagaagaataagaaaaaaaagaggttttggaaatcgaaggcccgagaggtgtccaaaaagccagcctcagggccgggagctgtcgtgcgaccaccgaaggcgccagaggacttctctcagaattggaaggcactgcaagagtggcttctgaaacagaaatcacaggcgccagaaaaacccttagtgatcagccagatgggctccaaaaagaaacctaaaattatccagcagaataaaaaagaaacatctccacaggtgaaaggcgaagagatgcctgctggtaaagatcaggaggcgagtagaggttccgtcccaagcggctcgaaaatggacagacgagctccagtgcctagaactaaagccagtggcaccgaacacaacaagaaagggaccaaggagagaactaatggggatatagtgcccgagcgtggggacatagagcataagaagaggaaggctaaagaggccgcacccgcccccccaaccgaggaggacatctggttcgacgatgtggatccggccgacattgaagcggcaatcggacctgaggctgccaagatagcccgaaaacagctgggacagagcgaaggatctgtgtccctctctctcgtcaaagaacaggcatttggcgggctcactagagcactagcactcgattgcgaaatggttggagtgggacccaaaggtgaagagtctatggccgcacgggtttccattgtcaatcaatatggcaaatgtgtgtacgataagtatgtgaagccaactgagcccgtaaccgactaccgcacggccgtatcgggaattcgccctgagaatctgaagcagggcgaagaactggaagtagtgcaaaaggaggtggcagagatgttgaagggccgcatcctggtggggcatgccctgcataatgacctgaaatccgggcggcctagcctgaggttgttatcagaaaaaatcctcggcttgcaagtgcagcaagattctgggtgcccaggatccaatgaggcggtaaggcatggggaagaaggcgttggtgagcacgggcctagacaggcacctcctgccgactgttctcgaccactgcagtag

SEQ ID NO: 204032 - DNA, 1269 bp, Artificial Sequence
  derived and/or modified sequence
atgggtaaggccaaggtgcccgcttccaagcgcgctccttctagtcccgtggccaaaccaggcccagtgaaaacactgacccggaaaaaaaacaagaagaaaaaacggttttggaaaagtaaggcccgagaggtgagtaaaaagccagctagcggtcccggagccgtggtccggcctcctaaagcgcctgaggatttcagtcaaaactggaaggctctccaagaatggctcctgaaacagaagagccaagcccctgaaaaaccactggtcatttctcagatggggtctaagaaaaagccgaaaattatacagcagaacaagaaagagacttccccacaggtgaagggcgaggagatgcctgccggaaaagaccaagaggcttcacgaggatcagtgccctctgggagcaagatggatagacgcgctcctgtaccccgaactaaggcctccggaactgaacataataaaaaagggaccaaggaacggacaaacggagacatcgtcccagagcgaggagacatcgaacacaagaagcgcaaggcaaaagaggccgctcccgctccgccaacagaggaagacatctggttcgatgacgtggaccctgccgacattgaagccgcaatcgggccagaagcggctaaaatcgctaggaagcagttagggcagtctgaaggctctgtgtccctctctctggtgaaagaacaagctttcggcggactcacaagggcacttgctctcgactgcgagatggtgggagttggcccaaagggcgaagagtctatggccgctcgagtttccattgtgaaccagtatggtaagtgcgtttacgataagtacgttaaaccaaccgagcccgtaaccgactaccgcactgctgtgtccgggatacgccctgagaacctgaagcagggtgaagaattggaggttgttcagaaggaggtggcggagatgctgaagggaagaatcctcgttgggcacgcactgcacaacgacttaaaggtgttgtttttagaccacccaaaaaagaaaattagagatacacagaaatataaacctttcaaaagccaggtcaaaagtgggaggccctccttgaggctcctcagcgaaaaaattctcggcctccaggttcagcaggcagaacattgcagcattcaggacgctcaggctgctatgagactctacgttatggtgaaaaaggagtgggagtcaatggctagggaccgccgacctctgcttactgcccctgaccactgttccgatgatgcatag

SEQ ID NO: 204033 - DNA, 1125 bp, Artificial Sequence
  derived and/or modified sequence
cctgtggccaaacccggacctgtgaaaactttaacccgaaaaaagaacaaaaaaaaaaagcggttctggaaatctaaagctagggaagttagcaaaaagccggctagtggacccggagctgtggttagacccccaaaggccccagaagacttcagccagaactggaaagccctgcaagagtggttgctgaaacagaaatctcaggccccagagaagccactggtcatttcacaaatggggagtaaaaaaaagccaaagatcattcagcagaacaagaaggagacctccccacaagtgaagggggaggagatgccggcaggtaaggaccaggaagcctctagggggagtgtcccgtctggttccaagatggaccgaagggcaccggtgccacggacaaaagcgtccggaactgagcataacaaaaaaggaacgaaggagagaactaacggagacattgtgcccgagaggggcgacatagagcacaagaagcgtaaggccaaagaggccgcacccgcacccccaaccgaggaagacatctggttcgacgatgtcgatccagccgacatcgaggctgcaattggtcctgaagctgccaaaatcgccagaaagcagctaggacagagcgaaggatctgtgtccctgagcctggtcaaggagcaggcattcgggggattaactcgtgctttagctctggactgtgagatggttggagttggtccgaagggggaagagtctatggcagccagagtttccattgtgaaccaatatggcaagtgcgtgtacgataaatacgtgaaaccaacagaacccgtgacagactataggactgctgtctcaggcatcaggccagaaaatttaaaacaaggcgaggagctcgaggtggttcagaaggaggtagctgaaatgctaaaggggcgaatcctggttgggcacgctctccacaatgacctgaagtctggccgtccatctttacgcctcctttccgagaaaatattggggcttcaggtacagcaggattccgggtgtcccggaagcaacgaggcagttcgacacggagaagaaggcgtgggagaacacggaccgcgtcaagctcctcccgcagattgctcccggccattgcagtag

SEQ ID NO: 204034 - DNA, 2360 bp, Artificial Sequence
  derived and/or modified sequence
gcgcttccggggactggagcgtgcgtgctgaggtatgcgcaacgcgtgcggggtctcttccggagtcttttcctggacggggtccctgcggtgggtgtgtttcggcctggcctgggcaggcgcttgtgctgccagggcgccgggcccggggaggccggggtctcgggtggccgccggcccaggcgctggacggcagcaggatggggaaggcgaaggtccccgcctccaagcgcgccccgagcagccccgtggctaagccgggtcctgtcaagacgctcactcggaagaaaaacaagaagaaaaaaaggttttggaaaagcaaggcgcgggaagtaagcaagaagccagcaagcggccccggtgctgtggtgcgacctccaaaggcaccagaagacttttctcaaaactggaaggcgctgcaagagtggctgctgaaacaaaaatctcaggccccagaaaagcctcttgtcatctctcagatgggttccaaaaagaagcccaaaattatccagcaaaacaaaaaagagacctcgcctcaagtgaagggagaggagatgccggcaggaaaagaccaggaggccagcaggggctctgttccttcaggttccaagatggacaggagggcgccagtacctcgcaccaaggccagtggaacagagcacaataagaaaggaaccaaggaaaggacaaatggtgatattgttccagaacgaggggacatcgagcataagaagcggaaagctaaggaggcagccccagccccacccaccgaggaagacatctggtttgacgacgtggacccagcggatatcgaagctgccataggtccagaggcggccaagatagcgaggaaacagttgggtcagagcgagggcagcgtcagcctcagcctcgtgaaagagcaggccttcggcggcctgacaagagccttagccttggactgtgagatggtgggcgtgggccctaagggggaggagagcatggccgcccgtgtgtccatcgtgaaccagtatgggaagtgcgtttatgacaagtacgtcaaaccaactgagcccgtgacggactataggacagcggtcagtgggattcggcctgagaacctcaagcagggagaagagcttgaagttgttcagaaggaagtggcagagatgctgaagggcagaattctagtggggcacgctctgcataatgacctaaaggtactatttcttgatcatccaaaaaagaagattcgggacacacagaaatataaacctttcaagagtcaagtaaagagtggaaggccgtctctgagactactttcagagaagatccttgggctccaggtccagcaggcggagcactgttcaattcaggatgcccaggcagcaatgaggctgtacgtcatggtgaagaaggagtgggagagcatggcccgagacaggcgccccctgctgactgctccagaccactgcagtgacgacgcctagcagtcctgccctgctgctgctgccgccccgctacagaggcaatgtgaccagtcacagggacagatcacatctccccagagtggcaactctggtgaaaccttttcagaatcatggcagaggggcgtggcgtggtgctactgagaaggtcctccttcctcttgactttgtggtctgaaacctggtcttactgtccatgtgtgtttgggcccggatggtcagggtggggagcagggacggccatgggcacgcctggccacgctttaccgactgctgaccccctgggccaggtgaggttggggcctgtgggccgccagtccatacggtgctgtcactgcccatcttcggtgacaccctggggtgaggtgctcagcaccttcctctcgaggagccacattttcctcctttgtgttaggggacataacaagctctgctgggcttgagggacccagaccaggtgtctgcagtcagctcctgagacacagctggccggcacaacaggtgttacatcaggggtttcctgtggccgtttgaactttgagcatttatctaaattaaattggcccagggttggctggtgggtcacccagcagaggcttctccccatagcacgaggatgtgttgcctgggcacggtgactgcggttattcctggaggtcggcagacatgccaaccttgggctatttgagctggagaagctatgtgatgctagccggtggctttctgggctaggccccagtttgaggctcccctgggaactagagccaggaacagccagtggcactgacaaggggacggagtccaaggcgttattgggccacctgacagctggacagaaaaggggcagacacaccgaggatgcgatttaaaataaatgcagatgtttacttggaa

SEQ ID NO: 204035 - DNA, 860 bp, Artificial Sequence
  derived and/or modified sequence
atactctgcacagtatctcagtgcagacattcctgtcttaacacacaggaccagtcaaattcccgtgggcagccccagggttctgtgggatttcttgaacaccaactcttcttccttctcccaagaaagaaaagcaaaataagtgaatggaagggatgtgtgctatagggaaactttggagtgttttctaattcatccaagaaagtcagcccttcagttctttacctatcacagaacagtggctgctgaaacaaaaatctcaggccccagaaaagcctcttgtcatctctcagatgggttccaaaaagaagcccaaaattatccagcaaaacaaaaaagagacctcgcctcaagtgaagggagaggagatgccggcaggaaaagaccaggaggccagcaggggctctgttccttcaggttccaagatggacaggagggcgccagtacctcgcaccaaggccagtggaacagagcacaataagaaaggaaccaaggaaaggacaaatggtgatattgttccagaacgaggggacatcgagcataagaagcggaaagctaaggaggcagccccagccccacccaccgaggaagacatctggtttgacgacgtggacccagcggatatcgaagctgccataggtccagaggcggccaagatagcgaggaaacagttgggtcagagcgagggcagcgtcagcctcagcctcgtgaaagagcaggccttcggcggcctgacaagagccttagccttggactgtgagatggtgggcgtgggccctaagggggaggagagcatggccgcccgtgtgtccatcgtgaaccagtatgggaagtgcgtttatgacaagtacgtcaaacca

SEQ ID NO: 204036 - DNA, 2026 bp, Artificial Sequence
  derived and/or modified sequence
cccgtggctaagccgggtcctgtcaagacgctcactcggaagaaaaacaagaagaaaaaaaggttttggaaaagcaaggcgcgggaagtaagcaagaagccagcaagcggccccggtgctgtggtgcgacctccaaaggcaccagaagacttttctcaaaactggaaggcgctgcaagagtggctgctgaaacaaaaatctcaggccccagaaaagcctcttgtcatctctcagatgggttccaaaaagaagcccaaaattatccagcaaaacaaaaaagagacctcgcctcaagtgaagggagaggagatgccggcaggaaaagaccaggaggccagcaggggctctgttccttcaggttccaagatggacaggagggcgccagtacctcgcaccaaggccagtggaacagagcacaataagaaaggaaccaaggaaaggacaaatggtgatattgttccagaacgaggggacatcgagcataagaagcggaaagctaaggaggcagccccagccccacccaccgaggaagacatctggtttgacgacgtggacccagcggatatcgaagctgccataggtccagaggcggccaagatagcgaggaaacagttgggtcagagcgagggcagcgtcagcctcagcctcgtgaaagagcaggccttcggcggcctgacaagagccttagccttggactgtgagatggtgggcgtgggccctaagggggaggagagcatggccgcccgtgtgtccatcgtgaaccagtatgggaagtgcgtttatgacaagtacgtcaaaccaactgagcccgtgacggactataggacagcggtcagtgggattcggcctgagaacctcaagcagggagaagagcttgaagttgttcagaaggaagtggcagagatgctgaagggcagaattctagtggggcacgctctgcataatgacctaaagagtggaaggccgtctctgagactactttcagagaagatccttgggctccaggtccagcaggattcaggatgcccaggcagcaatgaggctgtacgtcatggtgaagaaggagtgggagagcatggcccgagacaggcgccccctgctgactgctccagaccactgcagtgacgacgcctagcagtcctgccctgctgctgctgccgccccgctacagaggcaatgtgaccagtcacagggacagatcacatctccccagagtggcaactctggtgaaaccttttcagaatcatggcagaggggcgtggcgtggtgctactgagaaggtcctccttcctcttgactttgtggtctgaaacctggtcttactgtccatgtgtgtttgggcccggatggtcagggtggggagcagggacggccatgggcacgcctggccacgctttaccgactgctgaccccctgggccaggtgaggttggggcctgtgggccgccagtccatacggtgctgtcactgcccatcttcggtgacaccctggggtgaggtgctcagcaccttcctctcgaggagccacattttcctcctttgtgttaggggacataacaagctctgctgggcttgagggacccagaccaggtgtctgcagtcagctcctgagacacagctggccggcacaacaggtgttacatcaggggtttcctgtggccgtttgaactttgagcatttatctaaattaaattggcccagggttggctggtgggtcacccagcagaggcttctccccatagcacgaggatgtgttgcctgggcacggtgactgcggttattcctggaggtcggcagacatgccaaccttgggctatttgagctggagaagctatgtgatgctagccggtggctttctgggctaggccccagtttgaggctcccctgggaactagagccaggaacagccagtggcactgacaaggggacggagtccaaggcgttattgggccacctgacagctggacagaaaaggggcagacacaccgaggatgcgatttaaaataaatgcagatgtttacttggaa

SEQ ID NO: 204037 - DNA, 1269 bp, Artificial Sequence
  derived and/or modified sequence
atgggcaaggccaaggtgcccgccagcaagagagcccccagcagccccgtggccaagcccggccccgtgaagaccctgaccagaaagaagaacaagaagaagaagagattctggaagagcaaggccagagaggtgagcaagaagcccgccagcggccccggcgccgtggtgagaccccccaaggcccccgaggacttcagccagaactggaaggccctgcaggagtggctgctgaagcagaagagccaggcccccgagaagcccctggtgatcagccagatgggcagcaagaagaagcccaagatcatccagcagaacaagaaggagaccagcccccaggtgaagggcgaggagatgcccgccggcaaggaccaggaggccagcagaggcagcgtgcccagcggcagcaagatggacagaagagcccccgtgcccagaaccaaggccagcggcaccgagcacaacaagaagggcaccaaggagagaaccaacggcgacatcgtgcccgagagaggcgacatcgagcacaagaagagaaaggccaaggaggccgcccccgccccccccaccgaggaggacatctggttcgacgacgtggaccccgccgacatcgaggccgccatcggccccgaggccgccaagatcgccagaaagcagctgggccagagcgagggcagcgtgagcctgagcctggtgaaggagcaggccttcggcggcctgaccagagccctggccctggactgcgagatggtgggcgtgggccccaagggcgaggagagcatggccgccagagtgagcatcgtgaaccagtacggcaagtgcgtgtacgacaagtacgtgaagcccaccgagcccgtgaccgactacagaaccgccgtgagcggcatcagacccgagaacctgaagcagggcgaggagctggaggtggtgcagaaggaggtggccgagatgctgaagggcagaatcctggtgggccacgccctgcacaacgacctgaaggtgctgttcctggaccaccccaagaagaagatcagagacacccagaagtacaagcccttcaagagccaggtgaagagcggcagacccagcctgagactgctgagcgagaagatcctgggcctgcaggtgcagcaggccgagcactgcagcatccaggacgcccaggccgccatgagactgtacgtgatggtgaagaaggagtgggagagcatggccagagacagaagacccctgctgaccgcccccgaccactgcagcgacgacgcctag

SEQ ID NO: 204038 - DNA, 1125 bp, Artificial Sequence
  derived and/or modified sequence
cccgtggccaagcccggccccgtgaagaccctgaccagaaagaagaacaagaagaagaagagattctggaagagcaaggccagagaggtgagcaagaagcccgccagcggccccggcgccgtggtgagaccccccaaggcccccgaggacttcagccagaactggaaggccctgcaggagtggctgctgaagcagaagagccaggcccccgagaagcccctggtgatcagccagatgggcagcaagaagaagcccaagatcatccagcagaacaagaaggagaccagcccccaggtgaagggcgaggagatgcccgccggcaaggaccaggaggccagcagaggcagcgtgcccagcggcagcaagatggacagaagagcccccgtgcccagaaccaaggccagcggcaccgagcacaacaagaagggcaccaaggagagaaccaacggcgacatcgtgcccgagagaggcgacatcgagcacaagaagagaaaggccaaggaggccgcccccgccccccccaccgaggaggacatctggttcgacgacgtggaccccgccgacatcgaggccgccatcggccccgaggccgccaagatcgccagaaagcagctgggccagagcgagggcagcgtgagcctgagcctggtgaaggagcaggccttcggcggcctgaccagagccctggccctggactgcgagatggtgggcgtgggccccaagggcgaggagagcatggccgccagagtgagcatcgtgaaccagtacggcaagtgcgtgtacgacaagtacgtgaagcccaccgagcccgtgaccgactacagaaccgccgtgagcggcatcagacccgagaacctgaagcagggcgaggagctggaggtggtgcagaaggaggtggccgagatgctgaagggcagaatcctggtgggccacgccctgcacaacgacctgaagagcggcagacccagcctgagactgctgagcgagaagatcctgggcctgcaggtgcagcaggacagcggctgccccggcagcaacgaggccgtgagacacggcgaggagggcgtgggcgagcacggccccagacaggccccccccgccgactgcagcagacccctgcagtag

SEQ ID NO: 204039 - protein, 168 aa, Artificial Sequence
  derived and/or modified sequence
MAFNDCFSLNYPGNPCPGDLIEVFRPGYQHWALYLGDGYVINIAPVDGIPASFTSAKSVFSSKALVKMQLLKDVVGNDTYRINNKYDETYPPLPVEEIIKRSEFVIGQEVAYNLLVNNCEHFVTLLRYGEGVSEQANRAISTVEFVTAAVGVFSFLGLFPKGQRAKYY

SEQ ID NO: 204040 - DNA, 507 bp, Artificial Sequence
  derived and/or modified sequence
atggcatttaatgattgcttctcactaaattacccaggtaacccctgccccggcgacctgattgaagtgtttaggcctggttatcagcattgggccctgtaccttggcgacgggtacgtgatcaacattgctccggtggacgggattcccgcctccttcacaagcgcaaaaagcgtgtttagtagcaaggctctcgtgaagatgcagctccttaaggacgtggtcggcaatgacacctaccgtattaataacaagtatgatgagacctatccaccactgcccgtggaagaaatcattaagagatctgaatttgtcattggccaggaagtcgcctacaacttgcttgtaaacaattgcgagcacttcgttacactgctgaggtacggcgaaggcgtgagcgagcaggctaaccgagccatctcaactgtcgaattcgtgactgcagcggtgggagtcttttcctttctcggactcttccctaagggacaaagagcgaagtattactag

SEQ ID NO: 204041 - DNA, 1066 bp, Artificial Sequence
  derived and/or modified sequence
cgggcgggcgggcgggcgaagctgggctcggggccaagcgaggtctagccggagcgactgtgccccgcctcctgggcggagcgggcggctccccatggtcagagcctcgtgccggctcggcagcgcccggacgccgagcccagcgcgtcggccccccggcgtgcgggcgtctcagagccgcggaggggccgccgggaccgtttcagcgtggcggcgctggtgctggcgttggccctggaggacggccccgagtgatggctggcgcctgcctcccgggtgtctcccgggtacagatggagtcgtcccgcggccgccggcggcaaggtcggcagctgcgaggccaagagagaccccaggacacacacagctgcctcccggtgcgagaagaagaccccggcttgagagtgagatggcgtttaatgattgcttcagtttgaactaccctggcaacccctgcccaggggacttgatcgaagtgttccgtcctggctatcagcactgggccctgtacttgggtgatggttacgttatcaacatagcacctgtagatggcattcctgcgtcctttacaagcgccaagtctgtattcagcagtaaggccctggtgaaaatgcagctcttgaaggatgttgtgggaaatgacacatacagaataaacaataaatacgatgaaacgtacccccctctccctgtggaagaaatcataaagcggtcagagtttgtaattggacaggaggtggcctataacttacttgtcaacaactgtgaacattttgtgacattgcttcgctatggagaaggagtttcagagcaggccaaccgagcgataagtaccgttgagtttgtgacagctgctgttggtgtcttctcattcctgggcttgtttccaaaaggacaaagagcaaaatactattaacaatttaccaaagagatattgatattgaaggaatttgggaggaggaaaagaaacctggggtgaatacttattttcagtgcatcattactgttccagattcctatgatggatggcagactctttaataaattgcttactgatattatctta

SEQ ID NO: 204042 - DNA, 507 bp, Artificial Sequence
  derived and/or modified sequence
atggccttcaatgactgcttcagcctgaactacccaggcaacccctgccctggggacctgattgaggtgttccggcccggctaccagcactgggccctgtacctgggagatggctacgtgatcaacatcgcccctgtggatggcatcccagccagcttcaccagcgccaagagcgtcttcagcagcaaggccctggtgaagatgcagctgctgaaggatgtggtgggcaatgacacctaccgcatcaacaacaagtatgatgagacctacccacccctgcctgtggaggagatcatcaagagaagtgaatttgtgattggccaggaggtggcctacaacctgctggtgaacaactgtgagcactttgtgaccctgctgcgctacggggagggcgtgtctgagcaggccaacagagccatcagcacagtggagtttgtgacagctgctgtgggcgtcttctccttcctgggcctcttccccaagggccagagggccaagtactactag

SEQ ID NO: 204043 - DNA, 507 bp, Artificial Sequence
  derived and/or modified sequence
atggccttcaacgactgcttcagcctgaactaccccggcaacccctgccctggcgatcttattgaggtgttcagacccggataccaacattgggctctgtacctcggcgatggatacgtcatcaacatcgcacccgtagacggtattcccgcgagctttacatcggctaagtccgtgttttccagtaaggctctggtcaagatgcagttactgaaagatgtggtcggcaacgacacataccgaattaataacaagtatgacgagacatatcctcctctgcccgttgaagaaattataaaacggagcgaattcgtgattggacaagaggtggcctataacctgctggtcaacaactgcgagcactttgtcaccctgttgaggtacggagagggcgtgtcggaacaagctaacagagctatcagtaccgttgaatttgttaccgccgcagtgggcgtcttttcattcttgggcctcttccccaagggccagagggcgaagtactactag

SEQ ID NO: 204044 - DNA, 507 bp, Artificial Sequence
  derived and/or modified sequence
atggcattcaatgattgctttagcttgaattatccagggaacccctgcccaggtgaccttattgaagtgttcaggcccggttatcaacattgggctctgtacctgggagatgggtatgtcattaacattgcccctgttgatggcatccccgcatcattcacctctgccaaatcagtgttctcaagcaaggccctcgtcaagatgcaactgctcaaagatgtggtgggaaatgatacataccgtataaacaataaatacgatgagacctacccaccactcccagtagaggagatcatcaagagatcggagtttgtgattggccaagaagtggcctacaacctcttggtcaataactgcgaacactttgttactctgctcaggtatggtgaaggcgtatctgaacaggcaaaccgggctatcagtactgtggagtttgtgactgccgcagtgggggtcttctcctttctgggactctttcccaagggtcagcgtgctaagtattactag

SEQ ID NO: 204045 - DNA, 507 bp, Artificial Sequence
  derived and/or modified sequence
atggccttcaacgactgcttcagcctgaactaccccggcaacccctgccccggcgacctgatcgaggtgttcagacccggctaccagcactgggccctgtacctgggcgacggctacgtgatcaacatcgcccccgtggacggcatccccgccagcttcaccagcgccaagagcgtgttcagcagcaaggccctggtgaagatgcagctgctgaaggacgtggtgggcaacgacacctacagaatcaacaacaagtacgacgagacctacccccccctgcccgtggaggagatcatcaagagaagcgagttcgtgatcggccaggaggtggcctacaacctgctggtgaacaactgcgagcacttcgtgaccctgctgagatacggcgagggcgtgagcgagcaggccaacagagccatcagcaccgtggagttcgtgaccgccgccgtgggcgtgttcagcttcctgggcctgttccccaagggccagagagccaagtactactag

SEQ ID NO: 204046 - protein, 213 aa, Artificial Sequence
  derived and/or modified sequence
MGNGTEEDYNFVFKVVLIGESGVGKTNLLSRFTRNEFSHDSRTTIGVEFSTRTVMLGTAAVKAQIWDTAGLERYRAITSAYYRGAVGALLVFDLTKHQTYAVVERWLKELYDHAEATIVVMLVGNKSDLSQAREVPTEEARMFAENNGLLFLETSALDSTNVELAFETVLKEIFAKVSKQRQNSIRTNAITLGSAQAGQEPGPGEKRACCISL

SEQ ID NO: 204047 - DNA, 642 bp, Artificial Sequence
  derived and/or modified sequence
atggggaatggaactgaggaagattacaacttcgtattcaaggtagttctcatcggtgaaagcggagtaggtaaaacgaacctactgtctagattcacccggaatgagttttcccatgattctcgtactacaattggcgttgagttctccaccagaaccgtgatgctggggactgctgcagtcaaggctcagatttgggataccgctggattggaaaggtaccgggccatcactagtgcctattatagaggggcagttggggcgctcctggtgttcgaccttactaaacatcaaacttacgctgtagtggagcggtggcttaaggaactctatgaccacgctgaggccactatagtggtgatgctagtgggtaacaagagtgatcttagccaggccagagaagtcccgacagaggaagcccggatgttcgccgaaaacaatggactactgttcctggaaacgtctgccctggattccacaaacgtggagttggcgttcgagactgtgttgaaggaaattttcgccaaggtaagcaaacagcgtcagaacagcatccggacaaatgcaattacactgggcagtgcgcaggccggccaggagccaggcccaggggaaaaacgtgcttgttgcattagcctctag

SEQ ID NO: 204048 - DNA, 642 bp, Artificial Sequence
  derived and/or modified sequence
atgggaaatggaacagaggaggactacaactttgtgttcaaggtggtgctgattggagagagcggcgtgggcaagaccaacctgctgagccgcttcaccagaaatgagttcagccatgacagcaggaccaccatcggcgtggagttcagcaccaggacagtgatgctgggcacagctgctgtgaaggcccagatctgggacacagctggcctggagcgctaccgggccatcaccagcgcctactacagaggagctgtgggcgccctgctggtgtttgacctgaccaagcaccagacctatgctgtggtggagcgctggctgaaggagctgtatgaccacgccgaggccaccatcgtggtgatgctggtgggcaacaagagtgacctgagccaggcccgggaggtgcccacagaggaggccaggatgtttgctgaaaataatggcctgctcttcctggagaccagcgccctggacagcaccaacgtggagctggcctttgagaccgtgctgaaggagatctttgccaaggtgtccaagcagaggcagaacagcatccgcaccaatgccatcaccctgggcagcgcccaggccggccaggagcccggccctggagagaagagggcctgctgcatcagcctgtag

SEQ ID NO: 204049 - DNA, 642 bp, Artificial Sequence
  derived and/or modified sequence
atgggcaacggcaccgaggaggactacaacttcgtgttcaaggtggtattaatcggagagagtggcgtgggtaagacgaatctgctcagcagatttacacgcaacgagtttagtcacgattcacggacaacaatcggcgtggaattttccacgcgtaccgtaatgctcggaaccgcagctgtgaaggcccaaatctgggatacagcgggcctggaacgctaccgagcaataacatccgcatactacaggggagccgtcggtgctctcttagtgtttgatctcacgaaacaccagacttacgctgtcgtggagcgttggctgaaagaactttatgaccacgctgaagccactattgtggtcatgctggtcggtaacaagagcgatctctcgcaagctcgggaagtgccaaccgaggaggcccgcatgttcgcagaaaataatggcctcttgtttctggagacatctgctttagacagcactaacgtagagctcgccttcgagactgtcttgaaggagatttttgccaaggtgtcgaagcagaggcagaacagtatcaggaccaatgcaatcaccctgggctcagcccaggcaggtcaggagcctggaccgggagagaaacgcgcctgttgtatttcactctag

SEQ ID NO: 204050 - DNA, 642 bp, Artificial Sequence
  derived and/or modified sequence
atgggtaatggtacagaagaagattacaacttcgtatttaaagtggtcctgattggcgaaagcggcgtgggcaaaactaatctgctgtcacgattcaccagaaatgaattcagccatgattcacggacgacaatcggtgtggagttctctaccaggacagttatgctgggtacagcggcagtaaaggctcagatttgggatactgctggtctggagaggtaccgagcaatcacgtcagcgtattatcggggagctgtgggggctctgttggttttcgacttgactaagcaccagacttatgcagtcgtggagcggtggcttaaagagctgtacgaccatgcagaggcgaccattgtggttatgctggtggggaacaaaagcgacctctcacaggcgcgtgaggtcccgacagaggaggcaagaatgtttgcagagaacaacggccttcttttcctggagaccagtgctttggattcaactaatgtggagctggccttcgagacagtgttgaaggaaatcttcgctaaggtgagcaaacagcggcagaacagcattcgcactaacgcaatcacactcggaagcgcccaagctggccaggagcccggacccggtgagaagcgtgcgtgctgcatcagtctatag

SEQ ID NO: 204051 - DNA, 1100 bp, Artificial Sequence
  derived and/or modified sequence
ctcagcttccgtcctctctgcttccttacagcacccccacctgccagagctgatcctccctaggccctgcctaaccttgagttggcccccaatccctctggctgcagaagtccccttacccccaatgagaggaggggcaggaccagatcttttgagagctgagggttgagggcattgagccaacacacagatttgtcgcctctgtccccgaagacacctgcaccctccatgcggagccaagatggggaatggaactgaggaagattataactttgtcttcaaggtggtgctgatcggcgaatcaggtgtggggaagaccaatctactctcccgattcacgcgcaatgagttcagccacgacagccgcaccaccatcggggttgagttctccacccgcactgtgatgttgggcaccgctgctgtcaaggctcagatctgggacacagctggcctggagcggtaccgagccatcacctcggcgtactatcgtggtgcagtgggggccctcctggtgtttgacctaaccaagcaccagacctatgctgtggtggagcgatggctgaaggagctctatgaccatgctgaagccacgatcgtcgtcatgctcgtgggtaacaaaagtgacctcagccaggcccgggaagtgcccactgaggaggcccgaatgttcgctgaaaacaatggactgctcttcctggagacctcagccctggactctaccaatgttgagctagcctttgagactgtcctgaaagaaatctttgcgaaggtgtccaagcagagacagaacagcatccggaccaatgccatcactctgggcagtgcccaggctggacaggagcctggccctggggagaagagggcctgttgcatcagcctctgaccttggccagcaccacctgcccccactggctttttggtgccccttgtccccacttcagccccaggacctttccttgccctttggttccagatatcagactgttccctgttcacagcaccctcagggtcttaaggtcttcatgccctatcacaaatacctcttttatctgtccacccctcacagactaggaccctcaaataaagctgttttatatcaa

SEQ ID NO: 204052 - DNA, 642 bp, Artificial Sequence
  derived and/or modified sequence
atgggcaacggcaccgaggaggactacaacttcgtgttcaaggtggtgctgatcggcgagagcggcgtgggcaagaccaacctgctgagcagattcaccagaaacgagttcagccacgacagcagaaccaccatcggcgtggagttcagcaccagaaccgtgatgctgggcaccgccgccgtgaaggcccagatctgggacaccgccggcctggagagatacagagccatcaccagcgcctactacagaggcgccgtgggcgccctgctggtgttcgacctgaccaagcaccagacctacgccgtggtggagagatggctgaaggagctgtacgaccacgccgaggccaccatcgtggtgatgctggtgggcaacaagagcgacctgagccaggccagagaggtgcccaccgaggaggccagaatgttcgccgagaacaacggcctgctgttcctggagaccagcgccctggacagcaccaacgtggagctggccttcgagaccgtgctgaaggagatcttcgccaaggtgagcaagcagagacagaacagcatcagaaccaacgccatcaccctgggcagcgcccaggccggccaggagcccggccccggcgagaagagagcctgctgcatcagcctgtag

SEQ ID NO: 204053 - protein, 862 aa, Artificial Sequence
  derived and/or modified sequence
MLRNSTFKNMQRRHTTLREKGRRQAIRGPAYMFNEKGTSLTPEEERFLDSAEYGNIPVVRKMLEESKTLNFNCVDYMGQNALQLAVGNEHLEVTELLLKKENLARVGDALLLAISKGYVRIVEAILNHPAFAQGQRLTLSPLEQELRDDDFYAYDEDGTRFSHDITPIILAAHCQEYEIVHILLLKGARIERPHDYFCKCNECTEKQRKDSFSHSRSRMNAYKGLASAAYLSLSSEDPVLTALELSNELARLANIETEFKNDYRKLSMQCKDFVVGVLDLCRDTEEVEAILNGDVNFQVWSDHHRPSLSRIKLAIKYEVKKFVAHPNCQQQLLTMWYENLSGLRQQSIAVKFLAVFGVSIGLPFLAIAYWIAPCSKLGRTLRSPFMKFVAHAVSFTIFLGLLVVNASDRFEGVKTLPNETFTDYPKQIFRVKTTQFSWTEMLIMKWVLGMIWSECKEIWEEGPREYVLHLWNLLDFGMLSIFVASFTARFMAFLKATEAQLYVDQHVQDDTLHNVSLPPEVAYFTYARDKWWPSDPQIISEGLYAIAVVLSFSRIAYILPANESFGPLQISLGRTVKDIFKFMVIFIMVFVAFMIGMFNLYSYYRGAKYNPAFTTVEESFKTLFWSIFGLSEVISVVLKYDHKFIENIGYVLYGVYNVTMVVVLLNMLIAMINNSYQEIEEDADVEWKFARAKLWLSYFDEGRTLPAPFNLVPSPKSFYYLIMRIKMCLIKLCKSKAKSCENDLEMGMLNSKFKKTRYQAGMRNSENLTANNTLSKPTRYQKIMKRLIKRYVLKAQVDRENDEVNEGELKEIKQDISSLRYELLEEKSQATGELADLIQQLSEKFGKNLNKDHLRVNKGKDI

SEQ ID NO: 204054 - DNA, 2589 bp, Artificial Sequence
  derived and/or modified sequence
atgctgagaaacagcaccttcaagaacatgcagagaagacacaccaccctgagagagaagggcagaagacaggccatcagaggccccgcctacatgttcaacgagaagggcaccagcctgacccccgaggaggagagattcctggacagcgccgagtacggcaacatccccgtggtgagaaagatgctggaggagagcaagaccctgaacttcaactgcgtggactacatgggccagaacgccctgcagctggccgtgggcaacgagcacctggaggtgaccgagctgctgctgaagaaggagaacctggccagagtgggcgacgccctgctgctggccatcagcaagggctacgtgagaatcgtggaggccatcctgaaccaccccgccttcgcccagggccagagactgaccctgagccccctggagcaggagctgagagacgacgacttctacgcctacgacgaggacggcaccagattcagccacgacatcacccccatcatcctggccgcccactgccaggagtacgagatcgtgcacatcctgctgctgaagggcgccagaatcgagagaccccacgactacttctgcaagtgcaacgagtgcaccgagaagcagagaaaggacagcttcagccacagcagaagcagaatgaacgcctacaagggcctggccagcgccgcctacctgagcctgagcagcgaggaccccgtgctgaccgccctggagctgagcaacgagctggccagactggccaacatcgagaccgagttcaagaacgactacagaaagctgagcatgcagtgcaaggacttcgtggtgggcgtgctggacctgtgcagagacaccgaggaggtggaggccatcctgaacggcgacgtgaacttccaggtgtggagcgaccaccacagacccagcctgagcagaatcaagctggccatcaagtacgaggtgaagaagttcgtggcccaccccaactgccagcagcagctgctgaccatgtggtacgagaacctgagcggcctgagacagcagagcatcgccgtgaagttcctggccgtgttcggcgtgagcatcggcctgcccttcctggccatcgcctactggatcgccccctgcagcaagctgggcagaaccctgagaagccccttcatgaagttcgtggcccacgccgtgagcttcaccatcttcctgggcctgctggtggtgaacgccagcgacagattcgagggcgtgaagaccctgcccaacgagaccttcaccgactaccccaagcagatcttcagagtgaagaccacccagttcagctggaccgagatgctgatcatgaagtgggtgctgggcatgatctggagcgagtgcaaggagatctgggaggagggccccagagagtacgtgctgcacctgtggaacctgctggacttcggcatgctgagcatcttcgtggccagcttcaccgccagattcatggccttcctgaaggccaccgaggcccagctgtacgtggaccagcacgtgcaggacgacaccctgcacaacgtgagcctgccccccgaggtggcctacttcacctacgccagagacaagtggtggcccagcgacccccagatcatcagcgagggcctgtacgccatcgccgtggtgctgagcttcagcagaatcgcctacatcctgcccgccaacgagagcttcggccccctgcagatcagcctgggcagaaccgtgaaggacatcttcaagttcatggtgatcttcatcatggtgttcgtggccttcatgatcggcatgttcaacctgtacagctactacagaggcgccaagtacaaccccgccttcaccaccgtggaggagagcttcaagaccctgttctggagcatcttcggcctgagcgaggtgatcagcgtggtgctgaagtacgaccacaagttcatcgagaacatcggctacgtgctgtacggcgtgtacaacgtgaccatggtggtggtgctgctgaacatgctgatcgccatgatcaacaacagctaccaggagatcgaggaggacgccgacgtggagtggaagttcgccagagccaagctgtggctgagctacttcgacgagggcagaaccctgcccgcccccttcaacctggtgcccagccccaagagcttctactacctgatcatgagaatcaagatgtgcctgatcaagctgtgcaagagcaaggccaagagctgcgagaacgacctggagatgggcatgctgaacagcaagttcaagaagaccagataccaggccggcatgagaaacagcgagaacctgaccgccaacaacaccctgagcaagcccaccagataccagaagatcatgaagagactgatcaagagatacgtgctgaaggcccaggtggacagagagaacgacgaggtgaacgagggcgagctgaaggagatcaagcaggacatcagcagcctgagatacgagctgctggaggagaagagccaggccaccggcgagctggccgacctgatccagcagctgagcgagaagttcggcaagaacctgaacaaggaccacctgagagtgaacaagggcaaggacatctag

SEQ ID NO: 204055 - DNA, 2589 bp, Artificial Sequence
  derived and/or modified sequence
atgctacgaaattctacatttaaaaatatgcagcggcgtcatacaactctcagagaaaaggggcgccggcaggctattcggggccccgcttacatgtttaatgagaaaggaacaagcttaaccccagaggaagaacgattcctggatagcgccgaatatggcaatattcccgtggtgagaaagatgctcgaggagagcaaaactttaaattttaattgcgtcgactacatgggccaaaacgcacttcagctggctgtggggaacgaacatctcgaggtgactgaactgttgctgaagaaggaaaacctcgctcgggtcggggatgcgcttctgttggccattagtaaaggctatgtccgaattgtggaggctattctaaatcacccggcttttgcacaaggacagcgcttgacgctgtctcctttggaacaggagctgagggacgatgacttctacgcgtatgacgaggatggcacacgattttcccacgacattacccccatcatcctcgctgctcactgtcaagaatatgaaattgtgcatattctgctactgaagggggctcgcattgagagaccccacgattacttttgcaagtgtaatgaatgcacggagaagcagagaaaggacagcttcagccactctcggtccagaatgaatgcctacaaaggcttggcgtcagcagcttacctctccctgtcctccgaggatccggtcttaactgcgcttgaactgagcaacgaactcgcacgccttgcaaacattgaaacggagtttaaaaatgattacaggaagctatccatgcaatgtaaagattttgtcgtcggggttttggacctctgtcgcgacacagaagaagtggaagcaatcctgaatggggatgtgaacttccaagtgtggtccgaccaccatcggccttcactgagccgcataaagttagcaatcaagtatgaagttaagaagtttgtagcccaccctaattgtcagcagcaacttctcaccatgtggtacgaaaacctgagtggactgcgccagcagagcattgcagtgaagttcctagccgtgtttggtgtatccattggcctgccatttctagccatcgcatattggattgcgccatgctccaaactcggaagaacattgcgctctcccttcatgaaatttgtggctcacgctgtgtccttcacaatatttctgggtttattggtcgttaacgcatcagaccggttcgaaggtgtgaagactctgccaaacgaaacttttacggactatccaaagcagatcttcagagttaaaactacgcaattctcatggactgagatgctgatcatgaagtgggtcctgggaatgatttggtcagagtgtaaggagatctgggaggaagggcctagggaatatgtactacatctttggaacctgctcgacttcggcatgctctcgatatttgtggcgtcttttaccgcccggttcatggctttcctcaaggcaactgaagctcagctgtatgtcgaccagcatgttcaggacgacacccttcacaatgtcagcctcccacccgaagtcgcatattttacatacgctagagataagtggtggccttctgaccctcagatcatctccgagggattatatgccatcgctgtggtactgtcgtttagtaggatcgcctacatccttccagccaacgaaagttttggtccccttcaaatctcccttggcagaactgtgaaggacatttttaaatttatggtgatttttatcatggtgtttgtggcatttatgatcggcatgttcaacttatattcatattatcggggcgcaaaatataaccccgcctttaccactgtggaagaatcttttaagactctcttctggtccattttcggactctcagaagtgattagcgtggtgttaaagtatgatcacaagttcattgagaatattgggtacgtgctttatggagtgtacaacgtgactatggtggtggtgctcctcaacatgctcatcgcaatgattaataacagctatcaggaaattgaggaagatgccgacgtggaatggaaatttgccagagccaagctatggctgtcctacttcgacgaagggcgcactttaccagcgccctttaatctcgtgccttccccgaagtctttctactacttgataatgcggattaaaatgtgtttgataaaactctgtaagagcaaagcaaagagctgtgagaacgacttagagatgggcatgcttaactccaagttcaagaaaaccaggtatcaggccgggatgcggaactccgaaaatcttaccgcgaacaacactctttctaagcctaccaggtaccagaaaattatgaagcggttgattaagagatacgtcctgaaggcccaagttgacagggaaaatgacgaggtgaacgagggcgagcttaaagaaattaaacaagacatttcttccctgagatatgagctgttggaggaaaagtcgcaggccactggcgaattggccgacctgatccagcagctttccgagaaattcggaaagaacctgaacaaggaccacctgcgggtgaacaaagggaaggacatctag

SEQ ID NO: 204056 - DNA, 2589 bp, Artificial Sequence
  derived and/or modified sequence
atgctgaggaacagcaccttcaagaacatgcagaggaggcacaccaccctgcgggagaagggccggcggcaggccatccggggccctgcctacatgtttaatgagaagggcaccagcctgaccccagaggaggagcgcttcctggacagcgcagaatatggcaacatccctgtggtgaggaagatgctggaggagagcaagaccctgaacttcaactgtgtggactacatgggccagaatgccctgcagctggccgtgggcaatgagcacctggaggtgacagagctgctgctgaagaaggagaacctggcccgggtgggagatgccctgctgctggccatcagcaagggctacgtgagaattgtggaggccatcctgaaccacccagcctttgcccagggccagaggctgaccctgagccccctggagcaggagctgagagatgatgacttctacgcctatgatgaagatggcacccgcttcagccatgacatcacccccatcatcctggccgcccactgccaggagtatgaaattgtgcacatcctgctgctgaagggggcccgcatcgagcggccccatgactacttctgcaagtgcaatgaatgtacagagaagcagaggaaggacagcttcagccacagccgcagcaggatgaatgcctacaagggcctggccagcgctgcctacctgagcctgagcagcgaggaccctgtgctgacagccctggagctgagcaatgagctggcccggctggccaacattgaaacagagttcaagaatgactacaggaagctgtccatgcagtgcaaggactttgtggtgggcgtgctggacctgtgccgggacacagaggaggtggaggccatcctgaatggagatgtgaacttccaggtgtggagcgaccaccaccggcccagcctgagccgcatcaagctggccatcaagtatgaggtgaagaagtttgtggcccaccccaactgccagcagcagctgctgaccatgtggtatgagaacctgagcggcctgcggcagcagagcattgctgtgaagttcctggccgtgtttggagtgtccatcggcctgcccttcctggccatcgcctactggatcgccccctgcagcaagctgggccgcaccctgcggagccccttcatgaagtttgtggcccatgctgtgtccttcaccatcttcctgggcctgctggtggtgaatgccagtgacagatttgagggcgtgaagaccctgcccaatgagaccttcacagactaccccaagcagatcttccgggtgaagaccacccagttctcctggacagagatgctgatcatgaagtgggtgctgggcatgatctggagcgagtgcaaggagatctgggaggagggcccccgggagtatgtgctgcacctgtggaacctgctggactttggcatgctgagcatctttgtggccagcttcaccgcccgcttcatggccttcctgaaggccacagaggcccagctgtatgtggaccagcacgtgcaggatgacaccctgcacaacgtgtccctgcccccagaggtggcctacttcacctacgcccgggacaagtggtggcccagcgacccccagatcatcagcgagggcctgtatgccatcgctgtggtgctgtccttcagcagaattgcctacatcctgcctgccaatgaaagctttggccccctgcagatcagcctgggccgcacagtgaaggacatcttcaagttcatggtgatcttcatcatggtgtttgtggccttcatgattggcatgttcaacctgtacagctactacagaggagccaagtacaacccagccttcaccaccgtggaggagagcttcaagaccctcttctggagcatcttcggcctgtctgaggtgatctctgtggtgctgaagtatgaccacaagttcatcgagaacatcggctacgtgctgtatggagtgtacaacgtgaccatggtggtggtgctgctgaacatgctgattgccatgatcaacaacagctaccaggagattgaagaagatgctgatgtggagtggaagtttgcccgggccaagctgtggctgagctactttgatgagggccgcaccctgcctgcccccttcaacctggtgcccagccccaagagcttctactacctgatcatgaggatcaagatgtgcctgatcaagctgtgcaagagcaaggccaagagctgtgaaaatgacctggagatgggcatgctgaacagcaagttcaagaagacccgctaccaggccggcatgagaaattctgagaacctgacagccaacaacaccctgagcaagcccacccgctaccagaagatcatgaagaggctcatcaagagatatgtgctgaaggcccaggtggaccgggagaatgatgaggtgaatgaaggagagctgaaggagatcaagcaggacatcagcagcctgcgctatgagctgctggaggagaagagccaggccactggagagctggccgacctgatccagcagctgtctgagaagtttgggaagaacctgaacaaggaccacctgcgggtgaacaagggcaaggacatctag

SEQ ID NO: 204057 - DNA, 2589 bp, Artificial Sequence
  derived and/or modified sequence
atgctgcggaacagcaccttcaagaacatgcagcggcggcacaccacgctaagagagaaagggcggaggcaggctattagagggccagcctacatgttcaatgagaagggaacaagcctaacgccagaggaagagcgatttctagacagtgctgagtatgggaacattcccgtagtgcgaaagatgcttgaggagtccaaaacgttgaactttaactgcgtggattacatgggccagaacgctttgcaactagcagttggaaacgaacacctagaagtcactgagctcctgctgaagaaagagaacctggctagggtgggagatgccctgctgcttgccatttccaaagggtacgtaagaattgtcgaggccattctgaatcatcccgcgttcgcccaggggcagagacttacactctcccctctcgaacaagagctgcgcgacgatgatttctatgcctacgacgaagatggcacacgtttttctcatgacattacccccattattctcgccgcccactgtcaagaatatgagatcgtccacatccttctgctgaagggcgcccgtatcgagagaccccacgactacttttgcaagtgcaatgaatgtacagagaagcagcgaaaagactcattcagtcatagccgatcccggatgaacgcgtacaagggactcgcttctgccgcgtatctgagtctctcctcggaggatccagtgctaacggcattagagttgtcaaatgagctcgcacggctggctaacattgaaaccgaattcaagaacgactatagaaaactgagcatgcagtgtaaggatttcgtagtgggcgttctggatctatgccgtgacacagaggaagttgaggcgatcctgaatggggacgtgaattttcaagtgtggtccgatcaccaccggccctctctcagcagaatcaaattagccattaagtatgaggtcaaaaaattcgtagcccatccaaattgccaacaacagctactaaccatgtggtacgagaacctgagcggactgagacagcagtccattgcagtgaagttcctggctgtcttcggggtgagtattggcttgccatttctcgcaatcgcatattggatcgctccatgttccaagctgggtcggaccctgcggtcgcctttcatgaagtttgtggctcatgctgtctcttttactatttttctgggcctcctggtggttaacgcttctgaccgcttcgagggagtgaaaacgctccctaacgagactttcaccgactatccgaagcaaatattccgggtgaagaccactcagttttcctggaccgagatgctaatcatgaaatgggtgttggggatgatttggagcgaatgcaaggaaatctgggaagagggaccccgcgagtatgtccttcatctgtggaatctgctagacttcgggatgttgtctatttttgtggcatctttcacagcacggtttatggcttttctgaaggcaaccgaagcccagttatatgtggaccaacatgttcaggatgatacactgcacaatgtctcgttgccacccgaggtggcatatttcacatacgccagagataagtggtggccctcagatccacagattatctcagagggcctgtacgcaattgccgtcgtgctgtcattttctagaattgcatacatattaccggcaaatgaaagcttcggccccctgcagatatctttgggccggacggtgaaggacatttttaaattcatggtcattttcattatggtcttcgtggccttcatgatagggatgttcaatttgtacagctactataggggggcaaagtataatccggcctttaccactgtggaagagagcttcaagaccctcttttggtccattttcggcctttccgaagtcatctcagtagtgcttaagtacgatcataagtttatcgaaaatattggctatgtgttatatggtgtttataacgtcacgatggtcgtggtgttactgaatatgctgattgccatgatcaataatagctatcaggaaatcgaggaggacgctgacgttgagtggaagttcgcgagggctaaactctggctttcttactttgacgaagggagaacactgcccgccccatttaatcttgtcccctctccgaaatccttttattacttaatcatgcgtattaagatgtgcttaatcaagctctgcaagagcaaagccaaatcgtgcgagaacgatttggaaatgggcatgctgaattctaagtttaaaaagacccggtatcaggctgggatgaggaattctgagaacctcaccgccaacaataccctcagcaagcctaccagataccagaagatcatgaaacgcctcatcaaacgctacgttcttaaggcccaggtggacagagagaacgatgaagtgaacgagggagaactgaaggaaattaaacaggatatctccagtttacggtatgagctgttggaagaaaagtctcaggcaacaggtgagctagcagatttaattcagcagctgagtgaaaagtttgggaagaacctcaataaggatcatctccgggtgaataagggaaaagacatctag

SEQ ID NO: 204058 - DNA, 2589 bp, Artificial Sequence
  derived and/or modified sequence
atgttaagaaattcaacctttaaaaacatgcaaagacggcataccactctgcgcgagaaaggaagacggcaggcgataagaggcccagcctatatgtttaacgaaaaaggtacgtcactgacgccagaggaagagcgttttctcgatagcgcagagtacggcaatatccccgtcgtcaggaaaatgctggaagagtcaaagactttgaacttcaactgtgtagactatatgggccagaacgcactgcagctcgccgtgggtaacgaacacctggaggtcaccgaactactgctgaagaaggagaatttggcacgtgtcggagacgctctgctcctggccatctcaaaaggctatgtcaggatagtcgaggcgatcttgaatcatccagcgttcgctcagggacagaggctgacgcttagtccattggagcaagaactgcgcgatgacgatttctacgcctatgacgaggacgggacccggttttcacacgacattacacccatcattctggccgctcactgccaggagtacgagatcgttcacatcttgctcctgaagggtgcaaggattgagcgcccacatgattacttctgtaaatgtaacgagtgcaccgagaagcaaagaaaggactcctttagccattcacgatctaggatgaatgcctataagggattagcttctgctgcctatctgtcgctgtcatctgaggaccccgtacttaccgccctcgagttaagtaacgagctggccaggctcgctaatatagagactgaattcaaaaacgactaccgtaaactgtccatgcaatgcaaagatttcgttgtgggagtgctagatctttgtcgagacacggaagaagtcgaggctattttaaacggcgacgtgaactttcaagtctggagtgaccatcatcgtcctagcctgagtcgaatcaaactggcaatcaagtacgaggtcaagaagtttgtggctcatccaaactgtcagcagcagctgctcactatgtggtatgagaacctctcaggcctgcgccagcagtctatcgccgtgaagttccttgccgttttcggagtttcaatcggcctgcctttcctggcgattgcttattggatcgcgccatgcagcaagctcggtcgcaccctgcgaagcccgttcatgaaatttgttgcgcatgcggtttcttttactatttttctgggcttactggtcgtgaacgcatctgacagatttgaaggcgttaagactctgccaaacgagacattcactgattaccccaagcagatctttagagtcaagacgactcagttttcctggaccgagatgctcattatgaaatgggtcctgggaatgatttggtcagagtgtaaggaaatatgggaggaaggtcctcgggaatatgtgctgcacttgtggaacctgctggactttggaatgctgtctatctttgtagctagtttcaccgcaagattcatggcattcctcaaggcaactgaggcacagctatatgtggatcaacatgtacaagatgacacactacacaatgtgtcacttccccctgaagtagcatatttcacatacgccagggacaaatggtggcccagtgacccacagatcattagcgagggcttgtatgctatagcagtcgttctcagctttagtcggatcgcatatatcttgccagctaacgagagctttgggccacttcaaatttctctgggcagaaccgtaaaggatatattcaaattcatggtgatttttattatggtctttgtggcttttatgatcggtatgttcaacctgtattcatactataggggcgcaaaatataacccagcattcacaacagtggaagagtccttcaagacccttttctggagtatctttggattgagcgaagtaattagcgtggtgctaaagtacgaccataagttcattgaaaatatcgggtatgtcctctacggtgtgtataacgtaaccatggtggtagtgctacttaatatgctgattgccatgatcaataattcttaccaggaaatcgaagaagacgccgatgtggaatggaaattcgctcgcgcaaagctttggttaagttactttgacgagggcaggacgttgcctgccccttttaacctggtgccttcaccaaagagcttctactacttaatcatgcgcatcaaaatgtgccttatcaaactgtgcaagtcaaaggcgaaaagctgtgagaacgacctcgagatgggcatgttaaactccaagtttaagaaaacccggtatcaggccggaatgcgaaactctgagaatttgactgccaataataccctcagcaaaccaacaaggtatcagaaaatcatgaaaagattgattaagcggtatgtcctgaaagcccaagtggaccgggaaaatgatgaagtgaacgaaggagagctgaaagagatcaaacaggatatttctagcctgaggtatgagctgctcgaagagaagagtcaggcaacaggcgaactggcagatcttatccagcagttgagtgaaaaattcggaaagaatctgaataaagaccacctcagggttaataagggaaaggacatctag

SEQ ID NO: 204059 - DNA, 2987 bp, Artificial Sequence
  derived and/or modified sequence
acagatgcttctccgtcatgttctctgggaaatttccccccgattaggaaaaggacggtaacacggttctgcctcggaaggcgagtttttaccactgcaacacaaagaacagaggagcgcgctttcacatcgttgcaacttaactcacttgaccagctctatacttcagcaccacggagagcggtacatccttggctaccacccatggggagccagcttctggcgactcaacaccggattccggtcatctagaggaggaacaagcctgcgtattacaccctcaatgttgaggaacagcaccttcaaaaacatgcagcgccggcacacaacgctgagggagaagggccgtcgccaggccatccggggtcccgcctacatgttcaacgagaagggcaccagtctgacgcccgaggaggagcgcttcctggactcggctgagtatggcaacatcccggtggtccggaaaatgctggaggagtccaagacccttaacttcaactgtgtggactacatggggcagaacgctctgcagctggccgtgggcaacgagcacctagaggtcacggagctgctgctgaagaaggagaacctggcacgggtgggggacgcgctgctgctggccatcagcaagggctatgtgcgcatcgtggaggccatcctcaaccacccggccttcgcgcagggccagcgcctgacgctcagcccgctggaacaggagctgcgcgacgacgacttctatgcctacgacgaggacggcacgcgcttctcccacgacatcacgcccatcatcctggcggcgcactgccaggagtatgagatcgtgcacatcctgctgctcaagggcgcccgcatcgagcggccccacgactacttctgcaagtgcaatgagtgcaccgagaaacagcggaaagactccttcagccactcgcgctcgcgcatgaacgcctacaaaggactggcgagtgctgcctacttgtccctgtccagcgaagaccctgtcctcaccgccctggagctcagcaacgagttagccagactagccaacattgagactgaatttaagaacgattacaggaagttatctatgcaatgcaaggattttgtagtgggcgtgctggacctgtgccgagacacagaagaggtggaagcaattttaaacggtgatgtgaacttccaagtctggtccgaccaccaccgtccaagtctgagccggatcaaactcgccattaaatatgaagtcaagaagttcgttgctcatcctaactgtcagcagcaattgcttaccatgtggtatgaaaatctctcaggcttacgtcaacagtctatcgctgtgaaattcctggctgtctttggagtctccataggcctcccttttctcgccatagcctattggattgctccgtgcagcaagctaggacgaaccctgaggagccctttcatgaagtttgtagctcatgcagtttcttttacaatcttcttgggattattagttgtgaatgcatctgaccgatttgaaggtgttaaaaccctgccaaacgaaaccttcacagactacccaaaacaaatcttcagagtgaaaaccacacagttctcctggacagaaatgctcattatgaagtgggtcttaggaatgatttggtccgaatgcaaggaaatctgggaggaggggccacgggagtacgtgctgcacttgtggaacctgctagatttcgggatgctgtccatcttcgtggcctccttcacagcacgcttcatggccttcctgaaggccacggaggcacagctgtacgtggaccagcacgtgcaggacgacacgctgcacaatgtctcgcttccgccggaagtggcatacttcacctacgccagggacaagtggtggccttcagaccctcagatcatatcggaagggctctacgcgatagccgtcgtgctgagcttctctcgcattgcatacattctgccagccaacgagagttttgggcccctgcagatctcgctagggagaactgtgaaagatatcttcaagttcatggtcattttcatcatggtatttgtggccttcatgattgggatgttcaacctgtactcttactaccgaggtgccaaatacaacccagcgtttacaacggttgaagaaagttttaaaactttgttttggtccatattcggcttatctgaagtaatctcagtggtgctgaaatacgaccacaaattcatcgagaacattggctacgttctctacggcgtttataacgtcaccatggtggtagtgttgctcaacatgctaatagccatgataaacaactcctatcaggaaattgaggaggatgcagatgtggaatggaagttcgcccgagcaaaactctggctgtcttactttgatgaaggaagaactctacctgctccttttaatctagtgccaagtcctaaatcattttattatctcataatgagaatcaagatgtgcctcataaaactctgcaaatctaaggccaaaagctgtgaaaatgaccttgaaatgggcatgctgaattccaaattcaagaagactcgctaccaggctggcatgaggaattctgaaaatctgacagcaaataacactttgagcaagcccaccagataccagaaaatcatgaaacggctcataaaaagatacgtcctgaaagcccaggtggacagagaaaatgacgaagtcaatgaaggcgagctgaaggaaatcaagcaagatatctccagcctgcgctatgagcttcttgaggaaaaatctcaagctactggtgagctggcagacctgattcaacaactcagcgagaagtttggaaagaacttaaacaaagaccacctgagggtgaacaagggcaaagacatttagcagcccacatcggcgtctgtgacttctaccagcattccaaggccaggttggatgccctcgcccccatccttggtggggaggggtccccagcccactcctctaggacacgaagggg

SEQ ID NO: 204060 - protein, 153 aa, Artificial Sequence
  derived and/or modified sequence
MADEIDFTTGDAGASSTYPMQCSALRKNGFVVLKGRPCKIVEMSTSKTGKHGHAKVHLVGIDIFTGKKYEDICPSTHNMDVPNIKRNDYQLICIQDGYLSLLTETGEVREDLKLPEGELGKEIEGKYNAGEDVQVSVMCAMSEEYAVAIKPCK

SEQ ID NO: 204061 - DNA, 5593 bp, Artificial Sequence
  derived and/or modified sequence
gggtaagggcggggaggctggggtgtggaaagtgtggcggccccgccccgtctcttggaactgccgcggccgccaccgccgctgccggcgccgctgctgtaggggaccagcgcgggtgcgcagacgaaaggcgctctttgccagctgaaagttcccacggaaaaactaccatctcccctgcccaccatggcagacgaaattgatttcactactggagatgccggggcttccagcacttaccctatgcagtgctcggccttgcgcaaaaacggcttcgtggtgctcaaaggacgaccatgcaaaatagtggagatgtcaacttccaaaactggaaagcatggtcatgccaaggttcaccttgttggaattgatattttcacgggcaaaaaatatgaagatatttgtccttctactcacaacatggatgttccaaatattaagagaaatgattatcaactgatatgcattcaagatggttacctttccctgctgacagaaactggtgaagttcgtgaggatcttaaactgccagaaggtgaactaggcaaagaaatagagggaaaatacaatgcaggtgaagatgtacaggtgtctgtcatgtgtgcaatgagtgaagaatatgctgtagccataaaaccctgcaaataaacggaaacatcaggcatgaacactgtttatgtctgaatcaactgcagatctaatttggttctaagttgtcaccaaagctatagccttcataagcaacctcatttctttttttaattgttttcagattgtgctgggttagttttgcaagcaattgataatttttaaaaaattatcaatatgtataattttttttgaattttgtagatatgtttcctataatattcctgtggttttcagtatgtcagtccaagaaacaaacaagatagcttcagcagatgtgatttgtctgagcaaatcattcctgtgttttagttagatgataaaccagggttttaaatcaaacaatgtagcataaagtggtattgaagtaccatatttaagttgaactgctctgcattaattacagatttaatataaaatgaactgattatatattggaattgttgcactttcagcctgtgtagggcaaacacaaatccttaaacaaaaatcatgttatcaaaaactgtcagttattttggtggccacatgcaaccatgtgattactttggtcatactatttaccaaattgttggcaaacttgatgtaaccttatatggtggttttagtcccttcttatggttggcagaagggcactgaactgttgggtgaaagttagttagcaagtaagattataaggaagacacaaaagacagtggcaaagagggttgattaaatctataagtttttatgtgaggactttgtaagtcagcataaaaatgaaaagttgtttctcagttgtttttgcttttaactttgcccccaacgtttaaagggagtgatctgctttacatgatactatgcaatgcttgttttccaactatgttgaataaatagtaatatttatcagtaaatactcctttccaacttccttttttttttttttttttttgagactgagtctcactccatcagccaggctggagtgcagtggtgcaatctcggctcactgcaacctctgcctcccgagttcaagcaattctcctgcctcagcctcccaagtagctgggactacaggtgcatgccaccacgcccagctacttttttgtgtattttagtagagatggggtttcaccatgttgtctaggctggtcttgaactcctgacctcaggtgatccacctgcctcagcctcccaaagtgctgggattacaggcatgagccaccacacccagcccctttccaaccatttctaagtagattttttgacattaatgtatttattaaacaaaaactgagaattccttaaattgatttggaatttttgttaattttatgtcctttttttcctaaagtgaattaaagtgaatcatggaagcagcattactttatatgaatattattatttaagttaagttattttaagtatatgcattttttctgattgttgtgtgacttaattcagttgctggtgtgaactataactagcaaataattctataaactgaattattttaaaaggtattttaggtgacaccactgcatttctatttcatcttttgagtcatatgtatattatttccagaattttagacattattacagggtttgtgaggacctttgactcagtgacaatcatcatattggagcaaaacatagaacaaaatcactatctcagaaataccttaattctctaagactggctcttagacctctcccatcatgccttgacctctaaaaagccctttgttcctatcttctaaaggaaagtatatcatatatgatgatgtaactgatctaatcagtgactggaaatagcattagtaacagaagatcccaagttttagttgcttaatttgtacacacttttaaatattgtcttagcctcggcaaaccaatttggggaagaagcaagatactttaagagaaatacaaaggaaatttctaaagcacaagaaatagtgaggtagtagttagtcgtctttcctacaacattttagcttttgcccatctaaagcacaattaaaattaggctacattctttccagtattctatttaagtacctactacatactgctctagtttcttagtactctgtaatgtgtatcttaattgctactggttggcattgtaactcataggaattccagaaaattattaatccgtgctgcttgcagttcattcatatggcccctcttaaccatgctggtgttatgattcagtattaactctcaattagcatgcccctgttcttcctaacttgtaaaatttcacataaatatattttcaattgtgtacaaattaagggtgtacaaattataataatgcatctctatcttcatactttgaatggcaaacgctatttatgcataaatattttcattttaagtaatatatgaagtgtaaatactcgatatataagtatagattttaaagatatgggactttattttcacataagtcaatagatgtttctctagaacaaaatatttagtaaagctttataaattatattaaaaggaagcggggaacatgtattttttaacatagaacagaagtgacttcattctttttagacatcagaaatgttaaagttgattcccaatatttgttgtacttttttgtagcaaatgttaaaaatcacgagttaccatgtatagaatgtggactgtcatgttgatatcattgtacagtgataagccatttttatctgtatacatttcaccaatttattaacaggttgaatatttgtttctttttagaacattttatttatactgtgaagactttgttataccttatttgctacaacatagatcatatcattgctactttgacttagcatttgcatcataaacataattatgatgtttttttcatgctcccttccaggggctcagtcacttgaagaaactgttgctaaccaagctcttgactctgtttcccttaatgatacaagtctctgtaccagcgctttatgttaattaccaaaactctcctgcatcagagcatgatatctataataggagatactgcaataaaatgattaggctgtaaaatttggagacacaatttttcattacaatgcaatttgcatgtgcacatgtgcgcacataactttatatgttagttcttttttccaaactcccaactcttaaaagtattgtagtctgttggtgcctcaactgttggtaactttttttttttaaatttacaactttccacaacttgtttttgtactttaaggtttctcaattagaatatttctagttgagctgtaatttgaatgcattgttctcagggctatttgtgctaaaagctgaaatttcattattttaaagctaattgcctgaaaatatattggcagaattttcccaaattgtaataactgtgatacatgcatataaaaaaatccttaatgtcaacacacttaaactacatgctaaatagtcaagaaaaaaatggaaacagtagcatccatactggaatcttgccatatttttttcattttagaatagattttggcagtctcatcttagaatcctatccttaggatacatctgaaagcattcctttggcatggaccccagagatagttttggagccaggcattgatgtagaggttcaccaaacatatttagggataatagataaattcataatgcttttttgggtacactgaaatgtttacatactgaattctgtaatatgaactaggaacgcatttactatgagaaaatatggctcttaagcagtgtaagagtgaaaatataagcatatttccattaacagtatattgtactgatcagcagctctcattttaacatcagttaggcataatatttcatagttttcaagccttttttttctgctaacattcagacaagtaacaggcaacaaagatttaagaaaaatttatggtggaaaaccttaaaaattgagacaattcaatctatttaatctattaaattttttctctgaattgggtatatggcatcattatttgattttagcagggaacatttggatttagcttatgaaacacagatgttctatgggaacatggcttgaagccaatatgtaatttaatgtttttccattaaacaaacatctgaacaccaacttagctaccaagtgaggtcaagtgcctgaaaagtactgtatacatctaataagcatgttttccttatgtaaaagatgcactttatggcaatgcataccaggctttcacctgctagaaacatacttgttgccaactttgccatctaccactattctcctccttagaacaggtagaaacctattttacaaaaaaaaaaaaaaaaaaaaaaagacaggttattgtatttatatgaagtccctaaaactgtttcttggtattgatagacttaagtttatcttagttcaagattgcactttttaaaaaactctggactattttcagcaatgaccgaacagcttgtcacacatcatagttgtgatcttttttgaggagttatttattgtggttaatatctactataaataagcattcttgtgcttgttacaaagcataatgcaaattactagttctatactagtataatgaaaatgactagttctatactgttatgtacttttgtcttcctccccaaaaaggaaacagtttagcattgtctaaattcagtggcacttttttagtaatacatttttttttcttagatacaggagaactattgcttttacctgcagaaactcaaatgttttcgctaaaactttaaaattctaaaatacgtagtatgggtattactaattgtacattttacatttcaaaaatagttaaaattcaaatgttaagtctttgacttaaaaaacctttaaatatagataataccttaacaattataactttgtgatattattaaaatatatttgtctgttaacttcatcagttgtattaaataaaaatagttaacagcttgcacta

SEQ ID NO: 204062 - DNA, 462 bp, Artificial Sequence
  derived and/or modified sequence
atggctgatgaaatcgattttacaaccggagatgccggcgcgtcatctacataccccatgcagtgttctgccctcaggaagaacggattcgtggtgctgaagggcagaccatgcaaaatcgttgagatgtccaccagtaagaccggcaagcacggacatgctaaagtccaccttgtgggaatcgatattttcaccggcaagaagtacgaagacatctgcccttcaacccacaacatggacgtgcccaacattaagcgaaacgactaccagcttatttgcattcaggacggctacctttcgctgctgaccgaaaccggcgaggttcgagaggacctaaagctgccagagggcgaactcgggaaagagatcgaaggcaagtacaacgccggggaggatgtccaagtgagtgtgatgtgcgccatgagcgaggagtatgccgtagcgattaaaccttgtaagtag

SEQ ID NO: 204063 - DNA, 462 bp, Artificial Sequence
  derived and/or modified sequence
atggctgatgaaattgacttcaccactggagatgctggggccagcagcacctaccccatgcagtgcagcgccctgaggaagaatggatttgtggtgctgaagggccggccctgcaagatcgtggagatgagcaccagcaagacaggcaagcacggccacgccaaggtgcacctggtgggcatcgacatcttcaccgggaagaagtatgaggacatctgccccagcacccacaacatggatgtgcccaacatcaagagaaatgactaccagctgatctgcatccaggacggctacctgagcctgctgacagaaacaggagaggtgcgggaggacctgaagctgcctgagggggagctgggcaaggagattgagggcaagtacaatgctggagaagatgtgcaggtgtctgtgatgtgtgccatgtctgaggagtatgctgtggccatcaagccctgcaagtag

SEQ ID NO: 204064 - DNA, 462 bp, Artificial Sequence
  derived and/or modified sequence
atggccgacgagatcgacttcaccaccggcgacgccggcgccagcagcacatatcctatgcagtgctctgctctgcggaagaatgggtttgtggttttgaagggccgcccctgtaagattgttgagatgtcaacttcaaaaaccggtaaacatggtcacgctaaggtgcacctggttgggatcgatatttttaccggcaagaagtatgaggacatttgcccatcaactcacaacatggatgtgcccaatatcaaacgcaatgactatcagctcatatgcatacaggatggatatctgagtctgttgaccgagacaggagaagttcgcgaagatttgaagttgcctgaaggcgagctgggcaaggaaattgagggcaagtacaatgcaggagaggacgtgcaggtttcggtcatgtgtgccatgagcgaagagtacgcagtggctatcaagccatgtaagtag

SEQ ID NO: 204065 - DNA, 462 bp, Artificial Sequence
  derived and/or modified sequence
atggcagacgagattgacttcaccactggagatgcaggcgcatccagcacctatcctatgcagtgctctgccttaagaaagaatgggttcgtggtcctcaaaggtaggccatgtaaaatcgtggagatgtctacctcgaagacagggaagcatggacacgccaaggtgcacctcgtggggattgatatttttaccggaaagaagtacgaggacatctgcccatctacacataacatggacgtgcccaacatcaaaagaaatgactaccagctgatctgtattcaagacggatatctgagtttactcactgaaaccggtgaagtcagagaggacctgaagctgcctgagggtgagctaggcaaggagattgaaggaaaatacaacgccggagaggacgttcaagtgtccgttatgtgtgcgatgtcagaagagtacgcagtcgctataaaaccgtgcaagtag

SEQ ID NO: 204066 - DNA, 462 bp, Artificial Sequence
  derived and/or modified sequence
atggccgacgagatcgacttcaccaccggcgacgccggcgccagcagcacctaccccatgcagtgcagcgccctgagaaagaacggcttcgtggtgctgaagggcagaccctgcaagatcgtggagatgagcaccagcaagaccggcaagcacggccacgccaaggtgcacctggtgggcatcgacatcttcaccggcaagaagtacgaggacatctgccccagcacccacaacatggacgtgcccaacatcaagagaaacgactaccagctgatctgcatccaggacggctacctgagcctgctgaccgagaccggcgaggtgagagaggacctgaagctgcccgagggcgagctgggcaaggagatcgagggcaagtacaacgccggcgaggacgtgcaggtgagcgtgatgtgcgccatgagcgaggagtacgccgtggccatcaagccctgcaagtag

SEQ ID NO: 204067 - protein, 373 aa, Artificial Sequence
  derived and/or modified sequence
MLPWLLVFSALGIQAWGDSSWNKTQAKQVSEGLQYLFENISQLTEKGLPTDVSTTVSRKAWGAEAVGCSIQLTTPVNVLVIHHVPGLECHDQTVCSQRLRELQAHHVHNNSGCDVAYNFLVGDDGRVYEGVGWNIQGVHTQGYNNISLGFAFFGTKKGHSPSPAALSAMENLITYAVQKGHLSSSYVQPLLGKGENCLAPRQKTSLKKACPGVVPRSVWGARETHCPRMTLPAKYGIIIHTAGRTCNISDECRLLVRDIQSFYIDRLKSCDIGYNFLVGQDGAIYEGVGWNVQGSSTPGYDDIALGITFMGTFTGIPPNAAALEAAQDLIQCAMVKGYLTPNYLLVGHSDVARTLSPGQALYNIISTWPHFKH

SEQ ID NO: 204068 - DNA, 1122 bp, Artificial Sequence
  derived and/or modified sequence
atgctcccctggctcttagtattttcagcattgggtatccaagcgtggggtgattcctcctggaacaaaacccaggctaaacaggtttccgaaggtctgcaatatcttttcgaaaacatcagccagttgaccgaaaagggtttgccaaccgacgtgagtactaccgtctcaagaaaagcttggggtgctgaagccgtaggatgctcaatccagctgacgacccccgtaaatgttctggtgatccatcatgtgcccggtctggaatgtcatgatcaaacggtgtgttcacagcgcctgagggaactccaggcccaccacgtacataacaatagtggatgtgatgtggcctataactttctggtgggtgatgacggcagggtgtatgaaggcgttggctggaatatccagggtgttcatactcagggatataacaacatctctttaggtttcgccttcttcggtacaaaaaaaggacactctcccagcccggctgcactgtccgctatggaaaatctaattacatacgccgtccagaagggccatttgagtagctcgtatgtgcagccactcctaggcaagggcgaaaactgcctcgcaccacgccagaaaaccagcctgaaaaaagcctgccccggagttgtcccacggtcagtttggggcgcacgggagactcactgtccacggatgacgctccccgctaaatacgggatcatcatccacaccgctggacgcacatgtaacatttctgacgaatgccgtctgttagtacgggacatccagagcttttatattgatcgcttgaaatcgtgcgacatcgggtacaactttttagttgggcaggacggggcaatatacgagggagtcggctggaatgtccagggttcatccactcccggatacgacgatatcgccctgggaattacatttatgggcacattcaccggaatccccccaaacgctgctgcactggaagcagcccaggacctgatccaatgcgcgatggtcaagggctatctgactccaaattatctgctcgtaggccacagtgacgtggcacgcaccctaagcccaggtcaagccctgtacaatatcatctccacctggccacatttcaaacattag

SEQ ID NO: 204069 - DNA, 1122 bp, Artificial Sequence
  derived and/or modified sequence
atgttaccttggctcttggtcttttccgcgctcggcattcaggcttggggggacagcagttggaataagactcaggccaaacaggttagcgaaggacttcagtacctgtttgagaacatttcacaactgacggagaagggactccctacggacgtatccaccacagtatccaggaaagcctggggcgcggaggccgtgggatgcagcattcagctaacaactccagttaatgtgctggtgatacaccacgtgccagggctggaatgtcatgatcagactgtgtgtagccagcgcctgagagagttgcaggcacaccatgttcacaacaacagcggatgcgacgtcgcctacaacttcttggtcggcgatgatggacgggtgtacgagggcgtgggttggaacatacaaggagttcacacccagggatacaataacatcagcctgggcttcgcatttttcgggacgaagaagggtcactctccgagccccgccgcactcagtgccatggaaaacctcatcacttatgcagtgcagaaaggacatttgtctagctcttatgtgcagccactgctcggcaaaggcgagaattgcctagccccaagacagaagacatccctcaaaaaggcgtgcccaggggtcgttccaagatccgtttggggagcacgggagacccactgccctagaatgacgctgcctgccaaatacggaattatcatccacactgctggccgcacatgcaacatctctgatgaatgtaggctgctggtgcgcgatatccagtccttctacattgacaggctaaaaagctgcgacatcggctacaattttctggtggggcaggatggcgctatctatgaaggcgtcgggtggaacgtgcagggatcgagtacacccggatacgacgatattgcgctaggtatcactttcatggggactttcaccgggattcctccaaatgccgccgccctggaagccgcccaggatttaatacagtgcgctatggtgaaaggttaccttaccccaaattatctgctggtcggacattcagatgtagcaaggacactgtctcccggccaagcgctttacaacattatttccacttggccacattttaagcattag

SEQ ID NO: 204070 - DNA, 1122 bp, Artificial Sequence
  derived and/or modified sequence
atgttgccatggctgctggttttcagtgctctggggattcaagcttggggcgattcaagctggaataaaacacaggcaaagcaagtgtctgagggattgcaatacctgttcgagaatattagtcaattgactgaaaagggactgcccacagatgtttccacaaccgtgtcccgcaaggcttggggagctgaggccgtggggtgctctattcagctcaccacccctgtcaacgtcttagtgatacaccatgttccaggcctggagtgccatgaccagactgtgtgttctcagcgactgcgtgaacttcaggcgcaccatgtccacaacaatagcggatgcgatgtggcttacaattttctggtcggagatgacgggcgcgtttacgagggcgtcggttggaatatccagggtgtgcacacacaggggtataacaatattagccttggctttgctttctttgggacaaaaaaaggacactcacctagtcctgcagccctgtccgctatggaaaatctcataacctatgcagtgcagaaaggccacctctctagttcctacgtgcagccgcttctcggtaaaggcgaaaactgtctggccccacgacagaagacttcactcaaaaaagcttgtccaggggtggtcccacggtcagtctggggcgccagagaaacacattgccctaggatgacattgcccgcaaagtatggcattataattcacacagccggccggacatgcaatatcagcgatgaatgtagactgctggtaagagacattcagagtttctacatcgatagactgaagagttgcgatattgggtacaactttctggttggacaggacggcgctatctatgaaggggttggctggaacgtccagggtagttcaacaccaggctacgacgacatcgccctgggaattacctttatggggacttttaccggcattccccccaacgctgctgccctcgaggctgcccaagatctcatccagtgtgccatggtcaaaggctatctcactcctaattatctgctcgtgggtcactctgatgtcgctcggactctgtctcccggacaagctctctacaacatcatcagcacttggcctcatttcaaacattag

SEQ ID NO: 204071 - DNA, 1122 bp, Artificial Sequence
  derived and/or modified sequence
atgctgccctggctgctggtgttcagcgccctgggcatccaggcctggggcgacagcagctggaacaagacccaggccaagcaggtgagcgagggcctgcagtacctgttcgagaacatcagccagctgaccgagaagggcctgcccaccgacgtgagcaccaccgtgagcagaaaggcctggggcgccgaggccgtgggctgcagcatccagctgaccacccccgtgaacgtgctggtgatccaccacgtgcccggcctggagtgccacgaccagaccgtgtgcagccagagactgagagagctgcaggcccaccacgtgcacaacaacagcggctgcgacgtggcctacaacttcctggtgggcgacgacggcagagtgtacgagggcgtgggctggaacatccagggcgtgcacacccagggctacaacaacatcagcctgggcttcgccttcttcggcaccaagaagggccacagccccagccccgccgccctgagcgccatggagaacctgatcacctacgccgtgcagaagggccacctgagcagcagctacgtgcagcccctgctgggcaagggcgagaactgcctggcccccagacagaagaccagcctgaagaaggcctgccccggcgtggtgcccagaagcgtgtggggcgccagagagacccactgccccagaatgaccctgcccgccaagtacggcatcatcatccacaccgccggcagaacctgcaacatcagcgacgagtgcagactgctggtgagagacatccagagcttctacatcgacagactgaagagctgcgacatcggctacaacttcctggtgggccaggacggcgccatctacgagggcgtgggctggaacgtgcagggcagcagcacccccggctacgacgacatcgccctgggcatcaccttcatgggcaccttcaccggcatcccccccaacgccgccgccctggaggccgcccaggacctgatccagtgcgccatggtgaagggctacctgacccccaactacctgctggtgggccacagcgacgtggccagaaccctgagccccggccaggccctgtacaacatcatcagcacctggccccacttcaagcactag

SEQ ID NO: 204072 - DNA, 1122 bp, Artificial Sequence
  derived and/or modified sequence
atgctgccgtggttgttggttttctcggctctgggcattcaagcatggggggactcttcctggaataaaacacaagccaagcaggtctctgagggtctgcagtacttatttgagaacatcagtcagcttaccgaaaagggcctccctactgatgtctctacaacagtgtcacgcaaagcatggggggcagaagcggttggctgctccatacaacttactactcctgtgaatgtgttggtaattcatcacgtgcctggactggaatgtcacgaccagaccgtctgcagtcaaaggcttcgcgagcttcaagcacatcacgtccacaacaattcagggtgtgatgtggcttataacttcctggtgggggacgatggcagggtgtacgagggggtcgggtggaacattcaaggcgtgcacactcaggggtacaataacatcagtcttggtttcgcattcttcggaaccaaaaagggccatagcccctccccagccgctctatccgctatggagaatctcataacatacgccgttcaaaagggccacttgtcttcgtcgtatgtgcagccactgctcggtaagggtgaaaactgcctagccccacggcagaagacctccttgaagaaggcctgtcctggcgtagtgcctagaagcgtatggggagcgcgggagacccattgccctaggatgacactgcctgccaaatatgggatcataattcacacagcaggtcggacttgtaatatcagcgacgagtgccgcctgctggtgcgtgatatacaatccttttatatagaccggcttaaaagctgtgacatcggctataactttctggtaggccaggacggtgccatttatgagggcgtcggatggaatgttcagggcagctccactccaggttatgacgacattgctctgggcatcacttttatgggcactttcaccggcattccaccaaacgcagctgcccttgaagctgcccaggatctgatacagtgcgccatggttaagggctatcttactcctaattacctcctagtgggacactccgacgtggctcgaacactgtccccagggcaggctctttacaacatcatcagcacctggccacacttcaaacactag

SEQ ID NO: 204073 - DNA, 1834 bp, Artificial Sequence
  derived and/or modified sequence
acaggacccacagatatctgctgccatccacactctccagattggtgtcctgggaccacgtggggatgctgccgtggcttcttgtcttctctgctctgggtatccaggcctggggtgattcctcctggaacaaaacacaagctaaacaggtatcagaggggctccagtacctatttgagaacatctcccagctcactgaaaaaggccttcccacagatgtctccaccacggtctctcgcaaggcatggggggcagaagctgttggctgcagtattcagctgaccacgccagtgaatgtccttgttatacaccatgtccctggactggagtgtcacgaccagacagtctgcagccagagactgcgggaactgcaggcccatcatgtccacaacaacagtgggtgtgatgtggcctacaacttcctggttggggatgatggcagggtgtatgaaggtgttggctggaatatccaaggagtgcacacccaaggctacaacaacatctccctgggctttgccttctttggcactaagaaaggccacagtcccagccctgctgccctgtcggccatggaaaacctaatcacctatgctgtccagaagggccacctgtcatccagttatgttcagccacttcttgggaaaggcgagaactgcctggcccctcggcagaagacaagcctgaagaaggcttgccccggcgttgtcccacggtctgtgtggggagccagggagacccactgtcccaggatgactctcccagcgaagtatggcatcattatccacactgccgggaggacctgcaacatttctgatgagtgccgcctgctggtccgggacatccagtctttctacatagacaggctcaagtcatgcgacattggttataacttcctggtgggccaggatggcgccatttatgaaggggtgggctggaatgtccaaggctcctccacccctggctacgatgacattgccctgggcattaccttcatgggcaccttcacaggtataccacccaatgctgcagcactagaggcagcccaagacctgatccagtgtgccatggtcaaagggtacctgactcccaactacctgctggtgggccacagtgatgtggcccgaaccttgtctcctgggcaggctttgtacaacatcatcagcacctggcctcatttcaaacactgagagaagccccaggtccttctgagactgctttccctcccctgtcaggtctctcctgtcctaaccatccagcttggctcaacaccttttgccctcctcccctgccacacagtcctgtgcctcctttttcaggttgggatgatcatgccctctcctgccaacatcctccaagggcctccaaacctcatagctggacattcacagccctctgagtctgagtccagatttcttctctccttaccttcctctcccttggaaacccaactcctcagccaggtgagacaatgggctggttcttgtttcatttctctctctctctccattcccctctgcctggtgagccttcccctggtgtctgcctggcagcccccacctcccacctatcacccctcacccataactcaggtcaacgtgaccaaccttccttgcttacacataaacttgtatatatttggatgtagcccttatttaatggctgtcattatttatagatatgtctatccttgctacttggttgtgagtttctccaggggaggaactgtgttttattcatctctatgtcctctgtttctcagcagtgtctgaaatttaatgggttctactgatgtttattagagaaatggatgaataaatgaatgaagagatccaaa

SEQ ID NO: 204074 - DNA, 1122 bp, Artificial Sequence
  derived and/or modified sequence
atgctgccctggctgctggtgttttctgccctgggcatccaggcctggggagacagctcctggaacaagacccaggccaagcaggtgtctgagggcctgcagtacctgtttgagaacatcagccagctgacagagaagggcctgcccacagatgtgtccaccaccgtgtccaggaaggcctggggcgctgaggccgtgggctgcagcatccagctgaccacccctgtgaatgtgctggtgatccaccacgtgcccggcctggagtgccacgaccagacagtgtgcagccagaggctgcgggagctgcaggcccaccacgtgcacaacaacagcggctgtgatgtggcctacaacttcctggtgggagatgatggccgggtgtatgagggcgtgggctggaacatccagggcgtgcacacccagggctacaacaacatcagcctgggctttgccttcttcggcaccaagaagggccacagccccagccctgctgccctgagcgccatggagaacctgatcacctatgctgtgcagaagggccacctgagcagcagctatgtgcagcccctgctgggcaaaggagagaactgcctggccccccggcagaagaccagcctgaagaaggcctgccctggggtggtgcccaggtctgtgtggggcgcccgggagacccactgccccaggatgaccctgcctgccaagtatggcatcatcatccacacagctggccgcacctgcaacatcagtgatgaatgtcggctgctggtgcgggacatccagagcttctacatcgaccggctgaagagctgtgacatcggctacaacttcctggtgggccaggatggagccatctatgaaggagtgggctggaatgtgcagggcagcagcaccccaggctatgatgacatcgccctgggcatcaccttcatgggcaccttcaccggcatccccccaaatgctgctgccctggaggccgcccaggacctgatccagtgtgccatggtgaagggctacctgacccccaactacctgctggtgggccacagtgatgtggcccggaccctgagccctggccaggccctgtacaacatcatcagcacctggccccacttcaagcactag

SEQ ID NO: 204075 - DNA, 1122 bp, Artificial Sequence
  derived and/or modified sequence
atgctgccctggctgctggtgttcagcgccctgggcatccaggcctggggtgactcctcctggaataagacccaggctaagcaagtgtccgaggggttgcagtatttgtttgaaaacatctcacaattgacagagaaaggtttgccgaccgatgtcagtactactgtctcccggaaggcgtggggagctgaggccgtggggtgttccatccaactcaccaccccagtcaatgtgctggttatccaccatgtgccgggactagagtgccacgatcagaccgtatgtagtcaacggttacgggaattgcaggcacatcacgttcacaacaattctggctgtgacgtggcgtacaattttctcgtgggagatgacgggagagtgtatgaaggggtgggctggaatatccaaggagtgcacacacaaggttacaataatattagtctaggtttcgccttcttcgggacaaagaaaggtcatagcccctcccctgcagccctgtccgccatggagaacttaataacatacgcagtgcaaaagggacacctaagcagcagctacgtgcagccactgctgggtaagggcgagaactgcctggctccacgacagaagacttcattgaaaaaagcctgccccggtgtcgtgccacggtcagtgtggggtgctcgtgagacgcactgtcctagaatgaccctgccggcgaagtacggcatcataattcatacagccggacgcacctgcaacatttcagacgagtgcagattattggtcagagacattcaatcattttacattgaccgcctaaaatcgtgcgacattggatataacttcctagtgggccaggacggggccatttacgagggggtggggtggaacgtgcagggctccagcacccccgggtatgacgatattgcattggggattactttcatgggaacatttacagggataccaccaaacgccgcagccctggaagccgctcaggatctcatccagtgcgctatggtgaagggctatttgacccctaactacctactggtggggcacagtgatgtggcccggaccctctcacccgggcaggctttatataatatcatctctacttggccacactttaagcattag

SEQ ID NO: 204076 - RNA, 1122 nt, Artificial Sequence
  derived and/or modified sequence
auguuaccuuggcucuuggucuuuuccgcgcucggcauucaggcuuggggggacagcaguuggaauaagacucaggccaaacagguuagcgaaggacuucaguaccuguuugagaacauuucacaacugacggagaagggacucccuacggacguauccaccacaguauccaggaaagccuggggcgcggaggccgugggaugcagcauucagcuaacaacuccaguuaaugugcuggugauacaccacgugccagggcuggaaugucaugaucagacuguguguagccagcgccugagagaguugcaggcacaccauguucacaacaacagcggaugcgacgucgccuacaacuucuuggucggcgaugauggacggguguacgagggcguggguuggaacauacaaggaguucacacccagggauacaauaacaucagccugggcuucgcauuuuucgggacgaagaagggucacucuccgagccccgccgcacucagugccauggaaaaccucaucacuuaugcagugcagaaaggacauuugucuagcucuuaugugcagccacugcucggcaaaggcgagaauugccuagccccaagacagaagacaucccucaaaaaggcgugcccaggggucguuccaagauccguuuggggagcacgggagacccacugcccuagaaugacgcugccugccaaauacggaauuaucauccacacugcuggccgcacaugcaacaucucugaugaauguaggcugcuggugcgcgauauccaguccuucuacauugacaggcuaaaaagcugcgacaucggcuacaauuuucugguggggcaggauggcgcuaucuaugaaggcgucggguggaacgugcagggaucgaguacacccggauacgacgauauugcgcuagguaucacuuucauggggacuuucaccgggauuccuccaaaugccgccgcccuggaagccgcccaggauuuaauacagugcgcuauggugaaagguuaccuuaccccaaauuaucugcuggucggacauucagauguagcaaggacacugucucccggccaagcgcuuuacaacauuauuuccacuuggccacauuuuaagcauuag

SEQ ID NO: 204077 - RNA, 1122 nt, Artificial Sequence
  derived and/or modified sequence
auguugccauggcugcugguuuucagugcucuggggauucaagcuuggggcgauucaagcuggaauaaaacacaggcaaagcaagugucugagggauugcaauaccuguucgagaauauuagucaauugacugaaaagggacugcccacagauguuuccacaaccgugucccgcaaggcuuggggagcugaggccguggggugcucuauucagcucaccaccccugucaacgucuuagugauacaccauguuccaggccuggagugccaugaccagacuguguguucucagcgacugcgugaacuucaggcgcaccauguccacaacaauagcggaugcgauguggcuuacaauuuucuggucggagaugacgggcgcguuuacgagggcgucgguuggaauauccagggugugcacacacagggguauaacaauauuagccuuggcuuugcuuucuuugggacaaaaaaaggacacucaccuaguccugcagcccuguccgcuauggaaaaucucauaaccuaugcagugcagaaaggccaccucucuaguuccuacgugcagccgcuucucgguaaaggcgaaaacugucuggccccacgacagaagacuucacucaaaaaagcuuguccagggguggucccacggucagucuggggcgccagagaaacacauugcccuaggaugacauugcccgcaaaguauggcauuauaauucacacagccggccggacaugcaauaucagcgaugaauguagacugcugguaagagacauucagaguuucuacaucgauagacugaagaguugcgauauuggguacaacuuucugguuggacaggacggcgcuaucuaugaagggguuggcuggaacguccaggguaguucaacaccaggcuacgacgacaucgcccugggaauuaccuuuauggggacuuuuaccggcauuccccccaacgcugcugcccucgaggcugcccaagaucucauccagugugccauggucaaaggcuaucucacuccuaauuaucugcucgugggucacucugaugucgcucggacucugucucccggacaagcucucuacaacaucaucagcacuuggccucauuucaaacauuag

SEQ ID NO: 204078 - protein, 204 aa, Artificial Sequence
  derived and/or modified sequence
MVDQLRERTTMADPLRERTELLLADYLGYCAREPGTPEPAPSTPEAAVLRSAAARLRQIHRSFFSAYLGYPGNRFELVALMADSVLSDSPGPTWGRVVTLVTFAGTLLERGPLVTARWKKWGFQPRLKEQEGDVARDCQRLVALLSSRLMGQHRAWLQAQGGWDGFCHFFRTPFPLAFWRKQLVQAFLSCLLTTAFIYLWTRLL

SEQ ID NO: 204079 - DNA, 615 bp, Artificial Sequence
  derived and/or modified sequence
atggtagatcagctgagagagcggacaactatggccgaccccctccgggaaaggacagagttactcctagccgattatctgggttattgtgcaagagagccagggactccggagcccgccccttccacccccgaagccgcagtgttgagatcagccgcggcgaggctaaggcaaattcacagatctttcttttctgcctatctcggctacccggggaatagatttgagttggtggctttaatggctgactcggttctgtccgactcacccgggcctacatggggacgtgtcgtaactcttgtgacattcgctggaaccctgctggaaagggggccactcgtgactgcacgctggaagaagtggggcttccagcctaggctgaaagagcaggagggcgatgtcgctagggattgtcagagactcgtggccctgctttcatctaggttgatggggcaacaccgagcatggctccaagctcagggcggctgggatggtttttgtcacttctttagaacaccgtttcccttagccttctggcgaaagcagttagtccaggctttcttatcctgccttctgacaacggcatttatttacctctggaccagactgttgtag

SEQ ID NO: 204080 - DNA, 615 bp, Artificial Sequence
  derived and/or modified sequence
atggtggaccagctgcgggagaggaccaccatggctgaccccctgcgggagaggacagagctgctgctggccgactacctgggctactgtgcccgggagcccggcaccccagagcccgcccccagcaccccagaggccgctgtgctgcggtctgctgctgcccggctgcggcagatccacaggagcttcttcagcgcctacctgggctacccaggcaacagatttgagctggtggccctgatggctgacagcgtgctgagtgacagccctggccccacctggggccgggtggtgaccctggtgacctttgctggcaccctgctggagcggggccccctggtgacagcccgctggaagaagtggggcttccagccccggctgaaggagcaggagggagatgtggcccgggactgccagaggctggtggccctgctgagcagccggctgatgggccagcaccgggcctggctgcaggcccagggcggctgggatggcttctgccacttcttccgcacccccttccccctggccttctggaggaagcagctggtgcaggccttcctgagctgcctgctgaccacagccttcatctacctgtggacccggctgctgtag

SEQ ID NO: 204081 - DNA, 615 bp, Artificial Sequence
  derived and/or modified sequence
atggtggaccagctgcgggagcggaccaccatggccgaccccctgagagagaggactgaactgcttcttgctgattacctaggttactgtgccagggagcccggcacgcccgagcccgccccgtccactcctgaggctgccgtgttacggtccgcagccgcacgtctgaggcaaattcacagatctttctttagtgcctatttgggctatcctggcaacaggtttgagctggtagcactgatggccgactccgttctctctgactctcccggcccaacctggggccgggtggtcacactggtgaccttcgccgggacgttactggaacgcggtcccctggtcactgctagatggaagaagtggggattccagccgaggttaaaggaacaagagggagatgtggcaagggactgtcagagactggtagccctgctgagtagcaggctaatgggacaacacagagcatggctccaggctcagggagggtgggacggtttctgtcatttttttagaacgccatttcctctcgccttctggagaaagcagctcgtgcaggcttttctgtcatgtctcttaacaacagcctttatctacctgtggactcgactgttgtag

SEQ ID NO: 204082 - DNA, 615 bp, Artificial Sequence
  derived and/or modified sequence
atggtcgaccaactgagggagcggaccactatggccgatccactccgcgagcggaccgagttactgttggccgattatctcggctattgcgccagggaacctggcacccctgagcccgctccttctacccctgaagccgcagtgctgcggtctgcagctgctaggttacggcagatacatcgatcattcttttccgcttatctcggctatcctggaaataggttcgaactggtcgccctgatggccgacagcgtgctttccgacagccccggacctacatgggggagagtggtgactctcgtgacgttcgccggaacactgttggagcggggtcctctcgtaacagcccgatggaagaagtggggcttccagcccaggttgaaggagcaggagggagacgttgcccgagactgccaaagattagtggctctactgagtagtcgcctgatgggccaacatcgcgcatggctccaggcccaaggtggatgggacggcttctgccacttcttccgaacccctttccctctggcattttggcgcaaacagctagtgcaggcctttctgtcgtgcctcctgacaactgctttcatatatctgtggacaaggctgctttag

SEQ ID NO: 204083 - DNA, 1249 bp, Artificial Sequence
  derived and/or modified sequence
cgggccaagaaaaccagcgaaggcccggccccccagcagaggccggaccatggttgaccagttgcgggagcgcaccaccatggccgacccgctgcgggagcgcaccgagctgttgctggccgactacctggggtactgcgcccgggaacccggcacccccgagccggcgccatccacgcccgaggccgccgtgctgcgctccgcggccgccaggttacggcagattcaccggtcctttttctccgcctacctcggctaccccgggaaccgcttcgagctggtggcgctgatggcggattccgtgctctccgacagccccggccccacctggggcagagtggtgacgctcgtgaccttcgcagggacgctgctggagagagggccgctggtgaccgcccggtggaagaagtggggcttccagccgcggctaaaggagcaggagggcgacgtcgcccgggactgccagcgcctggtggccttgctgagctcgcggctcatggggcagcaccgcgcctggctgcaggctcagggcggctgggatggcttttgtcacttcttcaggaccccctttccactggctttttggagaaaacagctggtccaggcttttctgtcatgcttgttaacaacagccttcatttatctctggacacgattattatgagttttaaaacttttaacccgcttctacctgcccaactgtgaccaactaaatgacagatgtgtgagaacaagaactgagggaaagcaccttcccccaccccagacgtttttatctgaatgcatacaaggagtcctgaggtggtgatttggccagtgttttaacttgtgacaagtactcaggtgtgaggacaagaatgcaaatggctcttccttgagtgaaagaaatggggagtctagagcctctttatgccaaagaaccgcagaagaaactgcattccattaaatgggaaatacagtgctatttgctaaaacttggataagagtgcgaacctctcatctctccacaacttcatgtgctgctgactaattttaaacatggccacagctggggcaaaataatccccaaagtagaaaaagtcccagtttaacaaagaatgtaatgttaaaatcacttataaggaattctttgaaaccaaatcctttgaaatctaattcctgggacttctaggtttttatagttaacatactaatttcttcaataattgttaactgcaaagttttaataaatttgtacctttaaaaaaaa

SEQ ID NO: 204084 - DNA, 615 bp, Artificial Sequence
  derived and/or modified sequence
atggtggaccagctgagagagagaaccaccatggccgaccccctgagagagagaaccgagctgctgctggccgactacctgggctactgcgccagagagcccggcacccccgagcccgcccccagcacccccgaggccgccgtgctgagaagcgccgccgccagactgagacagatccacagaagcttcttcagcgcctacctgggctaccccggcaacagattcgagctggtggccctgatggccgacagcgtgctgagcgacagccccggccccacctggggcagagtggtgaccctggtgaccttcgccggcaccctgctggagagaggccccctggtgaccgccagatggaagaagtggggcttccagcccagactgaaggagcaggagggcgacgtggccagagactgccagagactggtggccctgctgagcagcagactgatgggccagcacagagcctggctgcaggcccagggcggctgggacggcttctgccacttcttcagaacccccttccccctggccttctggagaaagcagctggtgcaggccttcctgagctgcctgctgaccaccgccttcatctacctgtggaccagactgctgtag

SEQ ID NO: 204085 - protein, 357 aa, Artificial Sequence
  derived and/or modified sequence
MARENGESSSSWKKQAEDIKKIFEFKETLGTGAFSEVVLAEEKATGKLFAVKCIPKKALKGKESSIENEIAVLRKIKHENIVALEDIYESPNHLYLVMQLVSGGELFDRIVEKGFYTEKDASTLIRQVLDAVYYLHRMGIVHRDLKPENLLYYSQDEESKIMISDFGLSKMEGKGDVMSTACGTPGYVAPEVLAQKPYSKAVDCWSIGVIAYILLCGYPPFYDENDSKLFEQILKAEYEFDSPYWDDISDSAKDFIRNLMEKDPNKRYTCEQAARHPWIAGDTALNKNIHESVSAQIRKNFAKSKWRQAFNATAVVRHMRKLHLGSSLDSSNASVSSSLSLASQKDCAYVAKPESLS

SEQ ID NO: 204086 - DNA, 1074 bp, Artificial Sequence
  derived and/or modified sequence
atggccagagagaacggcgagagcagcagcagctggaagaagcaggccgaggacatcaagaagatcttcgagttcaaggagaccctgggcaccggcgccttcagcgaggtggtgctggccgaggagaaggccaccggcaagctgttcgccgtgaagtgcatccccaagaaggccctgaagggcaaggagagcagcatcgagaacgagatcgccgtgctgagaaagatcaagcacgagaacatcgtggccctggaggacatctacgagagccccaaccacctgtacctggtgatgcagctggtgagcggcggcgagctgttcgacagaatcgtggagaagggcttctacaccgagaaggacgccagcaccctgatcagacaggtgctggacgccgtgtactacctgcacagaatgggcatcgtgcacagagacctgaagcccgagaacctgctgtactacagccaggacgaggagagcaagatcatgatcagcgacttcggcctgagcaagatggagggcaagggcgacgtgatgagcaccgcctgcggcacccccggctacgtggcccccgaggtgctggcccagaagccctacagcaaggccgtggactgctggagcatcggcgtgatcgcctacatcctgctgtgcggctacccccccttctacgacgagaacgacagcaagctgttcgagcagatcctgaaggccgagtacgagttcgacagcccctactgggacgacatcagcgacagcgccaaggacttcatcagaaacctgatggagaaggaccccaacaagagatacacctgcgagcaggccgccagacacccctggatcgccggcgacaccgccctgaacaagaacatccacgagagcgtgagcgcccagatcagaaagaacttcgccaagagcaagtggagacaggccttcaacgccaccgccgtggtgagacacatgagaaagctgcacctgggcagcagcctggacagcagcaacgccagcgtgagcagcagcctgagcctggccagccagaaggactgcgcctacgtggccaagcccgagagcctgagctag

SEQ ID NO: 204087 - DNA, 1074 bp, Artificial Sequence
  derived and/or modified sequence
atggccagagagaacggtgagtccagtagcagttggaagaagcaagcggaggacatcaagaaaatcttcgaattcaaggaaactctagggactggcgcgttcagtgaggttgtgcttgcggaggaaaaggccacaggcaagttgttcgcggtcaaatgcatccccaaaaaagcgctaaagggcaaggagtcctctatagagaacgagattgccgttttgagaaagatcaagcatgagaatattgtggccttggaggatatctacgaaagccctaaccacctatacttagtaatgcagctggtcagcgggggggagctgttcgaccggattgtcgaaaaaggattctacacagagaaggacgcatctactctcatcaggcaggtgctcgacgctgtctattaccttcaccgcatgggcatcgtgcacagggatctgaagccagagaacctgctctattactcccaggacgaggagtccaaaattatgattagcgattttggtctatcgaagatggagggaaagggcgacgtcatgagtaccgcctgcggaactccaggatatgtggccccagaggtcctcgcgcagaaaccttacagcaaagccgtagattgttggtcaattggtgtgattgcttatatcctgctctgcgggtatcctcctttttacgatgagaatgacagcaagttgtttgagcagatccttaaggctgaatacgagttcgattctccctattgggacgatatttctgacagtgccaaggacttcattagaaatttgatggagaaggacccaaataagcgatacacttgcgaacaggcagcaagacacccttggatcgctggcgatacggctcttaacaagaacatccatgagagtgtatccgcccagattcgaaaaaattttgctaaatccaagtggcggcaagcatttaacgctacagcagtggtcagacacatgagaaagctccacctggggtcttctctcgacagctctaacgccagcgttagcagctccctgtccttggccagtcaaaaggactgcgcttatgtcgcgaagcccgagtctttgtcctag

SEQ ID NO: 204088 - DNA, 1074 bp, Artificial Sequence
  derived and/or modified sequence
atggcccgggagaatggagagagcagcagctcctggaagaagcaggccgaggacatcaagaagatctttgagttcaaggagaccctgggcactggagccttcagcgaggtggtgctggccgaggagaaggccaccgggaagctgtttgctgtgaagtgcatccccaagaaggccctgaagggcaaggagagcagcattgaaaatgaaattgctgtgctgaggaagatcaagcatgaaaatattgtggccctggaggacatctatgagagccccaaccacctgtacctggtgatgcagctggtgtctggaggagagctgtttgaccgcatcgtggagaagggcttctacacagagaaggatgccagcaccctcatccggcaggtgctggatgctgtgtactacctgcacaggatgggcatcgtgcaccgggacctgaagccagagaacctgctgtactacagccaggatgaggagagcaagatcatgatcagtgactttggcctgagcaagatggagggcaaaggagatgtgatgagcacagcctgtggcaccccaggctacgtggcccctgaggtgctggcccagaagccctacagcaaggctgtggactgctggagcattggagtcatcgcctacatcctgctgtgtggctacccacccttctatgatgaaaatgacagcaagctgtttgagcagatcctgaaggccgagtatgaatttgacagcccctactgggatgacatcagtgacagcgccaaggacttcatccggaacctgatggagaaggaccccaacaagcgctacacctgtgagcaggccgcccggcacccctggattgctggggacacagccctgaacaagaacatccacgagagcgtgtctgcccagatcaggaagaactttgccaagagcaagtggaggcaggccttcaatgccacagctgtggtgcgccacatgaggaagctgcacctgggcagcagcctggacagcagcaatgcctctgtgagcagcagcctgagcctggccagccagaaggactgtgcctacgtggccaagccagagagcctgtcctag

SEQ ID NO: 204089 - DNA, 1578 bp, Artificial Sequence
  derived and/or modified sequence
cccgccgcctctgcgcccgcgccgcgcccccggcgccccctccccagcgcgcccccggccgctcctccgcgccgcgctcgtcggccatggcccgggagaacggcgagagcagctcctcctggaaaaagcaagctgaagacatcaagaagatcttcgagttcaaagagaccctcggaaccggggccttttccgaagtggttttagctgaagagaaggcaactggcaagctctttgctgtgaagtgtatccctaagaaggcgctgaagggcaaggaaagcagcatagagaatgagatagccgtcctgagaaagattaagcatgaaaatattgttgccctggaagacatttatgaaagcccaaatcacctgtacttggtcatgcagctggtgtccggtggagagctgtttgaccggatagtggagaaggggttttatacagagaaggatgccagcactctgatccgccaagtcttggacgccgtgtactatctccacagaatgggcatcgtccacagagacctcaagcccgaaaatctcttgtactacagtcaagatgaggagtccaaaataatgatcagtgactttggattgtcaaaaatggagggcaaaggagatgtgatgtccactgcctgtggaactccaggctatgtcgctcctgaagtcctcgcccagaaaccttacagcaaagccgttgactgctggtccatcggagtgattgcctacatcttgctctgcggctaccctcctttttatgatgaaaatgactccaagctctttgagcagatcctcaaggcggaatatgagtttgactctccctactgggatgacatctccgactctgcaaaagacttcattcggaacctgatggagaaggacccgaataaaagatacacgtgtgagcaggcagctcggcacccatggatcgctggtgacacagccctcaacaaaaacatccacgagtccgtcagcgcccagatccggaaaaactttgccaagagcaaatggagacaagcatttaatgccacggccgtcgtcagacatatgagaaaactacacctcggcagcagcctggacagttcaaatgcaagtgtttcgagcagcctcagtttggccagccaaaaagactgtgcgtatgtagcaaaaccagaatccctcagctgacactgaagacgagcctggggtggagaggagggagccggcatctgccgagcacctcctgtttgccaggcgctttctatacttaatcccatgtcatgcgaccctaggactttttttaacatgtaatcactgggctgggtgcagtggctcacgcctgtaatcccaacactttgggaggctgaggcaggaggactgtttgagttcaggagttttaagaccagcctgaccaacatggtgaaaccccatctctactaaaatataaaaattagccgggtgtggtggcgagcacctgtaatgtcagctacttgggaggctgaggcaggagaatcacttgaacccaggaagcggaggttgcaatgagctgagatcacaccactgcactccagcctgggtgacagattgagactccctctcaaaaaaa

SEQ ID NO: 204090 - DNA, 1074 bp, Artificial Sequence
  derived and/or modified sequence
atggcccgggagaacggcgagagcagcagcagctggaagaagcaggcagaagacatcaaaaaaattttcgagttcaaggaaacattgggaaccggcgccttcagtgaggtcgttctcgccgaagaaaaagctactggcaagctgtttgccgtgaaatgtatccccaagaaagctctgaaaggaaaggaatcctcaatcgaaaatgaaattgcagtgttgagaaagattaagcacgagaacattgtggcccttgaggatatctatgaaagccctaaccatttatatctagttatgcagctggtgtccgggggcgagctttttgacagaatcgtcgaaaagggtttttataccgagaaagacgctagcaccctgatccgacaggttttggatgcagtttattacttgcacagaatgggcatcgttcaccgggacttaaaaccggaaaatctgctgtactactcgcaggacgaggagagtaaaattatgatatctgactttggcctctctaagatggagggcaagggagacgtcatgtccaccgcatgcggaactcctgggtatgtggccccagaagtcctggcccagaaaccctacagtaaagccgtggactgttggtcaataggagttatcgcttacatattgttgtgtggctaccccccgttctacgatgagaacgactctaagctgttcgagcagatcctcaaggcagagtacgaatttgacagcccctattgggacgatatatctgactctgcaaaagattttatccgtaacttgatggagaaagaccctaataaaaggtacacttgtgaacaggccgctcggcacccctggatcgctggagatactgcactgaacaagaacatccacgagagtgtgagcgcacagatcaggaagaacttcgccaaatctaagtggagacaggccttcaacgccaccgcagtggtgcgacacatgcggaagcttcatctaggatcatctctggattctagcaacgcctcagtcagttcaagtctctccctcgcgtcccagaaggactgtgcgtacgtagctaagccagaatccctgtcctag

SEQ ID NO: 204091 - DNA, 1074 bp, Artificial Sequence
  derived and/or modified sequence
atggctagggagaatggcgagtctagtagctcctggaagaagcaggctgaagatattaaaaagatcttcgagttcaaagagaccctcggaacaggcgcattctccgaagtggtattagctgaggagaaggccacaggaaagctgttcgccgtgaaatgcatccccaagaaagcgctcaagggcaaagagtcctccatcgagaatgagatcgccgtccttcggaaaattaaacatgagaacattgtggccctagaagacatctacgagagcccaaaccatttgtaccttgtaatgcaactggtgtcaggcggtgaactttttgatcgaatcgttgagaagggtttctacacagagaaggatgccagcactctgatccggcaggttctagacgctgtttactaccttcaccgaatggggatcgttcatcgggatctgaagccagagaacctactgtattattctcaggacgaggagtctaagatcatgattagcgactttggtcttagcaagatggagggtaagggagacgtaatgagtaccgcgtgcggcacaccaggctacgtggctcctgaagtcctcgcccagaaaccttatagcaaagcggtggattgctggagcattggcgtgatcgcatatattttgctgtgcggctaccctccattttacgacgagaatgatagtaaactgtttgagcagatactgaaggccgaatacgaattcgactcgccttattgggatgacatcagcgacagcgcaaaagatttcatcagaaacctgatggagaaggaccctaacaaaagatacacttgtgagcaggcagccagacacccctggatcgctggcgacacagccctgaacaaaaacatccacgagtcagtgtcagcgcaaatacggaaaaatttcgccaagagtaaatggcggcaggcttttaacgcaactgccgtggtgagacacatgaggaaacttcatttaggatcgagtcttgacagctccaacgcaagcgtgagctcttccctttcactggcttctcagaaagactgcgcctatgtggctaagcccgagagcctatcttag

SEQ ID NO: 204092 - protein, 117 aa, Artificial Sequence
  derived and/or modified sequence
MLSKAHGCKTALSLGRCPKIREECEFQERDVCTKDRQCQDNKKCCVFSCGKKCLDLKQDVCEMPKETGPCLAYFLHWWYDKKDNTCSMFVYGGCQGNNNNFQSKANCLNTCKNKRFP

SEQ ID NO: 204093 - protein, 133 aa, Artificial Sequence
  derived and/or modified sequence
MGSSGLLSLLVLFVLLANVQGPGLTDWLFPRRCPKIREECEFQERDVCTKDRQCQDNKKCCVFSCGKKCLDLKQDVCEMPKETGPCLAYFLHWWYDKKDNTCSMFVYGGCQGNNNNFQSKANCLNTCKNKRFP

SEQ ID NO: 204094 - DNA, 354 bp, Artificial Sequence
  derived and/or modified sequence
atgctgtccaaggctcacggctgtaagacagccctcagcctggggagatgccctaaaatccgggaagagtgcgagtttcaagagcgcgacgtgtgtaccaaggataggcagtgccaagataacaagaaatgctgtgtattcagctgcgggaagaagtgtctggatctaaagcaggacgtttgcgaaatgccaaaggagaccggcccttgtctcgcctattttctgcattggtggtatgataaaaaggataatacgtgcagtatgtttgtgtatggaggctgccaggggaacaataataattttcagtctaaggcaaattgtctgaacacgtgtaagaataagcgattcccatag

SEQ ID NO: 204095 - DNA, 402 bp, Artificial Sequence
  derived and/or modified sequence
atgggttcctctggactgctttcgctactggtgctcttcgttctgcttgctaatgtccagggccctggactcactgattggttgttcccaagaaggtgtccaaagatacgcgaagagtgcgagttccaggaacgcgatgtgtgtactaaagatagacagtgccaggacaacaagaaatgttgtgtcttctcatgcgggaaaaaatgtttggacctcaagcaggatgtatgcgagatgcctaaggaaacaggcccttgtttggcctactttttacactggtggtacgacaagaaggacaacacatgttctatgtttgtgtacgggggatgtcaagggaataacaacaacttccagtccaaggcaaactgccttaatacgtgtaaaaataagagattcccatag

SEQ ID NO: 204096 - DNA, 354 bp, Artificial Sequence
  derived and/or modified sequence
atgctcagcaaagctcatggctgcaagaccgcgctttcattaggccgctgcccgaagatccgtgaggagtgcgagttccaggagagagatgtgtgcactaaagatcgtcagtgccaggataacaaaaagtgctgtgtcttctcatgtggaaaaaaatgcctcgacctaaaacaagatgtatgtgaaatgcccaaagagaccggcccctgcctcgcctatttcctacattggtggtacgataaaaaggacaatacatgtagcatgttcgtttacggaggatgtcaaggcaacaacaataactttcaatctaaggccaactgccttaatacctgtaagaataagagatttccatag

SEQ ID NO: 204097 - DNA, 402 bp, Artificial Sequence
  derived and/or modified sequence
atgggctcatcaggcctgctgagtctgctggtcctgtttgtgctgctggccaacgtgcagggaccaggactgactgactggctcttccctcgtagatgccctaagatccgcgaggaatgtgagttccaggaacgcgacgtttgcaccaaagacagacagtgccaagacaataagaaatgctgtgtcttcagttgtgggaagaaatgcttagacttgaaacaggatgtatgcgagatgcccaaagaaaccggaccatgtctggcctatttcctccactggtggtacgataaaaaggataacacttgctcaatgttcgtctacgggggatgtcaaggtaacaacaacaacttccaatctaaagccaactgcctcaacacatgcaaaaataaaaggttcccctag

SEQ ID NO: 204098 - DNA, 354 bp, Artificial Sequence
  derived and/or modified sequence
atgctcagcaaagctcatggctgcaagaccgcgctttcattaggccgctgcccgaagatccgtgaggagtgcgagttccaggagagagatgtgtgcactaaagatcgtcagtgccaggataacaaaaagtgctgtgtcttctcatgtggaaaaaaatgcctcgacctaaaacaagatgtatgtgaaatgcccaaagagaccggcccctgcctcgcctatttcctacattggtggtacgataaaaaggacaatacatgtagcatgttcgtttacggaggatgtcaaggcaacaacaataacttccaatcaaaagccaattgcctaaatacttgcaaaaataaaagattcccctag

SEQ ID NO: 204099 - DNA, 402 bp, Artificial Sequence
  derived and/or modified sequence
atgggctcctccggtttgctgagtctcctcgtcctctttgtgctgctagccaatgtgcagggtccaggactgactgattggctgttcccgagaagatgtccaaaaataagggaggaatgcgagttccaggagcgcgacgtgtgcactaaagatagacagtgccaagataataagaaatgctgtgtcttcagctgtggtaagaagtgcttagatctgaagcaggacgtgtgtgagatgcccaaagaaactggtccctgtcttgcttactttctccattggtggtacgataaaaaagataatacttgctcaatgttcgtctacgggggatgtcaaggtaacaacaacaacttccaatctaaagccaactgcctcaacacatgcaaaaataaaaggttcccctag

SEQ ID NO: 204100 - DNA, 354 bp, Artificial Sequence
  derived and/or modified sequence
atgctgagcaaggcccacggctgcaagaccgccctgagcctgggcagatgccccaagatcagagaggagtgcgagttccaggagagagacgtgtgcaccaaggacagacagtgccaggacaacaagaagtgctgcgtgttcagctgcggcaagaagtgcctggacctgaagcaggacgtgtgcgagatgcccaaggagaccggcccctgcctggcctacttcctgcactggtggtacgacaagaaggacaacacctgcagcatgttcgtgtacggcggctgccagggcaacaacaacaacttccagagcaaggccaactgcctgaacacctgcaagaacaagagattcccctag

SEQ ID NO: 204101 - DNA, 402 bp, Artificial Sequence
  derived and/or modified sequence
atgggcagcagcggcctgctgagcctgctggtgctgttcgtgctgctggccaacgtgcagggccccggcctgaccgactggctgttccccagaagatgccccaagatcagagaggagtgcgagttccaggagagagacgtgtgcaccaaggacagacagtgccaggacaacaagaagtgctgcgtgttcagctgcggcaagaagtgcctggacctgaagcaggacgtgtgcgagatgcccaaggagaccggcccctgcctggcctacttcctgcactggtggtacgacaagaaggacaacacctgcagcatgttcgtgtacggcggctgccagggcaacaacaacaacttccagagcaaggccaactgcctgaacacctgcaagaacaagagattcccctag

SEQ ID NO: 204102 - DNA, 1217 bp, Artificial Sequence
  derived and/or modified sequence
acagatgatgaaaccaaggttcagagagggtcagaattcagaccaagtcagaattcaaaatctaaactggctccggggtaagtgatactaattgctgtataatactaccacctagaggaacttccaaacatggattcctcaacaaggccaaaaagaccgcattggcttacatcagtggcccacaatggtgtgattttgccttccaggggacctttgcagtgcctggagacattttcagttgttacaatcaggggtgctactggattctgatgggaagaggcctgggatgctgctaaacatcctacaatccccagttcagccccccaaacaaagaattatccagcccaaatatcaccagtggttgagaaattctgccttagatgggatggagctggggggtgggaatagagggaggagaggtcactggggagtggtgggggtgtaggcagtagggaaatgagtgaggctgccctgaggaaaagaactcctgggggcaagcaaactgaaagcaaacttccctgactctctagaattgccttgtgtctggcaaagtggggagacactatgctctctaaggcacacgggtgtaaaaccgctctttccctagggagatgtcccaaaatcagagaagaatgtgaattccaagaaagggatgtgtgtacaaaggacagacaatgccaggacaacaagaagtgttgtgtcttcagctgcggaaaaaaatgtttagatctcaaacaagatgtatgcgaaatgccaaaagaaactggcccctgcctggcttattttcttcattggtggtatgacaagaaagataatacttgctccatgtttgtctatggtggctgccagggaaacaataacaacttccaatccaaagccaactgcctgaacacctgcaagaataaacgctttccctgattggataaggatgcactggaagaactgccagaatgtggctcatgctctgagtactgttcctgtacctgacggatgctccagactggcttccagtttcactctcagcattccaagatcttagcccttcccagaacagaacgcttgcatctacctcctcttcctccatctttggctcttttgatgcacaatatccatccgttttgatttcatctttatgtcccctttatctccaacttctagaactcccagtttatacctgtgtcactctcaattttttccagtaaagtacttgatgtagt

SEQ ID NO: 204103 - DNA, 354 bp, Artificial Sequence
  derived and/or modified sequence
atgttgagcaaagcacacgggtgcaaaacggcccttagccttggccgctgcccaaaaattagggaggagtgcgaatttcaagagcgcgatgtgtgcactaaggataggcagtgccaagacaacaagaagtgctgtgtattctcatgcggtaagaagtgcctggacctcaagcaggacgtctgtgaaatgccaaaggaaaccgggccctgcttggcctattttctccattggtggtacgacaaaaaagacaacacatgttctatgttcgtgtatgggggatgccaaggcaataacaataattttcagagtaaggctaactgcttaaacacctgtaaaaataaacgctttccctag

SEQ ID NO: 204104 - DNA, 402 bp, Artificial Sequence
  derived and/or modified sequence
atgggttcatcgggattgctgtccctgttagtactatttgttctcctggccaacgttcaggggcctgggctcactgattggctattcccgcggagatgtcctaagattcgtgaagaatgtgagttccaagaacgagatgtgtgcactaaagacaggcaatgtcaagataataagaaatgttgcgtgtttagctgtggcaaaaagtgtttggacctaaagcaggatgtctgtgagatgccaaaggagacaggcccatgtctggcctattttttacactggtggtacgataagaaggacaatacttgcagcatgttcgtgtacgggggttgccagggaaacaacaataatttccagagcaaggcaaattgcctgaatacatgcaagaataagagattcccctag

SEQ ID NO: 204105 - DNA, 1987 bp, Artificial Sequence
  derived and/or modified sequence
tatccaaggtgcagcagctgagcattccaaattcgggaaccaccagaaaggctggcctctcttcaacatgggatcttctggacttttgagcctcctggtgctattcgtcctcttagcgaatgtccagggacctggtctgactgattggttatttcccaggagatgtcccaaaatcagagaagaatgtgaattccaagaaagggatgtgtgtacaaaggacagacaatgccaggacaacaagaagtgttgtgtcttcagctgcggaaaaaaatgtttagatctcaaacaagatgtatgcgaaatgccaaaagaaactggcccctgcctggcttattttcttcattggtggtatgacaagaaagataatacttgctccatgtttgtctatggtggctgccagggaaacaataacaacttccaatccaaagccaactgcctgaacacctgcaagaataaacgctttccctgattggataaggatgcactggaagaactgccagaatgtggctcatgctctgagtactgttcctgtacctgacggatgctccagactggcttccagtttcactctcagcattccaagatcttagcccttcccagaacagaacgcttgcatctacctcctcttcctccatctttggctcttttgatgcacaatatccatccgttttgatttcatctttatgtcccctttatctccaacttctagaactcccagtttatacctgtgtcactctcaattttttccagtaaagtacttgatgtagtcctgtgccttgaggctgagtgattgacatctttttggcacattacactttgcagagtaagggatcattgaggcttctggtgacatcattcaagggagtgaagacaatcagaactttgagagttcagagttccaggaatattgttattgttatcttcctctgtttctacaaaagattgtaaaaccctttttaggcaagggcccaaggacagtgccttagtttggatcctctagaaactaaccctgggaaaagggcatgggtgcaggtagtttgtttgagagatttcccaggacatacaagatggggagtgagatgagtaattcagggaagagaagggaagagagaagagtctattatgagctggttactactgtggctcaatcctattggggaccttttaaagaatcatgtaaaacaggcttacaaattttctttttaaaaatattttattttattttacgttccgggatacatgtgcaggacctgcaggtttgttacataggtaagcctgtgccatggtggtttgctgcacctatcaacccattacctgggtattaagccccgcatgcattagctatttatcctgatgctttccctccccctgccccctcaacagtccacgtgttctcattgttcatctcccacttgcaagtgagaacatgtggtatttacttttgttcctgcgttactttgctgaggataacggcttccagcttcatccatgtccctgcaaaggacgtgatctcatttctttttatggctgcatagtattccatggcatatatgtaccacattttctttatccagcctatcgttgatggatatttggtttgattccatgtttttgctattgtaaatagtgctgcagtgaacatacacatgcatgtatctttataaaagaatgatttatattcctttgagtgtatacccagtaatgggattgctgggtcaaatggtatttctggttctagatctttcaggaattggcacactctcttccacaatggttgaaccaatttacattcccaacagtgtaaaagcattcatgtttctccacagctttaccagcatctgttgtttctggactttttaataatcaccattctgactggcatgagatggtatctcattgtggttttgatttgcatttctctgatgatcactggtgttgagctttttttcatatgtttgttggccgcataaatgtcttcttttgagaa

SEQ ID NO: 204106 - DNA, 354 bp, Artificial Sequence
  derived and/or modified sequence
atgctgagcaaggcccacggctgcaagacagccctgagcctgggccgctgccccaagatccgggaggagtgtgagttccaggagagagatgtgtgcaccaaggaccggcagtgccaggacaacaagaagtgctgcgtgttcagctgtgggaagaagtgcctggacctgaagcaggatgtgtgtgagatgcccaaggagaccggcccctgcctggcctacttcctgcactggtggtatgacaagaaggacaacacctgcagcatgtttgtgtatggaggctgccagggcaacaacaacaacttccagagcaaggccaactgcctgaacacctgcaagaacaagcgcttcccctag

SEQ ID NO: 204107 - DNA, 402 bp, Artificial Sequence
  derived and/or modified sequence
atgggcagcagcggcctgctgagcctgctggtgctgtttgtgctgctggccaacgtgcagggccctggcctgacagactggctgttcccccggcgctgccccaagatccgggaggagtgtgagttccaggagagagatgtgtgcaccaaggaccggcagtgccaggacaacaagaagtgctgcgtgttcagctgtgggaagaagtgcctggacctgaagcaggatgtgtgtgagatgcccaaggagaccggcccctgcctggcctacttcctgcactggtggtatgacaagaaggacaacacctgcagcatgtttgtgtatggaggctgccagggcaacaacaacaacttccagagcaaggccaactgcctgaacacctgcaagaacaagcgcttcccctag

SEQ ID NO: 204108 - DNA, 354 bp, Artificial Sequence
  derived and/or modified sequence
atgctgagcaaggcccacggctgcaagaccgccctgagcctgggccggtgtcccaaaattcgtgaagaatgcgaatttcaggagagagacgtctgcaccaaagataggcagtgtcaggacaacaagaagtgctgcgtattcagctgcggaaagaagtgccttgatctgaaacaggatgtttgtgaaatgccgaaggaaacggggccttgcctggcttacttcctccactggtggtatgataagaaagataatacttgctcaatgttcgtgtatggcggatgtcaagggaataacaataactttcaatccaaggcgaattgcctgaatacatgtaagaacaagcgcttcccatag

SEQ ID NO: 204109 - DNA, 402 bp, Artificial Sequence
  derived and/or modified sequence
atgggcagcagcggcctgctgagcctgctggtgctgttcgtgctgttggctaacgtacagggcccagggctgacagattggctattcccccggagatgcccaaagatccgggaggagtgcgaattccaggaaagagatgtgtgtaccaaggatcgtcagtgtcaggataacaaaaaatgttgcgtgttcagctgtggaaagaaatgcctggacctcaagcaggacgtgtgtgagatgcctaaggaaacagggccttgcttggcctatttcctgcactggtggtatgacaaaaaagataatacttgctctatgtttgtctatggtggttgtcaagggaataataacaactttcaatcgaaggccaactgcctgaacacatgcaagaataagcggtttccatag

SEQ ID NO: 204110 - RNA, 354 nt, Artificial Sequence
  derived and/or modified sequence
augcucagcaaagcucauggcugcaagaccgcgcuuucauuaggccgcugcccgaagauccgugaggagugcgaguuccaggagagagaugugugcacuaaagaucgucagugccaggauaacaaaaagugcugugucuucucauguggaaaaaaaugccucgaccuaaaacaagauguaugugaaaugcccaaagagaccggccccugccucgccuauuuccuacauuggugguacgauaaaaaggacaauacauguagcauguucguuuacggaggaugucaaggcaacaacaauaacuuucaaucuaaggccaacugccuuaauaccuguaagaauaagagauuuccauag

SEQ ID NO: 204111 - RNA, 402 nt, Artificial Sequence
  derived and/or modified sequence
augggcucaucaggccugcugagucugcugguccuguuugugcugcuggccaacgugcagggaccaggacugacugacuggcucuucccucguagaugcccuaagauccgcgaggaaugugaguuccaggaacgcgacguuugcaccaaagacagacagugccaagacaauaagaaaugcugugucuucaguugugggaagaaaugcuuagacuugaaacaggauguaugcgagaugcccaaagaaaccggaccaugucuggccuauuuccuccacuggugguacgauaaaaaggauaacacuugcucaauguucgucuacgggggaugucaagguaacaacaacaacuuccaaucuaaagccaacugccucaacacaugcaaaaauaaaagguuccccuag

SEQ ID NO: 204112 - RNA, 354 nt, Artificial Sequence
  derived and/or modified sequence
augcucagcaaagcucauggcugcaagaccgcgcuuucauuaggccgcugcccgaagauccgugaggagugcgaguuccaggagagagaugugugcacuaaagaucgucagugccaggauaacaaaaagugcugugucuucucauguggaaaaaaaugccucgaccuaaaacaagauguaugugaaaugcccaaagagaccggccccugccucgccuauuuccuacauuggugguacgauaaaaaggacaauacauguagcauguucguuuacggaggaugucaaggcaacaacaauaacuuccaaucaaaagccaauugccuaaauacuugcaaaaauaaaagauuccccuag

SEQ ID NO: 204113 - RNA, 402 nt, Artificial Sequence
  derived and/or modified sequence
augggcuccuccgguuugcugagucuccucguccucuuugugcugcuagccaaugugcaggguccaggacugacugauuggcuguucccgagaagauguccaaaaauaagggaggaaugcgaguuccaggagcgcgacgugugcacuaaagauagacagugccaagauaauaagaaaugcugugucuucagcugugguaagaagugcuuagaucugaagcaggacgugugugagaugcccaaagaaacuggucccugucuugcuuacuuucuccauuggugguacgauaaaaaagauaauacuugcucaauguucgucuacgggggaugucaagguaacaacaacaacuuccaaucuaaagccaacugccucaacacaugcaaaaauaaaagguuccccuag

SEQ ID NO: 204114 - protein, 462 aa, Artificial Sequence
  derived and/or modified sequence
MSAGGPCPAAAGGGPGGASCSVGAPGGVSMFRWLEVLEKEFDKAFVDVDLLLGEIDPDQADITYEGRQKMTSLSSCFAQLCHKAQSVSQINHKLEAQLVDLKSELTETQAEKVVLEKEVHDQLLQLHSIQLQLHAKTGQSADSGTIKAKLSGPSVEELERELEANKKEKMKEAQLEAEVKLLRKENEALRRHIAVLQAEVYGARLAAKYLDKELAGRVQQIQLLGRDMKGPAHDKLWNQLEAEIHLHRHKTVIRACRGRNDLKRPMQAPPGHDQDSLKKSQGVGPIRKVLLLKEDHEGLGISITGGKEHGVPILISEIHPGQPADRCGGLHVGDAILAVNGVNLRDTKHKEAVTILSQQRGEIEFEVVYVAPEVDSDDENVEYEDESGHRYRLYLDELEGGGNPGASCKDTSGEIKVLQGFNKKAVTDTHENGDLGTASETPLDDGASKLDDLHTLYHKKSY

SEQ ID NO: 204115 - protein, 462 aa, Artificial Sequence
  derived and/or modified sequence
MSAGGPCPAAAGGGPGGASCSVGAPGGVSMFRWLEVLEKEFDKAFVDVDLLLGEIDPDQADITYEGRQKMTSLSSCFAQLCHKAQSVSQINHKLEAQLVDLKSELTETQAEKVVLEKEVHDQLLQLHSIQLQLHAKTGQSADSGTIKAKLVSRSSSKMERELEANKKEKMKEAQLEAEVKLLRKENEALRRHIAVLQAEVYGARLAAKYLDKELAGRVQQIQLLGRDMKGPAHDKLWNQLEAEIHLHRHKTVIRACRGRNDLKRPMQAPPGHDQDSLKKSQGVGPIRKVLLLKEDHEGLGISITGGKEHGVPILISEIHPGQPADRCGGLHVGDAILAVNGVNLRDTKHKEAVTILSQQRGEIEFEVVYVAPEVDSDDENVEYEDESGHRYRLYLDELEGGGNPGASCKDTSGEIKVLQGFNKKAVTDTHENGDLGTASETPLDDGASKLDDLHTLYHKKSY

SEQ ID NO: 204116 - DNA, 1389 bp, Artificial Sequence
  derived and/or modified sequence
atgagcgccgggggcccttgtcccgcggcagccggtggtggccctggcggggcttcctgctccgtgggtgcccctggaggcgtgtctatgtttcggtggctagaggtgctggaaaaagagttcgataaagccttcgttgacgtggacctgctgctgggtgagattgaccccgaccaagctgatattacctacgagggacgtcagaagatgacaagcttgagttcatgctttgctcagctgtgccataaggcacagagtgttagccagatcaatcataagctcgaagctcaactcgtcgaccttaagagtgaactcacagagacacaggcagagaaagtggtgttggaaaaggaagttcacgaccagttactccaactgcactcaatccagttgcagctacacgctaagacaggtcagtctgctgactcaggtaccatcaaagcaaaactcagcggcccatcagtcgaggaactagagcgtgaattggaggcaaataaaaaggaaaagatgaaggaagcccaattagaagccgaagtgaagctgctcagaaaggagaacgaagccctcagaaggcacatcgcagttctgcaagcggaggtttacggagcacggttggcagccaagtatttggacaaagagctcgcaggacgagtacagcagatacagttgttgggccgggatatgaaaggcccagcacacgataaactgtggaaccagcttgaggccgagatacacttgcaccgtcataagaccgtcatcagagcgtgccgcggcaggaacgacctgaagaggcctatgcaggctccaccgggacatgatcaggacagcttaaagaagtcccagggcgttgggcctatcaggaaggtccttctgctgaaggaggaccatgagggcctgggaatcagtatcaccggaggaaaggaacatggggtccccatcctgatctctgaaattcacccagggcagcctgccgatcggtgcggcggtctgcatgtgggagacgcaatacttgcggtgaacggagtgaatctccgagacactaaacataaagaggccgtgacaattttgtcccaacagcggggcgagatcgagtttgaggtggtgtacgtggcaccggaggtggatagcgatgatgagaacgtggagtacgaggacgaatctggccatcgctatcgtctctacttggacgagctggaaggcggggggaacccaggcgctagttgcaaggacacctccggggagattaaagtcctgcaaggcttcaataagaaagcggtgaccgacacacacgagaatggagacttagggactgcgtcagagacccccctcgacgacggggcctctaagttggacgatctgcacacactctaccacaagaagtcttactag

SEQ ID NO: 204117 - DNA, 1389 bp, Artificial Sequence
  derived and/or modified sequence
atgagcgcgggggggccctgcccggccgctgccggagggggccctggaggggcctcatgttcggtcggagctcccgggggcgtgagcatgttccgctggctggaagtgttggaaaaggagttcgataaggcgtttgtggacgtggacttgctactgggggagatcgaccccgaccaggcggacattacctacgagggccggcaaaagatgacatcactgtccagttgttttgcccagttgtgccataaagcgcagagtgtttcacagatcaatcataagttagaagcacagcttgtggaccttaaaagtgagttgaccgaaactcaggccgaaaaggttgtcctggagaaagaagttcatgatcaactgcttcagttgcacagcattcagctgcagttgcatgcgaagactggacagtcagccgattctggtaccatcaaagcaaagctggtgagtcgctcatccagcaagatggaaagggaactggaggccaataagaaagaaaaaatgaaagaagctcaattagaagccgaagtaaagctgttgaggaaggagaatgaggccctgaggcggcatatcgcagtccttcaggctgaagtgtatggtgcccgactcgcggcaaaatacctcgataaagagttagctgggagagtgcagcaaatccagctgctaggccgggacatgaagggcccggctcatgataagctgtggaatcagcttgaggccgagatccacctccaccgacataaaaccgtgattcgcgcgtgtaggggcagaaatgatctgaagcgaccgatgcaggctccacctggccacgaccaggattcactgaaaaaatcacagggtgtaggacccattcgcaaagtcctgctgctcaaggaggaccacgaaggcctgggcatatcaatcactggggggaaggagcatggggtccccatcctgatcagtgaaattcaccctgggcagcccgcagaccggtgcgggggcctgcacgtaggggacgcaatcctggctgtcaacggagtcaatctgagggataccaagcacaaggaagcagttaccatattgagtcaacagcgaggagagattgagtttgaagtggtgtatgttgccccagaggtggactcagacgacgagaacgtcgagtacgaagacgagtccggccataggtataggctgtacctggacgagctggaaggaggagggaatccaggagcttcttgcaaagacaccagcggggaaattaaggtcttacagggctttaacaaaaaggctgtcacagacacacacgagaacggcgacttgggcactgcttcagagacacctttggatgatggagccagcaaactggacgatcttcacacactctaccataaaaagtcctattag

SEQ ID NO: 204118 - DNA, 4450 bp, Artificial Sequence
  derived and/or modified sequence
tcagtcccagcagttcccttcgtgcgcggggggcggcgagggtcttcagcagtcgggagaggcccttgacggcgccatgtcggcgggcggtccatgcccagcagcagccggagggggcccagggggcgcctcctgctccgtgggggcccctggcggggtatccatgttccggtggctggaggtgctggagaaggagttcgacaaagcttttgtggatgtggatctgctcctgggagagatcgatccagaccaagcggacatcacttatgaggggcgacagaagatgaccagcctgagctcctgctttgcacagctttgccacaaagcccagtctgtgtctcaaatcaaccacaagctggaggcacagttggtggatctgaaatctgaactgacagaaacccaagcagagaaagttgttttggagaaagaagtacatgatcagcttttacagctgcactctattcagctgcagcttcatgctaaaactggtcaaagtgctgactctggtaccattaaggcaaaattgtctggcccctctgtggaggagctggaaagagagcttgaggcaaacaaaaaagaaaaaatgaaagaagcacaacttgaagctgaagtgaaattgttgagaaaagagaatgaagcccttcgtagacatatagctgttctccaggctgaagtatatggggcgagactagctgccaagtacttggataaggaactggcaggaagggtccaacagatacaattgctaggacgagatatgaagggacctgctcatgataagctttggaaccaattagaagctgaaatacatttgcatcgtcacaaaactgtgatccgagcctgcagaggacgtaatgacttgaaacgaccaatgcaagcaccaccaggccatgatcaagattccctaaagaaaagccaaggtgttggtccaattagaaaagttctcctccttaaggaagatcatgaaggccttggcatttcaattacaggtgggaaagaacatggtgttccaatcctcatctctgagatccatccggggcaacctgctgatagatgcggagggctgcacgttggggatgctattttggcagtcaacggagttaacctaagggacacaaagcataaagaagctgtaactattctttctcagcagagaggagagattgaatttgaagtagtttatgtggctcctgaagtggattctgatgatgaaaacgtagagtatgaagatgagagtggacatcgttaccgtttgtaccttgatgagttagaaggaggtggtaaccctggtgctagttgcaaagacacaagtggggaaatcaaagtattacaaggatttaataagaaggcagtaactgacacacatgaaaatggagacctgggcactgcaagtgaaactccgctagatgacggtgcttcaaaattagatgatctgcacactctgtatcataaaaaatcttattaaattgaccatatctccagacaagattgttaatcagactattctgaatttggggcactggggaagatggtgacaaagactacaaaatcaggggaggctgtttgttgcctaaatgaaaggcgggtacctcagggcttcatgtgaacaattctcaatgcataaaacaccctgttttctgtggtagaccataattagctattgcatgtaaagcaattttgattttcttgaacttgtaagcaccaaagcatgtgtttcccaaaggggtattactgggctcttaagtaccaaatgaaaccctactgttttacttggttccttttccctttagtaggaggacagtgctaactggaattttataaggagtaccctttaaaatacagagagtaagtgaattcatattttatattctagaatgttaactgtggtatttcagaagacagagcttgactcaatgaattgtagaaatataggcttgacttaatttttgtaactgaaaggctttagacttaaaaaaatttattgtgcatcctaaaatctaaaccaattattaatgatcatttattgtaatgagtttgcatttcagctttattcaatgcagtacaaaatagttttctttaagcagtcttttatcaatcaatgctgcactagaaatagattctcaaaagttactaaacattttactttttttgttttttaaaagaaatgcagatgagtgtaaaacatctgttctcaattatgttgatctgtgtgcgcagtactggagcatttacccattcatgttgagcctcaaatgcttgttttctggggtccacaaaagacagttttatacattttgagttgttcataaagtttgtcttgtgatagtcctggcacttaaagacaaatttttctggtagtaaaagttcagatttattactatgtcatgaaacacagtacattcaaatcaaacggcagttttctttctaagtaaatgatttccagtcatctaaaaggtgggcaagatgagataaagacattttgatacagtaattgttttggttgggttttcatgtcagtttatgtttgactaaagctctcttcatatgcaggtttataaatttgttaggtctgttgtcccatgattaaacatggagtgcctcctctctgatttaatattctgcaggtcattgtaacctgctaggcaaagtcacaacattgcattaaagaggtgatagctttgctaatatcactgttttaaaggacgtacagttaaaggaatattaagtgggagaaagcctacaaggcttttagaatattatcagtatcttcatttctggtattcagatgttatgtgataaaacacattttttttggctttcccagatacactatatatttgttcaagggtaaatctataaaatgtatatactttattttgtggttttgctatttataaatttaatgttttaactgttgctcatttatggtttgttttgggtggtggtgttcatctgtatatcaccatgttaatttgtaatggaagtgcacttcgtagtgtatattgttactgacattaaaatactttatagcattgtctctgagcaaaagctagtatttaattgtacaaatgaataagcaagttacatgttattgtttgctcttgacagggtaggcctcttaaaagaaaaaaaacaacttgttttttctttatgaatcccctatgccaaacacataccttccatgcatgacatgagatctgcaaactggattttagccaccgtatttatttagtcaaaaaaattgtccattgtagcagacccgaaaacctttttgctgtgacatgaaaccatgttattcttatcttcttaaaacacagcctgggatggaatggccatggcatttttttcagagaacatcctttatctgctatgactgaatccttaggaaatgtaagctataaccctttgattttcaagaactaccgaataagtgtatgaagaggtggttttttaaaacttcaagttggaatttttatgaggtcactgtgtaatttgaagaattgtgtgagattgtcatgatataaattccttttaaggactgataaatagaatgaaaagtttccaggtagtttaaaactccacaggtcagtttccttttcattcctgcttcactgtggtttataagcctacgggagagcaccgttgctcagatgctactgtgagcttcctgtccggtgttagaaagtaactagttaaaagttcattttagaatgtatggtttttggggatgaactaagaattagttattagttccaaaggactgagaaccaattttaatattttcacatttataggaaagaaattcatatgtccctgaaacttctaggacaaaaccaaacaagtaaggagggaactgttgcaaagccatttcatcgagaaggggacagaaggagaaatacacacatgtatacacaaacagaatggttgagaaaacgttttaataaaatgtgagggttgtatgtgtgcgtgtatatatttacacttaacctctaaaattctcttctacagtatctctgttatgaatatgatggaaaagcaacattttggtggtgagactattgttaaaataaatttgagaaagacgaaaattttgtgagtcttgataattacaagtcaacagctatcgaaagttagcacagcttgtctgtggtgctgtttttttccccactgcagtggacttatgctgttttcatgtttagaaacaaaaaggtttcatgtgattcatgtgtaagatgcacagtatttgacatcctgattatgtaatccctattccatctatccagtcttacacttatggttggcctcaaatctattgcatttatgataatgtattatatctagttgagtttaatatttttttattagcctgtaaataaagatggcatcttctacattaaaatgatattgatctcatttttttaaataaacattttgtttccttgacgttaaa

SEQ ID NO: 204119 - DNA, 4604 bp, Artificial Sequence
  derived and/or modified sequence
gggaggtgggactgactgagtcttccgtgtgtcgccgccgttgccgcctcagcttcagcctcgttactcctgcggttctgtgactgtgctgctggcgttaacggcgcgaggtgaagggaggtgacggagtgtgcccgcgcgcgcgggggtcccctcagtcccagcagttcccttcgtgcgcggggggcggcgagggtcttcagcagtcgggagaggcccttgacggcgccatgtcggcgggcggtccatgcccagcagcagccggagggggcccagggggcgcctcctgctccgtgggggcccctggcggggtatccatgttccggtggctggaggtgctggagaaggagttcgacaaagcttttgtggatgtggatctgctcctgggagagatcgatccagaccaagcggacatcacttatgaggggcgacagaagatgaccagcctgagctcctgctttgcacagctttgccacaaagcccagtctgtgtctcaaatcaaccacaagctggaggcacagttggtggatctgaaatctgaactgacagaaacccaagcagagaaagttgttttggagaaagaagtacatgatcagcttttacagctgcactctattcagctgcagcttcatgctaaaactggtcaaagtgctgactctggtaccattaaggcaaaattggtaagtagaagtagttccaagatggaaagagagcttgaggcaaacaaaaaagaaaaaatgaaagaagcacaacttgaagctgaagtgaaattgttgagaaaagagaatgaagcccttcgtagacatatagctgttctccaggctgaagtatatggggcgagactagctgccaagtacttggataaggaactggcaggaagggtccaacagatacaattgctaggacgagatatgaagggacctgctcatgataagctttggaaccaattagaagctgaaatacatttgcatcgtcacaaaactgtgatccgagcctgcagaggacgtaatgacttgaaacgaccaatgcaagcaccaccaggccatgatcaagattccctaaagaaaagccaaggtgttggtccaattagaaaagttctcctccttaaggaagatcatgaaggccttggcatttcaattacaggtgggaaagaacatggtgttccaatcctcatctctgagatccatccggggcaacctgctgatagatgcggagggctgcacgttggggatgctattttggcagtcaacggagttaacctaagggacacaaagcataaagaagctgtaactattctttctcagcagagaggagagattgaatttgaagtagtttatgtggctcctgaagtggattctgatgatgaaaacgtagagtatgaagatgagagtggacatcgttaccgtttgtaccttgatgagttagaaggaggtggtaaccctggtgctagttgcaaagacacaagtggggaaatcaaagtattacaaggatttaataagaaggcagtaactgacacacatgaaaatggagacctgggcactgcaagtgaaactccgctagatgacggtgcttcaaaattagatgatctgcacactctgtatcataaaaaatcttattaaattgaccatatctccagacaagattgttaatcagactattctgaatttggggcactggggaagatggtgacaaagactacaaaatcaggggaggctgtttgttgcctaaatgaaaggcgggtacctcagggcttcatgtgaacaattctcaatgcataaaacaccctgttttctgtggtagaccataattagctattgcatgtaaagcaattttgattttcttgaacttgtaagcaccaaagcatgtgtttcccaaaggggtattactgggctcttaagtaccaaatgaaaccctactgttttacttggttccttttccctttagtaggaggacagtgctaactggaattttataaggagtaccctttaaaatacagagagtaagtgaattcatattttatattctagaatgttaactgtggtatttcagaagacagagcttgactcaatgaattgtagaaatataggcttgacttaatttttgtaactgaaaggctttagacttaaaaaaatttattgtgcatcctaaaatctaaaccaattattaatgatcatttattgtaatgagtttgcatttcagctttattcaatgcagtacaaaatagttttctttaagcagtcttttatcaatcaatgctgcactagaaatagattctcaaaagttactaaacattttactttttttgttttttaaaagaaatgcagatgagtgtaaaacatctgttctcaattatgttgatctgtgtgcgcagtactggagcatttacccattcatgttgagcctcaaatgcttgttttctggggtccacaaaagacagttttatacattttgagttgttcataaagtttgtcttgtgatagtcctggcacttaaagacaaatttttctggtagtaaaagttcagatttattactatgtcatgaaacacagtacattcaaatcaaacggcagttttctttctaagtaaatgatttccagtcatctaaaaggtgggcaagatgagataaagacattttgatacagtaattgttttggttgggttttcatgtcagtttatgtttgactaaagctctcttcatatgcaggtttataaatttgttaggtctgttgtcccatgattaaacatggagtgcctcctctctgatttaatattctgcaggtcattgtaacctgctaggcaaagtcacaacattgcattaaagaggtgatagctttgctaatatcactgttttaaaggacgtacagttaaaggaatattaagtgggagaaagcctacaaggcttttagaatattatcagtatcttcatttctggtattcagatgttatgtgataaaacacattttttttggctttcccagatacactatatatttgttcaagggtaaatctataaaatgtatatactttattttgtggttttgctatttataaatttaatgttttaactgttgctcatttatggtttgttttgggtggtggtgttcatctgtatatcaccatgttaatttgtaatggaagtgcacttcgtagtgtatattgttactgacattaaaatactttatagcattgtctctgagcaaaagctagtatttaattgtacaaatgaataagcaagttacatgttattgtttgctcttgacagggtaggcctcttaaaagaaaaaaaacaacttgttttttctttatgaatcccctatgccaaacacataccttccatgcatgacatgagatctgcaaactggattttagccaccgtatttatttagtcaaaaaaattgtccattgtagcagacccgaaaacctttttgctgtgacatgaaaccatgttattcttatcttcttaaaacacagcctgggatggaatggccatggcatttttttcagagaacatcctttatctgctatgactgaatccttaggaaatgtaagctataaccctttgattttcaagaactaccgaataagtgtatgaagaggtggttttttaaaacttcaagttggaatttttatgaggtcactgtgtaatttgaagaattgtgtgagattgtcatgatataaattccttttaaggactgataaatagaatgaaaagtttccaggtagtttaaaactccacaggtcagtttccttttcattcctgcttcactgtggtttataagcctacgggagagcaccgttgctcagatgctactgtgagcttcctgtccggtgttagaaagtaactagttaaaagttcattttagaatgtatggtttttggggatgaactaagaattagttattagttccaaaggactgagaaccaattttaatattttcacatttataggaaagaaattcatatgtccctgaaacttctaggacaaaaccaaacaagtaaggagggaactgttgcaaagccatttcatcgagaaggggacagaaggagaaatacacacatgtatacacaaacagaatggttgagaaaacgttttaataaaatgtgagggttgtatgtgtgcgtgtatatatttacacttaacctctaaaattctcttctacagtatctctgttatgaatatgatggaaaagcaacattttggtggtgagactattgttaaaataaatttgagaaagacgaaaattttgtgagtcttgataattacaagtcaacagctatcgaaagttagcacagcttgtctgtggtgctgtttttttccccactgcagtggacttatgctgttttcatgtttagaaacaaaaaggtttcatgtgattcatgtgtaagatgcacagtatttgacatcctgattatgtaatccctattccatctatccagtcttacacttatggttggcctcaaatctattgcatttatgataatgtattatatctagttgagtttaatatttttttattagcctgtaaataaagatggcatcttctacattaaaatgatattgatctcatttttttaaataaacattttgtttccttgacgttaaa

SEQ ID NO: 204120 - DNA, 1389 bp, Artificial Sequence
  derived and/or modified sequence
atgtctgctgggggcccctgcccagctgctgctgggggcggccctggaggagccagctgcagcgtgggcgcccctggaggagtgtccatgttccgctggctggaggtgctggagaaggagtttgacaaggcctttgtggatgtggacctgctgctgggggagattgatcctgaccaggccgacatcacctatgagggccggcagaagatgaccagcctgagcagctgctttgcccagctgtgccacaaggcccagagcgtgtcccagatcaaccacaagctggaggcccagctggtggacctgaagtctgagctgacagagacccaggccgagaaggtggtgctggagaaggaggtgcatgaccagctgctgcagctgcacagcatccagctgcagctgcacgccaagacaggccagagcgctgacagcggcaccatcaaggccaagctgagcggccccagcgtggaggagctggagcgggagctggaggccaacaagaaggagaagatgaaggaggcccagctggaggccgaggtgaagctgctgaggaaagaaaatgaggccctgcggcggcacatcgctgtgctgcaggccgaggtgtatggagcccggctggccgccaagtacctggacaaggagctggccggccgggtgcagcagatccagctgctgggccgggacatgaagggccctgcccatgacaagctgtggaaccagctggaggccgagatccacctgcaccgccacaagacagtcatccgggcctgccggggcagaaatgacctgaagaggcccatgcaggcccctcctggccatgaccaggacagcctgaagaagagccagggcgtgggccccatcaggaaggtgctgctgctgaaggaggaccacgagggcctgggcatcagcatcaccggcggcaaggagcacggcgtgcccatcctgatcagcgagatccaccctggccagcctgctgacagatgtggcggcctgcacgtgggagatgccatcctggccgtgaatggagtgaacctgcgggacaccaagcacaaggaggccgtgaccatcctgagccagcagagaggagaaattgaatttgaggtggtgtatgtggcccctgaggtggacagtgatgatgaaaatgtggagtatgaagatgaaagtggccaccgctaccgcctgtacctggatgagctggagggcggcggcaaccctggggccagctgcaaggacaccagcggggagatcaaggtgctgcagggcttcaacaagaaggctgtgacagacacccatgaaaatggagacctgggcacagccagcgagacccccctggatgatggagccagcaagctggatgacctgcacaccctgtaccacaagaagagctactag

SEQ ID NO: 204121 - DNA, 1389 bp, Artificial Sequence
  derived and/or modified sequence
atgtctgctgggggcccctgcccagctgctgctgggggcggccctggaggagccagctgcagcgtgggcgcccctggaggagtgtccatgttccgctggctggaggtgctggagaaggagtttgacaaggcctttgtggatgtggacctgctgctgggggagattgatcctgaccaggccgacatcacctatgagggccggcagaagatgaccagcctgagcagctgctttgcccagctgtgccacaaggcccagagcgtgtcccagatcaaccacaagctggaggcccagctggtggacctgaagtctgagctgacagagacccaggccgagaaggtggtgctggagaaggaggtgcatgaccagctgctgcagctgcacagcatccagctgcagctgcacgccaagacaggccagagcgctgacagcggcaccatcaaggccaagctggtgagccgcagcagcagcaagatggagcgggagctggaggccaacaagaaggagaagatgaaggaggcccagctggaggccgaggtgaagctgctgaggaaagaaaatgaggccctgcggcggcacatcgctgtgctgcaggccgaggtgtatggagcccggctggccgccaagtacctggacaaggagctggccggccgggtgcagcagatccagctgctgggccgggacatgaagggccctgcccatgacaagctgtggaaccagctggaggccgagatccacctgcaccgccacaagacagtcatccgggcctgccggggcagaaatgacctgaagaggcccatgcaggcccctcctggccatgaccaggacagcctgaagaagagccagggcgtgggccccatcaggaaggtgctgctgctgaaggaggaccacgagggcctgggcatcagcatcaccggcggcaaggagcacggcgtgcccatcctgatcagcgagatccaccctggccagcctgctgacagatgtggcggcctgcacgtgggagatgccatcctggccgtgaatggagtgaacctgcgggacaccaagcacaaggaggccgtgaccatcctgagccagcagagaggagaaattgaatttgaggtggtgtatgtggcccctgaggtggacagtgatgatgaaaatgtggagtatgaagatgaaagtggccaccgctaccgcctgtacctggatgagctggagggcggcggcaaccctggggccagctgcaaggacaccagcggggagatcaaggtgctgcagggcttcaacaagaaggctgtgacagacacccatgaaaatggagacctgggcacagccagcgagacccccctggatgatggagccagcaagctggatgacctgcacaccctgtaccacaagaagagctactag

SEQ ID NO: 204122 - DNA, 1389 bp, Artificial Sequence
  derived and/or modified sequence
atgagcgccggcggcccctgccccgccgccgccggcggcggccccggaggcgcctcatgctcggtgggagcccctggaggcgtgtctatgttccgctggctggaggtgctggagaaggagtttgataaggctttcgtagacgtggacttactccttggagaaattgaccctgaccaagctgacataacgtacgaaggccggcagaagatgacgtccttgagcagttgcttcgcgcagctgtgtcacaaggcccaaagtgtttcccagatcaatcacaagctggaagcgcagctcgtggacctgaagagtgaactaaccgagactcaagccgaaaaggtagtgctcgaaaaagaggtgcatgaccaactgctgcagctccacagcatccagctgcagctacatgccaagactggtcaatcggcagacagtggaacaattaaagccaaactgagcggccctagcgtggaggaattggaaagagaactggaggccaataagaaagagaaaatgaaggaagcccagcttgaggccgaggtgaagctgctgcgcaaggagaatgaagccttacgccgccatatcgccgtcctgcaggccgaggtgtatggcgccagattggctgcgaagtacctggacaaagaattggctggtagagtacagcagatccaacttttgggacgggatatgaagggtccggcgcacgataaactctggaaccaattggaggccgagatccacctgcaccgtcataaaacggttatccgcgcatgccgggggcgtaacgatctgaagcgacccatgcaggctccaccgggtcatgatcaagatagccttaaaaagagccaaggagtaggacccattaggaaggtcctccttcttaaggaggatcacgaaggactggggatcagcattactgggggtaaagagcatggcgtgcccatactcatatccgaaattcatccaggccagccggccgaccggtgcggagggttgcacgtgggcgatgcaatcttggcagttaatggcgtcaatctgcgagataccaagcacaaagaggctgttactattctttcacagcagcgaggagagatcgaatttgaggtggtttacgttgcccctgaagtcgactcagatgacgagaatgtcgaatacgaagacgaaagtggccaccggtatcgcttgtacctggacgagctggaaggaggcgggaaccctggggcttcctgcaaagatacaagcggcgagataaaggtgctgcaaggcttcaacaagaaggcggtgacagacactcacgagaatggtgatttgggaaccgcctcagaaaccccgctggacgacggagccagtaagctcgacgacctgcacacattgtaccataaaaagtcatactag

SEQ ID NO: 204123 - DNA, 1389 bp, Artificial Sequence
  derived and/or modified sequence
atgagcgccggcggcccctgccccgccgccgccggcggcggccccgggggggcgtcatgctctgtcggcgcacccggcggtgtgtctatgttcaggtggttggaggtgttagagaaagagttcgacaaggcctttgttgatgtggacttgctactgggggaaattgatccagatcaggcggatatcacctatgagggacgccaaaaaatgacaagcctctcttcttgctttgcccaactgtgtcacaaggcgcagtcagtgtctcaaatcaaccataagctggaggctcagctagtagacttgaagtccgaactgaccgagacccaggccgaaaaagtggtactggaaaaggaggttcacgatcagttgctccagctccactctatccagctgcagcttcatgccaaaactggacagagcgctgatagcgggacaattaaggccaaactcgtaagcagaagttcctcaaagatggaacgggagttagaggccaataagaaggagaagatgaaagaagcacagctggaagctgaggtcaaactgctaagaaaggagaatgaggccctgaggagacacatcgcggtcttacaggccgaggtgtatggagcccggttggcggccaaatatctggacaaagaactggccggaagggtccagcagatccagcttctaggccgtgacatgaagggtcccgcccatgacaagctttggaaccagcttgaagcagagatccacctgcatcgccacaagactgtcatccgcgcatgcagaggacggaatgacctgaaacgtcccatgcaggcccctcctggccacgaccaagatagtctcaaaaagagtcagggcgtcggcccaattagaaaggtcctcttactgaaagaggaccacgaaggcctgggcatatctatcacaggaggcaaagagcatggcgtgccaatcctgatttccgagattcacccagggcagcccgccgatcgttgtggaggccttcacgtcggagacgcaattctagccgtgaatggagtcaacctgagagatactaaacacaaggaggcagtgactatactatctcaacagcgtggcgagatcgaattcgaagttgtttacgtggcccctgaagttgattctgacgatgaaaacgtggaatacgaggatgagtctgggcaccgctaccgcctctacctggacgagctagagggcgggggcaaccctggggcctcttgcaaagacacgagcggtgagattaaagtcctgcagggattcaataaaaaggccgtcaccgacacacacgagaatggagacttgggcaccgcatccgagacaccactggatgacggagcaagcaaactggacgacctgcatacgctgtaccataagaagagctattag

SEQ ID NO: 204124 - DNA, 1389 bp, Artificial Sequence
  derived and/or modified sequence
atgtccgcagggggtccatgtcccgctgctgccggtgggggaccaggtggggcttcgtgtagtgtcggtgctcctggcggtgtgtccatgtttcgctggttggaagtgcttgaaaaggaatttgacaaagccttcgttgacgtggatcttcttttgggagaaatcgaccctgatcaggcggatatcacctatgagggaaggcaaaagatgacctcactctcttcatgtttcgcccagctctgtcacaaggcacagtccgtttcccagatcaatcacaaactggaagcacagctcgttgacctcaaatcagaactgaccgagacccaagccgaaaaagtcgttttggaaaaggaggtgcacgaccaacttctgcagctacatagcatacagctgcaactgcacgccaaaacaggacagagcgctgactccggaacaatcaaggccaagttgtcgggaccctcagtagaggaactcgagagggaattagaagccaataagaaggagaaaatgaaagaggcacagctggaagccgaagtcaagctgctgaggaaagaaaacgaggcactacggcgtcacattgccgtgctccaggcagaggtctatggggcaagactggctgcaaagtatctggacaaagagttggctgggagggttcaacagatccaactgctggggagagacatgaaggggccagcacacgacaaactttggaatcagttggaggccgagatccacctccaccgccacaagacagtgatacgcgcatgtcggggacgcaatgatcttaagcggccaatgcaagcaccacccggtcacgatcaggacagtctgaaaaagagccagggggtggggcctatccgaaaggtattgttactgaaagaagaccacgagggcttaggtatttccattacaggaggaaaggaacatggggtccccattctcatctcggaaatacatccgggtcagcccgcagacaggtgcggtgggctgcatgttggagatgccatcctggcagtcaatggagtgaacctgcgcgatacaaaacacaaagaagccgtgaccattttatctcagcagcgcggagaaattgagtttgaggtcgtatatgtggccccagaggtggactctgacgacgaaaatgtggaatacgaggatgaatcgggacaccgctatcgtctgtacctggacgaactcgaaggtggtggtaacccaggggcttcctgcaaggatacttccggggagatcaaggttctccaaggattcaataagaaggctgtaaccgatactcacgagaacggcgacttaggtaccgcttccgagacacccctggacgacggcgcttcgaagctagatgatcttcatacactgtaccataagaaaagttactag

SEQ ID NO: 204125 - DNA, 1389 bp, Artificial Sequence
  derived and/or modified sequence
atgagcgccggaggaccgtgtccagccgctgccggaggtggcccaggcggtgcttcctgctcagtgggagcaccgggtggagtctcaatgttcagatggctggaagttctcgaaaaggaattcgacaaggcattcgtggatgtcgatctgctcctgggcgagatcgaccctgaccaggccgatattacatatgaaggtcgccagaagatgacatctctgagctcttgcttcgcgcagctgtgtcacaaggcacaaagcgtctcccaaatcaaccataaactcgaggcccagctggttgatctgaaatctgaacttactgaaactcaggcagagaaagtcgtcctggagaaggaagtgcacgaccagctgttacagctgcactccatccagctccagctacatgctaagacgggacagtccgctgattcagggacgatcaaagcaaaattggtatctcgatcctccagtaagatggagagagagctagaagccaataaaaaagagaaaatgaaagaagcccagctcgaggcagaggttaaactgctcagaaaggagaacgaagctctgcgacggcacatcgctgtcctgcaggcagaggtgtatggggctaggctggcagctaagtatctggacaaagaactcgccggaagagtccagcaaatacagctgttaggcagggacatgaagggccctgcccacgacaagctgtggaatcaactggaagcggagattcaccttcatcgccacaaaaccgtaatccgcgcttgtcgtggacgaaatgacctgaagaggccaatgcaggctccgccagggcatgatcaggacagtttgaagaagagccagggagtgggaccaatcaggaaagtgctcctacttaaagaagatcacgagggcttgggtatctccattacaggaggaaaagaacacggagttcctatcttgatttccgagatccatccaggtcaacccgctgacaggtgtggcggactgcacgtgggagacgcgatcctcgcagtgaatggcgtgaacctacgtgataccaaacacaaggaagctgttacaattttgagccaacagaggggggagatcgagtttgaggtggtatatgtggcccctgaggttgattcagatgatgagaatgtcgagtatgaagacgaaagtggccatagatacagactgtatctggatgagcttgagggcggaggcaatcctggagcctcctgcaaggacacaagtggagaaatcaaggtacttcaaggatttaacaaaaaagccgtgaccgacacccacgagaacggcgatctgggcactgcctccgagacccccctggacgacggggcatcaaaacttgatgatctacatacattatatcacaaaaagtcttactag

SEQ ID NO: 204126 - DNA, 1389 bp, Artificial Sequence
  derived and/or modified sequence
atgagcgccggcggcccctgccccgccgccgccggcggcggccccggcggcgccagctgcagcgtgggcgcccccggcggcgtgagcatgttcagatggctggaggtgctggagaaggagttcgacaaggccttcgtggacgtggacctgctgctgggcgagatcgaccccgaccaggccgacatcacctacgagggcagacagaagatgaccagcctgagcagctgcttcgcccagctgtgccacaaggcccagagcgtgagccagatcaaccacaagctggaggcccagctggtggacctgaagagcgagctgaccgagacccaggccgagaaggtggtgctggagaaggaggtgcacgaccagctgctgcagctgcacagcatccagctgcagctgcacgccaagaccggccagagcgccgacagcggcaccatcaaggccaagctgagcggccccagcgtggaggagctggagagagagctggaggccaacaagaaggagaagatgaaggaggcccagctggaggccgaggtgaagctgctgagaaaggagaacgaggccctgagaagacacatcgccgtgctgcaggccgaggtgtacggcgccagactggccgccaagtacctggacaaggagctggccggcagagtgcagcagatccagctgctgggcagagacatgaagggccccgcccacgacaagctgtggaaccagctggaggccgagatccacctgcacagacacaagaccgtgatcagagcctgcagaggcagaaacgacctgaagagacccatgcaggccccccccggccacgaccaggacagcctgaagaagagccagggcgtgggccccatcagaaaggtgctgctgctgaaggaggaccacgagggcctgggcatcagcatcaccggcggcaaggagcacggcgtgcccatcctgatcagcgagatccaccccggccagcccgccgacagatgcggcggcctgcacgtgggcgacgccatcctggccgtgaacggcgtgaacctgagagacaccaagcacaaggaggccgtgaccatcctgagccagcagagaggcgagatcgagttcgaggtggtgtacgtggcccccgaggtggacagcgacgacgagaacgtggagtacgaggacgagagcggccacagatacagactgtacctggacgagctggagggcggcggcaaccccggcgccagctgcaaggacaccagcggcgagatcaaggtgctgcagggcttcaacaagaaggccgtgaccgacacccacgagaacggcgacctgggcaccgccagcgagacccccctggacgacggcgccagcaagctggacgacctgcacaccctgtaccacaagaagagctactag

SEQ ID NO: 204127 - DNA, 1389 bp, Artificial Sequence
  derived and/or modified sequence
atgagcgccggcggcccctgccccgccgccgccggcggcggccccggcggcgccagctgcagcgtgggcgcccccggcggcgtgagcatgttcagatggctggaggtgctggagaaggagttcgacaaggccttcgtggacgtggacctgctgctgggcgagatcgaccccgaccaggccgacatcacctacgagggcagacagaagatgaccagcctgagcagctgcttcgcccagctgtgccacaaggcccagagcgtgagccagatcaaccacaagctggaggcccagctggtggacctgaagagcgagctgaccgagacccaggccgagaaggtggtgctggagaaggaggtgcacgaccagctgctgcagctgcacagcatccagctgcagctgcacgccaagaccggccagagcgccgacagcggcaccatcaaggccaagctggtgagcagaagcagcagcaagatggagagagagctggaggccaacaagaaggagaagatgaaggaggcccagctggaggccgaggtgaagctgctgagaaaggagaacgaggccctgagaagacacatcgccgtgctgcaggccgaggtgtacggcgccagactggccgccaagtacctggacaaggagctggccggcagagtgcagcagatccagctgctgggcagagacatgaagggccccgcccacgacaagctgtggaaccagctggaggccgagatccacctgcacagacacaagaccgtgatcagagcctgcagaggcagaaacgacctgaagagacccatgcaggccccccccggccacgaccaggacagcctgaagaagagccagggcgtgggccccatcagaaaggtgctgctgctgaaggaggaccacgagggcctgggcatcagcatcaccggcggcaaggagcacggcgtgcccatcctgatcagcgagatccaccccggccagcccgccgacagatgcggcggcctgcacgtgggcgacgccatcctggccgtgaacggcgtgaacctgagagacaccaagcacaaggaggccgtgaccatcctgagccagcagagaggcgagatcgagttcgaggtggtgtacgtggcccccgaggtggacagcgacgacgagaacgtggagtacgaggacgagagcggccacagatacagactgtacctggacgagctggagggcggcggcaaccccggcgccagctgcaaggacaccagcggcgagatcaaggtgctgcagggcttcaacaagaaggccgtgaccgacacccacgagaacggcgacctgggcaccgccagcgagacccccctggacgacggcgccagcaagctggacgacctgcacaccctgtaccacaagaagagctactag

SEQ ID NO: 204128 - protein, 450 aa, Artificial Sequence
  derived and/or modified sequence
MGLRSHHLSLGLLLLFLLPAECLGAEGRLALKLFRDLFANYTSALRPVADTDQTLNVTLEVTLSQIIDMDERNQVLTLYLWIRQEWTDAYLRWDPNAYGGLDAIRIPSSLVWRPDIVLYNKADAQPPGSASTNVVLRHDGAVRWDAPAITRSSCRVDVAAFPFDAQHCGLTFGSWTHGGHQLDVRPRGAAASLADFVENVEWRVLGMPARRRVLTYGCCSEPYPDVTFTLLLRRRAAAYVCNLLLPCVLISLLAPLAFHLPADSGEKVSLGVTVLLALTVFQLLLAESMPPAESVPLIGKYYMATMTMVTFSTALTILIMNLHYCGPSVRPVPAWARALLLGHLARGLCVRERGEPCGQSRPPELSPSPQSPEGGAGPPAGPCHEPRCLCRQEALLHHVATIANTFRSHRAAQRCHEDWKRLARVMDRFFLAIFFSMALVMSLLVLVQAL

SEQ ID NO: 204129 - DNA, 1353 bp, Artificial Sequence
  derived and/or modified sequence
atgggattgcggtctcatcatctgtcacttggtcttctcctcttatttttactacccgcggaatgcttgggcgcagaggggaggctggcactgaaactctttcgtgacctctttgcgaactatacctccgcactacgccctgtcgccgatacagaccagacgctcaatgtgaccctggaggtgacactgtcgcagattatcgacatggatgagcgaaatcaggttctgaccctttacctgtggatccgacaagaatggacggacgcctacctaaggtgggatcccaacgcatacggcggcctggatgcgattcgaatcccttcctccctggtatggcgaccggatatcgttctgtacaacaaagcagacgcgcagcccccggggtcagctagcacaaatgtggtgctccggcacgatggcgccgtcaggtgggacgcgcctgcaattacgcggtccagctgccgggttgatgtggcagctttcccctttgatgcccaacactgtgggcttacatttggatcatggacccatggaggccatcagctcgacgtgaggccaaggggggccgctgccagtctggctgattttgttgaaaatgtcgagtggagagtcctgggaatgcccgctcgcaggagagtgttaacctatggctgctgctcggaaccctacccggacgtaacatttactctgcttctccggaggcgggccgccgcctatgtttgtaatctcctgctgccgtgcgtactcataagccttctcgcaccactggcgttccacctccctgccgacagcggtgagaaggtgagcctgggggtcaccgtcttgctggcccttacagtgttccaattacttctcgcggagagcatgcccccggcagagtctgtgccgttaattggcaagtattacatggcaacaatgaccatggtgactttctcgaccgccctgaccatccttattatgaacctccattactgcggccctagtgtccggcctgttccagcttgggccagagcactgctcctggggcacctggcccgtggcttgtgtgtgcgggagagaggcgaaccgtgcggacagtccagaccacccgagttgagccccagccctcaaagtcctgagggcggcgctggcccacccgcagggccttgccacgaaccaaggtgtctctgtagacaggaggccctacttcatcacgtggccactattgcaaataccttccgctcacaccgggccgcccagcgttgtcacgaggactggaagcgcctagcaagagtcatggaccgcttctttctggccattttcttcagtatggccttggtgatgtccctacttgtgctggtgcaggcgttgtag

SEQ ID NO: 204130 - DNA, 1353 bp, Artificial Sequence
  derived and/or modified sequence
atgggcctgcggagccaccacctgagcctgggcctgctgctgctcttcctgctgcctgcagaatgtctgggcgctgagggccgcctggccctgaagctgttccgggacctgtttgccaactacaccagcgccctgcggcctgtggccgacacagaccagaccctgaatgtgaccctggaggtgaccctgagccagatcatcgacatggatgagaggaaccaggtgctgaccctgtacctgtggatccggcaggagtggacagatgcctacctgcgctgggaccccaatgcctacggcggcctggatgccatccgcatccccagcagcctggtgtggaggccagacatcgtgctgtacaacaaggcagatgcccagcccccaggcagcgccagcaccaacgtggtgctgcggcatgatggagctgtgcgctgggatgccccagccatcaccaggagcagctgccgggtggatgtggccgccttcccctttgatgcccagcactgcggcctgaccttcggctcctggacccatggaggccaccagctggatgtgcggcccagaggagctgctgccagcctggccgactttgtggagaatgtggagtggagggtgctgggcatgcctgccaggagaagagtgctgacctacggctgctgcagcgagccctacccagatgtgaccttcaccctgctgctgcggcggcgggctgctgcctacgtgtgcaacctgctgctgccctgtgtgctgatcagcctgctggcccccctggccttccacctgcctgctgacagcggggagaaggtgtccctgggcgtgacagtgctgctggccctgactgtgttccagctgctgctggccgagagcatgcccccagctgagagcgtgcccctcatcggcaagtactacatggccaccatgaccatggtgaccttcagcacagccctgaccatcctgatcatgaacctgcactactgcggccccagcgtgcggcctgtgcctgcctgggcccgggccctgctgctgggccacctggcccggggcctgtgtgtgcgggagcggggggagccctgtggccagagccggcccccagagctgagccccagcccccagagccctgagggcggggccggccccccagctggcccctgccacgagccccgctgcctgtgccggcaggaggccctgctgcaccacgtggccaccatcgccaacaccttccgcagccacagagctgcccagcgctgccacgaggactggaagaggctggcccgggtgatggaccgcttcttcctggccatcttcttctccatggccctggtgatgagcctgctggtgctggtgcaggccctgtag

SEQ ID NO: 204131 - DNA, 1353 bp, Artificial Sequence
  derived and/or modified sequence
atgggcctgcggagccaccacctgagcctgggcctgctgctgctgttcctcttgccagctgaatgtctgggagccgaagggcggctcgctctcaagctgtttagggacctctttgctaactacaccagtgccctcaggccagtagccgacacagaccagacactgaacgtgacactggaggtcaccttgagtcagattatcgatatggatgaacgcaaccaagtgctgaccctttacctttggatccgacaggagtggaccgacgcatatttgcggtgggaccctaatgcctacggcggtctcgacgctatccgaattccgagctcactagtatggcgaccggatatcgtgctgtataataaagcagacgcccagcccccagggtcagcttctactaatgtggtcctaagacatgatggtgcggtccgatgggatgccccggcgataacccgttctagttgtcgagtggacgttgctgccttcccattcgacgcccaacattgcggtctgactttcggatcctggacccacggtgggcaccaactcgatgtgaggcctagaggggccgccgcgtccttggccgattttgtcgaaaatgtagagtggagggtgctggggatgcctgccaggcgaagggtgctcacatatggctgttgctccgagccctacccagatgttacatttaccttgctcttgaggcgtagggctgccgcctacgtgtgtaacctgctattgccttgcgtcctgattagtctccttgctcccttggcgttccatctaccagctgactcaggcgagaaagtatccctaggtgttaccgtccttctcgcgctgacggtattccaactgctgcttgcagagagcatgccaccggcggaaagcgtccccctcatcggtaagtattacatggccacaatgactatggttacattcagcacagccctgacaattctgatcatgaacctgcactactgcgggccttcagtccgcccagtgcctgcctgggccagggccttgctgcttggccacctagcccgcggattgtgcgttcgggagcggggtgagccatgcggccagagccggcccccagagctgagtccatctccgcagtcccccgagggcggggctggtcctcccgctgggccctgccacgaaccacgatgcctttgtaggcaagaggccctactgcaccacgtggcaaccatcgctaacacattcagatctcaccgagcagctcagcgctgccacgaggactggaaacgattggctagagtgatggaccgattcttcctggccatattcttcagcatggcgcttgtcatgtctcttctcgtcttggttcaggcactgtag

SEQ ID NO: 204132 - DNA, 1353 bp, Artificial Sequence
  derived and/or modified sequence
atggggttgcgcagccaccatctctcactgggacttctactcctattcctgctgccagctgagtgcctcggcgctgagggccgtctagccctcaaactgtttcgggacctattcgccaactatacctccgcccttcggccagttgccgatactgaccagacactgaatgtgacgctggaggtcactctctctcagattattgatatggatgaaagaaaccaggtcttaactctgtacctgtggattagacaggagtggaccgacgcatacctgaggtgggatcctaacgcttacgggggacttgatgcgattaggatcccctcaagcctggtgtggaggcccgacatcgtcctctataacaaggcagacgcccagcctcccggttccgcctccaccaatgtagtgcttaggcacgatggtgcggtgcgctgggacgccccagccataactcgctcatcctgcagggtggatgtcgcagcttttcctttcgatgcccagcactgtggccttaccttcgggtcatggactcatgggggtcaccagctggatgtgcgccctcgaggagcggcagcctccctcgcggattttgtcgaaaacgtggaatggcgtgtccttggtatgccagccaggagacgcgtgctgacctatggatgttgctccgaaccttacccagacgtaacttttacattattactacgacggagagccgcagcctacgtttgcaacttactgctgccctgtgtgctgattagtctgctcgcccctctggccttccatctgcctgcggactctggagagaaagtatcattgggcgtgacggttctattggcacttacagtgtttcagctgctgctggccgaaagcatgccccctgccgaaagcgtacctctgatcgggaagtattacatggctaccatgacgatggtaaccttttctactgccctcacaattcttatcatgaacctgcactattgcggcccttctgtgaggcctgtgcccgcatgggctagagccctccttctagggcacctggccaggggactgtgtgtccgcgagcgcggagagccttgtggacagtccaggccccctgaactgtccccatcacctcaatctcctgaaggaggtgcaggtcctccagccggtccctgtcacgaacctcgctgtctctgccggcaggaggcgctcctgcatcatgtggccaccattgccaacaccttcagatctcaccgagctgctcagcggtgccacgaggattggaaacgcctggctagagtgatggaccgcttcttccttgctatcttcttctcaatggctttagtaatgtctttgctggttttggttcaggccctctag

SEQ ID NO: 204133 - DNA, 1945 bp, Artificial Sequence
  derived and/or modified sequence
taattttgccctaggtctggccaggaggcctcacatccagagacctgcccccgctcttgcagtgccagggccatggggctccggagccaccacctcagcctgggccttctgcttctgtttctactccctgcagagtgcctgggagctgagggccggctggctctcaagctgttccgtgacctctttgccaactacacaagtgccctgagacctgtggcagacacagaccagactctgaatgtgaccctggaggtgacactgtcccagatcatcgacatggatgaacggaaccaggtgctgaccctgtatctgtggatacggcaggagtggacagatgcctacctacgatgggaccccaatgcctatggtggcctggatgccatccgcatccccagcagtcttgtgtggcggccagacatcgtactctataacaaagccgacgcgcagcctccaggttccgccagcaccaacgtggtcctgcgccacgatggcgccgtgcgctgggacgcgccggccatcacgcgcagctcgtgccgcgtggatgtagcagccttcccgttcgacgcccagcactgcggcctgacgttcggctcctggactcacggcgggcaccaactggatgtgcggccgcgcggcgctgcagccagcctggcggacttcgtggagaacgtggagtggcgcgtgctgggcatgccggcgcggcggcgcgtgctcacctacggctgctgctccgagccctaccccgacgtcaccttcacgctgctgctgcgccgccgcgccgccgcctacgtgtgcaacctgctgctgccctgcgtgctcatctcgctgcttgcgccgctcgccttccacctgcctgccgactcaggcgagaaggtgtcgctgggcgtcaccgtgctgctggcgctcaccgtcttccagttgctgctggccgagagcatgccaccggccgagagcgtgccgctcatcgggaagtactacatggccactatgaccatggtcacattctcaacagcactcaccatccttatcatgaacctgcattactgtggtcccagtgtccgcccagtgccagcctgggctagggccctcctgctgggacacctggcacggggcctgtgcgtgcgggaaagaggggagccctgtgggcagtccaggccacctgagttatctcctagcccccagtcgcctgaaggaggggctggccccccagcgggcccttgccacgagccacgatgtctgtgccgccaggaagccctactgcaccacgtagccaccattgccaataccttccgcagccaccgagctgcccagcgctgccatgaggactggaagcgcctggcccgtgtgatggaccgcttcttcctggccatcttcttctccatggccctggtcatgagcctcctggtgctggtgcaggccctgtgagggctgggactaagtcacagggatctgctgcagccacagctcctccagaaagggacagccacggccaagtggttgctggtctttgggccagccagtctctccccactgctcctaagatcctgagacacttgacttcacaatccacaagggagcactcattgtctacacaccctaactaaaggaagtccagagcctgccactcccctaattccaaaaaaaagaggaactctacaaaggccaagatcacagagtacagtcttggagggacagaattgtttgtgctgggtattggagctctcagtggggagcacatgggttataatgagaaactgaactgtactgctgcatttcctgtcttccttcctaggtggctgctttgcagggctttggctgttacctttccctgctgaggggctcagggaaaagggtcggggattctcagtcgagtttccagagcaggaggccctacagacatttggccccaaatccctgactcaataaagtaagcgtgtacctagca

SEQ ID NO: 204134 - DNA, 1353 bp, Artificial Sequence
  derived and/or modified sequence
atgggcctgagaagccaccacctgagcctgggcctgctgctgctgttcctgctgcccgccgagtgcctgggcgccgagggcagactggccctgaagctgttcagagacctgttcgccaactacaccagcgccctgagacccgtggccgacaccgaccagaccctgaacgtgaccctggaggtgaccctgagccagatcatcgacatggacgagagaaaccaggtgctgaccctgtacctgtggatcagacaggagtggaccgacgcctacctgagatgggaccccaacgcctacggcggcctggacgccatcagaatccccagcagcctggtgtggagacccgacatcgtgctgtacaacaaggccgacgcccagccccccggcagcgccagcaccaacgtggtgctgagacacgacggcgccgtgagatgggacgcccccgccatcaccagaagcagctgcagagtggacgtggccgccttccccttcgacgcccagcactgcggcctgaccttcggcagctggacccacggcggccaccagctggacgtgagacccagaggcgccgccgccagcctggccgacttcgtggagaacgtggagtggagagtgctgggcatgcccgccagaagaagagtgctgacctacggctgctgcagcgagccctaccccgacgtgaccttcaccctgctgctgagaagaagagccgccgcctacgtgtgcaacctgctgctgccctgcgtgctgatcagcctgctggcccccctggccttccacctgcccgccgacagcggcgagaaggtgagcctgggcgtgaccgtgctgctggccctgaccgtgttccagctgctgctggccgagagcatgccccccgccgagagcgtgcccctgatcggcaagtactacatggccaccatgaccatggtgaccttcagcaccgccctgaccatcctgatcatgaacctgcactactgcggccccagcgtgagacccgtgcccgcctgggccagagccctgctgctgggccacctggccagaggcctgtgcgtgagagagagaggcgagccctgcggccagagcagaccccccgagctgagccccagcccccagagccccgagggcggcgccggcccccccgccggcccctgccacgagcccagatgcctgtgcagacaggaggccctgctgcaccacgtggccaccatcgccaacaccttcagaagccacagagccgcccagagatgccacgaggactggaagagactggccagagtgatggacagattcttcctggccatcttcttcagcatggccctggtgatgagcctgctggtgctggtgcaggccctgtag

SEQ ID NO: 204135 - protein, 1203 aa, Artificial Sequence
  derived and/or modified sequence
MDLRDFYLLAALIACLRLDSAIAQELIYTIREELPENVPIGNIPKDLNISHINAATGTSASLVYRLVSKAGDAPLVKVSSSTGEIFTTSNRIDREKLCAGASYAEENECFFELEVVILPNDFFRLIKIKIIVKDTNDNAPMFPSPVINISIPENTLINSRFPIPSATDPDTGFNGVQHYELLNGQSVFGLDIVETPEGEKWPQLIVQQNLDREQKDTYVMKIKVEDGGTPQKSSTAILQVTVSDVNDNRPVFKEGQVEVHIPENAPVGTSVIQLHATDADIGSNAEIRYIFGAQVAPATKRLFALNNTTGLITVQRSLDREETAIHKVTVLASDGSSTPARATVTINVTDVNDNPPNIDLRYIISPINGTVYLSEKDPVNTKIALITVSDKDTDVNGKVICFIEREVPFHLKAVYDNQYLLETSSLLDYEGTKEFSFKIVASDSGKPSLNQTALVRVKLEDENDNPPIFNQPVIELSVSENNRRGLYLTTISATDEDSGKNADIVYQLGPNASFFDLDRKTGVLTASRVFDREEQERFIFTVTARDNGTPPLQSQAAVIVTVLDENDNSPKFTHNHFQFFVSENLPKYSTVGVITVTDADAGENKAVTLSILNDNDNFVLDPYSGVIKSNVSFDREQQSSYTFDVKATDGGQPPRSSTAKVTINVMDVNDNSPVVISPPSNTSFKLVPLSAIPGSVVAEVFAVDVDTGMNAELKYTIVSGNNKGLFRIDPVTGNITLEEKPAPTDVGLHRLVVNISDLGYPKSLHTLVLVFLYVNDTAGNASYIYDLIRRTMETPLDRNIGDSSQPYQNEDYLTIMIAIIAGAMVVIVVIFVTVLVRCRHASRFKAAQRSKQGAEWMSPNQENKQNKKKKRKKRKSPKSSLLNFVTIEESKPDDAVHEPINGTISLPAELEEQSIGRFDWGPAPPTTFKPNSPDLAKHYKSASPQPAFHLKPDTPVSVKKHHVIQELPLDNTFVGGCDTLSKRSSTSSDHFSASECSSQGGFKTKGPLHTRQSQRRVTFHLPDGSQESCSDSGLGDHEPVGSGTLISHPLPLVQPQDEFYDQASPDKRTEADGNSDPNSDGPLGPRGLAEATEMCTQECLVLGHSDNCWMPPGLGPYQHPKSPLSTFAPQKEWVKKDKLVNGHTLTRAWKEDSNRNQFNDRKQYGSNEGHFNNGSHMTDIPLANLKSYKQAGGATESPKEHQL

SEQ ID NO: 204136 - DNA, 3612 bp, Artificial Sequence
  derived and/or modified sequence
atggaccttcgagatttctatcttttggctgcgttaatcgcctgccttaggctcgattcagccatcgcgcaggaacttatttacaccatccgtgaagaactccctgagaatgtgccaatcggcaacatccccaaagacttgaatatcagccacatcaatgccgcaacaggcacctctgccagcttggtgtaccggttagtttctaaggcaggcgatgcacctctagtcaaggtatcatcctccactggcgagatcttcacgacaagtaaccgtattgatcgggagaagctctgtgccggcgcctcatacgctgaagaaaacgagtgttttttcgaattagaagtggtgatacttccaaacgattttttcagactcattaagatcaaaattattgtgaaggacaccaacgacaatgcacctatgtttcccagtccagtgattaatattagcattcccgaaaacactctgatcaacagtcggttccccatccctagcgcaactgatcctgataccggatttaacggcgtgcagcactatgagctgctaaacggccagtctgtgtttggcctagatatcgtggaaacccccgagggcgagaaatggccacagctgattgtgcagcagaacttagaccgggagcagaaagacacttatgtaatgaagatcaaagtggaagatggaggcacgcctcagaagtcgtccacagccattctgcaggtcacggtcagtgatgtaaacgataatcgccctgtgtttaaagaaggacaggtggaggtgcacattcctgaaaacgcaccagtcggcacatccgttatacaactgcacgccacagatgcagacatcggaagtaatgcggaaatcagatatatcttcggggcccaggtcgctcctgcaaccaagaggctgtttgcactgaataacaccaccggactcattaccgtacagcgttctctcgatagggaagagactgccatccataaagtcaccgtgctggccagcgacggctctagcacacctgcacgggctacagtaacaattaacgtcaccgacgtaaacgataacccccctaacatcgaccttagatatatcatatctcctattaacggcacagtctacctctcagagaaggaccccgttaataccaaaatcgcccttatcaccgttagcgacaaggacaccgacgtcaatggaaaggtcatttgtttcatcgaaagggaggtgccgttccacctgaaagccgtgtatgacaaccagtatctgctggagacctcctccctcttggattatgagggaaccaaagaatttagtttcaagattgtcgcctccgatagcggaaagccaagtctgaaccaaaccgcgctcgtgcgggtgaagcttgaagatgagaacgataacccccctattttcaaccagccagtgatcgagttgagtgtatcggagaacaaccggcggggactgtatctgaccaccatctcagctaccgatgaggacagtggaaaaaatgccgatatagtatatcagctgggtcccaatgccagtttcttcgacctcgatcgaaaaactggggttctgaccgcctctagggtattcgaccgtgaagaacaagagagatttattttcacagtgaccgcacgagataacgggacaccccctctgcagagccaggctgctgtcatcgtgacagttcttgacgagaacgataacagtcctaagtttacacataaccacttccagttctttgtcagcgaaaacttgcccaagtactctactgtgggggttattaccgtaaccgatgccgatgctggcgaaaacaaagccgtgacgctttctatacttaacgataacgacaactttgtgctcgacccgtacagcggcgtaataaagagcaatgtgagctttgatagggagcagcagagtagttacacattcgatgtgaaggcaaccgatggcggacagccacctcgttctagtacggccaaggtaactattaacgtgatggacgtgaatgacaactctcctgtggtgatctcccctccttccaatacaagctttaagctggtgcccctgtcggcaataccaggttccgtcgtggctgaagtatttgcggttgacgtggacacggggatgaacgcggagttaaaatacactattgtgtctggtaacaataagggactgttccgaatagacccagtcactgggaacatcacgctcgaagagaaaccagcacccactgacgtgggacttcatcggctcgtagtgaacatcagcgacctcgggtatccaaaaagtctccacactctcgttttggtgtttctgtatgtgaatgatacagccgggaacgccagttatatatacgacctgataagaaggaccatggaaacgccactggaccgcaatattggcgactcatcccagccctaccagaatgaggactacttaactatcatgattgccattattgctggagccatggtggtgattgtcgtgatctttgtgacagtgttggtacgatgcaggcatgccagcagattcaaggccgcccagagatctaagcagggggccgagtggatgagcccaaaccaggaaaataagcagaataagaaaaagaaacgcaagaagcggaagtcacctaaatcctcgctgcttaatttcgtcacaattgaagaaagcaagccagatgacgcggtgcatgaacccattaacgggacgatttctttgcccgccgagttggaggagcaatcaattggtcggtttgactgggggcctgcaccccctaccacttttaagccaaacagtccagacctggctaaacattacaagagcgccagtcctcagcccgccttccaccttaagccagatactcctgtgagcgtcaagaagcatcacgtgatccaagagctgcccctcgacaacacctttgttggcggctgtgacaccctctccaaacgatcctcaactagcagcgatcacttctccgctagtgagtgtagctcccagggggggtttaagaccaagggaccgctacacacacggcagtcccaaagacgggttacctttcatctgcctgacggtagtcaagaatcttgctcagactccggcttaggggatcatgagcccgtaggcagcggtacattaattagccatccgctacccctagtgcagcctcaggatgagttttatgatcaggcatcgcctgataaacggaccgaggctgacggaaacagcgatcccaacagcgatggaccactaggcccccgaggactggcagaggctaccgaaatgtgcacacaagagtgcctggtcctgggacattccgataactgctggatgcccccagggctggggccatatcagcatcctaagagtccactcagcacattcgcccctcagaaagagtgggtgaagaaggacaagctcgtgaacggtcatactctgacacgcgcctggaaagaagatagcaaccgaaaccagttcaatgaccgcaagcaatacgggagtaatgagggccacttcaataacggcagtcacatgacagatatccccctggccaacttgaaatcgtataaacaagctggcggagctaccgagagccctaaagaacatcagctgtag

SEQ ID NO: 204137 - DNA, 3612 bp, Artificial Sequence
  derived and/or modified sequence
atggacctgagggatttctacctgttggccgcgctgattgcatgtttgaggctggacagcgcaatcgcgcaggagctgatctacaccataagggaagaactgcctgaaaatgtgccaataggcaatattccgaaagacttgaatatttctcacattaacgctgccacaggcacttccgcttcccttgtgtataggttggtcagtaaagcgggcgatgcccctctagtgaaggtgtcttctagcacgggcgaaatcttcacgactagtaacagaatcgaccgagagaaactgtgcgcaggtgcatcatatgccgaagagaacgagtgtttctttgagctagaagtcgtgattctgccgaacgactttttcagattaattaagatcaagatcatcgttaaagatacaaatgacaacgcgccgatgttcccctcccccgttattaatatcagcatccctgaaaacaccctgattaactctaggttccctatcccctcggccaccgatcctgacactggatttaacggggtgcagcactatgagctgttgaacgggcagagtgtcttcggtctggatattgtcgagacccccgaaggagaaaaatggccccaacttatcgttcaacagaatctggacagggagcaaaaggacacatatgtgatgaaaatcaaggtggaggatggcgggaccccacagaaaagtagcactgccatcttgcaggtgaccgtttctgatgtcaacgacaacaggcctgtctttaaggaaggccaggtagaggtacacatcccggaaaacgcccctgtgggcacatccgtgatccagttgcacgcaacagatgccgatatcgggtcaaatgcagagattcgctatatcttcggagctcaggtggcccccgccactaagcgcctgtttgctttaaacaatacgactggccttataacggtccaacgtagtttggatagggaagagactgccatacataaggtcactgtgctcgcttccgacggaagttccacaccggcccgcgccacagttacaataaatgttacagatgtgaatgacaatccaccgaatatcgacctccggtacattatatccccaatcaatggaactgtatacctgtctgagaaggaccctgttaataccaagattgccctcatcacagtgtctgacaaagataccgacgttaatggaaaagtgatttgtttcatagaaagagaagtgccttttcacctaaaagctgtgtacgacaatcagtacttgcttgaaaccagtagccttctggattatgaaggaacgaaggagttctcttttaaaatcgtggccagcgacagcggcaagccttccctgaaccaaacagcacttgttcgggtgaaactcgaggacgagaacgataatcccccgatctttaatcaacccgttattgagctctccgtctctgagaataatcgccgtggcctgtatttgaccacaatctcagcaaccgatgaggacagcggaaaaaacgccgacattgtgtaccaactaggaccaaatgccagcttcttcgacctcgacaggaagactggcgttcttaccgcctcccgcgtttttgatcgagaggagcaagaacggttcatttttacagtcaccgctagggacaatgggactcctccactccagtcgcaggcggccgtgattgttacagtcctggacgagaacgacaactcacctaagttcacacataaccactttcagttctttgtgagcgaaaaccttccgaaatatagtaccgtcggggtgatcacagtcaccgacgccgacgcgggtgaaaataaggcagtgaccctgagcattttaaacgacaatgataacttcgttcttgacccgtatagtggtgtgatcaaatctaacgtgtccttcgatcgtgaacagcagtctagctacacatttgatgttaaggctactgatggcgggcagcccccacgtagttcaaccgctaaggtgaccataaacgtgatggatgtcaatgacaactccccagtggtcatcagtcccccatccaataccagtttcaagctggttcccttaagcgccatcccaggaagcgtggtggccgaggttttcgctgtagacgttgatacagggatgaacgcggagctgaagtacacgattgtatccgggaataataagggtctgtttcggatcgatccagtgaccgggaacataactctggaggaaaagccagccccaacggacgtgggactacaccgtcttgttgtgaacatctctgatcttgggtatcccaagtcactgcatacactcgtcctcgtgttcctgtatgtaaatgatacagctggtaacgcatcatacatatatgacctgatccgccgcaccatggagacaccacttgatcgaaacatcggggattcttcacagccataccaaaacgaggattacctaacaattatgattgccatcatcgcaggcgctatggtagtgattgtggttatcttcgtgacagtgttggtgcgctgtcgccacgccagtcggttcaaggcggcccagaggagtaaacagggggccgagtggatgagtccaaatcaggaaaataaacagaacaaaaaaaagaagcggaagaagcggaagagcccgaagtcttcacttctcaactttgttaccatcgaggagagcaagccggacgacgcggtgcacgaacctattaacggtacaatcagtcttccagcagagttggaggagcaatccatcggccgttttgactgggggccagctcctcccactacattcaagccaaacagtccagacctggccaagcattacaaaagcgcctcccctcagccagcattccatctgaagcctgacaccccagtctctgtaaaaaagcatcatgtgatacaagaactccctctggacaatacattcgtcggagggtgcgatactctctctaagcgctccagcacctcatctgaccatttttccgcttccgagtgttcttctcaaggaggatttaaaacaaaaggacctctgcacacaagacaatctcaaaggcgggtaacatttcacctgcctgacggttctcaggaatcatgcagtgacagtgggctgggcgaccacgagccagtaggttctggtactcttatttctcatcctttacccctggtccagccacaggatgagttttacgaccaggcatctccagacaaaaggaccgaagctgacggtaactcagatcccaattccgatgggccacttggaccgcgcggactagccgaggcaaccgagatgtgtactcaagaatgcctcgtgctggggcattcggataattgctggatgcccccagggcttggcccatatcaacaccctaaatctccattgtccacctttgcaccccagaaggagtgggtgaaaaaagataagcttgtcaacggacatactttaaccagagcctggaaggaggactcgaacaggaaccagttcaacgataggaaacaatacggatccaacgagggccactttaacaacgggtcacacatgacagacatacctctggctaacttgaagtcctacaaacaggcaggaggcgcaaccgagtcacccaaggagcatcaattgtag

SEQ ID NO: 204138 - DNA, 3612 bp, Artificial Sequence
  derived and/or modified sequence
atggacctgcgggacttctacctgctggccgccctgattgcctgcctgcggctggacagcgccatcgcccaggagctgatctacaccatccgggaggagctgcctgaaaatgtgcccatcggcaacatccccaaggacctgaacatcagccacatcaatgctgccaccggcaccagcgccagcctggtgtaccgcctggtgtccaaggctggagatgcccccctggtgaaggtgagcagcagcactggagagatcttcaccaccagcaacagaattgaccgggagaagctgtgtgccggggccagctatgcagaggagaatgaatgcttctttgagctggaggtggtgatcctgcccaatgacttcttccgcctcatcaagatcaagatcatcgtgaaggacaccaatgacaatgcccccatgttccccagccctgtgatcaacatcagcatccctgagaacaccctcatcaacagccgcttccccatccccagcgccacagatcctgacaccggcttcaacggggtgcagcactatgagctgctgaatggccagagcgtgtttggcctggacatcgtggagaccccagagggggagaagtggccccagctgattgtgcagcagaacctggaccgggagcagaaggacacctacgtgatgaagatcaaggtggaggatggcggcaccccccagaagagcagcacagccatcctgcaggtgacagtgtctgatgtgaatgacaacagacctgtgttcaaggagggccaggtggaggtgcacatcccagaaaatgcccctgtgggcaccagcgtcatccagctgcacgccacagatgctgacatcggcagcaatgctgagatccgctacatctttggagcccaggtggccccagccaccaagaggctgtttgccctgaacaacaccaccggcctcatcaccgtgcagaggagcctggaccgggaggagacagccatccacaaggtgacagtgctggccagtgatggcagcagcaccccagcccgggccaccgtgaccatcaacgtgacagatgtgaatgacaacccccccaacatcgacctgcgctacatcatcagccccatcaatggcaccgtgtacctgtctgagaaggaccctgtgaacaccaagatcgccctgatcaccgtgtctgacaaggacacagatgtgaatggcaaggtgatctgcttcatcgagcgggaggtgcccttccacctgaaggctgtgtatgacaaccagtacctgctggagaccagcagcctgctggactatgagggcaccaaggagttctccttcaagatcgtggccagtgacagcggcaagcccagcctgaaccagacagccctggtgcgggtgaagctggaggatgaaaatgacaacccccccatcttcaaccagcccgtcatcgagctgtctgtgtctgagaacaacagaagaggcctgtacctgaccaccatcagcgccacagatgaggacagcggcaagaatgctgacatcgtgtaccagctgggccccaatgccagcttctttgacctggacaggaagacaggagtgctgacagccagccgggtgtttgaccgggaggagcaggagcgcttcatcttcaccgtgacagcccgggacaatggcaccccacccctgcagagccaggccgctgtgattgtgacagtgctggatgaaaatgacaacagccccaagttcacccacaaccacttccagttctttgtgtctgagaacctgcccaagtacagcacagtgggcgtcatcaccgtgacagatgctgatgctggggagaacaaggctgtgaccctgagcatcctgaatgacaatgacaactttgtgctggacccctacagcggggtcatcaagagcaatgtgtcctttgaccgggagcagcagagcagctacacctttgatgtgaaggccacagatggcggccagcccccaagaagcagcacagccaaggtgaccatcaacgtgatggatgtgaatgacaacagccctgtggtgatcagcccccccagcaacaccagcttcaagctggtgcccctgagcgccatccctggctctgtggtggccgaggtgtttgctgtggatgtggacaccggcatgaatgctgagctgaagtacaccatcgtgtctggcaacaacaagggcctcttcagaattgatcctgtgacaggcaacatcaccctggaggagaagccagcccccacagatgtgggcctgcaccggctggtggtgaacatcagtgacctgggctaccccaagagcctgcacaccctggtgctggtgttcctgtatgtgaatgacacagctggaaatgccagctacatctatgacctgatccggaggaccatggagacccccctggacaggaacatcggggacagcagccagccctaccagaatgaagactacctgaccatcatgattgccatcatcgccggggccatggtggtgattgtggtgatctttgtgacagtgctggtgcgctgcagacatgccagccgcttcaaggccgcccagaggagcaagcagggcgctgagtggatgagccccaaccaggagaacaagcagaacaagaagaagaagaggaagaagaggaagagccccaagagcagcctgctgaactttgtgaccatcgaggagagcaagccagatgatgctgtgcatgagcccatcaatggcaccatcagcctgcctgctgagctggaggagcagagcatcggccgctttgactggggccctgccccacccaccaccttcaagcccaacagcccagacctggccaagcactacaagagcgccagcccccagcctgccttccacctgaagccagacacccctgtgtctgtgaagaagcaccacgtgatccaggagctgcccctggacaacacctttgtgggcggctgtgacaccctgagcaagaggagcagcaccagcagtgaccacttcagcgcctctgaatgtagcagccagggcggcttcaagaccaagggccccctgcacacccggcagagccagaggagagtgaccttccacctgcctgatggcagccaggagagctgcagcgacagcggcctgggggaccacgagcctgtgggcagcggcaccctcatcagccaccccctgcccctggtgcagccccaggatgagttctatgaccaggccagcccagacaagaggacagaagcagatggcaacagcgaccccaacagtgatggccccctgggcccccggggcctggccgaggccacagagatgtgcacccaggagtgcctggtgctgggccacagcgacaactgctggatgcctcctggcctgggcccctaccagcaccccaagagccccctgagcacctttgccccccagaaggagtgggtgaagaaggacaagctggtgaatggccacaccctgacccgggcctggaaggaggacagcaacagaaaccagttcaatgacaggaagcagtatggcagcaatgaaggccacttcaacaacggcagccacatgacagacatccccctggccaacctgaagagctacaagcaggccggcggggccacagagagccccaaggagcaccagctgtag

SEQ ID NO: 204139 - DNA, 3612 bp, Artificial Sequence
  derived and/or modified sequence
atggacctgcgggacttctacctgctggccgccctgatcgcctgcctaagattggacagtgctattgcccaagaactgatctacaccatccgggaggaactcccagaaaacgtgcccataggaaatattcccaaggatcttaatattagtcacatcaacgctgccaccgggacctcagcttcactagtttaccggttggtgtccaaggcaggggacgctcctctagtaaaagtctcctcatcaacaggagagattttcactacctctaaccggatcgacagggagaaactttgtgccggcgcaagctatgccgaggagaatgaatgtttctttgagttagaggtggtgatcctgccgaatgattttttccgactgattaagatcaagataatcgtgaaggacacaaacgataacgctcctatgttcccctcccctgtgattaatatctcaattcccgaaaatactctgattaactcccggtttcccatcccatccgccacggatcccgacacaggtttcaatggggttcaacactatgaattacttaacggacaaagcgtttttggtctggacattgtggagacccctgagggagagaagtggccacagctaatagtccagcagaatctcgatagggagcaaaaggacacctatgtgatgaagataaaggtcgaggatggggggacaccccaaaagtcatccaccgccatcctgcaggtcactgtctcagatgttaacgacaacagacctgttttcaaggagggacaggtagaggtacacatcccagagaatgcacctgtgggcacctctgttatacagctccacgctaccgacgccgatataggtagcaatgccgagatccggtatattttcggtgcccaggtggcccctgccactaagagattatttgcactcaacaacaccaccggtctgattacggttcagcgaagtctggacagggaagaaactgctatccacaaagtcactgttctagcatcagacggcagctcaacccctgcacgggccacagtcacaatcaacgtaaccgacgtgaacgataacccaccaaatattgacctgagatatatcatcagtcccatcaacggcactgtctacctctccgagaaggatcctgttaatactaagatcgctctgatcacggtgagtgacaaggacaccgacgttaatggcaaggtgatctgcttcatcgaacgggaggtgcctttccacctgaaggccgtgtacgacaaccagtaccttctggaaacctcctcactcctggactacgaaggcacaaaagagtttagtttcaagatcgtggctagcgacagcgggaaacccagtctgaaccagacagccttggtccgagttaaactggaggacgaaaacgataatccaccaatttttaaccagccggtgattgagctgtctgtaagcgagaataataggagaggcctctatctgacaaccattagcgccactgatgaagactctgggaagaatgccgacatcgtgtaccagttggggccaaacgcgagctttttcgatctcgaccgtaaaactggggttctaacagcctccagagtgtttgaccgagaagagcaggagcgattcatttttacagttaccgcccgcgataatggaaccccacccctgcagagccaggccgctgtgatcgtcacggtgctcgacgagaatgacaactcacctaaatttacacacaaccactttcagttcttcgtgtctgaaaatttgccaaaatacagcacggtgggcgtcataacagtcactgatgctgacgccggagagaacaaggcagtcaccctctcaatactgaatgacaacgacaattttgtgttggatccatacagcggcgtcatcaagtctaatgtgtcgttcgacagagaacagcaatcttcctataccttcgacgtcaaagccacagatggaggacagcctccccggagtagcacagcgaaagttactataaacgtgatggatgtcaacgacaactccccagtcgtgatctcccctccttcgaacacaagcttcaagctcgtgcccctatcagccatccctgggtcggtcgttgccgaggtctttgcagtcgatgtggataccggcatgaacgccgagctcaagtacactattgtatctggaaataataagggtctgtttcgcattgaccctgtcactggcaacattactctggaagaaaagcccgcccctacggacgtcgggctgcatcgcttagttgtcaatatcagcgacctggggtaccctaagagtctgcacactctggtgttggtgttcctgtacgttaatgatacagccggtaacgcctcttacatctacgatctgatacggagaactatggagacccctctagatcgcaacatcggagatagctctcagccgtatcagaacgaggattacctgaccatcatgatcgcaatcatagccggcgccatggtagtgattgtggtcatcttcgtaacggtactggtgcggtgtaggcacgcttcgagattcaaggctgcccagcggtccaaacagggggcagagtggatgagcccaaaccaagagaacaaacaaaataagaagaagaaaagaaaaaagcgaaaatcccctaaatctagcttacttaacttcgtgaccatcgaagaatctaagccggacgatgcagtacatgagcccattaacggcacaatcagcctccccgccgagctcgaggaacagtccatagggcgattcgactggggaccagcaccacctactacttttaagcccaactcccccgatctggccaagcattacaagtccgcctcccctcagccagcgttccatctaaagcccgatacccccgtgagcgttaaaaagcatcatgtgattcaggaactgccattagataatacatttgtggggggttgtgatacactatctaagcgatctagcacctcttcagaccacttttcggcgagtgaatgctctagtcagggtgggtttaagaccaaaggccctctgcatacacgacagagtcagcgccgggtcactttccacttgcccgatggcagtcaggagtcatgcagtgatagcggcctcggggaccatgagccagtcggcagcggcaccctgatctctcatccccttccactggtccagccacaggacgaattttatgaccaggcctctcctgacaaaaggacggaggccgatggcaatagcgaccccaactctgatggaccgctcggaccaaggggcctggctgaagccacagaaatgtgtactcaggagtgcttggtactgggccattccgataactgctggatgccccccggtctgggaccttatcagcatccaaagtcccctttatctacattcgcacctcagaaggagtgggtcaagaaggataagttggtgaatggccataccctcacccgggcttggaaagaagacagcaacagaaaccagttcaatgatcgcaaacagtatggtagtaatgagggccactttaataacgggagccacatgacagatattccgctagctaatctgaaatcctacaagcaagccgggggagccaccgagagcccaaaggaacaccagctgtag

SEQ ID NO: 204140 - DNA, 3612 bp, Artificial Sequence
  derived and/or modified sequence
atggacctgcgggacttctacctgctggccgccctgatcgcctgccttaggctggattccgccattgcccaggagttgatctacacaatccgggaggagctgccagagaatgtaccgatagggaatatcccaaaggatttaaatataagccacatcaatgccgcaaccggaacatctgcttctcttgtgtaccgtttggtctccaaagcgggggatgctccactggttaaagtaagctcatccaccggcgagatctttactacgtctaaccgaattgacagggaaaagctgtgtgccggcgcttcttacgccgaagagaacgagtgtttcttcgagctcgaggtggttatcctgccgaatgattttttccggttgatcaaaatcaagatcattgtgaaagatactaatgacaatgctccgatgttccccagtcctgtgattaacatctccattcctgaaaacaccctcatcaattcccgatttcctattccctctgccaccgatcccgacactggttttaacggcgtgcagcattacgagctcctgaacggtcagtcagtgtttgggttagacatcgtagaaacaccagaaggcgagaagtggccccagttaatcgttcaacagaaccttgatagggaacagaaggatacctacgtgatgaaaatcaaggtggaggatggaggcacaccacagaagtctagtactgccatcctgcaagtcacagtgagcgacgtaaatgacaaccggcccgtgttcaaggaaggtcaggtcgaggtccatatccccgaaaacgcaccggtggggacaagcgtaattcagctccacgcaacggatgcggatataggatcaaacgccgagatcagatatattttcggagcacaggtggcaccagcgaccaagcggctgtttgccttgaataatacgactggtttaatcacggttcagcggagtctggatcgagaggagaccgctatccacaaggtcaccgtcttagcgtccgacggctctagcacccccgctcgagccactgtgaccataaatgtaacagatgtgaatgacaatccccccaacatcgatctcaggtacatcatttccccgatcaacggcaccgtttacctgtcagaaaaggaccctgtgaataccaaaatagcactgattactgtgagcgataaggatactgacgtgaatggcaaggtgatttgtttcatcgaacgagaggtgccgtttcacttgaaggctgtgtatgacaaccagtacctgctggagacaagttctctgctggattacgaaggcaccaaggagttcagctttaagatcgtcgcctccgactctggtaagccaagcctaaaccagactgccctcgtacgcgtgaagttagaggatgagaacgataatcctcctatctttaatcaaccagttatcgaactgtcagtcagcgagaataatcgcaggggattatatctaacaacaatcagtgccaccgatgaagactccgggaagaacgcagatattgtgtatcagctcggacccaatgccagcttcttcgatctggaccggaagaccggcgtgctgactgctagccgggtgttcgaccgggaggagcaggaaaggtttattttcactgtgacagcaagggataatgggacccctcctctgcaatcgcaagcggcggtgatagtcactgtgctcgatgaaaacgacaacagccctaaatttacacataaccattttcagttcttcgtgtctgagaacttgcccaaatattcgacagtgggagtcatcacagtcacggatgccgacgccggggagaacaaagctgtaactttgtccatccttaacgataatgataacttcgttctagatccctactccggggtcatcaagtctaacgttagcttcgaccgcgaacaacaatccagttatacctttgacgtgaaagccacagacggcggtcagcctccccggagtagtaccgccaaagtgacgattaatgtgatggacgtaaacgataatagccccgtggttatctctccgccaagtaatactagtttcaaactggtgcccctgtcagccatcccgggatcagtcgtcgcagaggtctttgctgtcgatgtcgatactggcatgaacgccgaactgaaatataccatcgttagcggcaacaacaaaggcctgtttcggatcgaccctgtgactggcaacatcaccctggaggaaaaacccgctcccaccgatgtgggtctacaccggctcgtggtaaacatcagcgacctagggtatcccaaaagcctgcacacactcgtgctcgtgttcctgtacgtaaacgacactgctgggaatgcaagctatatttacgatctcattagaaggacgatggagaccccattagacaggaacattggtgattcaagtcagccttatcagaatgaagattaccttacaatcatgattgctatcatcgcgggcgccatggtggttatcgtggttatatttgtaaccgtgctagtgaggtgccggcacgcttcccggttcaaagcagcccagaggtctaaacagggggccgaatggatgagtcccaaccaggaaaacaagcagaacaaaaaaaaaaagcggaaaaaacgaaaaagcccaaagtcctctctgctgaactttgtcactatagaagagtccaagccagacgatgcggtacacgaacctatcaatggaaccatcagcctgcccgccgaactggaggaacagagtataggacgctttgattgggggccagctccccccacgactttcaagcccaattcccccgaccttgccaagcactataaatccgcctctcctcagccggcgttccaccttaagcctgacacaccagtaagtgtcaagaagcaccacgttatccaggagctgccactcgataacacgtttgtaggaggctgcgataccctctcaaaaaggtcctcgacttctagcgaccattttagcgcctccgaatgcagcagccagggaggttttaagactaagggtccgctccacactcgacagtcccaaaggagggtaaccttccacctccccgatggtagccaggaatcatgttccgattcggggctgggggaccacgagcctgtgggttctggaacattaattagtcaccccctcccactggttcagccccaggacgagttctacgaccaagcatctccagacaagcgtacggaggccgacggaaactcagatcccaatagcgatggccccctaggaccacggggtctggccgaggctacagaaatgtgcacgcaagagtgcttggttttaggtcattccgataactgttggatgccacccggacttggaccttaccagcatcctaaaagtcccctgtcaacatttgcaccccaaaaggagtgggtcaaaaaggacaagctggtcaacggtcacactctgacgagggcttggaaggaggactcaaacagaaatcagttcaacgacagaaaacagtacggatctaatgagggtcactttaacaacggatcacacatgacggacatccccttggctaacttgaaaagctacaaacaggccgggggcgctacagagtccccaaaggagcatcagttgtag

SEQ ID NO: 204141 - DNA, 3612 bp, Artificial Sequence
  derived and/or modified sequence
atggacctcagggacttttacctgctggctgctctgatcgcctgtttgaggcttgacagcgcaatcgcccaagaacttatctacaccattagggaggaattgccagagaatgtgcccatcggcaatatccccaaggatcttaatattagccacatcaacgccgctacggggacaagtgcctccctggtgtaccgtctggtgtccaaagcaggggatgcacctctagtgaaagtgtcgagctcaaccggcgagatcttcaccactagcaataggattgacagagaaaaactttgtgcaggcgcaagctatgccgaagaaaatgagtgtttctttgaactggaagtcgtcattttgcccaacgattttttccgcctcataaagatcaagattatcgtgaaagacactaatgacaacgcccctatgtttccttccccagtgatcaatatttccattcctgagaacacattgatcaattctcgcttccctattccttctgccacagaccccgataccgggttcaacggagtacagcactacgagctattaaatggacaatctgtcttcggcttggatatagtcgaaaccccagagggagagaagtggcctcaactgatcgtgcaacaaaatttggatcgcgaacagaaagacacatacgtcatgaaaatcaaagtggaagacggcggtacaccccagaagagtagtacagctatcctgcaggttaccgtctccgatgtcaatgataaccggcctgtctttaaggaaggccaggttgaagtgcacatccctgagaacgctcccgtcggtactagcgtcatacaattacatgccacagatgccgacattgggtcgaatgctgaaatccgctacatctttggagcccaggtggcccctgcaacaaagcggctgttcgctttgaacaacaccacaggtctaatcaccgtgcagaggagcttggacagggaagagacagcaattcacaaagtgacagttctggcctccgatggatccagcactccggctagagctacagtgacaattaacgttactgacgttaatgacaacccacctaacatagatctccgttacattatctcccctataaacggcactgtgtacctcagcgaaaaagaccccgttaacaccaaaatagcgctgattacagtctcggataaggatactgatgtgaacggaaaagtgatttgtttcattgagcgggaggtcccctttcacctcaaagcagtgtacgacaatcagtatcttcttgaaacaagtagtctgttggactatgaggggactaaagagttctccttcaaaatcgtagcctcagactccggaaagccctcattgaatcagaccgccctcgtgcgcgtgaagctcgaagacgaaaacgacaatcccccaatctttaaccagcccgtgatcgaactgagtgtctccgagaacaacaggcgaggcctctatctcaccacaatttctgctaccgatgaagatagtggtaagaacgccgacattgtgtatcagctcgggccaaacgcctcctttttcgacctggatcggaaaaccggcgtcctcactgccagccgcgtgttcgaccgggaggagcaagagaggtttatcttcacagtcaccgcaagggataacggcacaccaccgctgcagtctcaagcagccgtgatcgttacggtcctcgacgaaaacgataattcgcccaagttcacccacaaccatttccagttctttgtgtcagaaaatctgccaaaatattccaccgtgggcgtgattactgtgacggacgccgatgctggtgagaacaaggctgtaacactgtccatcctgaacgacaacgataactttgttctggacccctactcgggagtcatcaagtctaacgtttcatttgatcgcgagcagcagagctcatatactttcgacgtcaaggcaaccgacgggggacagcccccaagaagttccaccgccaaggtgacaatcaacgtgatggacgtcaatgataactctccagtcgtcatctcccccccaagcaacacgagctttaagttggttcctctgagcgctatacccggatctgtcgtggccgaagtgttcgctgtcgacgtcgacactggaatgaacgcggagctgaagtatactatcgtgagcggaaacaacaaaggactcttcaggatagaccccgtgaccggcaatattactcttgaagaaaaacccgcaccaaccgacgtgggcctgcacaggctagtggtgaacatctccgacctgggatatccaaagagccttcacacactagtcctggtgtttctctatgtgaatgatacagctggcaatgcctcctacatctatgatttgatccgccgtacgatggaaacacccctagataggaacatcggtgattcatctcagccctatcagaacgaagattacttgacaataatgatagcgatcattgccggagcaatggtggtcatcgtggtgatctttgtgacggtgttagtgcggtgcagacacgctagccgattcaaggccgcacaaaggagcaagcaaggggctgagtggatgagcccaaatcaggagaataagcagaataagaaaaagaagcgcaaaaaaagaaagtcccccaagtcatccttgctaaattttgttaccattgaggagtctaaaccagacgacgctgtccatgagccgattaacgggaccattagcctgcccgctgaattggaggaacaatctatcggcagatttgactggggacctgcgcctccaaccaccttcaagcccaattcacccgacctggcgaagcattacaagagcgcatctccccaacctgcatttcacctgaagcctgatacaccagtgagcgtgaagaaacaccatgtcattcaggagctgccgctcgacaacacttttgtgggcggttgtgatacactgagcaagcgttcctccactagctcagatcatttctccgcctctgagtgttcctcacagggcggttttaagacaaaaggtccactacacactcgccaatcacagcgaagggtgacctttcatctacccgacgggagccaggaatcctgtagcgatagcggcctgggggaccacgaacccgtcggatcaggaaccctcatctcccacccactgccccttgtgcaaccccaggacgagttttatgaccaggcgagccccgacaaacggactgaggccgatggtaacagcgaccccaacagtgacggacctctcgggccaagaggcttagcggaagcaactgaaatgtgcacacaggagtgcctagtgctgggacattcagataactgttggatgccgccagggttggggccttatcagcaccctaagagccccctatcaactttcgccccacagaaagagtgggtgaaaaaggacaagctggtcaatggacacaccctgactagagcgtggaaggaagattccaatcgcaaccagtttaacgatagaaaacagtatggttccaatgagggacactttaacaacggctcccacatgacagacattccgctggctaatcttaaatcatataaacaggccggaggagcaaccgaatctccaaaagagcaccagctatag

SEQ ID NO: 204142 - DNA, 3612 bp, Artificial Sequence
  derived and/or modified sequence
atggatctccgtgatttctatcttctggctgctctaatagcatgtctgaggctggactcagcaatcgcgcaggagctgatctataccattagggaagagctgccagaaaatgtgccaatagggaatattcccaaagatctaaacatctcccatatcaatgccgcaactggcacaagtgcctccctggtataccggctggtgtcaaaggctggggatgccccactggtgaaggtgagctcctccaccggggaaattttcaccaccagcaatcgtatcgatcgggagaaactctgcgctggcgcaagctatgccgaggaaaatgagtgtttttttgagctagaggtcgtgatcctgccaaatgactttttcaggttgattaagattaagatcatcgtaaaagatacaaacgataatgcccctatgttccccagtccagtcattaacatatcaattcccgagaacaccttaatcaattcccgcttccctattccctcagccacagatcctgacaccgggttcaacggtgtccagcactacgagctgcttaatggacaatctgtgtttggactcgatattgtggagacccccgagggagagaagtggccccagttaatcgtccaacaaaacctcgaccgtgagcagaaagatacctacgttatgaaaattaaagttgaggacgggggtacaccgcaaaagtccagtacagccatcctgcaggtgactgttagcgacgtgaacgataaccgccctgtgttcaaggaagggcaggttgaagtgcacattccagaaaatgccccagtgggcacaagcgtcatccaactccacgcaaccgatgccgacatcggctctaacgcagagatccgttacatcttcggcgcacaggtggcgcctgccactaagcgcctctttgccctcaataatacgaccgggctcattaccgtgcagaggagccttgacagggaggaaactgctattcacaaggttacagtcctggcaagcgacgggagttctacccccgctcgcgctaccgtaacaatcaatgttactgatgttaacgacaacccccctaatatcgatctgagatacattatcagtccaattaatggcactgtttacctgagcgaaaaggatcccgtcaataccaagatcgcgctgatcacggtgtccgataaagataccgacgtcaatggaaaggttatttgctttatcgaacgcgaagtccccttccacttgaaagcagtgtacgacaatcagtatctgctcgagactagcagcttgctggactatgaagggaccaaagagttttccttcaagatcgtcgcgagcgattctgggaaaccctcgctgaaccagacggcactggtacgtgtgaagttggaagatgagaacgataatccaccgatctttaatcagcccgtgatcgagctttctgtgtctgaaaacaaccgccgtggcctatatctaactacaatttcggccacggatgaagatagcgggaaaaacgctgacatagtctatcaacttggacccaatgcatcattctttgatctggaccgaaagaccggtgttctcacagcctcacgggtcttcgatagagaggagcaagagcgtttcatttttacagtaactgctcgcgacaacggaacgccacccctacagagtcaggcagcggtgattgtaacagtgctggacgaaaacgacaattctccaaaattcactcacaaccactttcaattcttcgtcagcgagaatctgcccaaatattcaacagtcggggttattaccgttacagacgccgatgcaggtgaaaacaaagctgtgactttatctatactgaacgacaatgataattttgtgttggacccttactcaggagtgatcaaatccaacgtttcctttgatagggagcagcagagttcctatacatttgatgtcaaagcaacggacgggggacagccacccaggtccagcacagcaaaagtcaccatcaacgtgatggatgtgaatgacaatagcccagttgtcatatcacctccaagcaacacctcctttaaactggttcccctgagtgcaatccctgggtctgtggttgcagaagtgttcgcagtggatgttgacacgggcatgaatgccgagctgaaatataccatagtgagtggaaacaataagggactctttcggattgacccggtgactggcaatataaccctggaggagaaacctgctcccaccgacgttggcctgcatcgcctggtggtgaacatctctgacctggggtatccaaaatccctccatacgcttgtgctcgtttttctgtacgttaacgataccgcaggcaacgctagctacatatatgacttaatccgccgaacaatggagactccactcgatagaaatattggcgactcctctcagccataccaaaacgaggactatctaaccatcatgattgctatcattgcgggtgccatggttgtgattgtggtcatattcgtcaccgtcctagtgagatgccggcacgcgtcaaggtttaaagctgctcagcggtccaagcagggcgcagagtggatgtcccccaaccaggagaataagcagaataaaaagaagaagcggaaaaagcggaagtcacccaaaagcagcctgttaaattttgtgacgatcgaagaatcaaagccggatgacgcagtgcatgagcccatcaacgggactatctccctgccggcagaactcgaagaacagtcaatcggccgtttcgattgggggcctgctcctcccacgaccttcaagccaaactctcctgacctcgccaagcactacaaatcagcctccccacaaccagcttttcatctaaaaccagacactcctgtctctgtgaagaagcatcatgtgatccaagaattgccactcgataacacttttgtcggaggctgtgatactctctcgaaacggagttcaacaagtagcgaccacttctcagccagtgagtgttcaagccaggggggatttaaaaccaagggtccgctccacactcggcagagccagcgcagagtcactttccatctccctgatggcagccaggaaagctgctcggacagcggtttaggagaccacgaacctgttggaagtgggacgctgatttctcaccccctgcccttggtccaaccccaagatgagttctacgaccaagcttctcccgataagcgtactgaggcagatggaaactcagacccaaattctgatgggccattgggacctcgtgggctggccgaggccacagaaatgtgtacacaggagtgcctggtgttgggacactccgataattgttggatgccgccaggcctcgggccttatcagcaccccaagagcccattgtcaacatttgcaccacagaaagagtgggtcaagaaagataaactcgtgaacggacacacactaactcgggcttggaaagaggactccaacagaaaccagtttaacgacaggaagcaatatggctcgaatgaaggtcatttcaacaatgggagtcatatgaccgatattccactggcaaacctgaaaagctacaaacaggcaggcggagccaccgaatctccaaaggagcaccagctttag

SEQ ID NO: 204143 - DNA, 3663 bp, Artificial Sequence
  derived and/or modified sequence
atggacctgagggatttttacctgttggctgctctgattgcctgtttaaggctggattccgcaatagctcaagaacttatttacactattagagaggaattgcctgaaaatgtgcccataggaaacataccaaaggatctgaacatttctcacatcaatgctgccacagggaccagcgccagccttgtctacagactggtttctaaagctggggatgcccctttggtgaaagtttccagcagcactggggaaattttcacaacctccaacagaatagacagagaaaaactctgtgctggcgcctcatatgctgaggagaatgagtgtttctttgaacttgaggtggtgatcctccccaatgatttcttcaggctgatcaaaataaaaataattgtcaaggataccaatgataatgcccccatgtttccatctcctgtcatcaatatttccattccagaaaacactttgatcaacagccgctttccaattccatcagcaacagatcctgacacaggcttcaatggtgtacagcattatgaattgttaaatgggcagagtgtttttggactggatatcgtggaaactccagagggagagaagtggccacaactgattgttcagcaaaacttggatagagaacagaaagatacctatgtgatgaaaatcaaagtagaggatggaggcactccacagaaatccagtacggccatactgcaggtcacagtaagtgatgtaaatgacaacaggccagtgtttaaagagggtcaagtggaggtgcatattccagagaatgctcccgtaggtacctctgtaattcagctccatgccactgatgcagatataggcagtaatgctgaaatccggtacatttttggtgcccaggtcgcccctgcaaccaaaagactctttgctttaaataatactactgggctgattacagttcagaggtccttagatagagaggagacagccattcacaaagtgacagtgctggctagtgacggcagctccactcctgctcgagcaacggttaccatcaatgtcaccgatgtaaatgataaccctcctaatatagacctcaggtacattataagtcccatcaatggcaccgtgtatttatctgagaaagatcctgtcaatacaaagattgccctaattacagtttcagataaggacacagatgtgaatggcaaagtgatctgttttattgaaagagaggtcccatttcatttgaaggcggtatatgacaaccaatatttgttagagacctcttctttgttggactatgagggcaccaaagaattcagctttaaaattgttgcctctgattctgggaagcccagtttaaatcagactgccctggtaagggttaagcttgaggatgaaaatgacaacccaccaattttcaaccagcctgtaattgagctgtcagtttctgaaaacaaccgacgtgggttatacttaacaactattagtgccacagatgaagacagtgggaaaaatgcagacattgtttatcagcttggaccgaatgcctccttctttgatctggaccgaaaaacaggagttttgacagcctccagagtatttgacagagaagaacaagaacgattcatttttacagtaactgccagggacaatgggacccctcccctccaaagccaagcggctgtgattgttactgttctggatgagaatgacaatagccccaagtttactcataatcattttcaattttttgtgtctgagaatctgccaaagtatagtactgtgggggtaatcacagtgacagatgcagatgctggagagaataaagctgtgactctttccattctaaatgacaatgataattttgtgttggatccctattctggagtcataaagtcaaatgtctcatttgatagagagcagcagagttcctacacttttgatgtcaaagccactgatggaggacaaccacctcgttcctctactgcaaaagtaactatcaacgtcatggatgtcaatgacaacagcccagttgtcatttctccaccgtctaatacttcctttaagttggtgcccctctcagccattcctggctccgtggtagcagaagtttttgcagtggatgttgacactggaatgaacgctgaactaaagtatactatagtgagtggaaacaataaaggcttattccggattgatccagtaacaggtaacattactctggaagaaaaaccagcacctactgatgtgggattgcatcgtttggtggtcaacataagtgacctggggtaccctaagtctttgcacacgcttgtgcttgtattcctttatgttaacgacactgctggaaatgcctcctatatctatgacttgatccgcaggactatggagaccccgttggacaggaacataggggatagtagccaaccctatcaaaatgaggactatctaaccatcatgattgccatcatcgccggtgccatggtggtcattgttgtgatcttcgtcaccgttctggtgcgctgtcgccatgcatcaaggttcaaagcagctcagaggagcaagcaaggtgccgaatggatgtccccaaaccaggagaacaagcaaaacaagaaaaagaaaagaaagaaaaggaagtctcccaaaagctctcttttgaactttgttactatcgaagagtccaaacccgatgatgcagttcatgaacctatcaatgggacaataagcctgccggctgaactggaggagcaaagtataggaagatttgactggggcccggcacctccaacaacattcaagcctaacagtcctgacctggccaagcactacaaatctgcttctccacagcctgcttttcatctcaaaccagacactccagtttccgtgaaaaagcaccacgtgattcaggaactccctttggacaacacctttgttgggggttgtgacaccctttctaaacgctcttccactagttcagatcacttcagtgcctcagagtgcagttcccaaggaggcttcaagacaaagggccccttacacaccagacagtcgcagcgccgtgttacgtttcatctccctgatggctcccaggaaagctgcagtgacagtggtctaggagaccatgagccggtgggtagtggaaccctgatctcacaccctcttcctctggttcagccacaggacgaattctatgaccaggcctctccggacaagaggactgaagcagatggcaactctgatcccaactctgatgggcctttgggtccccgaggattagctgaagctacagagatgtgcactcaagagtgcttggttttgggtcactctgataattgctggatgcctcctggcttgggtccatatcaacaccccaaatctcctctctcaacctttgcaccccagaaagaatgggtgaagaaggacaagcttgtgaatgggcacaccctgaccagagcctggaaagaagacagcaacaggaaccagttcaatgaccgtaagcagtatggctccaatgaaggccatttcaacaatggcagccacatgacagacattcctctggcaaatctgaagtcttataagcaagcaggaggtgctactgagagtcctaaggagcaccaactctaagaaaaggctatatgggacctaataactttaaatagacatgctaataccgtg

SEQ ID NO: 204144 - DNA, 5834 bp, Artificial Sequence
  derived and/or modified sequence
agagagaggagagggagaaggagagaggggcagaggggaagggagagagggagagcacgcgagacggaaaggagcgcctcagagtctctgaagcacgcaagagataaccgattaggaatttttcgggcaactgtcacccggatagctgtcagagaatcatcatcaccgcaactctgacgtttcctacaagaagttagagacttaagcagtattggcatcggatggaaatggtatgcatgctgctgtggaaaatatccctgagctgaagaagtgcaactatgtgttgtgtgtgctaaatgcccagaagaacccagacccagtgggtaagagagacgaaatgtggagagaatgactaacgacaaatccgtgaatttgttctctggagttgctaatttgccagcccgaagcaacacattttacaaggaggaaacattttgctgcttctgatttctccccaaactggtgctaccagatgcatggctttctatgtgttggaacaaatcattcctaactgcagcatactgggaaaggggaaaggttgaggcaactaaccggctgtctccaaataagtgatgagatataatgcatcctccagtccatgcacgcttcctcttgcaatttgtgcatcattcctcagtggaaacctttaaaccctaaaatccaggaaaagaaaataaatacattatcatggacctgagggatttttacctgttggctgctctgattgcctgtttaaggctggattccgcaatagctcaagaacttatttacactattagagaggaattgcctgaaaatgtgcccataggaaacataccaaaggatctgaacatttctcacatcaatgctgccacagggaccagcgccagccttgtctacagactggtttctaaagctggggatgcccctttggtgaaagtttccagcagcactggggaaattttcacaacctccaacagaatagacagagaaaaactctgtgctggcgcctcatatgctgaggagaatgagtgtttctttgaacttgaggtggtgatcctccccaatgatttcttcaggctgatcaaaataaaaataattgtcaaggataccaatgataatgcccccatgtttccatctcctgtcatcaatatttccattccagaaaacactttgatcaacagccgctttccaattccatcagcaacagatcctgacacaggcttcaatggtgtacagcattatgaattgttaaatgggcagagtgtttttggactggatatcgtggaaactccagagggagagaagtggccacaactgattgttcagcaaaacttggatagagaacagaaagatacctatgtgatgaaaatcaaagtagaggatggaggcactccacagaaatccagtacggccatactgcaggtcacagtaagtgatgtaaatgacaacaggccagtgtttaaagagggtcaagtggaggtgcatattccagagaatgctcccgtaggtacctctgtaattcagctccatgccactgatgcagatataggcagtaatgctgaaatccggtacatttttggtgcccaggtcgcccctgcaaccaaaagactctttgctttaaataatactactgggctgattacagttcagaggtccttagatagagaggagacagccattcacaaagtgacagtgctggctagtgacggcagctccactcctgctcgagcaacggttaccatcaatgtcaccgatgtaaatgataaccctcctaatatagacctcaggtacattataagtcccatcaatggcaccgtgtatttatctgagaaagatcctgtcaatacaaagattgccctaattacagtttcagataaggacacagatgtgaatggcaaagtgatctgttttattgaaagagaggtcccatttcatttgaaggcggtatatgacaaccaatatttgttagagacctcttctttgttggactatgagggcaccaaagaattcagctttaaaattgttgcctctgattctgggaagcccagtttaaatcagactgccctggtaagggttaagcttgaggatgaaaatgacaacccaccaattttcaaccagcctgtaattgagctgtcagtttctgaaaacaaccgacgtgggttatacttaacaactattagtgccacagatgaagacagtgggaaaaatgcagacattgtttatcagcttggaccgaatgcctccttctttgatctggaccgaaaaacaggagttttgacagcctccagagtatttgacagagaagaacaagaacgattcatttttacagtaactgccagggacaatgggacccctcccctccaaagccaagcggctgtgattgttactgttctggatgagaatgacaatagccccaagtttactcataatcattttcaattttttgtgtctgagaatctgccaaagtatagtactgtgggggtaatcacagtgacagatgcagatgctggagagaataaagctgtgactctttccattctaaatgacaatgataattttgtgttggatccctattctggagtcataaagtcaaatgtctcatttgatagagagcagcagagttcctacacttttgatgtcaaagccactgatggaggacaaccacctcgttcctctactgcaaaagtaactatcaacgtcatggatgtcaatgacaacagcccagttgtcatttctccaccgtctaatacttcctttaagttggtgcccctctcagccattcctggctccgtggtagcagaagtttttgcagtggatgttgacactggaatgaacgctgaactaaagtatactatagtgagtggaaacaataaaggcttattccggattgatccagtaacaggtaacattactctggaagaaaaaccagcacctactgatgtgggattgcatcgtttggtggtcaacataagtgacctggggtaccctaagtctttgcacacgcttgtgcttgtattcctttatgttaacgacactgctggaaatgcctcctatatctatgacttgatccgcaggactatggagaccccgttggacaggaacataggggatagtagccaaccctatcaaaatgaggactatctaaccatcatgattgccatcatcgccggtgccatggtggtcattgttgtgatcttcgtcaccgttctggtgcgctgtcgccatgcatcaaggttcaaagcagctcagaggagcaagcaaggtgccgaatggatgtccccaaaccaggagaacaagcaaaacaagaaaaagaaaagaaagaaaaggaagtctcccaaaagctctcttttgaactttgttactatcgaagagtccaaacccgatgatgcagttcatgaacctatcaatgggacaataagcctgccggctgaactggaggagcaaagtataggaagatttgactggggcccggcacctccaacaacattcaagcctaacagtcctgacctggccaagcactacaaatctgcttctccacagcctgcttttcatctcaaaccagacactccagtttccgtgaaaaagcaccacgtgattcaggaactccctttggacaacacctttgttgggggttgtgacaccctttctaaacgctcttccactagttcagatcacttcagtgcctcagagtgcagttcccaaggaggcttcaagacaaagggccccttacacaccagacagtcgcagcgccgtgttacgtttcatctccctgatggctcccaggaaagctgcagtgacagtggtctaggagaccatgagccggtgggtagtggaaccctgatctcacaccctcttcctctggttcagccacaggacgaattctatgaccaggcctctccggacaagaggactgaagcagatggcaactctgatcccaactctgatgggcctttgggtccccgaggattagctgaagctacagagatgtgcactcaagagtgcttggttttgggtcactctgataattgctggatgcctcctggcttgggtccatatcaacaccccaaatctcctctctcaacctttgcaccccagaaagaatgggtgaagaaggacaagcttgtgaatgggcacaccctgaccagagcctggaaagaagacagcaacaggaaccagttcaatgaccgtaagcagtatggctccaatgaaggccatttcaacaatggcagccacatgacagacattcctctggcaaatctgaagtcttataagcaagcaggaggtgctactgagagtcctaaggagcaccaactctaagaaaaggctatatgggacctaataactttaaatagacatgctaataccgtgtgcgtcagagctttatgtattcaatagatctctacaactatgccccttctagcagggatacctataactttgtgttagcaccatggagaatacaatgtttttgcaacatatgagagaagatagttctagccatgcaattttgtttactagaattgattacactctccagagatctctccattgtgcaaattttttttattattgcattttattttgaccctggactgctgctatgaacaatagaatatgcatttggaaagtaagaaagtttcatggattagagtgactgaaaaacatatccagttagaaaattgtgcttttttttttttttttttttttttttgtcattgatttgtgctgggactgctatacttgacattatactgcaaacaaaacttaaagagataagcattaaacctattgtgctgttaacaacgttagtggacacttgtaagtcaatcagtgttaaagtatttgtaaatagaagcaagctattattaacaacttttgtgtacttataatgttcacctaaaaatgttgtagcataattctgtgttttatggttgcttctgtccttctttttatttacctctttgttgttatttttgttgtttctttcagtgaggtgtttctgtgttagtagtctgtcttgacacacattgttcaaacaatctcaagcacttgtgtttaaaaaaggttctgaaatcttgcttctcatatgatagcttatgatgccggaattctgtaaacaataaagatgaaagaaaaaatgaaaactttatacaaaaaaggacttctgcaaaagcttggaaattcagaacctattttttatcatcttattttcaaagtaggcaaaagcaaaatcacttaattagtaccattaagtgagagagtaatggaaaactgttatccatcaaaagtgatataatatcctgtacttgtcactcatgtaaaactaatgtatcaaaattagcatatatggaagaaaaatcactattcaaaaatagtttcaattgggcaaatgtgtgtctacaactttgttgaaatggcagagtctgtgttgatcctcatatacaataatgttgttgtaacacaagtgttattagaccatagccacaaaatatttaatgtgttgtgccttcatgatgtaacagaacattctccaggtagggtagttgggggaaataaagggataaatctctaattattgctgtttaactgtttgttatcatagttggtcaatgcctggcaggtaccagcatattgtcacttaggtcaaaccaataaagtgacaactaatgttaataagatctcagttgcacgtgcaaacaaatccaaattcgaacattcttaggaggtttttgttaaggcatgacagatgatttaaacaaataaatagcatgcaacaaaatgtctttattgaaagaagtggaagttatcttaatgccacggttcaccatcaatttaaaagtaaaaaaaacaaa

SEQ ID NO: 204145 - DNA, 3612 bp, Artificial Sequence
  derived and/or modified sequence
atggacctgagagacttctacctgctggccgccctgatcgcctgcctgagactggacagcgccatcgcccaggagctgatctacaccatcagagaggagctgcccgagaacgtgcccatcggcaacatccccaaggacctgaacatcagccacatcaacgccgccaccggcaccagcgccagcctggtgtacagactggtgagcaaggccggcgacgcccccctggtgaaggtgagcagcagcaccggcgagatcttcaccaccagcaacagaatcgacagagagaagctgtgcgccggcgccagctacgccgaggagaacgagtgcttcttcgagctggaggtggtgatcctgcccaacgacttcttcagactgatcaagatcaagatcatcgtgaaggacaccaacgacaacgcccccatgttccccagccccgtgatcaacatcagcatccccgagaacaccctgatcaacagcagattccccatccccagcgccaccgaccccgacaccggcttcaacggcgtgcagcactacgagctgctgaacggccagagcgtgttcggcctggacatcgtggagacccccgagggcgagaagtggccccagctgatcgtgcagcagaacctggacagagagcagaaggacacctacgtgatgaagatcaaggtggaggacggcggcaccccccagaagagcagcaccgccatcctgcaggtgaccgtgagcgacgtgaacgacaacagacccgtgttcaaggagggccaggtggaggtgcacatccccgagaacgcccccgtgggcaccagcgtgatccagctgcacgccaccgacgccgacatcggcagcaacgccgagatcagatacatcttcggcgcccaggtggcccccgccaccaagagactgttcgccctgaacaacaccaccggcctgatcaccgtgcagagaagcctggacagagaggagaccgccatccacaaggtgaccgtgctggccagcgacggcagcagcacccccgccagagccaccgtgaccatcaacgtgaccgacgtgaacgacaacccccccaacatcgacctgagatacatcatcagccccatcaacggcaccgtgtacctgagcgagaaggaccccgtgaacaccaagatcgccctgatcaccgtgagcgacaaggacaccgacgtgaacggcaaggtgatctgcttcatcgagagagaggtgcccttccacctgaaggccgtgtacgacaaccagtacctgctggagaccagcagcctgctggactacgagggcaccaaggagttcagcttcaagatcgtggccagcgacagcggcaagcccagcctgaaccagaccgccctggtgagagtgaagctggaggacgagaacgacaacccccccatcttcaaccagcccgtgatcgagctgagcgtgagcgagaacaacagaagaggcctgtacctgaccaccatcagcgccaccgacgaggacagcggcaagaacgccgacatcgtgtaccagctgggccccaacgccagcttcttcgacctggacagaaagaccggcgtgctgaccgccagcagagtgttcgacagagaggagcaggagagattcatcttcaccgtgaccgccagagacaacggcaccccccccctgcagagccaggccgccgtgatcgtgaccgtgctggacgagaacgacaacagccccaagttcacccacaaccacttccagttcttcgtgagcgagaacctgcccaagtacagcaccgtgggcgtgatcaccgtgaccgacgccgacgccggcgagaacaaggccgtgaccctgagcatcctgaacgacaacgacaacttcgtgctggacccctacagcggcgtgatcaagagcaacgtgagcttcgacagagagcagcagagcagctacaccttcgacgtgaaggccaccgacggcggccagccccccagaagcagcaccgccaaggtgaccatcaacgtgatggacgtgaacgacaacagccccgtggtgatcagcccccccagcaacaccagcttcaagctggtgcccctgagcgccatccccggcagcgtggtggccgaggtgttcgccgtggacgtggacaccggcatgaacgccgagctgaagtacaccatcgtgagcggcaacaacaagggcctgttcagaatcgaccccgtgaccggcaacatcaccctggaggagaagcccgcccccaccgacgtgggcctgcacagactggtggtgaacatcagcgacctgggctaccccaagagcctgcacaccctggtgctggtgttcctgtacgtgaacgacaccgccggcaacgccagctacatctacgacctgatcagaagaaccatggagacccccctggacagaaacatcggcgacagcagccagccctaccagaacgaggactacctgaccatcatgatcgccatcatcgccggcgccatggtggtgatcgtggtgatcttcgtgaccgtgctggtgagatgcagacacgccagcagattcaaggccgcccagagaagcaagcagggcgccgagtggatgagccccaaccaggagaacaagcagaacaagaagaagaagagaaagaagagaaagagccccaagagcagcctgctgaacttcgtgaccatcgaggagagcaagcccgacgacgccgtgcacgagcccatcaacggcaccatcagcctgcccgccgagctggaggagcagagcatcggcagattcgactggggccccgccccccccaccaccttcaagcccaacagccccgacctggccaagcactacaagagcgccagcccccagcccgccttccacctgaagcccgacacccccgtgagcgtgaagaagcaccacgtgatccaggagctgcccctggacaacaccttcgtgggcggctgcgacaccctgagcaagagaagcagcaccagcagcgaccacttcagcgccagcgagtgcagcagccagggcggcttcaagaccaagggccccctgcacaccagacagagccagagaagagtgaccttccacctgcccgacggcagccaggagagctgcagcgacagcggcctgggcgaccacgagcccgtgggcagcggcaccctgatcagccaccccctgcccctggtgcagccccaggacgagttctacgaccaggccagccccgacaagagaaccgaggccgacggcaacagcgaccccaacagcgacggccccctgggccccagaggcctggccgaggccaccgagatgtgcacccaggagtgcctggtgctgggccacagcgacaactgctggatgccccccggcctgggcccctaccagcaccccaagagccccctgagcaccttcgccccccagaaggagtgggtgaagaaggacaagctggtgaacggccacaccctgaccagagcctggaaggaggacagcaacagaaaccagttcaacgacagaaagcagtacggcagcaacgagggccacttcaacaacggcagccacatgaccgacatccccctggccaacctgaagagctacaagcaggccggcggcgccaccgagagccccaaggagcaccagctgtag

SEQ ID NO: 204146 - protein, 757 aa, Artificial Sequence
  derived and/or modified sequence
MLLRLLLAWAAAGPTLGQDPWAAEPRAACGPSSCYALFPRRRTFLEAWRACRELGGDLATPRTPEEAQRVDSLVGAGPASRLLWIGLQRQARQCQLQRPLRGFTWTTGDQDTAFTNWAQPASGGPCPAQRCVALEASGEHRWLEGSCTLAVDGYLCQFGFEGACPALQDEAGQAGPAVYTTPFHLVSTEFEWLPFGSVAAVQCQAGRGASLLCVKQPEGGVGWSRAGPLCLGTGCSPDNGGCEHECVEEVDGHVSCRCTEGFRLAADGRSCEDPCAQAPCEQQCEPGGPQGYSCHCRLGFRPAEDDPHRCVDTDECQIAGVCQQMCVNYVGGFECYCSEGHELEADGISCSPAGAMGAQASQDLGDELLDDGEDEEDEDEAWKAFNGGWTEMPGILWMEPTQPPDFALAYRPSFPEDREPQIPYPEPTWPPPLSAPRVPYHSSVLSVTRPVVVSATHPTLPSAHQPPVIPATHPALSRDHQIPVIAANYPDLPSAYQPGILSVSHSAQPPAHQPPMISTKYPELFPAHQSPMFPDTRVAGTQTTTHLPGIPPNHAPLVTTLGAQLPPQAPDALVLRTQATQLPIIPTAQPSLTTTSRSPVSPAHQISVPAATQPAALPTLLPSQSPTNQTSPISPTHPHSKAPQIPREDGPSPKLALWLPSPAPTAAPTALGEAGLAEHSQRDDRWLLVALLVPTCVFLVVLLALGIVYCTRCGPHAPNKRITDCYRWVIHAGSKSPTEPMPPRGSLTGVQTCRTSV

SEQ ID NO: 204147 - DNA, 2274 bp, Artificial Sequence
  derived and/or modified sequence
atgcttcttcgtctcctgctggcatgggccgcagccggtccaacgctgggccaggatccctgggccgcggagccccgagcggcctgcggaccttctagctgctatgcgttgttcccaaggcgtcgaacatttctggaagcttggcgggcctgccgagaactggggggggaccttgcaaccccccgaactccagaagaggctcagagagtcgactcactggttggagccggaccagcatcccgcctcctctggatcggattgcaaagacaggctaggcagtgccaactgcagcggccactgcgaggattcacttggacaaccggtgatcaggacaccgcttttactaattgggcgcaacccgcctcaggtggaccctgcccggctcagcgatgtgttgcattggaggcctctggtgaacataggtggctcgaggggtcctgcacactcgctgtggacgggtacttgtgccagttcggttttgagggcgcttgcccagcattgcaggatgaggccggtcaggcgggcccagctgtttacaccactccatttcacctcgtctctacagagttcgagtggctgccctttggcagcgttgctgcggtccagtgccaggccggtcgcggcgcgagtcttttatgcgtcaagcagccagaaggcggtgtggggtggtcaagagccggccccctttgccttggcacaggatgcagccccgataacggcggctgcgaacacgagtgcgtggaagaggtggacggacacgtgagttgcagatgcacagagggcttccgtctcgctgcagatgggaggtcgtgtgaggatccgtgcgcacaggcgccctgtgaacagcagtgcgagcccgggggtcctcaaggatattcctgccactgcaggctgggttttcgtcccgcagaggatgacccacacaggtgtgttgatacagatgagtgtcaaattgccggagtttgccagcagatgtgcgtcaattatgtaggagggtttgagtgctactgctcagaaggacacgaattggaagctgacggaatctcgtgctctcccgccggggcaatgggtgcgcaagcttcccaggaccttggcgatgagctgctggacgatggggaagacgaagaagatgaggacgaggcatggaaggccttcaatggcggctggaccgaaatgcccggcatactgtggatggagccaacccagccccctgattttgctctggcataccgcccttcgttccccgaggaccgggaacctcagatcccctatcccgaacccacctggcccccacccctgtcagctccccgcgttccgtaccactcttccgttctctctgtgacccgacccgttgtggtctccgctacccacccaacattgccttcagcacaccagccacctgtcatccccgctactcatccagcactttctcgggatcaccaaatccctgtgatcgctgcaaactacccagatcttccctccgcatatcaaccaggtatcctctcagttagtcacagcgcccagccaccagcccaccagcctccaatgattagtacaaagtatccagagctgttccctgctcaccagagtccgatgtttcctgacacccgggtggcagggacacagacgacaactcatttgcctggtattccaccaaatcatgcccccttggtgaccacccttggagcacaattaccaccccaggcaccagacgcactggtgctgaggactcaggccacgcagttgccaatcatacctactgcacagccgagcctgactaccacgtctcggagccccgtgagtcccgctcatcaaattagtgtcccagctgcgactcagcccgccgcccttcccaccttactgccgtcccaatccccaacgaaccagaccagccccatcagccccactcaccctcatagcaaagcccctcagattccgcgagaagacggcccatcccctaaactcgcgctctggctgcccagtccagcaccaaccgcggccccgaccgccctgggcgaggccggattggctgagcactcccagcgtgatgatcgctggctcctggtggcacttctggtccctacatgcgttttcttggtggtgctgctggctctcggaatcgtgtactgtacaaggtgtgggccccatgcccccaacaagcgcattacagactgttacaggtgggttatacacgcaggtagtaagagtccaacagaacccatgccccccaggggctccctgacgggcgtacaaacttgccgcaccagcgtgtag

SEQ ID NO: 204148 - DNA, 2274 bp, Artificial Sequence
  derived and/or modified sequence
atgctgctgcggctgctgctggcctgggccgccgccggccccaccctgggccaggacccctgggccgctgagcccagggctgcctgtggccccagcagctgctacgccctcttccccaggaggaggaccttcctggaggcctggagggcctgccgggagctgggcggggacctggccacccccaggaccccagaggaggcccagagggtggacagcctggtgggcgccggccctgccagccggctgctgtggattggcctgcagaggcaggcccggcagtgccagctgcagaggcccctgcggggcttcacctggaccactggagaccaggacacagccttcaccaactgggcccagcctgccagcggcggcccctgcccagcccagagatgtgtggccctggaggccagcggggagcaccgctggctggagggcagctgcaccctggccgtggatggctacctgtgccagtttggatttgagggcgcctgcccagccctgcaggatgaagctggccaggccggccctgctgtgtacaccacccccttccacctggtgtccacagaatttgagtggctgccctttggatctgtggccgctgtgcagtgccaggccggccgcggggccagcctgctgtgtgtgaagcagcctgagggcggcgtgggctggagccgggccggccccctgtgcctgggcaccggctgcagcccagacaatggaggctgtgaacatgaatgtgtggaggaggtggatggccacgtgtcctgccgctgcacagagggcttccggctggccgcagatggccgcagctgtgaggacccctgtgcccaggccccctgtgagcagcagtgtgagcccggcggcccccagggctacagctgccactgccgcctgggcttccggccagcagaagatgacccccaccgctgtgtggacacagatgagtgccagattgctggggtgtgccagcagatgtgtgtgaactacgtgggcggctttgagtgctactgcagcgagggccacgagctggaggctgatggcatcagctgcagccctgctggggccatgggcgcccaggccagccaggacctgggagatgagctgctggatgatggagaagatgaggaggatgaagatgaggcctggaaggccttcaacggcggctggacagagatgcctggcatcctgtggatggagcccacccagcccccagactttgccctggcctaccggcccagcttccctgaggaccgggagccccagatcccctacccagagcccacctggcccccacccctgagcgccccccgggtgccctaccacagctctgtgctgtctgtgaccaggcctgtggtggtgtctgccacccaccccaccctgcccagcgcccaccagccccctgtgatcccagccacccacccagccctgagccgggaccaccagatccctgtgattgctgccaactacccagacctgcccagcgcctaccagcccggcatcctgtctgtgagccacagcgcccagcccccagcccaccagccccccatgatcagcaccaagtacccagagctgtttcctgcccaccagagccccatgtttcctgacaccagggtggccggcacccagaccaccacccacctgcccggcatcccccccaaccacgcccccctggtgaccaccctgggcgcccagctgcccccccaggccccagatgccctggtgctgcggacccaggccacccagctgcccatcatccccacagcccagcccagcctgaccaccaccagccgcagccctgtgtccccagcccaccagatctctgtgcctgctgccacccagcctgctgccctgcccaccctgctgcccagccagagccccaccaaccagaccagccccatcagccccacccacccccacagcaaggccccccagatcccccgggaggatggccccagccccaagctggccctgtggctgcccagccctgcccccacagctgcccccacagccctgggggaggccggcctggccgagcacagccagagagatgaccgctggctgctggtggccctgctggtgcccacctgtgtgttcctggtggtgctgctggccctgggcatcgtgtactgcacccgctgtggcccccacgcccccaacaagaggatcacagactgctaccgctgggtgattcatgctggcagcaagagccccacagagcccatgccaccccggggcagcctgactggagtgcagacctgcaggacctctgtgtag

SEQ ID NO: 204149 - DNA, 2274 bp, Artificial Sequence
  derived and/or modified sequence
atgctgctgcggctgctgctggcctgggccgccgccggccccaccttgggccaggacccttgggccgcagagcctcgagcggcatgcggaccgagtagttgctatgccttgtttcctagacggcggacttttttggaagcctggagagcctgcagggaactgggaggggaccttgccacgcctaggactcccgaggaggcccaaagggtggacagcctcgtgggtgctggaccggcctcacgccttctgtggatcggactgcagcgacaagccaggcagtgtcaattgcagcggccacttagaggttttacctggaccaccggggatcaggatactgcattcaccaattgggcgcagccggccagtgggggaccatgccccgcgcaaagatgtgtggccttggaggcgagcggagaacatcggtggttagagggttcttgtaccttagcagtggatgggtatctttgccagtttggctttgagggtgcctgtcctgccctgcaggacgaggctggtcaagctggccccgcggtatacaccaccccctttcatctggtcagtacagagttcgaatggctcccatttggctccgtggccgctgtccagtgccaagcaggaaggggggcctcgctcctgtgcgtgaaacaacctgaggggggggtcggctggtccagagccggtccgttatgtctaggcaccggctgcagcccagataacggtggctgcgaacacgaatgtgtcgaggaggtcgatggtcacgtgtcttgccggtgtaccgaggggttcagattggccgccgatggaaggtcttgcgaagatccctgtgctcaagccccctgtgagcagcagtgcgagccggggggcccacagggctatagctgtcattgtcgcctcgggtttcgaccagccgaagacgacccccatcggtgcgtcgataccgacgagtgtcaaatcgcgggagtctgccagcagatgtgcgttaattacgttgggggctttgaatgttattgttctgaagggcacgagttagaagctgacgggattagctgttctccagcaggagcaatgggggcacaagcaagtcaagacctcggggacgagctgctggacgacggagaggacgaggaagacgaggacgaagcttggaaagcattcaacggtggctggactgaaatgccgggcatcctatggatggagcctactcagcctcccgacttcgccctcgcttatcggcccagtttccctgaggaccgtgaacctcagatcccatatccagagcccacatggcccccacccttatctgcgccaagagtgccataccacagttccgtactgagcgtcacccgccccgtagtagtttccgccactcaccctaccctgcccagcgcgcatcaacctcccgtgattccagctacgcaccccgcactgagtcgggatcaccaaatccctgtaatagccgccaactacccagatctccctagtgcttaccagcctggcattctctctgtgagccacagtgcccagccccccgcccaccagccacccatgatttcaactaaatacccagaactgtttcctgcccaccaaagccctatgttccccgatacgcgcgtcgctgggacacagaccacaacacatctgcctggcataccgcccaatcatgcgccactggttactaccttgggcgcacagcttcctccccaggcgcctgacgcactcgtgttacggacacaagcaacacagctgccaatcattcctaccgctcagccctctctcaccaccacctcccggagcccagtctcacctgcccaccagatcagcgttcccgccgcgactcaacccgctgccctgccgacactcctcccttcccagagcccaactaatcagacatcccctatctctcccacacatccacattccaaagctccacagatcccccgggaagatggacccagtcccaagttggccctgtggcttccaagccccgcaccgacagcagctcctacagctctgggcgaggccgggctggccgaacattctcaacgagacgatagatggttgctggttgcacttctcgtcccaacatgcgtctttctggtcgtgctgttggccctgggcatagtctactgtactcgctgcggtccccatgctcctaacaagagaataactgattgttaccgctgggtgatccacgcgggatctaagtctccgaccgagcccatgccaccaaggggatccctgacaggagtacagacatgccggactagtgtgtag

SEQ ID NO: 204150 - DNA, 2274 bp, Artificial Sequence
  derived and/or modified sequence
atgttgctgagacttttgctcgcatgggcagccgcaggaccgaccctgggccaggatccttgggcggctgagccgagagcggcttgcggaccatcctcgtgctatgcgttgttccctcggcgtcggaccttcttggaagcatggagggcatgtcgcgagttaggtggcgatttggccacgcccaggacaccagaggaggctcagagagtggactctctggtcggggctggcccagcgagccggctgctgtggattggcctccagcgccaagcaagacagtgccagcttcaacgacctctacgcggattcacctggaccacaggggaccaagacactgccttcaccaactgggctcagcccgcaagtggaggaccttgcccggcacagagatgcgtggcactggaggcatccggcgagcaccggtggctcgagggttcttgtaccttggcagttgacggatacctctgccagttcgggtttgagggagcgtgtccggcactgcaggatgaggccggtcaggctgggcctgccgtgtacaccacgccctttcatcttgtgtccacagagtttgaatggctgccgtttggaagcgtcgccgctgtccaatgccaggcgggtaggggggcatccttgctgtgcgtgaagcaacctgaaggcggagtcggctggagcagagctgggccactctgcctgggcaccggatgcagccctgacaacggaggctgcgaacatgagtgcgtggaggaagtagacggccatgtgagctgtcgctgtactgagggctttcggctcgcagctgatgggaggagttgcgaagatccttgtgctcaggcaccctgtgagcagcaatgtgaacccggtgggccacagggctactcatgccactgccggttgggatttagaccagccgaggatgatcctcaccggtgtgtagacacggatgagtgccagattgcgggagtgtgtcagcaaatgtgcgtgaactacgtaggaggttttgaatgctactgttctgagggccatgaactcgaggccgacggaataagctgttctcctgccggagcaatgggggcacaggcttcacaggacctcggagacgagctactggatgacggcgaagatgaagaagatgaggatgaggcctggaaggcctttaacggaggctggactgagatgcctgggattctctggatggaaccaacacaacccccagactttgctcttgcttaccggcctagtttcccggaggatcgtgagccccagattccctaccctgaacccacctggccacctcccttgtctgcccctagagtgccttatcacagctctgtgctctctgtgacacgtcccgtggtggtcagcgccacacatcccacactgccttctgcccaccagcccccagttatccctgctacccatcccgcactgtcccgcgatcatcagattccagtaatcgcagccaattatccggatctcccttccgcataccagcctgggatactgtctgtctcacactctgcccagccccctgcccatcagccaccaatgatctcaactaaatatccagaactatttcccgcacatcagtctcccatgttccccgatacgagagtcgcaggaacccaaactactacacacctgcccggaatccctcctaaccatgctccactcgtgactacactcggagcgcagttgcctccccaggcccctgatgccctggtactgcgtacacaagccacacagctgcctattatacccactgcccagccctccctgacaacaacctcacggtcacccgtcagcccggcacaccagatttctgtcccagctgcaacgcagcccgcagctctgccaacattgctgccatcccagtccccaactaaccagacgagtccaatctcccccactcatccacacagcaaagcacctcagatccctagagaagatgggccttctccaaaactggctctgtggctaccatcacccgcacctacagccgctccaacggcactgggcgaggccggtctggctgaacactctcaaagagatgatagatggttgctggtggctctgctggtccctacatgtgttttcttggtcgtactgttagctctcggcatcgtgtactgtacaaggtgtggtccgcacgcacccaacaaacggattacagactgctaccggtgggttatccatgcgggttcaaaatctccaactgaaccaatgcccccacggggttccctgactggcgtgcagacctgtaggacttccgtgtag

SEQ ID NO: 204151 - DNA, 2558 bp, Artificial Sequence
  derived and/or modified sequence
agtccgggggcatcgcgatgctgctgcgcctgttgctggcctgggcggccgcagggcccacactgggccaggacccctgggctgctgagccccgtgccgcctgcggccccagcagctgctacgctctcttcccacggcgccgcaccttcctggaggcctggcgggcctgccgcgagctggggggcgacctggccactcctcggacccccgaggaggcccagcgtgtggacagcctggtgggtgcgggcccagccagccggctgctgtggatcgggctgcagcggcaggcccggcaatgccagctgcagcgcccactgcgcggcttcacgtggaccacaggggaccaggacacggctttcaccaactgggcccagccagcctctggaggcccctgcccggcccagcgctgtgtggccctggaggcaagtggcgagcaccgctggctggagggctcgtgcacgctggctgtcgacggctacctgtgccagtttggcttcgagggcgcctgcccggcgctgcaagatgaggcgggccaggccggcccagccgtgtataccacgcccttccacctggtctccacagagtttgagtggctgcccttcggctctgtggccgctgtgcagtgccaggctggcaggggagcctctctgctctgcgtgaagcagcctgagggaggtgtgggctggtcacgggctgggcccctgtgcctggggactggctgcagccctgacaacgggggctgcgaacacgaatgtgtggaggaggtggatggtcacgtgtcctgccgctgcactgagggcttccggctggcagcagacgggcgcagttgcgaggacccctgtgcccaggctccgtgcgagcagcagtgtgagcccggtgggccacaaggctacagctgccactgtcgcctgggtttccggccagcggaggatgatccgcaccgctgtgtggacacagatgagtgccagattgccggtgtgtgccagcagatgtgtgtcaactacgttggtggcttcgagtgttattgtagcgagggacatgagctggaggctgatggcatcagctgcagccctgcaggggccatgggtgcccaggcttcccaggacctcggagatgagttgctggatgacggggaggatgaggaagatgaagacgaggcctggaaggccttcaacggtggctggacggagatgcctgggatcctgtggatggagcctacgcagccgcctgactttgccctggcctatagaccgagcttcccagaggacagagagccacagataccctacccggagcccacctggccacccccgctcagtgcccccagggtcccctaccactcctcagtgctctccgtcacccggcctgtggtggtctctgccacgcatcccacactgccttctgcccaccagcctcctgtgatccctgccacacacccagctttgtcccgtgaccaccagatccccgtgatcgcagccaactatccagatctgccttctgcctaccaacccggtattctctctgtctctcattcagcacagcctcctgcccaccagccccctatgatctcaaccaaatatccggagctcttccctgcccaccagtcccccatgtttccagacacccgggtcgctggcacccagaccaccactcatttgcctggaatcccacctaaccatgcccctctggtcaccaccctcggtgcccagctaccccctcaagccccagatgcccttgtcctcagaacccaggccacccagcttcccattatcccaactgcccagccctctctgaccaccacctccaggtcccctgtgtctcctgcccatcaaatctctgtgcctgctgccacccagcccgcagccctccccaccctcctgccctctcagagccccactaaccagacctcacccatcagccctacacatccccattccaaagccccccaaatcccaagggaagatggccccagtcccaagttggccctgtggctgccctcaccagctcccacagcagccccaacagccctgggggaggctggtcttgccgagcacagccagagggatgaccggtggctgctggtggcactcctggtgccaacgtgtgtctttttggtggtcctgcttgcactgggcatcgtgtactgcacccgctgtggcccccatgcacccaacaagcgcatcactgactgctatcgctgggtcatccatgctgggagcaagagcccaacagaacccatgccccccaggggcagcctcacaggggtgcagacctgcagaaccagcgtgtgatggggtgcagacccccctcatggagtatggggcgctggacacatggccggggctgcaccagggacccatgggggctgcccagctggacagatggcttcctgctccccaggcccagccagggtcctctctcaaccactagacttggctctcaggaactctgcttcctggcccagcgctcgtgaccaaggatacaccaaagcccttaagacctcagggggcgggtgctggggtcttctccaataaatggggtgtcaaccttacccaagg

SEQ ID NO: 204152 - DNA, 2274 bp, Artificial Sequence
  derived and/or modified sequence
atgctgctgagactgctgctggcctgggccgccgccggccccaccctgggccaggacccctgggccgccgagcccagagccgcctgcggccccagcagctgctacgccctgttccccagaagaagaaccttcctggaggcctggagagcctgcagagagctgggcggcgacctggccacccccagaacccccgaggaggcccagagagtggacagcctggtgggcgccggccccgccagcagactgctgtggatcggcctgcagagacaggccagacagtgccagctgcagagacccctgagaggcttcacctggaccaccggcgaccaggacaccgccttcaccaactgggcccagcccgccagcggcggcccctgccccgcccagagatgcgtggccctggaggccagcggcgagcacagatggctggagggcagctgcaccctggccgtggacggctacctgtgccagttcggcttcgagggcgcctgccccgccctgcaggacgaggccggccaggccggccccgccgtgtacaccacccccttccacctggtgagcaccgagttcgagtggctgcccttcggcagcgtggccgccgtgcagtgccaggccggcagaggcgccagcctgctgtgcgtgaagcagcccgagggcggcgtgggctggagcagagccggccccctgtgcctgggcaccggctgcagccccgacaacggcggctgcgagcacgagtgcgtggaggaggtggacggccacgtgagctgcagatgcaccgagggcttcagactggccgccgacggcagaagctgcgaggacccctgcgcccaggccccctgcgagcagcagtgcgagcccggcggcccccagggctacagctgccactgcagactgggcttcagacccgccgaggacgacccccacagatgcgtggacaccgacgagtgccagatcgccggcgtgtgccagcagatgtgcgtgaactacgtgggcggcttcgagtgctactgcagcgagggccacgagctggaggccgacggcatcagctgcagccccgccggcgccatgggcgcccaggccagccaggacctgggcgacgagctgctggacgacggcgaggacgaggaggacgaggacgaggcctggaaggccttcaacggcggctggaccgagatgcccggcatcctgtggatggagcccacccagccccccgacttcgccctggcctacagacccagcttccccgaggacagagagccccagatcccctaccccgagcccacctggcccccccccctgagcgcccccagagtgccctaccacagcagcgtgctgagcgtgaccagacccgtggtggtgagcgccacccaccccaccctgcccagcgcccaccagccccccgtgatccccgccacccaccccgccctgagcagagaccaccagatccccgtgatcgccgccaactaccccgacctgcccagcgcctaccagcccggcatcctgagcgtgagccacagcgcccagccccccgcccaccagccccccatgatcagcaccaagtaccccgagctgttccccgcccaccagagccccatgttccccgacaccagagtggccggcacccagaccaccacccacctgcccggcatcccccccaaccacgcccccctggtgaccaccctgggcgcccagctgcccccccaggcccccgacgccctggtgctgagaacccaggccacccagctgcccatcatccccaccgcccagcccagcctgaccaccaccagcagaagccccgtgagccccgcccaccagatcagcgtgcccgccgccacccagcccgccgccctgcccaccctgctgcccagccagagccccaccaaccagaccagccccatcagccccacccacccccacagcaaggccccccagatccccagagaggacggccccagccccaagctggccctgtggctgcccagccccgcccccaccgccgcccccaccgccctgggcgaggccggcctggccgagcacagccagagagacgacagatggctgctggtggccctgctggtgcccacctgcgtgttcctggtggtgctgctggccctgggcatcgtgtactgcaccagatgcggcccccacgcccccaacaagagaatcaccgactgctacagatgggtgatccacgccggcagcaagagccccaccgagcccatgccccccagaggcagcctgaccggcgtgcagacctgcagaaccagcgtgtag

SEQ ID NO: 204153 - protein, 500 aa, Artificial Sequence
  derived and/or modified sequence
MRGELWLLVLVLREAARALSPQPGAGHDEGPGSGWAAKGTVRGWNRRARESPGHVSEPDRTQLSQDLGGGTLAMDTLPDNRTRVVEDNHSYYVSRLYGPSEPHSRELWVDVAEANRSQVKIHTILSNTHRQASRVVLSFDFPFYGHPLRQITIATGGFIFMGDVIHRMLTATQYVAPLMANFNPGYSDNSTVVYFDNGTVFVVQWDHVYLQGWEDKGSFTFQAALHHDGRIVFAYKEIPMSVPEISSSQHPVKTGLSDAFMILNPSPDVPESRRRSIFEYHRIELDPSKVTSMSAVEFTPLPTCLQHRSCDACMSSDLTFNCSWCHVLQRCSSGFDRYRQEWMDYGCAQEAEGRMCEDFQDEDHDSASPDTSFSPYDGDLTTTSSSLFIDSLTTEDDTKLNPYAGGDGLQNNLSPKTKGTPVHLGTIVGIVLAVLLVAAIILAGIYINGHPTSNAALFFIERRPHHWPAMKFRSHPDHSTYAEVEPSGHEKEGFMEAEQC

SEQ ID NO: 204154 - protein, 337 aa, Artificial Sequence
  derived and/or modified sequence
MRGELWLLVLVLREAARALSPQPGAGHDEGPGSGWAAKGTVRGWNRRARESPGHVSEPDRTQLSQDLGGGTLAMDTLPDNRTRVVEDNHSYYVSRLYGPSEPHSRELWVDVAEANRSQVKIHTILSNTHRQASRVVLSFDFPFYGHPLRQITIATGGFIFMGDVIHRMLTATQYVAPLMANFNPGYSDNSTVVYFDNGTVFVVQWDHVYLQGWEDKGSFTFQAALHHDGRIVFAYKEIPMSVPEISSSQHPVKTGLSDAFMILNPSPDVPESRRRSIFEYHRIELDPSKVTSMSAVEFTPLPTCLQHRSCDACMSSDLTFNCSWCHVLQSRDEVSPC

SEQ ID NO: 204155 - protein, 427 aa, Artificial Sequence
  derived and/or modified sequence
MDTLPDNRTRVVEDNHSYYVSRLYGPSEPHSRELWVDVAEANRSQVKIHTILSNTHRQASRVVLSFDFPFYGHPLRQITIATGGFIFMGDVIHRMLTATQYVAPLMANFNPGYSDNSTVVYFDNGTVFVVQWDHVYLQGWEDKGSFTFQAALHHDGRIVFAYKEIPMSVPEISSSQHPVKTGLSDAFMILNPSPDVPESRRRSIFEYHRIELDPSKVTSMSAVEFTPLPTCLQHRSCDACMSSDLTFNCSWCHVLQRSLNNQDENTYVNCLDSQQCHGSSESRRPFQDEDHDSASPDTSFSPYDGDLTTTSSSLFIDSLTTEDDTKLNPYAGGDGLQNNLSPKTKGTPVHLGTIVGIVLAVLLVAAIILAGIYINGHPTSNAALFFIERRPHHWPAMKFRSHPDHSTYAEVEPSGHEKEGFMEAEQC

SEQ ID NO: 204156 - protein, 124 aa, Artificial Sequence
  derived and/or modified sequence
MDTLPDNRTRVVEDNHSYYVSRLYGPSEPHSRELWVDVAEANRSQVKIHTILSNTHRQASRVVLSFDFPFYGHPLRQITIATGGFIFMGDVIHRMLTATQYVAPLMANFNPGYSDNSTVVYFDN

SEQ ID NO: 204157 - protein, 222 aa, Artificial Sequence
  derived and/or modified sequence
MDTLPDNRTRVVEDNHSYYVSRLYGPSEPHSRELWVDVAEANRSQVKIHTILSNTHRQASRVVLSFDFPFYGHPLRQITIATGGFIFMGDVIHRMLTATQYVAPLMANFNPGYSDNSTVVYFDNGTVFVVQWDHVYLQGWEDKGSFTFQAALHHDGRIVFAYKEIPMSVPEISSSQHPVKTGLSDAFMILNPSPDVPESRRRSIFEYHRIELDPSKVTSMSA

SEQ ID NO: 204158 - protein, 65 aa, Artificial Sequence
  derived and/or modified sequence
  misc_feature (1)..(1): Xaa can be any naturally occurring amino acid
XSFTFQAALHHDGRIVFAYKEIPMSVPEISSSQHPVKTGLSDAFMILNPSPDVPGFSAESAKHLW

SEQ ID NO: 204159 - protein, 460 aa, Artificial Sequence
  derived and/or modified sequence
MALSVRTLPLRGFLVPRPQPTRSQDAPSPRLPLSSAPAPCRHKNEEDNHSYYVSRLYGPSEPHSRELWVDVAEANRSQVKIHTILSNTHRQASRVVLSFDFPFYGHPLRQITIATGGFIFMGDVIHRMLTATQYVAPLMANFNPGYSDNSTVVYFDNGTVFVVQWDHVYLQGWEDKGSFTFQAALHHDGRIVFAYKEIPMSVPEISSSQHPVKTGLSDAFMILNPSPDVPESRRRSIFEYHRIELDPSKVTSMSAVEFTPLPTCLQHRSCDACMSSDLTFNCSWCHVLQRCSSGFDRYRQEWMDYGCAQEAEGRMCEDFQDEDHDSASPDTSFSPYDGDLTTTSSSLFIDSLTTEDDTKLNPYAGGDGLQNNLSPKTKGTPVHLGTIVGIVLAVLLVAAIILAGIYINGHPTSNAALFFIERRPHHWPAMKFRSHPDHSTYAEVEPSGHEKEGFMEAEQC

SEQ ID NO: 204160 - protein, 240 aa, Artificial Sequence
  derived and/or modified sequence
MDTLPDNRTRVVEDNHSYYVSRLYGPSEPHSRELWVDVAEANRSQVKIHTILSNTHRQASRVVLSFDFPFYGHPLRQITIATGGFIFMGDVIHRMLTATQYVAPLMANFNPGYSDNSTVVYFDNGTVFVVQWDHVYLQGWEDKGSFTFQAALHHDGRIVFAYKEIPMSVPEISSSQHPVKTGLSDAFMILNPSPDVPESRRRSIFEYHRIELDPSKVTSMSAVEFTPLPSPSTTRMKTRM

SEQ ID NO: 204161 - DNA, 303 bp, Artificial Sequence
  derived and/or modified sequence
atgggcaccagcagcatcttcctgtgcgtgctgttcctgtgcggcgccctgggcctgaccatgagccccgccagaggcagactgagatgctacatctgcggcttcaccaagccctgccaccccgtgcccaccgagtgcagagacgacgaggcctgcggcatcagcatcggcaccagcggcagaaccctggtgcagtggcccttcagcagaagactgcccaccagcatccaccccgccttccccgtggcccccgccagcgcctgcctgttccaccccaccgaccagagcgagatcaccgagtag

SEQ ID NO: 204162 - DNA, 303 bp, Artificial Sequence
  derived and/or modified sequence
atgggcacatcgtccatttttctgtgtgtactctttctctgcggtgcactgggcctaaccatgagtccagcccgtggaagactgcgttgttacatttgtggctttaccaagccttgccatccagttccaacagagtgtcgggatgatgaggcatgcgggattagcatagggacctcaggccgcaccctagtacagtggccctttagccgtaggctgcctacgagcattcacccagcatttccggtggctcctgccagtgcctgtctcttccaccctactgaccaatccgagattacggagtag

SEQ ID NO: 204163 - DNA, 201 bp, Artificial Sequence
  derived and/or modified sequence
atgggcacctcttccatctttctctgtgtcctgtttttatgtggtgcactcgggctgacgatgagtcctgctcgcggacgattgagatgctacatttgtgggttcacaaagccttgtcatcccgttcctactgagtgtcgcgatgacgaagcttgcgggattagcatcggaacatctgaccagtccgagattactgagtag

SEQ ID NO: 204164 - DNA, 201 bp, Artificial Sequence
  derived and/or modified sequence
atgggaacatccagtatctttctatgtgtgttgttcctttgtggagctctcggtctgacgatgagtcccgctcggggacggctgcgctgttacatttgtgggtttactaaaccctgtcaccctgtgccaacggaatgtcgggatgatgaggcttgtggcatatccattggaacctctgatcaatctgagattacagagtag

SEQ ID NO: 204165 - DNA, 201 bp, Artificial Sequence
  derived and/or modified sequence
atgggaacttcaagtatcttcctttgcgtgctcttcctgtgcggtgccctgggcctgaccatgtccccagccaggggcagactccgttgttacatttgcggcttcactaagccatgtcacccggtccccaccgaatgccgtgatgatgaggcctgtggtatctccattggcacctccgatcaaagtgagattacggaatag

SEQ ID NO: 204166 - DNA, 201 bp, Artificial Sequence
  derived and/or modified sequence
atgggaacctcaagcatcttcctgtgtgtattattcctatgtggagccctcggcctcacaatgtctcctgcgcgcgggagactgagatgttacatctgtggattcaccaaaccctgtcaccctgttccaactgagtgccgggatgacgaagcctgtggcatttctatcgggacttcggatcagtctgagatcaccgagtag

SEQ ID NO: 204167 - DNA, 201 bp, Artificial Sequence
  derived and/or modified sequence
atgggcaccagcagcatcttcctgtgcgtgctgttcctgtgcggcgccttgggtctgacaatgagtcccgcccgcggtcgcctgcgatgctatatatgtggcttcacaaaaccatgccatcccgtaccaactgagtgccgcgacgatgaagcctgcggtataagcattggcacctctgatcagtctgagattacagagtag

SEQ ID NO: 204168 - DNA, 201 bp, Artificial Sequence
  derived and/or modified sequence
atgggcaccagcagcatcttcctgtgcgtgctgttcctgtgcggcgcactaggcctgaccatgtcccctgccagagggcgccttagatgctatatctgcggattcacaaaaccttgtcatcctgtgcccactgaatgcagggatgatgaggcgtgtgggatctcaattggaacctctgaccagagtgagatcacagagtag

SEQ ID NO: 204169 - DNA, 303 bp, Artificial Sequence
  derived and/or modified sequence
atgggcaccagcagcatcttcctgtgcgtgctgttcctgtgcggcgctcttggactaaccatgagcccagcccggggaagacttagatgttacatttgcggttttactaagccttgccatcccgtgcctacagaatgccgggacgacgaggcatgcggtatcagcatcggtacctcaggacggacactcgtccaatggcccttctctagaaggctccctacatcaatccaccccgcatttcccgtcgcccctgcgtccgcctgcctattccatcccaccgaccaaagtgagattacagagtag

SEQ ID NO: 204170 - DNA, 303 bp, Artificial Sequence
  derived and/or modified sequence
atggggacttcatcaattttcctgtgcgtcctcttcttatgtggcgcattgggactgaccatgagccccgctcgcggacggctgagatgctacatctgcggatttaccaaaccctgtcaccctgtcccaactgagtgccgggatgacgaggcttgtgggatatcgataggaacctctggcaggactctagtgcaatggccattttcacgaaggctccccacaagcattcatcctgcgttccctgtggcgccagcgagcgcttgccttttccaccccactgatcagtcagagatcacagaatag

SEQ ID NO: 204171 - DNA, 201 bp, Artificial Sequence
  derived and/or modified sequence
atggggacatccagcattttcctttgtgttctgttcctttgcggtgctctaggtttgaccatgagcccagcacggggaagattgcgttgctacatctgtgggttcactaagccgtgtcaccccgtccctaccgaatgcagggacgatgaggcatgtgggatatcaattgggacttcagaccagtcagagataaccgagtag

SEQ ID NO: 204172 - DNA, 201 bp, Artificial Sequence
  derived and/or modified sequence
atgggaacatcatcaatctttctgtgtgtgttattcctatgtggtgcacttggcttgaccatgagtccagccagagggagattacgttgctatatctgcggctttacaaaaccatgccaccctgtgcctacggagtgcagggacgatgaggcttgcggcatttccatcggcacatccgaccaatcagaaatcacagagtag

SEQ ID NO: 204173 - DNA, 201 bp, Artificial Sequence
  derived and/or modified sequence
atggggacatcatccattttcctgtgcgtgctttttctttgtggggctctggggttgacaatgagtcccgcaaggggaagactacgatgttacatttgcggctttactaaaccctgccacccagtgccaacagagtgcagggatgatgaggcctgcggaatttcaatcggaacatccgaccagagcgagataactgagtag

SEQ ID NO: 204174 - DNA, 201 bp, Artificial Sequence
  derived and/or modified sequence
atgggaaccagcagtatatttctatgcgtactctttttatgcggagcacttggactgacgatgagcccggctaggggcaggctgagatgttacatctgcggctttactaagccctgtcacccagttccaaccgagtgtcgcgacgatgaagcttgtggcatttccattggaacctctgatcagtctgagatcacggaatag
